United States Patent Application Publication US 2011/0191912 A1 - sequence listing, part 23

SEQ ID NO: 61567 - DNA, 8 bp, Unknown
  misc_feature (1)..( 8): Matrix.003 file - promoters60/4913724
gttgatgt

SEQ ID NO: 61568 - DNA, 13 bp, Unknown
  misc_feature (1)..( 13): Matrix.003 file - promoters60/4913724
gagataagtattg

SEQ ID NO: 61569 - DNA, 7 bp, Unknown
  misc_feature (1)..( 7): Matrix.003 file - promoters60/4914111
tttgccg

SEQ ID NO: 61570 - DNA, 8 bp, Unknown
  misc_feature (1)..( 8): Matrix.003 file - promoters60/4914111
ctgtttat

SEQ ID NO: 61571 - DNA, 9 bp, Unknown
  misc_feature (1)..( 9): Matrix.003 file - promoters60/4914111
ctgtgtctc

SEQ ID NO: 61572 - DNA, 7 bp, Unknown
  misc_feature (1)..( 7): Matrix.003 file - promoters60/4914111
tctggtt

SEQ ID NO: 61573 - DNA, 7 bp, Unknown
  misc_feature (1)..( 7): Matrix.003 file - promoters60/4914111
gatgcag

SEQ ID NO: 61574 - DNA, 7 bp, Unknown
  misc_feature (1)..( 7): Matrix.003 file - promoters60/4914111
acaagtg

SEQ ID NO: 61575 - DNA, 7 bp, Unknown
  misc_feature (1)..( 7): Matrix.003 file - promoters60/4914111
aatagtt

SEQ ID NO: 61576 - DNA, 9 bp, Unknown
  misc_feature (1)..( 9): Matrix.003 file - promoters60/4914111
attggactt

SEQ ID NO: 61577 - DNA, 6 bp, Unknown
  misc_feature (1)..( 6): Matrix.003 file - promoters60/4914111
aatttc

SEQ ID NO: 61578 - DNA, 7 bp, Unknown
  misc_feature (1)..( 7): Matrix.003 file - promoters60/4914111
tctgtct

SEQ ID NO: 61579 - DNA, 8 bp, Unknown
  misc_feature (1)..( 8): Matrix.003 file - promoters60/4914111
aatgattt

SEQ ID NO: 61580 - DNA, 6 bp, Unknown
  misc_feature (1)..( 6): Matrix.003 file - promoters60/4914111
aacagt

SEQ ID NO: 61581 - DNA, 6 bp, Unknown
  misc_feature (1)..( 6): Matrix.003 file - promoters60/4914111
attgga

SEQ ID NO: 61582 - DNA, 6 bp, Unknown
  misc_feature (1)..( 6): Matrix.003 file - promoters60/4914111
taattt

SEQ ID NO: 61583 - DNA, 7 bp, Unknown
  misc_feature (1)..( 7): Matrix.003 file - promoters60/4914111
tttattg

SEQ ID NO: 61584 - DNA, 6 bp, Unknown
  misc_feature (1)..( 6): Matrix.003 file - promoters60/4914111
tctaga

SEQ ID NO: 61585 - DNA, 10 bp, Unknown
  misc_feature (1)..( 10): Matrix.003 file - promoters60/4915127
tatataaata

SEQ ID NO: 61586 - DNA, 8 bp, Unknown
  misc_feature (1)..( 8): Matrix.003 file - promoters60/4915163
caaaatat

SEQ ID NO: 61587 - DNA, 11 bp, Unknown
  misc_feature (1)..( 11): Matrix.003 file - promoters60/4915163
taatataagta

SEQ ID NO: 61588 - DNA, 9 bp, Unknown
  misc_feature (1)..( 9): Matrix.003 file - promoters60/4915163
attattcat

SEQ ID NO: 61589 - DNA, 7 bp, Unknown
  misc_feature (1)..( 7): Matrix.003 file - promoters60/4915163
attttaa

SEQ ID NO: 61590 - DNA, 9 bp, Unknown
  misc_feature (1)..( 9): Matrix.003 file - promoters60/4915163
tttataagt

SEQ ID NO: 61591 - DNA, 9 bp, Unknown
  misc_feature (1)..( 9): Matrix.003 file - promoters60/4915163
aaaatatat

SEQ ID NO: 61592 - DNA, 17 bp, Unknown
  misc_feature (1)..( 17): Matrix.003 file - promoters60/4915163
taaattttaaaattatt

SEQ ID NO: 61593 - DNA, 10 bp, Unknown
  misc_feature (1)..( 10): Matrix.003 file - promoters60/4915163
atttaaatta

SEQ ID NO: 61594 - DNA, 10 bp, Unknown
  misc_feature (1)..( 10): Matrix.003 file - promoters60/4915163
tattttaatt

SEQ ID NO: 61595 - DNA, 6 bp, Unknown
  misc_feature (1)..( 6): Matrix.003 file - promoters60/4915163
tttaag

SEQ ID NO: 61596 - DNA, 13 bp, Unknown
  misc_feature (1)..( 13): Matrix.003 file - promoters60/4915163
attctaaaattat

SEQ ID NO: 61597 - DNA, 13 bp, Unknown
  misc_feature (1)..( 13): Matrix.003 file - promoters60/4915163
ctataaaaaccaa

SEQ ID NO: 61598 - DNA, 9 bp, Unknown
  misc_feature (1)..( 9): Matrix.003 file - promoters60/4915163
cataattat

SEQ ID NO: 61599 - DNA, 11 bp, Unknown
  misc_feature (1)..( 11): Matrix.003 file - promoters60/4915163
ctataaatatc

SEQ ID NO: 61600 - DNA, 7 bp, Unknown
  misc_feature (1)..( 7): Matrix.003 file - promoters60/4915199
tgtgttg

SEQ ID NO: 61601 - DNA, 7 bp, Unknown
  misc_feature (1)..( 7): Matrix.003 file - promoters60/4915199
ttgcttc

SEQ ID NO: 61602 - DNA, 8 bp, Unknown
  misc_feature (1)..( 8): Matrix.003 file - promoters60/4915199
accaaaaa

SEQ ID NO: 61603 - DNA, 7 bp, Unknown
  misc_feature (1)..( 7): Matrix.003 file - promoters60/4915199
ttttact

SEQ ID NO: 61604 - DNA, 6 bp, Unknown
  misc_feature (1)..( 6): Matrix.003 file - promoters60/4915199
aaagct

SEQ ID NO: 61605 - DNA, 6 bp, Unknown
  misc_feature (1)..( 6): Matrix.003 file - promoters60/4915199
gtttgt

SEQ ID NO: 61606 - DNA, 9 bp, Unknown
  misc_feature (1)..( 9): Matrix.003 file - promoters60/4915199
tgtctgtgt

SEQ ID NO: 61607 - DNA, 6 bp, Unknown
  misc_feature (1)..( 6): Matrix.003 file - promoters60/4915199
aaaaat

SEQ ID NO: 61608 - DNA, 10 bp, Unknown
  misc_feature (1)..( 10): Matrix.003 file - promoters60/4915199
gtttctctga

SEQ ID NO: 61609 - DNA, 8 bp, Unknown
  misc_feature (1)..( 8): Matrix.003 file - promoters60/4915199
atttagat

SEQ ID NO: 61610 - DNA, 8 bp, Unknown
  misc_feature (1)..( 8): Matrix.003 file - promoters60/4915199
aaaaatat

SEQ ID NO: 61611 - DNA, 8 bp, Unknown
  misc_feature (1)..( 8): Matrix.003 file - promoters60/4915199
acacaaat

SEQ ID NO: 61612 - DNA, 6 bp, Unknown
  misc_feature (1)..( 6): Matrix.003 file - promoters60/4915199
gataaa

SEQ ID NO: 61613 - DNA, 6 bp, Unknown
  misc_feature (1)..( 6): Matrix.003 file - promoters60/4915199
gttgtt

SEQ ID NO: 61614 - DNA, 7 bp, Unknown
  misc_feature (1)..( 7): Matrix.003 file - promoters60/4915199
aatcgta

SEQ ID NO: 61615 - DNA, 7 bp, Unknown
  misc_feature (1)..( 7): Matrix.003 file - promoters60/4915199
aaaataa

SEQ ID NO: 61616 - DNA, 7 bp, Unknown
  misc_feature (1)..( 7): Matrix.003 file - promoters60/4915199
attctca

SEQ ID NO: 61617 - DNA, 7 bp, Unknown
  misc_feature (1)..( 7): Matrix.003 file - promoters60/4915199
atcacaa

SEQ ID NO: 61618 - DNA, 6 bp, Unknown
  misc_feature (1)..( 6): Matrix.003 file - promoters60/4915199
aatcaa

SEQ ID NO: 61619 - DNA, 6 bp, Unknown
  misc_feature (1)..( 6): Matrix.003 file - promoters60/4915199
tttctt

SEQ ID NO: 61620 - DNA, 9 bp, Unknown
  misc_feature (1)..( 9): Matrix.003 file - promoters60/4915199
tcactgttt

SEQ ID NO: 61621 - DNA, 8 bp, Unknown
  misc_feature (1)..( 8): Matrix.003 file - promoters60/4915199
acaccaat

SEQ ID NO: 61622 - DNA, 7 bp, Unknown
  misc_feature (1)..( 7): Matrix.003 file - promoters60/4915199
ctggtga

SEQ ID NO: 61623 - DNA, 11 bp, Unknown
  misc_feature (1)..( 11): Matrix.003 file - promoters60/4915244
tttgattctat

SEQ ID NO: 61624 - DNA, 9 bp, Unknown
  misc_feature (1)..( 9): Matrix.003 file - promoters60/4915244
ttatattgt

SEQ ID NO: 61625 - DNA, 9 bp, Unknown
  misc_feature (1)..( 9): Matrix.003 file - promoters60/4915244
aaatataaa

SEQ ID NO: 61626 - DNA, 17 bp, Unknown
  misc_feature (1)..( 17): Matrix.003 file - promoters60/4915244
aaatataaaaatataaa

SEQ ID NO: 61627 - DNA, 9 bp, Unknown
  misc_feature (1)..( 9): Matrix.003 file - promoters60/4915244
ccaatattt

SEQ ID NO: 61628 - DNA, 9 bp, Unknown
  misc_feature (1)..( 9): Matrix.003 file - promoters60/4915244
tttttcaaa

SEQ ID NO: 61629 - DNA, 8 bp, Unknown
  misc_feature (1)..( 8): Matrix.003 file - promoters60/4915347
ttttttac

SEQ ID NO: 61630 - DNA, 7 bp, Unknown
  misc_feature (1)..( 7): Matrix.003 file - promoters60/4915347
catatat

SEQ ID NO: 61631 - DNA, 6 bp, Unknown
  misc_feature (1)..( 6): Matrix.003 file - promoters60/4915347
ttatat

SEQ ID NO: 61632 - DNA, 7 bp, Unknown
  misc_feature (1)..( 7): Matrix.003 file - promoters60/4915347
acaatca

SEQ ID NO: 61633 - DNA, 7 bp, Unknown
  misc_feature (1)..( 7): Matrix.003 file - promoters60/4915347
tgaaaac

SEQ ID NO: 61634 - DNA, 6 bp, Unknown
  misc_feature (1)..( 6): Matrix.003 file - promoters60/4915347
tttttt

SEQ ID NO: 61635 - DNA, 7 bp, Unknown
  misc_feature (1)..( 7): Matrix.003 file - promoters60/4915347
gttttaa

SEQ ID NO: 61636 - DNA, 7 bp, Unknown
  misc_feature (1)..( 7): Matrix.003 file - promoters60/4915347
ctctctc

SEQ ID NO: 61637 - DNA, 7 bp, Unknown
  misc_feature (1)..( 7): Matrix.003 file - promoters60/4915347
attggta

SEQ ID NO: 61638 - DNA, 8 bp, Unknown
  misc_feature (1)..( 8): Matrix.003 file - promoters60/4915347
aatcatat

SEQ ID NO: 61639 - DNA, 7 bp, Unknown
  misc_feature (1)..( 7): Matrix.003 file - promoters60/4915347
tcctttt

SEQ ID NO: 61640 - DNA, 7 bp, Unknown
  misc_feature (1)..( 7): Matrix.003 file - promoters60/4915347
aaacaca

SEQ ID NO: 61641 - DNA, 6 bp, Unknown
  misc_feature (1)..( 6): Matrix.003 file - promoters60/4915347
taataa

SEQ ID NO: 61642 - DNA, 9 bp, Unknown
  misc_feature (1)..( 9): Matrix.003 file - promoters60/4915347
attttttta

SEQ ID NO: 61643 - DNA, 7 bp, Unknown
  misc_feature (1)..( 7): Matrix.003 file - promoters60/4915347
gtgggaa

SEQ ID NO: 61644 - DNA, 6 bp, Unknown
  misc_feature (1)..( 6): Matrix.003 file - promoters60/4915347
tactgt

SEQ ID NO: 61645 - DNA, 9 bp, Unknown
  misc_feature (1)..( 9): Matrix.003 file - promoters60/4915347
tcaaaattt

SEQ ID NO: 61646 - DNA, 6 bp, Unknown
  misc_feature (1)..( 6): Matrix.003 file - promoters60/4915347
ttgaaa

SEQ ID NO: 61647 - DNA, 7 bp, Unknown
  misc_feature (1)..( 7): Matrix.003 file - promoters60/4915347
cttctcc

SEQ ID NO: 61648 - DNA, 7 bp, Unknown
  misc_feature (1)..( 7): Matrix.003 file - promoters60/4915347
ttcatgt

SEQ ID NO: 61649 - DNA, 7 bp, Unknown
  misc_feature (1)..( 7): Matrix.003 file - promoters60/4915347
aagattt

SEQ ID NO: 61650 - DNA, 7 bp, Unknown
  misc_feature (1)..( 7): Matrix.003 file - promoters60/4915347
tacctca

SEQ ID NO: 61651 - DNA, 7 bp, Unknown
  misc_feature (1)..( 7): Matrix.003 file - promoters60/4915347
tttgata

SEQ ID NO: 61652 - DNA, 9 bp, Unknown
  misc_feature (1)..( 9): Matrix.003 file - promoters60/4915347
catcattat

SEQ ID NO: 61653 - DNA, 10 bp, Unknown
  misc_feature (1)..( 10): Matrix.003 file - promoters60/4915384
tttcaataac

SEQ ID NO: 61654 - DNA, 7 bp, Unknown
  misc_feature (1)..( 7): Matrix.003 file - promoters60/4915384
ttttaat

SEQ ID NO: 61655 - DNA, 10 bp, Unknown
  misc_feature (1)..( 10): Matrix.003 file - promoters60/4915384
ggtttatttt

SEQ ID NO: 61656 - DNA, 8 bp, Unknown
  misc_feature (1)..( 8): Matrix.003 file - promoters60/4915384
gaaaagta

SEQ ID NO: 61657 - DNA, 8 bp, Unknown
  misc_feature (1)..( 8): Matrix.003 file - promoters60/4915384
tcaaattg

SEQ ID NO: 61658 - DNA, 8 bp, Unknown
  misc_feature (1)..( 8): Matrix.003 file - promoters60/4915384
aaatttgt

SEQ ID NO: 61659 - DNA, 8 bp, Unknown
  misc_feature (1)..( 8): Matrix.003 file - promoters60/4915384
ttaagaga

SEQ ID NO: 61660 - DNA, 10 bp, Unknown
  misc_feature (1)..( 10): Matrix.003 file - promoters60/4915384
attttatttt

SEQ ID NO: 61661 - DNA, 11 bp, Unknown
  misc_feature (1)..( 11): Matrix.003 file - promoters60/4915409
atagttcaaac

SEQ ID NO: 61662 - DNA, 7 bp, Unknown
  misc_feature (1)..( 7): Matrix.003 file - promoters60/4915409
ttataga

SEQ ID NO: 61663 - DNA, 12 bp, Unknown
  misc_feature (1)..( 12): Matrix.003 file - promoters60/4915420
ataaaaatacta

SEQ ID NO: 61664 - DNA, 6 bp, Unknown
  misc_feature (1)..( 6): Matrix.003 file - promoters60/4915420
tattat

SEQ ID NO: 61665 - DNA, 13 bp, Unknown
  misc_feature (1)..( 13): Matrix.003 file - promoters60/4915420
aaacaatttacaa

SEQ ID NO: 61666 - DNA, 8 bp, Unknown
  misc_feature (1)..( 8): Matrix.003 file - promoters60/4915420
tttagatc

SEQ ID NO: 61667 - DNA, 12 bp, Unknown
  misc_feature (1)..( 12): Matrix.003 file - promoters60/4915420
gagattttatat

SEQ ID NO: 61668 - DNA, 10 bp, Unknown
  misc_feature (1)..( 10): Matrix.003 file - promoters60/4915420
tatttataaa

SEQ ID NO: 61669 - DNA, 9 bp, Unknown
  misc_feature (1)..( 9): Matrix.003 file - promoters60/4915606
taatggtta

SEQ ID NO: 61670 - DNA, 11 bp, Unknown
  misc_feature (1)..( 11): Matrix.003 file - promoters60/4915606
tcagataaaaa

SEQ ID NO: 61671 - DNA, 7 bp, Unknown
  misc_feature (1)..( 7): Matrix.003 file - promoters60/4915606
attttat

SEQ ID NO: 61672 - DNA, 9 bp, Unknown
  misc_feature (1)..( 9): Matrix.003 file - promoters60/4915623
tcatatctg

SEQ ID NO: 61673 - DNA, 8 bp, Unknown
  misc_feature (1)..( 8): Matrix.003 file - promoters60/4915623
tttaaatt

SEQ ID NO: 61674 - DNA, 9 bp, Unknown
  misc_feature (1)..( 9): Matrix.003 file - promoters60/4915623
aatttattt

SEQ ID NO: 61675 - DNA, 9 bp, Unknown
  misc_feature (1)..( 9): Matrix.003 file - promoters60/4915623
ttacattag

SEQ ID NO: 61676 - DNA, 8 bp, Unknown
  misc_feature (1)..( 8): Matrix.003 file - promoters60/4915623
ttatgatc

SEQ ID NO: 61677 - DNA, 7 bp, Unknown
  misc_feature (1)..( 7): Matrix.003 file - promoters60/4915623
aaacact

SEQ ID NO: 61678 - DNA, 6 bp, Unknown
  misc_feature (1)..( 6): Matrix.003 file - promoters60/4915623
caaata

SEQ ID NO: 61679 - DNA, 6 bp, Unknown
  misc_feature (1)..( 6): Matrix.003 file - promoters60/4915694
ctactt

SEQ ID NO: 61680 - DNA, 6 bp, Unknown
  misc_feature (1)..( 6): Matrix.003 file - promoters60/4915694
tttcaa

SEQ ID NO: 61681 - DNA, 7 bp, Unknown
  misc_feature (1)..( 7): Matrix.003 file - promoters60/4915694
attattt

SEQ ID NO: 61682 - DNA, 7 bp, Unknown
  misc_feature (1)..( 7): Matrix.003 file - promoters60/4915694
atttaaa

SEQ ID NO: 61683 - DNA, 6 bp, Unknown
  misc_feature (1)..( 6): Matrix.003 file - promoters60/4915694
ccaaag

SEQ ID NO: 61684 - DNA, 8 bp, Unknown
  misc_feature (1)..( 8): Matrix.003 file - promoters60/4915694
aaatcttg

SEQ ID NO: 61685 - DNA, 8 bp, Unknown
  misc_feature (1)..( 8): Matrix.003 file - promoters60/4915694
tttaacgt

SEQ ID NO: 61686 - DNA, 6 bp, Unknown
  misc_feature (1)..( 6): Matrix.003 file - promoters60/4915694
tattta

SEQ ID NO: 61687 - DNA, 6 bp, Unknown
  misc_feature (1)..( 6): Matrix.003 file - promoters60/4915694
tcaata

SEQ ID NO: 61688 - DNA, 6 bp, Unknown
  misc_feature (1)..( 6): Matrix.003 file - promoters60/4915694
aacaaa

SEQ ID NO: 61689 - DNA, 8 bp, Unknown
  misc_feature (1)..( 8): Matrix.003 file - promoters60/4915694
aaaaacaa

SEQ ID NO: 61690 - DNA, 8 bp, Unknown
  misc_feature (1)..( 8): Matrix.003 file - promoters60/4915694
ctacaaaa

SEQ ID NO: 61691 - DNA, 8 bp, Unknown
  misc_feature (1)..( 8): Matrix.003 file - promoters60/4915694
ctaaattc

SEQ ID NO: 61692 - DNA, 8 bp, Unknown
  misc_feature (1)..( 8): Matrix.003 file - promoters60/4915694
gattcaaa

SEQ ID NO: 61693 - DNA, 7 bp, Unknown
  misc_feature (1)..( 7): Matrix.003 file - promoters60/4915694
tttacaa

SEQ ID NO: 61694 - DNA, 6 bp, Unknown
  misc_feature (1)..( 6): Matrix.003 file - promoters60/4915694
gttttg

SEQ ID NO: 61695 - DNA, 7 bp, Unknown
  misc_feature (1)..( 7): Matrix.003 file - promoters60/4915694
aaagaaa

SEQ ID NO: 61696 - DNA, 7 bp, Unknown
  misc_feature (1)..( 7): Matrix.003 file - promoters60/4915694
cacattt

SEQ ID NO: 61697 - DNA, 8 bp, Unknown
  misc_feature (1)..( 8): Matrix.003 file - promoters60/4915694
taacaatt

SEQ ID NO: 61698 - DNA, 6 bp, Unknown
  misc_feature (1)..( 6): Matrix.003 file - promoters60/4915694
acaaaa

SEQ ID NO: 61699 - DNA, 8 bp, Unknown
  misc_feature (1)..( 8): Matrix.003 file - promoters60/4915816
atttcttt

SEQ ID NO: 61700 - DNA, 8 bp, Unknown
  misc_feature (1)..( 8): Matrix.003 file - promoters60/4915816
atgaattg

SEQ ID NO: 61701 - DNA, 6 bp, Unknown
  misc_feature (1)..( 6): Matrix.003 file - promoters60/4915816
acatga

SEQ ID NO: 61702 - DNA, 9 bp, Unknown
  misc_feature (1)..( 9): Matrix.003 file - promoters60/4915816
ggcaaggaa

SEQ ID NO: 61703 - DNA, 9 bp, Unknown
  misc_feature (1)..( 9): Matrix.003 file - promoters60/4915816
agaaacata

SEQ ID NO: 61704 - DNA, 6 bp, Unknown
  misc_feature (1)..( 6): Matrix.003 file - promoters60/4915816
aggaag

SEQ ID NO: 61705 - DNA, 7 bp, Unknown
  misc_feature (1)..( 7): Matrix.003 file - promoters60/4915816
ataaacc

SEQ ID NO: 61706 - DNA, 8 bp, Unknown
  misc_feature (1)..( 8): Matrix.003 file - promoters60/4915816
taaagatt

SEQ ID NO: 61707 - DNA, 6 bp, Unknown
  misc_feature (1)..( 6): Matrix.003 file - promoters60/4915816
attggg

SEQ ID NO: 61708 - DNA, 6 bp, Unknown
  misc_feature (1)..( 6): Matrix.003 file - promoters60/4915816
ccattt

SEQ ID NO: 61709 - DNA, 7 bp, Unknown
  misc_feature (1)..( 7): Matrix.003 file - promoters60/4915816
aatggcg

SEQ ID NO: 61710 - DNA, 7 bp, Unknown
  misc_feature (1)..( 7): Matrix.003 file - promoters60/4915816
agattgg

SEQ ID NO: 61711 - DNA, 7 bp, Unknown
  misc_feature (1)..( 7): Matrix.003 file - promoters60/4915816
ttttctt

SEQ ID NO: 61712 - DNA, 6 bp, Unknown
  misc_feature (1)..( 6): Matrix.003 file - promoters60/4915816
aatgga

SEQ ID NO: 61713 - DNA, 6 bp, Unknown
  misc_feature (1)..( 6): Matrix.003 file - promoters60/4915816
aatatt

SEQ ID NO: 61714 - DNA, 8 bp, Unknown
  misc_feature (1)..( 8): Matrix.003 file - promoters60/4915816
gaaattag

SEQ ID NO: 61715 - DNA, 6 bp, Unknown
  misc_feature (1)..( 6): Matrix.003 file - promoters60/4915816
aaaaat

SEQ ID NO: 61716 - DNA, 6 bp, Unknown
  misc_feature (1)..( 6): Matrix.003 file - promoters60/4915816
aaatag

SEQ ID NO: 61717 - DNA, 6 bp, Unknown
  misc_feature (1)..( 6): Matrix.003 file - promoters60/4915816
atttta

SEQ ID NO: 61718 - DNA, 12 bp, Unknown
  misc_feature (1)..( 12): Matrix.003 file - promoters60/4915819
aaataaaacatt

SEQ ID NO: 61719 - DNA, 9 bp, Unknown
  misc_feature (1)..( 9): Matrix.003 file - promoters60/4915819
aaaccaaac

SEQ ID NO: 61720 - DNA, 8 bp, Unknown
  misc_feature (1)..( 8): Matrix.003 file - promoters60/4915819
aataaaag

SEQ ID NO: 61721 - DNA, 10 bp, Unknown
  misc_feature (1)..( 10): Matrix.003 file - promoters60/4921122
aaatacaata

SEQ ID NO: 61722 - DNA, 8 bp, Unknown
  misc_feature (1)..( 8): Matrix.003 file - promoters60/4921122
cacaaggc

SEQ ID NO: 61723 - DNA, 6 bp, Unknown
  misc_feature (1)..( 6): Matrix.003 file - promoters60/4921291
acattt

SEQ ID NO: 61724 - DNA, 11 bp, Unknown
  misc_feature (1)..( 11): Matrix.003 file - promoters60/4921291
tccgttatgtc

SEQ ID NO: 61725 - DNA, 7 bp, Unknown
  misc_feature (1)..( 7): Matrix.003 file - promoters60/4921291
acaataa

SEQ ID NO: 61726 - DNA, 7 bp, Unknown
  misc_feature (1)..( 7): Matrix.003 file - promoters60/4921291
aatgtag

SEQ ID NO: 61727 - DNA, 6 bp, Unknown
  misc_feature (1)..( 6): Matrix.003 file - promoters60/4921291
tctgaa

SEQ ID NO: 61728 - DNA, 7 bp, Unknown
  misc_feature (1)..( 7): Matrix.003 file - promoters60/4921291
ataatta

SEQ ID NO: 61729 - DNA, 7 bp, Unknown
  misc_feature (1)..( 7): Matrix.003 file - promoters60/4921291
caaaatt

SEQ ID NO: 61730 - DNA, 7 bp, Unknown
  misc_feature (1)..( 7): Matrix.003 file - promoters60/4921291
ttcataa

SEQ ID NO: 61731 - DNA, 8 bp, Unknown
  misc_feature (1)..( 8): Matrix.003 file - promoters60/4921291
ttttactt

SEQ ID NO: 61732 - DNA, 7 bp, Unknown
  misc_feature (1)..( 7): Matrix.003 file - promoters60/4921291
acgaact

SEQ ID NO: 61733 - DNA, 7 bp, Unknown
  misc_feature (1)..( 7): Matrix.003 file - promoters60/4921291
tatctcg

SEQ ID NO: 61734 - DNA, 8 bp, Unknown
  misc_feature (1)..( 8): Matrix.003 file - promoters60/4921291
atttgcac

SEQ ID NO: 61735 - DNA, 7 bp, Unknown
  misc_feature (1)..( 7): Matrix.003 file - promoters60/4921291
ttaatat

SEQ ID NO: 61736 - DNA, 6 bp, Unknown
  misc_feature (1)..( 6): Matrix.003 file - promoters60/4921291
aatata

SEQ ID NO: 61737 - DNA, 7 bp, Unknown
  misc_feature (1)..( 7): Matrix.003 file - promoters60/4921291
tgactaa

SEQ ID NO: 61738 - DNA, 6 bp, Unknown
  misc_feature (1)..( 6): Matrix.003 file - promoters60/4921291
atttat

SEQ ID NO: 61739 - DNA, 7 bp, Unknown
  misc_feature (1)..( 7): Matrix.003 file - promoters60/4921291
tttattt

SEQ ID NO: 61740 - DNA, 8 bp, Unknown
  misc_feature (1)..( 8): Matrix.003 file - promoters60/4921291
taaatata

SEQ ID NO: 61741 - DNA, 7 bp, Unknown
  misc_feature (1)..( 7): Matrix.003 file - promoters60/4921373
atgatta

SEQ ID NO: 61742 - DNA, 6 bp, Unknown
  misc_feature (1)..( 6): Matrix.003 file - promoters60/4921373
attaca

SEQ ID NO: 61743 - DNA, 7 bp, Unknown
  misc_feature (1)..( 7): Matrix.003 file - promoters60/4921373
aattata

SEQ ID NO: 61744 - DNA, 8 bp, Unknown
  misc_feature (1)..( 8): Matrix.003 file - promoters60/4921373
aaagatta

SEQ ID NO: 61745 - DNA, 7 bp, Unknown
  misc_feature (1)..( 7): Matrix.003 file - promoters60/4921373
aaaagtg

SEQ ID NO: 61746 - DNA, 7 bp, Unknown
  misc_feature (1)..( 7): Matrix.003 file - promoters60/4921373
tttcatt

SEQ ID NO: 61747 - DNA, 6 bp, Unknown
  misc_feature (1)..( 6): Matrix.003 file - promoters60/4921373
ttcaaa

SEQ ID NO: 61748 - DNA, 9 bp, Unknown
  misc_feature (1)..( 9): Matrix.003 file - promoters60/4921373
ctataaata

SEQ ID NO: 61749 - DNA, 6 bp, Unknown
  misc_feature (1)..( 6): Matrix.003 file - promoters60/4921373
agtata

SEQ ID NO: 61750 - DNA, 8 bp, Unknown
  misc_feature (1)..( 8): Matrix.003 file - promoters60/4921373
agttaatt

SEQ ID NO: 61751 - DNA, 6 bp, Unknown
  misc_feature (1)..( 6): Matrix.003 file - promoters60/4921373
taaaag

SEQ ID NO: 61752 - DNA, 8 bp, Unknown
  misc_feature (1)..( 8): Matrix.003 file - promoters60/4921373
atgaattt

SEQ ID NO: 61753 - DNA, 7 bp, Unknown
  misc_feature (1)..( 7): Matrix.003 file - promoters60/4921373
tttatgt

SEQ ID NO: 61754 - DNA, 6 bp, Unknown
  misc_feature (1)..( 6): Matrix.003 file - promoters60/4921373
tatatt

SEQ ID NO: 61755 - DNA, 6 bp, Unknown
  misc_feature (1)..( 6): Matrix.003 file - promoters60/4921373
tctaaa

SEQ ID NO: 61756 - DNA, 10 bp, Unknown
  misc_feature (1)..( 10): Matrix.003 file - promoters60/4921381
aaaaattgaa

SEQ ID NO: 61757 - DNA, 8 bp, Unknown
  misc_feature (1)..( 8): Matrix.003 file - promoters60/4921433
cagatttt

SEQ ID NO: 61758 - DNA, 9 bp, Unknown
  misc_feature (1)..( 9): Matrix.003 file - promoters60/4921433
gaatttaaa

SEQ ID NO: 61759 - DNA, 8 bp, Unknown
  misc_feature (1)..( 8): Matrix.003 file - promoters60/4921433
tatgaata

SEQ ID NO: 61760 - DNA, 12 bp, Unknown
  misc_feature (1)..( 12): Matrix.003 file - promoters60/4921433
ggtcaaaaaaaa

SEQ ID NO: 61761 - DNA, 8 bp, Unknown
  misc_feature (1)..( 8): Matrix.003 file - promoters60/4934904
gagctctc

SEQ ID NO: 61762 - DNA, 8 bp, Unknown
  misc_feature (1)..( 8): Matrix.003 file - promoters60/4934904
acatctca

SEQ ID NO: 61763 - DNA, 12 bp, Unknown
  misc_feature (1)..( 12): Matrix.003 file - promoters60/4934904
tctgggaaatcg

SEQ ID NO: 61764 - DNA, 6 bp, Unknown
  misc_feature (1)..( 6): Matrix.003 file - promoters60/4934904
tttcaa

SEQ ID NO: 61765 - DNA, 6 bp, Unknown
  misc_feature (1)..( 6): Matrix.003 file - promoters60/4934904
ggaaat

SEQ ID NO: 61766 - DNA, 9 bp, Unknown
  misc_feature (1)..( 9): Matrix.003 file - promoters60/4938731
aattaaaac

SEQ ID NO: 61767 - DNA, 10 bp, Unknown
  misc_feature (1)..( 10): Matrix.003 file - promoters60/4938731
ttataaaaaa

SEQ ID NO: 61768 - DNA, 11 bp, Unknown
  misc_feature (1)..( 11): Matrix.003 file - promoters60/4938731
acatatttcta

SEQ ID NO: 61769 - DNA, 11 bp, Unknown
  misc_feature (1)..( 11): Matrix.003 file - promoters60/4938731
cgatttatctt

SEQ ID NO: 61770 - DNA, 6 bp, Unknown
  misc_feature (1)..( 6): Matrix.003 file - promoters60/4943425
taaaag

SEQ ID NO: 61771 - DNA, 8 bp, Unknown
  misc_feature (1)..( 8): Matrix.003 file - promoters60/4943425
ctgtaaaa

SEQ ID NO: 61772 - DNA, 6 bp, Unknown
  misc_feature (1)..( 6): Matrix.003 file - promoters60/4943425
ggtggt

SEQ ID NO: 61773 - DNA, 6 bp, Unknown
  misc_feature (1)..( 6): Matrix.003 file - promoters60/4943425
ttgagt

SEQ ID NO: 61774 - DNA, 7 bp, Unknown
  misc_feature (1)..( 7): Matrix.003 file - promoters60/4943425
tttgatt

SEQ ID NO: 61775 - DNA, 6 bp, Unknown
  misc_feature (1)..( 6): Matrix.003 file - promoters60/4943425
tcaaaa

SEQ ID NO: 61776 - DNA, 8 bp, Unknown
  misc_feature (1)..( 8): Matrix.003 file - promoters60/4943425
ctctcgtt

SEQ ID NO: 61777 - DNA, 7 bp, Unknown
  misc_feature (1)..( 7): Matrix.003 file - promoters60/4943425
atgataa

SEQ ID NO: 61778 - DNA, 7 bp, Unknown
  misc_feature (1)..( 7): Matrix.003 file - promoters60/4943425
aacctgt

SEQ ID NO: 61779 - DNA, 8 bp, Unknown
  misc_feature (1)..( 8): Matrix.003 file - promoters60/4943425
ttgcatat

SEQ ID NO: 61780 - DNA, 8 bp, Unknown
  misc_feature (1)..( 8): Matrix.003 file - promoters60/4943425
tgttatgc

SEQ ID NO: 61781 - DNA, 7 bp, Unknown
  misc_feature (1)..( 7): Matrix.003 file - promoters60/4943425
ttgctaa

SEQ ID NO: 61782 - DNA, 6 bp, Unknown
  misc_feature (1)..( 6): Matrix.003 file - promoters60/4943425
ttcctt

SEQ ID NO: 61783 - DNA, 6 bp, Unknown
  misc_feature (1)..( 6): Matrix.003 file - promoters60/4943425
aagaga

SEQ ID NO: 61784 - DNA, 7 bp, Unknown
  misc_feature (1)..( 7): Matrix.003 file - promoters60/4943425
aagaaag

SEQ ID NO: 61785 - DNA, 12 bp, Unknown
  misc_feature (1)..( 12): Matrix.003 file - promoters60/4943637
ttggtttaaaaa

SEQ ID NO: 61786 - DNA, 8 bp, Unknown
  misc_feature (1)..( 8): Matrix.003 file - promoters60/4943637
tgagaaag

SEQ ID NO: 61787 - DNA, 12 bp, Unknown
  misc_feature (1)..( 12): Matrix.003 file - promoters60/4943637
ttagtttggtct

SEQ ID NO: 61788 - DNA, 7 bp, Unknown
  misc_feature (1)..( 7): Matrix.003 file - promoters60/4943637
tattttt

SEQ ID NO: 61789 - DNA, 12 bp, Unknown
  misc_feature (1)..( 12): Matrix.003 file - promoters60/4943637
ttagtttgttct

SEQ ID NO: 61790 - DNA, 10 bp, Unknown
  misc_feature (1)..( 10): Matrix.003 file - promoters60/4943637
taaatttgct

SEQ ID NO: 61791 - DNA, 11 bp, Unknown
  misc_feature (1)..( 11): Matrix.003 file - promoters60/4949707
tttaaaaaatc

SEQ ID NO: 61792 - DNA, 11 bp, Unknown
  misc_feature (1)..( 11): Matrix.003 file - promoters60/4949707
taagaaaattc

SEQ ID NO: 61793 - DNA, 11 bp, Unknown
  misc_feature (1)..( 11): Matrix.003 file - promoters60/4952527
caatgaaacct

SEQ ID NO: 61794 - DNA, 6 bp, Unknown
  misc_feature (1)..( 6): Matrix.003 file - promoters60/4974495
ctaatt

SEQ ID NO: 61795 - DNA, 7 bp, Unknown
  misc_feature (1)..( 7): Matrix.003 file - promoters60/4974495
gaaacag

SEQ ID NO: 61796 - DNA, 6 bp, Unknown
  misc_feature (1)..( 6): Matrix.003 file - promoters60/4974495
aagaga

SEQ ID NO: 61797 - DNA, 6 bp, Unknown
  misc_feature (1)..( 6): Matrix.003 file - promoters60/4974495
atcata

SEQ ID NO: 61798 - DNA, 7 bp, Unknown
  misc_feature (1)..( 7): Matrix.003 file - promoters60/4974495
tgtgttt

SEQ ID NO: 61799 - DNA, 11 bp, Unknown
  misc_feature (1)..( 11): Matrix.003 file - promoters60/4974495
ttaggatgcag

SEQ ID NO: 61800 - DNA, 8 bp, Unknown
  misc_feature (1)..( 8): Matrix.003 file - promoters60/4974495
aatgcatg

SEQ ID NO: 61801 - DNA, 7 bp, Unknown
  misc_feature (1)..( 7): Matrix.003 file - promoters60/4974495
ttggttg

SEQ ID NO: 61802 - DNA, 6 bp, Unknown
  misc_feature (1)..( 6): Matrix.003 file - promoters60/4974495
gagatg

SEQ ID NO: 61803 - DNA, 7 bp, Unknown
  misc_feature (1)..( 7): Matrix.003 file - promoters60/4974495
ttaatta

SEQ ID NO: 61804 - DNA, 6 bp, Unknown
  misc_feature (1)..( 6): Matrix.003 file - promoters60/4974495
agttca

SEQ ID NO: 61805 - DNA, 7 bp, Unknown
  misc_feature (1)..( 7): Matrix.003 file - promoters60/4974495
ggaagaa

SEQ ID NO: 61806 - DNA, 7 bp, Unknown
  misc_feature (1)..( 7): Matrix.003 file - promoters60/4974495
aataaaa

SEQ ID NO: 61807 - DNA, 6 bp, Unknown
  misc_feature (1)..( 6): Matrix.003 file - promoters60/4974495
tgcaca

SEQ ID NO: 61808 - DNA, 10 bp, Unknown
  misc_feature (1)..( 10): Matrix.003 file - promoters60/4974495
tttatccaag

SEQ ID NO: 61809 - DNA, 12 bp, Unknown
  misc_feature (1)..( 12): Matrix.003 file - promoters60/4978201
ataatttaaatg

SEQ ID NO: 61810 - DNA, 10 bp, Unknown
  misc_feature (1)..( 10): Matrix.003 file - promoters60/4992383
ttttgatttg

SEQ ID NO: 61811 - DNA, 9 bp, Unknown
  misc_feature (1)..( 9): Matrix.003 file - promoters60/4992383
aatttattt

SEQ ID NO: 61812 - DNA, 11 bp, Unknown
  misc_feature (1)..( 11): Matrix.003 file - promoters60/4992383
tacgtaacatg

SEQ ID NO: 61813 - DNA, 12 bp, Unknown
  misc_feature (1)..( 12): Matrix.003 file - promoters60/4992383
aacttttaagta

SEQ ID NO: 61814 - DNA, 8 bp, Unknown
  misc_feature (1)..( 8): Matrix.003 file - promoters60/4992383
agtttcta

SEQ ID NO: 61815 - DNA, 8 bp, Unknown
  misc_feature (1)..( 8): Matrix.003 file - promoters60/4992383
tttagttt

SEQ ID NO: 61816 - DNA, 7 bp, Unknown
  misc_feature (1)..( 7): Matrix.003 file - promoters60/4992383
aatgttt

SEQ ID NO: 61817 - DNA, 7 bp, Unknown
  misc_feature (1)..( 7): Matrix.003 file - promoters60/4992383
actttta

SEQ ID NO: 61818 - DNA, 10 bp, Unknown
  misc_feature (1)..( 10): Matrix.003 file - promoters60/4992383
aaattgatat

SEQ ID NO: 61819 - DNA, 10 bp, Unknown
  misc_feature (1)..( 10): Matrix.003 file - promoters60/4992383
tttgtataaa

SEQ ID NO: 61820 - DNA, 8 bp, Unknown
  misc_feature (1)..( 8): Matrix.003 file - promoters60/4992383
cggtttgg

SEQ ID NO: 61821 - DNA, 8 bp, Unknown
  misc_feature (1)..( 8): Matrix.003 file - promoters60/4992383
tagctaaa

SEQ ID NO: 61822 - DNA, 9 bp, Unknown
  misc_feature (1)..( 9): Matrix.003 file - promoters60/4992383
tattaatat

SEQ ID NO: 61823 - DNA, 9 bp, Unknown
  misc_feature (1)..( 9): Matrix.003 file - promoters60/4992383
ttttagaaa

SEQ ID NO: 61824 - DNA, 11 bp, Unknown
  misc_feature (1)..( 11): Matrix.003 file - promoters60/4992383
tgttttgtttt

SEQ ID NO: 61825 - DNA, 12 bp, Unknown
  misc_feature (1)..( 12): Matrix.003 file - promoters60/4992383
ttttaactaaca

SEQ ID NO: 61826 - DNA, 8 bp, Unknown
  misc_feature (1)..( 8): Matrix.003 file - promoters60/5003710
agaggaat

SEQ ID NO: 61827 - DNA, 13 bp, Unknown
  misc_feature (1)..( 13): Matrix.003 file - promoters60/5003710
tattcaaaacata

SEQ ID NO: 61828 - DNA, 13 bp, Unknown
  misc_feature (1)..( 13): Matrix.003 file - promoters60/5003710
tattcaaaacata

SEQ ID NO: 61829 - DNA, 12 bp, Unknown
  misc_feature (1)..( 12): Matrix.003 file - promoters60/5003710
ttttcttattgt

SEQ ID NO: 61830 - DNA, 8 bp, Unknown
  misc_feature (1)..( 8): Matrix.003 file - promoters60/5003710
atacaaaa

SEQ ID NO: 61831 - DNA, 6 bp, Unknown
  misc_feature (1)..( 6): Matrix.003 file - promoters60/5003710
atcaca

SEQ ID NO: 61832 - DNA, 10 bp, Unknown
  misc_feature (1)..( 10): Matrix.003 file - promoters60/5003710
tactatttta

SEQ ID NO: 61833 - DNA, 7 bp, Unknown
  misc_feature (1)..( 7): Matrix.003 file - promoters60/5003710
caaaact

SEQ ID NO: 61834 - DNA, 10 bp, Unknown
  misc_feature (1)..( 10): Matrix.003 file - promoters60/5003710
atatattttc

SEQ ID NO: 61835 - DNA, 7 bp, Unknown
  misc_feature (1)..( 7): Matrix.003 file - promoters60/5003710
aaaatat

SEQ ID NO: 61836 - DNA, 9 bp, Unknown
  misc_feature (1)..( 9): Matrix.003 file - promoters60/5003710
aataataca

SEQ ID NO: 61837 - DNA, 7 bp, Unknown
  misc_feature (1)..( 7): Matrix.003 file - promoters60/5003710
aaaatat

SEQ ID NO: 61838 - DNA, 6 bp, Unknown
  misc_feature (1)..( 6): Matrix.003 file - promoters60/5003710
gtggaa

SEQ ID NO: 61839 - DNA, 7 bp, Unknown
  misc_feature (1)..( 7): Matrix.003 file - promoters60/5003710
tatccgt

SEQ ID NO: 61840 - DNA, 7 bp, Unknown
  misc_feature (1)..( 7): Matrix.003 file - promoters60/5003710
atcaaag

SEQ ID NO: 61841 - DNA, 7 bp, Unknown
  misc_feature (1)..( 7): Matrix.003 file - promoters60/5003710
tttccat

SEQ ID NO: 61842 - DNA, 6 bp, Unknown
  misc_feature (1)..( 6): Matrix.003 file - promoters60/5003710
tatatt

SEQ ID NO: 61843 - DNA, 7 bp, Unknown
  misc_feature (1)..( 7): Matrix.003 file - promoters60/5003710
acaaaac

SEQ ID NO: 61844 - DNA, 6 bp, Unknown
  misc_feature (1)..( 6): Matrix.003 file - promoters60/5003710
gaccta

SEQ ID NO: 61845 - DNA, 9 bp, Unknown
  misc_feature (1)..( 9): Matrix.003 file - promoters60/5003848
tcaagaaag

SEQ ID NO: 61846 - DNA, 6 bp, Unknown
  misc_feature (1)..( 6): Matrix.003 file - promoters60/5003848
attgtt

SEQ ID NO: 61847 - DNA, 8 bp, Unknown
  misc_feature (1)..( 8): Matrix.003 file - promoters60/5003848
ctaaattt

SEQ ID NO: 61848 - DNA, 7 bp, Unknown
  misc_feature (1)..( 7): Matrix.003 file - promoters60/5003848
tttggag

SEQ ID NO: 61849 - DNA, 7 bp, Unknown
  misc_feature (1)..( 7): Matrix.003 file - promoters60/5003848
gagtgta

SEQ ID NO: 61850 - DNA, 6 bp, Unknown
  misc_feature (1)..( 6): Matrix.003 file - promoters60/5003848
gaacca

SEQ ID NO: 61851 - DNA, 7 bp, Unknown
  misc_feature (1)..( 7): Matrix.003 file - promoters60/5003848
tagaaag

SEQ ID NO: 61852 - DNA, 7 bp, Unknown
  misc_feature (1)..( 7): Matrix.003 file - promoters60/5003848
gttctga

SEQ ID NO: 61853 - DNA, 6 bp, Unknown
  misc_feature (1)..( 6): Matrix.003 file - promoters60/5003848
tagtca

SEQ ID NO: 61854 - DNA, 8 bp, Unknown
  misc_feature (1)..( 8): Matrix.003 file - promoters60/5003848
tcaaaacc

SEQ ID NO: 61855 - DNA, 8 bp, Unknown
  misc_feature (1)..( 8): Matrix.003 file - promoters60/5003848
tttgtttt

SEQ ID NO: 61856 - DNA, 6 bp, Unknown
  misc_feature (1)..( 6): Matrix.003 file - promoters60/5003848
ctttga

SEQ ID NO: 61857 - DNA, 11 bp, Unknown
  misc_feature (1)..( 11): Matrix.003 file - promoters60/5662739
aagaagaaaaa

SEQ ID NO: 61858 - DNA, 8 bp, Unknown
  misc_feature (1)..( 8): Matrix.003 file - promoters60/5662749
catatttt

SEQ ID NO: 61859 - DNA, 11 bp, Unknown
  misc_feature (1)..( 11): Matrix.003 file - promoters60/5662749
actactaaaaa

SEQ ID NO: 61860 - DNA, 10 bp, Unknown
  misc_feature (1)..( 10): Matrix.003 file - promoters60/5662749
taaaataaga

SEQ ID NO: 61861 - DNA, 9 bp, Unknown
  misc_feature (1)..( 9): Matrix.003 file - promoters60/5662749
ctttgtttc

SEQ ID NO: 61862 - DNA, 8 bp, Unknown
  misc_feature (1)..( 8): Matrix.003 file - promoters60/5662749
aaagtctt

SEQ ID NO: 61863 - DNA, 8 bp, Unknown
  misc_feature (1)..( 8): Matrix.003 file - promoters60/5662749
aaaattct

SEQ ID NO: 61864 - DNA, 8 bp, Unknown
  misc_feature (1)..( 8): Matrix.003 file - promoters60/5662749
tataaata

SEQ ID NO: 61865 - DNA, 8 bp, Unknown
  misc_feature (1)..( 8): Matrix.003 file - promoters60/5662763
ttttaata

SEQ ID NO: 61866 - DNA, 7 bp, Unknown
  misc_feature (1)..( 7): Matrix.003 file - promoters60/5662763
aatcaat

SEQ ID NO: 61867 - DNA, 13 bp, Unknown
  misc_feature (1)..( 13): Matrix.003 file - promoters60/5662763
tgttatgtggtgt

SEQ ID NO: 61868 - DNA, 7 bp, Unknown
  misc_feature (1)..( 7): Matrix.003 file - promoters60/5662763
attcgca

SEQ ID NO: 61869 - DNA, 9 bp, Unknown
  misc_feature (1)..( 9): Matrix.003 file - promoters60/5662763
tttgttttt

SEQ ID NO: 61870 - DNA, 7 bp, Unknown
  misc_feature (1)..( 7): Matrix.003 file - promoters60/5662763
tttgttt

SEQ ID NO: 61871 - DNA, 9 bp, Unknown
  misc_feature (1)..( 9): Matrix.003 file - promoters60/5662763
atgaatttg

SEQ ID NO: 61872 - DNA, 7 bp, Unknown
  misc_feature (1)..( 7): Matrix.003 file - promoters60/5662763
aatatgt

SEQ ID NO: 61873 - DNA, 6 bp, Unknown
  misc_feature (1)..( 6): Matrix.003 file - promoters60/5662763
ggtgtt

SEQ ID NO: 61874 - DNA, 7 bp, Unknown
  misc_feature (1)..( 7): Matrix.003 file - promoters60/5662763
ataattt

SEQ ID NO: 61875 - DNA, 6 bp, Unknown
  misc_feature (1)..( 6): Matrix.003 file - promoters60/5662763
ttattt

SEQ ID NO: 61876 - DNA, 9 bp, Unknown
  misc_feature (1)..( 9): Matrix.003 file - promoters60/5662763
tttctgttt

SEQ ID NO: 61877 - DNA, 6 bp, Unknown
  misc_feature (1)..( 6): Matrix.003 file - promoters60/5662763
tttcag

SEQ ID NO: 61878 - DNA, 7 bp, Unknown
  misc_feature (1)..( 7): Matrix.003 file - promoters60/5662763
aacaaaa

SEQ ID NO: 61879 - DNA, 8 bp, Unknown
  misc_feature (1)..( 8): Matrix.003 file - promoters60/5662763
taacaaaa

SEQ ID NO: 61880 - DNA, 7 bp, Unknown
  misc_feature (1)..( 7): Matrix.003 file - promoters60/5662763
tttttct

SEQ ID NO: 61881 - DNA, 7 bp, Unknown
  misc_feature (1)..( 7): Matrix.003 file - promoters60/5662763
aaaattg

SEQ ID NO: 61882 - DNA, 9 bp, Unknown
  misc_feature (1)..( 9): Matrix.003 file - promoters60/5662763
ggttcgatt

SEQ ID NO: 61883 - DNA, 7 bp, Unknown
  misc_feature (1)..( 7): Matrix.003 file - promoters60/5662763
caaagtc

SEQ ID NO: 61884 - DNA, 11 bp, Unknown
  misc_feature (1)..( 11): Matrix.003 file - promoters60/5662765
agaaaaaaaat

SEQ ID NO: 61885 - DNA, 9 bp, Unknown
  misc_feature (1)..( 9): Matrix.003 file - promoters60/5662765
tttattaaa

SEQ ID NO: 61886 - DNA, 10 bp, Unknown
  misc_feature (1)..( 10): Matrix.003 file - promoters60/5662765
aggcccatat

SEQ ID NO: 61887 - DNA, 11 bp, Unknown
  misc_feature (1)..( 11): Matrix.003 file - promoters60/5662765
atttttattaa

SEQ ID NO: 61888 - DNA, 7 bp, Unknown
  misc_feature (1)..( 7): Matrix.003 file - promoters60/5662769
aataaaa

SEQ ID NO: 61889 - DNA, 8 bp, Unknown
  misc_feature (1)..( 8): Matrix.003 file - promoters60/5662769
ctttttaa

SEQ ID NO: 61890 - DNA, 7 bp, Unknown
  misc_feature (1)..( 7): Matrix.003 file - promoters60/5662769
aaaaaga

SEQ ID NO: 61891 - DNA, 8 bp, Unknown
  misc_feature (1)..( 8): Matrix.003 file - promoters60/5662769
ataaaaaa

SEQ ID NO: 61892 - DNA, 11 bp, Unknown
  misc_feature (1)..( 11): Matrix.003 file - promoters60/5662769
tattatcataa

SEQ ID NO: 61893 - DNA, 11 bp, Unknown
  misc_feature (1)..( 11): Matrix.003 file - promoters60/5662769
tttctaactcc

SEQ ID NO: 61894 - DNA, 9 bp, Unknown
  misc_feature (1)..( 9): Matrix.003 file - promoters60/5662769
ttaaaaaaa

SEQ ID NO: 61895 - DNA, 8 bp, Unknown
  misc_feature (1)..( 8): Matrix.003 file - promoters60/5662771
tgagatga

SEQ ID NO: 61896 - DNA, 6 bp, Unknown
  misc_feature (1)..( 6): Matrix.003 file - promoters60/5662771
ttttat

SEQ ID NO: 61897 - DNA, 8 bp, Unknown
  misc_feature (1)..( 8): Matrix.003 file - promoters60/5662771
gaatattt

SEQ ID NO: 61898 - DNA, 9 bp, Unknown
  misc_feature (1)..( 9): Matrix.003 file - promoters60/5662771
cccaaacca

SEQ ID NO: 61899 - DNA, 11 bp, Unknown
  misc_feature (1)..( 11): Matrix.003 file - promoters60/5662771
aatttcgtttg

SEQ ID NO: 61900 - DNA, 7 bp, Unknown
  misc_feature (1)..( 7): Matrix.003 file - promoters60/5662771
attattg

SEQ ID NO: 61901 - DNA, 6 bp, Unknown
  misc_feature (1)..( 6): Matrix.003 file - promoters60/5662771
cacatt

SEQ ID NO: 61902 - DNA, 9 bp, Unknown
  misc_feature (1)..( 9): Matrix.003 file - promoters60/5662771
atcccaatt

SEQ ID NO: 61903 - DNA, 8 bp, Unknown
  misc_feature (1)..( 8): Matrix.003 file - promoters60/5662771
taactttt

SEQ ID NO: 61904 - DNA, 8 bp, Unknown
  misc_feature (1)..( 8): Matrix.003 file - promoters60/5662771
ttttattt

SEQ ID NO: 61905 - DNA, 8 bp, Unknown
  misc_feature (1)..( 8): Matrix.003 file - promoters60/5662771
tttctttt

SEQ ID NO: 61906 - DNA, 8 bp, Unknown
  misc_feature (1)..( 8): Matrix.003 file - promoters60/5662771
tttgctca

SEQ ID NO: 61907 - DNA, 6 bp, Unknown
  misc_feature (1)..( 6): Matrix.003 file - promoters60/5662771
aatatt

SEQ ID NO: 61908 - DNA, 7 bp, Unknown
  misc_feature (1)..( 7): Matrix.003 file - promoters60/5662779
aaaagat

SEQ ID NO: 61909 - DNA, 7 bp, Unknown
  misc_feature (1)..( 7): Matrix.003 file - promoters60/5662779
ttagttt

SEQ ID NO: 61910 - DNA, 9 bp, Unknown
  misc_feature (1)..( 9): Matrix.003 file - promoters60/5662779
tttgcagaa

SEQ ID NO: 61911 - DNA, 11 bp, Unknown
  misc_feature (1)..( 11): Matrix.003 file - promoters60/5662779
agtcaaagaaa

SEQ ID NO: 61912 - DNA, 9 bp, Unknown
  misc_feature (1)..( 9): Matrix.003 file - promoters60/5662779
ttaatataa

SEQ ID NO: 61913 - DNA, 8 bp, Unknown
  misc_feature (1)..( 8): Matrix.003 file - promoters60/5662779
gatgtaac

SEQ ID NO: 61914 - DNA, 7 bp, Unknown
  misc_feature (1)..( 7): Matrix.003 file - promoters60/5662779
aatatgt

SEQ ID NO: 61915 - DNA, 13 bp, Unknown
  misc_feature (1)..( 13): Matrix.003 file - promoters60/5662779
tgcaaaagagaca

SEQ ID NO: 61916 - DNA, 6 bp, Unknown
  misc_feature (1)..( 6): Matrix.003 file - promoters60/5662779
ttttga

SEQ ID NO: 61917 - DNA, 6 bp, Unknown
  misc_feature (1)..( 6): Matrix.003 file - promoters60/5662779
cttgcc

SEQ ID NO: 61918 - DNA, 7 bp, Unknown
  misc_feature (1)..( 7): Matrix.003 file - promoters60/5662779
ctcctgc

SEQ ID NO: 61919 - DNA, 6 bp, Unknown
  misc_feature (1)..( 6): Matrix.003 file - promoters60/5662785
aatgtg

SEQ ID NO: 61920 - DNA, 6 bp, Unknown
  misc_feature (1)..( 6): Matrix.003 file - promoters60/5662785
ttctta

SEQ ID NO: 61921 - DNA, 7 bp, Unknown
  misc_feature (1)..( 7): Matrix.003 file - promoters60/5662785
gattaaa

SEQ ID NO: 61922 - DNA, 8 bp, Unknown
  misc_feature (1)..( 8): Matrix.003 file - promoters60/5662785
tttgggcc

SEQ ID NO: 61923 - DNA, 8 bp, Unknown
  misc_feature (1)..( 8): Matrix.003 file - promoters60/5662785
tctcttgg

SEQ ID NO: 61924 - DNA, 7 bp, Unknown
  misc_feature (1)..( 7): Matrix.003 file - promoters60/5662785
ataattt

SEQ ID NO: 61925 - DNA, 6 bp, Unknown
  misc_feature (1)..( 6): Matrix.003 file - promoters60/5662785
tgattt

SEQ ID NO: 61926 - DNA, 8 bp, Unknown
  misc_feature (1)..( 8): Matrix.003 file - promoters60/5662785
tttccttt

SEQ ID NO: 61927 - DNA, 7 bp, Unknown
  misc_feature (1)..( 7): Matrix.003 file - promoters60/5662785
atctttg

SEQ ID NO: 61928 - DNA, 6 bp, Unknown
  misc_feature (1)..( 6): Matrix.003 file - promoters60/5662785
tttgat

SEQ ID NO: 61929 - DNA, 6 bp, Unknown
  misc_feature (1)..( 6): Matrix.003 file - promoters60/5662785
attctt

SEQ ID NO: 61930 - DNA, 8 bp, Unknown
  misc_feature (1)..( 8): Matrix.003 file - promoters60/5662785
tttatctt

SEQ ID NO: 61931 - DNA, 6 bp, Unknown
  misc_feature (1)..( 6): Matrix.003 file - promoters60/5662785
ttatat

SEQ ID NO: 61932 - DNA, 8 bp, Unknown
  misc_feature (1)..( 8): Matrix.003 file - promoters60/5662785
atatatct

SEQ ID NO: 61933 - DNA, 7 bp, Unknown
  misc_feature (1)..( 7): Matrix.003 file - promoters60/5662785
cttagtt

SEQ ID NO: 61934 - DNA, 7 bp, Unknown
  misc_feature (1)..( 7): Matrix.003 file - promoters60/5662785
gttattt

SEQ ID NO: 61935 - DNA, 13 bp, Unknown
  misc_feature (1)..( 13): Matrix.003 file - promoters60/5662799
aaacaaatttgcc

SEQ ID NO: 61936 - DNA, 8 bp, Unknown
  misc_feature (1)..( 8): Matrix.003 file - promoters60/5662809
tttgttat

SEQ ID NO: 61937 - DNA, 6 bp, Unknown
  misc_feature (1)..( 6): Matrix.003 file - promoters60/5662809
ataaaa

SEQ ID NO: 61938 - DNA, 13 bp, Unknown
  misc_feature (1)..( 13): Matrix.003 file - promoters60/5662809
attatttaaaact

SEQ ID NO: 61939 - DNA, 11 bp, Unknown
  misc_feature (1)..( 11): Matrix.003 file - promoters60/5662809
ttaaagttcaa

SEQ ID NO: 61940 - DNA, 7 bp, Unknown
  misc_feature (1)..( 7): Matrix.003 file - promoters60/5662809
aatattt

SEQ ID NO: 61941 - DNA, 7 bp, Unknown
  misc_feature (1)..( 7): Matrix.003 file - promoters60/5662809
tttcttt

SEQ ID NO: 61942 - DNA, 6 bp, Unknown
  misc_feature (1)..( 6): Matrix.003 file - promoters60/5662809
cagaca

SEQ ID NO: 61943 - DNA, 6 bp, Unknown
  misc_feature (1)..( 6): Matrix.003 file - promoters60/5662809
tttttt

SEQ ID NO: 61944 - DNA, 6 bp, Unknown
  misc_feature (1)..( 6): Matrix.003 file - promoters60/5662809
ctttta

SEQ ID NO: 61945 - DNA, 6 bp, Unknown
  misc_feature (1)..( 6): Matrix.003 file - promoters60/5662809
caaaaa

SEQ ID NO: 61946 - DNA, 11 bp, Unknown
  misc_feature (1)..( 11): Matrix.003 file - promoters60/5662809
aaacaacaaat

SEQ ID NO: 61947 - DNA, 7 bp, Unknown
  misc_feature (1)..( 7): Matrix.003 file - promoters60/5662809
ctattta

SEQ ID NO: 61948 - DNA, 7 bp, Unknown
  misc_feature (1)..( 7): Matrix.003 file - promoters60/5662809
ttttctt

SEQ ID NO: 61949 - DNA, 6 bp, Unknown
  misc_feature (1)..( 6): Matrix.003 file - promoters60/5662809
tttatt

SEQ ID NO: 61950 - DNA, 8 bp, Unknown
  misc_feature (1)..( 8): Matrix.003 file - promoters60/5662809
ctaattaa

SEQ ID NO: 61951 - DNA, 6 bp, Unknown
  misc_feature (1)..( 6): Matrix.003 file - promoters60/5662809
aataaa

SEQ ID NO: 61952 - DNA, 7 bp, Unknown
  misc_feature (1)..( 7): Matrix.003 file - promoters60/5662809
tttgtta

SEQ ID NO: 61953 - DNA, 7 bp, Unknown
  misc_feature (1)..( 7): Matrix.003 file - promoters60/5662809
aaagaaa

SEQ ID NO: 61954 - DNA, 7 bp, Unknown
  misc_feature (1)..( 7): Matrix.003 file - promoters60/5662809
cgcgttt

SEQ ID NO: 61955 - DNA, 8 bp, Unknown
  misc_feature (1)..( 8): Matrix.003 file - promoters60/5662828
aaatcctc

SEQ ID NO: 61956 - DNA, 7 bp, Unknown
  misc_feature (1)..( 7): Matrix.003 file - promoters60/5662828
aatatct

SEQ ID NO: 61957 - DNA, 7 bp, Unknown
  misc_feature (1)..( 7): Matrix.003 file - promoters60/5662828
tttataa

SEQ ID NO: 61958 - DNA, 6 bp, Unknown
  misc_feature (1)..( 6): Matrix.003 file - promoters60/5662828
ttgtta

SEQ ID NO: 61959 - DNA, 7 bp, Unknown
  misc_feature (1)..( 7): Matrix.003 file - promoters60/5662828
ttttgat

SEQ ID NO: 61960 - DNA, 8 bp, Unknown
  misc_feature (1)..( 8): Matrix.003 file - promoters60/5662828
agaccctt

SEQ ID NO: 61961 - DNA, 6 bp, Unknown
  misc_feature (1)..( 6): Matrix.003 file - promoters60/5662828
ttgaga

SEQ ID NO: 61962 - DNA, 7 bp, Unknown
  misc_feature (1)..( 7): Matrix.003 file - promoters60/5662828
taaattg

SEQ ID NO: 61963 - DNA, 6 bp, Unknown
  misc_feature (1)..( 6): Matrix.003 file - promoters60/5662828
ttttaa

SEQ ID NO: 61964 - DNA, 6 bp, Unknown
  misc_feature (1)..( 6): Matrix.003 file - promoters60/5662828
atacct

SEQ ID NO: 61965 - DNA, 6 bp, Unknown
  misc_feature (1)..( 6): Matrix.003 file - promoters60/5662828
ataatt

SEQ ID NO: 61966 - DNA, 6 bp, Unknown
  misc_feature (1)..( 6): Matrix.003 file - promoters60/5662828
ctacgt

SEQ ID NO: 61967 - DNA, 6 bp, Unknown
  misc_feature (1)..( 6): Matrix.003 file - promoters60/5662828
gttgat

SEQ ID NO: 61968 - DNA, 8 bp, Unknown
  misc_feature (1)..( 8): Matrix.003 file - promoters60/5662828
aatatctc

SEQ ID NO: 61969 - DNA, 6 bp, Unknown
  misc_feature (1)..( 6): Matrix.003 file - promoters60/5662828
gggttt

SEQ ID NO: 61970 - DNA, 6 bp, Unknown
  misc_feature (1)..( 6): Matrix.003 file - promoters60/5662828
acaaat

SEQ ID NO: 61971 - DNA, 7 bp, Unknown
  misc_feature (1)..( 7): Matrix.003 file - promoters60/5662828
tctaaaa

SEQ ID NO: 61972 - DNA, 6 bp, Unknown
  misc_feature (1)..( 6): Matrix.003 file - promoters60/5662828
aatgtc

SEQ ID NO: 61973 - DNA, 7 bp, Unknown
  misc_feature (1)..( 7): Matrix.003 file - promoters60/5662828
aatctac

SEQ ID NO: 61974 - DNA, 7 bp, Unknown
  misc_feature (1)..( 7): Matrix.003 file - promoters60/5662835
tttatga

SEQ ID NO: 61975 - DNA, 7 bp, Unknown
  misc_feature (1)..( 7): Matrix.003 file - promoters60/5662835
actattg

SEQ ID NO: 61976 - DNA, 6 bp, Unknown
  misc_feature (1)..( 6): Matrix.003 file - promoters60/5662835
taacca

SEQ ID NO: 61977 - DNA, 6 bp, Unknown
  misc_feature (1)..( 6): Matrix.003 file - promoters60/5662835
gatgag

SEQ ID NO: 61978 - DNA, 6 bp, Unknown
  misc_feature (1)..( 6): Matrix.003 file - promoters60/5662835
ttggaa

SEQ ID NO: 61979 - DNA, 8 bp, Unknown
  misc_feature (1)..( 8): Matrix.003 file - promoters60/5662835
acaaattt

SEQ ID NO: 61980 - DNA, 7 bp, Unknown
  misc_feature (1)..( 7): Matrix.003 file - promoters60/5662835
ttgactt

SEQ ID NO: 61981 - DNA, 8 bp, Unknown
  misc_feature (1)..( 8): Matrix.003 file - promoters60/5662835
ttgattta

SEQ ID NO: 61982 - DNA, 6 bp, Unknown
  misc_feature (1)..( 6): Matrix.003 file - promoters60/5662835
aaacaa

SEQ ID NO: 61983 - DNA, 6 bp, Unknown
  misc_feature (1)..( 6): Matrix.003 file - promoters60/5662835
acacgt

SEQ ID NO: 61984 - DNA, 6 bp, Unknown
  misc_feature (1)..( 6): Matrix.003 file - promoters60/5662835
ttaacc

SEQ ID NO: 61985 - DNA, 7 bp, Unknown
  misc_feature (1)..( 7): Matrix.003 file - promoters60/5662835
tttggaa

SEQ ID NO: 61986 - DNA, 6 bp, Unknown
  misc_feature (1)..( 6): Matrix.003 file - promoters60/5662835
aatttg

SEQ ID NO: 61987 - DNA, 7 bp, Unknown
  misc_feature (1)..( 7): Matrix.003 file - promoters60/5662835
attaatt

SEQ ID NO: 61988 - DNA, 6 bp, Unknown
  misc_feature (1)..( 6): Matrix.003 file - promoters60/5662835
ttaaaa

SEQ ID NO: 61989 - DNA, 8 bp, Unknown
  misc_feature (1)..( 8): Matrix.003 file - promoters60/5662893
aaaataaa

SEQ ID NO: 61990 - DNA, 9 bp, Unknown
  misc_feature (1)..( 9): Matrix.003 file - promoters60/5662895
aattaaaac

SEQ ID NO: 61991 - DNA, 8 bp, Unknown
  misc_feature (1)..( 8): Matrix.003 file - promoters60/5662895
ttttgttt

SEQ ID NO: 61992 - DNA, 7 bp, Unknown
  misc_feature (1)..( 7): Matrix.003 file - promoters60/5662895
cattttt

SEQ ID NO: 61993 - DNA, 6 bp, Unknown
  misc_feature (1)..( 6): Matrix.003 file - promoters60/5662895
taaatt

SEQ ID NO: 61994 - DNA, 6 bp, Unknown
  misc_feature (1)..( 6): Matrix.003 file - promoters60/5662895
ttctta

SEQ ID NO: 61995 - DNA, 8 bp, Unknown
  misc_feature (1)..( 8): Matrix.003 file - promoters60/5662895
aaaatttt

SEQ ID NO: 61996 - DNA, 7 bp, Unknown
  misc_feature (1)..( 7): Matrix.003 file - promoters60/5662895
caacttc

SEQ ID NO: 61997 - DNA, 6 bp, Unknown
  misc_feature (1)..( 6): Matrix.003 file - promoters60/5662895
tgattc

SEQ ID NO: 61998 - DNA, 6 bp, Unknown
  misc_feature (1)..( 6): Matrix.003 file - promoters60/5662895
aaaaac

SEQ ID NO: 61999 - DNA, 6 bp, Unknown
  misc_feature (1)..( 6): Matrix.003 file - promoters60/5662895
tttatt

SEQ ID NO: 62000 - DNA, 9 bp, Unknown
  misc_feature (1)..( 9): Matrix.003 file - promoters60/5662895
tttacataa

SEQ ID NO: 62001 - DNA, 7 bp, Unknown
  misc_feature (1)..( 7): Matrix.003 file - promoters60/5662895
agaagaa

SEQ ID NO: 62002 - DNA, 9 bp, Unknown
  misc_feature (1)..( 9): Matrix.003 file - promoters60/5662895
tgtggattt

SEQ ID NO: 62003 - DNA, 6 bp, Unknown
  misc_feature (1)..( 6): Matrix.003 file - promoters60/5662895
tcgaat

SEQ ID NO: 62004 - DNA, 7 bp, Unknown
  misc_feature (1)..( 7): Matrix.003 file - promoters60/5662895
cataaaa

SEQ ID NO: 62005 - DNA, 7 bp, Unknown
  misc_feature (1)..( 7): Matrix.003 file - promoters60/5662895
aatcgga

SEQ ID NO: 62006 - DNA, 7 bp, Unknown
  misc_feature (1)..( 7): Matrix.003 file - promoters60/5662895
ttcagat

SEQ ID NO: 62007 - DNA, 6 bp, Unknown
  misc_feature (1)..( 6): Matrix.003 file - promoters60/5662895
ctgtaa

SEQ ID NO: 62008 - DNA, 6 bp, Unknown
  misc_feature (1)..( 6): Matrix.003 file - promoters60/5662895
aaaatg

SEQ ID NO: 62009 - DNA, 8 bp, Unknown
  misc_feature (1)..( 8): Matrix.003 file - promoters60/5662895
ttatctaa

SEQ ID NO: 62010 - DNA, 7 bp, Unknown
  misc_feature (1)..( 7): Matrix.003 file - promoters60/5662895
ttatctt

SEQ ID NO: 62011 - DNA, 6 bp, Unknown
  misc_feature (1)..( 6): Matrix.003 file - promoters60/5662895
attttt

SEQ ID NO: 62012 - DNA, 13 bp, Unknown
  misc_feature (1)..( 13): Matrix.003 file - promoters60/5662914
ttatttaaaaaca

SEQ ID NO: 62013 - DNA, 11 bp, Unknown
  misc_feature (1)..( 11): Matrix.003 file - promoters60/5662914
aattaaaaaaa

SEQ ID NO: 62014 - DNA, 7 bp, Unknown
  misc_feature (1)..( 7): Matrix.003 file - promoters60/5662921
tttctta

SEQ ID NO: 62015 - DNA, 6 bp, Unknown
  misc_feature (1)..( 6): Matrix.003 file - promoters60/5662921
aatgtt

SEQ ID NO: 62016 - DNA, 9 bp, Unknown
  misc_feature (1)..( 9): Matrix.003 file - promoters60/5662921
taatttcaa

SEQ ID NO: 62017 - DNA, 8 bp, Unknown
  misc_feature (1)..( 8): Matrix.003 file - promoters60/5662921
tggcgtgt

SEQ ID NO: 62018 - DNA, 8 bp, Unknown
  misc_feature (1)..( 8): Matrix.003 file - promoters60/5662921
aaatttta

SEQ ID NO: 62019 - DNA, 8 bp, Unknown
  misc_feature (1)..( 8): Matrix.003 file - promoters60/5662921
tatataaa

SEQ ID NO: 62020 - DNA, 7 bp, Unknown
  misc_feature (1)..( 7): Matrix.003 file - promoters60/5662921
aataatt

SEQ ID NO: 62021 - DNA, 7 bp, Unknown
  misc_feature (1)..( 7): Matrix.003 file - promoters60/5662921
taaaaaa

SEQ ID NO: 62022 - DNA, 6 bp, Unknown
  misc_feature (1)..( 6): Matrix.003 file - promoters60/5662921
gttcaa

SEQ ID NO: 62023 - DNA, 6 bp, Unknown
  misc_feature (1)..( 6): Matrix.003 file - promoters60/5662921
ttttgg

SEQ ID NO: 62024 - DNA, 8 bp, Unknown
  misc_feature (1)..( 8): Matrix.003 file - promoters60/5662921
ttggtttt

SEQ ID NO: 62025 - DNA, 8 bp, Unknown
  misc_feature (1)..( 8): Matrix.003 file - promoters60/5662921
aaaaaaaa

SEQ ID NO: 62026 - DNA, 8 bp, Unknown
  misc_feature (1)..( 8): Matrix.003 file - promoters60/5662921
atacacaa

SEQ ID NO: 62027 - DNA, 7 bp, Unknown
  misc_feature (1)..( 7): Matrix.003 file - promoters60/5662921
attataa

SEQ ID NO: 62028 - DNA, 7 bp, Unknown
  misc_feature (1)..( 7): Matrix.003 file - promoters60/5662921
gtccttt

SEQ ID NO: 62029 - DNA, 6 bp, Unknown
  misc_feature (1)..( 6): Matrix.003 file - promoters60/5662921
ttaaaa

SEQ ID NO: 62030 - DNA, 6 bp, Unknown
  misc_feature (1)..( 6): Matrix.003 file - promoters60/5662921
gaataa

SEQ ID NO: 62031 - DNA, 6 bp, Unknown
  misc_feature (1)..( 6): Matrix.003 file - promoters60/5662921
gagaga

SEQ ID NO: 62032 - DNA, 9 bp, Unknown
  misc_feature (1)..( 9): Matrix.003 file - promoters60/5662945
gaatgtgaa

SEQ ID NO: 62033 - DNA, 7 bp, Unknown
  misc_feature (1)..( 7): Matrix.003 file - promoters60/5662945
ccaagaa

SEQ ID NO: 62034 - DNA, 6 bp, Unknown
  misc_feature (1)..( 6): Matrix.003 file - promoters60/5662945
tttcct

SEQ ID NO: 62035 - DNA, 7 bp, Unknown
  misc_feature (1)..( 7): Matrix.003 file - promoters60/5662945
agaatct

SEQ ID NO: 62036 - DNA, 8 bp, Unknown
  misc_feature (1)..( 8): Matrix.003 file - promoters60/5662945
ttgcagaa

SEQ ID NO: 62037 - DNA, 6 bp, Unknown
  misc_feature (1)..( 6): Matrix.003 file - promoters60/5662945
caaaac

SEQ ID NO: 62038 - DNA, 8 bp, Unknown
  misc_feature (1)..( 8): Matrix.003 file - promoters60/5662945
attgtttg

SEQ ID NO: 62039 - DNA, 7 bp, Unknown
  misc_feature (1)..( 7): Matrix.003 file - promoters60/5662945
caaatga

SEQ ID NO: 62040 - DNA, 8 bp, Unknown
  misc_feature (1)..( 8): Matrix.003 file - promoters60/5662945
acacgtgg

SEQ ID NO: 62041 - DNA, 6 bp, Unknown
  misc_feature (1)..( 6): Matrix.003 file - promoters60/5662945
ttgttt

SEQ ID NO: 62042 - DNA, 6 bp, Unknown
  misc_feature (1)..( 6): Matrix.003 file - promoters60/5662945
tttctt

SEQ ID NO: 62043 - DNA, 10 bp, Unknown
  misc_feature (1)..( 10): Matrix.003 file - promoters60/5662945
gtcatattga

SEQ ID NO: 62044 - DNA, 6 bp, Unknown
  misc_feature (1)..( 6): Matrix.003 file - promoters60/5662945
aattga

SEQ ID NO: 62045 - DNA, 6 bp, Unknown
  misc_feature (1)..( 6): Matrix.003 file - promoters60/5662945
ctacct

SEQ ID NO: 62046 - DNA, 9 bp, Unknown
  misc_feature (1)..( 9): Matrix.003 file - promoters60/5662945
acgtaaccg

SEQ ID NO: 62047 - DNA, 6 bp, Unknown
  misc_feature (1)..( 6): Matrix.003 file - promoters60/5662948
ggaacc

SEQ ID NO: 62048 - DNA, 10 bp, Unknown
  misc_feature (1)..( 10): Matrix.003 file - promoters60/5662948
tatcactgca

SEQ ID NO: 62049 - DNA, 7 bp, Unknown
  misc_feature (1)..( 7): Matrix.003 file - promoters60/5662948
tgtcgtt

SEQ ID NO: 62050 - DNA, 6 bp, Unknown
  misc_feature (1)..( 6): Matrix.003 file - promoters60/5662948
aagata

SEQ ID NO: 62051 - DNA, 10 bp, Unknown
  misc_feature (1)..( 10): Matrix.003 file - promoters60/5662948
tacgatcatc

SEQ ID NO: 62052 - DNA, 7 bp, Unknown
  misc_feature (1)..( 7): Matrix.003 file - promoters60/5662948
tctggta

SEQ ID NO: 62053 - DNA, 7 bp, Unknown
  misc_feature (1)..( 7): Matrix.003 file - promoters60/5662948
tttcttg

SEQ ID NO: 62054 - DNA, 6 bp, Unknown
  misc_feature (1)..( 6): Matrix.003 file - promoters60/5662948
tccatt

SEQ ID NO: 62055 - DNA, 9 bp, Unknown
  misc_feature (1)..( 9): Matrix.003 file - promoters60/5662948
tttattgtt

SEQ ID NO: 62056 - DNA, 7 bp, Unknown
  misc_feature (1)..( 7): Matrix.003 file - promoters60/5662948
caagatt

SEQ ID NO: 62057 - DNA, 7 bp, Unknown
  misc_feature (1)..( 7): Matrix.003 file - promoters60/5662948
acaagtt

SEQ ID NO: 62058 - DNA, 10 bp, Unknown
  misc_feature (1)..( 10): Matrix.003 file - promoters60/5662967
taaaaattct

SEQ ID NO: 62059 - DNA, 11 bp, Unknown
  misc_feature (1)..( 11): Matrix.003 file - promoters60/5662967
caaagatgagt

SEQ ID NO: 62060 - DNA, 9 bp, Unknown
  misc_feature (1)..( 9): Matrix.003 file - promoters60/5662967
aaaaataat

SEQ ID NO: 62061 - DNA, 10 bp, Unknown
  misc_feature (1)..( 10): Matrix.003 file - promoters60/5662967
aaataaaatt

SEQ ID NO: 62062 - DNA, 9 bp, Unknown
  misc_feature (1)..( 9): Matrix.003 file - promoters60/5662967
ttaaaaaaa

SEQ ID NO: 62063 - DNA, 12 bp, Unknown
  misc_feature (1)..( 12): Matrix.003 file - promoters60/5662967
taatattattat

SEQ ID NO: 62064 - DNA, 7 bp, Unknown
  misc_feature (1)..( 7): Matrix.003 file - promoters60/5662967
tttattt

SEQ ID NO: 62065 - DNA, 13 bp, Unknown
  misc_feature (1)..( 13): Matrix.003 file - promoters60/5662967
gattaaaatacaa

SEQ ID NO: 62066 - DNA, 11 bp, Unknown
  misc_feature (1)..( 11): Matrix.003 file - promoters60/5662967
aaaaaactaat

SEQ ID NO: 62067 - DNA, 7 bp, Unknown
  misc_feature (1)..( 7): Matrix.003 file - promoters60/5662977
gttcctt

SEQ ID NO: 62068 - DNA, 8 bp, Unknown
  misc_feature (1)..( 8): Matrix.003 file - promoters60/5662977
aaatgtta

SEQ ID NO: 62069 - DNA, 7 bp, Unknown
  misc_feature (1)..( 7): Matrix.003 file - promoters60/5662977
gttgatt

SEQ ID NO: 62070 - DNA, 8 bp, Unknown
  misc_feature (1)..( 8): Matrix.003 file - promoters60/5662977
cgacatgt

SEQ ID NO: 62071 - DNA, 6 bp, Unknown
  misc_feature (1)..( 6): Matrix.003 file - promoters60/5662977
acatgt

SEQ ID NO: 62072 - DNA, 6 bp, Unknown
  misc_feature (1)..( 6): Matrix.003 file - promoters60/5662992
tatttc

SEQ ID NO: 62073 - DNA, 6 bp, Unknown
  misc_feature (1)..( 6): Matrix.003 file - promoters60/5662992
acattt

SEQ ID NO: 62074 - DNA, 9 bp, Unknown
  misc_feature (1)..( 9): Matrix.003 file - promoters60/5662992
atttatata

SEQ ID NO: 62075 - DNA, 8 bp, Unknown
  misc_feature (1)..( 8): Matrix.003 file - promoters60/5662992
atatataa

SEQ ID NO: 62076 - DNA, 7 bp, Unknown
  misc_feature (1)..( 7): Matrix.003 file - promoters60/5662992
ttcgttt

SEQ ID NO: 62077 - DNA, 8 bp, Unknown
  misc_feature (1)..( 8): Matrix.003 file - promoters60/5662992
attttaaa

SEQ ID NO: 62078 - DNA, 10 bp, Unknown
  misc_feature (1)..( 10): Matrix.003 file - promoters60/5662992
aacaaattta

SEQ ID NO: 62079 - DNA, 6 bp, Unknown
  misc_feature (1)..( 6): Matrix.003 file - promoters60/5662992
atataa

SEQ ID NO: 62080 - DNA, 10 bp, Unknown
  misc_feature (1)..( 10): Matrix.003 file - promoters60/5662992
aattattttc

SEQ ID NO: 62081 - DNA, 6 bp, Unknown
  misc_feature (1)..( 6): Matrix.003 file - promoters60/5662992
tttggt

SEQ ID NO: 62082 - DNA, 7 bp, Unknown
  misc_feature (1)..( 7): Matrix.003 file - promoters60/5662992
tctaaaa

SEQ ID NO: 62083 - DNA, 6 bp, Unknown
  misc_feature (1)..( 6): Matrix.003 file - promoters60/5662992
gtaact

SEQ ID NO: 62084 - DNA, 6 bp, Unknown
  misc_feature (1)..( 6): Matrix.003 file - promoters60/5662992
cgaaaa

SEQ ID NO: 62085 - DNA, 7 bp, Unknown
  misc_feature (1)..( 7): Matrix.003 file - promoters60/5662992
aaaatat

SEQ ID NO: 62086 - DNA, 6 bp, Unknown
  misc_feature (1)..( 6): Matrix.003 file - promoters60/5662992
tatttt

SEQ ID NO: 62087 - DNA, 7 bp, Unknown
  misc_feature (1)..( 7): Matrix.003 file - promoters60/5662992
tttccta

SEQ ID NO: 62088 - DNA, 10 bp, Unknown
  misc_feature (1)..( 10): Matrix.003 file - promoters60/5662992
taattagaaa

SEQ ID NO: 62089 - DNA, 6 bp, Unknown
  misc_feature (1)..( 6): Matrix.003 file - promoters60/5662992
aaacat

SEQ ID NO: 62090 - DNA, 9 bp, Unknown
  misc_feature (1)..( 9): Matrix.003 file - promoters60/5662999
tagacaatg

SEQ ID NO: 62091 - DNA, 7 bp, Unknown
  misc_feature (1)..( 7): Matrix.003 file - promoters60/5662999
gatgttg

SEQ ID NO: 62092 - DNA, 7 bp, Unknown
  misc_feature (1)..( 7): Matrix.003 file - promoters60/5662999
ctgcttc

SEQ ID NO: 62093 - DNA, 7 bp, Unknown
  misc_feature (1)..( 7): Matrix.003 file - promoters60/5662999
ctgaatc

SEQ ID NO: 62094 - DNA, 7 bp, Unknown
  misc_feature (1)..( 7): Matrix.003 file - promoters60/5662999
tgtatag

SEQ ID NO: 62095 - DNA, 7 bp, Unknown
  misc_feature (1)..( 7): Matrix.003 file - promoters60/5662999
aataagt

SEQ ID NO: 62096 - DNA, 7 bp, Unknown
  misc_feature (1)..( 7): Matrix.003 file - promoters60/5662999
caaaaga

SEQ ID NO: 62097 - DNA, 7 bp, Unknown
  misc_feature (1)..( 7): Matrix.003 file - promoters60/5662999
ctcctca

SEQ ID NO: 62098 - DNA, 6 bp, Unknown
  misc_feature (1)..( 6): Matrix.003 file - promoters60/5662999
atataa

SEQ ID NO: 62099 - DNA, 6 bp, Unknown
  misc_feature (1)..( 6): Matrix.003 file - promoters60/5662999
aatctg

SEQ ID NO: 62100 - DNA, 7 bp, Unknown
  misc_feature (1)..( 7): Matrix.003 file - promoters60/5662999
tttttaa

SEQ ID NO: 62101 - DNA, 8 bp, Unknown
  misc_feature (1)..( 8): Matrix.003 file - promoters60/5662999
acaattta

SEQ ID NO: 62102 - DNA, 7 bp, Unknown
  misc_feature (1)..( 7): Matrix.003 file - promoters60/5662999
caagaaa

SEQ ID NO: 62103 - DNA, 9 bp, Unknown
  misc_feature (1)..( 9): Matrix.003 file - promoters60/5662999
aaaagagta

SEQ ID NO: 62104 - DNA, 6 bp, Unknown
  misc_feature (1)..( 6): Matrix.003 file - promoters60/5662999
ttttgt

SEQ ID NO: 62105 - DNA, 8 bp, Unknown
  misc_feature (1)..( 8): Matrix.003 file - promoters60/5662999
attgcata

SEQ ID NO: 62106 - DNA, 7 bp, Unknown
  misc_feature (1)..( 7): Matrix.003 file - promoters60/5662999
tggagtg

SEQ ID NO: 62107 - DNA, 6 bp, Unknown
  misc_feature (1)..( 6): Matrix.003 file - promoters60/5662999
catatt

SEQ ID NO: 62108 - DNA, 6 bp, Unknown
  misc_feature (1)..( 6): Matrix.003 file - promoters60/5662999
tttact

SEQ ID NO: 62109 - DNA, 6 bp, Unknown
  misc_feature (1)..( 6): Matrix.003 file - promoters60/5662999
ttttgt

SEQ ID NO: 62110 - DNA, 10 bp, Unknown
  misc_feature (1)..( 10): Matrix.003 file - promoters60/5662999
agttaatctc

SEQ ID NO: 62111 - DNA, 12 bp, Unknown
  misc_feature (1)..( 12): Matrix.003 file - promoters60/5663003
acctcttttccg

SEQ ID NO: 62112 - DNA, 8 bp, Unknown
  misc_feature (1)..( 8): Matrix.003 file - promoters60/5663003
aaaaacaa

SEQ ID NO: 62113 - DNA, 12 bp, Unknown
  misc_feature (1)..( 12): Matrix.003 file - promoters60/5663003
aaataattgtat

SEQ ID NO: 62114 - DNA, 10 bp, Unknown
  misc_feature (1)..( 10): Matrix.003 file - promoters60/5663003
gaaatagatt

SEQ ID NO: 62115 - DNA, 11 bp, Unknown
  misc_feature (1)..( 11): Matrix.003 file - promoters60/5663003
ttacttaaatt

SEQ ID NO: 62116 - DNA, 7 bp, Unknown
  misc_feature (1)..( 7): Matrix.003 file - promoters60/5663034
ttcaaaa

SEQ ID NO: 62117 - DNA, 14 bp, Unknown
  misc_feature (1)..( 14): Matrix.003 file - promoters60/5663034
aactcattttctta

SEQ ID NO: 62118 - DNA, 8 bp, Unknown
  misc_feature (1)..( 8): Matrix.003 file - promoters60/5663034
aatttata

SEQ ID NO: 62119 - DNA, 8 bp, Unknown
  misc_feature (1)..( 8): Matrix.003 file - promoters60/5663034
caatatta

SEQ ID NO: 62120 - DNA, 7 bp, Unknown
  misc_feature (1)..( 7): Matrix.003 file - promoters60/5663034
tagattt

SEQ ID NO: 62121 - DNA, 6 bp, Unknown
  misc_feature (1)..( 6): Matrix.003 file - promoters60/5663034
gttttt

SEQ ID NO: 62122 - DNA, 9 bp, Unknown
  misc_feature (1)..( 9): Matrix.003 file - promoters60/5663034
aagaaacaa

SEQ ID NO: 62123 - DNA, 8 bp, Unknown
  misc_feature (1)..( 8): Matrix.003 file - promoters60/5663034
attttgtt

SEQ ID NO: 62124 - DNA, 8 bp, Unknown
  misc_feature (1)..( 8): Matrix.003 file - promoters60/5663034
aaaaatat

SEQ ID NO: 62125 - DNA, 6 bp, Unknown
  misc_feature (1)..( 6): Matrix.003 file - promoters60/5663034
attatt

SEQ ID NO: 62126 - DNA, 7 bp, Unknown
  misc_feature (1)..( 7): Matrix.003 file - promoters60/5663034
tcaaatc

SEQ ID NO: 62127 - DNA, 7 bp, Unknown
  misc_feature (1)..( 7): Matrix.003 file - promoters60/5663034
atgtcta

SEQ ID NO: 62128 - DNA, 6 bp, Unknown
  misc_feature (1)..( 6): Matrix.003 file - promoters60/5663034
agctaa

SEQ ID NO: 62129 - DNA, 7 bp, Unknown
  misc_feature (1)..( 7): Matrix.003 file - promoters60/5663034
cttaaga

SEQ ID NO: 62130 - DNA, 6 bp, Unknown
  misc_feature (1)..( 6): Matrix.003 file - promoters60/5663034
ttttat

SEQ ID NO: 62131 - DNA, 6 bp, Unknown
  misc_feature (1)..( 6): Matrix.003 file - promoters60/5663034
ttgcaa

SEQ ID NO: 62132 - DNA, 7 bp, Unknown
  misc_feature (1)..( 7): Matrix.003 file - promoters60/5663034
aatctta

SEQ ID NO: 62133 - DNA, 6 bp, Unknown
  misc_feature (1)..( 6): Matrix.003 file - promoters60/5663034
atttat

SEQ ID NO: 62134 - DNA, 9 bp, Unknown
  misc_feature (1)..( 9): Matrix.003 file - promoters60/5663034
cctactaaa

SEQ ID NO: 62135 - DNA, 6 bp, Unknown
  misc_feature (1)..( 6): Matrix.003 file - promoters60/5663050
attctc

SEQ ID NO: 62136 - DNA, 8 bp, Unknown
  misc_feature (1)..( 8): Matrix.003 file - promoters60/5663050
ctcaaatt

SEQ ID NO: 62137 - DNA, 7 bp, Unknown
  misc_feature (1)..( 7): Matrix.003 file - promoters60/5663050
tacaaaa

SEQ ID NO: 62138 - DNA, 7 bp, Unknown
  misc_feature (1)..( 7): Matrix.003 file - promoters60/5663050
aaaaagg

SEQ ID NO: 62139 - DNA, 6 bp, Unknown
  misc_feature (1)..( 6): Matrix.003 file - promoters60/5663050
tattta

SEQ ID NO: 62140 - DNA, 6 bp, Unknown
  misc_feature (1)..( 6): Matrix.003 file - promoters60/5663050
cttcaa

SEQ ID NO: 62141 - DNA, 6 bp, Unknown
  misc_feature (1)..( 6): Matrix.003 file - promoters60/5663050
tcttac

SEQ ID NO: 62142 - DNA, 6 bp, Unknown
  misc_feature (1)..( 6): Matrix.003 file - promoters60/5663050
tgataa

SEQ ID NO: 62143 - DNA, 7 bp, Unknown
  misc_feature (1)..( 7): Matrix.003 file - promoters60/5663050
ttaagtt

SEQ ID NO: 62144 - DNA, 8 bp, Unknown
  misc_feature (1)..( 8): Matrix.003 file - promoters60/5663050
tatagttg

SEQ ID NO: 62145 - DNA, 6 bp, Unknown
  misc_feature (1)..( 6): Matrix.003 file - promoters60/5663050
gaaaaa

SEQ ID NO: 62146 - DNA, 8 bp, Unknown
  misc_feature (1)..( 8): Matrix.003 file - promoters60/5663050
tgtataga

SEQ ID NO: 62147 - DNA, 7 bp, Unknown
  misc_feature (1)..( 7): Matrix.003 file - promoters60/5663050
aaaaata

SEQ ID NO: 62148 - DNA, 7 bp, Unknown
  misc_feature (1)..( 7): Matrix.003 file - promoters60/5663050
ataatat

SEQ ID NO: 62149 - DNA, 7 bp, Unknown
  misc_feature (1)..( 7): Matrix.003 file - promoters60/5663050
aaacgct

SEQ ID NO: 62150 - DNA, 9 bp, Unknown
  misc_feature (1)..( 9): Matrix.003 file - promoters60/5663050
aaaagaaaa

SEQ ID NO: 62151 - DNA, 7 bp, Unknown
  misc_feature (1)..( 7): Matrix.003 file - promoters60/5663050
ctggaat

SEQ ID NO: 62152 - DNA, 7 bp, Unknown
  misc_feature (1)..( 7): Matrix.003 file - promoters60/5663050
aaaactt

SEQ ID NO: 62153 - DNA, 8 bp, Unknown
  misc_feature (1)..( 8): Matrix.003 file - promoters60/5663050
cttaatta

SEQ ID NO: 62154 - DNA, 7 bp, Unknown
  misc_feature (1)..( 7): Matrix.003 file - promoters60/5663050
cacatat

SEQ ID NO: 62155 - DNA, 7 bp, Unknown
  misc_feature (1)..( 7): Matrix.003 file - promoters60/5663069
taaaaat

SEQ ID NO: 62156 - DNA, 6 bp, Unknown
  misc_feature (1)..( 6): Matrix.003 file - promoters60/5663069
cgagtt

SEQ ID NO: 62157 - DNA, 6 bp, Unknown
  misc_feature (1)..( 6): Matrix.003 file - promoters60/5663069
aaaact

SEQ ID NO: 62158 - DNA, 6 bp, Unknown
  misc_feature (1)..( 6): Matrix.003 file - promoters60/5663069
ttcgta

SEQ ID NO: 62159 - DNA, 9 bp, Unknown
  misc_feature (1)..( 9): Matrix.003 file - promoters60/5663069
tggacaatg

SEQ ID NO: 62160 - DNA, 8 bp, Unknown
  misc_feature (1)..( 8): Matrix.003 file - promoters60/5663069
atttcaag

SEQ ID NO: 62161 - DNA, 10 bp, Unknown
  misc_feature (1)..( 10): Matrix.003 file - promoters60/5663069
gtcaaaaaat

SEQ ID NO: 62162 - DNA, 6 bp, Unknown
  misc_feature (1)..( 6): Matrix.003 file - promoters60/5663069
taaatg

SEQ ID NO: 62163 - DNA, 9 bp, Unknown
  misc_feature (1)..( 9): Matrix.003 file - promoters60/5663069
taaaaacca

SEQ ID NO: 62164 - DNA, 7 bp, Unknown
  misc_feature (1)..( 7): Matrix.003 file - promoters60/5663069
aaccaat

SEQ ID NO: 62165 - DNA, 6 bp, Unknown
  misc_feature (1)..( 6): Matrix.003 file - promoters60/5663069
aaatcc

SEQ ID NO: 62166 - DNA, 7 bp, Unknown
  misc_feature (1)..( 7): Matrix.003 file - promoters60/5663069
atccaaa

SEQ ID NO: 62167 - DNA, 8 bp, Unknown
  misc_feature (1)..( 8): Matrix.003 file - promoters60/5663069
aaaaaata

SEQ ID NO: 62168 - DNA, 7 bp, Unknown
  misc_feature (1)..( 7): Matrix.003 file - promoters60/5663069
attctat

SEQ ID NO: 62169 - DNA, 11 bp, Unknown
  misc_feature (1)..( 11): Matrix.003 file - promoters60/5663069
ttttcgaaaaa

SEQ ID NO: 62170 - DNA, 6 bp, Unknown
  misc_feature (1)..( 6): Matrix.003 file - promoters60/5663069
tataaa

SEQ ID NO: 62171 - DNA, 13 bp, Unknown
  misc_feature (1)..( 13): Matrix.003 file - promoters60/5663138
aaaaacaaaataa

SEQ ID NO: 62172 - DNA, 10 bp, Unknown
  misc_feature (1)..( 10): Matrix.003 file - promoters60/5663138
gaaatcaaaa

SEQ ID NO: 62173 - DNA, 9 bp, Unknown
  misc_feature (1)..( 9): Matrix.003 file - promoters60/5663138
agatttccg

SEQ ID NO: 62174 - DNA, 12 bp, Unknown
  misc_feature (1)..( 12): Matrix.003 file - promoters60/5663138
gaaaaagaaaaa

SEQ ID NO: 62175 - DNA, 8 bp, Unknown
  misc_feature (1)..( 8): Matrix.003 file - promoters60/5663138
aaataaca

SEQ ID NO: 62176 - DNA, 8 bp, Unknown
  misc_feature (1)..( 8): Matrix.003 file - promoters60/5663138
aaaatttg

SEQ ID NO: 62177 - DNA, 10 bp, Unknown
  misc_feature (1)..( 10): Matrix.003 file - promoters60/5663142
taaaaatgaa

SEQ ID NO: 62178 - DNA, 8 bp, Unknown
  misc_feature (1)..( 8): Matrix.003 file - promoters60/5663142
aataatga

SEQ ID NO: 62179 - DNA, 14 bp, Unknown
  misc_feature (1)..( 14): Matrix.003 file - promoters60/5663142
acttataatataat

SEQ ID NO: 62180 - DNA, 9 bp, Unknown
  misc_feature (1)..( 9): Matrix.003 file - promoters60/5663142
aaatataat

SEQ ID NO: 62181 - DNA, 9 bp, Unknown
  misc_feature (1)..( 9): Matrix.003 file - promoters60/5663142
aaaatatat

SEQ ID NO: 62182 - DNA, 11 bp, Unknown
  misc_feature (1)..( 11): Matrix.003 file - promoters60/5663142
agaaaatcaat

SEQ ID NO: 62183 - DNA, 10 bp, Unknown
  misc_feature (1)..( 10): Matrix.003 file - promoters60/5663142
ttttatcaaa

SEQ ID NO: 62184 - DNA, 11 bp, Unknown
  misc_feature (1)..( 11): Matrix.003 file - promoters60/5663142
tcaatcaaatg

SEQ ID NO: 62185 - DNA, 11 bp, Unknown
  misc_feature (1)..( 11): Matrix.003 file - promoters60/5663142
agacataataa

SEQ ID NO: 62186 - DNA, 8 bp, Unknown
  misc_feature (1)..( 8): Matrix.003 file - promoters60/5663142
tcatataa

SEQ ID NO: 62187 - DNA, 8 bp, Unknown
  misc_feature (1)..( 8): Matrix.003 file - promoters60/5663142
aaatcttg

SEQ ID NO: 62188 - DNA, 8 bp, Unknown
  misc_feature (1)..( 8): Matrix.003 file - promoters60/5663142
tttcaaat

SEQ ID NO: 62189 - DNA, 7 bp, Unknown
  misc_feature (1)..( 7): Matrix.003 file - promoters60/5663142
aattttt

SEQ ID NO: 62190 - DNA, 8 bp, Unknown
  misc_feature (1)..( 8): Matrix.003 file - promoters60/5663142
atttgttt

SEQ ID NO: 62191 - DNA, 6 bp, Unknown
  misc_feature (1)..( 6): Matrix.003 file - promoters60/5663151
caattt

SEQ ID NO: 62192 - DNA, 8 bp, Unknown
  misc_feature (1)..( 8): Matrix.003 file - promoters60/5663151
agaatcca

SEQ ID NO: 62193 - DNA, 10 bp, Unknown
  misc_feature (1)..( 10): Matrix.003 file - promoters60/5663151
aagaaatgat

SEQ ID NO: 62194 - DNA, 8 bp, Unknown
  misc_feature (1)..( 8): Matrix.003 file - promoters60/5663151
aataaaac

SEQ ID NO: 62195 - DNA, 6 bp, Unknown
  misc_feature (1)..( 6): Matrix.003 file - promoters60/5663151
ccaaaa

SEQ ID NO: 62196 - DNA, 9 bp, Unknown
  misc_feature (1)..( 9): Matrix.003 file - promoters60/5663151
caaacccaa

SEQ ID NO: 62197 - DNA, 6 bp, Unknown
  misc_feature (1)..( 6): Matrix.003 file - promoters60/5663151
aagaat

SEQ ID NO: 62198 - DNA, 7 bp, Unknown
  misc_feature (1)..( 7): Matrix.003 file - promoters60/5663151
aaactga

SEQ ID NO: 62199 - DNA, 7 bp, Unknown
  misc_feature (1)..( 7): Matrix.003 file - promoters60/5663151
attatct

SEQ ID NO: 62200 - DNA, 6 bp, Unknown
  misc_feature (1)..( 6): Matrix.003 file - promoters60/5663151
caagaa

SEQ ID NO: 62201 - DNA, 7 bp, Unknown
  misc_feature (1)..( 7): Matrix.003 file - promoters60/5663151
tttaggt

SEQ ID NO: 62202 - DNA, 6 bp, Unknown
  misc_feature (1)..( 6): Matrix.003 file - promoters60/5663151
ttcagt

SEQ ID NO: 62203 - DNA, 8 bp, Unknown
  misc_feature (1)..( 8): Matrix.003 file - promoters60/5663154
tttacttt

SEQ ID NO: 62204 - DNA, 6 bp, Unknown
  misc_feature (1)..( 6): Matrix.003 file - promoters60/5663154
ttattt

SEQ ID NO: 62205 - DNA, 8 bp, Unknown
  misc_feature (1)..( 8): Matrix.003 file - promoters60/5663154
ttttattc

SEQ ID NO: 62206 - DNA, 8 bp, Unknown
  misc_feature (1)..( 8): Matrix.003 file - promoters60/5663154
attctttt

SEQ ID NO: 62207 - DNA, 6 bp, Unknown
  misc_feature (1)..( 6): Matrix.003 file - promoters60/5663154
agtttg

SEQ ID NO: 62208 - DNA, 7 bp, Unknown
  misc_feature (1)..( 7): Matrix.003 file - promoters60/5663154
ttcataa

SEQ ID NO: 62209 - DNA, 8 bp, Unknown
  misc_feature (1)..( 8): Matrix.003 file - promoters60/5663154
aaatataa

SEQ ID NO: 62210 - DNA, 8 bp, Unknown
  misc_feature (1)..( 8): Matrix.003 file - promoters60/5663154
acgtcgaa

SEQ ID NO: 62211 - DNA, 6 bp, Unknown
  misc_feature (1)..( 6): Matrix.003 file - promoters60/5663154
aaaaca

SEQ ID NO: 62212 - DNA, 7 bp, Unknown
  misc_feature (1)..( 7): Matrix.003 file - promoters60/5663154
tttactc

SEQ ID NO: 62213 - DNA, 6 bp, Unknown
  misc_feature (1)..( 6): Matrix.003 file - promoters60/5663154
ttttat

SEQ ID NO: 62214 - DNA, 7 bp, Unknown
  misc_feature (1)..( 7): Matrix.003 file - promoters60/5663154
actaatt

SEQ ID NO: 62215 - DNA, 9 bp, Unknown
  misc_feature (1)..( 9): Matrix.003 file - promoters60/5663154
ttgattaaa

SEQ ID NO: 62216 - DNA, 6 bp, Unknown
  misc_feature (1)..( 6): Matrix.003 file - promoters60/5663154
tggata

SEQ ID NO: 62217 - DNA, 7 bp, Unknown
  misc_feature (1)..( 7): Matrix.003 file - promoters60/5663154
ttggata

SEQ ID NO: 62218 - DNA, 7 bp, Unknown
  misc_feature (1)..( 7): Matrix.003 file - promoters60/5663154
taaaaaa

SEQ ID NO: 62219 - DNA, 7 bp, Unknown
  misc_feature (1)..( 7): Matrix.003 file - promoters60/5663154
acgaact

SEQ ID NO: 62220 - DNA, 7 bp, Unknown
  misc_feature (1)..( 7): Matrix.003 file - promoters60/5663154
tatctcg

SEQ ID NO: 62221 - DNA, 8 bp, Unknown
  misc_feature (1)..( 8): Matrix.003 file - promoters60/5663154
atttgcac

SEQ ID NO: 62222 - DNA, 7 bp, Unknown
  misc_feature (1)..( 7): Matrix.003 file - promoters60/5663154
ttaatat

SEQ ID NO: 62223 - DNA, 6 bp, Unknown
  misc_feature (1)..( 6): Matrix.003 file - promoters60/5663154
aatata

SEQ ID NO: 62224 - DNA, 6 bp, Unknown
  misc_feature (1)..( 6): Matrix.003 file - promoters60/5663182
aaataa

SEQ ID NO: 62225 - DNA, 7 bp, Unknown
  misc_feature (1)..( 7): Matrix.003 file - promoters60/5663182
aatctaa

SEQ ID NO: 62226 - DNA, 8 bp, Unknown
  misc_feature (1)..( 8): Matrix.003 file - promoters60/5663182
atatatac

SEQ ID NO: 62227 - DNA, 8 bp, Unknown
  misc_feature (1)..( 8): Matrix.003 file - promoters60/5663182
aatcagtg

SEQ ID NO: 62228 - DNA, 8 bp, Unknown
  misc_feature (1)..( 8): Matrix.003 file - promoters60/5663182
aaataaat

SEQ ID NO: 62229 - DNA, 7 bp, Unknown
  misc_feature (1)..( 7): Matrix.003 file - promoters60/5663182
ataaaac

SEQ ID NO: 62230 - DNA, 8 bp, Unknown
  misc_feature (1)..( 8): Matrix.003 file - promoters60/5663182
aacaaaaa

SEQ ID NO: 62231 - DNA, 6 bp, Unknown
  misc_feature (1)..( 6): Matrix.003 file - promoters60/5663182
aaaaga

SEQ ID NO: 62232 - DNA, 7 bp, Unknown
  misc_feature (1)..( 7): Matrix.003 file - promoters60/5663182
atcatgt

SEQ ID NO: 62233 - DNA, 6 bp, Unknown
  misc_feature (1)..( 6): Matrix.003 file - promoters60/5663182
gagtcc

SEQ ID NO: 62234 - DNA, 9 bp, Unknown
  misc_feature (1)..( 9): Matrix.003 file - promoters60/5663182
tttcggttc

SEQ ID NO: 62235 - DNA, 6 bp, Unknown
  misc_feature (1)..( 6): Matrix.003 file - promoters60/5663182
tcttta

SEQ ID NO: 62236 - DNA, 6 bp, Unknown
  misc_feature (1)..( 6): Matrix.003 file - promoters60/5663182
tccctt

SEQ ID NO: 62237 - DNA, 11 bp, Unknown
  misc_feature (1)..( 11): Matrix.003 file - promoters60/5663221
gtttttgttgc

SEQ ID NO: 62238 - DNA, 5 bp, Unknown
  misc_feature (1)..( 5): Matrix.003 file - promoters60/5663221
aattt

SEQ ID NO: 62239 - DNA, 12 bp, Unknown
  misc_feature (1)..( 12): Matrix.003 file - promoters60/5663221
agagatttagaa

SEQ ID NO: 62240 - DNA, 11 bp, Unknown
  misc_feature (1)..( 11): Matrix.003 file - promoters60/5663224
cttttaaaata

SEQ ID NO: 62241 - DNA, 7 bp, Unknown
  misc_feature (1)..( 7): Matrix.003 file - promoters60/5663224
gaattat

SEQ ID NO: 62242 - DNA, 8 bp, Unknown
  misc_feature (1)..( 8): Matrix.003 file - promoters60/5663234
aaaccttg

SEQ ID NO: 62243 - DNA, 10 bp, Unknown
  misc_feature (1)..( 10): Matrix.003 file - promoters60/5663234
catatatata

SEQ ID NO: 62244 - DNA, 8 bp, Unknown
  misc_feature (1)..( 8): Matrix.003 file - promoters60/5663234
cattttcg

SEQ ID NO: 62245 - DNA, 10 bp, Unknown
  misc_feature (1)..( 10): Matrix.003 file - promoters60/5663234
cataaaagat

SEQ ID NO: 62246 - DNA, 8 bp, Unknown
  misc_feature (1)..( 8): Matrix.003 file - promoters60/5663234
ataaaaaa

SEQ ID NO: 62247 - DNA, 14 bp, Unknown
  misc_feature (1)..( 14): Matrix.003 file - promoters60/5663234
tgatggtattgact

SEQ ID NO: 62248 - DNA, 8 bp, Unknown
  misc_feature (1)..( 8): Matrix.003 file - promoters60/5663234
ttatatat

SEQ ID NO: 62249 - DNA, 7 bp, Unknown
  misc_feature (1)..( 7): Matrix.003 file - promoters60/5663234
taaagtt

SEQ ID NO: 62250 - DNA, 7 bp, Unknown
  misc_feature (1)..( 7): Matrix.003 file - promoters60/5663234
aaatttg

SEQ ID NO: 62251 - DNA, 7 bp, Unknown
  misc_feature (1)..( 7): Matrix.003 file - promoters60/5663234
atttatt

SEQ ID NO: 62252 - DNA, 7 bp, Unknown
  misc_feature (1)..( 7): Matrix.003 file - promoters60/5663234
tatttaa

SEQ ID NO: 62253 - DNA, 8 bp, Unknown
  misc_feature (1)..( 8): Matrix.003 file - promoters60/5663281
aaccattt

SEQ ID NO: 62254 - DNA, 8 bp, Unknown
  misc_feature (1)..( 8): Matrix.003 file - promoters60/5663281
aataaaat

SEQ ID NO: 62255 - DNA, 11 bp, Unknown
  misc_feature (1)..( 11): Matrix.003 file - promoters60/5663281
aattaatattt

SEQ ID NO: 62256 - DNA, 7 bp, Unknown
  misc_feature (1)..( 7): Matrix.003 file - promoters60/5663281
ttatttt

SEQ ID NO: 62257 - DNA, 6 bp, Unknown
  misc_feature (1)..( 6): Matrix.003 file - promoters60/5663281
taacat

SEQ ID NO: 62258 - DNA, 7 bp, Unknown
  misc_feature (1)..( 7): Matrix.003 file - promoters60/5663281
aatgtga

SEQ ID NO: 62259 - DNA, 8 bp, Unknown
  misc_feature (1)..( 8): Matrix.003 file - promoters60/5663281
aaaaaaaa

SEQ ID NO: 62260 - DNA, 8 bp, Unknown
  misc_feature (1)..( 8): Matrix.003 file - promoters60/5663281
atttgatt

SEQ ID NO: 62261 - DNA, 10 bp, Unknown
  misc_feature (1)..( 10): Matrix.003 file - promoters60/5663281
aaaaaaactt

SEQ ID NO: 62262 - DNA, 6 bp, Unknown
  misc_feature (1)..( 6): Matrix.003 file - promoters60/5663281
tatatt

SEQ ID NO: 62263 - DNA, 8 bp, Unknown
  misc_feature (1)..( 8): Matrix.003 file - promoters60/5663281
acataacg

SEQ ID NO: 62264 - DNA, 7 bp, Unknown
  misc_feature (1)..( 7): Matrix.003 file - promoters60/5663281
cattttt

SEQ ID NO: 62265 - DNA, 6 bp, Unknown
  misc_feature (1)..( 6): Matrix.003 file - promoters60/5663281
tagagt

SEQ ID NO: 62266 - DNA, 7 bp, Unknown
  misc_feature (1)..( 7): Matrix.003 file - promoters60/5663281
aaaccct

SEQ ID NO: 62267 - DNA, 7 bp, Unknown
  misc_feature (1)..( 7): Matrix.003 file - promoters60/5663281
gtgttta

SEQ ID NO: 62268 - DNA, 6 bp, Unknown
  misc_feature (1)..( 6): Matrix.003 file - promoters60/5663281
taaaca

SEQ ID NO: 62269 - DNA, 6 bp, Unknown
  misc_feature (1)..( 6): Matrix.003 file - promoters60/5663281
aagata

SEQ ID NO: 62270 - DNA, 8 bp, Unknown
  misc_feature (1)..( 8): Matrix.003 file - promoters60/5663327
cagatttc

SEQ ID NO: 62271 - DNA, 9 bp, Unknown
  misc_feature (1)..( 9): Matrix.003 file - promoters60/5663327
tgtttgaaa

SEQ ID NO: 62272 - DNA, 6 bp, Unknown
  misc_feature (1)..( 6): Matrix.003 file - promoters60/5663327
gaataa

SEQ ID NO: 62273 - DNA, 10 bp, Unknown
  misc_feature (1)..( 10): Matrix.003 file - promoters60/5663327
acattttttt

SEQ ID NO: 62274 - DNA, 7 bp, Unknown
  misc_feature (1)..( 7): Matrix.003 file - promoters60/5663327
aaatatt

SEQ ID NO: 62275 - DNA, 9 bp, Unknown
  misc_feature (1)..( 9): Matrix.003 file - promoters60/5663327
tgtatgaaa

SEQ ID NO: 62276 - DNA, 6 bp, Unknown
  misc_feature (1)..( 6): Matrix.003 file - promoters60/5663327
aatata

SEQ ID NO: 62277 - DNA, 7 bp, Unknown
  misc_feature (1)..( 7): Matrix.003 file - promoters60/5663327
attttaa

SEQ ID NO: 62278 - DNA, 8 bp, Unknown
  misc_feature (1)..( 8): Matrix.003 file - promoters60/5663327
aatcgatc

SEQ ID NO: 62279 - DNA, 6 bp, Unknown
  misc_feature (1)..( 6): Matrix.003 file - promoters60/5663327
aaaaat

SEQ ID NO: 62280 - DNA, 10 bp, Unknown
  misc_feature (1)..( 10): Matrix.003 file - promoters60/5663327
ctctgcaatt

SEQ ID NO: 62281 - DNA, 8 bp, Unknown
  misc_feature (1)..( 8): Matrix.003 file - promoters60/5663327
taaaacga

SEQ ID NO: 62282 - DNA, 6 bp, Unknown
  misc_feature (1)..( 6): Matrix.003 file - promoters60/5663327
ttaatc

SEQ ID NO: 62283 - DNA, 12 bp, Unknown
  misc_feature (1)..( 12): Matrix.003 file - promoters60/5663327
ttaaaatcacat

SEQ ID NO: 62284 - DNA, 14 bp, Unknown
  misc_feature (1)..( 14): Matrix.003 file - promoters60/5663327
tataagtttgatat

SEQ ID NO: 62285 - DNA, 10 bp, Unknown
  misc_feature (1)..( 10): Matrix.003 file - promoters60/5663327
aaactaattt

SEQ ID NO: 62286 - DNA, 9 bp, Unknown
  misc_feature (1)..( 9): Matrix.003 file - promoters60/5663327
tttcttttc

SEQ ID NO: 62287 - DNA, 10 bp, Unknown
  misc_feature (1)..( 10): Matrix.003 file - promoters60/5663327
tttaaatttt

SEQ ID NO: 62288 - DNA, 6 bp, Unknown
  misc_feature (1)..( 6): Matrix.003 file - promoters60/5663327
caaaat

SEQ ID NO: 62289 - DNA, 13 bp, Unknown
  misc_feature (1)..( 13): Matrix.003 file - promoters60/5663327
tttaaaaataaat

SEQ ID NO: 62290 - DNA, 7 bp, Unknown
  misc_feature (1)..( 7): Matrix.003 file - promoters60/5663327
aatcaaa

SEQ ID NO: 62291 - DNA, 8 bp, Unknown
  misc_feature (1)..( 8): Matrix.003 file - promoters60/5663333
catgaata

SEQ ID NO: 62292 - DNA, 7 bp, Unknown
  misc_feature (1)..( 7): Matrix.003 file - promoters60/5663333
cgatcat

SEQ ID NO: 62293 - DNA, 7 bp, Unknown
  misc_feature (1)..( 7): Matrix.003 file - promoters60/5663333
agaaatt

SEQ ID NO: 62294 - DNA, 7 bp, Unknown
  misc_feature (1)..( 7): Matrix.003 file - promoters60/5663333
taaactt

SEQ ID NO: 62295 - DNA, 13 bp, Unknown
  misc_feature (1)..( 13): Matrix.003 file - promoters60/5663358
ataaattattctc

SEQ ID NO: 62296 - DNA, 9 bp, Unknown
  misc_feature (1)..( 9): Matrix.003 file - promoters60/5663358
agaaatgaa

SEQ ID NO: 62297 - DNA, 9 bp, Unknown
  misc_feature (1)..( 9): Matrix.003 file - promoters60/5663358
tataaaata

SEQ ID NO: 62298 - DNA, 8 bp, Unknown
  misc_feature (1)..( 8): Matrix.003 file - promoters60/5663370
acacacaa

SEQ ID NO: 62299 - DNA, 8 bp, Unknown
  misc_feature (1)..( 8): Matrix.003 file - promoters60/5663370
caaaacaa

SEQ ID NO: 62300 - DNA, 8 bp, Unknown
  misc_feature (1)..( 8): Matrix.003 file - promoters60/5663370
aaataatt

SEQ ID NO: 62301 - DNA, 6 bp, Unknown
  misc_feature (1)..( 6): Matrix.003 file - promoters60/5663370
aaaacg

SEQ ID NO: 62302 - DNA, 9 bp, Unknown
  misc_feature (1)..( 9): Matrix.003 file - promoters60/5663370
aatattggt

SEQ ID NO: 62303 - DNA, 7 bp, Unknown
  misc_feature (1)..( 7): Matrix.003 file - promoters60/5663370
attgcaa

SEQ ID NO: 62304 - DNA, 8 bp, Unknown
  misc_feature (1)..( 8): Matrix.003 file - promoters60/5663370
tggagtta

SEQ ID NO: 62305 - DNA, 9 bp, Unknown
  misc_feature (1)..( 9): Matrix.003 file - promoters60/5663370
tggtaatta

SEQ ID NO: 62306 - DNA, 7 bp, Unknown
  misc_feature (1)..( 7): Matrix.003 file - promoters60/5663370
gagagga

SEQ ID NO: 62307 - DNA, 7 bp, Unknown
  misc_feature (1)..( 7): Matrix.003 file - promoters60/5663370
acaagaa

SEQ ID NO: 62308 - DNA, 6 bp, Unknown
  misc_feature (1)..( 6): Matrix.003 file - promoters60/5663370
ctaaaa

SEQ ID NO: 62309 - DNA, 10 bp, Unknown
  misc_feature (1)..( 10): Matrix.003 file - promoters60/5663370
aaaacaacca

SEQ ID NO: 62310 - DNA, 6 bp, Unknown
  misc_feature (1)..( 6): Matrix.003 file - promoters60/5663370
aaaaat

SEQ ID NO: 62311 - DNA, 8 bp, Unknown
  misc_feature (1)..( 8): Matrix.003 file - promoters60/5663370
tctgtata

SEQ ID NO: 62312 - DNA, 9 bp, Unknown
  misc_feature (1)..( 9): Matrix.003 file - promoters60/5663370
ataaatttc

SEQ ID NO: 62313 - DNA, 8 bp, Unknown
  misc_feature (1)..( 8): Matrix.003 file - promoters60/5663370
ttcaacat

SEQ ID NO: 62314 - DNA, 7 bp, Unknown
  misc_feature (1)..( 7): Matrix.003 file - promoters60/5663370
catctct

SEQ ID NO: 62315 - DNA, 6 bp, Unknown
  misc_feature (1)..( 6): Matrix.003 file - promoters60/5663370
atgagc

SEQ ID NO: 62316 - DNA, 6 bp, Unknown
  misc_feature (1)..( 6): Matrix.003 file - promoters60/5663370
taaaac

SEQ ID NO: 62317 - DNA, 10 bp, Unknown
  misc_feature (1)..( 10): Matrix.003 file - promoters60/5663370
ttcaattttt

SEQ ID NO: 62318 - DNA, 6 bp, Unknown
  misc_feature (1)..( 6): Matrix.003 file - promoters60/5663370
atgaga

SEQ ID NO: 62319 - DNA, 6 bp, Unknown
  misc_feature (1)..( 6): Matrix.003 file - promoters60/5663370
gaggaa

SEQ ID NO: 62320 - DNA, 8 bp, Unknown
  misc_feature (1)..( 8): Matrix.003 file - promoters60/5663370
actcttca

SEQ ID NO: 62321 - DNA, 7 bp, Unknown
  misc_feature (1)..( 7): Matrix.003 file - promoters60/5663370
caaaata

SEQ ID NO: 62322 - DNA, 8 bp, Unknown
  misc_feature (1)..( 8): Matrix.003 file - promoters60/5663374
agacattt

SEQ ID NO: 62323 - DNA, 13 bp, Unknown
  misc_feature (1)..( 13): Matrix.003 file - promoters60/5663374
aaataaaataaat

SEQ ID NO: 62324 - DNA, 9 bp, Unknown
  misc_feature (1)..( 9): Matrix.003 file - promoters60/5663374
ttcccacta

SEQ ID NO: 62325 - DNA, 9 bp, Unknown
  misc_feature (1)..( 9): Matrix.003 file - promoters60/5663374
aaaccagaa

SEQ ID NO: 62326 - DNA, 6 bp, Unknown
  misc_feature (1)..( 6): Matrix.003 file - promoters60/5663374
atttcc

SEQ ID NO: 62327 - DNA, 6 bp, Unknown
  misc_feature (1)..( 6): Matrix.003 file - promoters60/5663374
atatgg

SEQ ID NO: 62328 - DNA, 6 bp, Unknown
  misc_feature (1)..( 6): Matrix.003 file - promoters60/5663374
aagata

SEQ ID NO: 62329 - DNA, 7 bp, Unknown
  misc_feature (1)..( 7): Matrix.003 file - promoters60/5663374
attgtta

SEQ ID NO: 62330 - DNA, 7 bp, Unknown
  misc_feature (1)..( 7): Matrix.003 file - promoters60/5663374
aactaaa

SEQ ID NO: 62331 - DNA, 6 bp, Unknown
  misc_feature (1)..( 6): Matrix.003 file - promoters60/5663374
atctat

SEQ ID NO: 62332 - DNA, 6 bp, Unknown
  misc_feature (1)..( 6): Matrix.003 file - promoters60/5663374
aataaa

SEQ ID NO: 62333 - DNA, 6 bp, Unknown
  misc_feature (1)..( 6): Matrix.003 file - promoters60/5663374
agtaaa

SEQ ID NO: 62334 - DNA, 7 bp, Unknown
  misc_feature (1)..( 7): Matrix.003 file - promoters60/5663374
aatcggg

SEQ ID NO: 62335 - DNA, 8 bp, Unknown
  misc_feature (1)..( 8): Matrix.003 file - promoters60/5663374
gaaacaaa

SEQ ID NO: 62336 - DNA, 9 bp, Unknown
  misc_feature (1)..( 9): Matrix.003 file - promoters60/5663374
aaagaaaag

SEQ ID NO: 62337 - DNA, 7 bp, Unknown
  misc_feature (1)..( 7): Matrix.003 file - promoters60/5663374
gtatata

SEQ ID NO: 62338 - DNA, 7 bp, Unknown
  misc_feature (1)..( 7): Matrix.003 file - promoters60/5663418
aatcaca

SEQ ID NO: 62339 - DNA, 7 bp, Unknown
  misc_feature (1)..( 7): Matrix.003 file - promoters60/5663418
tctttat

SEQ ID NO: 62340 - DNA, 7 bp, Unknown
  misc_feature (1)..( 7): Matrix.003 file - promoters60/5663418
gaaaaaa

SEQ ID NO: 62341 - DNA, 6 bp, Unknown
  misc_feature (1)..( 6): Matrix.003 file - promoters60/5663418
aaagaa

SEQ ID NO: 62342 - DNA, 6 bp, Unknown
  misc_feature (1)..( 6): Matrix.003 file - promoters60/5663418
ttgctc

SEQ ID NO: 62343 - DNA, 7 bp, Unknown
  misc_feature (1)..( 7): Matrix.003 file - promoters60/5663418
acttgga

SEQ ID NO: 62344 - DNA, 14 bp, Unknown
  misc_feature (1)..( 14): Matrix.003 file - promoters60/5663418
ggtctattctaaat

SEQ ID NO: 62345 - DNA, 7 bp, Unknown
  misc_feature (1)..( 7): Matrix.003 file - promoters60/5663418
tttaatt

SEQ ID NO: 62346 - DNA, 8 bp, Unknown
  misc_feature (1)..( 8): Matrix.003 file - promoters60/5663418
tctgattt

SEQ ID NO: 62347 - DNA, 6 bp, Unknown
  misc_feature (1)..( 6): Matrix.003 file - promoters60/5663418
ttttct

SEQ ID NO: 62348 - DNA, 9 bp, Unknown
  misc_feature (1)..( 9): Matrix.003 file - promoters60/5663418
tgagttgat

SEQ ID NO: 62349 - DNA, 6 bp, Unknown
  misc_feature (1)..( 6): Matrix.003 file - promoters60/5663418
cttttt

SEQ ID NO: 62350 - DNA, 8 bp, Unknown
  misc_feature (1)..( 8): Matrix.003 file - promoters60/5663418
ttgaattt

SEQ ID NO: 62351 - DNA, 8 bp, Unknown
  misc_feature (1)..( 8): Matrix.003 file - promoters60/5663418
tcaataca

SEQ ID NO: 62352 - DNA, 6 bp, Unknown
  misc_feature (1)..( 6): Matrix.003 file - promoters60/5663418
acaaat

SEQ ID NO: 62353 - DNA, 11 bp, Unknown
  misc_feature (1)..( 11): Matrix.003 file - promoters60/5663418
accaaatattg

SEQ ID NO: 62354 - DNA, 7 bp, Unknown
  misc_feature (1)..( 7): Matrix.003 file - promoters60/5663418
tttatgt

SEQ ID NO: 62355 - DNA, 6 bp, Unknown
  misc_feature (1)..( 6): Matrix.003 file - promoters60/5663418
agactt

SEQ ID NO: 62356 - DNA, 7 bp, Unknown
  misc_feature (1)..( 7): Matrix.003 file - promoters60/5663418
agaagct

SEQ ID NO: 62357 - DNA, 7 bp, Unknown
  misc_feature (1)..( 7): Matrix.003 file - promoters60/5663418
tataaaa

SEQ ID NO: 62358 - DNA, 10 bp, Unknown
  misc_feature (1)..( 10): Matrix.003 file - promoters60/5663433
ggcttagatt

SEQ ID NO: 62359 - DNA, 6 bp, Unknown
  misc_feature (1)..( 6): Matrix.003 file - promoters60/5663433
tttttt

SEQ ID NO: 62360 - DNA, 6 bp, Unknown
  misc_feature (1)..( 6): Matrix.003 file - promoters60/5663433
aaatat

SEQ ID NO: 62361 - DNA, 8 bp, Unknown
  misc_feature (1)..( 8): Matrix.003 file - promoters60/5663433
aaatatca

SEQ ID NO: 62362 - DNA, 6 bp, Unknown
  misc_feature (1)..( 6): Matrix.003 file - promoters60/5663433
acacat

SEQ ID NO: 62363 - DNA, 7 bp, Unknown
  misc_feature (1)..( 7): Matrix.003 file - promoters60/5663433
atgatta

SEQ ID NO: 62364 - DNA, 8 bp, Unknown
  misc_feature (1)..( 8): Matrix.003 file - promoters60/5663433
aatgggcc

SEQ ID NO: 62365 - DNA, 7 bp, Unknown
  misc_feature (1)..( 7): Matrix.003 file - promoters60/5663433
atgatat

SEQ ID NO: 62366 - DNA, 6 bp, Unknown
  misc_feature (1)..( 6): Matrix.003 file - promoters60/5663433
ttttaa

SEQ ID NO: 62367 - DNA, 7 bp, Unknown
  misc_feature (1)..( 7): Matrix.003 file - promoters60/5663433
tttgaga

SEQ ID NO: 62368 - DNA, 7 bp, Unknown
  misc_feature (1)..( 7): Matrix.003 file - promoters60/5663433
gtaaaat

SEQ ID NO: 62369 - DNA, 7 bp, Unknown
  misc_feature (1)..( 7): Matrix.003 file - promoters60/5663440
aaaagaa

SEQ ID NO: 62370 - DNA, 10 bp, Unknown
  misc_feature (1)..( 10): Matrix.003 file - promoters60/5663440
tctcttctct

SEQ ID NO: 62371 - DNA, 7 bp, Unknown
  misc_feature (1)..( 7): Matrix.003 file - promoters60/5663440
aagcaaa

SEQ ID NO: 62372 - DNA, 9 bp, Unknown
  misc_feature (1)..( 9): Matrix.003 file - promoters60/5663440
ttatattta

SEQ ID NO: 62373 - DNA, 9 bp, Unknown
  misc_feature (1)..( 9): Matrix.003 file - promoters60/5663474
taaagatgt

SEQ ID NO: 62374 - DNA, 8 bp, Unknown
  misc_feature (1)..( 8): Matrix.003 file - promoters60/5663474
ttgtgtta

SEQ ID NO: 62375 - DNA, 6 bp, Unknown
  misc_feature (1)..( 6): Matrix.003 file - promoters60/5663474
gttttt

SEQ ID NO: 62376 - DNA, 7 bp, Unknown
  misc_feature (1)..( 7): Matrix.003 file - promoters60/5663474
aatacaa

SEQ ID NO: 62377 - DNA, 7 bp, Unknown
  misc_feature (1)..( 7): Matrix.003 file - promoters60/5663474
aagaaag

SEQ ID NO: 62378 - DNA, 9 bp, Unknown
  misc_feature (1)..( 9): Matrix.003 file - promoters60/5663474
tctaatgaa

SEQ ID NO: 62379 - DNA, 7 bp, Unknown
  misc_feature (1)..( 7): Matrix.003 file - promoters60/5663474
tgaagaa

SEQ ID NO: 62380 - DNA, 9 bp, Unknown
  misc_feature (1)..( 9): Matrix.003 file - promoters60/5663474
tcaaaaaga

SEQ ID NO: 62381 - DNA, 7 bp, Unknown
  misc_feature (1)..( 7): Matrix.003 file - promoters60/5663474
tgtgttg

SEQ ID NO: 62382 - DNA, 6 bp, Unknown
  misc_feature (1)..( 6): Matrix.003 file - promoters60/5663474
atctcc

SEQ ID NO: 62383 - DNA, 7 bp, Unknown
  misc_feature (1)..( 7): Matrix.003 file - promoters60/5663474
gttggat

SEQ ID NO: 62384 - DNA, 7 bp, Unknown
  misc_feature (1)..( 7): Matrix.003 file - promoters60/5663474
catataa

SEQ ID NO: 62385 - DNA, 9 bp, Unknown
  misc_feature (1)..( 9): Matrix.003 file - promoters60/5663474
tcttataat

SEQ ID NO: 62386 - DNA, 8 bp, Unknown
  misc_feature (1)..( 8): Matrix.003 file - promoters60/5663478
caagcttt

SEQ ID NO: 62387 - DNA, 11 bp, Unknown
  misc_feature (1)..( 11): Matrix.003 file - promoters60/5663478
aaaatcataat

SEQ ID NO: 62388 - DNA, 10 bp, Unknown
  misc_feature (1)..( 10): Matrix.003 file - promoters60/5663478
tgattagtaa

SEQ ID NO: 62389 - DNA, 8 bp, Unknown
  misc_feature (1)..( 8): Matrix.003 file - promoters60/5663478
tttcttaa

SEQ ID NO: 62390 - DNA, 10 bp, Unknown
  misc_feature (1)..( 10): Matrix.003 file - promoters60/5663478
ctcaaacttg

SEQ ID NO: 62391 - DNA, 6 bp, Unknown
  misc_feature (1)..( 6): Matrix.003 file - promoters60/5663502
aaaaaa

SEQ ID NO: 62392 - DNA, 11 bp, Unknown
  misc_feature (1)..( 11): Matrix.003 file - promoters60/5663502
atttatcgaat

SEQ ID NO: 62393 - DNA, 7 bp, Unknown
  misc_feature (1)..( 7): Matrix.003 file - promoters60/5663502
caccgaa

SEQ ID NO: 62394 - DNA, 6 bp, Unknown
  misc_feature (1)..( 6): Matrix.003 file - promoters60/5663502
actttt

SEQ ID NO: 62395 - DNA, 6 bp, Unknown
  misc_feature (1)..( 6): Matrix.003 file - promoters60/5663502
ttttac

SEQ ID NO: 62396 - DNA, 6 bp, Unknown
  misc_feature (1)..( 6): Matrix.003 file - promoters60/5663502
tcttgt

SEQ ID NO: 62397 - DNA, 7 bp, Unknown
  misc_feature (1)..( 7): Matrix.003 file - promoters60/5663502
attcttc

SEQ ID NO: 62398 - DNA, 14 bp, Unknown
  misc_feature (1)..( 14): Matrix.003 file - promoters60/5663502
tcatttttttttgt

SEQ ID NO: 62399 - DNA, 10 bp, Unknown
  misc_feature (1)..( 10): Matrix.003 file - promoters60/5663502
aatttttttt

SEQ ID NO: 62400 - DNA, 10 bp, Unknown
  misc_feature (1)..( 10): Matrix.003 file - promoters60/5663502
aaacacatct

SEQ ID NO: 62401 - DNA, 9 bp, Unknown
  misc_feature (1)..( 9): Matrix.003 file - promoters60/5663502
catttcttt

SEQ ID NO: 62402 - DNA, 8 bp, Unknown
  misc_feature (1)..( 8): Matrix.003 file - promoters60/5663502
aattatat

SEQ ID NO: 62403 - DNA, 6 bp, Unknown
  misc_feature (1)..( 6): Matrix.003 file - promoters60/5663502
attctt

SEQ ID NO: 62404 - DNA, 6 bp, Unknown
  misc_feature (1)..( 6): Matrix.003 file - promoters60/5663502
aaatca

SEQ ID NO: 62405 - DNA, 7 bp, Unknown
  misc_feature (1)..( 7): Matrix.003 file - promoters60/5663502
ttaactt

SEQ ID NO: 62406 - DNA, 6 bp, Unknown
  misc_feature (1)..( 6): Matrix.003 file - promoters60/5663502
ttcaaa

SEQ ID NO: 62407 - DNA, 6 bp, Unknown
  misc_feature (1)..( 6): Matrix.003 file - promoters60/5663502
gtttct

SEQ ID NO: 62408 - DNA, 7 bp, Unknown
  misc_feature (1)..( 7): Matrix.003 file - promoters60/5663502
ttaaatt

SEQ ID NO: 62409 - DNA, 7 bp, Unknown
  misc_feature (1)..( 7): Matrix.003 file - promoters60/5663502
atatctt

SEQ ID NO: 62410 - DNA, 10 bp, Unknown
  misc_feature (1)..( 10): Matrix.003 file - promoters60/5663502
ttttaacctc

SEQ ID NO: 62411 - DNA, 8 bp, Unknown
  misc_feature (1)..( 8): Matrix.003 file - promoters60/5663577
gtacgaat

SEQ ID NO: 62412 - DNA, 8 bp, Unknown
  misc_feature (1)..( 8): Matrix.003 file - promoters60/5663577
atttcatt

SEQ ID NO: 62413 - DNA, 6 bp, Unknown
  misc_feature (1)..( 6): Matrix.003 file - promoters60/5663585
atcaaa

SEQ ID NO: 62414 - DNA, 12 bp, Unknown
  misc_feature (1)..( 12): Matrix.003 file - promoters60/5663585
attcttaaattt

SEQ ID NO: 62415 - DNA, 6 bp, Unknown
  misc_feature (1)..( 6): Matrix.003 file - promoters60/5663585
ccaaat

SEQ ID NO: 62416 - DNA, 6 bp, Unknown
  misc_feature (1)..( 6): Matrix.003 file - promoters60/5663585
attatt

SEQ ID NO: 62417 - DNA, 9 bp, Unknown
  misc_feature (1)..( 9): Matrix.003 file - promoters60/5663585
tattcaaac

SEQ ID NO: 62418 - DNA, 6 bp, Unknown
  misc_feature (1)..( 6): Matrix.003 file - promoters60/5663585
atttgg

SEQ ID NO: 62419 - DNA, 8 bp, Unknown
  misc_feature (1)..( 8): Matrix.003 file - promoters60/5663585
taacaagc

SEQ ID NO: 62420 - DNA, 8 bp, Unknown
  misc_feature (1)..( 8): Matrix.003 file - promoters60/5663585
ctttataa

SEQ ID NO: 62421 - DNA, 7 bp, Unknown
  misc_feature (1)..( 7): Matrix.003 file - promoters60/5663585
gtgaaaa

SEQ ID NO: 62422 - DNA, 6 bp, Unknown
  misc_feature (1)..( 6): Matrix.003 file - promoters60/5663585
agacaa

SEQ ID NO: 62423 - DNA, 6 bp, Unknown
  misc_feature (1)..( 6): Matrix.003 file - promoters60/5663585
ttctta

SEQ ID NO: 62424 - DNA, 8 bp, Unknown
  misc_feature (1)..( 8): Matrix.003 file - promoters60/5663585
ataaacaa

SEQ ID NO: 62425 - DNA, 7 bp, Unknown
  misc_feature (1)..( 7): Matrix.003 file - promoters60/5663585
aaatcca

SEQ ID NO: 62426 - DNA, 7 bp, Unknown
  misc_feature (1)..( 7): Matrix.003 file - promoters60/5663585
attattc

SEQ ID NO: 62427 - DNA, 7 bp, Unknown
  misc_feature (1)..( 7): Matrix.003 file - promoters60/5663585
atgatat

SEQ ID NO: 62428 - DNA, 7 bp, Unknown
  misc_feature (1)..( 7): Matrix.003 file - promoters60/5663585
aatattt

SEQ ID NO: 62429 - DNA, 8 bp, Unknown
  misc_feature (1)..( 8): Matrix.003 file - promoters60/5663585
aaagcttt

SEQ ID NO: 62430 - DNA, 7 bp, Unknown
  misc_feature (1)..( 7): Matrix.003 file - promoters60/5663585
acaaatt

SEQ ID NO: 62431 - DNA, 6 bp, Unknown
  misc_feature (1)..( 6): Matrix.003 file - promoters60/5663585
cacata

SEQ ID NO: 62432 - DNA, 6 bp, Unknown
  misc_feature (1)..( 6): Matrix.003 file - promoters60/5663585
aagttt

SEQ ID NO: 62433 - DNA, 6 bp, Unknown
  misc_feature (1)..( 6): Matrix.003 file - promoters60/5663585
ataaat

SEQ ID NO: 62434 - DNA, 8 bp, Unknown
  misc_feature (1)..( 8): Matrix.003 file - promoters60/5663585
attgtaat

SEQ ID NO: 62435 - DNA, 8 bp, Unknown
  misc_feature (1)..( 8): Matrix.003 file - promoters60/5663585
aattatac

SEQ ID NO: 62436 - DNA, 6 bp, Unknown
  misc_feature (1)..( 6): Matrix.003 file - promoters60/5663585
gtaaaa

SEQ ID NO: 62437 - DNA, 7 bp, Unknown
  misc_feature (1)..( 7): Matrix.003 file - promoters60/5663585
tttctat

SEQ ID NO: 62438 - DNA, 10 bp, Unknown
  misc_feature (1)..( 10): Matrix.003 file - promoters60/5663585
tataaaagtt

SEQ ID NO: 62439 - DNA, 9 bp, Unknown
  misc_feature (1)..( 9): Matrix.003 file - promoters60/5663595
gacaaaata

SEQ ID NO: 62440 - DNA, 6 bp, Unknown
  misc_feature (1)..( 6): Matrix.003 file - promoters60/5663595
aatact

SEQ ID NO: 62441 - DNA, 8 bp, Unknown
  misc_feature (1)..( 8): Matrix.003 file - promoters60/5663595
ttttattt

SEQ ID NO: 62442 - DNA, 7 bp, Unknown
  misc_feature (1)..( 7): Matrix.003 file - promoters60/5663595
tttgtct

SEQ ID NO: 62443 - DNA, 7 bp, Unknown
  misc_feature (1)..( 7): Matrix.003 file - promoters60/5663595
tttagtt

SEQ ID NO: 62444 - DNA, 8 bp, Unknown
  misc_feature (1)..( 8): Matrix.003 file - promoters60/5663595
tttacttg

SEQ ID NO: 62445 - DNA, 7 bp, Unknown
  misc_feature (1)..( 7): Matrix.003 file - promoters60/5663595
tttcttt

SEQ ID NO: 62446 - DNA, 8 bp, Unknown
  misc_feature (1)..( 8): Matrix.003 file - promoters60/5663595
tcagttta

SEQ ID NO: 62447 - DNA, 6 bp, Unknown
  misc_feature (1)..( 6): Matrix.003 file - promoters60/5663595
ttttca

SEQ ID NO: 62448 - DNA, 7 bp, Unknown
  misc_feature (1)..( 7): Matrix.003 file - promoters60/5663595
atttggt

SEQ ID NO: 62449 - DNA, 7 bp, Unknown
  misc_feature (1)..( 7): Matrix.003 file - promoters60/5663595
aaaatct

SEQ ID NO: 62450 - DNA, 15 bp, Unknown
  misc_feature (1)..( 15): Matrix.003 file - promoters60/5663595
actaaaatccaaaat

SEQ ID NO: 62451 - DNA, 6 bp, Unknown
  misc_feature (1)..( 6): Matrix.003 file - promoters60/5663595
ttttct

SEQ ID NO: 62452 - DNA, 9 bp, Unknown
  misc_feature (1)..( 9): Matrix.003 file - promoters60/5663595
aaaatgaat

SEQ ID NO: 62453 - DNA, 6 bp, Unknown
  misc_feature (1)..( 6): Matrix.003 file - promoters60/5663595
tctttt

SEQ ID NO: 62454 - DNA, 10 bp, Unknown
  misc_feature (1)..( 10): Matrix.003 file - promoters60/5663595
tttcattttt

SEQ ID NO: 62455 - DNA, 6 bp, Unknown
  misc_feature (1)..( 6): Matrix.003 file - promoters60/5663595
tttaac

SEQ ID NO: 62456 - DNA, 7 bp, Unknown
  misc_feature (1)..( 7): Matrix.003 file - promoters60/5663595
gacataa

SEQ ID NO: 62457 - DNA, 8 bp, Unknown
  misc_feature (1)..( 8): Matrix.003 file - promoters60/5663595
ttccaaaa

SEQ ID NO: 62458 - DNA, 6 bp, Unknown
  misc_feature (1)..( 6): Matrix.003 file - promoters60/5663595
aaaatt

SEQ ID NO: 62459 - DNA, 6 bp, Unknown
  misc_feature (1)..( 6): Matrix.003 file - promoters60/5663595
aattaa

SEQ ID NO: 62460 - DNA, 8 bp, Unknown
  misc_feature (1)..( 8): Matrix.003 file - promoters60/5663595
aaaaaatt

SEQ ID NO: 62461 - DNA, 6 bp, Unknown
  misc_feature (1)..( 6): Matrix.003 file - promoters60/5663614
aatttg

SEQ ID NO: 62462 - DNA, 7 bp, Unknown
  misc_feature (1)..( 7): Matrix.003 file - promoters60/5663614
cttataa

SEQ ID NO: 62463 - DNA, 6 bp, Unknown
  misc_feature (1)..( 6): Matrix.003 file - promoters60/5663614
aataat

SEQ ID NO: 62464 - DNA, 9 bp, Unknown
  misc_feature (1)..( 9): Matrix.003 file - promoters60/5663614
aaaacaatt

SEQ ID NO: 62465 - DNA, 6 bp, Unknown
  misc_feature (1)..( 6): Matrix.003 file - promoters60/5663614
agcaaa

SEQ ID NO: 62466 - DNA, 7 bp, Unknown
  misc_feature (1)..( 7): Matrix.003 file - promoters60/5663614
aaccaaa

SEQ ID NO: 62467 - DNA, 12 bp, Unknown
  misc_feature (1)..( 12): Matrix.003 file - promoters60/5663614
aaaataaatcaa

SEQ ID NO: 62468 - DNA, 6 bp, Unknown
  misc_feature (1)..( 6): Matrix.003 file - promoters60/5663614
ttcatt

SEQ ID NO: 62469 - DNA, 9 bp, Unknown
  misc_feature (1)..( 9): Matrix.003 file - promoters60/5663614
atacaattt

SEQ ID NO: 62470 - DNA, 8 bp, Unknown
  misc_feature (1)..( 8): Matrix.003 file - promoters60/5663614
aaacttta

SEQ ID NO: 62471 - DNA, 13 bp, Unknown
  misc_feature (1)..( 13): Matrix.003 file - promoters60/5663614
atcttcttacttt

SEQ ID NO: 62472 - DNA, 6 bp, Unknown
  misc_feature (1)..( 6): Matrix.003 file - promoters60/5663614
aaaata

SEQ ID NO: 62473 - DNA, 6 bp, Unknown
  misc_feature (1)..( 6): Matrix.003 file - promoters60/5663614
tggtct

SEQ ID NO: 62474 - DNA, 6 bp, Unknown
  misc_feature (1)..( 6): Matrix.003 file - promoters60/5663614
cccaaa

SEQ ID NO: 62475 - DNA, 11 bp, Unknown
  misc_feature (1)..( 11): Matrix.003 file - promoters60/5663614
caaaaggacca

SEQ ID NO: 62476 - DNA, 6 bp, Unknown
  misc_feature (1)..( 6): Matrix.003 file - promoters60/5663614
tcagat

SEQ ID NO: 62477 - DNA, 7 bp, Unknown
  misc_feature (1)..( 7): Matrix.003 file - promoters60/5663614
tttgttt

SEQ ID NO: 62478 - DNA, 6 bp, Unknown
  misc_feature (1)..( 6): Matrix.003 file - promoters60/5663614
ttctta

SEQ ID NO: 62479 - DNA, 7 bp, Unknown
  misc_feature (1)..( 7): Matrix.003 file - promoters60/5663614
aaaataa

SEQ ID NO: 62480 - DNA, 6 bp, Unknown
  misc_feature (1)..( 6): Matrix.003 file - promoters60/5663614
caatat

SEQ ID NO: 62481 - DNA, 8 bp, Unknown
  misc_feature (1)..( 8): Matrix.003 file - promoters60/5663614
tattaata

SEQ ID NO: 62482 - DNA, 8 bp, Unknown
  misc_feature (1)..( 8): Matrix.003 file - promoters60/5663614
tttggccc

SEQ ID NO: 62483 - DNA, 7 bp, Unknown
  misc_feature (1)..( 7): Matrix.003 file - promoters60/5663614
caaaatt

SEQ ID NO: 62484 - DNA, 7 bp, Unknown
  misc_feature (1)..( 7): Matrix.003 file - promoters60/5663614
aatattt

SEQ ID NO: 62485 - DNA, 8 bp, Unknown
  misc_feature (1)..( 8): Matrix.003 file - promoters60/5663625
atgtttat

SEQ ID NO: 62486 - DNA, 11 bp, Unknown
  misc_feature (1)..( 11): Matrix.003 file - promoters60/5663625
tttttattttc

SEQ ID NO: 62487 - DNA, 6 bp, Unknown
  misc_feature (1)..( 6): Matrix.003 file - promoters60/5663625
tattat

SEQ ID NO: 62488 - DNA, 7 bp, Unknown
  misc_feature (1)..( 7): Matrix.003 file - promoters60/5663625
aaataat

SEQ ID NO: 62489 - DNA, 11 bp, Unknown
  misc_feature (1)..( 11): Matrix.003 file - promoters60/5663625
gattttttata

SEQ ID NO: 62490 - DNA, 12 bp, Unknown
  misc_feature (1)..( 12): Matrix.003 file - promoters60/5663625
atttataaaatt

SEQ ID NO: 62491 - DNA, 7 bp, Unknown
  misc_feature (1)..( 7): Matrix.003 file - promoters60/5663698
tgcataa

SEQ ID NO: 62492 - DNA, 9 bp, Unknown
  misc_feature (1)..( 9): Matrix.003 file - promoters60/5663698
tcaaaaact

SEQ ID NO: 62493 - DNA, 7 bp, Unknown
  misc_feature (1)..( 7): Matrix.003 file - promoters60/5663698
aacaaat

SEQ ID NO: 62494 - DNA, 6 bp, Unknown
  misc_feature (1)..( 6): Matrix.003 file - promoters60/5663698
ttttaa

SEQ ID NO: 62495 - DNA, 6 bp, Unknown
  misc_feature (1)..( 6): Matrix.003 file - promoters60/5663698
ccaatt

SEQ ID NO: 62496 - DNA, 9 bp, Unknown
  misc_feature (1)..( 9): Matrix.003 file - promoters60/5663698
tataatgaa

SEQ ID NO: 62497 - DNA, 8 bp, Unknown
  misc_feature (1)..( 8): Matrix.003 file - promoters60/5663698
agtgatca

SEQ ID NO: 62498 - DNA, 10 bp, Unknown
  misc_feature (1)..( 10): Matrix.003 file - promoters60/5663698
cttacaattt

SEQ ID NO: 62499 - DNA, 6 bp, Unknown
  misc_feature (1)..( 6): Matrix.003 file - promoters60/5663698
tttgta

SEQ ID NO: 62500 - DNA, 6 bp, Unknown
  misc_feature (1)..( 6): Matrix.003 file - promoters60/5663698
aatata

SEQ ID NO: 62501 - DNA, 6 bp, Unknown
  misc_feature (1)..( 6): Matrix.003 file - promoters60/5663698
aatggt

SEQ ID NO: 62502 - DNA, 8 bp, Unknown
  misc_feature (1)..( 8): Matrix.003 file - promoters60/5663698
tcaaattt

SEQ ID NO: 62503 - DNA, 7 bp, Unknown
  misc_feature (1)..( 7): Matrix.003 file - promoters60/5663698
aagaaca

SEQ ID NO: 62504 - DNA, 7 bp, Unknown
  misc_feature (1)..( 7): Matrix.003 file - promoters60/5663698
gttagtg

SEQ ID NO: 62505 - DNA, 6 bp, Unknown
  misc_feature (1)..( 6): Matrix.003 file - promoters60/5663698
ttttgc

SEQ ID NO: 62506 - DNA, 9 bp, Unknown
  misc_feature (1)..( 9): Matrix.003 file - promoters60/5663698
tgagaattt

SEQ ID NO: 62507 - DNA, 9 bp, Unknown
  misc_feature (1)..( 9): Matrix.003 file - promoters60/5663698
gatgttgta

SEQ ID NO: 62508 - DNA, 8 bp, Unknown
  misc_feature (1)..( 8): Matrix.003 file - promoters60/5663698
tctatctg

SEQ ID NO: 62509 - DNA, 11 bp, Unknown
  misc_feature (1)..( 11): Matrix.003 file - promoters60/5663706
aaaaattctaa

SEQ ID NO: 62510 - DNA, 7 bp, Unknown
  misc_feature (1)..( 7): Matrix.003 file - promoters60/5663706
aaaattc

SEQ ID NO: 62511 - DNA, 8 bp, Unknown
  misc_feature (1)..( 8): Matrix.003 file - promoters60/5663706
gtaggtag

SEQ ID NO: 62512 - DNA, 13 bp, Unknown
  misc_feature (1)..( 13): Matrix.003 file - promoters60/5663706
gttttatttaata

SEQ ID NO: 62513 - DNA, 7 bp, Unknown
  misc_feature (1)..( 7): Matrix.003 file - promoters60/5663706
gtaaaaa

SEQ ID NO: 62514 - DNA, 10 bp, Unknown
  misc_feature (1)..( 10): Matrix.003 file - promoters60/5663706
ttatattctt

SEQ ID NO: 62515 - DNA, 7 bp, Unknown
  misc_feature (1)..( 7): Matrix.003 file - promoters60/5663706
aaattaa

SEQ ID NO: 62516 - DNA, 11 bp, Unknown
  misc_feature (1)..( 11): Matrix.003 file - promoters60/5663706
ttgaatatttc

SEQ ID NO: 62517 - DNA, 7 bp, Unknown
  misc_feature (1)..( 7): Matrix.003 file - promoters60/5663706
acactta

SEQ ID NO: 62518 - DNA, 10 bp, Unknown
  misc_feature (1)..( 10): Matrix.003 file - promoters60/5663706
taattaattt

SEQ ID NO: 62519 - DNA, 8 bp, Unknown
  misc_feature (1)..( 8): Matrix.003 file - promoters60/5663710
catgaata

SEQ ID NO: 62520 - DNA, 10 bp, Unknown
  misc_feature (1)..( 10): Matrix.003 file - promoters60/5663710
agataatctt

SEQ ID NO: 62521 - DNA, 11 bp, Unknown
  misc_feature (1)..( 11): Matrix.003 file - promoters60/5663710
ataaaattgaa

SEQ ID NO: 62522 - DNA, 9 bp, Unknown
  misc_feature (1)..( 9): Matrix.003 file - promoters60/5663744
gttttactt

SEQ ID NO: 62523 - DNA, 8 bp, Unknown
  misc_feature (1)..( 8): Matrix.003 file - promoters60/5663744
ctagtgat

SEQ ID NO: 62524 - DNA, 8 bp, Unknown
  misc_feature (1)..( 8): Matrix.003 file - promoters60/5663744
aaacatgg

SEQ ID NO: 62525 - DNA, 9 bp, Unknown
  misc_feature (1)..( 9): Matrix.003 file - promoters60/5663744
gtatagatt

SEQ ID NO: 62526 - DNA, 8 bp, Unknown
  misc_feature (1)..( 8): Matrix.003 file - promoters60/5663744
gatacgtg

SEQ ID NO: 62527 - DNA, 10 bp, Unknown
  misc_feature (1)..( 10): Matrix.003 file - promoters60/5663744
gaactagata

SEQ ID NO: 62528 - DNA, 6 bp, Unknown
  misc_feature (1)..( 6): Matrix.003 file - promoters60/5663744
ttgatt

SEQ ID NO: 62529 - DNA, 9 bp, Unknown
  misc_feature (1)..( 9): Matrix.003 file - promoters60/5663744
taacttttt

SEQ ID NO: 62530 - DNA, 7 bp, Unknown
  misc_feature (1)..( 7): Matrix.003 file - promoters60/5663744
ataaaga

SEQ ID NO: 62531 - DNA, 7 bp, Unknown
  misc_feature (1)..( 7): Matrix.003 file - promoters60/5663744
tccagaa

SEQ ID NO: 62532 - DNA, 8 bp, Unknown
  misc_feature (1)..( 8): Matrix.003 file - promoters60/5663744
aatcaaag

SEQ ID NO: 62533 - DNA, 7 bp, Unknown
  misc_feature (1)..( 7): Matrix.003 file - promoters60/5663744
aaacaca

SEQ ID NO: 62534 - DNA, 7 bp, Unknown
  misc_feature (1)..( 7): Matrix.003 file - promoters60/5663744
aaagatc

SEQ ID NO: 62535 - DNA, 7 bp, Unknown
  misc_feature (1)..( 7): Matrix.003 file - promoters60/5663744
aaacaaa

SEQ ID NO: 62536 - DNA, 7 bp, Unknown
  misc_feature (1)..( 7): Matrix.003 file - promoters60/5663748
tttttat

SEQ ID NO: 62537 - DNA, 6 bp, Unknown
  misc_feature (1)..( 6): Matrix.003 file - promoters60/5663748
agaaat

SEQ ID NO: 62538 - DNA, 7 bp, Unknown
  misc_feature (1)..( 7): Matrix.003 file - promoters60/5663748
tttatct

SEQ ID NO: 62539 - DNA, 8 bp, Unknown
  misc_feature (1)..( 8): Matrix.003 file - promoters60/5663748
ctttactt

SEQ ID NO: 62540 - DNA, 8 bp, Unknown
  misc_feature (1)..( 8): Matrix.003 file - promoters60/5663748
aaaaataa

SEQ ID NO: 62541 - DNA, 7 bp, Unknown
  misc_feature (1)..( 7): Matrix.003 file - promoters60/5663748
aaacaaa

SEQ ID NO: 62542 - DNA, 9 bp, Unknown
  misc_feature (1)..( 9): Matrix.003 file - promoters60/5663748
aagaaaata

SEQ ID NO: 62543 - DNA, 7 bp, Unknown
  misc_feature (1)..( 7): Matrix.003 file - promoters60/5663748
aaatttt

SEQ ID NO: 62544 - DNA, 8 bp, Unknown
  misc_feature (1)..( 8): Matrix.003 file - promoters60/5663758
catttttt

SEQ ID NO: 62545 - DNA, 10 bp, Unknown
  misc_feature (1)..( 10): Matrix.003 file - promoters60/5663758
ctaaaattat

SEQ ID NO: 62546 - DNA, 7 bp, Unknown
  misc_feature (1)..( 7): Matrix.003 file - promoters60/5663758
ttttttt

SEQ ID NO: 62547 - DNA, 9 bp, Unknown
  misc_feature (1)..( 9): Matrix.003 file - promoters60/5663758
tcaaaatta

SEQ ID NO: 62548 - DNA, 8 bp, Unknown
  misc_feature (1)..( 8): Matrix.003 file - promoters60/5663758
ttgtgttt

SEQ ID NO: 62549 - DNA, 10 bp, Unknown
  misc_feature (1)..( 10): Matrix.003 file - promoters60/5663758
ctaaaataat

SEQ ID NO: 62550 - DNA, 9 bp, Unknown
  misc_feature (1)..( 9): Matrix.003 file - promoters60/5663758
atctaaaaa

SEQ ID NO: 62551 - DNA, 7 bp, Unknown
  misc_feature (1)..( 7): Matrix.003 file - promoters60/5663785
aaaataa

SEQ ID NO: 62552 - DNA, 5 bp, Unknown
  misc_feature (1)..( 5): Matrix.003 file - promoters60/5663785
taaaa

SEQ ID NO: 62553 - DNA, 9 bp, Unknown
  misc_feature (1)..( 9): Matrix.003 file - promoters60/5663785
ctgttattt

SEQ ID NO: 62554 - DNA, 8 bp, Unknown
  misc_feature (1)..( 8): Matrix.003 file - promoters60/5663785
aaaattaa

SEQ ID NO: 62555 - DNA, 10 bp, Unknown
  misc_feature (1)..( 10): Matrix.003 file - promoters60/5663785
taaatagaaa

SEQ ID NO: 62556 - DNA, 9 bp, Unknown
  misc_feature (1)..( 9): Matrix.003 file - promoters60/5663785
aaaataaaa

SEQ ID NO: 62557 - DNA, 11 bp, Unknown
  misc_feature (1)..( 11): Matrix.003 file - promoters60/5663785
tataaccaaaa

SEQ ID NO: 62558 - DNA, 8 bp, Unknown
  misc_feature (1)..( 8): Matrix.003 file - promoters60/5663805
tttgtata

SEQ ID NO: 62559 - DNA, 13 bp, Unknown
  misc_feature (1)..( 13): Matrix.003 file - promoters60/5663805
tcacaataaaaat

SEQ ID NO: 62560 - DNA, 14 bp, Unknown
  misc_feature (1)..( 14): Matrix.003 file - promoters60/5663805
acttataataaata

SEQ ID NO: 62561 - DNA, 10 bp, Unknown
  misc_feature (1)..( 10): Matrix.003 file - promoters60/5663805
ggtttttgta

SEQ ID NO: 62562 - DNA, 14 bp, Unknown
  misc_feature (1)..( 14): Matrix.003 file - promoters60/5663805
acatataataaaaa

SEQ ID NO: 62563 - DNA, 10 bp, Unknown
  misc_feature (1)..( 10): Matrix.003 file - promoters60/5663805
atataataaa

SEQ ID NO: 62564 - DNA, 10 bp, Unknown
  misc_feature (1)..( 10): Matrix.003 file - promoters60/5663805
aaataatgaa

SEQ ID NO: 62565 - DNA, 14 bp, Unknown
  misc_feature (1)..( 14): Matrix.003 file - promoters60/5663805
acttataatataat

SEQ ID NO: 62566 - DNA, 11 bp, Unknown
  misc_feature (1)..( 11): Matrix.003 file - promoters60/5663805
tcctattatat

SEQ ID NO: 62567 - DNA, 6 bp, Unknown
  misc_feature (1)..( 6): Matrix.003 file - promoters60/5663820
ttatca

SEQ ID NO: 62568 - DNA, 8 bp, Unknown
  misc_feature (1)..( 8): Matrix.003 file - promoters60/5663820
ttttattt

SEQ ID NO: 62569 - DNA, 8 bp, Unknown
  misc_feature (1)..( 8): Matrix.003 file - promoters60/5663820
cctacttt

SEQ ID NO: 62570 - DNA, 7 bp, Unknown
  misc_feature (1)..( 7): Matrix.003 file - promoters60/5663820
tttggtt

SEQ ID NO: 62571 - DNA, 7 bp, Unknown
  misc_feature (1)..( 7): Matrix.003 file - promoters60/5663820
tttctct

SEQ ID NO: 62572 - DNA, 6 bp, Unknown
  misc_feature (1)..( 6): Matrix.003 file - promoters60/5663820
cactta

SEQ ID NO: 62573 - DNA, 6 bp, Unknown
  misc_feature (1)..( 6): Matrix.003 file - promoters60/5663820
gaaagt

SEQ ID NO: 62574 - DNA, 9 bp, Unknown
  misc_feature (1)..( 9): Matrix.003 file - promoters60/5663820
ttgggatcc

SEQ ID NO: 62575 - DNA, 8 bp, Unknown
  misc_feature (1)..( 8): Matrix.003 file - promoters60/5663820
tatgtgtg

SEQ ID NO: 62576 - DNA, 6 bp, Unknown
  misc_feature (1)..( 6): Matrix.003 file - promoters60/5663820
ttttca

SEQ ID NO: 62577 - DNA, 7 bp, Unknown
  misc_feature (1)..( 7): Matrix.003 file - promoters60/5663820
gttcaaa

SEQ ID NO: 62578 - DNA, 7 bp, Unknown
  misc_feature (1)..( 7): Matrix.003 file - promoters60/5663820
gcaatga

SEQ ID NO: 62579 - DNA, 6 bp, Unknown
  misc_feature (1)..( 6): Matrix.003 file - promoters60/5663820
tgtttt

SEQ ID NO: 62580 - DNA, 6 bp, Unknown
  misc_feature (1)..( 6): Matrix.003 file - promoters60/5663820
accttc

SEQ ID NO: 62581 - DNA, 6 bp, Unknown
  misc_feature (1)..( 6): Matrix.003 file - promoters60/5663820
tctttt

SEQ ID NO: 62582 - DNA, 7 bp, Unknown
  misc_feature (1)..( 7): Matrix.003 file - promoters60/5663820
cttgatt

SEQ ID NO: 62583 - DNA, 7 bp, Unknown
  misc_feature (1)..( 7): Matrix.003 file - promoters60/5663820
aatataa

SEQ ID NO: 62584 - DNA, 7 bp, Unknown
  misc_feature (1)..( 7): Matrix.003 file - promoters60/5663820
tatcttt

SEQ ID NO: 62585 - DNA, 7 bp, Unknown
  misc_feature (1)..( 7): Matrix.003 file - promoters60/5663820
tttcttt

SEQ ID NO: 62586 - DNA, 7 bp, Unknown
  misc_feature (1)..( 7): Matrix.003 file - promoters60/5663820
aataaac

SEQ ID NO: 62587 - DNA, 8 bp, Unknown
  misc_feature (1)..( 8): Matrix.003 file - promoters60/5663820
ccgtgtta

SEQ ID NO: 62588 - DNA, 11 bp, Unknown
  misc_feature (1)..( 11): Matrix.003 file - promoters60/5663862
caaaagaaaat

SEQ ID NO: 62589 - DNA, 9 bp, Unknown
  misc_feature (1)..( 9): Matrix.003 file - promoters60/5663862
taacgaaat

SEQ ID NO: 62590 - DNA, 7 bp, Unknown
  misc_feature (1)..( 7): Matrix.003 file - promoters60/5663862
caaaacc

SEQ ID NO: 62591 - DNA, 9 bp, Unknown
  misc_feature (1)..( 9): Matrix.003 file - promoters60/5663934
catataaaa

SEQ ID NO: 62592 - DNA, 7 bp, Unknown
  misc_feature (1)..( 7): Matrix.003 file - promoters60/5663934
tttgttt

SEQ ID NO: 62593 - DNA, 10 bp, Unknown
  misc_feature (1)..( 10): Matrix.003 file - promoters60/5663942
gagagatttt

SEQ ID NO: 62594 - DNA, 7 bp, Unknown
  misc_feature (1)..( 7): Matrix.003 file - promoters60/5663942
attaggg

SEQ ID NO: 62595 - DNA, 7 bp, Unknown
  misc_feature (1)..( 7): Matrix.003 file - promoters60/5663942
tttagat

SEQ ID NO: 62596 - DNA, 9 bp, Unknown
  misc_feature (1)..( 9): Matrix.003 file - promoters60/5663942
gagaagaaa

SEQ ID NO: 62597 - DNA, 6 bp, Unknown
  misc_feature (1)..( 6): Matrix.003 file - promoters60/5663942
agtgag

SEQ ID NO: 62598 - DNA, 6 bp, Unknown
  misc_feature (1)..( 6): Matrix.003 file - promoters60/5663942
gagaga

SEQ ID NO: 62599 - DNA, 7 bp, Unknown
  misc_feature (1)..( 7): Matrix.003 file - promoters60/5663942
taaataa

SEQ ID NO: 62600 - DNA, 6 bp, Unknown
  misc_feature (1)..( 6): Matrix.003 file - promoters60/5663942
tcaccg

SEQ ID NO: 62601 - DNA, 6 bp, Unknown
  misc_feature (1)..( 6): Matrix.003 file - promoters60/5663942
aggaga

SEQ ID NO: 62602 - DNA, 7 bp, Unknown
  misc_feature (1)..( 7): Matrix.003 file - promoters60/5663942
acgacca

SEQ ID NO: 62603 - DNA, 6 bp, Unknown
  misc_feature (1)..( 6): Matrix.003 file - promoters60/5663942
agagaa

SEQ ID NO: 62604 - DNA, 6 bp, Unknown
  misc_feature (1)..( 6): Matrix.003 file - promoters60/5663942
tgcaaa

SEQ ID NO: 62605 - DNA, 7 bp, Unknown
  misc_feature (1)..( 7): Matrix.003 file - promoters60/5663942
caattaa

SEQ ID NO: 62606 - DNA, 9 bp, Unknown
  misc_feature (1)..( 9): Matrix.003 file - promoters60/5663942
caatccacg

SEQ ID NO: 62607 - DNA, 7 bp, Unknown
  misc_feature (1)..( 7): Matrix.003 file - promoters60/5663942
agtattg

SEQ ID NO: 62608 - DNA, 7 bp, Unknown
  misc_feature (1)..( 7): Matrix.003 file - promoters60/5663942
tatgaaa

SEQ ID NO: 62609 - DNA, 8 bp, Unknown
  misc_feature (1)..( 8): Matrix.003 file - promoters60/5663942
ttatatat

SEQ ID NO: 62610 - DNA, 6 bp, Unknown
  misc_feature (1)..( 6): Matrix.003 file - promoters60/5663942
actcac

SEQ ID NO: 62611 - DNA, 6 bp, Unknown
  misc_feature (1)..( 6): Matrix.003 file - promoters60/5663942
gagaat

SEQ ID NO: 62612 - DNA, 9 bp, Unknown
  misc_feature (1)..( 9): Matrix.003 file - promoters60/5663942
cagatttca

SEQ ID NO: 62613 - DNA, 7 bp, Unknown
  misc_feature (1)..( 7): Matrix.003 file - promoters60/5663942
aaaatat

SEQ ID NO: 62614 - DNA, 6 bp, Unknown
  misc_feature (1)..( 6): Matrix.003 file - promoters60/5663942
ataaaa

SEQ ID NO: 62615 - DNA, 7 bp, Unknown
  misc_feature (1)..( 7): Matrix.003 file - promoters60/5663942
gttgata

SEQ ID NO: 62616 - DNA, 8 bp, Unknown
  misc_feature (1)..( 8): Matrix.003 file - promoters60/5663946
taaagaaa

SEQ ID NO: 62617 - DNA, 8 bp, Unknown
  misc_feature (1)..( 8): Matrix.003 file - promoters60/5663946
ttttcttc

SEQ ID NO: 62618 - DNA, 10 bp, Unknown
  misc_feature (1)..( 10): Matrix.003 file - promoters60/5663950
tagaaaaatt

SEQ ID NO: 62619 - DNA, 11 bp, Unknown
  misc_feature (1)..( 11): Matrix.003 file - promoters60/5663950
acctttttata

SEQ ID NO: 62620 - DNA, 12 bp, Unknown
  misc_feature (1)..( 12): Matrix.003 file - promoters60/5663950
attatcttcaat

SEQ ID NO: 62621 - DNA, 9 bp, Unknown
  misc_feature (1)..( 9): Matrix.003 file - promoters60/5663954
aattcttag

SEQ ID NO: 62622 - DNA, 6 bp, Unknown
  misc_feature (1)..( 6): Matrix.003 file - promoters60/5663962
gcagta

SEQ ID NO: 62623 - DNA, 7 bp, Unknown
  misc_feature (1)..( 7): Matrix.003 file - promoters60/5663962
accagca

SEQ ID NO: 62624 - DNA, 6 bp, Unknown
  misc_feature (1)..( 6): Matrix.003 file - promoters60/5663962
aaccga

SEQ ID NO: 62625 - DNA, 6 bp, Unknown
  misc_feature (1)..( 6): Matrix.003 file - promoters60/5663962
aaccgg

SEQ ID NO: 62626 - DNA, 7 bp, Unknown
  misc_feature (1)..( 7): Matrix.003 file - promoters60/5663962
gatacca

SEQ ID NO: 62627 - DNA, 9 bp, Unknown
  misc_feature (1)..( 9): Matrix.003 file - promoters60/5663962
ctccgccga

SEQ ID NO: 62628 - DNA, 7 bp, Unknown
  misc_feature (1)..( 7): Matrix.003 file - promoters60/5663962
tcataat

SEQ ID NO: 62629 - DNA, 6 bp, Unknown
  misc_feature (1)..( 6): Matrix.003 file - promoters60/5663962
attgtt

SEQ ID NO: 62630 - DNA, 9 bp, Unknown
  misc_feature (1)..( 9): Matrix.003 file - promoters60/5663970
aaaatttca

SEQ ID NO: 62631 - DNA, 10 bp, Unknown
  misc_feature (1)..( 10): Matrix.003 file - promoters60/5663970
tctgaatttc

SEQ ID NO: 62632 - DNA, 13 bp, Unknown
  misc_feature (1)..( 13): Matrix.003 file - promoters60/5663970
aggataattgata

SEQ ID NO: 62633 - DNA, 7 bp, Unknown
  misc_feature (1)..( 7): Matrix.003 file - promoters60/5663985
tgtttaa

SEQ ID NO: 62634 - DNA, 8 bp, Unknown
  misc_feature (1)..( 8): Matrix.003 file - promoters60/5663985
gttaactt

SEQ ID NO: 62635 - DNA, 8 bp, Unknown
  misc_feature (1)..( 8): Matrix.003 file - promoters60/5663985
tattttga

SEQ ID NO: 62636 - DNA, 8 bp, Unknown
  misc_feature (1)..( 8): Matrix.003 file - promoters60/5663985
ttagtgtt

SEQ ID NO: 62637 - DNA, 15 bp, Unknown
  misc_feature (1)..( 15): Matrix.003 file - promoters60/5663985
aatcaaggagcaatt

SEQ ID NO: 62638 - DNA, 7 bp, Unknown
  misc_feature (1)..( 7): Matrix.003 file - promoters60/5663985
gatacag

SEQ ID NO: 62639 - DNA, 6 bp, Unknown
  misc_feature (1)..( 6): Matrix.003 file - promoters60/5663985
ttcagc

SEQ ID NO: 62640 - DNA, 6 bp, Unknown
  misc_feature (1)..( 6): Matrix.003 file - promoters60/5663985
tcttgt

SEQ ID NO: 62641 - DNA, 6 bp, Unknown
  misc_feature (1)..( 6): Matrix.003 file - promoters60/5663985
cttctt

SEQ ID NO: 62642 - DNA, 6 bp, Unknown
  misc_feature (1)..( 6): Matrix.003 file - promoters60/5663985
caaaaa

SEQ ID NO: 62643 - DNA, 7 bp, Unknown
  misc_feature (1)..( 7): Matrix.003 file - promoters60/5663985
tatgggc

SEQ ID NO: 62644 - DNA, 6 bp, Unknown
  misc_feature (1)..( 6): Matrix.003 file - promoters60/5663985
gggctt

SEQ ID NO: 62645 - DNA, 9 bp, Unknown
  misc_feature (1)..( 9): Matrix.003 file - promoters60/5663985
ttttggtta

SEQ ID NO: 62646 - DNA, 6 bp, Unknown
  misc_feature (1)..( 6): Matrix.003 file - promoters60/5663985
tttttg

SEQ ID NO: 62647 - DNA, 9 bp, Unknown
  misc_feature (1)..( 9): Matrix.003 file - promoters60/5663985
tttcaaaag

SEQ ID NO: 62648 - DNA, 7 bp, Unknown
  misc_feature (1)..( 7): Matrix.003 file - promoters60/5663985
aagagaa

SEQ ID NO: 62649 - DNA, 10 bp, Unknown
  misc_feature (1)..( 10): Matrix.003 file - promoters60/5663996
tcaaaactta

SEQ ID NO: 62650 - DNA, 7 bp, Unknown
  misc_feature (1)..( 7): Matrix.003 file - promoters60/5663996
taagaac

SEQ ID NO: 62651 - DNA, 7 bp, Unknown
  misc_feature (1)..( 7): Matrix.003 file - promoters60/5664022
aacttaa

SEQ ID NO: 62652 - DNA, 6 bp, Unknown
  misc_feature (1)..( 6): Matrix.003 file - promoters60/5664022
caaaac

SEQ ID NO: 62653 - DNA, 6 bp, Unknown
  misc_feature (1)..( 6): Matrix.003 file - promoters60/5664022
ttcaaa

SEQ ID NO: 62654 - DNA, 8 bp, Unknown
  misc_feature (1)..( 8): Matrix.003 file - promoters60/5664022
ttgtaaca

SEQ ID NO: 62655 - DNA, 6 bp, Unknown
  misc_feature (1)..( 6): Matrix.003 file - promoters60/5664022
cttttc

SEQ ID NO: 62656 - DNA, 8 bp, Unknown
  misc_feature (1)..( 8): Matrix.003 file - promoters60/5664022
aataaaaa

SEQ ID NO: 62657 - DNA, 9 bp, Unknown
  misc_feature (1)..( 9): Matrix.003 file - promoters60/5664022
acccaaaaa

SEQ ID NO: 62658 - DNA, 7 bp, Unknown
  misc_feature (1)..( 7): Matrix.003 file - promoters60/5664022
ctagcaa

SEQ ID NO: 62659 - DNA, 7 bp, Unknown
  misc_feature (1)..( 7): Matrix.003 file - promoters60/5664022
taaaccc

SEQ ID NO: 62660 - DNA, 7 bp, Unknown
  misc_feature (1)..( 7): Matrix.003 file - promoters60/5664022
ataactt

SEQ ID NO: 62661 - DNA, 7 bp, Unknown
  misc_feature (1)..( 7): Matrix.003 file - promoters60/5664022
attggaa

SEQ ID NO: 62662 - DNA, 7 bp, Unknown
  misc_feature (1)..( 7): Matrix.003 file - promoters60/5664022
tactaaa

SEQ ID NO: 62663 - DNA, 9 bp, Unknown
  misc_feature (1)..( 9): Matrix.003 file - promoters60/5664060
acaaataat

SEQ ID NO: 62664 - DNA, 8 bp, Unknown
  misc_feature (1)..( 8): Matrix.003 file - promoters60/5664060
attggatt

SEQ ID NO: 62665 - DNA, 9 bp, Unknown
  misc_feature (1)..( 9): Matrix.003 file - promoters60/5664060
atttgtcta

SEQ ID NO: 62666 - DNA, 8 bp, Unknown
  misc_feature (1)..( 8): Matrix.003 file - promoters60/5664060
aaatgtca

SEQ ID NO: 62667 - DNA, 7 bp, Unknown
  misc_feature (1)..( 7): Matrix.003 file - promoters60/5664060
tgaaaac

SEQ ID NO: 62668 - DNA, 6 bp, Unknown
  misc_feature (1)..( 6): Matrix.003 file - promoters60/5664072
tagaaa

SEQ ID NO: 62669 - DNA, 7 bp, Unknown
  misc_feature (1)..( 7): Matrix.003 file - promoters60/5664072
ataatga

SEQ ID NO: 62670 - DNA, 7 bp, Unknown
  misc_feature (1)..( 7): Matrix.003 file - promoters60/5664072
taaaaat

SEQ ID NO: 62671 - DNA, 6 bp, Unknown
  misc_feature (1)..( 6): Matrix.003 file - promoters60/5664072
aaacag

SEQ ID NO: 62672 - DNA, 8 bp, Unknown
  misc_feature (1)..( 8): Matrix.003 file - promoters60/5664072
ctctattt

SEQ ID NO: 62673 - DNA, 7 bp, Unknown
  misc_feature (1)..( 7): Matrix.003 file - promoters60/5664072
attcttt

SEQ ID NO: 62674 - DNA, 10 bp, Unknown
  misc_feature (1)..( 10): Matrix.003 file - promoters60/5664072
tagcatttat

SEQ ID NO: 62675 - DNA, 6 bp, Unknown
  misc_feature (1)..( 6): Matrix.003 file - promoters60/5664072
aaagaa

SEQ ID NO: 62676 - DNA, 7 bp, Unknown
  misc_feature (1)..( 7): Matrix.003 file - promoters60/5664072
tagagaa

SEQ ID NO: 62677 - DNA, 7 bp, Unknown
  misc_feature (1)..( 7): Matrix.003 file - promoters60/5664072
aaggaga

SEQ ID NO: 62678 - DNA, 7 bp, Unknown
  misc_feature (1)..( 7): Matrix.003 file - promoters60/5664072
aaagaag

SEQ ID NO: 62679 - DNA, 6 bp, Unknown
  misc_feature (1)..( 6): Matrix.003 file - promoters60/5664072
caaaag

SEQ ID NO: 62680 - DNA, 6 bp, Unknown
  misc_feature (1)..( 6): Matrix.003 file - promoters60/5664072
caacac

SEQ ID NO: 62681 - DNA, 6 bp, Unknown
  misc_feature (1)..( 6): Matrix.003 file - promoters60/5664072
ttgaag

SEQ ID NO: 62682 - DNA, 11 bp, Unknown
  misc_feature (1)..( 11): Matrix.003 file - promoters60/5664080
attgtctcgta

SEQ ID NO: 62683 - DNA, 8 bp, Unknown
  misc_feature (1)..( 8): Matrix.003 file - promoters60/5664080
acttaaaa

SEQ ID NO: 62684 - DNA, 8 bp, Unknown
  misc_feature (1)..( 8): Matrix.003 file - promoters60/5664080
caatttac

SEQ ID NO: 62685 - DNA, 7 bp, Unknown
  misc_feature (1)..( 7): Matrix.003 file - promoters60/5664080
tgaagaa

SEQ ID NO: 62686 - DNA, 8 bp, Unknown
  misc_feature (1)..( 8): Matrix.003 file - promoters60/5664080
gaaacttt

SEQ ID NO: 62687 - DNA, 12 bp, Unknown
  misc_feature (1)..( 12): Matrix.003 file - promoters60/5664080
tttacagcatgc

SEQ ID NO: 62688 - DNA, 6 bp, Unknown
  misc_feature (1)..( 6): Matrix.003 file - promoters60/5664080
tgcttc

SEQ ID NO: 62689 - DNA, 6 bp, Unknown
  misc_feature (1)..( 6): Matrix.003 file - promoters60/5664080
tcagtt

SEQ ID NO: 62690 - DNA, 10 bp, Unknown
  misc_feature (1)..( 10): Matrix.003 file - promoters60/5664080
aaagtgagtg

SEQ ID NO: 62691 - DNA, 10 bp, Unknown
  misc_feature (1)..( 10): Matrix.003 file - promoters60/5664080
aggataaagt

SEQ ID NO: 62692 - DNA, 7 bp, Unknown
  misc_feature (1)..( 7): Matrix.003 file - promoters60/5664080
gaatggt

SEQ ID NO: 62693 - DNA, 7 bp, Unknown
  misc_feature (1)..( 7): Matrix.003 file - promoters60/5664080
gaaaccc

SEQ ID NO: 62694 - DNA, 12 bp, Unknown
  misc_feature (1)..( 12): Matrix.003 file - promoters60/5664084
gaaaagcaaaac

SEQ ID NO: 62695 - DNA, 8 bp, Unknown
  misc_feature (1)..( 8): Matrix.003 file - promoters60/5664084
aaagttaa

SEQ ID NO: 62696 - DNA, 9 bp, Unknown
  misc_feature (1)..( 9): Matrix.003 file - promoters60/5664084
ttaaatttt

SEQ ID NO: 62697 - DNA, 7 bp, Unknown
  misc_feature (1)..( 7): Matrix.003 file - promoters60/5664084
cttattg

SEQ ID NO: 62698 - DNA, 7 bp, Unknown
  misc_feature (1)..( 7): Matrix.003 file - promoters60/5664084
aaaaatc

SEQ ID NO: 62699 - DNA, 6 bp, Unknown
  misc_feature (1)..( 6): Matrix.003 file - promoters60/5664084
aacaca

SEQ ID NO: 62700 - DNA, 10 bp, Unknown
  misc_feature (1)..( 10): Matrix.003 file - promoters60/5664084
agaaaacgaa

SEQ ID NO: 62701 - DNA, 6 bp, Unknown
  misc_feature (1)..( 6): Matrix.003 file - promoters60/5664084
ccaacc

SEQ ID NO: 62702 - DNA, 7 bp, Unknown
  misc_feature (1)..( 7): Matrix.003 file - promoters60/5664084
aaaaatt

SEQ ID NO: 62703 - DNA, 6 bp, Unknown
  misc_feature (1)..( 6): Matrix.003 file - promoters60/5664084
atataa

SEQ ID NO: 62704 - DNA, 7 bp, Unknown
  misc_feature (1)..( 7): Matrix.003 file - promoters60/5664084
ccagaaa

SEQ ID NO: 62705 - DNA, 7 bp, Unknown
  misc_feature (1)..( 7): Matrix.003 file - promoters60/5664084
tcgattt

SEQ ID NO: 62706 - DNA, 7 bp, Unknown
  misc_feature (1)..( 7): Matrix.003 file - promoters60/5664084
attataa

SEQ ID NO: 62707 - DNA, 8 bp, Unknown
  misc_feature (1)..( 8): Matrix.003 file - promoters60/5664126
attataca

SEQ ID NO: 62708 - DNA, 8 bp, Unknown
  misc_feature (1)..( 8): Matrix.003 file - promoters60/5664126
aaatatat

SEQ ID NO: 62709 - DNA, 7 bp, Unknown
  misc_feature (1)..( 7): Matrix.003 file - promoters60/5664126
aacgtaa

SEQ ID NO: 62710 - DNA, 7 bp, Unknown
  misc_feature (1)..( 7): Matrix.003 file - promoters60/5664126
attggaa

SEQ ID NO: 62711 - DNA, 6 bp, Unknown
  misc_feature (1)..( 6): Matrix.003 file - promoters60/5664126
attttt

SEQ ID NO: 62712 - DNA, 8 bp, Unknown
  misc_feature (1)..( 8): Matrix.003 file - promoters60/5664126
acacacac

SEQ ID NO: 62713 - DNA, 6 bp, Unknown
  misc_feature (1)..( 6): Matrix.003 file - promoters60/5664126
tcaaaa

SEQ ID NO: 62714 - DNA, 6 bp, Unknown
  misc_feature (1)..( 6): Matrix.003 file - promoters60/5664126
acataa

SEQ ID NO: 62715 - DNA, 6 bp, Unknown
  misc_feature (1)..( 6): Matrix.003 file - promoters60/5664126
aattga

SEQ ID NO: 62716 - DNA, 9 bp, Unknown
  misc_feature (1)..( 9): Matrix.003 file - promoters60/5664126
aacaaaaat

SEQ ID NO: 62717 - DNA, 9 bp, Unknown
  misc_feature (1)..( 9): Matrix.003 file - promoters60/5664126
aaacccttt

SEQ ID NO: 62718 - DNA, 6 bp, Unknown
  misc_feature (1)..( 6): Matrix.003 file - promoters60/5664126
gaaaat

SEQ ID NO: 62719 - DNA, 7 bp, Unknown
  misc_feature (1)..( 7): Matrix.003 file - promoters60/5664126
tttgttc

SEQ ID NO: 62720 - DNA, 8 bp, Unknown
  misc_feature (1)..( 8): Matrix.003 file - promoters60/5664126
tttaggtc

SEQ ID NO: 62721 - DNA, 7 bp, Unknown
  misc_feature (1)..( 7): Matrix.003 file - promoters60/5664126
agaaaat

SEQ ID NO: 62722 - DNA, 14 bp, Unknown
  misc_feature (1)..( 14): Matrix.003 file - promoters60/5664126
taattcagaaaaat

SEQ ID NO: 62723 - DNA, 6 bp, Unknown
  misc_feature (1)..( 6): Matrix.003 file - promoters60/5664126
aatata

SEQ ID NO: 62724 - DNA, 6 bp, Unknown
  misc_feature (1)..( 6): Matrix.003 file - promoters60/5664126
aaaatt

SEQ ID NO: 62725 - DNA, 7 bp, Unknown
  misc_feature (1)..( 7): Matrix.003 file - promoters60/5664126
aacagaa

SEQ ID NO: 62726 - DNA, 6 bp, Unknown
  misc_feature (1)..( 6): Matrix.003 file - promoters60/5664126
tgtaat

SEQ ID NO: 62727 - DNA, 7 bp, Unknown
  misc_feature (1)..( 7): Matrix.003 file - promoters60/5664126
tttattt

SEQ ID NO: 62728 - DNA, 12 bp, Unknown
  misc_feature (1)..( 12): Matrix.003 file - promoters60/5664126
aaaagaaaaaac

SEQ ID NO: 62729 - DNA, 8 bp, Unknown
  misc_feature (1)..( 8): Matrix.003 file - promoters60/5664126
aatgttct

SEQ ID NO: 62730 - DNA, 8 bp, Unknown
  misc_feature (1)..( 8): Matrix.003 file - promoters60/5664126
taatttgt

SEQ ID NO: 62731 - DNA, 6 bp, Unknown
  misc_feature (1)..( 6): Matrix.003 file - promoters60/5664126
atgggc

SEQ ID NO: 62732 - DNA, 6 bp, Unknown
  misc_feature (1)..( 6): Matrix.003 file - promoters60/5664126
ggccca

SEQ ID NO: 62733 - DNA, 7 bp, Unknown
  misc_feature (1)..( 7): Matrix.003 file - promoters60/5664133
tcacaaa

SEQ ID NO: 62734 - DNA, 9 bp, Unknown
  misc_feature (1)..( 9): Matrix.003 file - promoters60/5664133
aattaagtt

SEQ ID NO: 62735 - DNA, 8 bp, Unknown
  misc_feature (1)..( 8): Matrix.003 file - promoters60/5664133
cacaaaac

SEQ ID NO: 62736 - DNA, 8 bp, Unknown
  misc_feature (1)..( 8): Matrix.003 file - promoters60/5664133
caaacaaa

SEQ ID NO: 62737 - DNA, 8 bp, Unknown
  misc_feature (1)..( 8): Matrix.003 file - promoters60/5664133
caaacata

SEQ ID NO: 62738 - DNA, 9 bp, Unknown
  misc_feature (1)..( 9): Matrix.003 file - promoters60/5664133
tcacaaaac

SEQ ID NO: 62739 - DNA, 9 bp, Unknown
  misc_feature (1)..( 9): Matrix.003 file - promoters60/5664133
ataaacatg

SEQ ID NO: 62740 - DNA, 11 bp, Unknown
  misc_feature (1)..( 11): Matrix.003 file - promoters60/5664141
ataaaaacaaa

SEQ ID NO: 62741 - DNA, 10 bp, Unknown
  misc_feature (1)..( 10): Matrix.003 file - promoters60/5664141
gatttgtttt

SEQ ID NO: 62742 - DNA, 11 bp, Unknown
  misc_feature (1)..( 11): Matrix.003 file - promoters60/5664141
aacaattaaaa

SEQ ID NO: 62743 - DNA, 12 bp, Unknown
  misc_feature (1)..( 12): Matrix.003 file - promoters60/5664141
atgaatttttaa

SEQ ID NO: 62744 - DNA, 13 bp, Unknown
  misc_feature (1)..( 13): Matrix.003 file - promoters60/5664141
atgtataaaaaca

SEQ ID NO: 62745 - DNA, 11 bp, Unknown
  misc_feature (1)..( 11): Matrix.003 file - promoters60/5664153
aagttatatat

SEQ ID NO: 62746 - DNA, 7 bp, Unknown
  misc_feature (1)..( 7): Matrix.003 file - promoters60/5664153
tttcaaa

SEQ ID NO: 62747 - DNA, 6 bp, Unknown
  misc_feature (1)..( 6): Matrix.003 file - promoters60/5664153
ttagtt

SEQ ID NO: 62748 - DNA, 10 bp, Unknown
  misc_feature (1)..( 10): Matrix.003 file - promoters60/5664153
gaaccaaagt

SEQ ID NO: 62749 - DNA, 7 bp, Unknown
  misc_feature (1)..( 7): Matrix.003 file - promoters60/5664153
aacacac

SEQ ID NO: 62750 - DNA, 6 bp, Unknown
  misc_feature (1)..( 6): Matrix.003 file - promoters60/5664153
aacatt

SEQ ID NO: 62751 - DNA, 8 bp, Unknown
  misc_feature (1)..( 8): Matrix.003 file - promoters60/5664153
gtgagttc

SEQ ID NO: 62752 - DNA, 7 bp, Unknown
  misc_feature (1)..( 7): Matrix.003 file - promoters60/5664153
ttaattt

SEQ ID NO: 62753 - DNA, 7 bp, Unknown
  misc_feature (1)..( 7): Matrix.003 file - promoters60/5664153
tgactct

SEQ ID NO: 62754 - DNA, 8 bp, Unknown
  misc_feature (1)..( 8): Matrix.003 file - promoters60/5664153
gtactaaa

SEQ ID NO: 62755 - DNA, 7 bp, Unknown
  misc_feature (1)..( 7): Matrix.003 file - promoters60/5664153
ttcgtat

SEQ ID NO: 62756 - DNA, 6 bp, Unknown
  misc_feature (1)..( 6): Matrix.003 file - promoters60/5664153
cagaag

SEQ ID NO: 62757 - DNA, 7 bp, Unknown
  misc_feature (1)..( 7): Matrix.003 file - promoters60/5664153
aagaaat

SEQ ID NO: 62758 - DNA, 7 bp, Unknown
  misc_feature (1)..( 7): Matrix.003 file - promoters60/5664153
ccaaaaa

SEQ ID NO: 62759 - DNA, 7 bp, Unknown
  misc_feature (1)..( 7): Matrix.003 file - promoters60/5664170
cataatt

SEQ ID NO: 62760 - DNA, 7 bp, Unknown
  misc_feature (1)..( 7): Matrix.003 file - promoters60/5664170
atttttg

SEQ ID NO: 62761 - DNA, 9 bp, Unknown
  misc_feature (1)..( 9): Matrix.003 file - promoters60/5664182
cattttctt

SEQ ID NO: 62762 - DNA, 7 bp, Unknown
  misc_feature (1)..( 7): Matrix.003 file - promoters60/5664182
ttgggct

SEQ ID NO: 62763 - DNA, 8 bp, Unknown
  misc_feature (1)..( 8): Matrix.003 file - promoters60/5664216
taaaacaa

SEQ ID NO: 62764 - DNA, 8 bp, Unknown
  misc_feature (1)..( 8): Matrix.003 file - promoters60/5664216
tataaata

SEQ ID NO: 62765 - DNA, 9 bp, Unknown
  misc_feature (1)..( 9): Matrix.003 file - promoters60/5664222
ttggtcaaa

SEQ ID NO: 62766 - DNA, 7 bp, Unknown
  misc_feature (1)..( 7): Matrix.003 file - promoters60/5664222
aaaccaa

SEQ ID NO: 62767 - DNA, 9 bp, Unknown
  misc_feature (1)..( 9): Matrix.003 file - promoters60/5664222
agaaccaaa

SEQ ID NO: 62768 - DNA, 7 bp, Unknown
  misc_feature (1)..( 7): Matrix.003 file - promoters60/5664222
caaacac

SEQ ID NO: 62769 - DNA, 6 bp, Unknown
  misc_feature (1)..( 6): Matrix.003 file - promoters60/5664222
tatcta

SEQ ID NO: 62770 - DNA, 8 bp, Unknown
  misc_feature (1)..( 8): Matrix.003 file - promoters60/5664222
gaaactca

SEQ ID NO: 62771 - DNA, 9 bp, Unknown
  misc_feature (1)..( 9): Matrix.003 file - promoters60/5664222
attcacttt

SEQ ID NO: 62772 - DNA, 8 bp, Unknown
  misc_feature (1)..( 8): Matrix.003 file - promoters60/5664222
acccgttt

SEQ ID NO: 62773 - DNA, 7 bp, Unknown
  misc_feature (1)..( 7): Matrix.003 file - promoters60/5664222
tcataat

SEQ ID NO: 62774 - DNA, 6 bp, Unknown
  misc_feature (1)..( 6): Matrix.003 file - promoters60/5664222
attgtt

SEQ ID NO: 62775 - DNA, 9 bp, Unknown
  misc_feature (1)..( 9): Matrix.003 file - promoters60/5664263
tgaatgatt

SEQ ID NO: 62776 - DNA, 7 bp, Unknown
  misc_feature (1)..( 7): Matrix.003 file - promoters60/5664268
gagacga

SEQ ID NO: 62777 - DNA, 7 bp, Unknown
  misc_feature (1)..( 7): Matrix.003 file - promoters60/5664268
gtaacat

SEQ ID NO: 62778 - DNA, 7 bp, Unknown
  misc_feature (1)..( 7): Matrix.003 file - promoters60/5664268
aacgatg

SEQ ID NO: 62779 - DNA, 8 bp, Unknown
  misc_feature (1)..( 8): Matrix.003 file - promoters60/5664268
gtgtgaac

SEQ ID NO: 62780 - DNA, 7 bp, Unknown
  misc_feature (1)..( 7): Matrix.003 file - promoters60/5664268
ctatatt

SEQ ID NO: 62781 - DNA, 9 bp, Unknown
  misc_feature (1)..( 9): Matrix.003 file - promoters60/5664268
ataaaccaa

SEQ ID NO: 62782 - DNA, 6 bp, Unknown
  misc_feature (1)..( 6): Matrix.003 file - promoters60/5664268
atttaa

SEQ ID NO: 62783 - DNA, 6 bp, Unknown
  misc_feature (1)..( 6): Matrix.003 file - promoters60/5664268
gatttg

SEQ ID NO: 62784 - DNA, 7 bp, Unknown
  misc_feature (1)..( 7): Matrix.003 file - promoters60/5664268
caaatcg

SEQ ID NO: 62785 - DNA, 9 bp, Unknown
  misc_feature (1)..( 9): Matrix.003 file - promoters60/5664268
gataccaac

SEQ ID NO: 62786 - DNA, 6 bp, Unknown
  misc_feature (1)..( 6): Matrix.003 file - promoters60/5664268
gaacta

SEQ ID NO: 62787 - DNA, 7 bp, Unknown
  misc_feature (1)..( 7): Matrix.003 file - promoters60/5664268
tcataat

SEQ ID NO: 62788 - DNA, 6 bp, Unknown
  misc_feature (1)..( 6): Matrix.003 file - promoters60/5664268
attgtt

SEQ ID NO: 62789 - DNA, 6 bp, Unknown
  misc_feature (1)..( 6): Matrix.003 file - promoters60/5664290
aatttt

SEQ ID NO: 62790 - DNA, 6 bp, Unknown
  misc_feature (1)..( 6): Matrix.003 file - promoters60/5664290
aacgaa

SEQ ID NO: 62791 - DNA, 8 bp, Unknown
  misc_feature (1)..( 8): Matrix.003 file - promoters60/5664290
tatgcttt

SEQ ID NO: 62792 - DNA, 8 bp, Unknown
  misc_feature (1)..( 8): Matrix.003 file - promoters60/5664290
ttaccaaa

SEQ ID NO: 62793 - DNA, 7 bp, Unknown
  misc_feature (1)..( 7): Matrix.003 file - promoters60/5664290
attctca

SEQ ID NO: 62794 - DNA, 8 bp, Unknown
  misc_feature (1)..( 8): Matrix.003 file - promoters60/5664290
tggaatcc

SEQ ID NO: 62795 - DNA, 7 bp, Unknown
  misc_feature (1)..( 7): Matrix.003 file - promoters60/5664290
atcatgc

SEQ ID NO: 62796 - DNA, 8 bp, Unknown
  misc_feature (1)..( 8): Matrix.003 file - promoters60/5664294
aaaatcga

SEQ ID NO: 62797 - DNA, 8 bp, Unknown
  misc_feature (1)..( 8): Matrix.003 file - promoters60/5664294
gataaaaa

SEQ ID NO: 62798 - DNA, 10 bp, Unknown
  misc_feature (1)..( 10): Matrix.003 file - promoters60/5664294
actttataat

SEQ ID NO: 62799 - DNA, 10 bp, Unknown
  misc_feature (1)..( 10): Matrix.003 file - promoters60/5664298
tacaaaaata

SEQ ID NO: 62800 - DNA, 7 bp, Unknown
  misc_feature (1)..( 7): Matrix.003 file - promoters60/5664302
tggttat

SEQ ID NO: 62801 - DNA, 8 bp, Unknown
  misc_feature (1)..( 8): Matrix.003 file - promoters60/5664302
caaaagga

SEQ ID NO: 62802 - DNA, 10 bp, Unknown
  misc_feature (1)..( 10): Matrix.003 file - promoters60/5664302
agcaggaaga

SEQ ID NO: 62803 - DNA, 7 bp, Unknown
  misc_feature (1)..( 7): Matrix.003 file - promoters60/5664302
tataaat

SEQ ID NO: 62804 - DNA, 7 bp, Unknown
  misc_feature (1)..( 7): Matrix.003 file - promoters60/5664302
ttggaaa

SEQ ID NO: 62805 - DNA, 6 bp, Unknown
  misc_feature (1)..( 6): Matrix.003 file - promoters60/5664302
aaataa

SEQ ID NO: 62806 - DNA, 6 bp, Unknown
  misc_feature (1)..( 6): Matrix.003 file - promoters60/5664302
ttaaaa

SEQ ID NO: 62807 - DNA, 10 bp, Unknown
  misc_feature (1)..( 10): Matrix.003 file - promoters60/5664302
accttaaaaa

SEQ ID NO: 62808 - DNA, 7 bp, Unknown
  misc_feature (1)..( 7): Matrix.003 file - promoters60/5664302
aaaacct

SEQ ID NO: 62809 - DNA, 6 bp, Unknown
  misc_feature (1)..( 6): Matrix.003 file - promoters60/5664302
ttaaaa

SEQ ID NO: 62810 - DNA, 8 bp, Unknown
  misc_feature (1)..( 8): Matrix.003 file - promoters60/5664302
aaaataaa

SEQ ID NO: 62811 - DNA, 7 bp, Unknown
  misc_feature (1)..( 7): Matrix.003 file - promoters60/5664302
aaaccta

SEQ ID NO: 62812 - DNA, 11 bp, Unknown
  misc_feature (1)..( 11): Matrix.003 file - promoters60/5664302
ataaaccaaaa

SEQ ID NO: 62813 - DNA, 6 bp, Unknown
  misc_feature (1)..( 6): Matrix.003 file - promoters60/5664302
aaaata

SEQ ID NO: 62814 - DNA, 6 bp, Unknown
  misc_feature (1)..( 6): Matrix.003 file - promoters60/5664302
ccaaaa

SEQ ID NO: 62815 - DNA, 6 bp, Unknown
  misc_feature (1)..( 6): Matrix.003 file - promoters60/5664302
ccaaaa

SEQ ID NO: 62816 - DNA, 7 bp, Unknown
  misc_feature (1)..( 7): Matrix.003 file - promoters60/5664302
aaaatca

SEQ ID NO: 62817 - DNA, 7 bp, Unknown
  misc_feature (1)..( 7): Matrix.003 file - promoters60/5664302
tcataaa

SEQ ID NO: 62818 - DNA, 10 bp, Unknown
  misc_feature (1)..( 10): Matrix.003 file - promoters60/5664302
caaaaattca

SEQ ID NO: 62819 - DNA, 8 bp, Unknown
  misc_feature (1)..( 8): Matrix.003 file - promoters60/5664302
tgtaatat

SEQ ID NO: 62820 - DNA, 7 bp, Unknown
  misc_feature (1)..( 7): Matrix.003 file - promoters60/5664302
aattggt

SEQ ID NO: 62821 - DNA, 6 bp, Unknown
  misc_feature (1)..( 6): Matrix.003 file - promoters60/5664302
ggttat

SEQ ID NO: 62822 - DNA, 7 bp, Unknown
  misc_feature (1)..( 7): Matrix.003 file - promoters60/5664302
ggaagat

SEQ ID NO: 62823 - DNA, 6 bp, Unknown
  misc_feature (1)..( 6): Matrix.003 file - promoters60/5664311
aaaaag

SEQ ID NO: 62824 - DNA, 8 bp, Unknown
  misc_feature (1)..( 8): Matrix.003 file - promoters60/5664311
caaaacaa

SEQ ID NO: 62825 - DNA, 14 bp, Unknown
  misc_feature (1)..( 14): Matrix.003 file - promoters60/5664311
actatcaaagaaag

SEQ ID NO: 62826 - DNA, 8 bp, Unknown
  misc_feature (1)..( 8): Matrix.003 file - promoters60/5664329
aaataaaa

SEQ ID NO: 62827 - DNA, 9 bp, Unknown
  misc_feature (1)..( 9): Matrix.003 file - promoters60/5664329
gtctctttc

SEQ ID NO: 62828 - DNA, 7 bp, Unknown
  misc_feature (1)..( 7): Matrix.003 file - promoters60/5664329
tttttgt

SEQ ID NO: 62829 - DNA, 6 bp, Unknown
  misc_feature (1)..( 6): Matrix.003 file - promoters60/5664329
aaaaaa

SEQ ID NO: 62830 - DNA, 6 bp, Unknown
  misc_feature (1)..( 6): Matrix.003 file - promoters60/5664329
taaaaa

SEQ ID NO: 62831 - DNA, 9 bp, Unknown
  misc_feature (1)..( 9): Matrix.003 file - promoters60/5664329
acaaatttt

SEQ ID NO: 62832 - DNA, 10 bp, Unknown
  misc_feature (1)..( 10): Matrix.003 file - promoters60/5664329
aaaaagaaat

SEQ ID NO: 62833 - DNA, 8 bp, Unknown
  misc_feature (1)..( 8): Matrix.003 file - promoters60/5664329
attacaag

SEQ ID NO: 62834 - DNA, 7 bp, Unknown
  misc_feature (1)..( 7): Matrix.003 file - promoters60/5664329
aaacaaa

SEQ ID NO: 62835 - DNA, 6 bp, Unknown
  misc_feature (1)..( 6): Matrix.003 file - promoters60/5664329
tgtaca

SEQ ID NO: 62836 - DNA, 6 bp, Unknown
  misc_feature (1)..( 6): Matrix.003 file - promoters60/5664329
ataaaa

SEQ ID NO: 62837 - DNA, 8 bp, Unknown
  misc_feature (1)..( 8): Matrix.003 file - promoters60/5664329
agatatct

SEQ ID NO: 62838 - DNA, 8 bp, Unknown
  misc_feature (1)..( 8): Matrix.003 file - promoters60/5664329
tttaatag

SEQ ID NO: 62839 - DNA, 9 bp, Unknown
  misc_feature (1)..( 9): Matrix.003 file - promoters60/5664329
atataataa

SEQ ID NO: 62840 - DNA, 6 bp, Unknown
  misc_feature (1)..( 6): Matrix.003 file - promoters60/5664329
ttttaa

SEQ ID NO: 62841 - DNA, 6 bp, Unknown
  misc_feature (1)..( 6): Matrix.003 file - promoters60/5664329
cttcca

SEQ ID NO: 62842 - DNA, 6 bp, Unknown
  misc_feature (1)..( 6): Matrix.003 file - promoters60/5664329
aaaaat

SEQ ID NO: 62843 - DNA, 7 bp, Unknown
  misc_feature (1)..( 7): Matrix.003 file - promoters60/5664341
ttccctt

SEQ ID NO: 62844 - DNA, 6 bp, Unknown
  misc_feature (1)..( 6): Matrix.003 file - promoters60/5664341
ctttct

SEQ ID NO: 62845 - DNA, 6 bp, Unknown
  misc_feature (1)..( 6): Matrix.003 file - promoters60/5664341
ttctct

SEQ ID NO: 62846 - DNA, 6 bp, Unknown
  misc_feature (1)..( 6): Matrix.003 file - promoters60/5664341
ttctat

SEQ ID NO: 62847 - DNA, 7 bp, Unknown
  misc_feature (1)..( 7): Matrix.003 file - promoters60/5664341
tatctat

SEQ ID NO: 62848 - DNA, 7 bp, Unknown
  misc_feature (1)..( 7): Matrix.003 file - promoters60/5664341
atagtgt

SEQ ID NO: 62849 - DNA, 6 bp, Unknown
  misc_feature (1)..( 6): Matrix.003 file - promoters60/5664341
aacttg

SEQ ID NO: 62850 - DNA, 6 bp, Unknown
  misc_feature (1)..( 6): Matrix.003 file - promoters60/5664341
tcatat

SEQ ID NO: 62851 - DNA, 7 bp, Unknown
  misc_feature (1)..( 7): Matrix.003 file - promoters60/5664341
ttacgta

SEQ ID NO: 62852 - DNA, 7 bp, Unknown
  misc_feature (1)..( 7): Matrix.003 file - promoters60/5664341
ctgatta

SEQ ID NO: 62853 - DNA, 6 bp, Unknown
  misc_feature (1)..( 6): Matrix.003 file - promoters60/5664341
atcatt

SEQ ID NO: 62854 - DNA, 11 bp, Unknown
  misc_feature (1)..( 11): Matrix.003 file - promoters60/5664341
ttactgaagtt

SEQ ID NO: 62855 - DNA, 7 bp, Unknown
  misc_feature (1)..( 7): Matrix.003 file - promoters60/5664341
tttccat

SEQ ID NO: 62856 - DNA, 8 bp, Unknown
  misc_feature (1)..( 8): Matrix.003 file - promoters60/5664341
atctcgtg

SEQ ID NO: 62857 - DNA, 10 bp, Unknown
  misc_feature (1)..( 10): Matrix.003 file - promoters60/5664362
gaatccaaag

SEQ ID NO: 62858 - DNA, 8 bp, Unknown
  misc_feature (1)..( 8): Matrix.003 file - promoters60/5664402
aatttttt

SEQ ID NO: 62859 - DNA, 7 bp, Unknown
  misc_feature (1)..( 7): Matrix.003 file - promoters60/5664402
tattttt

SEQ ID NO: 62860 - DNA, 7 bp, Unknown
  misc_feature (1)..( 7): Matrix.003 file - promoters60/5664402
ccaaatt

SEQ ID NO: 62861 - DNA, 6 bp, Unknown
  misc_feature (1)..( 6): Matrix.003 file - promoters60/5664402
gaaaca

SEQ ID NO: 62862 - DNA, 6 bp, Unknown
  misc_feature (1)..( 6): Matrix.003 file - promoters60/5664402
acaaac

SEQ ID NO: 62863 - DNA, 8 bp, Unknown
  misc_feature (1)..( 8): Matrix.003 file - promoters60/5664402
aaaaaaaa

SEQ ID NO: 62864 - DNA, 12 bp, Unknown
  misc_feature (1)..( 12): Matrix.003 file - promoters60/5664402
aaaattaaattt

SEQ ID NO: 62865 - DNA, 6 bp, Unknown
  misc_feature (1)..( 6): Matrix.003 file - promoters60/5664402
tgaaaa

SEQ ID NO: 62866 - DNA, 8 bp, Unknown
  misc_feature (1)..( 8): Matrix.003 file - promoters60/5664402
acgtctct

SEQ ID NO: 62867 - DNA, 7 bp, Unknown
  misc_feature (1)..( 7): Matrix.003 file - promoters60/5664402
tcatgtt

SEQ ID NO: 62868 - DNA, 7 bp, Unknown
  misc_feature (1)..( 7): Matrix.003 file - promoters60/5664402
aaaactt

SEQ ID NO: 62869 - DNA, 7 bp, Unknown
  misc_feature (1)..( 7): Matrix.003 file - promoters60/5664402
ccactat

SEQ ID NO: 62870 - DNA, 6 bp, Unknown
  misc_feature (1)..( 6): Matrix.003 file - promoters60/5664402
aaattg

SEQ ID NO: 62871 - DNA, 7 bp, Unknown
  misc_feature (1)..( 7): Matrix.003 file - promoters60/5664402
agaagaa

SEQ ID NO: 62872 - DNA, 8 bp, Unknown
  misc_feature (1)..( 8): Matrix.003 file - promoters60/5664402
tttctttt

SEQ ID NO: 62873 - DNA, 6 bp, Unknown
  misc_feature (1)..( 6): Matrix.003 file - promoters60/5664402
tcacca

SEQ ID NO: 62874 - DNA, 7 bp, Unknown
  misc_feature (1)..( 7): Matrix.003 file - promoters60/5664402
tttgagc

SEQ ID NO: 62875 - DNA, 8 bp, Unknown
  misc_feature (1)..( 8): Matrix.003 file - promoters60/5664402
atatacta

SEQ ID NO: 62876 - DNA, 7 bp, Unknown
  misc_feature (1)..( 7): Matrix.003 file - promoters60/5664402
ggtctga

SEQ ID NO: 62877 - DNA, 8 bp, Unknown
  misc_feature (1)..( 8): Matrix.003 file - promoters60/5664465
attaattc

SEQ ID NO: 62878 - DNA, 9 bp, Unknown
  misc_feature (1)..( 9): Matrix.003 file - promoters60/5664465
ataaaaaaa

SEQ ID NO: 62879 - DNA, 10 bp, Unknown
  misc_feature (1)..( 10): Matrix.003 file - promoters60/5664465
attaattgta

SEQ ID NO: 62880 - DNA, 11 bp, Unknown
  misc_feature (1)..( 11): Matrix.003 file - promoters60/5664465
cagagacagca

SEQ ID NO: 62881 - DNA, 10 bp, Unknown
  misc_feature (1)..( 10): Matrix.003 file - promoters60/5664465
caatattata

SEQ ID NO: 62882 - DNA, 8 bp, Unknown
  misc_feature (1)..( 8): Matrix.003 file - promoters60/5664480
taaaatat

SEQ ID NO: 62883 - DNA, 9 bp, Unknown
  misc_feature (1)..( 9): Matrix.003 file - promoters60/5664480
ttatttgga

SEQ ID NO: 62884 - DNA, 8 bp, Unknown
  misc_feature (1)..( 8): Matrix.003 file - promoters60/5664480
atctagtt

SEQ ID NO: 62885 - DNA, 7 bp, Unknown
  misc_feature (1)..( 7): Matrix.003 file - promoters60/5664480
tataaat

SEQ ID NO: 62886 - DNA, 11 bp, Unknown
  misc_feature (1)..( 11): Matrix.003 file - promoters60/5664480
cgaaactggtc

SEQ ID NO: 62887 - DNA, 8 bp, Unknown
  misc_feature (1)..( 8): Matrix.003 file - promoters60/5664480
gaactcat

SEQ ID NO: 62888 - DNA, 9 bp, Unknown
  misc_feature (1)..( 9): Matrix.003 file - promoters60/5664480
ttaaatgaa

SEQ ID NO: 62889 - DNA, 7 bp, Unknown
  misc_feature (1)..( 7): Matrix.003 file - promoters60/5664480
agaagaa

SEQ ID NO: 62890 - DNA, 6 bp, Unknown
  misc_feature (1)..( 6): Matrix.003 file - promoters60/5664480
gtgtaa

SEQ ID NO: 62891 - DNA, 9 bp, Unknown
  misc_feature (1)..( 9): Matrix.003 file - promoters60/5664480
aaacaaaaa

SEQ ID NO: 62892 - DNA, 7 bp, Unknown
  misc_feature (1)..( 7): Matrix.003 file - promoters60/5664480
ctaatct

SEQ ID NO: 62893 - DNA, 6 bp, Unknown
  misc_feature (1)..( 6): Matrix.003 file - promoters60/5664480
aacaga

SEQ ID NO: 62894 - DNA, 6 bp, Unknown
  misc_feature (1)..( 6): Matrix.003 file - promoters60/5664480
agcaat

SEQ ID NO: 62895 - DNA, 9 bp, Unknown
  misc_feature (1)..( 9): Matrix.003 file - promoters60/5664488
ttacgaaag

SEQ ID NO: 62896 - DNA, 7 bp, Unknown
  misc_feature (1)..( 7): Matrix.003 file - promoters60/5664488
acaaaga

SEQ ID NO: 62897 - DNA, 7 bp, Unknown
  misc_feature (1)..( 7): Matrix.003 file - promoters60/5664488
tatatat

SEQ ID NO: 62898 - DNA, 6 bp, Unknown
  misc_feature (1)..( 6): Matrix.003 file - promoters60/5664488
tcataa

SEQ ID NO: 62899 - DNA, 6 bp, Unknown
  misc_feature (1)..( 6): Matrix.003 file - promoters60/5664488
catttc

SEQ ID NO: 62900 - DNA, 7 bp, Unknown
  misc_feature (1)..( 7): Matrix.003 file - promoters60/5664488
catatgt

SEQ ID NO: 62901 - DNA, 6 bp, Unknown
  misc_feature (1)..( 6): Matrix.003 file - promoters60/5664488
caagtc

SEQ ID NO: 62902 - DNA, 9 bp, Unknown
  misc_feature (1)..( 9): Matrix.003 file - promoters60/5664488
attaaatat

SEQ ID NO: 62903 - DNA, 7 bp, Unknown
  misc_feature (1)..( 7): Matrix.003 file - promoters60/5664488
gatacat

SEQ ID NO: 62904 - DNA, 8 bp, Unknown
  misc_feature (1)..( 8): Matrix.003 file - promoters60/5664488
gtcgatct

SEQ ID NO: 62905 - DNA, 6 bp, Unknown
  misc_feature (1)..( 6): Matrix.003 file - promoters60/5664488
taaact

SEQ ID NO: 62906 - DNA, 8 bp, Unknown
  misc_feature (1)..( 8): Matrix.003 file - promoters60/5664488
aatggtgt

SEQ ID NO: 62907 - DNA, 6 bp, Unknown
  misc_feature (1)..( 6): Matrix.003 file - promoters60/5664488
aatgtt

SEQ ID NO: 62908 - DNA, 7 bp, Unknown
  misc_feature (1)..( 7): Matrix.003 file - promoters60/5664488
tgtacat

SEQ ID NO: 62909 - DNA, 6 bp, Unknown
  misc_feature (1)..( 6): Matrix.003 file - promoters60/5664488
tatgag

SEQ ID NO: 62910 - DNA, 8 bp, Unknown
  misc_feature (1)..( 8): Matrix.003 file - promoters60/5664488
gatgtttc

SEQ ID NO: 62911 - DNA, 9 bp, Unknown
  misc_feature (1)..( 9): Matrix.003 file - promoters60/5664517
tttatgaaa

SEQ ID NO: 62912 - DNA, 10 bp, Unknown
  misc_feature (1)..( 10): Matrix.003 file - promoters60/5664517
taaaattaaa

SEQ ID NO: 62913 - DNA, 6 bp, Unknown
  misc_feature (1)..( 6): Matrix.003 file - promoters60/5664633
atttta

SEQ ID NO: 62914 - DNA, 10 bp, Unknown
  misc_feature (1)..( 10): Matrix.003 file - promoters60/5664633
aaaaggaaaa

SEQ ID NO: 62915 - DNA, 8 bp, Unknown
  misc_feature (1)..( 8): Matrix.003 file - promoters60/5664633
gcaaaaat

SEQ ID NO: 62916 - DNA, 6 bp, Unknown
  misc_feature (1)..( 6): Matrix.003 file - promoters60/5664633
tatttt

SEQ ID NO: 62917 - DNA, 6 bp, Unknown
  misc_feature (1)..( 6): Matrix.003 file - promoters60/5664633
ttttca

SEQ ID NO: 62918 - DNA, 6 bp, Unknown
  misc_feature (1)..( 6): Matrix.003 file - promoters60/5664633
tttttt

SEQ ID NO: 62919 - DNA, 8 bp, Unknown
  misc_feature (1)..( 8): Matrix.003 file - promoters60/5664633
attaatta

SEQ ID NO: 62920 - DNA, 6 bp, Unknown
  misc_feature (1)..( 6): Matrix.003 file - promoters60/5664633
tttttc

SEQ ID NO: 62921 - DNA, 9 bp, Unknown
  misc_feature (1)..( 9): Matrix.003 file - promoters60/5664633
aatcactat

SEQ ID NO: 62922 - DNA, 8 bp, Unknown
  misc_feature (1)..( 8): Matrix.003 file - promoters60/5664633
tatatgtt

SEQ ID NO: 62923 - DNA, 8 bp, Unknown
  misc_feature (1)..( 8): Matrix.003 file - promoters60/5664633
tttcattt

SEQ ID NO: 62924 - DNA, 8 bp, Unknown
  misc_feature (1)..( 8): Matrix.003 file - promoters60/5664633
aaaattaa

SEQ ID NO: 62925 - DNA, 8 bp, Unknown
  misc_feature (1)..( 8): Matrix.003 file - promoters60/5664633
tacgaaaa

SEQ ID NO: 62926 - DNA, 6 bp, Unknown
  misc_feature (1)..( 6): Matrix.003 file - promoters60/5664633
atttta

SEQ ID NO: 62927 - DNA, 7 bp, Unknown
  misc_feature (1)..( 7): Matrix.003 file - promoters60/5664633
agaataa

SEQ ID NO: 62928 - DNA, 6 bp, Unknown
  misc_feature (1)..( 6): Matrix.003 file - promoters60/5664633
aagttg

SEQ ID NO: 62929 - DNA, 7 bp, Unknown
  misc_feature (1)..( 7): Matrix.003 file - promoters60/5664633
tttgaaa

SEQ ID NO: 62930 - DNA, 7 bp, Unknown
  misc_feature (1)..( 7): Matrix.003 file - promoters60/5664633
taagaaa

SEQ ID NO: 62931 - DNA, 7 bp, Unknown
  misc_feature (1)..( 7): Matrix.003 file - promoters60/5664633
ttgggaa

SEQ ID NO: 62932 - DNA, 13 bp, Unknown
  misc_feature (1)..( 13): Matrix.003 file - promoters60/5664633
tccgatttatttt

SEQ ID NO: 62933 - DNA, 6 bp, Unknown
  misc_feature (1)..( 6): Matrix.003 file - promoters60/5664633
agtttt

SEQ ID NO: 62934 - DNA, 7 bp, Unknown
  misc_feature (1)..( 7): Matrix.003 file - promoters60/5664633
gaagaaa

SEQ ID NO: 62935 - DNA, 6 bp, Unknown
  misc_feature (1)..( 6): Matrix.003 file - promoters60/5664633
ttgaat

SEQ ID NO: 62936 - DNA, 7 bp, Unknown
  misc_feature (1)..( 7): Matrix.003 file - promoters60/5664633
aaaatta

SEQ ID NO: 62937 - DNA, 7 bp, Unknown
  misc_feature (1)..( 7): Matrix.003 file - promoters60/5664633
tttccgc

SEQ ID NO: 62938 - DNA, 9 bp, Unknown
  misc_feature (1)..( 9): Matrix.003 file - promoters60/5664633
aaaaaaaaa

SEQ ID NO: 62939 - DNA, 6 bp, Unknown
  misc_feature (1)..( 6): Matrix.003 file - promoters60/5664633
aaatca

SEQ ID NO: 62940 - DNA, 9 bp, Unknown
  misc_feature (1)..( 9): Matrix.003 file - promoters60/5664657
aaaattgaa

SEQ ID NO: 62941 - DNA, 8 bp, Unknown
  misc_feature (1)..( 8): Matrix.003 file - promoters60/5664657
ctttaaaa

SEQ ID NO: 62942 - DNA, 8 bp, Unknown
  misc_feature (1)..( 8): Matrix.003 file - promoters60/5664657
aaattaca

SEQ ID NO: 62943 - DNA, 11 bp, Unknown
  misc_feature (1)..( 11): Matrix.003 file - promoters60/5664657
atttgtttgaa

SEQ ID NO: 62944 - DNA, 12 bp, Unknown
  misc_feature (1)..( 12): Matrix.003 file - promoters60/5664703
ctttttgtatat

SEQ ID NO: 62945 - DNA, 6 bp, Unknown
  misc_feature (1)..( 6): Matrix.003 file - promoters60/5664703
attgaa

SEQ ID NO: 62946 - DNA, 6 bp, Unknown
  misc_feature (1)..( 6): Matrix.003 file - promoters60/5664703
tgaaca

SEQ ID NO: 62947 - DNA, 7 bp, Unknown
  misc_feature (1)..( 7): Matrix.003 file - promoters60/5664703
tctacga

SEQ ID NO: 62948 - DNA, 7 bp, Unknown
  misc_feature (1)..( 7): Matrix.003 file - promoters60/5664703
aggattt

SEQ ID NO: 62949 - DNA, 10 bp, Unknown
  misc_feature (1)..( 10): Matrix.003 file - promoters60/5664703
gcaggagatg

SEQ ID NO: 62950 - DNA, 8 bp, Unknown
  misc_feature (1)..( 8): Matrix.003 file - promoters60/5664703
tctgaatt

SEQ ID NO: 62951 - DNA, 6 bp, Unknown
  misc_feature (1)..( 6): Matrix.003 file - promoters60/5664703
aatcta

SEQ ID NO: 62952 - DNA, 6 bp, Unknown
  misc_feature (1)..( 6): Matrix.003 file - promoters60/5664703
catcaa

SEQ ID NO: 62953 - DNA, 8 bp, Unknown
  misc_feature (1)..( 8): Matrix.003 file - promoters60/5664703
gattcgtg

SEQ ID NO: 62954 - DNA, 7 bp, Unknown
  misc_feature (1)..( 7): Matrix.003 file - promoters60/5664703
cacggtc

SEQ ID NO: 62955 - DNA, 6 bp, Unknown
  misc_feature (1)..( 6): Matrix.003 file - promoters60/5664703
ggttta

SEQ ID NO: 62956 - DNA, 6 bp, Unknown
  misc_feature (1)..( 6): Matrix.003 file - promoters60/5664703
ttgact

SEQ ID NO: 62957 - DNA, 6 bp, Unknown
  misc_feature (1)..( 6): Matrix.003 file - promoters60/5664703
ggctgt

SEQ ID NO: 62958 - DNA, 8 bp, Unknown
  misc_feature (1)..( 8): Matrix.003 file - promoters60/5664734
aaattagt

SEQ ID NO: 62959 - DNA, 6 bp, Unknown
  misc_feature (1)..( 6): Matrix.003 file - promoters60/5664734
atctta

SEQ ID NO: 62960 - DNA, 6 bp, Unknown
  misc_feature (1)..( 6): Matrix.003 file - promoters60/5664734
tgatgt

SEQ ID NO: 62961 - DNA, 9 bp, Unknown
  misc_feature (1)..( 9): Matrix.003 file - promoters60/5664734
gtgagagga

SEQ ID NO: 62962 - DNA, 6 bp, Unknown
  misc_feature (1)..( 6): Matrix.003 file - promoters60/5664734
cggtga

SEQ ID NO: 62963 - DNA, 6 bp, Unknown
  misc_feature (1)..( 6): Matrix.003 file - promoters60/5664734
cggtgg

SEQ ID NO: 62964 - DNA, 6 bp, Unknown
  misc_feature (1)..( 6): Matrix.003 file - promoters60/5664734
gagaaa

SEQ ID NO: 62965 - DNA, 6 bp, Unknown
  misc_feature (1)..( 6): Matrix.003 file - promoters60/5664734
aaacta

SEQ ID NO: 62966 - DNA, 6 bp, Unknown
  misc_feature (1)..( 6): Matrix.003 file - promoters60/5664734
atgatc

SEQ ID NO: 62967 - DNA, 7 bp, Unknown
  misc_feature (1)..( 7): Matrix.003 file - promoters60/5664734
caaatta

SEQ ID NO: 62968 - DNA, 6 bp, Unknown
  misc_feature (1)..( 6): Matrix.003 file - promoters60/5664734
gacgtg

SEQ ID NO: 62969 - DNA, 6 bp, Unknown
  misc_feature (1)..( 6): Matrix.003 file - promoters60/5664806
atgaaa

SEQ ID NO: 62970 - DNA, 10 bp, Unknown
  misc_feature (1)..( 10): Matrix.003 file - promoters60/5664806
aaggaaaaaa

SEQ ID NO: 62971 - DNA, 7 bp, Unknown
  misc_feature (1)..( 7): Matrix.003 file - promoters60/5664806
aacatga

SEQ ID NO: 62972 - DNA, 11 bp, Unknown
  misc_feature (1)..( 11): Matrix.003 file - promoters60/5664806
accaagaaaac

SEQ ID NO: 62973 - DNA, 6 bp, Unknown
  misc_feature (1)..( 6): Matrix.003 file - promoters60/5664806
ttttca

SEQ ID NO: 62974 - DNA, 10 bp, Unknown
  misc_feature (1)..( 10): Matrix.003 file - promoters60/5664806
taatagcaat

SEQ ID NO: 62975 - DNA, 8 bp, Unknown
  misc_feature (1)..( 8): Matrix.003 file - promoters60/5664806
attattat

SEQ ID NO: 62976 - DNA, 7 bp, Unknown
  misc_feature (1)..( 7): Matrix.003 file - promoters60/5664806
ttgtgga

SEQ ID NO: 62977 - DNA, 11 bp, Unknown
  misc_feature (1)..( 11): Matrix.003 file - promoters60/5664806
tcttatttttt

SEQ ID NO: 62978 - DNA, 7 bp, Unknown
  misc_feature (1)..( 7): Matrix.003 file - promoters60/5664806
atgcatt

SEQ ID NO: 62979 - DNA, 7 bp, Unknown
  misc_feature (1)..( 7): Matrix.003 file - promoters60/5664806
aatgaac

SEQ ID NO: 62980 - DNA, 7 bp, Unknown
  misc_feature (1)..( 7): Matrix.003 file - promoters60/5664806
aaaagaa

SEQ ID NO: 62981 - DNA, 7 bp, Unknown
  misc_feature (1)..( 7): Matrix.003 file - promoters60/5664806
tttaatt

SEQ ID NO: 62982 - DNA, 7 bp, Unknown
  misc_feature (1)..( 7): Matrix.003 file - promoters60/5664806
ttggcta

SEQ ID NO: 62983 - DNA, 7 bp, Unknown
  misc_feature (1)..( 7): Matrix.003 file - promoters60/5664806
ataaata

SEQ ID NO: 62984 - DNA, 7 bp, Unknown
  misc_feature (1)..( 7): Matrix.003 file - promoters60/5664806
taatatt

SEQ ID NO: 62985 - DNA, 7 bp, Unknown
  misc_feature (1)..( 7): Matrix.003 file - promoters60/5664806
acaatat

SEQ ID NO: 62986 - DNA, 7 bp, Unknown
  misc_feature (1)..( 7): Matrix.003 file - promoters60/5664806
tgggttt

SEQ ID NO: 62987 - DNA, 8 bp, Unknown
  misc_feature (1)..( 8): Matrix.003 file - promoters60/5664806
acaactga

SEQ ID NO: 62988 - DNA, 6 bp, Unknown
  misc_feature (1)..( 6): Matrix.003 file - promoters60/5664806
tgtttt

SEQ ID NO: 62989 - DNA, 7 bp, Unknown
  misc_feature (1)..( 7): Matrix.003 file - promoters60/5664806
atgggag

SEQ ID NO: 62990 - DNA, 6 bp, Unknown
  misc_feature (1)..( 6): Matrix.003 file - promoters60/5664806
ctatct

SEQ ID NO: 62991 - DNA, 7 bp, Unknown
  misc_feature (1)..( 7): Matrix.003 file - promoters60/5664814
aaaaaaa

SEQ ID NO: 62992 - DNA, 11 bp, Unknown
  misc_feature (1)..( 11): Matrix.003 file - promoters60/5664814
attttcataaa

SEQ ID NO: 62993 - DNA, 10 bp, Unknown
  misc_feature (1)..( 10): Matrix.003 file - promoters60/5664814
agttaataaa

SEQ ID NO: 62994 - DNA, 9 bp, Unknown
  misc_feature (1)..( 9): Matrix.003 file - promoters60/5664814
aacaattga

SEQ ID NO: 62995 - DNA, 7 bp, Unknown
  misc_feature (1)..( 7): Matrix.003 file - promoters60/5664814
aaaaaag

SEQ ID NO: 62996 - DNA, 12 bp, Unknown
  misc_feature (1)..( 12): Matrix.003 file - promoters60/5664814
tctcaaaatcaa

SEQ ID NO: 62997 - DNA, 12 bp, Unknown
  misc_feature (1)..( 12): Matrix.003 file - promoters60/5664873
gtctcctataaa

SEQ ID NO: 62998 - DNA, 15 bp, Unknown
  misc_feature (1)..( 15): Matrix.003 file - promoters60/5664873
tataacccaaaatta

SEQ ID NO: 62999 - DNA, 8 bp, Unknown
  misc_feature (1)..( 8): Matrix.003 file - promoters60/5664942
cataacag

SEQ ID NO: 63000 - DNA, 6 bp, Unknown
  misc_feature (1)..( 6): Matrix.003 file - promoters60/5664942
aactta

SEQ ID NO: 63001 - DNA, 6 bp, Unknown
  misc_feature (1)..( 6): Matrix.003 file - promoters60/5664942
ctttct

SEQ ID NO: 63002 - DNA, 6 bp, Unknown
  misc_feature (1)..( 6): Matrix.003 file - promoters60/5664942
aaaatc

SEQ ID NO: 63003 - DNA, 6 bp, Unknown
  misc_feature (1)..( 6): Matrix.003 file - promoters60/5664942
aataat

SEQ ID NO: 63004 - DNA, 6 bp, Unknown
  misc_feature (1)..( 6): Matrix.003 file - promoters60/5664942
acatct

SEQ ID NO: 63005 - DNA, 6 bp, Unknown
  misc_feature (1)..( 6): Matrix.003 file - promoters60/5664942
tataag

SEQ ID NO: 63006 - DNA, 8 bp, Unknown
  misc_feature (1)..( 8): Matrix.003 file - promoters60/5664942
tacatttc

SEQ ID NO: 63007 - DNA, 7 bp, Unknown
  misc_feature (1)..( 7): Matrix.003 file - promoters60/5664942
atacata

SEQ ID NO: 63008 - DNA, 6 bp, Unknown
  misc_feature (1)..( 6): Matrix.003 file - promoters60/5664942
cttcat

SEQ ID NO: 63009 - DNA, 7 bp, Unknown
  misc_feature (1)..( 7): Matrix.003 file - promoters60/5664942
tttctat

SEQ ID NO: 63010 - DNA, 7 bp, Unknown
  misc_feature (1)..( 7): Matrix.003 file - promoters60/5665083
tcgacaa

SEQ ID NO: 63011 - DNA, 7 bp, Unknown
  misc_feature (1)..( 7): Matrix.003 file - promoters60/5665083
gttttta

SEQ ID NO: 63012 - DNA, 7 bp, Unknown
  misc_feature (1)..( 7): Matrix.003 file - promoters60/5665083
gaaacac

SEQ ID NO: 63013 - DNA, 8 bp, Unknown
  misc_feature (1)..( 8): Matrix.003 file - promoters60/5665083
tctctatt

SEQ ID NO: 63014 - DNA, 6 bp, Unknown
  misc_feature (1)..( 6): Matrix.003 file - promoters60/5665083
taaaaa

SEQ ID NO: 63015 - DNA, 8 bp, Unknown
  misc_feature (1)..( 8): Matrix.003 file - promoters60/5665083
tggactgt

SEQ ID NO: 63016 - DNA, 7 bp, Unknown
  misc_feature (1)..( 7): Matrix.003 file - promoters60/5665083
atcctat

SEQ ID NO: 63017 - DNA, 6 bp, Unknown
  misc_feature (1)..( 6): Matrix.003 file - promoters60/5665083
tgaacc

SEQ ID NO: 63018 - DNA, 6 bp, Unknown
  misc_feature (1)..( 6): Matrix.003 file - promoters60/5665083
ttacat

SEQ ID NO: 63019 - DNA, 7 bp, Unknown
  misc_feature (1)..( 7): Matrix.003 file - promoters60/5665083
gtgattt

SEQ ID NO: 63020 - DNA, 10 bp, Unknown
  misc_feature (1)..( 10): Matrix.003 file - promoters60/5665083
ttttgaatct

SEQ ID NO: 63021 - DNA, 7 bp, Unknown
  misc_feature (1)..( 7): Matrix.003 file - promoters60/5665083
tataatc

SEQ ID NO: 63022 - DNA, 6 bp, Unknown
  misc_feature (1)..( 6): Matrix.003 file - promoters60/5665083
atattg

SEQ ID NO: 63023 - DNA, 7 bp, Unknown
  misc_feature (1)..( 7): Matrix.003 file - promoters60/5665083
tatagtt

SEQ ID NO: 63024 - DNA, 11 bp, Unknown
  misc_feature (1)..( 11): Matrix.003 file - promoters60/5665083
aaacttcatct

SEQ ID NO: 63025 - DNA, 7 bp, Unknown
  misc_feature (1)..( 7): Matrix.003 file - promoters60/5665083
tatatgt

SEQ ID NO: 63026 - DNA, 7 bp, Unknown
  misc_feature (1)..( 7): Matrix.003 file - promoters60/5665083
taagatt

SEQ ID NO: 63027 - DNA, 7 bp, Unknown
  misc_feature (1)..( 7): Matrix.003 file - promoters60/5665083
tggatat

SEQ ID NO: 63028 - DNA, 15 bp, Unknown
  misc_feature (1)..( 15): Matrix.003 file - promoters60/5665140
gaaagttcaattaat

SEQ ID NO: 63029 - DNA, 11 bp, Unknown
  misc_feature (1)..( 11): Matrix.003 file - promoters60/5665140
tttaacataga

SEQ ID NO: 63030 - DNA, 10 bp, Unknown
  misc_feature (1)..( 10): Matrix.003 file - promoters60/5665140
attaaatgtt

SEQ ID NO: 63031 - DNA, 10 bp, Unknown
  misc_feature (1)..( 10): Matrix.003 file - promoters60/5665140
ttaaatgtta

SEQ ID NO: 63032 - DNA, 8 bp, Unknown
  misc_feature (1)..( 8): Matrix.003 file - promoters60/5665140
acaaaaaa

SEQ ID NO: 63033 - DNA, 8 bp, Unknown
  misc_feature (1)..( 8): Matrix.003 file - promoters60/5665140
aaaacaaa

SEQ ID NO: 63034 - DNA, 8 bp, Unknown
  misc_feature (1)..( 8): Matrix.003 file - promoters60/5665140
aataaata

SEQ ID NO: 63035 - DNA, 8 bp, Unknown
  misc_feature (1)..( 8): Matrix.003 file - promoters60/5665140
aaacatag

SEQ ID NO: 63036 - DNA, 13 bp, Unknown
  misc_feature (1)..( 13): Matrix.003 file - promoters60/5665140
aaaacaataaatt

SEQ ID NO: 63037 - DNA, 10 bp, Unknown
  misc_feature (1)..( 10): Matrix.003 file - promoters60/5665140
tataattacg

SEQ ID NO: 63038 - DNA, 10 bp, Unknown
  misc_feature (1)..( 10): Matrix.003 file - promoters60/5665140
catacaattc

SEQ ID NO: 63039 - DNA, 9 bp, Unknown
  misc_feature (1)..( 9): Matrix.003 file - promoters60/5665140
aatttaatt

SEQ ID NO: 63040 - DNA, 16 bp, Unknown
  misc_feature (1)..( 16): Matrix.003 file - promoters60/5665140
taatttaaatcataaa

SEQ ID NO: 63041 - DNA, 10 bp, Unknown
  misc_feature (1)..( 10): Matrix.003 file - promoters60/5665140
aaaaaacaat

SEQ ID NO: 63042 - DNA, 8 bp, Unknown
  misc_feature (1)..( 8): Matrix.003 file - promoters60/5665234
caaaaaaa

SEQ ID NO: 63043 - DNA, 10 bp, Unknown
  misc_feature (1)..( 10): Matrix.003 file - promoters60/5665283
ttttaaaaga

SEQ ID NO: 63044 - DNA, 7 bp, Unknown
  misc_feature (1)..( 7): Matrix.003 file - promoters60/5665283
caataat

SEQ ID NO: 63045 - DNA, 7 bp, Unknown
  misc_feature (1)..( 7): Matrix.003 file - promoters60/5665283
attattg

SEQ ID NO: 63046 - DNA, 7 bp, Unknown
  misc_feature (1)..( 7): Matrix.003 file - promoters60/5665283
cacaaag

SEQ ID NO: 63047 - DNA, 6 bp, Unknown
  misc_feature (1)..( 6): Matrix.003 file - promoters60/5665283
taccct

SEQ ID NO: 63048 - DNA, 10 bp, Unknown
  misc_feature (1)..( 10): Matrix.003 file - promoters60/5665283
attacttttt

SEQ ID NO: 63049 - DNA, 7 bp, Unknown
  misc_feature (1)..( 7): Matrix.003 file - promoters60/5665283
gatatat

SEQ ID NO: 63050 - DNA, 6 bp, Unknown
  misc_feature (1)..( 6): Matrix.003 file - promoters60/5665283
caaaag

SEQ ID NO: 63051 - DNA, 7 bp, Unknown
  misc_feature (1)..( 7): Matrix.003 file - promoters60/5665283
ttgagtt

SEQ ID NO: 63052 - DNA, 7 bp, Unknown
  misc_feature (1)..( 7): Matrix.003 file - promoters60/5665283
atagcta

SEQ ID NO: 63053 - DNA, 10 bp, Unknown
  misc_feature (1)..( 10): Matrix.003 file - promoters60/5665283
actatatata

SEQ ID NO: 63054 - DNA, 8 bp, Unknown
  misc_feature (1)..( 8): Matrix.003 file - promoters60/5665283
acatagga

SEQ ID NO: 63055 - DNA, 6 bp, Unknown
  misc_feature (1)..( 6): Matrix.003 file - promoters60/5665283
tatttt

SEQ ID NO: 63056 - DNA, 13 bp, Unknown
  misc_feature (1)..( 13): Matrix.003 file - promoters60/5665283
attggatacatat

SEQ ID NO: 63057 - DNA, 6 bp, Unknown
  misc_feature (1)..( 6): Matrix.003 file - promoters60/5665283
gaacat

SEQ ID NO: 63058 - DNA, 6 bp, Unknown
  misc_feature (1)..( 6): Matrix.003 file - promoters60/5665283
tttata

SEQ ID NO: 63059 - DNA, 8 bp, Unknown
  misc_feature (1)..( 8): Matrix.003 file - promoters60/5665283
aatcttta

SEQ ID NO: 63060 - DNA, 6 bp, Unknown
  misc_feature (1)..( 6): Matrix.003 file - promoters60/5665283
ttaata

SEQ ID NO: 63061 - DNA, 7 bp, Unknown
  misc_feature (1)..( 7): Matrix.003 file - promoters60/5665283
taacgct

SEQ ID NO: 63062 - DNA, 6 bp, Unknown
  misc_feature (1)..( 6): Matrix.003 file - promoters60/5665283
aacaac

SEQ ID NO: 63063 - DNA, 8 bp, Unknown
  misc_feature (1)..( 8): Matrix.003 file - promoters60/5665283
gtaataat

SEQ ID NO: 63064 - DNA, 7 bp, Unknown
  misc_feature (1)..( 7): Matrix.003 file - promoters60/5665314
aaacaaa

SEQ ID NO: 63065 - DNA, 7 bp, Unknown
  misc_feature (1)..( 7): Matrix.003 file - promoters60/5665314
aaaagaa

SEQ ID NO: 63066 - DNA, 6 bp, Unknown
  misc_feature (1)..( 6): Matrix.003 file - promoters60/5665314
gacaaa

SEQ ID NO: 63067 - DNA, 8 bp, Unknown
  misc_feature (1)..( 8): Matrix.003 file - promoters60/5665314
tttattat

SEQ ID NO: 63068 - DNA, 7 bp, Unknown
  misc_feature (1)..( 7): Matrix.003 file - promoters60/5665314
aacagaa

SEQ ID NO: 63069 - DNA, 8 bp, Unknown
  misc_feature (1)..( 8): Matrix.003 file - promoters60/5665314
ttttgagt

SEQ ID NO: 63070 - DNA, 7 bp, Unknown
  misc_feature (1)..( 7): Matrix.003 file - promoters60/5665314
tgtatct

SEQ ID NO: 63071 - DNA, 6 bp, Unknown
  misc_feature (1)..( 6): Matrix.003 file - promoters60/5665314
taataa

SEQ ID NO: 63072 - DNA, 8 bp, Unknown
  misc_feature (1)..( 8): Matrix.003 file - promoters60/5665314
taaaggag

SEQ ID NO: 63073 - DNA, 6 bp, Unknown
  misc_feature (1)..( 6): Matrix.003 file - promoters60/5665314
ttcctg

SEQ ID NO: 63074 - DNA, 10 bp, Unknown
  misc_feature (1)..( 10): Matrix.003 file - promoters60/5665314
gggtttatga

SEQ ID NO: 63075 - DNA, 8 bp, Unknown
  misc_feature (1)..( 8): Matrix.003 file - promoters60/5665314
tggaagaa

SEQ ID NO: 63076 - DNA, 6 bp, Unknown
  misc_feature (1)..( 6): Matrix.003 file - promoters60/5665314
acctgt

SEQ ID NO: 63077 - DNA, 6 bp, Unknown
  misc_feature (1)..( 6): Matrix.003 file - promoters60/5665314
cacaag

SEQ ID NO: 63078 - DNA, 7 bp, Unknown
  misc_feature (1)..( 7): Matrix.003 file - promoters60/5665314
gaagctt

SEQ ID NO: 63079 - DNA, 9 bp, Unknown
  misc_feature (1)..( 9): Matrix.003 file - promoters60/5665326
aatgaatat

SEQ ID NO: 63080 - DNA, 13 bp, Unknown
  misc_feature (1)..( 13): Matrix.003 file - promoters60/5665326
ttataataaatag

SEQ ID NO: 63081 - DNA, 8 bp, Unknown
  misc_feature (1)..( 8): Matrix.003 file - promoters60/5665326
aaatatat

SEQ ID NO: 63082 - DNA, 8 bp, Unknown
  misc_feature (1)..( 8): Matrix.003 file - promoters60/5665326
aaattaat

SEQ ID NO: 63083 - DNA, 9 bp, Unknown
  misc_feature (1)..( 9): Matrix.003 file - promoters60/5665326
ctttatata

SEQ ID NO: 63084 - DNA, 9 bp, Unknown
  misc_feature (1)..( 9): Matrix.003 file - promoters60/5665326
atactttac

SEQ ID NO: 63085 - DNA, 9 bp, Unknown
  misc_feature (1)..( 9): Matrix.003 file - promoters60/5665326
tttattgat

SEQ ID NO: 63086 - DNA, 9 bp, Unknown
  misc_feature (1)..( 9): Matrix.003 file - promoters60/5665326
aatttattt

SEQ ID NO: 63087 - DNA, 9 bp, Unknown
  misc_feature (1)..( 9): Matrix.003 file - promoters60/5665326
cattttttt

SEQ ID NO: 63088 - DNA, 8 bp, Unknown
  misc_feature (1)..( 8): Matrix.003 file - promoters60/5665343
ttttttta

SEQ ID NO: 63089 - DNA, 8 bp, Unknown
  misc_feature (1)..( 8): Matrix.003 file - promoters60/5665343
tttaagtt

SEQ ID NO: 63090 - DNA, 8 bp, Unknown
  misc_feature (1)..( 8): Matrix.003 file - promoters60/5665343
acttcttt

SEQ ID NO: 63091 - DNA, 7 bp, Unknown
  misc_feature (1)..( 7): Matrix.003 file - promoters60/5665343
ttgtttc

SEQ ID NO: 63092 - DNA, 13 bp, Unknown
  misc_feature (1)..( 13): Matrix.003 file - promoters60/5665343
ctaaaaactatga

SEQ ID NO: 63093 - DNA, 7 bp, Unknown
  misc_feature (1)..( 7): Matrix.003 file - promoters60/5665343
gaagaaa

SEQ ID NO: 63094 - DNA, 8 bp, Unknown
  misc_feature (1)..( 8): Matrix.003 file - promoters60/5665343
ttatttta

SEQ ID NO: 63095 - DNA, 7 bp, Unknown
  misc_feature (1)..( 7): Matrix.003 file - promoters60/5665351
gcatttc

SEQ ID NO: 63096 - DNA, 8 bp, Unknown
  misc_feature (1)..( 8): Matrix.003 file - promoters60/5665351
caaatgga

SEQ ID NO: 63097 - DNA, 6 bp, Unknown
  misc_feature (1)..( 6): Matrix.003 file - promoters60/5665351
accatt

SEQ ID NO: 63098 - DNA, 6 bp, Unknown
  misc_feature (1)..( 6): Matrix.003 file - promoters60/5665351
atcttt

SEQ ID NO: 63099 - DNA, 7 bp, Unknown
  misc_feature (1)..( 7): Matrix.003 file - promoters60/5665351
tgaaatt

SEQ ID NO: 63100 - DNA, 9 bp, Unknown
  misc_feature (1)..( 9): Matrix.003 file - promoters60/5665351
cttcttctc

SEQ ID NO: 63101 - DNA, 6 bp, Unknown
  misc_feature (1)..( 6): Matrix.003 file - promoters60/5665351
tattat

SEQ ID NO: 63102 - DNA, 7 bp, Unknown
  misc_feature (1)..( 7): Matrix.003 file - promoters60/5665351
tatatga

SEQ ID NO: 63103 - DNA, 6 bp, Unknown
  misc_feature (1)..( 6): Matrix.003 file - promoters60/5665351
atcaac

SEQ ID NO: 63104 - DNA, 8 bp, Unknown
  misc_feature (1)..( 8): Matrix.003 file - promoters60/5665351
cgaaacca

SEQ ID NO: 63105 - DNA, 7 bp, Unknown
  misc_feature (1)..( 7): Matrix.003 file - promoters60/5665351
aggaatc

SEQ ID NO: 63106 - DNA, 6 bp, Unknown
  misc_feature (1)..( 6): Matrix.003 file - promoters60/5665351
cttctt

SEQ ID NO: 63107 - DNA, 9 bp, Unknown
  misc_feature (1)..( 9): Matrix.003 file - promoters60/5665351
aagattgtt

SEQ ID NO: 63108 - DNA, 6 bp, Unknown
  misc_feature (1)..( 6): Matrix.003 file - promoters60/5665351
tgatct

SEQ ID NO: 63109 - DNA, 7 bp, Unknown
  misc_feature (1)..( 7): Matrix.003 file - promoters60/5665351
tggtaat

SEQ ID NO: 63110 - DNA, 6 bp, Unknown
  misc_feature (1)..( 6): Matrix.003 file - promoters60/5665359
aattct

SEQ ID NO: 63111 - DNA, 7 bp, Unknown
  misc_feature (1)..( 7): Matrix.003 file - promoters60/5665359
aaaaatt

SEQ ID NO: 63112 - DNA, 7 bp, Unknown
  misc_feature (1)..( 7): Matrix.003 file - promoters60/5665359
tttgaga

SEQ ID NO: 63113 - DNA, 6 bp, Unknown
  misc_feature (1)..( 6): Matrix.003 file - promoters60/5665359
gaactt

SEQ ID NO: 63114 - DNA, 7 bp, Unknown
  misc_feature (1)..( 7): Matrix.003 file - promoters60/5665359
gagaaaa

SEQ ID NO: 63115 - DNA, 5 bp, Unknown
  misc_feature (1)..( 5): Matrix.003 file - promoters60/5665359
gttta

SEQ ID NO: 63116 - DNA, 6 bp, Unknown
  misc_feature (1)..( 6): Matrix.003 file - promoters60/5665359
tattgt

SEQ ID NO: 63117 - DNA, 9 bp, Unknown
  misc_feature (1)..( 9): Matrix.003 file - promoters60/5665359
attgttttg

SEQ ID NO: 63118 - DNA, 8 bp, Unknown
  misc_feature (1)..( 8): Matrix.003 file - promoters60/5665359
aaaatata

SEQ ID NO: 63119 - DNA, 6 bp, Unknown
  misc_feature (1)..( 6): Matrix.003 file - promoters60/5665359
ttaatt

SEQ ID NO: 63120 - DNA, 6 bp, Unknown
  misc_feature (1)..( 6): Matrix.003 file - promoters60/5665359
cagaag

SEQ ID NO: 63121 - DNA, 7 bp, Unknown
  misc_feature (1)..( 7): Matrix.003 file - promoters60/5665359
aatctct

SEQ ID NO: 63122 - DNA, 10 bp, Unknown
  misc_feature (1)..( 10): Matrix.003 file - promoters60/5665359
aaagatttct

SEQ ID NO: 63123 - DNA, 6 bp, Unknown
  misc_feature (1)..( 6): Matrix.003 file - promoters60/5665359
actttg

SEQ ID NO: 63124 - DNA, 6 bp, Unknown
  misc_feature (1)..( 6): Matrix.003 file - promoters60/5665359
tttatt

SEQ ID NO: 63125 - DNA, 8 bp, Unknown
  misc_feature (1)..( 8): Matrix.003 file - promoters60/5665359
taaaattt

SEQ ID NO: 63126 - DNA, 6 bp, Unknown
  misc_feature (1)..( 6): Matrix.003 file - promoters60/5665359
gtatca

SEQ ID NO: 63127 - DNA, 8 bp, Unknown
  misc_feature (1)..( 8): Matrix.003 file - promoters60/5665367
tcgctgaa

SEQ ID NO: 63128 - DNA, 7 bp, Unknown
  misc_feature (1)..( 7): Matrix.003 file - promoters60/5665367
aaataaa

SEQ ID NO: 63129 - DNA, 8 bp, Unknown
  misc_feature (1)..( 8): Matrix.003 file - promoters60/5665367
tatgactt

SEQ ID NO: 63130 - DNA, 7 bp, Unknown
  misc_feature (1)..( 7): Matrix.003 file - promoters60/5665367
ggaaaaa

SEQ ID NO: 63131 - DNA, 8 bp, Unknown
  misc_feature (1)..( 8): Matrix.003 file - promoters60/5665367
tatatata

SEQ ID NO: 63132 - DNA, 9 bp, Unknown
  misc_feature (1)..( 9): Matrix.003 file - promoters60/5665367
taagagttt

SEQ ID NO: 63133 - DNA, 8 bp, Unknown
  misc_feature (1)..( 8): Matrix.003 file - promoters60/5665367
aggaattc

SEQ ID NO: 63134 - DNA, 7 bp, Unknown
  misc_feature (1)..( 7): Matrix.003 file - promoters60/5665367
actatcg

SEQ ID NO: 63135 - DNA, 7 bp, Unknown
  misc_feature (1)..( 7): Matrix.003 file - promoters60/5665367
taaaatg

SEQ ID NO: 63136 - DNA, 7 bp, Unknown
  misc_feature (1)..( 7): Matrix.003 file - promoters60/5665367
aaaatag

SEQ ID NO: 63137 - DNA, 9 bp, Unknown
  misc_feature (1)..( 9): Matrix.003 file - promoters60/5665367
attctattt

SEQ ID NO: 63138 - DNA, 7 bp, Unknown
  misc_feature (1)..( 7): Matrix.003 file - promoters60/5665367
ttagata

SEQ ID NO: 63139 - DNA, 7 bp, Unknown
  misc_feature (1)..( 7): Matrix.003 file - promoters60/5665367
ttagttc

SEQ ID NO: 63140 - DNA, 7 bp, Unknown
  misc_feature (1)..( 7): Matrix.003 file - promoters60/5665367
acaaaat

SEQ ID NO: 63141 - DNA, 6 bp, Unknown
  misc_feature (1)..( 6): Matrix.003 file - promoters60/5665367
aaaata

SEQ ID NO: 63142 - DNA, 7 bp, Unknown
  misc_feature (1)..( 7): Matrix.003 file - promoters60/5665367
aaacgaa

SEQ ID NO: 63143 - DNA, 6 bp, Unknown
  misc_feature (1)..( 6): Matrix.003 file - promoters60/5665367
taaaaa

SEQ ID NO: 63144 - DNA, 7 bp, Unknown
  misc_feature (1)..( 7): Matrix.003 file - promoters60/5665367
ggtgaga

SEQ ID NO: 63145 - DNA, 6 bp, Unknown
  misc_feature (1)..( 6): Matrix.003 file - promoters60/5665367
gagaaa

SEQ ID NO: 63146 - DNA, 7 bp, Unknown
  misc_feature (1)..( 7): Matrix.003 file - promoters60/5665374
taaaaca

SEQ ID NO: 63147 - DNA, 8 bp, Unknown
  misc_feature (1)..( 8): Matrix.003 file - promoters60/5665374
ttatcaaa

SEQ ID NO: 63148 - DNA, 7 bp, Unknown
  misc_feature (1)..( 7): Matrix.003 file - promoters60/5665374
tacagct

SEQ ID NO: 63149 - DNA, 6 bp, Unknown
  misc_feature (1)..( 6): Matrix.003 file - promoters60/5665374
ccacta

SEQ ID NO: 63150 - DNA, 10 bp, Unknown
  misc_feature (1)..( 10): Matrix.003 file - promoters60/5665374
actatctaaa

SEQ ID NO: 63151 - DNA, 7 bp, Unknown
  misc_feature (1)..( 7): Matrix.003 file - promoters60/5665374
aaaatta

SEQ ID NO: 63152 - DNA, 7 bp, Unknown
  misc_feature (1)..( 7): Matrix.003 file - promoters60/5665374
aatggac

SEQ ID NO: 63153 - DNA, 7 bp, Unknown
  misc_feature (1)..( 7): Matrix.003 file - promoters60/5665374
aataaat

SEQ ID NO: 63154 - DNA, 7 bp, Unknown
  misc_feature (1)..( 7): Matrix.003 file - promoters60/5665374
tatatga

SEQ ID NO: 63155 - DNA, 7 bp, Unknown
  misc_feature (1)..( 7): Matrix.003 file - promoters60/5665374
aaaccaa

SEQ ID NO: 63156 - DNA, 6 bp, Unknown
  misc_feature (1)..( 6): Matrix.003 file - promoters60/5665374
tttttg

SEQ ID NO: 63157 - DNA, 8 bp, Unknown
  misc_feature (1)..( 8): Matrix.003 file - promoters60/5665374
aataacca

SEQ ID NO: 63158 - DNA, 6 bp, Unknown
  misc_feature (1)..( 6): Matrix.003 file - promoters60/5665374
aaatca

SEQ ID NO: 63159 - DNA, 6 bp, Unknown
  misc_feature (1)..( 6): Matrix.003 file - promoters60/5665374
ccaaaa

SEQ ID NO: 63160 - DNA, 8 bp, Unknown
  misc_feature (1)..( 8): Matrix.003 file - promoters60/5665374
tattgaac

SEQ ID NO: 63161 - DNA, 6 bp, Unknown
  misc_feature (1)..( 6): Matrix.003 file - promoters60/5665374
ttattg

SEQ ID NO: 63162 - DNA, 8 bp, Unknown
  misc_feature (1)..( 8): Matrix.003 file - promoters60/5665374
attgtcaa

SEQ ID NO: 63163 - DNA, 9 bp, Unknown
  misc_feature (1)..( 9): Matrix.003 file - promoters60/5665374
gaaaaaatg

SEQ ID NO: 63164 - DNA, 6 bp, Unknown
  misc_feature (1)..( 6): Matrix.003 file - promoters60/5665374
taaaag

SEQ ID NO: 63165 - DNA, 8 bp, Unknown
  misc_feature (1)..( 8): Matrix.003 file - promoters60/5665374
agcctcac

SEQ ID NO: 63166 - DNA, 7 bp, Unknown
  misc_feature (1)..( 7): Matrix.003 file - promoters60/5665404
agatgtg

SEQ ID NO: 63167 - DNA, 9 bp, Unknown
  misc_feature (1)..( 9): Matrix.003 file - promoters60/5665404
ttcgtcctt

SEQ ID NO: 63168 - DNA, 7 bp, Unknown
  misc_feature (1)..( 7): Matrix.003 file - promoters60/5665404
ttgcttt

SEQ ID NO: 63169 - DNA, 10 bp, Unknown
  misc_feature (1)..( 10): Matrix.003 file - promoters60/5665404
aaataaaata

SEQ ID NO: 63170 - DNA, 10 bp, Unknown
  misc_feature (1)..( 10): Matrix.003 file - promoters60/5665404
agttaaaaca

SEQ ID NO: 63171 - DNA, 10 bp, Unknown
  misc_feature (1)..( 10): Matrix.003 file - promoters60/5665404
aaccctaaag

SEQ ID NO: 63172 - DNA, 6 bp, Unknown
  misc_feature (1)..( 6): Matrix.003 file - promoters60/5665404
aaaaat

SEQ ID NO: 63173 - DNA, 6 bp, Unknown
  misc_feature (1)..( 6): Matrix.003 file - promoters60/5665404
gcctac

SEQ ID NO: 63174 - DNA, 9 bp, Unknown
  misc_feature (1)..( 9): Matrix.003 file - promoters60/5665404
aaacattgt

SEQ ID NO: 63175 - DNA, 6 bp, Unknown
  misc_feature (1)..( 6): Matrix.003 file - promoters60/5665404
ctattg

SEQ ID NO: 63176 - DNA, 7 bp, Unknown
  misc_feature (1)..( 7): Matrix.003 file - promoters60/5665404
aaacaaa

SEQ ID NO: 63177 - DNA, 7 bp, Unknown
  misc_feature (1)..( 7): Matrix.003 file - promoters60/5665404
aaacttt

SEQ ID NO: 63178 - DNA, 6 bp, Unknown
  misc_feature (1)..( 6): Matrix.003 file - promoters60/5665404
agtaaa

SEQ ID NO: 63179 - DNA, 7 bp, Unknown
  misc_feature (1)..( 7): Matrix.003 file - promoters60/5665404
aatcggg

SEQ ID NO: 63180 - DNA, 8 bp, Unknown
  misc_feature (1)..( 8): Matrix.003 file - promoters60/5665404
gaaacaaa

SEQ ID NO: 63181 - DNA, 10 bp, Unknown
  misc_feature (1)..( 10): Matrix.003 file - promoters60/5665404
ggaaaagaaa

SEQ ID NO: 63182 - DNA, 7 bp, Unknown
  misc_feature (1)..( 7): Matrix.003 file - promoters60/5665404
cccacta

SEQ ID NO: 63183 - DNA, 9 bp, Unknown
  misc_feature (1)..( 9): Matrix.003 file - promoters60/5665404
aaagaaaag

SEQ ID NO: 63184 - DNA, 7 bp, Unknown
  misc_feature (1)..( 7): Matrix.003 file - promoters60/5665404
gtatata

SEQ ID NO: 63185 - DNA, 7 bp, Unknown
  misc_feature (1)..( 7): Matrix.003 file - promoters60/5665420
aaaatat

SEQ ID NO: 63186 - DNA, 8 bp, Unknown
  misc_feature (1)..( 8): Matrix.003 file - promoters60/5665420
caacgaaa

SEQ ID NO: 63187 - DNA, 7 bp, Unknown
  misc_feature (1)..( 7): Matrix.003 file - promoters60/5665420
tatcata

SEQ ID NO: 63188 - DNA, 6 bp, Unknown
  misc_feature (1)..( 6): Matrix.003 file - promoters60/5665420
atttta

SEQ ID NO: 63189 - DNA, 6 bp, Unknown
  misc_feature (1)..( 6): Matrix.003 file - promoters60/5665420
gacggt

SEQ ID NO: 63190 - DNA, 9 bp, Unknown
  misc_feature (1)..( 9): Matrix.003 file - promoters60/5665420
aaatgaaaa

SEQ ID NO: 63191 - DNA, 10 bp, Unknown
  misc_feature (1)..( 10): Matrix.003 file - promoters60/5665420
tgtgaattaa

SEQ ID NO: 63192 - DNA, 8 bp, Unknown
  misc_feature (1)..( 8): Matrix.003 file - promoters60/5665420
taataaag

SEQ ID NO: 63193 - DNA, 7 bp, Unknown
  misc_feature (1)..( 7): Matrix.003 file - promoters60/5665420
tctcttt

SEQ ID NO: 63194 - DNA, 7 bp, Unknown
  misc_feature (1)..( 7): Matrix.003 file - promoters60/5665420
tttgagt

SEQ ID NO: 63195 - DNA, 9 bp, Unknown
  misc_feature (1)..( 9): Matrix.003 file - promoters60/5665420
ttaaaatag

SEQ ID NO: 63196 - DNA, 9 bp, Unknown
  misc_feature (1)..( 9): Matrix.003 file - promoters60/5665420
ataaattaa

SEQ ID NO: 63197 - DNA, 6 bp, Unknown
  misc_feature (1)..( 6): Matrix.003 file - promoters60/5665420
atatat

SEQ ID NO: 63198 - DNA, 8 bp, Unknown
  misc_feature (1)..( 8): Matrix.003 file - promoters60/5665420
aacggaaa

SEQ ID NO: 63199 - DNA, 6 bp, Unknown
  misc_feature (1)..( 6): Matrix.003 file - promoters60/5665420
tcataa

SEQ ID NO: 63200 - DNA, 7 bp, Unknown
  misc_feature (1)..( 7): Matrix.003 file - promoters60/5665420
ttatttc

SEQ ID NO: 63201 - DNA, 7 bp, Unknown
  misc_feature (1)..( 7): Matrix.003 file - promoters60/5665420
taaaaca

SEQ ID NO: 63202 - DNA, 7 bp, Unknown
  misc_feature (1)..( 7): Matrix.003 file - promoters60/5665420
aaaacaa

SEQ ID NO: 63203 - DNA, 7 bp, Unknown
  misc_feature (1)..( 7): Matrix.003 file - promoters60/5665420
tgtatat

SEQ ID NO: 63204 - DNA, 6 bp, Unknown
  misc_feature (1)..( 6): Matrix.003 file - promoters60/5665420
ttatca

SEQ ID NO: 63205 - DNA, 6 bp, Unknown
  misc_feature (1)..( 6): Matrix.003 file - promoters60/5665420
atttat

SEQ ID NO: 63206 - DNA, 8 bp, Unknown
  misc_feature (1)..( 8): Matrix.003 file - promoters60/5665420
gtgataaa

SEQ ID NO: 63207 - DNA, 7 bp, Unknown
  misc_feature (1)..( 7): Matrix.003 file - promoters60/5665420
gaaaata

SEQ ID NO: 63208 - DNA, 6 bp, Unknown
  misc_feature (1)..( 6): Matrix.003 file - promoters60/5665420
cagaaa

SEQ ID NO: 63209 - DNA, 10 bp, Unknown
  misc_feature (1)..( 10): Matrix.003 file - promoters60/5665420
ttaacaagta

SEQ ID NO: 63210 - DNA, 6 bp, Unknown
  misc_feature (1)..( 6): Matrix.003 file - promoters60/5665420
aagcaa

SEQ ID NO: 63211 - DNA, 14 bp, Unknown
  misc_feature (1)..( 14): Matrix.003 file - promoters60/5665436
aataattatattaa

SEQ ID NO: 63212 - DNA, 14 bp, Unknown
  misc_feature (1)..( 14): Matrix.003 file - promoters60/5665436
aattttttctttat

SEQ ID NO: 63213 - DNA, 10 bp, Unknown
  misc_feature (1)..( 10): Matrix.003 file - promoters60/5665436
aatattaaaa

SEQ ID NO: 63214 - DNA, 12 bp, Unknown
  misc_feature (1)..( 12): Matrix.003 file - promoters60/5665507
caagaaaacaaa

SEQ ID NO: 63215 - DNA, 10 bp, Unknown
  misc_feature (1)..( 10): Matrix.003 file - promoters60/5665796
tattaatgtt

SEQ ID NO: 63216 - DNA, 10 bp, Unknown
  misc_feature (1)..( 10): Matrix.003 file - promoters60/5665796
attgataaat

SEQ ID NO: 63217 - DNA, 12 bp, Unknown
  misc_feature (1)..( 12): Matrix.003 file - promoters60/5665796
taataaattcat

SEQ ID NO: 63218 - DNA, 6 bp, Unknown
  misc_feature (1)..( 6): Matrix.003 file - promoters60/5666614
gaataa

SEQ ID NO: 63219 - DNA, 7 bp, Unknown
  misc_feature (1)..( 7): Matrix.003 file - promoters60/5666614
atggaat

SEQ ID NO: 63220 - DNA, 7 bp, Unknown
  misc_feature (1)..( 7): Matrix.003 file - promoters60/5666614
ttaaaaa

SEQ ID NO: 63221 - DNA, 6 bp, Unknown
  misc_feature (1)..( 6): Matrix.003 file - promoters60/5666614
caaggg

SEQ ID NO: 63222 - DNA, 7 bp, Unknown
  misc_feature (1)..( 7): Matrix.003 file - promoters60/5666614
gtttaac

SEQ ID NO: 63223 - DNA, 8 bp, Unknown
  misc_feature (1)..( 8): Matrix.003 file - promoters60/5666614
taatttcg

SEQ ID NO: 63224 - DNA, 6 bp, Unknown
  misc_feature (1)..( 6): Matrix.003 file - promoters60/5666614
caacaa

SEQ ID NO: 63225 - DNA, 6 bp, Unknown
  misc_feature (1)..( 6): Matrix.003 file - promoters60/5666614
ccacaa

SEQ ID NO: 63226 - DNA, 9 bp, Unknown
  misc_feature (1)..( 9): Matrix.003 file - promoters60/5666614
agaagtagc

SEQ ID NO: 63227 - DNA, 8 bp, Unknown
  misc_feature (1)..( 8): Matrix.003 file - promoters60/5666614
acaacaga

SEQ ID NO: 63228 - DNA, 8 bp, Unknown
  misc_feature (1)..( 8): Matrix.003 file - promoters60/5666614
ttgcttac

SEQ ID NO: 63229 - DNA, 7 bp, Unknown
  misc_feature (1)..( 7): Matrix.003 file - promoters60/5666614
tttctct

SEQ ID NO: 63230 - DNA, 6 bp, Unknown
  misc_feature (1)..( 6): Matrix.003 file - promoters60/5666614
tatttt

SEQ ID NO: 63231 - DNA, 9 bp, Unknown
  misc_feature (1)..( 9): Matrix.003 file - promoters60/5666614
gacaaatac

SEQ ID NO: 63232 - DNA, 6 bp, Unknown
  misc_feature (1)..( 6): Matrix.003 file - promoters60/5666614
caattt

SEQ ID NO: 63233 - DNA, 8 bp, Unknown
  misc_feature (1)..( 8): Matrix.003 file - promoters60/5667152
cggtataa

SEQ ID NO: 63234 - DNA, 8 bp, Unknown
  misc_feature (1)..( 8): Matrix.003 file - promoters60/5667152
aaaaaatc

SEQ ID NO: 63235 - DNA, 8 bp, Unknown
  misc_feature (1)..( 8): Matrix.003 file - promoters60/5667152
acaaaatt

SEQ ID NO: 63236 - DNA, 7 bp, Unknown
  misc_feature (1)..( 7): Matrix.003 file - promoters60/5667152
agaaatg

SEQ ID NO: 63237 - DNA, 7 bp, Unknown
  misc_feature (1)..( 7): Matrix.003 file - promoters60/5667152
agtgaag

SEQ ID NO: 63238 - DNA, 8 bp, Unknown
  misc_feature (1)..( 8): Matrix.003 file - promoters60/5667152
tggtctgt

SEQ ID NO: 63239 - DNA, 7 bp, Unknown
  misc_feature (1)..( 7): Matrix.003 file - promoters60/5667152
ttattcg

SEQ ID NO: 63240 - DNA, 7 bp, Unknown
  misc_feature (1)..( 7): Matrix.003 file - promoters60/5667152
ttgaatc

SEQ ID NO: 63241 - DNA, 9 bp, Unknown
  misc_feature (1)..( 9): Matrix.003 file - promoters60/5667152
atcaaattt

SEQ ID NO: 63242 - DNA, 7 bp, Unknown
  misc_feature (1)..( 7): Matrix.003 file - promoters60/5667152
tttcttc

SEQ ID NO: 63243 - DNA, 6 bp, Unknown
  misc_feature (1)..( 6): Matrix.003 file - promoters60/5667152
gttgta

SEQ ID NO: 63244 - DNA, 7 bp, Unknown
  misc_feature (1)..( 7): Matrix.003 file - promoters60/5667152
gaccaga

SEQ ID NO: 63245 - DNA, 7 bp, Unknown
  misc_feature (1)..( 7): Matrix.003 file - promoters60/5667570
aatgaat

SEQ ID NO: 63246 - DNA, 7 bp, Unknown
  misc_feature (1)..( 7): Matrix.003 file - promoters60/5667570
ataatta

SEQ ID NO: 63247 - DNA, 7 bp, Unknown
  misc_feature (1)..( 7): Matrix.003 file - promoters60/5667570
ttaaaga

SEQ ID NO: 63248 - DNA, 7 bp, Unknown
  misc_feature (1)..( 7): Matrix.003 file - promoters60/5667570
aaaatta

SEQ ID NO: 63249 - DNA, 8 bp, Unknown
  misc_feature (1)..( 8): Matrix.003 file - promoters60/5667570
tatttaat

SEQ ID NO: 63250 - DNA, 9 bp, Unknown
  misc_feature (1)..( 9): Matrix.003 file - promoters60/5667570
tttaaaata

SEQ ID NO: 63251 - DNA, 6 bp, Unknown
  misc_feature (1)..( 6): Matrix.003 file - promoters60/5667570
taataa

SEQ ID NO: 63252 - DNA, 7 bp, Unknown
  misc_feature (1)..( 7): Matrix.003 file - promoters60/5667570
aaaaaag

SEQ ID NO: 63253 - DNA, 8 bp, Unknown
  misc_feature (1)..( 8): Matrix.003 file - promoters60/5667570
aaacaaat

SEQ ID NO: 63254 - DNA, 8 bp, Unknown
  misc_feature (1)..( 8): Matrix.003 file - promoters60/5667570
ataagaaa

SEQ ID NO: 63255 - DNA, 11 bp, Unknown
  misc_feature (1)..( 11): Matrix.003 file - promoters60/5667570
caaaataaaaa

SEQ ID NO: 63256 - DNA, 9 bp, Unknown
  misc_feature (1)..( 9): Matrix.003 file - promoters60/5667570
tggtgtttt

SEQ ID NO: 63257 - DNA, 11 bp, Unknown
  misc_feature (1)..( 11): Matrix.003 file - promoters60/5667570
tatatataaac

SEQ ID NO: 63258 - DNA, 7 bp, Unknown
  misc_feature (1)..( 7): Matrix.003 file - promoters60/5667570
ttcccaa

SEQ ID NO: 63259 - DNA, 6 bp, Unknown
  misc_feature (1)..( 6): Matrix.003 file - promoters60/5667570
ctgttg

SEQ ID NO: 63260 - DNA, 7 bp, Unknown
  misc_feature (1)..( 7): Matrix.003 file - promoters60/5667570
ttgaaat

SEQ ID NO: 63261 - DNA, 6 bp, Unknown
  misc_feature (1)..( 6): Matrix.003 file - promoters60/5667570
aaatta

SEQ ID NO: 63262 - DNA, 7 bp, Unknown
  misc_feature (1)..( 7): Matrix.003 file - promoters60/5667570
cttattt

SEQ ID NO: 63263 - DNA, 8 bp, Unknown
  misc_feature (1)..( 8): Matrix.003 file - promoters60/5667570
tttcaaaa

SEQ ID NO: 63264 - DNA, 7 bp, Unknown
  misc_feature (1)..( 7): Matrix.003 file - promoters60/5667570
aaattta

SEQ ID NO: 63265 - DNA, 7 bp, Unknown
  misc_feature (1)..( 7): Matrix.003 file - promoters60/5667570
acccaaa

SEQ ID NO: 63266 - DNA, 6 bp, Unknown
  misc_feature (1)..( 6): Matrix.003 file - promoters60/5667570
tctcat

SEQ ID NO: 63267 - DNA, 7 bp, Unknown
  misc_feature (1)..( 7): Matrix.003 file - promoters60/5667570
ttgccaa

SEQ ID NO: 63268 - DNA, 6 bp, Unknown
  misc_feature (1)..( 6): Matrix.003 file - promoters60/5667570
tttatt

SEQ ID NO: 63269 - DNA, 6 bp, Unknown
  misc_feature (1)..( 6): Matrix.003 file - promoters60/5667570
taattt

SEQ ID NO: 63270 - DNA, 7 bp, Unknown
  misc_feature (1)..( 7): Matrix.003 file - promoters60/5667570
aaaaagg

SEQ ID NO: 63271 - DNA, 7 bp, Unknown
  misc_feature (1)..( 7): Matrix.003 file - promoters60/5667570
gctaaaa

SEQ ID NO: 63272 - DNA, 8 bp, Unknown
  misc_feature (1)..( 8): Matrix.003 file - promoters60/5667588
caataatt

SEQ ID NO: 63273 - DNA, 9 bp, Unknown
  misc_feature (1)..( 9): Matrix.003 file - promoters60/5667588
attattatt

SEQ ID NO: 63274 - DNA, 10 bp, Unknown
  misc_feature (1)..( 10): Matrix.003 file - promoters60/5667588
tatctaagtg

SEQ ID NO: 63275 - DNA, 6 bp, Unknown
  misc_feature (1)..( 6): Matrix.003 file - promoters60/5667588
ttaaca

SEQ ID NO: 63276 - DNA, 8 bp, Unknown
  misc_feature (1)..( 8): Matrix.003 file - promoters60/5667588
cctaccac

SEQ ID NO: 63277 - DNA, 8 bp, Unknown
  misc_feature (1)..( 8): Matrix.003 file - promoters60/5667588
actatata

SEQ ID NO: 63278 - DNA, 8 bp, Unknown
  misc_feature (1)..( 8): Matrix.003 file - promoters60/5667588
ttattttt

SEQ ID NO: 63279 - DNA, 6 bp, Unknown
  misc_feature (1)..( 6): Matrix.003 file - promoters60/5667588
aattat

SEQ ID NO: 63280 - DNA, 6 bp, Unknown
  misc_feature (1)..( 6): Matrix.003 file - promoters60/5667588
gagttt

SEQ ID NO: 63281 - DNA, 6 bp, Unknown
  misc_feature (1)..( 6): Matrix.003 file - promoters60/5667588
attttt

SEQ ID NO: 63282 - DNA, 7 bp, Unknown
  misc_feature (1)..( 7): Matrix.003 file - promoters60/5667588
tttttat

SEQ ID NO: 63283 - DNA, 9 bp, Unknown
  misc_feature (1)..( 9): Matrix.003 file - promoters60/5667588
aaaaatatc

SEQ ID NO: 63284 - DNA, 6 bp, Unknown
  misc_feature (1)..( 6): Matrix.003 file - promoters60/5667588
acacca

SEQ ID NO: 63285 - DNA, 6 bp, Unknown
  misc_feature (1)..( 6): Matrix.003 file - promoters60/5667588
tcaaga

SEQ ID NO: 63286 - DNA, 6 bp, Unknown
  misc_feature (1)..( 6): Matrix.003 file - promoters60/5667588
atagcc

SEQ ID NO: 63287 - DNA, 6 bp, Unknown
  misc_feature (1)..( 6): Matrix.003 file - promoters60/5667588
aaaaat

SEQ ID NO: 63288 - DNA, 7 bp, Unknown
  misc_feature (1)..( 7): Matrix.003 file - promoters60/5667588
aatagta

SEQ ID NO: 63289 - DNA, 6 bp, Unknown
  misc_feature (1)..( 6): Matrix.003 file - promoters60/5667588
taaagg

SEQ ID NO: 63290 - DNA, 9 bp, Unknown
  misc_feature (1)..( 9): Matrix.003 file - promoters60/5667588
aaaaatgaa

SEQ ID NO: 63291 - DNA, 9 bp, Unknown
  misc_feature (1)..( 9): Matrix.003 file - promoters60/5667588
aaaacattt

SEQ ID NO: 63292 - DNA, 9 bp, Unknown
  misc_feature (1)..( 9): Matrix.003 file - promoters60/5667588
tcacgaaaa

SEQ ID NO: 63293 - DNA, 7 bp, Unknown
  misc_feature (1)..( 7): Matrix.003 file - promoters60/5667588
ttccgaa

SEQ ID NO: 63294 - DNA, 7 bp, Unknown
  misc_feature (1)..( 7): Matrix.003 file - promoters60/5667685
attgatt

SEQ ID NO: 63295 - DNA, 10 bp, Unknown
  misc_feature (1)..( 10): Matrix.003 file - promoters60/5667685
ttgtaaccaa

SEQ ID NO: 63296 - DNA, 8 bp, Unknown
  misc_feature (1)..( 8): Matrix.003 file - promoters60/5667685
ctagaatt

SEQ ID NO: 63297 - DNA, 6 bp, Unknown
  misc_feature (1)..( 6): Matrix.003 file - promoters60/5667685
atcttc

SEQ ID NO: 63298 - DNA, 8 bp, Unknown
  misc_feature (1)..( 8): Matrix.003 file - promoters60/5667685
tttcgaaa

SEQ ID NO: 63299 - DNA, 6 bp, Unknown
  misc_feature (1)..( 6): Matrix.003 file - promoters60/5667685
tcactt

SEQ ID NO: 63300 - DNA, 6 bp, Unknown
  misc_feature (1)..( 6): Matrix.003 file - promoters60/5667685
aaaaat

SEQ ID NO: 63301 - DNA, 8 bp, Unknown
  misc_feature (1)..( 8): Matrix.003 file - promoters60/5667685
ttttttca

SEQ ID NO: 63302 - DNA, 6 bp, Unknown
  misc_feature (1)..( 6): Matrix.003 file - promoters60/5667685
tttaat

SEQ ID NO: 63303 - DNA, 10 bp, Unknown
  misc_feature (1)..( 10): Matrix.003 file - promoters60/5667685
accaaaaatg

SEQ ID NO: 63304 - DNA, 6 bp, Unknown
  misc_feature (1)..( 6): Matrix.003 file - promoters60/5667685
acaaaa

SEQ ID NO: 63305 - DNA, 6 bp, Unknown
  misc_feature (1)..( 6): Matrix.003 file - promoters60/5667685
aataaa

SEQ ID NO: 63306 - DNA, 7 bp, Unknown
  misc_feature (1)..( 7): Matrix.003 file - promoters60/5667685
taaaaat

SEQ ID NO: 63307 - DNA, 6 bp, Unknown
  misc_feature (1)..( 6): Matrix.003 file - promoters60/5667685
actaac

SEQ ID NO: 63308 - DNA, 8 bp, Unknown
  misc_feature (1)..( 8): Matrix.003 file - promoters60/5667685
tgaaacta

SEQ ID NO: 63309 - DNA, 6 bp, Unknown
  misc_feature (1)..( 6): Matrix.003 file - promoters60/5667685
aaatct

SEQ ID NO: 63310 - DNA, 7 bp, Unknown
  misc_feature (1)..( 7): Matrix.003 file - promoters60/5667685
cttaaat

SEQ ID NO: 63311 - DNA, 9 bp, Unknown
  misc_feature (1)..( 9): Matrix.003 file - promoters60/5667685
aactttttt

SEQ ID NO: 63312 - DNA, 7 bp, Unknown
  misc_feature (1)..( 7): Matrix.003 file - promoters60/5667685
ataaaat

SEQ ID NO: 63313 - DNA, 6 bp, Unknown
  misc_feature (1)..( 6): Matrix.003 file - promoters60/5667685
cttttt

SEQ ID NO: 63314 - DNA, 7 bp, Unknown
  misc_feature (1)..( 7): Matrix.003 file - promoters60/5667685
taaacca

SEQ ID NO: 63315 - DNA, 7 bp, Unknown
  misc_feature (1)..( 7): Matrix.003 file - promoters60/5667685
aagttaa

SEQ ID NO: 63316 - DNA, 6 bp, Unknown
  misc_feature (1)..( 6): Matrix.003 file - promoters60/5667685
tgaaaa

SEQ ID NO: 63317 - DNA, 8 bp, Unknown
  misc_feature (1)..( 8): Matrix.003 file - promoters60/5667685
gatgcaag

SEQ ID NO: 63318 - DNA, 9 bp, Unknown
  misc_feature (1)..( 9): Matrix.003 file - promoters60/5667720
taatttttt

SEQ ID NO: 63319 - DNA, 11 bp, Unknown
  misc_feature (1)..( 11): Matrix.003 file - promoters60/5667720
taaaatttact

SEQ ID NO: 63320 - DNA, 8 bp, Unknown
  misc_feature (1)..( 8): Matrix.003 file - promoters60/5667720
attttttt

SEQ ID NO: 63321 - DNA, 10 bp, Unknown
  misc_feature (1)..( 10): Matrix.003 file - promoters60/5667720
ctataaatat

SEQ ID NO: 63322 - DNA, 8 bp, Unknown
  misc_feature (1)..( 8): Matrix.003 file - promoters60/5667737
ctacaaag

SEQ ID NO: 63323 - DNA, 14 bp, Unknown
  misc_feature (1)..( 14): Matrix.003 file - promoters60/5667737
ctacaaagaccaaa

SEQ ID NO: 63324 - DNA, 6 bp, Unknown
  misc_feature (1)..( 6): Matrix.003 file - promoters60/5667741
gtttct

SEQ ID NO: 63325 - DNA, 6 bp, Unknown
  misc_feature (1)..( 6): Matrix.003 file - promoters60/5667741
tctgtt

SEQ ID NO: 63326 - DNA, 7 bp, Unknown
  misc_feature (1)..( 7): Matrix.003 file - promoters60/5667741
ttcttca

SEQ ID NO: 63327 - DNA, 9 bp, Unknown
  misc_feature (1)..( 9): Matrix.003 file - promoters60/5667741
ctgctatat

SEQ ID NO: 63328 - DNA, 7 bp, Unknown
  misc_feature (1)..( 7): Matrix.003 file - promoters60/5667741
ttcattt

SEQ ID NO: 63329 - DNA, 9 bp, Unknown
  misc_feature (1)..( 9): Matrix.003 file - promoters60/5667741
gttcttctt

SEQ ID NO: 63330 - DNA, 7 bp, Unknown
  misc_feature (1)..( 7): Matrix.003 file - promoters60/5667741
gaaaaaa

SEQ ID NO: 63331 - DNA, 7 bp, Unknown
  misc_feature (1)..( 7): Matrix.003 file - promoters60/5667741
gctgctg

SEQ ID NO: 63332 - DNA, 6 bp, Unknown
  misc_feature (1)..( 6): Matrix.003 file - promoters60/5667741
tgttct

SEQ ID NO: 63333 - DNA, 9 bp, Unknown
  misc_feature (1)..( 9): Matrix.003 file - promoters60/5667741
tttaactct

SEQ ID NO: 63334 - DNA, 8 bp, Unknown
  misc_feature (1)..( 8): Matrix.003 file - promoters60/5667741
gtctacga

SEQ ID NO: 63335 - DNA, 8 bp, Unknown
  misc_feature (1)..( 8): Matrix.003 file - promoters60/5667741
aatcaagt

SEQ ID NO: 63336 - DNA, 9 bp, Unknown
  misc_feature (1)..( 9): Matrix.003 file - promoters60/5667741
tgggcccat

SEQ ID NO: 63337 - DNA, 6 bp, Unknown
  misc_feature (1)..( 6): Matrix.003 file - promoters60/5667741
cgtcct

SEQ ID NO: 63338 - DNA, 9 bp, Unknown
  misc_feature (1)..( 9): Matrix.003 file - promoters60/5667741
ttttgtgtt

SEQ ID NO: 63339 - DNA, 7 bp, Unknown
  misc_feature (1)..( 7): Matrix.003 file - promoters60/5667741
ttttgag

SEQ ID NO: 63340 - DNA, 6 bp, Unknown
  misc_feature (1)..( 6): Matrix.003 file - promoters60/5667766
ttacta

SEQ ID NO: 63341 - DNA, 9 bp, Unknown
  misc_feature (1)..( 9): Matrix.003 file - promoters60/5667766
tttgtaaaa

SEQ ID NO: 63342 - DNA, 8 bp, Unknown
  misc_feature (1)..( 8): Matrix.003 file - promoters60/5667766
aaaaccat

SEQ ID NO: 63343 - DNA, 6 bp, Unknown
  misc_feature (1)..( 6): Matrix.003 file - promoters60/5667766
atctct

SEQ ID NO: 63344 - DNA, 8 bp, Unknown
  misc_feature (1)..( 8): Matrix.003 file - promoters60/5667766
gatattaa

SEQ ID NO: 63345 - DNA, 6 bp, Unknown
  misc_feature (1)..( 6): Matrix.003 file - promoters60/5667766
atattc

SEQ ID NO: 63346 - DNA, 8 bp, Unknown
  misc_feature (1)..( 8): Matrix.003 file - promoters60/5667766
cattcgga

SEQ ID NO: 63347 - DNA, 7 bp, Unknown
  misc_feature (1)..( 7): Matrix.003 file - promoters60/5667766
accataa

SEQ ID NO: 63348 - DNA, 7 bp, Unknown
  misc_feature (1)..( 7): Matrix.003 file - promoters60/5667766
caacaaa

SEQ ID NO: 63349 - DNA, 6 bp, Unknown
  misc_feature (1)..( 6): Matrix.003 file - promoters60/5667766
gaatgg

SEQ ID NO: 63350 - DNA, 9 bp, Unknown
  misc_feature (1)..( 9): Matrix.003 file - promoters60/5667766
attgttgtt

SEQ ID NO: 63351 - DNA, 6 bp, Unknown
  misc_feature (1)..( 6): Matrix.003 file - promoters60/5667766
cgaaac

SEQ ID NO: 63352 - DNA, 7 bp, Unknown
  misc_feature (1)..( 7): Matrix.003 file - promoters60/5667766
aaaactt

SEQ ID NO: 63353 - DNA, 7 bp, Unknown
  misc_feature (1)..( 7): Matrix.003 file - promoters60/5667785
actaatt

SEQ ID NO: 63354 - DNA, 6 bp, Unknown
  misc_feature (1)..( 6): Matrix.003 file - promoters60/5667785
caaaaa

SEQ ID NO: 63355 - DNA, 8 bp, Unknown
  misc_feature (1)..( 8): Matrix.003 file - promoters60/5667785
aaaaatat

SEQ ID NO: 63356 - DNA, 7 bp, Unknown
  misc_feature (1)..( 7): Matrix.003 file - promoters60/5667785
aaacata

SEQ ID NO: 63357 - DNA, 7 bp, Unknown
  misc_feature (1)..( 7): Matrix.003 file - promoters60/5667785
attaatg

SEQ ID NO: 63358 - DNA, 7 bp, Unknown
  misc_feature (1)..( 7): Matrix.003 file - promoters60/5667785
ttccaaa

SEQ ID NO: 63359 - DNA, 6 bp, Unknown
  misc_feature (1)..( 6): Matrix.003 file - promoters60/5667785
ccaaac

SEQ ID NO: 63360 - DNA, 6 bp, Unknown
  misc_feature (1)..( 6): Matrix.003 file - promoters60/5667785
ggtttt

SEQ ID NO: 63361 - DNA, 6 bp, Unknown
  misc_feature (1)..( 6): Matrix.003 file - promoters60/5667785
ttaatt

SEQ ID NO: 63362 - DNA, 8 bp, Unknown
  misc_feature (1)..( 8): Matrix.003 file - promoters60/5667785
gttagtat

SEQ ID NO: 63363 - DNA, 6 bp, Unknown
  misc_feature (1)..( 6): Matrix.003 file - promoters60/5667785
ttggcg

SEQ ID NO: 63364 - DNA, 7 bp, Unknown
  misc_feature (1)..( 7): Matrix.003 file - promoters60/5667785
atattta

SEQ ID NO: 63365 - DNA, 10 bp, Unknown
  misc_feature (1)..( 10): Matrix.003 file - promoters60/5667814
gaacaaaaaa

SEQ ID NO: 63366 - DNA, 11 bp, Unknown
  misc_feature (1)..( 11): Matrix.003 file - promoters60/5667814
aaattgaaaaa

SEQ ID NO: 63367 - DNA, 8 bp, Unknown
  misc_feature (1)..( 8): Matrix.003 file - promoters60/5667814
caaaaaac

SEQ ID NO: 63368 - DNA, 11 bp, Unknown
  misc_feature (1)..( 11): Matrix.003 file - promoters60/5667822
caattttgtct

SEQ ID NO: 63369 - DNA, 8 bp, Unknown
  misc_feature (1)..( 8): Matrix.003 file - promoters60/5667822
atttttac

SEQ ID NO: 63370 - DNA, 10 bp, Unknown
  misc_feature (1)..( 10): Matrix.003 file - promoters60/5667822
ataaattaaa

SEQ ID NO: 63371 - DNA, 11 bp, Unknown
  misc_feature (1)..( 11): Matrix.003 file - promoters60/5667822
aaaatttatta

SEQ ID NO: 63372 - DNA, 10 bp, Unknown
  misc_feature (1)..( 10): Matrix.003 file - promoters60/5667822
gtatattttg

SEQ ID NO: 63373 - DNA, 10 bp, Unknown
  misc_feature (1)..( 10): Matrix.003 file - promoters60/5667822
tctgttagat

SEQ ID NO: 63374 - DNA, 10 bp, Unknown
  misc_feature (1)..( 10): Matrix.003 file - promoters60/5667822
tataaaaaaa

SEQ ID NO: 63375 - DNA, 7 bp, Unknown
  misc_feature (1)..( 7): Matrix.003 file - promoters60/5667822
tataaaa

SEQ ID NO: 63376 - DNA, 11 bp, Unknown
  misc_feature (1)..( 11): Matrix.003 file - promoters60/5667822
atttattttgt

SEQ ID NO: 63377 - DNA, 9 bp, Unknown
  misc_feature (1)..( 9): Matrix.003 file - promoters60/5667822
attgacttt

SEQ ID NO: 63378 - DNA, 9 bp, Unknown
  misc_feature (1)..( 9): Matrix.003 file - promoters60/5667822
ttattttaa

SEQ ID NO: 63379 - DNA, 9 bp, Unknown
  misc_feature (1)..( 9): Matrix.003 file - promoters60/5667849
aaaaatttt

SEQ ID NO: 63380 - DNA, 12 bp, Unknown
  misc_feature (1)..( 12): Matrix.003 file - promoters60/5667849
atcaataagttt

SEQ ID NO: 63381 - DNA, 10 bp, Unknown
  misc_feature (1)..( 10): Matrix.003 file - promoters60/5667849
ttatatataa

SEQ ID NO: 63382 - DNA, 8 bp, Unknown
  misc_feature (1)..( 8): Matrix.003 file - promoters60/5668073
tttgattg

SEQ ID NO: 63383 - DNA, 6 bp, Unknown
  misc_feature (1)..( 6): Matrix.003 file - promoters60/5668085
acacca

SEQ ID NO: 63384 - DNA, 6 bp, Unknown
  misc_feature (1)..( 6): Matrix.003 file - promoters60/5668085
gcatgg

SEQ ID NO: 63385 - DNA, 6 bp, Unknown
  misc_feature (1)..( 6): Matrix.003 file - promoters60/5668085
tggtat

SEQ ID NO: 63386 - DNA, 6 bp, Unknown
  misc_feature (1)..( 6): Matrix.003 file - promoters60/5668085
acaata

SEQ ID NO: 63387 - DNA, 6 bp, Unknown
  misc_feature (1)..( 6): Matrix.003 file - promoters60/5668085
gttgtg

SEQ ID NO: 63388 - DNA, 7 bp, Unknown
  misc_feature (1)..( 7): Matrix.003 file - promoters60/5668085
tgtggat

SEQ ID NO: 63389 - DNA, 8 bp, Unknown
  misc_feature (1)..( 8): Matrix.003 file - promoters60/5668085
tttagctt

SEQ ID NO: 63390 - DNA, 6 bp, Unknown
  misc_feature (1)..( 6): Matrix.003 file - promoters60/5668085
gaatta

SEQ ID NO: 63391 - DNA, 6 bp, Unknown
  misc_feature (1)..( 6): Matrix.003 file - promoters60/5668085
gcggaa

SEQ ID NO: 63392 - DNA, 6 bp, Unknown
  misc_feature (1)..( 6): Matrix.003 file - promoters60/5668085
aaagaa

SEQ ID NO: 63393 - DNA, 7 bp, Unknown
  misc_feature (1)..( 7): Matrix.003 file - promoters60/5668085
tatcttc

SEQ ID NO: 63394 - DNA, 6 bp, Unknown
  misc_feature (1)..( 6): Matrix.003 file - promoters60/5668085
tccttg

SEQ ID NO: 63395 - DNA, 7 bp, Unknown
  misc_feature (1)..( 7): Matrix.003 file - promoters60/5668085
gatatat

SEQ ID NO: 63396 - DNA, 9 bp, Unknown
  misc_feature (1)..( 9): Matrix.003 file - promoters60/5668101
tataatttg

SEQ ID NO: 63397 - DNA, 6 bp, Unknown
  misc_feature (1)..( 6): Matrix.003 file - promoters60/5668101
attcat

SEQ ID NO: 63398 - DNA, 7 bp, Unknown
  misc_feature (1)..( 7): Matrix.003 file - promoters60/5668101
ttacaat

SEQ ID NO: 63399 - DNA, 7 bp, Unknown
  misc_feature (1)..( 7): Matrix.003 file - promoters60/5668101
aatatat

SEQ ID NO: 63400 - DNA, 8 bp, Unknown
  misc_feature (1)..( 8): Matrix.003 file - promoters60/5668101
tttatgtt

SEQ ID NO: 63401 - DNA, 6 bp, Unknown
  misc_feature (1)..( 6): Matrix.003 file - promoters60/5668101
taagtt

SEQ ID NO: 63402 - DNA, 12 bp, Unknown
  misc_feature (1)..( 12): Matrix.003 file - promoters60/5668101
cttgtaaccaca

SEQ ID NO: 63403 - DNA, 6 bp, Unknown
  misc_feature (1)..( 6): Matrix.003 file - promoters60/5668101
ttaata

SEQ ID NO: 63404 - DNA, 7 bp, Unknown
  misc_feature (1)..( 7): Matrix.003 file - promoters60/5668101
tatatgt

SEQ ID NO: 63405 - DNA, 9 bp, Unknown
  misc_feature (1)..( 9): Matrix.003 file - promoters60/5668101
ctaaaaaac

SEQ ID NO: 63406 - DNA, 6 bp, Unknown
  misc_feature (1)..( 6): Matrix.003 file - promoters60/5668101
aaaaat

SEQ ID NO: 63407 - DNA, 6 bp, Unknown
  misc_feature (1)..( 6): Matrix.003 file - promoters60/5668101
atacaa

SEQ ID NO: 63408 - DNA, 6 bp, Unknown
  misc_feature (1)..( 6): Matrix.003 file - promoters60/5668101
gttttt

SEQ ID NO: 63409 - DNA, 7 bp, Unknown
  misc_feature (1)..( 7): Matrix.003 file - promoters60/5668101
tttttag

SEQ ID NO: 63410 - DNA, 6 bp, Unknown
  misc_feature (1)..( 6): Matrix.003 file - promoters60/5668101
aaagaa

SEQ ID NO: 63411 - DNA, 7 bp, Unknown
  misc_feature (1)..( 7): Matrix.003 file - promoters60/5668101
aaaaata

SEQ ID NO: 63412 - DNA, 6 bp, Unknown
  misc_feature (1)..( 6): Matrix.003 file - promoters60/5668101
atcaaa

SEQ ID NO: 63413 - DNA, 8 bp, Unknown
  misc_feature (1)..( 8): Matrix.003 file - promoters60/5668101
atcagatt

SEQ ID NO: 63414 - DNA, 6 bp, Unknown
  misc_feature (1)..( 6): Matrix.003 file - promoters60/5668101
atgtca

SEQ ID NO: 63415 - DNA, 7 bp, Unknown
  misc_feature (1)..( 7): Matrix.003 file - promoters60/5668101
tgactct

SEQ ID NO: 63416 - DNA, 7 bp, Unknown
  misc_feature (1)..( 7): Matrix.003 file - promoters60/5668101
ttgcaaa

SEQ ID NO: 63417 - DNA, 6 bp, Unknown
  misc_feature (1)..( 6): Matrix.003 file - promoters60/5668101
atatct

SEQ ID NO: 63418 - DNA, 6 bp, Unknown
  misc_feature (1)..( 6): Matrix.003 file - promoters60/5668101
ttattt

SEQ ID NO: 63419 - DNA, 7 bp, Unknown
  misc_feature (1)..( 7): Matrix.003 file - promoters60/5668101
ttgatta

SEQ ID NO: 63420 - DNA, 10 bp, Unknown
  misc_feature (1)..( 10): Matrix.003 file - promoters60/5668111
tgaaaaatcg

SEQ ID NO: 63421 - DNA, 7 bp, Unknown
  misc_feature (1)..( 7): Matrix.003 file - promoters60/5668111
aaatcaa

SEQ ID NO: 63422 - DNA, 8 bp, Unknown
  misc_feature (1)..( 8): Matrix.003 file - promoters60/5668111
tttatatt

SEQ ID NO: 63423 - DNA, 9 bp, Unknown
  misc_feature (1)..( 9): Matrix.003 file - promoters60/5668111
aaaaaccct

SEQ ID NO: 63424 - DNA, 8 bp, Unknown
  misc_feature (1)..( 8): Matrix.003 file - promoters60/5668111
tcacaaaa

SEQ ID NO: 63425 - DNA, 9 bp, Unknown
  misc_feature (1)..( 9): Matrix.003 file - promoters60/5668111
gaaaaatca

SEQ ID NO: 63426 - DNA, 9 bp, Unknown
  misc_feature (1)..( 9): Matrix.003 file - promoters60/5668294
tgacaaaaa

SEQ ID NO: 63427 - DNA, 11 bp, Unknown
  misc_feature (1)..( 11): Matrix.003 file - promoters60/5668294
acgaaattaat

SEQ ID NO: 63428 - DNA, 13 bp, Unknown
  misc_feature (1)..( 13): Matrix.003 file - promoters60/5668294
atagaagaaaaaa

SEQ ID NO: 63429 - DNA, 10 bp, Unknown
  misc_feature (1)..( 10): Matrix.003 file - promoters60/5668294
aacacaaaag

SEQ ID NO: 63430 - DNA, 10 bp, Unknown
  misc_feature (1)..( 10): Matrix.003 file - promoters60/5668317
aagaaattaa

SEQ ID NO: 63431 - DNA, 8 bp, Unknown
  misc_feature (1)..( 8): Matrix.003 file - promoters60/5668317
gaaacttt

SEQ ID NO: 63432 - DNA, 8 bp, Unknown
  misc_feature (1)..( 8): Matrix.003 file - promoters60/5668317
tttgcttc

SEQ ID NO: 63433 - DNA, 7 bp, Unknown
  misc_feature (1)..( 7): Matrix.003 file - promoters60/5668317
gtgtgtg

SEQ ID NO: 63434 - DNA, 7 bp, Unknown
  misc_feature (1)..( 7): Matrix.003 file - promoters60/5668317
gaaaaaa

SEQ ID NO: 63435 - DNA, 12 bp, Unknown
  misc_feature (1)..( 12): Matrix.003 file - promoters60/5668317
gaaaaaaagaaa

SEQ ID NO: 63436 - DNA, 9 bp, Unknown
  misc_feature (1)..( 9): Matrix.003 file - promoters60/5668325
gatgattca

SEQ ID NO: 63437 - DNA, 6 bp, Unknown
  misc_feature (1)..( 6): Matrix.003 file - promoters60/5668325
tcaaat

SEQ ID NO: 63438 - DNA, 7 bp, Unknown
  misc_feature (1)..( 7): Matrix.003 file - promoters60/5668325
tggattt

SEQ ID NO: 63439 - DNA, 7 bp, Unknown
  misc_feature (1)..( 7): Matrix.003 file - promoters60/5668325
tgcagag

SEQ ID NO: 63440 - DNA, 7 bp, Unknown
  misc_feature (1)..( 7): Matrix.003 file - promoters60/5668325
ataaatt

SEQ ID NO: 63441 - DNA, 8 bp, Unknown
  misc_feature (1)..( 8): Matrix.003 file - promoters60/5668325
tttggatt

SEQ ID NO: 63442 - DNA, 6 bp, Unknown
  misc_feature (1)..( 6): Matrix.003 file - promoters60/5668325
aagatt

SEQ ID NO: 63443 - DNA, 6 bp, Unknown
  misc_feature (1)..( 6): Matrix.003 file - promoters60/5668325
ggtgaa

SEQ ID NO: 63444 - DNA, 7 bp, Unknown
  misc_feature (1)..( 7): Matrix.003 file - promoters60/5668325
tttgata

SEQ ID NO: 63445 - DNA, 6 bp, Unknown
  misc_feature (1)..( 6): Matrix.003 file - promoters60/5668325
gaaagt

SEQ ID NO: 63446 - DNA, 9 bp, Unknown
  misc_feature (1)..( 9): Matrix.003 file - promoters60/5668325
tttgaccag

SEQ ID NO: 63447 - DNA, 15 bp, Unknown
  misc_feature (1)..( 15): Matrix.003 file - promoters60/5668329
caaaatatataaaca

SEQ ID NO: 63448 - DNA, 11 bp, Unknown
  misc_feature (1)..( 11): Matrix.003 file - promoters60/5668352
agtaatataaa

SEQ ID NO: 63449 - DNA, 7 bp, Unknown
  misc_feature (1)..( 7): Matrix.003 file - promoters60/5668352
gaaaaaa

SEQ ID NO: 63450 - DNA, 11 bp, Unknown
  misc_feature (1)..( 11): Matrix.003 file - promoters60/5668352
tttctttaact

SEQ ID NO: 63451 - DNA, 8 bp, Unknown
  misc_feature (1)..( 8): Matrix.003 file - promoters60/5668359
atggattt

SEQ ID NO: 63452 - DNA, 6 bp, Unknown
  misc_feature (1)..( 6): Matrix.003 file - promoters60/5668359
ggtgtt

SEQ ID NO: 63453 - DNA, 9 bp, Unknown
  misc_feature (1)..( 9): Matrix.003 file - promoters60/5668359
agaacagaa

SEQ ID NO: 63454 - DNA, 11 bp, Unknown
  misc_feature (1)..( 11): Matrix.003 file - promoters60/5668359
agtatccagtt

SEQ ID NO: 63455 - DNA, 7 bp, Unknown
  misc_feature (1)..( 7): Matrix.003 file - promoters60/5668359
tgcaaat

SEQ ID NO: 63456 - DNA, 13 bp, Unknown
  misc_feature (1)..( 13): Matrix.003 file - promoters60/5668359
ttgaatcaaaatt

SEQ ID NO: 63457 - DNA, 6 bp, Unknown
  misc_feature (1)..( 6): Matrix.003 file - promoters60/5668359
aagatt

SEQ ID NO: 63458 - DNA, 6 bp, Unknown
  misc_feature (1)..( 6): Matrix.003 file - promoters60/5668359
ttggtt

SEQ ID NO: 63459 - DNA, 6 bp, Unknown
  misc_feature (1)..( 6): Matrix.003 file - promoters60/5668359
ttaacc

SEQ ID NO: 63460 - DNA, 7 bp, Unknown
  misc_feature (1)..( 7): Matrix.003 file - promoters60/5668359
ctcactc

SEQ ID NO: 63461 - DNA, 6 bp, Unknown
  misc_feature (1)..( 6): Matrix.003 file - promoters60/5668359
atttct

SEQ ID NO: 63462 - DNA, 13 bp, Unknown
  misc_feature (1)..( 13): Matrix.003 file - promoters60/5668367
gagaaccaaatta

SEQ ID NO: 63463 - DNA, 9 bp, Unknown
  misc_feature (1)..( 9): Matrix.003 file - promoters60/5668367
ttttctaaa

SEQ ID NO: 63464 - DNA, 9 bp, Unknown
  misc_feature (1)..( 9): Matrix.003 file - promoters60/5668367
acaatttag

SEQ ID NO: 63465 - DNA, 9 bp, Unknown
  misc_feature (1)..( 9): Matrix.003 file - promoters60/5668367
gaaaaattt

SEQ ID NO: 63466 - DNA, 7 bp, Unknown
  misc_feature (1)..( 7): Matrix.003 file - promoters60/5668367
catgatc

SEQ ID NO: 63467 - DNA, 7 bp, Unknown
  misc_feature (1)..( 7): Matrix.003 file - promoters60/5668367
tgagttt

SEQ ID NO: 63468 - DNA, 7 bp, Unknown
  misc_feature (1)..( 7): Matrix.003 file - promoters60/5668367
aatatag

SEQ ID NO: 63469 - DNA, 6 bp, Unknown
  misc_feature (1)..( 6): Matrix.003 file - promoters60/5668367
ataata

SEQ ID NO: 63470 - DNA, 9 bp, Unknown
  misc_feature (1)..( 9): Matrix.003 file - promoters60/5668367
tccaaaaac

SEQ ID NO: 63471 - DNA, 11 bp, Unknown
  misc_feature (1)..( 11): Matrix.003 file - promoters60/5668367
ataaatacatc

SEQ ID NO: 63472 - DNA, 9 bp, Unknown
  misc_feature (1)..( 9): Matrix.003 file - promoters60/5668367
attattttc

SEQ ID NO: 63473 - DNA, 7 bp, Unknown
  misc_feature (1)..( 7): Matrix.003 file - promoters60/5668367
tatatat

SEQ ID NO: 63474 - DNA, 8 bp, Unknown
  misc_feature (1)..( 8): Matrix.003 file - promoters60/5668367
ttttatat

SEQ ID NO: 63475 - DNA, 7 bp, Unknown
  misc_feature (1)..( 7): Matrix.003 file - promoters60/5668367
ataatat

SEQ ID NO: 63476 - DNA, 14 bp, Unknown
  misc_feature (1)..( 14): Matrix.003 file - promoters60/5668367
tttttataacattt

SEQ ID NO: 63477 - DNA, 8 bp, Unknown
  misc_feature (1)..( 8): Matrix.003 file - promoters60/5668367
ttttattt

SEQ ID NO: 63478 - DNA, 7 bp, Unknown
  misc_feature (1)..( 7): Matrix.003 file - promoters60/5668367
tttaagc

SEQ ID NO: 63479 - DNA, 8 bp, Unknown
  misc_feature (1)..( 8): Matrix.003 file - promoters60/5668367
tttcatga

SEQ ID NO: 63480 - DNA, 8 bp, Unknown
  misc_feature (1)..( 8): Matrix.003 file - promoters60/5668367
attattga

SEQ ID NO: 63481 - DNA, 9 bp, Unknown
  misc_feature (1)..( 9): Matrix.003 file - promoters60/5668367
taagtaatt

SEQ ID NO: 63482 - DNA, 7 bp, Unknown
  misc_feature (1)..( 7): Matrix.003 file - promoters60/5668367
acagaaa

SEQ ID NO: 63483 - DNA, 6 bp, Unknown
  misc_feature (1)..( 6): Matrix.003 file - promoters60/5668367
attctt

SEQ ID NO: 63484 - DNA, 7 bp, Unknown
  misc_feature (1)..( 7): Matrix.003 file - promoters60/5668367
aaactat

SEQ ID NO: 63485 - DNA, 7 bp, Unknown
  misc_feature (1)..( 7): Matrix.003 file - promoters60/5668367
agatttt

SEQ ID NO: 63486 - DNA, 6 bp, Unknown
  misc_feature (1)..( 6): Matrix.003 file - promoters60/5668367
atttta

SEQ ID NO: 63487 - DNA, 7 bp, Unknown
  misc_feature (1)..( 7): Matrix.003 file - promoters60/5668367
ttaaaat

SEQ ID NO: 63488 - DNA, 6 bp, Unknown
  misc_feature (1)..( 6): Matrix.003 file - promoters60/5668367
gttttc

SEQ ID NO: 63489 - DNA, 6 bp, Unknown
  misc_feature (1)..( 6): Matrix.003 file - promoters60/5668367
aaaatt

SEQ ID NO: 63490 - DNA, 7 bp, Unknown
  misc_feature (1)..( 7): Matrix.003 file - promoters60/5668367
attgaat

SEQ ID NO: 63491 - DNA, 6 bp, Unknown
  misc_feature (1)..( 6): Matrix.003 file - promoters60/5668367
actttt

SEQ ID NO: 63492 - DNA, 8 bp, Unknown
  misc_feature (1)..( 8): Matrix.003 file - promoters60/5668367
aaacaaaa

SEQ ID NO: 63493 - DNA, 8 bp, Unknown
  misc_feature (1)..( 8): Matrix.003 file - promoters60/5668367
gaaagaca

SEQ ID NO: 63494 - DNA, 7 bp, Unknown
  misc_feature (1)..( 7): Matrix.003 file - promoters60/5668367
aaaagtc

SEQ ID NO: 63495 - DNA, 8 bp, Unknown
  misc_feature (1)..( 8): Matrix.003 file - promoters60/5668367
aaggaaga

SEQ ID NO: 63496 - DNA, 27 bp, Unknown
  misc_feature (1)..( 27): Matrix.003 file - promoters60/5668367
gtcaacaaacgatggctatacaacaag

SEQ ID NO: 63497 - DNA, 8 bp, Unknown
  misc_feature (1)..( 8): Matrix.003 file - promoters60/5668375
ttttgaaa

SEQ ID NO: 63498 - DNA, 9 bp, Unknown
  misc_feature (1)..( 9): Matrix.003 file - promoters60/5668375
tttttcttc

SEQ ID NO: 63499 - DNA, 15 bp, Unknown
  misc_feature (1)..( 15): Matrix.003 file - promoters60/5668427
tttggggtttgcttc

SEQ ID NO: 63500 - DNA, 9 bp, Unknown
  misc_feature (1)..( 9): Matrix.003 file - promoters60/5668427
taatctgat

SEQ ID NO: 63501 - DNA, 7 bp, Unknown
  misc_feature (1)..( 7): Matrix.003 file - promoters60/5668427
tacatta

SEQ ID NO: 63502 - DNA, 8 bp, Unknown
  misc_feature (1)..( 8): Matrix.003 file - promoters60/5668427
tcaggttg

SEQ ID NO: 63503 - DNA, 10 bp, Unknown
  misc_feature (1)..( 10): Matrix.003 file - promoters60/5668435
tatataaata

SEQ ID NO: 63504 - DNA, 9 bp, Unknown
  misc_feature (1)..( 9): Matrix.003 file - promoters60/5668454
acttaatta

SEQ ID NO: 63505 - DNA, 11 bp, Unknown
  misc_feature (1)..( 11): Matrix.003 file - promoters60/5668454
aaataaattct

SEQ ID NO: 63506 - DNA, 7 bp, Unknown
  misc_feature (1)..( 7): Matrix.003 file - promoters60/5668454
ttctaaa

SEQ ID NO: 63507 - DNA, 6 bp, Unknown
  misc_feature (1)..( 6): Matrix.003 file - promoters60/5668457
aaccct

SEQ ID NO: 63508 - DNA, 6 bp, Unknown
  misc_feature (1)..( 6): Matrix.003 file - promoters60/5668457
gaattt

SEQ ID NO: 63509 - DNA, 8 bp, Unknown
  misc_feature (1)..( 8): Matrix.003 file - promoters60/5668457
acataagt

SEQ ID NO: 63510 - DNA, 6 bp, Unknown
  misc_feature (1)..( 6): Matrix.003 file - promoters60/5668457
aaaaaa

SEQ ID NO: 63511 - DNA, 7 bp, Unknown
  misc_feature (1)..( 7): Matrix.003 file - promoters60/5668457
gttacta

SEQ ID NO: 63512 - DNA, 6 bp, Unknown
  misc_feature (1)..( 6): Matrix.003 file - promoters60/5668457
caaatt

SEQ ID NO: 63513 - DNA, 6 bp, Unknown
  misc_feature (1)..( 6): Matrix.003 file - promoters60/5668457
tattac

SEQ ID NO: 63514 - DNA, 6 bp, Unknown
  misc_feature (1)..( 6): Matrix.003 file - promoters60/5668457
aaaact

SEQ ID NO: 63515 - DNA, 6 bp, Unknown
  misc_feature (1)..( 6): Matrix.003 file - promoters60/5668457
ttttgg

SEQ ID NO: 63516 - DNA, 6 bp, Unknown
  misc_feature (1)..( 6): Matrix.003 file - promoters60/5668457
ggcttc

SEQ ID NO: 63517 - DNA, 8 bp, Unknown
  misc_feature (1)..( 8): Matrix.003 file - promoters60/5668457
tttatata

SEQ ID NO: 63518 - DNA, 6 bp, Unknown
  misc_feature (1)..( 6): Matrix.003 file - promoters60/5668457
ggttga

SEQ ID NO: 63519 - DNA, 6 bp, Unknown
  misc_feature (1)..( 6): Matrix.003 file - promoters60/5668457
atgcaa

SEQ ID NO: 63520 - DNA, 9 bp, Unknown
  misc_feature (1)..( 9): Matrix.003 file - promoters60/5668457
atggttact

SEQ ID NO: 63521 - DNA, 9 bp, Unknown
  misc_feature (1)..( 9): Matrix.003 file - promoters60/5668457
agcccaaag

SEQ ID NO: 63522 - DNA, 11 bp, Unknown
  misc_feature (1)..( 11): Matrix.003 file - promoters60/5668469
tccatcattta

SEQ ID NO: 63523 - DNA, 9 bp, Unknown
  misc_feature (1)..( 9): Matrix.003 file - promoters60/5668469
aataactta

SEQ ID NO: 63524 - DNA, 10 bp, Unknown
  misc_feature (1)..( 10): Matrix.003 file - promoters60/5668469
caataaaaaa

SEQ ID NO: 63525 - DNA, 7 bp, Unknown
  misc_feature (1)..( 7): Matrix.003 file - promoters60/5668469
tttgtta

SEQ ID NO: 63526 - DNA, 8 bp, Unknown
  misc_feature (1)..( 8): Matrix.003 file - promoters60/5668469
aaaattaa

SEQ ID NO: 63527 - DNA, 7 bp, Unknown
  misc_feature (1)..( 7): Matrix.003 file - promoters60/5668473
cacttta

SEQ ID NO: 63528 - DNA, 8 bp, Unknown
  misc_feature (1)..( 8): Matrix.003 file - promoters60/5668473
aaaatcac

SEQ ID NO: 63529 - DNA, 6 bp, Unknown
  misc_feature (1)..( 6): Matrix.003 file - promoters60/5668473
atttgg

SEQ ID NO: 63530 - DNA, 6 bp, Unknown
  misc_feature (1)..( 6): Matrix.003 file - promoters60/5668473
aaaact

SEQ ID NO: 63531 - DNA, 6 bp, Unknown
  misc_feature (1)..( 6): Matrix.003 file - promoters60/5668473
cgtggc

SEQ ID NO: 63532 - DNA, 7 bp, Unknown
  misc_feature (1)..( 7): Matrix.003 file - promoters60/5668473
agtatgt

SEQ ID NO: 63533 - DNA, 8 bp, Unknown
  misc_feature (1)..( 8): Matrix.003 file - promoters60/5668473
taagactc

SEQ ID NO: 63534 - DNA, 7 bp, Unknown
  misc_feature (1)..( 7): Matrix.003 file - promoters60/5668473
tttagag

SEQ ID NO: 63535 - DNA, 6 bp, Unknown
  misc_feature (1)..( 6): Matrix.003 file - promoters60/5668473
aacgtt

SEQ ID NO: 63536 - DNA, 6 bp, Unknown
  misc_feature (1)..( 6): Matrix.003 file - promoters60/5668473
ggatca

SEQ ID NO: 63537 - DNA, 6 bp, Unknown
  misc_feature (1)..( 6): Matrix.003 file - promoters60/5668473
actaaa

SEQ ID NO: 63538 - DNA, 6 bp, Unknown
  misc_feature (1)..( 6): Matrix.003 file - promoters60/5668473
aaaatt

SEQ ID NO: 63539 - DNA, 7 bp, Unknown
  misc_feature (1)..( 7): Matrix.003 file - promoters60/5668473
aatctta

SEQ ID NO: 63540 - DNA, 6 bp, Unknown
  misc_feature (1)..( 6): Matrix.003 file - promoters60/5668473
ttaaaa

SEQ ID NO: 63541 - DNA, 7 bp, Unknown
  misc_feature (1)..( 7): Matrix.003 file - promoters60/5668473
aatataa

SEQ ID NO: 63542 - DNA, 10 bp, Unknown
  misc_feature (1)..( 10): Matrix.003 file - promoters60/5668473
ttttaaactt

SEQ ID NO: 63543 - DNA, 6 bp, Unknown
  misc_feature (1)..( 6): Matrix.003 file - promoters60/5668473
aagccc

SEQ ID NO: 63544 - DNA, 9 bp, Unknown
  misc_feature (1)..( 9): Matrix.003 file - promoters60/5668493
aaatattta

SEQ ID NO: 63545 - DNA, 5 bp, Unknown
  misc_feature (1)..( 5): Matrix.003 file - promoters60/5668493
caaaa

SEQ ID NO: 63546 - DNA, 9 bp, Unknown
  misc_feature (1)..( 9): Matrix.003 file - promoters60/5668505
cttatttta

SEQ ID NO: 63547 - DNA, 12 bp, Unknown
  misc_feature (1)..( 12): Matrix.003 file - promoters60/5668505
tatgataataaa

SEQ ID NO: 63548 - DNA, 9 bp, Unknown
  misc_feature (1)..( 9): Matrix.003 file - promoters60/5668505
taagaatat

SEQ ID NO: 63549 - DNA, 8 bp, Unknown
  misc_feature (1)..( 8): Matrix.003 file - promoters60/5668505
atttgttt

SEQ ID NO: 63550 - DNA, 11 bp, Unknown
  misc_feature (1)..( 11): Matrix.003 file - promoters60/5668505
ttgcaatttta

SEQ ID NO: 63551 - DNA, 7 bp, Unknown
  misc_feature (1)..( 7): Matrix.003 file - promoters60/5668505
atatttt

SEQ ID NO: 63552 - DNA, 9 bp, Unknown
  misc_feature (1)..( 9): Matrix.003 file - promoters60/5668505
aaagaatat

SEQ ID NO: 63553 - DNA, 10 bp, Unknown
  misc_feature (1)..( 10): Matrix.003 file - promoters60/5668505
ggatataaat

SEQ ID NO: 63554 - DNA, 8 bp, Unknown
  misc_feature (1)..( 8): Matrix.003 file - promoters60/5668505
aaattgtc

SEQ ID NO: 63555 - DNA, 8 bp, Unknown
  misc_feature (1)..( 8): Matrix.003 file - promoters60/5668505
aataaaac

SEQ ID NO: 63556 - DNA, 9 bp, Unknown
  misc_feature (1)..( 9): Matrix.003 file - promoters60/5668509
aaaaaataa

SEQ ID NO: 63557 - DNA, 11 bp, Unknown
  misc_feature (1)..( 11): Matrix.003 file - promoters60/5668509
aaattaataaa

SEQ ID NO: 63558 - DNA, 7 bp, Unknown
  misc_feature (1)..( 7): Matrix.003 file - promoters60/5668509
aaaaaaa

SEQ ID NO: 63559 - DNA, 13 bp, Unknown
  misc_feature (1)..( 13): Matrix.003 file - promoters60/5668509
aatttgaataaaa

SEQ ID NO: 63560 - DNA, 10 bp, Unknown
  misc_feature (1)..( 10): Matrix.003 file - promoters60/5668509
tcacaaaaaa

SEQ ID NO: 63561 - DNA, 9 bp, Unknown
  misc_feature (1)..( 9): Matrix.003 file - promoters60/5668509
agattattt

SEQ ID NO: 63562 - DNA, 12 bp, Unknown
  misc_feature (1)..( 12): Matrix.003 file - promoters60/5668509
cccttataaata

SEQ ID NO: 63563 - DNA, 7 bp, Unknown
  misc_feature (1)..( 7): Matrix.003 file - promoters60/5668509
taaaaat

SEQ ID NO: 63564 - DNA, 11 bp, Unknown
  misc_feature (1)..( 11): Matrix.003 file - promoters60/5668509
cgccttataaa

SEQ ID NO: 63565 - DNA, 8 bp, Unknown
  misc_feature (1)..( 8): Matrix.003 file - promoters60/5668529
ccgtatct

SEQ ID NO: 63566 - DNA, 11 bp, Unknown
  misc_feature (1)..( 11): Matrix.003 file - promoters60/5668529
aaaagttgact

SEQ ID NO: 63567 - DNA, 10 bp, Unknown
  misc_feature (1)..( 10): Matrix.003 file - promoters60/5668529
ttattatgtt

SEQ ID NO: 63568 - DNA, 15 bp, Unknown
  misc_feature (1)..( 15): Matrix.003 file - promoters60/5668529
tcttttctctatata

SEQ ID NO: 63569 - DNA, 8 bp, Unknown
  misc_feature (1)..( 8): Matrix.003 file - promoters60/5668529
aaaaataa

SEQ ID NO: 63570 - DNA, 10 bp, Unknown
  misc_feature (1)..( 10): Matrix.003 file - promoters60/5668529
aacaagtata

SEQ ID NO: 63571 - DNA, 11 bp, Unknown
  misc_feature (1)..( 11): Matrix.003 file - promoters60/5668529
acaccataatt

SEQ ID NO: 63572 - DNA, 8 bp, Unknown
  misc_feature (1)..( 8): Matrix.003 file - promoters60/5668529
caaatatt

SEQ ID NO: 63573 - DNA, 10 bp, Unknown
  misc_feature (1)..( 10): Matrix.003 file - promoters60/5668533
ttcataaata

SEQ ID NO: 63574 - DNA, 12 bp, Unknown
  misc_feature (1)..( 12): Matrix.003 file - promoters60/5668537
caatattttctc

SEQ ID NO: 63575 - DNA, 11 bp, Unknown
  misc_feature (1)..( 11): Matrix.003 file - promoters60/5668537
ttttctaaaat

SEQ ID NO: 63576 - DNA, 7 bp, Unknown
  misc_feature (1)..( 7): Matrix.003 file - promoters60/5668537
ataattc

SEQ ID NO: 63577 - DNA, 9 bp, Unknown
  misc_feature (1)..( 9): Matrix.003 file - promoters60/5668537
tatttttac

SEQ ID NO: 63578 - DNA, 8 bp, Unknown
  misc_feature (1)..( 8): Matrix.003 file - promoters60/5668537
actgtatt

SEQ ID NO: 63579 - DNA, 8 bp, Unknown
  misc_feature (1)..( 8): Matrix.003 file - promoters60/5668537
tactcaat

SEQ ID NO: 63580 - DNA, 7 bp, Unknown
  misc_feature (1)..( 7): Matrix.003 file - promoters60/5668537
gtacata

SEQ ID NO: 63581 - DNA, 6 bp, Unknown
  misc_feature (1)..( 6): Matrix.003 file - promoters60/5668537
ttctta

SEQ ID NO: 63582 - DNA, 7 bp, Unknown
  misc_feature (1)..( 7): Matrix.003 file - promoters60/5668537
tgtcaat

SEQ ID NO: 63583 - DNA, 6 bp, Unknown
  misc_feature (1)..( 6): Matrix.003 file - promoters60/5668537
tttcct

SEQ ID NO: 63584 - DNA, 6 bp, Unknown
  misc_feature (1)..( 6): Matrix.003 file - promoters60/5668537
ctacat

SEQ ID NO: 63585 - DNA, 8 bp, Unknown
  misc_feature (1)..( 8): Matrix.003 file - promoters60/5668537
gaaacgac

SEQ ID NO: 63586 - DNA, 12 bp, Unknown
  misc_feature (1)..( 12): Matrix.003 file - promoters60/5668537
tagaattactaa

SEQ ID NO: 63587 - DNA, 7 bp, Unknown
  misc_feature (1)..( 7): Matrix.003 file - promoters60/5668537
taataat

SEQ ID NO: 63588 - DNA, 6 bp, Unknown
  misc_feature (1)..( 6): Matrix.003 file - promoters60/5668537
aatttt

SEQ ID NO: 63589 - DNA, 7 bp, Unknown
  misc_feature (1)..( 7): Matrix.003 file - promoters60/5668537
tatacaa

SEQ ID NO: 63590 - DNA, 7 bp, Unknown
  misc_feature (1)..( 7): Matrix.003 file - promoters60/5668537
tataatt

SEQ ID NO: 63591 - DNA, 6 bp, Unknown
  misc_feature (1)..( 6): Matrix.003 file - promoters60/5668537
aaaaaa

SEQ ID NO: 63592 - DNA, 8 bp, Unknown
  misc_feature (1)..( 8): Matrix.003 file - promoters60/5668537
taaatttc

SEQ ID NO: 63593 - DNA, 7 bp, Unknown
  misc_feature (1)..( 7): Matrix.003 file - promoters60/5668537
aagagaa

SEQ ID NO: 63594 - DNA, 8 bp, Unknown
  misc_feature (1)..( 8): Matrix.003 file - promoters60/5668537
atggcttg

SEQ ID NO: 63595 - DNA, 8 bp, Unknown
  misc_feature (1)..( 8): Matrix.003 file - promoters60/5668541
cttccatg

SEQ ID NO: 63596 - DNA, 6 bp, Unknown
  misc_feature (1)..( 6): Matrix.003 file - promoters60/5668541
ataatc

SEQ ID NO: 63597 - DNA, 6 bp, Unknown
  misc_feature (1)..( 6): Matrix.003 file - promoters60/5668541
aatttg

SEQ ID NO: 63598 - DNA, 8 bp, Unknown
  misc_feature (1)..( 8): Matrix.003 file - promoters60/5668541
cactgact

SEQ ID NO: 63599 - DNA, 7 bp, Unknown
  misc_feature (1)..( 7): Matrix.003 file - promoters60/5668541
tccaaaa

SEQ ID NO: 63600 - DNA, 7 bp, Unknown
  misc_feature (1)..( 7): Matrix.003 file - promoters60/5668541
ctcaaga

SEQ ID NO: 63601 - DNA, 6 bp, Unknown
  misc_feature (1)..( 6): Matrix.003 file - promoters60/5668541
aaaaaa

SEQ ID NO: 63602 - DNA, 7 bp, Unknown
  misc_feature (1)..( 7): Matrix.003 file - promoters60/5668541
tttaaaa

SEQ ID NO: 63603 - DNA, 8 bp, Unknown
  misc_feature (1)..( 8): Matrix.003 file - promoters60/5668541
ttgaattt

SEQ ID NO: 63604 - DNA, 6 bp, Unknown
  misc_feature (1)..( 6): Matrix.003 file - promoters60/5668541
ttttgg

SEQ ID NO: 63605 - DNA, 7 bp, Unknown
  misc_feature (1)..( 7): Matrix.003 file - promoters60/5668541
tttgttt

SEQ ID NO: 63606 - DNA, 6 bp, Unknown
  misc_feature (1)..( 6): Matrix.003 file - promoters60/5668541
tactgc

SEQ ID NO: 63607 - DNA, 6 bp, Unknown
  misc_feature (1)..( 6): Matrix.003 file - promoters60/5668541
gatctg

SEQ ID NO: 63608 - DNA, 6 bp, Unknown
  misc_feature (1)..( 6): Matrix.003 file - promoters60/5668541
tgaatt

SEQ ID NO: 63609 - DNA, 6 bp, Unknown
  misc_feature (1)..( 6): Matrix.003 file - promoters60/5668541
aaccga

SEQ ID NO: 63610 - DNA, 7 bp, Unknown
  misc_feature (1)..( 7): Matrix.003 file - promoters60/5668541
cgtcaga

SEQ ID NO: 63611 - DNA, 6 bp, Unknown
  misc_feature (1)..( 6): Matrix.003 file - promoters60/5668541
cagact

SEQ ID NO: 63612 - DNA, 6 bp, Unknown
  misc_feature (1)..( 6): Matrix.003 file - promoters60/5668541
tggttt

SEQ ID NO: 63613 - DNA, 7 bp, Unknown
  misc_feature (1)..( 7): Matrix.003 file - promoters60/5668541
agaatgt

SEQ ID NO: 63614 - DNA, 10 bp, Unknown
  misc_feature (1)..( 10): Matrix.003 file - promoters60/5668547
atgtggctga

SEQ ID NO: 63615 - DNA, 9 bp, Unknown
  misc_feature (1)..( 9): Matrix.003 file - promoters60/5668547
gtgtcctct

SEQ ID NO: 63616 - DNA, 7 bp, Unknown
  misc_feature (1)..( 7): Matrix.003 file - promoters60/5668547
ttttctt

SEQ ID NO: 63617 - DNA, 8 bp, Unknown
  misc_feature (1)..( 8): Matrix.003 file - promoters60/5668547
tgtttcta

SEQ ID NO: 63618 - DNA, 7 bp, Unknown
  misc_feature (1)..( 7): Matrix.003 file - promoters60/5668547
acgtgga

SEQ ID NO: 63619 - DNA, 7 bp, Unknown
  misc_feature (1)..( 7): Matrix.003 file - promoters60/5668547
gctgaaa

SEQ ID NO: 63620 - DNA, 13 bp, Unknown
  misc_feature (1)..( 13): Matrix.003 file - promoters60/5668566
ttcctttcttaat

SEQ ID NO: 63621 - DNA, 11 bp, Unknown
  misc_feature (1)..( 11): Matrix.003 file - promoters60/5668566
cctttcttaat

SEQ ID NO: 63622 - DNA, 6 bp, Unknown
  misc_feature (1)..( 6): Matrix.003 file - promoters60/5668566
aaatta

SEQ ID NO: 63623 - DNA, 6 bp, Unknown
  misc_feature (1)..( 6): Matrix.003 file - promoters60/5668566
aattag

SEQ ID NO: 63624 - DNA, 6 bp, Unknown
  misc_feature (1)..( 6): Matrix.003 file - promoters60/5668566
tgcaaa

SEQ ID NO: 63625 - DNA, 7 bp, Unknown
  misc_feature (1)..( 7): Matrix.003 file - promoters60/5668566
attaaaa

SEQ ID NO: 63626 - DNA, 8 bp, Unknown
  misc_feature (1)..( 8): Matrix.003 file - promoters60/5668566
agtaacac

SEQ ID NO: 63627 - DNA, 7 bp, Unknown
  misc_feature (1)..( 7): Matrix.003 file - promoters60/5668566
atatagt

SEQ ID NO: 63628 - DNA, 7 bp, Unknown
  misc_feature (1)..( 7): Matrix.003 file - promoters60/5668566
tttaata

SEQ ID NO: 63629 - DNA, 6 bp, Unknown
  misc_feature (1)..( 6): Matrix.003 file - promoters60/5668566
ttaatt

SEQ ID NO: 63630 - DNA, 7 bp, Unknown
  misc_feature (1)..( 7): Matrix.003 file - promoters60/5668566
aatcatt

SEQ ID NO: 63631 - DNA, 6 bp, Unknown
  misc_feature (1)..( 6): Matrix.003 file - promoters60/5668566
gcttta

SEQ ID NO: 63632 - DNA, 8 bp, Unknown
  misc_feature (1)..( 8): Matrix.003 file - promoters60/5668566
ggtcataa

SEQ ID NO: 63633 - DNA, 7 bp, Unknown
  misc_feature (1)..( 7): Matrix.003 file - promoters60/5668566
gttatct

SEQ ID NO: 63634 - DNA, 9 bp, Unknown
  misc_feature (1)..( 9): Matrix.003 file - promoters60/5668592
tgagctgtt

SEQ ID NO: 63635 - DNA, 8 bp, Unknown
  misc_feature (1)..( 8): Matrix.003 file - promoters60/5668592
attacttc

SEQ ID NO: 63636 - DNA, 7 bp, Unknown
  misc_feature (1)..( 7): Matrix.003 file - promoters60/5668592
agcaaat

SEQ ID NO: 63637 - DNA, 9 bp, Unknown
  misc_feature (1)..( 9): Matrix.003 file - promoters60/5668592
aaaaaagct

SEQ ID NO: 63638 - DNA, 7 bp, Unknown
  misc_feature (1)..( 7): Matrix.003 file - promoters60/5668592
taaaggg

SEQ ID NO: 63639 - DNA, 6 bp, Unknown
  misc_feature (1)..( 6): Matrix.003 file - promoters60/5668592
tgtctc

SEQ ID NO: 63640 - DNA, 6 bp, Unknown
  misc_feature (1)..( 6): Matrix.003 file - promoters60/5668592
cctctg

SEQ ID NO: 63641 - DNA, 7 bp, Unknown
  misc_feature (1)..( 7): Matrix.003 file - promoters60/5668592
gtgacat

SEQ ID NO: 63642 - DNA, 7 bp, Unknown
  misc_feature (1)..( 7): Matrix.003 file - promoters60/5668592
taacaat

SEQ ID NO: 63643 - DNA, 6 bp, Unknown
  misc_feature (1)..( 6): Matrix.003 file - promoters60/5668592
tgtttc

SEQ ID NO: 63644 - DNA, 6 bp, Unknown
  misc_feature (1)..( 6): Matrix.003 file - promoters60/5668592
ggtccc

SEQ ID NO: 63645 - DNA, 6 bp, Unknown
  misc_feature (1)..( 6): Matrix.003 file - promoters60/5668592
tattat

SEQ ID NO: 63646 - DNA, 7 bp, Unknown
  misc_feature (1)..( 7): Matrix.003 file - promoters60/5668592
tacatat

SEQ ID NO: 63647 - DNA, 6 bp, Unknown
  misc_feature (1)..( 6): Matrix.003 file - promoters60/5668592
attctt

SEQ ID NO: 63648 - DNA, 10 bp, Unknown
  misc_feature (1)..( 10): Matrix.003 file - promoters60/5668592
taataaaaat

SEQ ID NO: 63649 - DNA, 8 bp, Unknown
  misc_feature (1)..( 8): Matrix.003 file - promoters60/5668592
caaaacta

SEQ ID NO: 63650 - DNA, 6 bp, Unknown
  misc_feature (1)..( 6): Matrix.003 file - promoters60/5668592
aacttc

SEQ ID NO: 63651 - DNA, 7 bp, Unknown
  misc_feature (1)..( 7): Matrix.003 file - promoters60/5668592
tcaaggt

SEQ ID NO: 63652 - DNA, 7 bp, Unknown
  misc_feature (1)..( 7): Matrix.003 file - promoters60/5668592
attatga

SEQ ID NO: 63653 - DNA, 8 bp, Unknown
  misc_feature (1)..( 8): Matrix.003 file - promoters60/5668629
aaaaatga

SEQ ID NO: 63654 - DNA, 13 bp, Unknown
  misc_feature (1)..( 13): Matrix.003 file - promoters60/5668629
cacgtataaaatg

SEQ ID NO: 63655 - DNA, 11 bp, Unknown
  misc_feature (1)..( 11): Matrix.003 file - promoters60/5668629
tcaattttata

SEQ ID NO: 63656 - DNA, 8 bp, Unknown
  misc_feature (1)..( 8): Matrix.003 file - promoters60/5668629
atataata

SEQ ID NO: 63657 - DNA, 10 bp, Unknown
  misc_feature (1)..( 10): Matrix.003 file - promoters60/5668629
tcaattttat

SEQ ID NO: 63658 - DNA, 9 bp, Unknown
  misc_feature (1)..( 9): Matrix.003 file - promoters60/5668629
caattttat

SEQ ID NO: 63659 - DNA, 7 bp, Unknown
  misc_feature (1)..( 7): Matrix.003 file - promoters60/5668629
ctttaaa

SEQ ID NO: 63660 - DNA, 8 bp, Unknown
  misc_feature (1)..( 8): Matrix.003 file - promoters60/5668629
tatttcaa

SEQ ID NO: 63661 - DNA, 10 bp, Unknown
  misc_feature (1)..( 10): Matrix.003 file - promoters60/5668748
aaccaaaaaa

SEQ ID NO: 63662 - DNA, 14 bp, Unknown
  misc_feature (1)..( 14): Matrix.003 file - promoters60/5668748
acaataaaatgata

SEQ ID NO: 63663 - DNA, 8 bp, Unknown
  misc_feature (1)..( 8): Matrix.003 file - promoters60/5668748
aaaaaata

SEQ ID NO: 63664 - DNA, 9 bp, Unknown
  misc_feature (1)..( 9): Matrix.003 file - promoters60/5668748
tgataaaat

SEQ ID NO: 63665 - DNA, 9 bp, Unknown
  misc_feature (1)..( 9): Matrix.003 file - promoters60/5668748
aaaaatata

SEQ ID NO: 63666 - DNA, 10 bp, Unknown
  misc_feature (1)..( 10): Matrix.003 file - promoters60/5668748
tatttttcct

SEQ ID NO: 63667 - DNA, 8 bp, Unknown
  misc_feature (1)..( 8): Matrix.003 file - promoters60/5668818
ataattta

SEQ ID NO: 63668 - DNA, 10 bp, Unknown
  misc_feature (1)..( 10): Matrix.003 file - promoters60/5668818
tcataattta

SEQ ID NO: 63669 - DNA, 9 bp, Unknown
  misc_feature (1)..( 9): Matrix.003 file - promoters60/5668818
agttttatt

SEQ ID NO: 63670 - DNA, 8 bp, Unknown
  misc_feature (1)..( 8): Matrix.003 file - promoters60/5668818
tatattca

SEQ ID NO: 63671 - DNA, 10 bp, Unknown
  misc_feature (1)..( 10): Matrix.003 file - promoters60/5668818
ctcatatata

SEQ ID NO: 63672 - DNA, 12 bp, Unknown
  misc_feature (1)..( 12): Matrix.003 file - promoters60/5668818
aattaaacaaaa

SEQ ID NO: 63673 - DNA, 9 bp, Unknown
  misc_feature (1)..( 9): Matrix.003 file - promoters60/5668818
attttattt

SEQ ID NO: 63674 - DNA, 10 bp, Unknown
  misc_feature (1)..( 10): Matrix.003 file - promoters60/5668818
atttattttt

SEQ ID NO: 63675 - DNA, 11 bp, Unknown
  misc_feature (1)..( 11): Matrix.003 file - promoters60/5668818
ttaaggattaa

SEQ ID NO: 63676 - DNA, 8 bp, Unknown
  misc_feature (1)..( 8): Matrix.003 file - promoters60/5668836
ctttccga

SEQ ID NO: 63677 - DNA, 9 bp, Unknown
  misc_feature (1)..( 9): Matrix.003 file - promoters60/5668836
aaatttaag

SEQ ID NO: 63678 - DNA, 7 bp, Unknown
  misc_feature (1)..( 7): Matrix.003 file - promoters60/5668836
attttat

SEQ ID NO: 63679 - DNA, 9 bp, Unknown
  misc_feature (1)..( 9): Matrix.003 file - promoters60/5668836
aaaattaaa

SEQ ID NO: 63680 - DNA, 9 bp, Unknown
  misc_feature (1)..( 9): Matrix.003 file - promoters60/5668836
taaaaattt

SEQ ID NO: 63681 - DNA, 9 bp, Unknown
  misc_feature (1)..( 9): Matrix.003 file - promoters60/5668836
aagtaacca

SEQ ID NO: 63682 - DNA, 7 bp, Unknown
  misc_feature (1)..( 7): Matrix.003 file - promoters60/5668836
aaactaa

SEQ ID NO: 63683 - DNA, 6 bp, Unknown
  misc_feature (1)..( 6): Matrix.003 file - promoters60/5668836
ataatg

SEQ ID NO: 63684 - DNA, 7 bp, Unknown
  misc_feature (1)..( 7): Matrix.003 file - promoters60/5668836
tattaaa

SEQ ID NO: 63685 - DNA, 7 bp, Unknown
  misc_feature (1)..( 7): Matrix.003 file - promoters60/5668836
cgaaaat

SEQ ID NO: 63686 - DNA, 6 bp, Unknown
  misc_feature (1)..( 6): Matrix.003 file - promoters60/5668836
atattt

SEQ ID NO: 63687 - DNA, 7 bp, Unknown
  misc_feature (1)..( 7): Matrix.003 file - promoters60/5668836
tttagca

SEQ ID NO: 63688 - DNA, 7 bp, Unknown
  misc_feature (1)..( 7): Matrix.003 file - promoters60/5668836
tcactta

SEQ ID NO: 63689 - DNA, 9 bp, Unknown
  misc_feature (1)..( 9): Matrix.003 file - promoters60/5668860
gtgaagatt

SEQ ID NO: 63690 - DNA, 8 bp, Unknown
  misc_feature (1)..( 8): Matrix.003 file - promoters60/5668860
catagatt

SEQ ID NO: 63691 - DNA, 6 bp, Unknown
  misc_feature (1)..( 6): Matrix.003 file - promoters60/5668860
taaatt

SEQ ID NO: 63692 - DNA, 7 bp, Unknown
  misc_feature (1)..( 7): Matrix.003 file - promoters60/5668860
tttaaat

SEQ ID NO: 63693 - DNA, 8 bp, Unknown
  misc_feature (1)..( 8): Matrix.003 file - promoters60/5668860
tttgattt

SEQ ID NO: 63694 - DNA, 8 bp, Unknown
  misc_feature (1)..( 8): Matrix.003 file - promoters60/5668860
ataaagat

SEQ ID NO: 63695 - DNA, 8 bp, Unknown
  misc_feature (1)..( 8): Matrix.003 file - promoters60/5668860
gataataa

SEQ ID NO: 63696 - DNA, 7 bp, Unknown
  misc_feature (1)..( 7): Matrix.003 file - promoters60/5668860
aatagtt

SEQ ID NO: 63697 - DNA, 6 bp, Unknown
  misc_feature (1)..( 6): Matrix.003 file - promoters60/5668860
aatact

SEQ ID NO: 63698 - DNA, 6 bp, Unknown
  misc_feature (1)..( 6): Matrix.003 file - promoters60/5668860
gaagaa

SEQ ID NO: 63699 - DNA, 6 bp, Unknown
  misc_feature (1)..( 6): Matrix.003 file - promoters60/5668860
ttgcaa

SEQ ID NO: 63700 - DNA, 6 bp, Unknown
  misc_feature (1)..( 6): Matrix.003 file - promoters60/5668860
aaaaaa

SEQ ID NO: 63701 - DNA, 6 bp, Unknown
  misc_feature (1)..( 6): Matrix.003 file - promoters60/5668860
tctcta

SEQ ID NO: 63702 - DNA, 7 bp, Unknown
  misc_feature (1)..( 7): Matrix.003 file - promoters60/5668860
agtattc

SEQ ID NO: 63703 - DNA, 7 bp, Unknown
  misc_feature (1)..( 7): Matrix.003 file - promoters60/5668860
aaaagaa

SEQ ID NO: 63704 - DNA, 7 bp, Unknown
  misc_feature (1)..( 7): Matrix.003 file - promoters60/5668860
aatattg

SEQ ID NO: 63705 - DNA, 7 bp, Unknown
  misc_feature (1)..( 7): Matrix.003 file - promoters60/5668860
tttgtgt

SEQ ID NO: 63706 - DNA, 6 bp, Unknown
  misc_feature (1)..( 6): Matrix.003 file - promoters60/5668860
gctttt

SEQ ID NO: 63707 - DNA, 6 bp, Unknown
  misc_feature (1)..( 6): Matrix.003 file - promoters60/5668860
aattta

SEQ ID NO: 63708 - DNA, 7 bp, Unknown
  misc_feature (1)..( 7): Matrix.003 file - promoters60/5668882
tttctta

SEQ ID NO: 63709 - DNA, 7 bp, Unknown
  misc_feature (1)..( 7): Matrix.003 file - promoters60/5668882
tttaatc

SEQ ID NO: 63710 - DNA, 7 bp, Unknown
  misc_feature (1)..( 7): Matrix.003 file - promoters60/5668882
aaaacat

SEQ ID NO: 63711 - DNA, 8 bp, Unknown
  misc_feature (1)..( 8): Matrix.003 file - promoters60/5668882
ataagaaa

SEQ ID NO: 63712 - DNA, 9 bp, Unknown
  misc_feature (1)..( 9): Matrix.003 file - promoters60/5668882
cttacatgt

SEQ ID NO: 63713 - DNA, 9 bp, Unknown
  misc_feature (1)..( 9): Matrix.003 file - promoters60/5668882
ctagttatt

SEQ ID NO: 63714 - DNA, 7 bp, Unknown
  misc_feature (1)..( 7): Matrix.003 file - promoters60/5668882
tttaatt

SEQ ID NO: 63715 - DNA, 6 bp, Unknown
  misc_feature (1)..( 6): Matrix.003 file - promoters60/5668882
atatat

SEQ ID NO: 63716 - DNA, 6 bp, Unknown
  misc_feature (1)..( 6): Matrix.003 file - promoters60/5668882
atatta

SEQ ID NO: 63717 - DNA, 8 bp, Unknown
  misc_feature (1)..( 8): Matrix.003 file - promoters60/5668882
acgacaaa

SEQ ID NO: 63718 - DNA, 8 bp, Unknown
  misc_feature (1)..( 8): Matrix.003 file - promoters60/5668882
atttattt

SEQ ID NO: 63719 - DNA, 7 bp, Unknown
  misc_feature (1)..( 7): Matrix.003 file - promoters60/5668882
tgtttaa

SEQ ID NO: 63720 - DNA, 8 bp, Unknown
  misc_feature (1)..( 8): Matrix.003 file - promoters60/5668882
tatcttct

SEQ ID NO: 63721 - DNA, 7 bp, Unknown
  misc_feature (1)..( 7): Matrix.003 file - promoters60/5668882
taggtta

SEQ ID NO: 63722 - DNA, 9 bp, Unknown
  misc_feature (1)..( 9): Matrix.003 file - promoters60/5668882
aaagtcaaa

SEQ ID NO: 63723 - DNA, 7 bp, Unknown
  misc_feature (1)..( 7): Matrix.003 file - promoters60/5668882
catcaaa

SEQ ID NO: 63724 - DNA, 8 bp, Unknown
  misc_feature (1)..( 8): Matrix.003 file - promoters60/5668882
gaagccca

SEQ ID NO: 63725 - DNA, 8 bp, Unknown
  misc_feature (1)..( 8): Matrix.003 file - promoters60/5668897
taaaaaat

SEQ ID NO: 63726 - DNA, 6 bp, Unknown
  misc_feature (1)..( 6): Matrix.003 file - promoters60/5668903
ataata

SEQ ID NO: 63727 - DNA, 8 bp, Unknown
  misc_feature (1)..( 8): Matrix.003 file - promoters60/5668903
agaatttg

SEQ ID NO: 63728 - DNA, 9 bp, Unknown
  misc_feature (1)..( 9): Matrix.003 file - promoters60/5668903
tttaatttg

SEQ ID NO: 63729 - DNA, 7 bp, Unknown
  misc_feature (1)..( 7): Matrix.003 file - promoters60/5668903
aaaaaat

SEQ ID NO: 63730 - DNA, 8 bp, Unknown
  misc_feature (1)..( 8): Matrix.003 file - promoters60/5668903
tggcacta

SEQ ID NO: 63731 - DNA, 6 bp, Unknown
  misc_feature (1)..( 6): Matrix.003 file - promoters60/5668903
aaacga

SEQ ID NO: 63732 - DNA, 9 bp, Unknown
  misc_feature (1)..( 9): Matrix.003 file - promoters60/5668903
ataataaaa

SEQ ID NO: 63733 - DNA, 11 bp, Unknown
  misc_feature (1)..( 11): Matrix.003 file - promoters60/5668903
aaaaaaaaaaa

SEQ ID NO: 63734 - DNA, 7 bp, Unknown
  misc_feature (1)..( 7): Matrix.003 file - promoters60/5668903
ttatata

SEQ ID NO: 63735 - DNA, 9 bp, Unknown
  misc_feature (1)..( 9): Matrix.003 file - promoters60/5668903
cttccacaa

SEQ ID NO: 63736 - DNA, 7 bp, Unknown
  misc_feature (1)..( 7): Matrix.003 file - promoters60/5668903
tatcatt

SEQ ID NO: 63737 - DNA, 7 bp, Unknown
  misc_feature (1)..( 7): Matrix.003 file - promoters60/5668903
ttagatc

SEQ ID NO: 63738 - DNA, 6 bp, Unknown
  misc_feature (1)..( 6): Matrix.003 file - promoters60/5668903
catttg

SEQ ID NO: 63739 - DNA, 7 bp, Unknown
  misc_feature (1)..( 7): Matrix.003 file - promoters60/5668926
taatttt

SEQ ID NO: 63740 - DNA, 7 bp, Unknown
  misc_feature (1)..( 7): Matrix.003 file - promoters60/5668926
gtagaaa

SEQ ID NO: 63741 - DNA, 9 bp, Unknown
  misc_feature (1)..( 9): Matrix.003 file - promoters60/5668926
ctaaagtct

SEQ ID NO: 63742 - DNA, 6 bp, Unknown
  misc_feature (1)..( 6): Matrix.003 file - promoters60/5668926
tttggt

SEQ ID NO: 63743 - DNA, 9 bp, Unknown
  misc_feature (1)..( 9): Matrix.003 file - promoters60/5668926
aatgaatat

SEQ ID NO: 63744 - DNA, 6 bp, Unknown
  misc_feature (1)..( 6): Matrix.003 file - promoters60/5668926
atataa

SEQ ID NO: 63745 - DNA, 8 bp, Unknown
  misc_feature (1)..( 8): Matrix.003 file - promoters60/5668926
catttaaa

SEQ ID NO: 63746 - DNA, 7 bp, Unknown
  misc_feature (1)..( 7): Matrix.003 file - promoters60/5668926
tttgaat

SEQ ID NO: 63747 - DNA, 12 bp, Unknown
  misc_feature (1)..( 12): Matrix.003 file - promoters60/5668926
aaaaatgtgaaa

SEQ ID NO: 63748 - DNA, 7 bp, Unknown
  misc_feature (1)..( 7): Matrix.003 file - promoters60/5668926
aatctaa

SEQ ID NO: 63749 - DNA, 10 bp, Unknown
  misc_feature (1)..( 10): Matrix.003 file - promoters60/5668926
ccaattttaa

SEQ ID NO: 63750 - DNA, 8 bp, Unknown
  misc_feature (1)..( 8): Matrix.003 file - promoters60/5668926
aatagaaa

SEQ ID NO: 63751 - DNA, 9 bp, Unknown
  misc_feature (1)..( 9): Matrix.003 file - promoters60/5668926
tataaaata

SEQ ID NO: 63752 - DNA, 6 bp, Unknown
  misc_feature (1)..( 6): Matrix.003 file - promoters60/5668926
cccaaa

SEQ ID NO: 63753 - DNA, 6 bp, Unknown
  misc_feature (1)..( 6): Matrix.003 file - promoters60/5668926
attttt

SEQ ID NO: 63754 - DNA, 8 bp, Unknown
  misc_feature (1)..( 8): Matrix.003 file - promoters60/5668926
ttttaata

SEQ ID NO: 63755 - DNA, 10 bp, Unknown
  misc_feature (1)..( 10): Matrix.003 file - promoters60/5668926
tatctgagaa

SEQ ID NO: 63756 - DNA, 10 bp, Unknown
  misc_feature (1)..( 10): Matrix.003 file - promoters60/5668926
agtctatata

SEQ ID NO: 63757 - DNA, 7 bp, Unknown
  misc_feature (1)..( 7): Matrix.003 file - promoters60/5668926
tgaaatg

SEQ ID NO: 63758 - DNA, 6 bp, Unknown
  misc_feature (1)..( 6): Matrix.003 file - promoters60/5668926
aacatt

SEQ ID NO: 63759 - DNA, 7 bp, Unknown
  misc_feature (1)..( 7): Matrix.003 file - promoters60/5668926
tctcttt

SEQ ID NO: 63760 - DNA, 8 bp, Unknown
  misc_feature (1)..( 8): Matrix.003 file - promoters60/5668926
cttcctct

SEQ ID NO: 63761 - DNA, 8 bp, Unknown
  misc_feature (1)..( 8): Matrix.003 file - promoters60/5668951
caaaacaa

SEQ ID NO: 63762 - DNA, 8 bp, Unknown
  misc_feature (1)..( 8): Matrix.003 file - promoters60/5668951
attcaatt

SEQ ID NO: 63763 - DNA, 7 bp, Unknown
  misc_feature (1)..( 7): Matrix.003 file - promoters60/5668951
cttatct

SEQ ID NO: 63764 - DNA, 15 bp, Unknown
  misc_feature (1)..( 15): Matrix.003 file - promoters60/5668951
acaaaaataaatcac

SEQ ID NO: 63765 - DNA, 9 bp, Unknown
  misc_feature (1)..( 9): Matrix.003 file - promoters60/5668974
atctttttt

SEQ ID NO: 63766 - DNA, 9 bp, Unknown
  misc_feature (1)..( 9): Matrix.003 file - promoters60/5668974
aaattttat

SEQ ID NO: 63767 - DNA, 12 bp, Unknown
  misc_feature (1)..( 12): Matrix.003 file - promoters60/5668974
atcaaaatattt

SEQ ID NO: 63768 - DNA, 9 bp, Unknown
  misc_feature (1)..( 9): Matrix.003 file - promoters60/5668974
agcaaatta

SEQ ID NO: 63769 - DNA, 13 bp, Unknown
  misc_feature (1)..( 13): Matrix.003 file - promoters60/5668974
aaataacaaaata

SEQ ID NO: 63770 - DNA, 11 bp, Unknown
  misc_feature (1)..( 11): Matrix.003 file - promoters60/5668990
tagagtttgat

SEQ ID NO: 63771 - DNA, 9 bp, Unknown
  misc_feature (1)..( 9): Matrix.003 file - promoters60/5668990
tcgtagtat

SEQ ID NO: 63772 - DNA, 7 bp, Unknown
  misc_feature (1)..( 7): Matrix.003 file - promoters60/5669010
ctcatga

SEQ ID NO: 63773 - DNA, 7 bp, Unknown
  misc_feature (1)..( 7): Matrix.003 file - promoters60/5669010
aagaaaa

SEQ ID NO: 63774 - DNA, 8 bp, Unknown
  misc_feature (1)..( 8): Matrix.003 file - promoters60/5669010
atgaaaat

SEQ ID NO: 63775 - DNA, 6 bp, Unknown
  misc_feature (1)..( 6): Matrix.003 file - promoters60/5669010
tgttac

SEQ ID NO: 63776 - DNA, 8 bp, Unknown
  misc_feature (1)..( 8): Matrix.003 file - promoters60/5669010
tttataaa

SEQ ID NO: 63777 - DNA, 7 bp, Unknown
  misc_feature (1)..( 7): Matrix.003 file - promoters60/5669010
cccatct

SEQ ID NO: 63778 - DNA, 7 bp, Unknown
  misc_feature (1)..( 7): Matrix.003 file - promoters60/5669010
tgtctat

SEQ ID NO: 63779 - DNA, 7 bp, Unknown
  misc_feature (1)..( 7): Matrix.003 file - promoters60/5669010
ttgcttg

SEQ ID NO: 63780 - DNA, 6 bp, Unknown
  misc_feature (1)..( 6): Matrix.003 file - promoters60/5669010
tgattt

SEQ ID NO: 63781 - DNA, 6 bp, Unknown
  misc_feature (1)..( 6): Matrix.003 file - promoters60/5669010
ttgtgt

SEQ ID NO: 63782 - DNA, 6 bp, Unknown
  misc_feature (1)..( 6): Matrix.003 file - promoters60/5669010
tcttct

SEQ ID NO: 63783 - DNA, 8 bp, Unknown
  misc_feature (1)..( 8): Matrix.003 file - promoters60/5669013
aaatatct

SEQ ID NO: 63784 - DNA, 9 bp, Unknown
  misc_feature (1)..( 9): Matrix.003 file - promoters60/5669013
atattatat

SEQ ID NO: 63785 - DNA, 7 bp, Unknown
  misc_feature (1)..( 7): Matrix.003 file - promoters60/5669508
tttgttt

SEQ ID NO: 63786 - DNA, 7 bp, Unknown
  misc_feature (1)..( 7): Matrix.003 file - promoters60/5669546
gttcctt

SEQ ID NO: 63787 - DNA, 8 bp, Unknown
  misc_feature (1)..( 8): Matrix.003 file - promoters60/5669546
aaatgtta

SEQ ID NO: 63788 - DNA, 7 bp, Unknown
  misc_feature (1)..( 7): Matrix.003 file - promoters60/5669546
gttgatt

SEQ ID NO: 63789 - DNA, 8 bp, Unknown
  misc_feature (1)..( 8): Matrix.003 file - promoters60/5669546
cgacatgt

SEQ ID NO: 63790 - DNA, 6 bp, Unknown
  misc_feature (1)..( 6): Matrix.003 file - promoters60/5669546
acatgt

SEQ ID NO: 63791 - DNA, 8 bp, Unknown
  misc_feature (1)..( 8): Matrix.003 file - promoters60/5670300
caaaaaaa

SEQ ID NO: 63792 - DNA, 6 bp, Unknown
  misc_feature (1)..( 6): Matrix.003 file - promoters60/5670300
aaaaca

SEQ ID NO: 63793 - DNA, 8 bp, Unknown
  misc_feature (1)..( 8): Matrix.003 file - promoters60/5670300
gaaataaa

SEQ ID NO: 63794 - DNA, 7 bp, Unknown
  misc_feature (1)..( 7): Matrix.003 file - promoters60/5670300
caaattt

SEQ ID NO: 63795 - DNA, 6 bp, Unknown
  misc_feature (1)..( 6): Matrix.003 file - promoters60/5670300
ttaaaa

SEQ ID NO: 63796 - DNA, 6 bp, Unknown
  misc_feature (1)..( 6): Matrix.003 file - promoters60/5670300
gtaacg

SEQ ID NO: 63797 - DNA, 7 bp, Unknown
  misc_feature (1)..( 7): Matrix.003 file - promoters60/5670300
gtggtta

SEQ ID NO: 63798 - DNA, 10 bp, Unknown
  misc_feature (1)..( 10): Matrix.003 file - promoters60/5670300
tacgtgtcaa

SEQ ID NO: 63799 - DNA, 20 bp, Unknown
  misc_feature (1)..( 20): Matrix.003 file - promoters60/5670300
ttggctattgcttcaccgcc

SEQ ID NO: 63800 - DNA, 16 bp, Unknown
  misc_feature (1)..( 16): Matrix.003 file - promoters60/5670300
gaccgagtcgtcctcg

SEQ ID NO: 63801 - DNA, 19 bp, Unknown
  misc_feature (1)..( 19): Matrix.003 file - promoters60/5670300
ttcttcttctataaatcaa

SEQ ID NO: 63802 - DNA, 6 bp, Unknown
  misc_feature (1)..( 6): Matrix.003 file - promoters60/5670300
gcttct

SEQ ID NO: 63803 - DNA, 8 bp, Unknown
  misc_feature (1)..( 8): Matrix.003 file - promoters60/5670300
ttctggcc

SEQ ID NO: 63804 - DNA, 7 bp, Unknown
  misc_feature (1)..( 7): Matrix.003 file - promoters60/5670300
tacatat

SEQ ID NO: 63805 - DNA, 15 bp, Unknown
  misc_feature (1)..( 15): Matrix.003 file - promoters60/5670300
cgccttagctttctc

SEQ ID NO: 63806 - DNA, 6 bp, Unknown
  misc_feature (1)..( 6): Matrix.003 file - promoters60/5670300
tttttt

SEQ ID NO: 63807 - DNA, 9 bp, Unknown
  misc_feature (1)..( 9): Matrix.003 file - promoters60/5670300
acaaaaagg

SEQ ID NO: 63808 - DNA, 7 bp, Unknown
  misc_feature (1)..( 7): Matrix.003 file - promoters60/5670300
acgaaga

SEQ ID NO: 63809 - DNA, 6 bp, Unknown
  misc_feature (1)..( 6): Matrix.003 file - promoters60/5670300
gttcaa

SEQ ID NO: 63810 - DNA, 6 bp, Unknown
  misc_feature (1)..( 6): Matrix.003 file - promoters60/5670300
gtatat

SEQ ID NO: 63811 - DNA, 9 bp, Unknown
  misc_feature (1)..( 9): Matrix.003 file - promoters60/5670300
atctaatga

SEQ ID NO: 63812 - DNA, 6 bp, Unknown
  misc_feature (1)..( 6): Matrix.003 file - promoters60/5670300
tcagta

SEQ ID NO: 63813 - DNA, 6 bp, Unknown
  misc_feature (1)..( 6): Matrix.003 file - promoters60/5670300
aacaac

SEQ ID NO: 63814 - DNA, 15 bp, Unknown
  misc_feature (1)..( 15): Matrix.003 file - promoters60/5670300
aatacccaaagagct

SEQ ID NO: 63815 - DNA, 7 bp, Unknown
  misc_feature (1)..( 7): Matrix.003 file - promoters60/5670680
tatgttc

SEQ ID NO: 63816 - DNA, 7 bp, Unknown
  misc_feature (1)..( 7): Matrix.003 file - promoters60/5670680
gttctag

SEQ ID NO: 63817 - DNA, 8 bp, Unknown
  misc_feature (1)..( 8): Matrix.003 file - promoters60/5670680
ataagata

SEQ ID NO: 63818 - DNA, 6 bp, Unknown
  misc_feature (1)..( 6): Matrix.003 file - promoters60/5670680
ttttaa

SEQ ID NO: 63819 - DNA, 8 bp, Unknown
  misc_feature (1)..( 8): Matrix.003 file - promoters60/5670680
aaaaaatg

SEQ ID NO: 63820 - DNA, 6 bp, Unknown
  misc_feature (1)..( 6): Matrix.003 file - promoters60/5670680
agaaat

SEQ ID NO: 63821 - DNA, 7 bp, Unknown
  misc_feature (1)..( 7): Matrix.003 file - promoters60/5670680
ataagat

SEQ ID NO: 63822 - DNA, 9 bp, Unknown
  misc_feature (1)..( 9): Matrix.003 file - promoters60/5670680
caagacaat

SEQ ID NO: 63823 - DNA, 6 bp, Unknown
  misc_feature (1)..( 6): Matrix.003 file - promoters60/5670680
atagta

SEQ ID NO: 63824 - DNA, 6 bp, Unknown
  misc_feature (1)..( 6): Matrix.003 file - promoters60/5670680
gaaaaa

SEQ ID NO: 63825 - DNA, 8 bp, Unknown
  misc_feature (1)..( 8): Matrix.003 file - promoters60/5670680
tgaaggtg

SEQ ID NO: 63826 - DNA, 8 bp, Unknown
  misc_feature (1)..( 8): Matrix.003 file - promoters60/5670680
aaatattt

SEQ ID NO: 63827 - DNA, 9 bp, Unknown
  misc_feature (1)..( 9): Matrix.003 file - promoters60/5670680
caagctcta

SEQ ID NO: 63828 - DNA, 8 bp, Unknown
  misc_feature (1)..( 8): Matrix.003 file - promoters60/5670680
attttcat

SEQ ID NO: 63829 - DNA, 8 bp, Unknown
  misc_feature (1)..( 8): Matrix.003 file - promoters60/5670680
attttttt

SEQ ID NO: 63830 - DNA, 6 bp, Unknown
  misc_feature (1)..( 6): Matrix.003 file - promoters60/5670680
tcatat

SEQ ID NO: 63831 - DNA, 6 bp, Unknown
  misc_feature (1)..( 6): Matrix.003 file - promoters60/5670680
agaaaa

SEQ ID NO: 63832 - DNA, 6 bp, Unknown
  misc_feature (1)..( 6): Matrix.003 file - promoters60/5670680
tttcaa

SEQ ID NO: 63833 - DNA, 8 bp, Unknown
  misc_feature (1)..( 8): Matrix.003 file - promoters60/5670680
atcaaaat

SEQ ID NO: 63834 - DNA, 8 bp, Unknown
  misc_feature (1)..( 8): Matrix.003 file - promoters60/5670784
attaacaa

SEQ ID NO: 63835 - DNA, 7 bp, Unknown
  misc_feature (1)..( 7): Matrix.003 file - promoters60/5670784
aagaaag

SEQ ID NO: 63836 - DNA, 8 bp, Unknown
  misc_feature (1)..( 8): Matrix.003 file - promoters60/5670784
agaggttc

SEQ ID NO: 63837 - DNA, 7 bp, Unknown
  misc_feature (1)..( 7): Matrix.003 file - promoters60/5670784
actggtg

SEQ ID NO: 63838 - DNA, 6 bp, Unknown
  misc_feature (1)..( 6): Matrix.003 file - promoters60/5670784
catcaa

SEQ ID NO: 63839 - DNA, 6 bp, Unknown
  misc_feature (1)..( 6): Matrix.003 file - promoters60/5670784
tatgat

SEQ ID NO: 63840 - DNA, 9 bp, Unknown
  misc_feature (1)..( 9): Matrix.003 file - promoters60/5670784
aatccaaac

SEQ ID NO: 63841 - DNA, 9 bp, Unknown
  misc_feature (1)..( 9): Matrix.003 file - promoters60/5670784
tttaaaagc

SEQ ID NO: 63842 - DNA, 7 bp, Unknown
  misc_feature (1)..( 7): Matrix.003 file - promoters60/5670784
aaactga

SEQ ID NO: 63843 - DNA, 8 bp, Unknown
  misc_feature (1)..( 8): Matrix.003 file - promoters60/5670784
atttattt

SEQ ID NO: 63844 - DNA, 8 bp, Unknown
  misc_feature (1)..( 8): Matrix.003 file - promoters60/5670784
aatagtta

SEQ ID NO: 63845 - DNA, 9 bp, Unknown
  misc_feature (1)..( 9): Matrix.003 file - promoters60/5670784
gttttcgct

SEQ ID NO: 63846 - DNA, 6 bp, Unknown
  misc_feature (1)..( 6): Matrix.003 file - promoters60/5670784
ttaaca

SEQ ID NO: 63847 - DNA, 6 bp, Unknown
  misc_feature (1)..( 6): Matrix.003 file - promoters60/5670784
agatta

SEQ ID NO: 63848 - DNA, 7 bp, Unknown
  misc_feature (1)..( 7): Matrix.003 file - promoters60/5670784
atcaagc

SEQ ID NO: 63849 - DNA, 7 bp, Unknown
  misc_feature (1)..( 7): Matrix.003 file - promoters60/5670784
gtaaacc

SEQ ID NO: 63850 - DNA, 6 bp, Unknown
  misc_feature (1)..( 6): Matrix.003 file - promoters60/5670784
ctgatt

SEQ ID NO: 63851 - DNA, 9 bp, Unknown
  misc_feature (1)..( 9): Matrix.003 file - promoters60/5670809
tgacaaaaa

SEQ ID NO: 63852 - DNA, 8 bp, Unknown
  misc_feature (1)..( 8): Matrix.003 file - promoters60/5670809
agaagagc

SEQ ID NO: 63853 - DNA, 9 bp, Unknown
  misc_feature (1)..( 9): Matrix.003 file - promoters60/5670809
taaaaactt

SEQ ID NO: 63854 - DNA, 8 bp, Unknown
  misc_feature (1)..( 8): Matrix.003 file - promoters60/5670809
gcatgtga

SEQ ID NO: 63855 - DNA, 11 bp, Unknown
  misc_feature (1)..( 11): Matrix.003 file - promoters60/5671204
ctatttaaaag

SEQ ID NO: 63856 - DNA, 8 bp, Unknown
  misc_feature (1)..( 8): Matrix.003 file - promoters60/5671204
acacaaaa

SEQ ID NO: 63857 - DNA, 10 bp, Unknown
  misc_feature (1)..( 10): Matrix.003 file - promoters60/5671204
aacacaaaaa

SEQ ID NO: 63858 - DNA, 13 bp, Unknown
  misc_feature (1)..( 13): Matrix.003 file - promoters60/5671318
tatataaaaagcc

SEQ ID NO: 63859 - DNA, 11 bp, Unknown
  misc_feature (1)..( 11): Matrix.003 file - promoters60/5671318
ctatataaaaa

SEQ ID NO: 63860 - DNA, 13 bp, Unknown
  misc_feature (1)..( 13): Matrix.003 file - promoters60/5671318
taaattatataat

SEQ ID NO: 63861 - DNA, 9 bp, Unknown
  misc_feature (1)..( 9): Matrix.003 file - promoters60/5671338
tgaaatttt

SEQ ID NO: 63862 - DNA, 10 bp, Unknown
  misc_feature (1)..( 10): Matrix.003 file - promoters60/5671338
tttaatgaat

SEQ ID NO: 63863 - DNA, 10 bp, Unknown
  misc_feature (1)..( 10): Matrix.003 file - promoters60/5671338
tatgttaaaa

SEQ ID NO: 63864 - DNA, 8 bp, Unknown
  misc_feature (1)..( 8): Matrix.003 file - promoters60/5671338
aaaaaatt

SEQ ID NO: 63865 - DNA, 10 bp, Unknown
  misc_feature (1)..( 10): Matrix.003 file - promoters60/5671338
gtaaatgtaa

SEQ ID NO: 63866 - DNA, 8 bp, Unknown
  misc_feature (1)..( 8): Matrix.003 file - promoters60/5671338
attttgga

SEQ ID NO: 63867 - DNA, 9 bp, Unknown
  misc_feature (1)..( 9): Matrix.003 file - promoters60/5671347
cattgttta

SEQ ID NO: 63868 - DNA, 7 bp, Unknown
  misc_feature (1)..( 7): Matrix.003 file - promoters60/5671710
taaaaag

SEQ ID NO: 63869 - DNA, 10 bp, Unknown
  misc_feature (1)..( 10): Matrix.003 file - promoters60/5671710
gatttacaat

SEQ ID NO: 63870 - DNA, 9 bp, Unknown
  misc_feature (1)..( 9): Matrix.003 file - promoters60/5671955
taattttac

SEQ ID NO: 63871 - DNA, 6 bp, Unknown
  misc_feature (1)..( 6): Matrix.003 file - promoters60/5671955
cagaca

SEQ ID NO: 63872 - DNA, 10 bp, Unknown
  misc_feature (1)..( 10): Matrix.003 file - promoters60/5671955
caattaaaaa

SEQ ID NO: 63873 - DNA, 7 bp, Unknown
  misc_feature (1)..( 7): Matrix.003 file - promoters60/5671955
atgcgtc

SEQ ID NO: 63874 - DNA, 6 bp, Unknown
  misc_feature (1)..( 6): Matrix.003 file - promoters60/5671955
ctcaga

SEQ ID NO: 63875 - DNA, 7 bp, Unknown
  misc_feature (1)..( 7): Matrix.003 file - promoters60/5671955
attttaa

SEQ ID NO: 63876 - DNA, 6 bp, Unknown
  misc_feature (1)..( 6): Matrix.003 file - promoters60/5671955
tttctt

SEQ ID NO: 63877 - DNA, 6 bp, Unknown
  misc_feature (1)..( 6): Matrix.003 file - promoters60/5671955
gaaaaa

SEQ ID NO: 63878 - DNA, 8 bp, Unknown
  misc_feature (1)..( 8): Matrix.003 file - promoters60/5671955
aataataa

SEQ ID NO: 63879 - DNA, 6 bp, Unknown
  misc_feature (1)..( 6): Matrix.003 file - promoters60/5671955
aaagga

SEQ ID NO: 63880 - DNA, 7 bp, Unknown
  misc_feature (1)..( 7): Matrix.003 file - promoters60/5671955
aacaaag

SEQ ID NO: 63881 - DNA, 8 bp, Unknown
  misc_feature (1)..( 8): Matrix.003 file - promoters60/5671955
atttattt

SEQ ID NO: 63882 - DNA, 11 bp, Unknown
  misc_feature (1)..( 11): Matrix.003 file - promoters60/5671955
tactgtattag

SEQ ID NO: 63883 - DNA, 6 bp, Unknown
  misc_feature (1)..( 6): Matrix.003 file - promoters60/5671955
tataat

SEQ ID NO: 63884 - DNA, 8 bp, Unknown
  misc_feature (1)..( 8): Matrix.003 file - promoters60/5671955
taatatta

SEQ ID NO: 63885 - DNA, 9 bp, Unknown
  misc_feature (1)..( 9): Matrix.003 file - promoters60/5672093
caaaaaaaa

SEQ ID NO: 63886 - DNA, 11 bp, Unknown
  misc_feature (1)..( 11): Matrix.003 file - promoters60/5672093
aaaaagggcca

SEQ ID NO: 63887 - DNA, 8 bp, Unknown
  misc_feature (1)..( 8): Matrix.003 file - promoters60/5672093
actatcaa

SEQ ID NO: 63888 - DNA, 9 bp, Unknown
  misc_feature (1)..( 9): Matrix.003 file - promoters60/5672842
atatataaa

SEQ ID NO: 63889 - DNA, 10 bp, Unknown
  misc_feature (1)..( 10): Matrix.003 file - promoters60/5672842
attagtgatt

SEQ ID NO: 63890 - DNA, 8 bp, Unknown
  misc_feature (1)..( 8): Matrix.003 file - promoters60/5673124
ccaataag

SEQ ID NO: 63891 - DNA, 8 bp, Unknown
  misc_feature (1)..( 8): Matrix.003 file - promoters60/5673124
acgttatg

SEQ ID NO: 63892 - DNA, 10 bp, Unknown
  misc_feature (1)..( 10): Matrix.003 file - promoters60/5673124
ggtttatttt

SEQ ID NO: 63893 - DNA, 13 bp, Unknown
  misc_feature (1)..( 13): Matrix.003 file - promoters60/5673124
tttgattccatgt

SEQ ID NO: 63894 - DNA, 9 bp, Unknown
  misc_feature (1)..( 9): Matrix.003 file - promoters60/5673124
aacttgttg

SEQ ID NO: 63895 - DNA, 11 bp, Unknown
  misc_feature (1)..( 11): Matrix.003 file - promoters60/5673650
aattgttactt

SEQ ID NO: 63896 - DNA, 4 bp, Unknown
  misc_feature (1)..( 4): Matrix.003 file - promoters60/5673674
aaat

SEQ ID NO: 63897 - DNA, 8 bp, Unknown
  misc_feature (1)..( 8): Matrix.003 file - promoters60/5673674
aaagaaga

SEQ ID NO: 63898 - DNA, 10 bp, Unknown
  misc_feature (1)..( 10): Matrix.003 file - promoters60/5673674
atgaaagaaa

SEQ ID NO: 63899 - DNA, 6 bp, Unknown
  misc_feature (1)..( 6): Matrix.003 file - promoters60/5673674
aataaa

SEQ ID NO: 63900 - DNA, 9 bp, Unknown
  misc_feature (1)..( 9): Matrix.003 file - promoters60/5673674
gatgtgatt

SEQ ID NO: 63901 - DNA, 9 bp, Unknown
  misc_feature (1)..( 9): Matrix.003 file - promoters60/5673674
ttatcaaac

SEQ ID NO: 63902 - DNA, 12 bp, Unknown
  misc_feature (1)..( 12): Matrix.003 file - promoters60/5673674
ttcttcttttaa

SEQ ID NO: 63903 - DNA, 8 bp, Unknown
  misc_feature (1)..( 8): Matrix.003 file - promoters60/5674194
aaataaat

SEQ ID NO: 63904 - DNA, 7 bp, Unknown
  misc_feature (1)..( 7): Matrix.003 file - promoters60/5674530
acaaata

SEQ ID NO: 63905 - DNA, 9 bp, Unknown
  misc_feature (1)..( 9): Matrix.003 file - promoters60/5674530
ttagtaaca

SEQ ID NO: 63906 - DNA, 6 bp, Unknown
  misc_feature (1)..( 6): Matrix.003 file - promoters60/5674530
aaaaat

SEQ ID NO: 63907 - DNA, 8 bp, Unknown
  misc_feature (1)..( 8): Matrix.003 file - promoters60/5674530
tctaaaat

SEQ ID NO: 63908 - DNA, 6 bp, Unknown
  misc_feature (1)..( 6): Matrix.003 file - promoters60/5674530
aacaca

SEQ ID NO: 63909 - DNA, 8 bp, Unknown
  misc_feature (1)..( 8): Matrix.003 file - promoters60/5674530
acacctgt

SEQ ID NO: 63910 - DNA, 8 bp, Unknown
  misc_feature (1)..( 8): Matrix.003 file - promoters60/5674530
aaaaaaaa

SEQ ID NO: 63911 - DNA, 8 bp, Unknown
  misc_feature (1)..( 8): Matrix.003 file - promoters60/5674530
atgaagtt

SEQ ID NO: 63912 - DNA, 9 bp, Unknown
  misc_feature (1)..( 9): Matrix.003 file - promoters60/5674530
ccaaataaa

SEQ ID NO: 63913 - DNA, 6 bp, Unknown
  misc_feature (1)..( 6): Matrix.003 file - promoters60/5674530
catgaa

SEQ ID NO: 63914 - DNA, 8 bp, Unknown
  misc_feature (1)..( 8): Matrix.003 file - promoters60/5674530
acttaaat

SEQ ID NO: 63915 - DNA, 9 bp, Unknown
  misc_feature (1)..( 9): Matrix.003 file - promoters60/5674530
aaaaaggag

SEQ ID NO: 63916 - DNA, 7 bp, Unknown
  misc_feature (1)..( 7): Matrix.003 file - promoters60/5674530
aagcaaa

SEQ ID NO: 63917 - DNA, 8 bp, Unknown
  misc_feature (1)..( 8): Matrix.003 file - promoters60/5674530
tgtctaca

SEQ ID NO: 63918 - DNA, 7 bp, Unknown
  misc_feature (1)..( 7): Matrix.003 file - promoters60/5674530
tagaaaa

SEQ ID NO: 63919 - DNA, 6 bp, Unknown
  misc_feature (1)..( 6): Matrix.003 file - promoters60/5674530
aaatca

SEQ ID NO: 63920 - DNA, 9 bp, Unknown
  misc_feature (1)..( 9): Matrix.003 file - promoters60/5674530
caaacaaaa

SEQ ID NO: 63921 - DNA, 9 bp, Unknown
  misc_feature (1)..( 9): Matrix.003 file - promoters60/5674626
gattaccaa

SEQ ID NO: 63922 - DNA, 7 bp, Unknown
  misc_feature (1)..( 7): Matrix.003 file - promoters60/5674626
gaagatg

SEQ ID NO: 63923 - DNA, 6 bp, Unknown
  misc_feature (1)..( 6): Matrix.003 file - promoters60/5674626
ttaaaa

SEQ ID NO: 63924 - DNA, 7 bp, Unknown
  misc_feature (1)..( 7): Matrix.003 file - promoters60/5674626
aaaatca

SEQ ID NO: 63925 - DNA, 6 bp, Unknown
  misc_feature (1)..( 6): Matrix.003 file - promoters60/5674626
atatgt

SEQ ID NO: 63926 - DNA, 6 bp, Unknown
  misc_feature (1)..( 6): Matrix.003 file - promoters60/5674626
ttgaag

SEQ ID NO: 63927 - DNA, 7 bp, Unknown
  misc_feature (1)..( 7): Matrix.003 file - promoters60/5674626
gaaattg

SEQ ID NO: 63928 - DNA, 6 bp, Unknown
  misc_feature (1)..( 6): Matrix.003 file - promoters60/5674626
tgatat

SEQ ID NO: 63929 - DNA, 6 bp, Unknown
  misc_feature (1)..( 6): Matrix.003 file - promoters60/5674626
atataa

SEQ ID NO: 63930 - DNA, 6 bp, Unknown
  misc_feature (1)..( 6): Matrix.003 file - promoters60/5674626
tatttt

SEQ ID NO: 63931 - DNA, 7 bp, Unknown
  misc_feature (1)..( 7): Matrix.003 file - promoters60/5674626
tttattg

SEQ ID NO: 63932 - DNA, 6 bp, Unknown
  misc_feature (1)..( 6): Matrix.003 file - promoters60/5674626
aatatt

SEQ ID NO: 63933 - DNA, 7 bp, Unknown
  misc_feature (1)..( 7): Matrix.003 file - promoters60/5674626
aataaat

SEQ ID NO: 63934 - DNA, 7 bp, Unknown
  misc_feature (1)..( 7): Matrix.003 file - promoters60/5674626
ttaaaag

SEQ ID NO: 63935 - DNA, 6 bp, Unknown
  misc_feature (1)..( 6): Matrix.003 file - promoters60/5674626
ttggat

SEQ ID NO: 63936 - DNA, 7 bp, Unknown
  misc_feature (1)..( 7): Matrix.003 file - promoters60/5674626
attccca

SEQ ID NO: 63937 - DNA, 6 bp, Unknown
  misc_feature (1)..( 6): Matrix.003 file - promoters60/5674626
atccaa

SEQ ID NO: 63938 - DNA, 7 bp, Unknown
  misc_feature (1)..( 7): Matrix.003 file - promoters60/5674626
attaccg

SEQ ID NO: 63939 - DNA, 7 bp, Unknown
  misc_feature (1)..( 7): Matrix.003 file - promoters60/5674626
gctaaaa

SEQ ID NO: 63940 - DNA, 7 bp, Unknown
  misc_feature (1)..( 7): Matrix.003 file - promoters60/5674626
aaggatt

SEQ ID NO: 63941 - DNA, 9 bp, Unknown
  misc_feature (1)..( 9): Matrix.003 file - promoters60/5674666
aaaagaaat

SEQ ID NO: 63942 - DNA, 8 bp, Unknown
  misc_feature (1)..( 8): Matrix.003 file - promoters60/5674666
aaaagaaa

SEQ ID NO: 63943 - DNA, 10 bp, Unknown
  misc_feature (1)..( 10): Matrix.003 file - promoters60/5674666
agacaaaaga

SEQ ID NO: 63944 - DNA, 9 bp, Unknown
  misc_feature (1)..( 9): Matrix.003 file - promoters60/5674666
tatataaaa

SEQ ID NO: 63945 - DNA, 7 bp, Unknown
  misc_feature (1)..( 7): Matrix.003 file - promoters60/5675330
caacaga

SEQ ID NO: 63946 - DNA, 10 bp, Unknown
  misc_feature (1)..( 10): Matrix.003 file - promoters60/5675330
tttgtggtaa

SEQ ID NO: 63947 - DNA, 6 bp, Unknown
  misc_feature (1)..( 6): Matrix.003 file - promoters60/5675330
catgtt

SEQ ID NO: 63948 - DNA, 6 bp, Unknown
  misc_feature (1)..( 6): Matrix.003 file - promoters60/5675330
attgag

SEQ ID NO: 63949 - DNA, 7 bp, Unknown
  misc_feature (1)..( 7): Matrix.003 file - promoters60/5675330
taccgga

SEQ ID NO: 63950 - DNA, 8 bp, Unknown
  misc_feature (1)..( 8): Matrix.003 file - promoters60/5675330
aaacagtt

SEQ ID NO: 63951 - DNA, 8 bp, Unknown
  misc_feature (1)..( 8): Matrix.003 file - promoters60/5675330
tcaagaag

SEQ ID NO: 63952 - DNA, 6 bp, Unknown
  misc_feature (1)..( 6): Matrix.003 file - promoters60/5675330
atctgc

SEQ ID NO: 63953 - DNA, 6 bp, Unknown
  misc_feature (1)..( 6): Matrix.003 file - promoters60/5675330
tttagt

SEQ ID NO: 63954 - DNA, 7 bp, Unknown
  misc_feature (1)..( 7): Matrix.003 file - promoters60/5675330
atgattt

SEQ ID NO: 63955 - DNA, 7 bp, Unknown
  misc_feature (1)..( 7): Matrix.003 file - promoters60/5675330
gaagttg

SEQ ID NO: 63956 - DNA, 6 bp, Unknown
  misc_feature (1)..( 6): Matrix.003 file - promoters60/5675330
tgttat

SEQ ID NO: 63957 - DNA, 6 bp, Unknown
  misc_feature (1)..( 6): Matrix.003 file - promoters60/5675330
aatatc

SEQ ID NO: 63958 - DNA, 8 bp, Unknown
  misc_feature (1)..( 8): Matrix.003 file - promoters60/5675330
tgttggaa

SEQ ID NO: 63959 - DNA, 6 bp, Unknown
  misc_feature (1)..( 6): Matrix.003 file - promoters60/5675330
ggaaaa

SEQ ID NO: 63960 - DNA, 7 bp, Unknown
  misc_feature (1)..( 7): Matrix.003 file - promoters60/5675330
aaatgtt

SEQ ID NO: 63961 - DNA, 11 bp, Unknown
  misc_feature (1)..( 11): Matrix.003 file - promoters60/5675628
aacacaaatta

SEQ ID NO: 63962 - DNA, 12 bp, Unknown
  misc_feature (1)..( 12): Matrix.003 file - promoters60/5675628
tgttccatggct

SEQ ID NO: 63963 - DNA, 7 bp, Unknown
  misc_feature (1)..( 7): Matrix.003 file - promoters60/5675628
tctttgt

SEQ ID NO: 63964 - DNA, 8 bp, Unknown
  misc_feature (1)..( 8): Matrix.003 file - promoters60/5676027
ttttttat

SEQ ID NO: 63965 - DNA, 9 bp, Unknown
  misc_feature (1)..( 9): Matrix.003 file - promoters60/5676027
taatttcaa

SEQ ID NO: 63966 - DNA, 8 bp, Unknown
  misc_feature (1)..( 8): Matrix.003 file - promoters60/5676027
aaatttta

SEQ ID NO: 63967 - DNA, 13 bp, Unknown
  misc_feature (1)..( 13): Matrix.003 file - promoters60/5676027
caagtatataaat

SEQ ID NO: 63968 - DNA, 8 bp, Unknown
  misc_feature (1)..( 8): Matrix.003 file - promoters60/5676027
caattatt

SEQ ID NO: 63969 - DNA, 8 bp, Unknown
  misc_feature (1)..( 8): Matrix.003 file - promoters60/5676027
atttatat

SEQ ID NO: 63970 - DNA, 11 bp, Unknown
  misc_feature (1)..( 11): Matrix.003 file - promoters60/5676160
aagtaaatttt

SEQ ID NO: 63971 - DNA, 11 bp, Unknown
  misc_feature (1)..( 11): Matrix.003 file - promoters60/5676160
atcatatataa

SEQ ID NO: 63972 - DNA, 6 bp, Unknown
  misc_feature (1)..( 6): Matrix.003 file - promoters60/5676521
tcttct

SEQ ID NO: 63973 - DNA, 9 bp, Unknown
  misc_feature (1)..( 9): Matrix.003 file - promoters60/5676521
aaaaaagaa

SEQ ID NO: 63974 - DNA, 8 bp, Unknown
  misc_feature (1)..( 8): Matrix.003 file - promoters60/5676521
ttgatttg

SEQ ID NO: 63975 - DNA, 8 bp, Unknown
  misc_feature (1)..( 8): Matrix.003 file - promoters60/5676521
tcttatag

SEQ ID NO: 63976 - DNA, 7 bp, Unknown
  misc_feature (1)..( 7): Matrix.003 file - promoters60/5676521
ttacttc

SEQ ID NO: 63977 - DNA, 6 bp, Unknown
  misc_feature (1)..( 6): Matrix.003 file - promoters60/5676521
gtgaaa

SEQ ID NO: 63978 - DNA, 7 bp, Unknown
  misc_feature (1)..( 7): Matrix.003 file - promoters60/5676521
aaaagaa

SEQ ID NO: 63979 - DNA, 7 bp, Unknown
  misc_feature (1)..( 7): Matrix.003 file - promoters60/5676521
aaaccca

SEQ ID NO: 63980 - DNA, 7 bp, Unknown
  misc_feature (1)..( 7): Matrix.003 file - promoters60/5676521
ccgaaaa

SEQ ID NO: 63981 - DNA, 6 bp, Unknown
  misc_feature (1)..( 6): Matrix.003 file - promoters60/5676521
ttgtga

SEQ ID NO: 63982 - DNA, 6 bp, Unknown
  misc_feature (1)..( 6): Matrix.003 file - promoters60/5676521
gagatc

SEQ ID NO: 63983 - DNA, 6 bp, Unknown
  misc_feature (1)..( 6): Matrix.003 file - promoters60/5676521
gtgttt

SEQ ID NO: 63984 - DNA, 8 bp, Unknown
  misc_feature (1)..( 8): Matrix.003 file - promoters60/5676521
cttattat

SEQ ID NO: 63985 - DNA, 10 bp, Unknown
  misc_feature (1)..( 10): Matrix.003 file - promoters60/5676521
gatcttcttc

SEQ ID NO: 63986 - DNA, 9 bp, Unknown
  misc_feature (1)..( 9): Matrix.003 file - promoters60/5676647
aacctatta

SEQ ID NO: 63987 - DNA, 6 bp, Unknown
  misc_feature (1)..( 6): Matrix.003 file - promoters60/5676647
cgactg

SEQ ID NO: 63988 - DNA, 7 bp, Unknown
  misc_feature (1)..( 7): Matrix.003 file - promoters60/5676647
tttattt

SEQ ID NO: 63989 - DNA, 6 bp, Unknown
  misc_feature (1)..( 6): Matrix.003 file - promoters60/5676647
tatttt

SEQ ID NO: 63990 - DNA, 7 bp, Unknown
  misc_feature (1)..( 7): Matrix.003 file - promoters60/5676647
aaagtga

SEQ ID NO: 63991 - DNA, 10 bp, Unknown
  misc_feature (1)..( 10): Matrix.003 file - promoters60/5676647
gaatatcttt

SEQ ID NO: 63992 - DNA, 7 bp, Unknown
  misc_feature (1)..( 7): Matrix.003 file - promoters60/5676647
aagaggt

SEQ ID NO: 63993 - DNA, 7 bp, Unknown
  misc_feature (1)..( 7): Matrix.003 file - promoters60/5676647
cttatta

SEQ ID NO: 63994 - DNA, 9 bp, Unknown
  misc_feature (1)..( 9): Matrix.003 file - promoters60/5676647
taaaaatga

SEQ ID NO: 63995 - DNA, 6 bp, Unknown
  misc_feature (1)..( 6): Matrix.003 file - promoters60/5676647
aggaaa

SEQ ID NO: 63996 - DNA, 6 bp, Unknown
  misc_feature (1)..( 6): Matrix.003 file - promoters60/5676647
gacaac

SEQ ID NO: 63997 - DNA, 7 bp, Unknown
  misc_feature (1)..( 7): Matrix.003 file - promoters60/5676647
aatcatc

SEQ ID NO: 63998 - DNA, 7 bp, Unknown
  misc_feature (1)..( 7): Matrix.003 file - promoters60/5677029
attgtaa

SEQ ID NO: 63999 - DNA, 10 bp, Unknown
  misc_feature (1)..( 10): Matrix.003 file - promoters60/5677029
taaaagttaa

SEQ ID NO: 64000 - DNA, 8 bp, Unknown
  misc_feature (1)..( 8): Matrix.003 file - promoters60/5677029
taaatgaa

SEQ ID NO: 64001 - DNA, 9 bp, Unknown
  misc_feature (1)..( 9): Matrix.003 file - promoters60/5677029
gattataaa

SEQ ID NO: 64002 - DNA, 7 bp, Unknown
  misc_feature (1)..( 7): Matrix.003 file - promoters60/5677029
attataa

SEQ ID NO: 64003 - DNA, 11 bp, Unknown
  misc_feature (1)..( 11): Matrix.003 file - promoters60/5677029
attgtatattt

SEQ ID NO: 64004 - DNA, 8 bp, Unknown
  misc_feature (1)..( 8): Matrix.003 file - promoters60/5677029
aagtatat

SEQ ID NO: 64005 - DNA, 6 bp, Unknown
  misc_feature (1)..( 6): Matrix.003 file - promoters60/5677230
tgtgga

SEQ ID NO: 64006 - DNA, 6 bp, Unknown
  misc_feature (1)..( 6): Matrix.003 file - promoters60/5677230
gacatt

SEQ ID NO: 64007 - DNA, 7 bp, Unknown
  misc_feature (1)..( 7): Matrix.003 file - promoters60/5677230
aagtaaa

SEQ ID NO: 64008 - DNA, 6 bp, Unknown
  misc_feature (1)..( 6): Matrix.003 file - promoters60/5677230
tttgga

SEQ ID NO: 64009 - DNA, 7 bp, Unknown
  misc_feature (1)..( 7): Matrix.003 file - promoters60/5677230
aaaatat

SEQ ID NO: 64010 - DNA, 6 bp, Unknown
  misc_feature (1)..( 6): Matrix.003 file - promoters60/5677230
agaatt

SEQ ID NO: 64011 - DNA, 7 bp, Unknown
  misc_feature (1)..( 7): Matrix.003 file - promoters60/5677230
tttcgaa

SEQ ID NO: 64012 - DNA, 6 bp, Unknown
  misc_feature (1)..( 6): Matrix.003 file - promoters60/5677230
tttgtt

SEQ ID NO: 64013 - DNA, 6 bp, Unknown
  misc_feature (1)..( 6): Matrix.003 file - promoters60/5677230
accgtc

SEQ ID NO: 64014 - DNA, 7 bp, Unknown
  misc_feature (1)..( 7): Matrix.003 file - promoters60/5677230
aatcggg

SEQ ID NO: 64015 - DNA, 8 bp, Unknown
  misc_feature (1)..( 8): Matrix.003 file - promoters60/5677230
gaaacaaa

SEQ ID NO: 64016 - DNA, 10 bp, Unknown
  misc_feature (1)..( 10): Matrix.003 file - promoters60/5677230
ggaaaagaaa

SEQ ID NO: 64017 - DNA, 7 bp, Unknown
  misc_feature (1)..( 7): Matrix.003 file - promoters60/5677230
cccacta

SEQ ID NO: 64018 - DNA, 9 bp, Unknown
  misc_feature (1)..( 9): Matrix.003 file - promoters60/5677230
aaagaaaag

SEQ ID NO: 64019 - DNA, 7 bp, Unknown
  misc_feature (1)..( 7): Matrix.003 file - promoters60/5677230
gtatata

SEQ ID NO: 64020 - DNA, 11 bp, Unknown
  misc_feature (1)..( 11): Matrix.003 file - promoters60/5677240
taagttgttgt

SEQ ID NO: 64021 - DNA, 7 bp, Unknown
  misc_feature (1)..( 7): Matrix.003 file - promoters60/5677240
tacaaaa

SEQ ID NO: 64022 - DNA, 8 bp, Unknown
  misc_feature (1)..( 8): Matrix.003 file - promoters60/5677240
aaaaggaa

SEQ ID NO: 64023 - DNA, 8 bp, Unknown
  misc_feature (1)..( 8): Matrix.003 file - promoters60/5677240
aaaatcaa

SEQ ID NO: 64024 - DNA, 6 bp, Unknown
  misc_feature (1)..( 6): Matrix.003 file - promoters60/5677240
tcatct

SEQ ID NO: 64025 - DNA, 7 bp, Unknown
  misc_feature (1)..( 7): Matrix.003 file - promoters60/5677240
gttttgg

SEQ ID NO: 64026 - DNA, 9 bp, Unknown
  misc_feature (1)..( 9): Matrix.003 file - promoters60/5677240
taaaaattt

SEQ ID NO: 64027 - DNA, 6 bp, Unknown
  misc_feature (1)..( 6): Matrix.003 file - promoters60/5677240
ttatta

SEQ ID NO: 64028 - DNA, 8 bp, Unknown
  misc_feature (1)..( 8): Matrix.003 file - promoters60/5677240
aaaataag

SEQ ID NO: 64029 - DNA, 6 bp, Unknown
  misc_feature (1)..( 6): Matrix.003 file - promoters60/5677240
atagat

SEQ ID NO: 64030 - DNA, 7 bp, Unknown
  misc_feature (1)..( 7): Matrix.003 file - promoters60/5677240
agagata

SEQ ID NO: 64031 - DNA, 6 bp, Unknown
  misc_feature (1)..( 6): Matrix.003 file - promoters60/5677240
taagat

SEQ ID NO: 64032 - DNA, 6 bp, Unknown
  misc_feature (1)..( 6): Matrix.003 file - promoters60/5677240
aaagaa

SEQ ID NO: 64033 - DNA, 12 bp, Unknown
  misc_feature (1)..( 12): Matrix.003 file - promoters60/5677240
aaaaacaaaaca

SEQ ID NO: 64034 - DNA, 6 bp, Unknown
  misc_feature (1)..( 6): Matrix.003 file - promoters60/5677240
aaaaat

SEQ ID NO: 64035 - DNA, 6 bp, Unknown
  misc_feature (1)..( 6): Matrix.003 file - promoters60/5677240
taaccc

SEQ ID NO: 64036 - DNA, 9 bp, Unknown
  misc_feature (1)..( 9): Matrix.003 file - promoters60/5677274
attatttta

SEQ ID NO: 64037 - DNA, 8 bp, Unknown
  misc_feature (1)..( 8): Matrix.003 file - promoters60/5677274
acatttag

SEQ ID NO: 64038 - DNA, 10 bp, Unknown
  misc_feature (1)..( 10): Matrix.003 file - promoters60/5677274
tcaaaatttg

SEQ ID NO: 64039 - DNA, 11 bp, Unknown
  misc_feature (1)..( 11): Matrix.003 file - promoters60/5677274
atcttagaatt

SEQ ID NO: 64040 - DNA, 9 bp, Unknown
  misc_feature (1)..( 9): Matrix.003 file - promoters60/5677274
agatattta

SEQ ID NO: 64041 - DNA, 11 bp, Unknown
  misc_feature (1)..( 11): Matrix.003 file - promoters60/5677274
tgaaacataaa

SEQ ID NO: 64042 - DNA, 9 bp, Unknown
  misc_feature (1)..( 9): Matrix.003 file - promoters60/5677286
tctcaaact

SEQ ID NO: 64043 - DNA, 8 bp, Unknown
  misc_feature (1)..( 8): Matrix.003 file - promoters60/5677286
gagcaaaa

SEQ ID NO: 64044 - DNA, 6 bp, Unknown
  misc_feature (1)..( 6): Matrix.003 file - promoters60/5677333
ttgtca

SEQ ID NO: 64045 - DNA, 9 bp, Unknown
  misc_feature (1)..( 9): Matrix.003 file - promoters60/5677333
agagttctg

SEQ ID NO: 64046 - DNA, 8 bp, Unknown
  misc_feature (1)..( 8): Matrix.003 file - promoters60/5677333
ctgtacaa

SEQ ID NO: 64047 - DNA, 6 bp, Unknown
  misc_feature (1)..( 6): Matrix.003 file - promoters60/5677333
ccaaga

SEQ ID NO: 64048 - DNA, 6 bp, Unknown
  misc_feature (1)..( 6): Matrix.003 file - promoters60/5677333
ggttga

SEQ ID NO: 64049 - DNA, 9 bp, Unknown
  misc_feature (1)..( 9): Matrix.003 file - promoters60/5677344
ccaaaataa

SEQ ID NO: 64050 - DNA, 9 bp, Unknown
  misc_feature (1)..( 9): Matrix.003 file - promoters60/5677344
taaaattac

SEQ ID NO: 64051 - DNA, 7 bp, Unknown
  misc_feature (1)..( 7): Matrix.003 file - promoters60/5677344
attttaa

SEQ ID NO: 64052 - DNA, 13 bp, Unknown
  misc_feature (1)..( 13): Matrix.003 file - promoters60/5677344
aataaaaaaagaa

SEQ ID NO: 64053 - DNA, 10 bp, Unknown
  misc_feature (1)..( 10): Matrix.003 file - promoters60/5677344
caaaaataaa

SEQ ID NO: 64054 - DNA, 8 bp, Unknown
  misc_feature (1)..( 8): Matrix.003 file - promoters60/5677344
tttatata

SEQ ID NO: 64055 - DNA, 7 bp, Unknown
  misc_feature (1)..( 7): Matrix.003 file - promoters60/5677484
attaaat

SEQ ID NO: 64056 - DNA, 8 bp, Unknown
  misc_feature (1)..( 8): Matrix.003 file - promoters60/5677484
tgaaaaaa

SEQ ID NO: 64057 - DNA, 8 bp, Unknown
  misc_feature (1)..( 8): Matrix.003 file - promoters60/5677484
attcttta

SEQ ID NO: 64058 - DNA, 9 bp, Unknown
  misc_feature (1)..( 9): Matrix.003 file - promoters60/5677484
tcatattta

SEQ ID NO: 64059 - DNA, 7 bp, Unknown
  misc_feature (1)..( 7): Matrix.003 file - promoters60/5677484
aaaataa

SEQ ID NO: 64060 - DNA, 6 bp, Unknown
  misc_feature (1)..( 6): Matrix.003 file - promoters60/5677484
ttaatt

SEQ ID NO: 64061 - DNA, 8 bp, Unknown
  misc_feature (1)..( 8): Matrix.003 file - promoters60/5677484
atgaaata

SEQ ID NO: 64062 - DNA, 6 bp, Unknown
  misc_feature (1)..( 6): Matrix.003 file - promoters60/5677484
ataaat

SEQ ID NO: 64063 - DNA, 6 bp, Unknown
  misc_feature (1)..( 6): Matrix.003 file - promoters60/5677484
taaatt

SEQ ID NO: 64064 - DNA, 6 bp, Unknown
  misc_feature (1)..( 6): Matrix.003 file - promoters60/5677484
ttatta

SEQ ID NO: 64065 - DNA, 8 bp, Unknown
  misc_feature (1)..( 8): Matrix.003 file - promoters60/5677484
taaaatat

SEQ ID NO: 64066 - DNA, 6 bp, Unknown
  misc_feature (1)..( 6): Matrix.003 file - promoters60/5677484
aacttt

SEQ ID NO: 64067 - DNA, 9 bp, Unknown
  misc_feature (1)..( 9): Matrix.003 file - promoters60/5677484
aaaaagtaa

SEQ ID NO: 64068 - DNA, 6 bp, Unknown
  misc_feature (1)..( 6): Matrix.003 file - promoters60/5677484
tttaaa

SEQ ID NO: 64069 - DNA, 13 bp, Unknown
  misc_feature (1)..( 13): Matrix.003 file - promoters60/5677484
ttttgcactattt

SEQ ID NO: 64070 - DNA, 7 bp, Unknown
  misc_feature (1)..( 7): Matrix.003 file - promoters60/5677484
aacgtaa

SEQ ID NO: 64071 - DNA, 6 bp, Unknown
  misc_feature (1)..( 6): Matrix.003 file - promoters60/5677484
tgggcc

SEQ ID NO: 64072 - DNA, 7 bp, Unknown
  misc_feature (1)..( 7): Matrix.003 file - promoters60/5677484
tctcgaa

SEQ ID NO: 64073 - DNA, 8 bp, Unknown
  misc_feature (1)..( 8): Matrix.003 file - promoters60/5677484
tttcattt

SEQ ID NO: 64074 - DNA, 7 bp, Unknown
  misc_feature (1)..( 7): Matrix.003 file - promoters60/5677484
aataata

SEQ ID NO: 64075 - DNA, 6 bp, Unknown
  misc_feature (1)..( 6): Matrix.003 file - promoters60/5677484
tatttg

SEQ ID NO: 64076 - DNA, 7 bp, Unknown
  misc_feature (1)..( 7): Matrix.003 file - promoters60/5677484
caaaatt

SEQ ID NO: 64077 - DNA, 7 bp, Unknown
  misc_feature (1)..( 7): Matrix.003 file - promoters60/5680986
ttttcag

SEQ ID NO: 64078 - DNA, 6 bp, Unknown
  misc_feature (1)..( 6): Matrix.003 file - promoters60/5681068
cgtgga

SEQ ID NO: 64079 - DNA, 7 bp, Unknown
  misc_feature (1)..( 7): Matrix.003 file - promoters60/5681068
gctgaaa

SEQ ID NO: 64080 - DNA, 6 bp, Unknown
  misc_feature (1)..( 6): Matrix.003 file - promoters60/5681068
attcaa

SEQ ID NO: 64081 - DNA, 9 bp, Unknown
  misc_feature (1)..( 9): Matrix.003 file - promoters60/5681068
tttggattt

SEQ ID NO: 64082 - DNA, 8 bp, Unknown
  misc_feature (1)..( 8): Matrix.003 file - promoters60/5681068
cacaccgt

SEQ ID NO: 64083 - DNA, 7 bp, Unknown
  misc_feature (1)..( 7): Matrix.003 file - promoters60/5681068
gtgaatt

SEQ ID NO: 64084 - DNA, 6 bp, Unknown
  misc_feature (1)..( 6): Matrix.003 file - promoters60/5681068
ccgttg

SEQ ID NO: 64085 - DNA, 6 bp, Unknown
  misc_feature (1)..( 6): Matrix.003 file - promoters60/5681068
atcgta

SEQ ID NO: 64086 - DNA, 6 bp, Unknown
  misc_feature (1)..( 6): Matrix.003 file - promoters60/5681068
agtcga

SEQ ID NO: 64087 - DNA, 9 bp, Unknown
  misc_feature (1)..( 9): Matrix.003 file - promoters60/5681068
gtgtcctct

SEQ ID NO: 64088 - DNA, 6 bp, Unknown
  misc_feature (1)..( 6): Matrix.003 file - promoters60/5681068
aaccgt

SEQ ID NO: 64089 - DNA, 7 bp, Unknown
  misc_feature (1)..( 7): Matrix.003 file - promoters60/5681068
aatacaa

SEQ ID NO: 64090 - DNA, 7 bp, Unknown
  misc_feature (1)..( 7): Matrix.003 file - promoters60/5681068
agaaagg

SEQ ID NO: 64091 - DNA, 7 bp, Unknown
  misc_feature (1)..( 7): Matrix.003 file - promoters60/5681068
ttgaaga

SEQ ID NO: 64092 - DNA, 7 bp, Unknown
  misc_feature (1)..( 7): Matrix.003 file - promoters60/5681068
cgtggat

SEQ ID NO: 64093 - DNA, 7 bp, Unknown
  misc_feature (1)..( 7): Matrix.003 file - promoters60/5681068
catcgag

SEQ ID NO: 64094 - DNA, 6 bp, Unknown
  misc_feature (1)..( 6): Matrix.003 file - promoters60/5681068
atcgga

SEQ ID NO: 64095 - DNA, 8 bp, Unknown
  misc_feature (1)..( 8): Matrix.003 file - promoters60/5681068
gtaagttt

SEQ ID NO: 64096 - DNA, 7 bp, Unknown
  misc_feature (1)..( 7): Matrix.003 file - promoters60/5681068
ctaaaca

SEQ ID NO: 64097 - DNA, 6 bp, Unknown
  misc_feature (1)..( 6): Matrix.003 file - promoters60/5681157
acacaa

SEQ ID NO: 64098 - DNA, 10 bp, Unknown
  misc_feature (1)..( 10): Matrix.003 file - promoters60/5681157
accttaaaaa

SEQ ID NO: 64099 - DNA, 8 bp, Unknown
  misc_feature (1)..( 8): Matrix.003 file - promoters60/5681157
ctacaaaa

SEQ ID NO: 64100 - DNA, 7 bp, Unknown
  misc_feature (1)..( 7): Matrix.003 file - promoters60/5681157
aaataaa

SEQ ID NO: 64101 - DNA, 6 bp, Unknown
  misc_feature (1)..( 6): Matrix.003 file - promoters60/5681157
ttaaaa

SEQ ID NO: 64102 - DNA, 8 bp, Unknown
  misc_feature (1)..( 8): Matrix.003 file - promoters60/5681157
taaaccat

SEQ ID NO: 64103 - DNA, 12 bp, Unknown
  misc_feature (1)..( 12): Matrix.003 file - promoters60/5681157
ataaaccaaaaa

SEQ ID NO: 64104 - DNA, 7 bp, Unknown
  misc_feature (1)..( 7): Matrix.003 file - promoters60/5681157
tcaaatt

SEQ ID NO: 64105 - DNA, 9 bp, Unknown
  misc_feature (1)..( 9): Matrix.003 file - promoters60/5681157
attaccaat

SEQ ID NO: 64106 - DNA, 6 bp, Unknown
  misc_feature (1)..( 6): Matrix.003 file - promoters60/5681157
ggatcc

SEQ ID NO: 64107 - DNA, 7 bp, Unknown
  misc_feature (1)..( 7): Matrix.003 file - promoters60/5681157
tataaat

SEQ ID NO: 64108 - DNA, 7 bp, Unknown
  misc_feature (1)..( 7): Matrix.003 file - promoters60/5681157
ttggaaa

SEQ ID NO: 64109 - DNA, 6 bp, Unknown
  misc_feature (1)..( 6): Matrix.003 file - promoters60/5681157
aaataa

SEQ ID NO: 64110 - DNA, 6 bp, Unknown
  misc_feature (1)..( 6): Matrix.003 file - promoters60/5681157
ttaaaa

SEQ ID NO: 64111 - DNA, 7 bp, Unknown
  misc_feature (1)..( 7): Matrix.003 file - promoters60/5681157
aaaacct

SEQ ID NO: 64112 - DNA, 6 bp, Unknown
  misc_feature (1)..( 6): Matrix.003 file - promoters60/5681157
ttaaaa

SEQ ID NO: 64113 - DNA, 7 bp, Unknown
  misc_feature (1)..( 7): Matrix.003 file - promoters60/5681157
aaaccta

SEQ ID NO: 64114 - DNA, 9 bp, Unknown
  misc_feature (1)..( 9): Matrix.003 file - promoters60/5681157
aaaataaac

SEQ ID NO: 64115 - DNA, 6 bp, Unknown
  misc_feature (1)..( 6): Matrix.003 file - promoters60/5681157
ccaaaa

SEQ ID NO: 64116 - DNA, 6 bp, Unknown
  misc_feature (1)..( 6): Matrix.003 file - promoters60/5681157
ccaaaa

SEQ ID NO: 64117 - DNA, 7 bp, Unknown
  misc_feature (1)..( 7): Matrix.003 file - promoters60/5681157
aaaatca

SEQ ID NO: 64118 - DNA, 7 bp, Unknown
  misc_feature (1)..( 7): Matrix.003 file - promoters60/5681157
tcataaa

SEQ ID NO: 64119 - DNA, 10 bp, Unknown
  misc_feature (1)..( 10): Matrix.003 file - promoters60/5681157
caaaaattca

SEQ ID NO: 64120 - DNA, 10 bp, Unknown
  misc_feature (1)..( 10): Matrix.003 file - promoters60/5681157
tttgtaatat

SEQ ID NO: 64121 - DNA, 7 bp, Unknown
  misc_feature (1)..( 7): Matrix.003 file - promoters60/5681157
aattggt

SEQ ID NO: 64122 - DNA, 6 bp, Unknown
  misc_feature (1)..( 6): Matrix.003 file - promoters60/5681157
atatga

SEQ ID NO: 64123 - DNA, 15 bp, Unknown
  misc_feature (1)..( 15): Matrix.003 file - promoters60/5681157
ttttctttcttttcc

SEQ ID NO: 64124 - DNA, 7 bp, Unknown
  misc_feature (1)..( 7): Matrix.003 file - promoters60/5681157
acacaat

SEQ ID NO: 64125 - DNA, 7 bp, Unknown
  misc_feature (1)..( 7): Matrix.003 file - promoters60/5681157
caaaaat

SEQ ID NO: 64126 - DNA, 6 bp, Unknown
  misc_feature (1)..( 6): Matrix.003 file - promoters60/5681157
gttttt

SEQ ID NO: 64127 - DNA, 7 bp, Unknown
  misc_feature (1)..( 7): Matrix.003 file - promoters60/5681157
tattatt

SEQ ID NO: 64128 - DNA, 9 bp, Unknown
  misc_feature (1)..( 9): Matrix.003 file - promoters60/5681157
tcatacttt

SEQ ID NO: 64129 - DNA, 8 bp, Unknown
  misc_feature (1)..( 8): Matrix.003 file - promoters60/5681157
gttaaatc

SEQ ID NO: 64130 - DNA, 9 bp, Unknown
  misc_feature (1)..( 9): Matrix.003 file - promoters60/5753942
tacattgta

SEQ ID NO: 64131 - DNA, 9 bp, Unknown
  misc_feature (1)..( 9): Matrix.003 file - promoters60/5753942
caaacaaaa

SEQ ID NO: 64132 - DNA, 8 bp, Unknown
  misc_feature (1)..( 8): Matrix.003 file - promoters60/5753942
atttaggc

SEQ ID NO: 64133 - DNA, 8 bp, Unknown
  misc_feature (1)..( 8): Matrix.003 file - promoters60/5753942
aatttggg

SEQ ID NO: 64134 - DNA, 11 bp, Unknown
  misc_feature (1)..( 11): Matrix.003 file - promoters60/5753942
tttgggttttt

SEQ ID NO: 64135 - DNA, 12 bp, Unknown
  misc_feature (1)..( 12): Matrix.003 file - promoters60/5754134
gaaatctggatg

SEQ ID NO: 64136 - DNA, 8 bp, Unknown
  misc_feature (1)..( 8): Matrix.003 file - promoters60/5754265
tttaatct

SEQ ID NO: 64137 - DNA, 10 bp, Unknown
  misc_feature (1)..( 10): Matrix.003 file - promoters60/5754265
aaataacttt

SEQ ID NO: 64138 - DNA, 7 bp, Unknown
  misc_feature (1)..( 7): Matrix.003 file - promoters60/5754269
aatttac

SEQ ID NO: 64139 - DNA, 9 bp, Unknown
  misc_feature (1)..( 9): Matrix.003 file - promoters60/5754269
aaatgtgaa

SEQ ID NO: 64140 - DNA, 8 bp, Unknown
  misc_feature (1)..( 8): Matrix.003 file - promoters60/5754273
aaaaacta

SEQ ID NO: 64141 - DNA, 13 bp, Unknown
  misc_feature (1)..( 13): Matrix.003 file - promoters60/5754273
aaggcccaataaa

SEQ ID NO: 64142 - DNA, 13 bp, Unknown
  misc_feature (1)..( 13): Matrix.003 file - promoters60/5754273
ttaaaaaaataca

SEQ ID NO: 64143 - DNA, 11 bp, Unknown
  misc_feature (1)..( 11): Matrix.003 file - promoters60/5754273
ttcaaaaaata

SEQ ID NO: 64144 - DNA, 9 bp, Unknown
  misc_feature (1)..( 9): Matrix.003 file - promoters60/5754276
aattgatga

SEQ ID NO: 64145 - DNA, 7 bp, Unknown
  misc_feature (1)..( 7): Matrix.003 file - promoters60/5754276
ataaatc

SEQ ID NO: 64146 - DNA, 8 bp, Unknown
  misc_feature (1)..( 8): Matrix.003 file - promoters60/5754276
atgaataa

SEQ ID NO: 64147 - DNA, 7 bp, Unknown
  misc_feature (1)..( 7): Matrix.003 file - promoters60/5754276
ctaattg

SEQ ID NO: 64148 - DNA, 6 bp, Unknown
  misc_feature (1)..( 6): Matrix.003 file - promoters60/5754276
tagcta

SEQ ID NO: 64149 - DNA, 7 bp, Unknown
  misc_feature (1)..( 7): Matrix.003 file - promoters60/5754276
tcaattt

SEQ ID NO: 64150 - DNA, 6 bp, Unknown
  misc_feature (1)..( 6): Matrix.003 file - promoters60/5754276
atctcg

SEQ ID NO: 64151 - DNA, 6 bp, Unknown
  misc_feature (1)..( 6): Matrix.003 file - promoters60/5754276
ctaaat

SEQ ID NO: 64152 - DNA, 9 bp, Unknown
  misc_feature (1)..( 9): Matrix.003 file - promoters60/5754276
aattaaaaa

SEQ ID NO: 64153 - DNA, 9 bp, Unknown
  misc_feature (1)..( 9): Matrix.003 file - promoters60/5754276
cttttgtat

SEQ ID NO: 64154 - DNA, 6 bp, Unknown
  misc_feature (1)..( 6): Matrix.003 file - promoters60/5754276
aaaaga

SEQ ID NO: 64155 - DNA, 6 bp, Unknown
  misc_feature (1)..( 6): Matrix.003 file - promoters60/5754276
aataat

SEQ ID NO: 64156 - DNA, 8 bp, Unknown
  misc_feature (1)..( 8): Matrix.003 file - promoters60/5754276
aaacatgt

SEQ ID NO: 64157 - DNA, 9 bp, Unknown
  misc_feature (1)..( 9): Matrix.003 file - promoters60/5754276
tttatttga

SEQ ID NO: 64158 - DNA, 6 bp, Unknown
  misc_feature (1)..( 6): Matrix.003 file - promoters60/5754276
actatt

SEQ ID NO: 64159 - DNA, 8 bp, Unknown
  misc_feature (1)..( 8): Matrix.003 file - promoters60/5754276
tctcttat

SEQ ID NO: 64160 - DNA, 6 bp, Unknown
  misc_feature (1)..( 6): Matrix.003 file - promoters60/5754276
tttgta

SEQ ID NO: 64161 - DNA, 6 bp, Unknown
  misc_feature (1)..( 6): Matrix.003 file - promoters60/5754276
tcactc

SEQ ID NO: 64162 - DNA, 10 bp, Unknown
  misc_feature (1)..( 10): Matrix.003 file - promoters60/5754280
ttaaatataa

SEQ ID NO: 64163 - DNA, 11 bp, Unknown
  misc_feature (1)..( 11): Matrix.003 file - promoters60/5754419
ttaaaataata

SEQ ID NO: 64164 - DNA, 9 bp, Unknown
  misc_feature (1)..( 9): Matrix.003 file - promoters60/5754419
agttctctc

SEQ ID NO: 64165 - DNA, 8 bp, Unknown
  misc_feature (1)..( 8): Matrix.003 file - promoters60/5754419
aaataatt

SEQ ID NO: 64166 - DNA, 7 bp, Unknown
  misc_feature (1)..( 7): Matrix.003 file - promoters60/5754461
gaattca

SEQ ID NO: 64167 - DNA, 11 bp, Unknown
  misc_feature (1)..( 11): Matrix.003 file - promoters60/5754461
cacaaaataat

SEQ ID NO: 64168 - DNA, 7 bp, Unknown
  misc_feature (1)..( 7): Matrix.003 file - promoters60/5755107
gtgtttc

SEQ ID NO: 64169 - DNA, 7 bp, Unknown
  misc_feature (1)..( 7): Matrix.003 file - promoters60/5755107
ggttttg

SEQ ID NO: 64170 - DNA, 6 bp, Unknown
  misc_feature (1)..( 6): Matrix.003 file - promoters60/5755107
attgga

SEQ ID NO: 64171 - DNA, 11 bp, Unknown
  misc_feature (1)..( 11): Matrix.003 file - promoters60/5755107
acaattaagcc

SEQ ID NO: 64172 - DNA, 7 bp, Unknown
  misc_feature (1)..( 7): Matrix.003 file - promoters60/5755107
tttcata

SEQ ID NO: 64173 - DNA, 7 bp, Unknown
  misc_feature (1)..( 7): Matrix.003 file - promoters60/5755107
aaacaat

SEQ ID NO: 64174 - DNA, 7 bp, Unknown
  misc_feature (1)..( 7): Matrix.003 file - promoters60/5755846
atttgat

SEQ ID NO: 64175 - DNA, 9 bp, Unknown
  misc_feature (1)..( 9): Matrix.003 file - promoters60/5755846
aatgttgat

SEQ ID NO: 64176 - DNA, 13 bp, Unknown
  misc_feature (1)..( 13): Matrix.003 file - promoters60/5755846
ttctaaaacataa

SEQ ID NO: 64177 - DNA, 16 bp, Unknown
  misc_feature (1)..( 16): Matrix.003 file - promoters60/5755846
aaaagttttatgttta

SEQ ID NO: 64178 - DNA, 9 bp, Unknown
  misc_feature (1)..( 9): Matrix.003 file - promoters60/5755846
aaatttaat

SEQ ID NO: 64179 - DNA, 11 bp, Unknown
  misc_feature (1)..( 11): Matrix.003 file - promoters60/5755846
ttttggtattg

SEQ ID NO: 64180 - DNA, 10 bp, Unknown
  misc_feature (1)..( 10): Matrix.003 file - promoters60/5755846
tgtttaacat

SEQ ID NO: 64181 - DNA, 9 bp, Unknown
  misc_feature (1)..( 9): Matrix.003 file - promoters60/5756166
aaagtgtaa

SEQ ID NO: 64182 - DNA, 12 bp, Unknown
  misc_feature (1)..( 12): Matrix.003 file - promoters60/5756166
gttacaatgttt

SEQ ID NO: 64183 - DNA, 8 bp, Unknown
  misc_feature (1)..( 8): Matrix.003 file - promoters60/5756166
tttcaatt

SEQ ID NO: 64184 - DNA, 10 bp, Unknown
  misc_feature (1)..( 10): Matrix.003 file - promoters60/5756166
attcatttta

SEQ ID NO: 64185 - DNA, 9 bp, Unknown
  misc_feature (1)..( 9): Matrix.003 file - promoters60/5756166
tcctcttaa

SEQ ID NO: 64186 - DNA, 6 bp, Unknown
  misc_feature (1)..( 6): Matrix.003 file - promoters60/5756489
ttcaaa

SEQ ID NO: 64187 - DNA, 8 bp, Unknown
  misc_feature (1)..( 8): Matrix.003 file - promoters60/5756489
gttcattt

SEQ ID NO: 64188 - DNA, 8 bp, Unknown
  misc_feature (1)..( 8): Matrix.003 file - promoters60/5756489
ctcatccc

SEQ ID NO: 64189 - DNA, 6 bp, Unknown
  misc_feature (1)..( 6): Matrix.003 file - promoters60/5756489
actaat

SEQ ID NO: 64190 - DNA, 6 bp, Unknown
  misc_feature (1)..( 6): Matrix.003 file - promoters60/5756489
atttac

SEQ ID NO: 64191 - DNA, 6 bp, Unknown
  misc_feature (1)..( 6): Matrix.003 file - promoters60/5756489
gttatc

SEQ ID NO: 64192 - DNA, 7 bp, Unknown
  misc_feature (1)..( 7): Matrix.003 file - promoters60/5756489
attgtaa

SEQ ID NO: 64193 - DNA, 6 bp, Unknown
  misc_feature (1)..( 6): Matrix.003 file - promoters60/5756489
tgtaat

SEQ ID NO: 64194 - DNA, 6 bp, Unknown
  misc_feature (1)..( 6): Matrix.003 file - promoters60/5756489
atacaa

SEQ ID NO: 64195 - DNA, 6 bp, Unknown
  misc_feature (1)..( 6): Matrix.003 file - promoters60/5756489
tttaca

SEQ ID NO: 64196 - DNA, 7 bp, Unknown
  misc_feature (1)..( 7): Matrix.003 file - promoters60/5756489
aaaatct

SEQ ID NO: 64197 - DNA, 7 bp, Unknown
  misc_feature (1)..( 7): Matrix.003 file - promoters60/5756489
actaaac

SEQ ID NO: 64198 - DNA, 7 bp, Unknown
  misc_feature (1)..( 7): Matrix.003 file - promoters60/5756489
ccaaata

SEQ ID NO: 64199 - DNA, 6 bp, Unknown
  misc_feature (1)..( 6): Matrix.003 file - promoters60/5756489
ttattc

SEQ ID NO: 64200 - DNA, 11 bp, Unknown
  misc_feature (1)..( 11): Matrix.003 file - promoters60/5758021
tcttaggattt

SEQ ID NO: 64201 - DNA, 11 bp, Unknown
  misc_feature (1)..( 11): Matrix.003 file - promoters60/5758021
gttcaaaaaaa

SEQ ID NO: 64202 - DNA, 7 bp, Unknown
  misc_feature (1)..( 7): Matrix.003 file - promoters60/5758021
atgggcc

SEQ ID NO: 64203 - DNA, 11 bp, Unknown
  misc_feature (1)..( 11): Matrix.003 file - promoters60/5758021
aaaattttttt

SEQ ID NO: 64204 - DNA, 6 bp, Unknown
  misc_feature (1)..( 6): Matrix.003 file - promoters60/5759305
aatact

SEQ ID NO: 64205 - DNA, 8 bp, Unknown
  misc_feature (1)..( 8): Matrix.003 file - promoters60/5759305
atatataa

SEQ ID NO: 64206 - DNA, 11 bp, Unknown
  misc_feature (1)..( 11): Matrix.003 file - promoters60/5759305
tttctttattt

SEQ ID NO: 64207 - DNA, 7 bp, Unknown
  misc_feature (1)..( 7): Matrix.003 file - promoters60/5759305
attatca

SEQ ID NO: 64208 - DNA, 7 bp, Unknown
  misc_feature (1)..( 7): Matrix.003 file - promoters60/5759305
tagaaaa

SEQ ID NO: 64209 - DNA, 7 bp, Unknown
  misc_feature (1)..( 7): Matrix.003 file - promoters60/5759305
atggatg

SEQ ID NO: 64210 - DNA, 12 bp, Unknown
  misc_feature (1)..( 12): Matrix.003 file - promoters60/5759305
taaggcaaattt

SEQ ID NO: 64211 - DNA, 8 bp, Unknown
  misc_feature (1)..( 8): Matrix.003 file - promoters60/5759305
tattaaaa

SEQ ID NO: 64212 - DNA, 10 bp, Unknown
  misc_feature (1)..( 10): Matrix.003 file - promoters60/5759305
tttatacaat

SEQ ID NO: 64213 - DNA, 6 bp, Unknown
  misc_feature (1)..( 6): Matrix.003 file - promoters60/5759305
agaaaa

SEQ ID NO: 64214 - DNA, 8 bp, Unknown
  misc_feature (1)..( 8): Matrix.003 file - promoters60/5759305
aaaaaata

SEQ ID NO: 64215 - DNA, 6 bp, Unknown
  misc_feature (1)..( 6): Matrix.003 file - promoters60/5759305
ctaaac

SEQ ID NO: 64216 - DNA, 6 bp, Unknown
  misc_feature (1)..( 6): Matrix.003 file - promoters60/5759305
caaaat

SEQ ID NO: 64217 - DNA, 6 bp, Unknown
  misc_feature (1)..( 6): Matrix.003 file - promoters60/5759305
ccatac

SEQ ID NO: 64218 - DNA, 6 bp, Unknown
  misc_feature (1)..( 6): Matrix.003 file - promoters60/5759305
cacgtg

SEQ ID NO: 64219 - DNA, 8 bp, Unknown
  misc_feature (1)..( 8): Matrix.003 file - promoters60/5759305
atgccagc

SEQ ID NO: 64220 - DNA, 7 bp, Unknown
  misc_feature (1)..( 7): Matrix.003 file - promoters60/5759305
gtgagat

SEQ ID NO: 64221 - DNA, 7 bp, Unknown
  misc_feature (1)..( 7): Matrix.003 file - promoters60/5759305
gaagaga

SEQ ID NO: 64222 - DNA, 9 bp, Unknown
  misc_feature (1)..( 9): Matrix.003 file - promoters60/5773091
ttttgttgt

SEQ ID NO: 64223 - DNA, 10 bp, Unknown
  misc_feature (1)..( 10): Matrix.003 file - promoters60/5773091
atataaagat

SEQ ID NO: 64224 - DNA, 9 bp, Unknown
  misc_feature (1)..( 9): Matrix.003 file - promoters60/5773759
cttttttta

SEQ ID NO: 64225 - DNA, 8 bp, Unknown
  misc_feature (1)..( 8): Matrix.003 file - promoters60/5773759
aatcgcat

SEQ ID NO: 64226 - DNA, 9 bp, Unknown
  misc_feature (1)..( 9): Matrix.003 file - promoters60/5773759
aaattttaa

SEQ ID NO: 64227 - DNA, 12 bp, Unknown
  misc_feature (1)..( 12): Matrix.003 file - promoters60/5773759
tttagcaataag

SEQ ID NO: 64228 - DNA, 8 bp, Unknown
  misc_feature (1)..( 8): Matrix.003 file - promoters60/5773772
gatctttt

SEQ ID NO: 64229 - DNA, 9 bp, Unknown
  misc_feature (1)..( 9): Matrix.003 file - promoters60/5773772
aattacatt

SEQ ID NO: 64230 - DNA, 6 bp, Unknown
  misc_feature (1)..( 6): Matrix.003 file - promoters60/5773772
attttt

SEQ ID NO: 64231 - DNA, 11 bp, Unknown
  misc_feature (1)..( 11): Matrix.003 file - promoters60/5773772
ttgattcacat

SEQ ID NO: 64232 - DNA, 8 bp, Unknown
  misc_feature (1)..( 8): Matrix.003 file - promoters60/5774545
tcttcact

SEQ ID NO: 64233 - DNA, 6 bp, Unknown
  misc_feature (1)..( 6): Matrix.003 file - promoters60/5774545
tctaat

SEQ ID NO: 64234 - DNA, 6 bp, Unknown
  misc_feature (1)..( 6): Matrix.003 file - promoters60/5774545
acaagt

SEQ ID NO: 64235 - DNA, 7 bp, Unknown
  misc_feature (1)..( 7): Matrix.003 file - promoters60/5774545
aatccgc

SEQ ID NO: 64236 - DNA, 10 bp, Unknown
  misc_feature (1)..( 10): Matrix.003 file - promoters60/5774545
tgagcttgat

SEQ ID NO: 64237 - DNA, 6 bp, Unknown
  misc_feature (1)..( 6): Matrix.003 file - promoters60/5774545
tcaaaa

SEQ ID NO: 64238 - DNA, 6 bp, Unknown
  misc_feature (1)..( 6): Matrix.003 file - promoters60/5774545
aaaacc

SEQ ID NO: 64239 - DNA, 8 bp, Unknown
  misc_feature (1)..( 8): Matrix.003 file - promoters60/5774545
tattatat

SEQ ID NO: 64240 - DNA, 8 bp, Unknown
  misc_feature (1)..( 8): Matrix.003 file - promoters60/5774545
tttataaa

SEQ ID NO: 64241 - DNA, 8 bp, Unknown
  misc_feature (1)..( 8): Matrix.003 file - promoters60/5774545
tctacgtc

SEQ ID NO: 64242 - DNA, 7 bp, Unknown
  misc_feature (1)..( 7): Matrix.003 file - promoters60/5774545
tcaccac

SEQ ID NO: 64243 - DNA, 7 bp, Unknown
  misc_feature (1)..( 7): Matrix.003 file - promoters60/5774545
aatgtat

SEQ ID NO: 64244 - DNA, 6 bp, Unknown
  misc_feature (1)..( 6): Matrix.003 file - promoters60/5774545
tgtctt

SEQ ID NO: 64245 - DNA, 8 bp, Unknown
  misc_feature (1)..( 8): Matrix.003 file - promoters60/5774545
atcaatgt

SEQ ID NO: 64246 - DNA, 7 bp, Unknown
  misc_feature (1)..( 7): Matrix.003 file - promoters60/5776417
ttttagt

SEQ ID NO: 64247 - DNA, 11 bp, Unknown
  misc_feature (1)..( 11): Matrix.003 file - promoters60/5776417
tttagtttttg

SEQ ID NO: 64248 - DNA, 10 bp, Unknown
  misc_feature (1)..( 10): Matrix.003 file - promoters60/5776417
tttatttttg

SEQ ID NO: 64249 - DNA, 12 bp, Unknown
  misc_feature (1)..( 12): Matrix.003 file - promoters60/5776425
aaataattgtat

SEQ ID NO: 64250 - DNA, 10 bp, Unknown
  misc_feature (1)..( 10): Matrix.003 file - promoters60/5776425
gaaatagatt

SEQ ID NO: 64251 - DNA, 11 bp, Unknown
  misc_feature (1)..( 11): Matrix.003 file - promoters60/5776425
ttacttaaatt

SEQ ID NO: 64252 - DNA, 9 bp, Unknown
  misc_feature (1)..( 9): Matrix.003 file - promoters60/5776545
tttttattt

SEQ ID NO: 64253 - DNA, 14 bp, Unknown
  misc_feature (1)..( 14): Matrix.003 file - promoters60/5776545
atgttaacaaaaca

SEQ ID NO: 64254 - DNA, 10 bp, Unknown
  misc_feature (1)..( 10): Matrix.003 file - promoters60/5776545
aaaataaatt

SEQ ID NO: 64255 - DNA, 11 bp, Unknown
  misc_feature (1)..( 11): Matrix.003 file - promoters60/5776545
tataaaaataa

SEQ ID NO: 64256 - DNA, 9 bp, Unknown
  misc_feature (1)..( 9): Matrix.003 file - promoters60/5776545
ttgatataa

SEQ ID NO: 64257 - DNA, 9 bp, Unknown
  misc_feature (1)..( 9): Matrix.003 file - promoters60/5776545
ctttttaaa

SEQ ID NO: 64258 - DNA, 10 bp, Unknown
  misc_feature (1)..( 10): Matrix.003 file - promoters50/1006957
caaactaggc

SEQ ID NO: 64259 - DNA, 8 bp, Unknown
  misc_feature (1)..( 8): Matrix.003 file - promoters50/1006957
gaaaggag

SEQ ID NO: 64260 - DNA, 9 bp, Unknown
  misc_feature (1)..( 9): Matrix.003 file - promoters50/1006965
cttgaagat

SEQ ID NO: 64261 - DNA, 7 bp, Unknown
  misc_feature (1)..( 7): Matrix.003 file - promoters50/1006965
aaaaatc

SEQ ID NO: 64262 - DNA, 10 bp, Unknown
  misc_feature (1)..( 10): Matrix.003 file - promoters50/1007014
actaaaaaag

SEQ ID NO: 64263 - DNA, 15 bp, Unknown
  misc_feature (1)..( 15): Matrix.003 file - promoters50/1007030
tagaatatatagagt

SEQ ID NO: 64264 - DNA, 13 bp, Unknown
  misc_feature (1)..( 13): Matrix.003 file - promoters50/1007030
atataatataata

SEQ ID NO: 64265 - DNA, 13 bp, Unknown
  misc_feature (1)..( 13): Matrix.003 file - promoters50/1007030
tataaatagtaaa

SEQ ID NO: 64266 - DNA, 10 bp, Unknown
  misc_feature (1)..( 10): Matrix.003 file - promoters50/1007030
aatctgaaaa

SEQ ID NO: 64267 - DNA, 11 bp, Unknown
  misc_feature (1)..( 11): Matrix.003 file - promoters50/1007030
tatcaaaaata

SEQ ID NO: 64268 - DNA, 10 bp, Unknown
  misc_feature (1)..( 10): Matrix.003 file - promoters50/1007030
ctttataaaa

SEQ ID NO: 64269 - DNA, 8 bp, Unknown
  misc_feature (1)..( 8): Matrix.003 file - promoters50/1007030
ctaaaaat

SEQ ID NO: 64270 - DNA, 8 bp, Unknown
  misc_feature (1)..( 8): Matrix.003 file - promoters50/1007030
taaaaaaa

SEQ ID NO: 64271 - DNA, 8 bp, Unknown
  misc_feature (1)..( 8): Matrix.003 file - promoters50/1007058
ggtatgat

SEQ ID NO: 64272 - DNA, 9 bp, Unknown
  misc_feature (1)..( 9): Matrix.003 file - promoters50/1007092
atatttttt

SEQ ID NO: 64273 - DNA, 8 bp, Unknown
  misc_feature (1)..( 8): Matrix.003 file - promoters50/1007092
aattgatt

SEQ ID NO: 64274 - DNA, 10 bp, Unknown
  misc_feature (1)..( 10): Matrix.003 file - promoters50/1007139
tttcaacaaa

SEQ ID NO: 64275 - DNA, 9 bp, Unknown
  misc_feature (1)..( 9): Matrix.003 file - promoters50/1007139
aaagttcag

SEQ ID NO: 64276 - DNA, 11 bp, Unknown
  misc_feature (1)..( 11): Matrix.003 file - promoters50/1007139
taaatatatgt

SEQ ID NO: 64277 - DNA, 10 bp, Unknown
  misc_feature (1)..( 10): Matrix.003 file - promoters50/1007152
attttgatta

SEQ ID NO: 64278 - DNA, 11 bp, Unknown
  misc_feature (1)..( 11): Matrix.003 file - promoters50/1007152
ttcttcaaaaa

SEQ ID NO: 64279 - DNA, 10 bp, Unknown
  misc_feature (1)..( 10): Matrix.003 file - promoters50/1007152
tcttcaaaaa

SEQ ID NO: 64280 - DNA, 6 bp, Unknown
  misc_feature (1)..( 6): Matrix.003 file - promoters50/1007187
aatttt

SEQ ID NO: 64281 - DNA, 9 bp, Unknown
  misc_feature (1)..( 9): Matrix.003 file - promoters50/1007187
aatttattt

SEQ ID NO: 64282 - DNA, 9 bp, Unknown
  misc_feature (1)..( 9): Matrix.003 file - promoters50/1007187
aatattttt

SEQ ID NO: 64283 - DNA, 9 bp, Unknown
  misc_feature (1)..( 9): Matrix.003 file - promoters50/1007187
tgttaatct

SEQ ID NO: 64284 - DNA, 7 bp, Unknown
  misc_feature (1)..( 7): Matrix.003 file - promoters50/1007187
tttttct

SEQ ID NO: 64285 - DNA, 8 bp, Unknown
  misc_feature (1)..( 8): Matrix.003 file - promoters50/1007258
attaatta

SEQ ID NO: 64286 - DNA, 7 bp, Unknown
  misc_feature (1)..( 7): Matrix.003 file - promoters50/1007258
atttaca

SEQ ID NO: 64287 - DNA, 7 bp, Unknown
  misc_feature (1)..( 7): Matrix.003 file - promoters50/1007258
gtttaat

SEQ ID NO: 64288 - DNA, 11 bp, Unknown
  misc_feature (1)..( 11): Matrix.003 file - promoters50/1007258
gttctaaataa

SEQ ID NO: 64289 - DNA, 7 bp, Unknown
  misc_feature (1)..( 7): Matrix.003 file - promoters50/1007258
tttttgt

SEQ ID NO: 64290 - DNA, 6 bp, Unknown
  misc_feature (1)..( 6): Matrix.003 file - promoters50/1007258
ttttta

SEQ ID NO: 64291 - DNA, 10 bp, Unknown
  misc_feature (1)..( 10): Matrix.003 file - promoters50/1007258
ttacattttt

SEQ ID NO: 64292 - DNA, 8 bp, Unknown
  misc_feature (1)..( 8): Matrix.003 file - promoters50/1007258
ttttgttt

SEQ ID NO: 64293 - DNA, 10 bp, Unknown
  misc_feature (1)..( 10): Matrix.003 file - promoters50/1007269
taaacgtttt

SEQ ID NO: 64294 - DNA, 12 bp, Unknown
  misc_feature (1)..( 12): Matrix.003 file - promoters50/1007269
taaattttaaaa

SEQ ID NO: 64295 - DNA, 11 bp, Unknown
  misc_feature (1)..( 11): Matrix.003 file - promoters50/1007269
cttagtatttt

SEQ ID NO: 64296 - DNA, 8 bp, Unknown
  misc_feature (1)..( 8): Matrix.003 file - promoters50/1007269
taaaaaag

SEQ ID NO: 64297 - DNA, 10 bp, Unknown
  misc_feature (1)..( 10): Matrix.003 file - promoters50/1007273
tggaaaagat

SEQ ID NO: 64298 - DNA, 8 bp, Unknown
  misc_feature (1)..( 8): Matrix.003 file - promoters50/1007273
cttgaatc

SEQ ID NO: 64299 - DNA, 8 bp, Unknown
  misc_feature (1)..( 8): Matrix.003 file - promoters50/1007286
attttgtt

SEQ ID NO: 64300 - DNA, 14 bp, Unknown
  misc_feature (1)..( 14): Matrix.003 file - promoters50/1007286
aactcattttctta

SEQ ID NO: 64301 - DNA, 8 bp, Unknown
  misc_feature (1)..( 8): Matrix.003 file - promoters50/1007286
aatttata

SEQ ID NO: 64302 - DNA, 9 bp, Unknown
  misc_feature (1)..( 9): Matrix.003 file - promoters50/1007289
aatgaatta

SEQ ID NO: 64303 - DNA, 9 bp, Unknown
  misc_feature (1)..( 9): Matrix.003 file - promoters50/1007289
aataatata

SEQ ID NO: 64304 - DNA, 14 bp, Unknown
  misc_feature (1)..( 14): Matrix.003 file - promoters50/1007289
atatcaattttttt

SEQ ID NO: 64305 - DNA, 10 bp, Unknown
  misc_feature (1)..( 10): Matrix.003 file - promoters50/1007289
aattaaataa

SEQ ID NO: 64306 - DNA, 7 bp, Unknown
  misc_feature (1)..( 7): Matrix.003 file - promoters50/1007289
aaataaa

SEQ ID NO: 64307 - DNA, 9 bp, Unknown
  misc_feature (1)..( 9): Matrix.003 file - promoters50/1007289
aattataaa

SEQ ID NO: 64308 - DNA, 8 bp, Unknown
  misc_feature (1)..( 8): Matrix.003 file - promoters50/1007370
caataatt

SEQ ID NO: 64309 - DNA, 8 bp, Unknown
  misc_feature (1)..( 8): Matrix.003 file - promoters50/1007554
tataacaa

SEQ ID NO: 64310 - DNA, 6 bp, Unknown
  misc_feature (1)..( 6): Matrix.003 file - promoters50/1007554
tttaat

SEQ ID NO: 64311 - DNA, 7 bp, Unknown
  misc_feature (1)..( 7): Matrix.003 file - promoters50/1007554
aaattat

SEQ ID NO: 64312 - DNA, 11 bp, Unknown
  misc_feature (1)..( 11): Matrix.003 file - promoters50/1007554
atataataata

SEQ ID NO: 64313 - DNA, 10 bp, Unknown
  misc_feature (1)..( 10): Matrix.003 file - promoters50/1007576
ctggaaaatg

SEQ ID NO: 64314 - DNA, 16 bp, Unknown
  misc_feature (1)..( 16): Matrix.003 file - promoters50/1007639
ttattgagtaaaacat

SEQ ID NO: 64315 - DNA, 10 bp, Unknown
  misc_feature (1)..( 10): Matrix.003 file - promoters50/1007639
ataaaaacaa

SEQ ID NO: 64316 - DNA, 15 bp, Unknown
  misc_feature (1)..( 15): Matrix.003 file - promoters50/1007639
ttacagaaatataaa

SEQ ID NO: 64317 - DNA, 13 bp, Unknown
  misc_feature (1)..( 13): Matrix.003 file - promoters50/1007639
agtgtttgctgac

SEQ ID NO: 64318 - DNA, 9 bp, Unknown
  misc_feature (1)..( 9): Matrix.003 file - promoters50/1007639
agtttgata

SEQ ID NO: 64319 - DNA, 14 bp, Unknown
  misc_feature (1)..( 14): Matrix.003 file - promoters50/1007639
atatcatttgaatt

SEQ ID NO: 64320 - DNA, 6 bp, Unknown
  misc_feature (1)..( 6): Matrix.003 file - promoters50/1007639
aaaaac

SEQ ID NO: 64321 - DNA, 12 bp, Unknown
  misc_feature (1)..( 12): Matrix.003 file - promoters50/1007675
aataaatgggaa

SEQ ID NO: 64322 - DNA, 6 bp, Unknown
  misc_feature (1)..( 6): Matrix.003 file - promoters50/1007675
taaaaa

SEQ ID NO: 64323 - DNA, 9 bp, Unknown
  misc_feature (1)..( 9): Matrix.003 file - promoters50/1007675
ctaaaaaaa

SEQ ID NO: 64324 - DNA, 9 bp, Unknown
  misc_feature (1)..( 9): Matrix.003 file - promoters50/1007675
tatataaaa

SEQ ID NO: 64325 - DNA, 6 bp, Unknown
  misc_feature (1)..( 6): Matrix.003 file - promoters50/1007731
atttac

SEQ ID NO: 64326 - DNA, 12 bp, Unknown
  misc_feature (1)..( 12): Matrix.003 file - promoters50/1007756
aacctgtttatt

SEQ ID NO: 64327 - DNA, 8 bp, Unknown
  misc_feature (1)..( 8): Matrix.003 file - promoters50/1007773
gaaaaagg

SEQ ID NO: 64328 - DNA, 9 bp, Unknown
  misc_feature (1)..( 9): Matrix.003 file - promoters50/1007791
attgtttat

SEQ ID NO: 64329 - DNA, 9 bp, Unknown
  misc_feature (1)..( 9): Matrix.003 file - promoters50/1007791
ttgctttct

SEQ ID NO: 64330 - DNA, 10 bp, Unknown
  misc_feature (1)..( 10): Matrix.003 file - promoters50/1007791
caatgttgaa

SEQ ID NO: 64331 - DNA, 10 bp, Unknown
  misc_feature (1)..( 10): Matrix.003 file - promoters50/1007791
aacaactttt

SEQ ID NO: 64332 - DNA, 7 bp, Unknown
  misc_feature (1)..( 7): Matrix.003 file - promoters50/1007791
aaagttt

SEQ ID NO: 64333 - DNA, 8 bp, Unknown
  misc_feature (1)..( 8): Matrix.003 file - promoters50/1007791
gttttgtg

SEQ ID NO: 64334 - DNA, 12 bp, Unknown
  misc_feature (1)..( 12): Matrix.003 file - promoters50/1007795
actatttaaatt

SEQ ID NO: 64335 - DNA, 10 bp, Unknown
  misc_feature (1)..( 10): Matrix.003 file - promoters50/1007795
agaaaattta

SEQ ID NO: 64336 - DNA, 8 bp, Unknown
  misc_feature (1)..( 8): Matrix.003 file - promoters50/1007795
aaaaataa

SEQ ID NO: 64337 - DNA, 12 bp, Unknown
  misc_feature (1)..( 12): Matrix.003 file - promoters50/1007795
gtatatgatttt

SEQ ID NO: 64338 - DNA, 10 bp, Unknown
  misc_feature (1)..( 10): Matrix.003 file - promoters50/1007795
tttataaaat

SEQ ID NO: 64339 - DNA, 13 bp, Unknown
  misc_feature (1)..( 13): Matrix.003 file - promoters50/1007795
gattttatattga

SEQ ID NO: 64340 - DNA, 13 bp, Unknown
  misc_feature (1)..( 13): Matrix.003 file - promoters50/1007795
attaattttattt

SEQ ID NO: 64341 - DNA, 9 bp, Unknown
  misc_feature (1)..( 9): Matrix.003 file - promoters50/1007795
aaaaaattt

SEQ ID NO: 64342 - DNA, 11 bp, Unknown
  misc_feature (1)..( 11): Matrix.003 file - promoters50/1007795
aaaataaacaa

SEQ ID NO: 64343 - DNA, 10 bp, Unknown
  misc_feature (1)..( 10): Matrix.003 file - promoters50/1007795
tttataattt

SEQ ID NO: 64344 - DNA, 12 bp, Unknown
  misc_feature (1)..( 12): Matrix.003 file - promoters50/1007802
gataaaatttgt

SEQ ID NO: 64345 - DNA, 12 bp, Unknown
  misc_feature (1)..( 12): Matrix.003 file - promoters50/1007831
gttaaataatta

SEQ ID NO: 64346 - DNA, 9 bp, Unknown
  misc_feature (1)..( 9): Matrix.003 file - promoters50/1007831
aaccttttt

SEQ ID NO: 64347 - DNA, 12 bp, Unknown
  misc_feature (1)..( 12): Matrix.003 file - promoters50/1007831
cttaaaaaaaga

SEQ ID NO: 64348 - DNA, 11 bp, Unknown
  misc_feature (1)..( 11): Matrix.003 file - promoters50/1007967
acaatttgaaa

SEQ ID NO: 64349 - DNA, 9 bp, Unknown
  misc_feature (1)..( 9): Matrix.003 file - promoters50/1008070
cttatatat

SEQ ID NO: 64350 - DNA, 7 bp, Unknown
  misc_feature (1)..( 7): Matrix.003 file - promoters50/1008070
atttcta

SEQ ID NO: 64351 - DNA, 9 bp, Unknown
  misc_feature (1)..( 9): Matrix.003 file - promoters50/1008070
caaatataa

SEQ ID NO: 64352 - DNA, 9 bp, Unknown
  misc_feature (1)..( 9): Matrix.003 file - promoters50/1008070
caaaaaaaa

SEQ ID NO: 64353 - DNA, 9 bp, Unknown
  misc_feature (1)..( 9): Matrix.003 file - promoters50/1008070
aaactgaat

SEQ ID NO: 64354 - DNA, 14 bp, Unknown
  misc_feature (1)..( 14): Matrix.003 file - promoters50/1008109
gtttcataattaaa

SEQ ID NO: 64355 - DNA, 12 bp, Unknown
  misc_feature (1)..( 12): Matrix.003 file - promoters50/1008148
tgaataaaaata

SEQ ID NO: 64356 - DNA, 8 bp, Unknown
  misc_feature (1)..( 8): Matrix.003 file - promoters50/1008183
ctttcagg

SEQ ID NO: 64357 - DNA, 10 bp, Unknown
  misc_feature (1)..( 10): Matrix.003 file - promoters50/1008218
aaatgtatgt

SEQ ID NO: 64358 - DNA, 10 bp, Unknown
  misc_feature (1)..( 10): Matrix.003 file - promoters50/1008218
tggttcataa

SEQ ID NO: 64359 - DNA, 13 bp, Unknown
  misc_feature (1)..( 13): Matrix.003 file - promoters50/1008226
ttaaaaacaaaaa

SEQ ID NO: 64360 - DNA, 8 bp, Unknown
  misc_feature (1)..( 8): Matrix.003 file - promoters50/1008226
ttaaaaac

SEQ ID NO: 64361 - DNA, 12 bp, Unknown
  misc_feature (1)..( 12): Matrix.003 file - promoters50/1008226
aataaatatgtc

SEQ ID NO: 64362 - DNA, 9 bp, Unknown
  misc_feature (1)..( 9): Matrix.003 file - promoters50/1008319
aaaaaaaca

SEQ ID NO: 64363 - DNA, 10 bp, Unknown
  misc_feature (1)..( 10): Matrix.003 file - promoters50/1008319
tttatattct

SEQ ID NO: 64364 - DNA, 12 bp, Unknown
  misc_feature (1)..( 12): Matrix.003 file - promoters50/1008324
gatatgttttgg

SEQ ID NO: 64365 - DNA, 9 bp, Unknown
  misc_feature (1)..( 9): Matrix.003 file - promoters50/1008334
tttaagagt

SEQ ID NO: 64366 - DNA, 7 bp, Unknown
  misc_feature (1)..( 7): Matrix.003 file - promoters50/1008397
gctttta

SEQ ID NO: 64367 - DNA, 8 bp, Unknown
  misc_feature (1)..( 8): Matrix.003 file - promoters50/1008397
gaatatta

SEQ ID NO: 64368 - DNA, 8 bp, Unknown
  misc_feature (1)..( 8): Matrix.003 file - promoters50/1008397
ttatcaaa

SEQ ID NO: 64369 - DNA, 10 bp, Unknown
  misc_feature (1)..( 10): Matrix.003 file - promoters50/1008397
caaaaatttg

SEQ ID NO: 64370 - DNA, 8 bp, Unknown
  misc_feature (1)..( 8): Matrix.003 file - promoters50/1008425
cttttgaa

SEQ ID NO: 64371 - DNA, 10 bp, Unknown
  misc_feature (1)..( 10): Matrix.003 file - promoters50/1008425
caaatacatt

SEQ ID NO: 64372 - DNA, 10 bp, Unknown
  misc_feature (1)..( 10): Matrix.003 file - promoters50/1008432
gtaaatggtt

SEQ ID NO: 64373 - DNA, 13 bp, Unknown
  misc_feature (1)..( 13): Matrix.003 file - promoters50/1008432
ctgttttattaaa

SEQ ID NO: 64374 - DNA, 13 bp, Unknown
  misc_feature (1)..( 13): Matrix.003 file - promoters50/1008432
tttttataaaatt

SEQ ID NO: 64375 - DNA, 8 bp, Unknown
  misc_feature (1)..( 8): Matrix.003 file - promoters50/1008443
gataaaaa

SEQ ID NO: 64376 - DNA, 11 bp, Unknown
  misc_feature (1)..( 11): Matrix.003 file - promoters50/1008443
tattcaaaaaa

SEQ ID NO: 64377 - DNA, 7 bp, Unknown
  misc_feature (1)..( 7): Matrix.003 file - promoters50/1008487
caattac

SEQ ID NO: 64378 - DNA, 9 bp, Unknown
  misc_feature (1)..( 9): Matrix.003 file - promoters50/1008491
aaaataaaa

SEQ ID NO: 64379 - DNA, 7 bp, Unknown
  misc_feature (1)..( 7): Matrix.003 file - promoters50/1008491
taaaact

SEQ ID NO: 64380 - DNA, 7 bp, Unknown
  misc_feature (1)..( 7): Matrix.003 file - promoters50/1008534
gattttg

SEQ ID NO: 64381 - DNA, 6 bp, Unknown
  misc_feature (1)..( 6): Matrix.003 file - promoters50/1008573
tttatt

SEQ ID NO: 64382 - DNA, 11 bp, Unknown
  misc_feature (1)..( 11): Matrix.003 file - promoters50/1008573
cttattatgtt

SEQ ID NO: 64383 - DNA, 14 bp, Unknown
  misc_feature (1)..( 14): Matrix.003 file - promoters50/1008573
tttaaaatatagtt

SEQ ID NO: 64384 - DNA, 9 bp, Unknown
  misc_feature (1)..( 9): Matrix.003 file - promoters50/1008673
tgtttttat

SEQ ID NO: 64385 - DNA, 6 bp, Unknown
  misc_feature (1)..( 6): Matrix.003 file - promoters50/1008732
aaaaaa

SEQ ID NO: 64386 - DNA, 8 bp, Unknown
  misc_feature (1)..( 8): Matrix.003 file - promoters50/1008732
aaaaataa

SEQ ID NO: 64387 - DNA, 8 bp, Unknown
  misc_feature (1)..( 8): Matrix.003 file - promoters50/1008759
atcatttt

SEQ ID NO: 64388 - DNA, 9 bp, Unknown
  misc_feature (1)..( 9): Matrix.003 file - promoters50/1008769
gtaaactca

SEQ ID NO: 64389 - DNA, 11 bp, Unknown
  misc_feature (1)..( 11): Matrix.003 file - promoters50/1008769
atgaatctttt

SEQ ID NO: 64390 - DNA, 7 bp, Unknown
  misc_feature (1)..( 7): Matrix.003 file - promoters50/1008769
aattttt

SEQ ID NO: 64391 - DNA, 10 bp, Unknown
  misc_feature (1)..( 10): Matrix.003 file - promoters50/1008769
taagtaaact

SEQ ID NO: 64392 - DNA, 8 bp, Unknown
  misc_feature (1)..( 8): Matrix.003 file - promoters50/1008769
atggttta

SEQ ID NO: 64393 - DNA, 11 bp, Unknown
  misc_feature (1)..( 11): Matrix.003 file - promoters50/1008787
gcataaaaaat

SEQ ID NO: 64394 - DNA, 11 bp, Unknown
  misc_feature (1)..( 11): Matrix.003 file - promoters50/1008791
taacggtagaa

SEQ ID NO: 64395 - DNA, 10 bp, Unknown
  misc_feature (1)..( 10): Matrix.003 file - promoters50/1008791
aacccatctc

SEQ ID NO: 64396 - DNA, 11 bp, Unknown
  misc_feature (1)..( 11): Matrix.003 file - promoters50/1008808
gaaaatgatta

SEQ ID NO: 64397 - DNA, 6 bp, Unknown
  misc_feature (1)..( 6): Matrix.003 file - promoters50/1008813
ttcaaa

SEQ ID NO: 64398 - DNA, 10 bp, Unknown
  misc_feature (1)..( 10): Matrix.003 file - promoters50/1008813
aaaaaaatat

SEQ ID NO: 64399 - DNA, 13 bp, Unknown
  misc_feature (1)..( 13): Matrix.003 file - promoters50/1008816
cgattaataaaaa

SEQ ID NO: 64400 - DNA, 10 bp, Unknown
  misc_feature (1)..( 10): Matrix.003 file - promoters50/1008816
atatttttta

SEQ ID NO: 64401 - DNA, 10 bp, Unknown
  misc_feature (1)..( 10): Matrix.003 file - promoters50/1008836
atattttttt

SEQ ID NO: 64402 - DNA, 11 bp, Unknown
  misc_feature (1)..( 11): Matrix.003 file - promoters50/1008836
atcaaaagaaa

SEQ ID NO: 64403 - DNA, 11 bp, Unknown
  misc_feature (1)..( 11): Matrix.003 file - promoters50/1008836
aaaaaaaaaat

SEQ ID NO: 64404 - DNA, 10 bp, Unknown
  misc_feature (1)..( 10): Matrix.003 file - promoters50/1008836
ttaaaattaa

SEQ ID NO: 64405 - DNA, 13 bp, Unknown
  misc_feature (1)..( 13): Matrix.003 file - promoters50/1008836
aaattatttataa

SEQ ID NO: 64406 - DNA, 8 bp, Unknown
  misc_feature (1)..( 8): Matrix.003 file - promoters50/1008836
atatttat

SEQ ID NO: 64407 - DNA, 9 bp, Unknown
  misc_feature (1)..( 9): Matrix.003 file - promoters50/1008836
tacaaatta

SEQ ID NO: 64408 - DNA, 8 bp, Unknown
  misc_feature (1)..( 8): Matrix.003 file - promoters50/1008836
tatataaa

SEQ ID NO: 64409 - DNA, 13 bp, Unknown
  misc_feature (1)..( 13): Matrix.003 file - promoters50/1008836
aaatttggaaaat

SEQ ID NO: 64410 - DNA, 10 bp, Unknown
  misc_feature (1)..( 10): Matrix.003 file - promoters50/1008836
atttttatta

SEQ ID NO: 64411 - DNA, 9 bp, Unknown
  misc_feature (1)..( 9): Matrix.003 file - promoters50/1008836
ttttaaaaa

SEQ ID NO: 64412 - DNA, 11 bp, Unknown
  misc_feature (1)..( 11): Matrix.003 file - promoters50/1008836
agtttaaaata

SEQ ID NO: 64413 - DNA, 8 bp, Unknown
  misc_feature (1)..( 8): Matrix.003 file - promoters50/1008889
attttttt

SEQ ID NO: 64414 - DNA, 8 bp, Unknown
  misc_feature (1)..( 8): Matrix.003 file - promoters50/1008889
taaattat

SEQ ID NO: 64415 - DNA, 11 bp, Unknown
  misc_feature (1)..( 11): Matrix.003 file - promoters50/1009030
actcatgtaat

SEQ ID NO: 64416 - DNA, 12 bp, Unknown
  misc_feature (1)..( 12): Matrix.003 file - promoters50/1009030
atggacctaaat

SEQ ID NO: 64417 - DNA, 11 bp, Unknown
  misc_feature (1)..( 11): Matrix.003 file - promoters50/1009053
tatattttttt

SEQ ID NO: 64418 - DNA, 10 bp, Unknown
  misc_feature (1)..( 10): Matrix.003 file - promoters50/1009053
atttttttaa

SEQ ID NO: 64419 - DNA, 12 bp, Unknown
  misc_feature (1)..( 12): Matrix.003 file - promoters50/1009068
aaaaattattga

SEQ ID NO: 64420 - DNA, 8 bp, Unknown
  misc_feature (1)..( 8): Matrix.003 file - promoters50/1009068
aaaaccaa

SEQ ID NO: 64421 - DNA, 9 bp, Unknown
  misc_feature (1)..( 9): Matrix.003 file - promoters50/1009068
aaaatatac

SEQ ID NO: 64422 - DNA, 7 bp, Unknown
  misc_feature (1)..( 7): Matrix.003 file - promoters50/1009086
caaattg

SEQ ID NO: 64423 - DNA, 11 bp, Unknown
  misc_feature (1)..( 11): Matrix.003 file - promoters50/1009086
aataaatttga

SEQ ID NO: 64424 - DNA, 10 bp, Unknown
  misc_feature (1)..( 10): Matrix.003 file - promoters50/1009086
ataaaacaaa

SEQ ID NO: 64425 - DNA, 13 bp, Unknown
  misc_feature (1)..( 13): Matrix.003 file - promoters50/1009112
tataaaccaatta

SEQ ID NO: 64426 - DNA, 4 bp, Unknown
  misc_feature (1)..( 4): Matrix.003 file - promoters50/1009112
taac

SEQ ID NO: 64427 - DNA, 10 bp, Unknown
  misc_feature (1)..( 10): Matrix.003 file - promoters50/1009112
atttcattta

SEQ ID NO: 64428 - DNA, 10 bp, Unknown
  misc_feature (1)..( 10): Matrix.003 file - promoters50/1009112
ttaaaaagta

SEQ ID NO: 64429 - DNA, 12 bp, Unknown
  misc_feature (1)..( 12): Matrix.003 file - promoters50/1009112
gttaaattaaaa

SEQ ID NO: 64430 - DNA, 8 bp, Unknown
  misc_feature (1)..( 8): Matrix.003 file - promoters50/1009112
aataaaac

SEQ ID NO: 64431 - DNA, 9 bp, Unknown
  misc_feature (1)..( 9): Matrix.003 file - promoters50/1009112
atttgaaat

SEQ ID NO: 64432 - DNA, 14 bp, Unknown
  misc_feature (1)..( 14): Matrix.003 file - promoters50/1009112
ataaaccaataatg

SEQ ID NO: 64433 - DNA, 8 bp, Unknown
  misc_feature (1)..( 8): Matrix.003 file - promoters50/1009112
aatattaa

SEQ ID NO: 64434 - DNA, 9 bp, Unknown
  misc_feature (1)..( 9): Matrix.003 file - promoters50/1009112
taaaacgta

SEQ ID NO: 64435 - DNA, 9 bp, Unknown
  misc_feature (1)..( 9): Matrix.003 file - promoters50/1009112
gaagaatta

SEQ ID NO: 64436 - DNA, 11 bp, Unknown
  misc_feature (1)..( 11): Matrix.003 file - promoters50/1009136
ataattcaatt

SEQ ID NO: 64437 - DNA, 10 bp, Unknown
  misc_feature (1)..( 10): Matrix.003 file - promoters50/1009136
aatttatata

SEQ ID NO: 64438 - DNA, 6 bp, Unknown
  misc_feature (1)..( 6): Matrix.003 file - promoters50/1009136
atataa

SEQ ID NO: 64439 - DNA, 11 bp, Unknown
  misc_feature (1)..( 11): Matrix.003 file - promoters50/1009136
ttaatcatatt

SEQ ID NO: 64440 - DNA, 9 bp, Unknown
  misc_feature (1)..( 9): Matrix.003 file - promoters50/1009136
taaattata

SEQ ID NO: 64441 - DNA, 11 bp, Unknown
  misc_feature (1)..( 11): Matrix.003 file - promoters50/1009136
gaaatataatt

SEQ ID NO: 64442 - DNA, 12 bp, Unknown
  misc_feature (1)..( 12): Matrix.003 file - promoters50/1009136
aaaaatatatca

SEQ ID NO: 64443 - DNA, 13 bp, Unknown
  misc_feature (1)..( 13): Matrix.003 file - promoters50/1009136
atctatataaata

SEQ ID NO: 64444 - DNA, 12 bp, Unknown
  misc_feature (1)..( 12): Matrix.003 file - promoters50/1009142
aaaagtgaaatg

SEQ ID NO: 64445 - DNA, 14 bp, Unknown
  misc_feature (1)..( 14): Matrix.003 file - promoters50/1009142
tgtatgctaagaca

SEQ ID NO: 64446 - DNA, 13 bp, Unknown
  misc_feature (1)..( 13): Matrix.003 file - promoters50/1009142
ctgaattatgtta

SEQ ID NO: 64447 - DNA, 7 bp, Unknown
  misc_feature (1)..( 7): Matrix.003 file - promoters50/1009169
atataaa

SEQ ID NO: 64448 - DNA, 7 bp, Unknown
  misc_feature (1)..( 7): Matrix.003 file - promoters50/1009207
tatcaat

SEQ ID NO: 64449 - DNA, 10 bp, Unknown
  misc_feature (1)..( 10): Matrix.003 file - promoters50/1009207
taaaacatta

SEQ ID NO: 64450 - DNA, 9 bp, Unknown
  misc_feature (1)..( 9): Matrix.003 file - promoters50/1009207
aaaaattat

SEQ ID NO: 64451 - DNA, 11 bp, Unknown
  misc_feature (1)..( 11): Matrix.003 file - promoters50/1009211
cactataaata

SEQ ID NO: 64452 - DNA, 11 bp, Unknown
  misc_feature (1)..( 11): Matrix.003 file - promoters50/1009211
caaataattca

SEQ ID NO: 64453 - DNA, 13 bp, Unknown
  misc_feature (1)..( 13): Matrix.003 file - promoters50/1009258
tgattattctctc

SEQ ID NO: 64454 - DNA, 7 bp, Unknown
  misc_feature (1)..( 7): Matrix.003 file - promoters50/1009276
caaaaat

SEQ ID NO: 64455 - DNA, 9 bp, Unknown
  misc_feature (1)..( 9): Matrix.003 file - promoters50/1009276
atttaccaa

SEQ ID NO: 64456 - DNA, 7 bp, Unknown
  misc_feature (1)..( 7): Matrix.003 file - promoters50/1009276
ttcaaaa

SEQ ID NO: 64457 - DNA, 9 bp, Unknown
  misc_feature (1)..( 9): Matrix.003 file - promoters50/1009276
aaaattgac

SEQ ID NO: 64458 - DNA, 9 bp, Unknown
  misc_feature (1)..( 9): Matrix.003 file - promoters50/1009335
tatgattct

SEQ ID NO: 64459 - DNA, 10 bp, Unknown
  misc_feature (1)..( 10): Matrix.003 file - promoters50/1009335
acctttaacc

SEQ ID NO: 64460 - DNA, 8 bp, Unknown
  misc_feature (1)..( 8): Matrix.003 file - promoters50/1009335
agtaaatg

SEQ ID NO: 64461 - DNA, 10 bp, Unknown
  misc_feature (1)..( 10): Matrix.003 file - promoters50/1009335
tataagttaa

SEQ ID NO: 64462 - DNA, 12 bp, Unknown
  misc_feature (1)..( 12): Matrix.003 file - promoters50/1009335
cttattagttaa

SEQ ID NO: 64463 - DNA, 7 bp, Unknown
  misc_feature (1)..( 7): Matrix.003 file - promoters50/1009354
gattctt

SEQ ID NO: 64464 - DNA, 8 bp, Unknown
  misc_feature (1)..( 8): Matrix.003 file - promoters50/1009354
taagaact

SEQ ID NO: 64465 - DNA, 9 bp, Unknown
  misc_feature (1)..( 9): Matrix.003 file - promoters50/1009426
ctattatta

SEQ ID NO: 64466 - DNA, 7 bp, Unknown
  misc_feature (1)..( 7): Matrix.003 file - promoters50/1009426
tctcttg

SEQ ID NO: 64467 - DNA, 10 bp, Unknown
  misc_feature (1)..( 10): Matrix.003 file - promoters50/1009426
tttctatata

SEQ ID NO: 64468 - DNA, 10 bp, Unknown
  misc_feature (1)..( 10): Matrix.003 file - promoters50/1009430
aatattttaa

SEQ ID NO: 64469 - DNA, 10 bp, Unknown
  misc_feature (1)..( 10): Matrix.003 file - promoters50/1009430
atcttaaata

SEQ ID NO: 64470 - DNA, 10 bp, Unknown
  misc_feature (1)..( 10): Matrix.003 file - promoters50/1009430
agaaaatttc

SEQ ID NO: 64471 - DNA, 11 bp, Unknown
  misc_feature (1)..( 11): Matrix.003 file - promoters50/1009430
taataattata

SEQ ID NO: 64472 - DNA, 7 bp, Unknown
  misc_feature (1)..( 7): Matrix.003 file - promoters50/1009437
ctagaat

SEQ ID NO: 64473 - DNA, 8 bp, Unknown
  misc_feature (1)..( 8): Matrix.003 file - promoters50/1009437
tttgattt

SEQ ID NO: 64474 - DNA, 7 bp, Unknown
  misc_feature (1)..( 7): Matrix.003 file - promoters50/1009437
ctttttt

SEQ ID NO: 64475 - DNA, 7 bp, Unknown
  misc_feature (1)..( 7): Matrix.003 file - promoters50/1009437
tttcttt

SEQ ID NO: 64476 - DNA, 10 bp, Unknown
  misc_feature (1)..( 10): Matrix.003 file - promoters50/1009520
gcatatataa

SEQ ID NO: 64477 - DNA, 9 bp, Unknown
  misc_feature (1)..( 9): Matrix.003 file - promoters50/1009528
gtttatccc

SEQ ID NO: 64478 - DNA, 6 bp, Unknown
  misc_feature (1)..( 6): Matrix.003 file - promoters50/1009528
acatac

SEQ ID NO: 64479 - DNA, 12 bp, Unknown
  misc_feature (1)..( 12): Matrix.003 file - promoters50/1009616
aaatattaacac

SEQ ID NO: 64480 - DNA, 11 bp, Unknown
  misc_feature (1)..( 11): Matrix.003 file - promoters50/1009616
aaactaaaaaa

SEQ ID NO: 64481 - DNA, 10 bp, Unknown
  misc_feature (1)..( 10): Matrix.003 file - promoters50/1009616
ctaaacaaaa

SEQ ID NO: 64482 - DNA, 11 bp, Unknown
  misc_feature (1)..( 11): Matrix.003 file - promoters50/1009616
ttaataattta

SEQ ID NO: 64483 - DNA, 8 bp, Unknown
  misc_feature (1)..( 8): Matrix.003 file - promoters50/1009654
aataaatc

SEQ ID NO: 64484 - DNA, 7 bp, Unknown
  misc_feature (1)..( 7): Matrix.003 file - promoters50/1009654
aactaaa

SEQ ID NO: 64485 - DNA, 7 bp, Unknown
  misc_feature (1)..( 7): Matrix.003 file - promoters50/1009654
taaaaga

SEQ ID NO: 64486 - DNA, 10 bp, Unknown
  misc_feature (1)..( 10): Matrix.003 file - promoters50/1009654
aaaaaaagaa

SEQ ID NO: 64487 - DNA, 8 bp, Unknown
  misc_feature (1)..( 8): Matrix.003 file - promoters50/1009654
atttgaat

SEQ ID NO: 64488 - DNA, 6 bp, Unknown
  misc_feature (1)..( 6): Matrix.003 file - promoters50/1009654
aaattt

SEQ ID NO: 64489 - DNA, 8 bp, Unknown
  misc_feature (1)..( 8): Matrix.003 file - promoters50/1009654
ggactaaa

SEQ ID NO: 64490 - DNA, 7 bp, Unknown
  misc_feature (1)..( 7): Matrix.003 file - promoters50/1009654
ataaaag

SEQ ID NO: 64491 - DNA, 8 bp, Unknown
  misc_feature (1)..( 8): Matrix.003 file - promoters50/1009686
attaagtc

SEQ ID NO: 64492 - DNA, 12 bp, Unknown
  misc_feature (1)..( 12): Matrix.003 file - promoters50/1009693
atatcaaaaaaa

SEQ ID NO: 64493 - DNA, 11 bp, Unknown
  misc_feature (1)..( 11): Matrix.003 file - promoters50/1009693
caagaaatatt

SEQ ID NO: 64494 - DNA, 8 bp, Unknown
  misc_feature (1)..( 8): Matrix.003 file - promoters50/1009693
aaagttgt

SEQ ID NO: 64495 - DNA, 8 bp, Unknown
  misc_feature (1)..( 8): Matrix.003 file - promoters50/1009693
aattaaat

SEQ ID NO: 64496 - DNA, 11 bp, Unknown
  misc_feature (1)..( 11): Matrix.003 file - promoters50/1009693
ttaaattatat

SEQ ID NO: 64497 - DNA, 8 bp, Unknown
  misc_feature (1)..( 8): Matrix.003 file - promoters50/1009693
caaaaaaa

SEQ ID NO: 64498 - DNA, 7 bp, Unknown
  misc_feature (1)..( 7): Matrix.003 file - promoters50/1009752
taacaat

SEQ ID NO: 64499 - DNA, 8 bp, Unknown
  misc_feature (1)..( 8): Matrix.003 file - promoters50/1009754
agataatt

SEQ ID NO: 64500 - DNA, 11 bp, Unknown
  misc_feature (1)..( 11): Matrix.003 file - promoters50/1009780
tttttacaaaa

SEQ ID NO: 64501 - DNA, 11 bp, Unknown
  misc_feature (1)..( 11): Matrix.003 file - promoters50/1009780
tgataaaaagt

SEQ ID NO: 64502 - DNA, 7 bp, Unknown
  misc_feature (1)..( 7): Matrix.003 file - promoters50/1009780
ttctaat

SEQ ID NO: 64503 - DNA, 7 bp, Unknown
  misc_feature (1)..( 7): Matrix.003 file - promoters50/1009822
cttctct

SEQ ID NO: 64504 - DNA, 6 bp, Unknown
  misc_feature (1)..( 6): Matrix.003 file - promoters50/1009822
ttctca

SEQ ID NO: 64505 - DNA, 8 bp, Unknown
  misc_feature (1)..( 8): Matrix.003 file - promoters50/1009822
cttctcca

SEQ ID NO: 64506 - DNA, 10 bp, Unknown
  misc_feature (1)..( 10): Matrix.003 file - promoters50/1009854
aaagaaaaaa

SEQ ID NO: 64507 - DNA, 12 bp, Unknown
  misc_feature (1)..( 12): Matrix.003 file - promoters50/1009854
tgaaagaaaaaa

SEQ ID NO: 64508 - DNA, 11 bp, Unknown
  misc_feature (1)..( 11): Matrix.003 file - promoters50/1009854
aaaaaataatc

SEQ ID NO: 64509 - DNA, 8 bp, Unknown
  misc_feature (1)..( 8): Matrix.003 file - promoters50/1009861
attataat

SEQ ID NO: 64510 - DNA, 13 bp, Unknown
  misc_feature (1)..( 13): Matrix.003 file - promoters50/1009861
cattatacatatt

SEQ ID NO: 64511 - DNA, 10 bp, Unknown
  misc_feature (1)..( 10): Matrix.003 file - promoters50/1009861
ttataattaa

SEQ ID NO: 64512 - DNA, 9 bp, Unknown
  misc_feature (1)..( 9): Matrix.003 file - promoters50/1009861
taaaaataa

SEQ ID NO: 64513 - DNA, 9 bp, Unknown
  misc_feature (1)..( 9): Matrix.003 file - promoters50/1009875
tttcaaaaa

SEQ ID NO: 64514 - DNA, 9 bp, Unknown
  misc_feature (1)..( 9): Matrix.003 file - promoters50/1009875
attcaacat

SEQ ID NO: 64515 - DNA, 13 bp, Unknown
  misc_feature (1)..( 13): Matrix.003 file - promoters50/1009875
aagcaacaaaaag

SEQ ID NO: 64516 - DNA, 10 bp, Unknown
  misc_feature (1)..( 10): Matrix.003 file - promoters50/1009875
caacaaaaag

SEQ ID NO: 64517 - DNA, 10 bp, Unknown
  misc_feature (1)..( 10): Matrix.003 file - promoters50/1009875
aacgtcaaaa

SEQ ID NO: 64518 - DNA, 9 bp, Unknown
  misc_feature (1)..( 9): Matrix.003 file - promoters50/1009875
cattatttt

SEQ ID NO: 64519 - DNA, 11 bp, Unknown
  misc_feature (1)..( 11): Matrix.003 file - promoters50/1009910
ataattttttt

SEQ ID NO: 64520 - DNA, 9 bp, Unknown
  misc_feature (1)..( 9): Matrix.003 file - promoters50/1009910
caattttta

SEQ ID NO: 64521 - DNA, 14 bp, Unknown
  misc_feature (1)..( 14): Matrix.003 file - promoters50/1009910
cttaaaaaattaga

SEQ ID NO: 64522 - DNA, 11 bp, Unknown
  misc_feature (1)..( 11): Matrix.003 file - promoters50/1009910
aaaattaaata

SEQ ID NO: 64523 - DNA, 10 bp, Unknown
  misc_feature (1)..( 10): Matrix.003 file - promoters50/1009910
tatttaaatg

SEQ ID NO: 64524 - DNA, 14 bp, Unknown
  misc_feature (1)..( 14): Matrix.003 file - promoters50/1009910
aataaaataacaaa

SEQ ID NO: 64525 - DNA, 9 bp, Unknown
  misc_feature (1)..( 9): Matrix.003 file - promoters50/1009930
tcatatctg

SEQ ID NO: 64526 - DNA, 8 bp, Unknown
  misc_feature (1)..( 8): Matrix.003 file - promoters50/1009930
tttaaatt

SEQ ID NO: 64527 - DNA, 7 bp, Unknown
  misc_feature (1)..( 7): Matrix.003 file - promoters50/1009930
aaacact

SEQ ID NO: 64528 - DNA, 9 bp, Unknown
  misc_feature (1)..( 9): Matrix.003 file - promoters50/1009930
aatttattt

SEQ ID NO: 64529 - DNA, 9 bp, Unknown
  misc_feature (1)..( 9): Matrix.003 file - promoters50/1009930
ttacattag

SEQ ID NO: 64530 - DNA, 8 bp, Unknown
  misc_feature (1)..( 8): Matrix.003 file - promoters50/1009930
ttatgatc

SEQ ID NO: 64531 - DNA, 6 bp, Unknown
  misc_feature (1)..( 6): Matrix.003 file - promoters50/1009930
caaata

SEQ ID NO: 64532 - DNA, 9 bp, Unknown
  misc_feature (1)..( 9): Matrix.003 file - promoters50/1009941
aaaattatc

SEQ ID NO: 64533 - DNA, 7 bp, Unknown
  misc_feature (1)..( 7): Matrix.003 file - promoters50/1009955
tggaaag

SEQ ID NO: 64534 - DNA, 6 bp, Unknown
  misc_feature (1)..( 6): Matrix.003 file - promoters50/1009955
cttctg

SEQ ID NO: 64535 - DNA, 11 bp, Unknown
  misc_feature (1)..( 11): Matrix.003 file - promoters50/1009999
aattgttttgt

SEQ ID NO: 64536 - DNA, 15 bp, Unknown
  misc_feature (1)..( 15): Matrix.003 file - promoters50/1009999
aagataaaaagaaaa

SEQ ID NO: 64537 - DNA, 10 bp, Unknown
  misc_feature (1)..( 10): Matrix.003 file - promoters50/1009999
gtgtacaaaa

SEQ ID NO: 64538 - DNA, 12 bp, Unknown
  misc_feature (1)..( 12): Matrix.003 file - promoters50/1009999
aaagaaaaaaag

SEQ ID NO: 64539 - DNA, 10 bp, Unknown
  misc_feature (1)..( 10): Matrix.003 file - promoters50/1009999
gcactaaata

SEQ ID NO: 64540 - DNA, 11 bp, Unknown
  misc_feature (1)..( 11): Matrix.003 file - promoters50/1009999
atcgatagata

SEQ ID NO: 64541 - DNA, 7 bp, Unknown
  misc_feature (1)..( 7): Matrix.003 file - promoters50/1010019
caaaaac

SEQ ID NO: 64542 - DNA, 8 bp, Unknown
  misc_feature (1)..( 8): Matrix.003 file - promoters50/1010025
atatcttc

SEQ ID NO: 64543 - DNA, 9 bp, Unknown
  misc_feature (1)..( 9): Matrix.003 file - promoters50/1010055
aaacaaatt

SEQ ID NO: 64544 - DNA, 11 bp, Unknown
  misc_feature (1)..( 11): Matrix.003 file - promoters50/1010055
aaattatttta

SEQ ID NO: 64545 - DNA, 8 bp, Unknown
  misc_feature (1)..( 8): Matrix.003 file - promoters50/1010055
tcaacaat

SEQ ID NO: 64546 - DNA, 7 bp, Unknown
  misc_feature (1)..( 7): Matrix.003 file - promoters50/1010055
aaaataa

SEQ ID NO: 64547 - DNA, 11 bp, Unknown
  misc_feature (1)..( 11): Matrix.003 file - promoters50/1010055
aatatttcgtt

SEQ ID NO: 64548 - DNA, 9 bp, Unknown
  misc_feature (1)..( 9): Matrix.003 file - promoters50/1010065
taaacaaat

SEQ ID NO: 64549 - DNA, 8 bp, Unknown
  misc_feature (1)..( 8): Matrix.003 file - promoters50/1010065
atttttta

SEQ ID NO: 64550 - DNA, 9 bp, Unknown
  misc_feature (1)..( 9): Matrix.003 file - promoters50/1010065
tataaaaaa

SEQ ID NO: 64551 - DNA, 10 bp, Unknown
  misc_feature (1)..( 10): Matrix.003 file - promoters50/1010065
acacaaaaca

SEQ ID NO: 64552 - DNA, 8 bp, Unknown
  misc_feature (1)..( 8): Matrix.003 file - promoters50/1010065
attacaaa

SEQ ID NO: 64553 - DNA, 10 bp, Unknown
  misc_feature (1)..( 10): Matrix.003 file - promoters50/1010068
tattcggcta

SEQ ID NO: 64554 - DNA, 16 bp, Unknown
  misc_feature (1)..( 16): Matrix.003 file - promoters50/1010094
aacatacaagaaacac

SEQ ID NO: 64555 - DNA, 11 bp, Unknown
  misc_feature (1)..( 11): Matrix.003 file - promoters50/1010094
taacttttgat

SEQ ID NO: 64556 - DNA, 8 bp, Unknown
  misc_feature (1)..( 8): Matrix.003 file - promoters50/1010094
ataataaa

SEQ ID NO: 64557 - DNA, 10 bp, Unknown
  misc_feature (1)..( 10): Matrix.003 file - promoters50/1010094
taacatttga

SEQ ID NO: 64558 - DNA, 7 bp, Unknown
  misc_feature (1)..( 7): Matrix.003 file - promoters50/1010094
aaaaatt

SEQ ID NO: 64559 - DNA, 9 bp, Unknown
  misc_feature (1)..( 9): Matrix.003 file - promoters50/1010094
gatatgata

SEQ ID NO: 64560 - DNA, 11 bp, Unknown
  misc_feature (1)..( 11): Matrix.003 file - promoters50/1010094
tagacaaaaca

SEQ ID NO: 64561 - DNA, 12 bp, Unknown
  misc_feature (1)..( 12): Matrix.003 file - promoters50/1010094
acacaaaaacga

SEQ ID NO: 64562 - DNA, 10 bp, Unknown
  misc_feature (1)..( 10): Matrix.003 file - promoters50/1010115
attctaaagt

SEQ ID NO: 64563 - DNA, 11 bp, Unknown
  misc_feature (1)..( 11): Matrix.003 file - promoters50/1010115
tcgataataca

SEQ ID NO: 64564 - DNA, 7 bp, Unknown
  misc_feature (1)..( 7): Matrix.003 file - promoters50/1010163
gagaaac

SEQ ID NO: 64565 - DNA, 12 bp, Unknown
  misc_feature (1)..( 12): Matrix.003 file - promoters50/1010170
aaattttcttct

SEQ ID NO: 64566 - DNA, 8 bp, Unknown
  misc_feature (1)..( 8): Matrix.003 file - promoters50/1010170
tttgcata

SEQ ID NO: 64567 - DNA, 9 bp, Unknown
  misc_feature (1)..( 9): Matrix.003 file - promoters50/1010201
tacaaaaat

SEQ ID NO: 64568 - DNA, 9 bp, Unknown
  misc_feature (1)..( 9): Matrix.003 file - promoters50/1010209
acacacatg

SEQ ID NO: 64569 - DNA, 13 bp, Unknown
  misc_feature (1)..( 13): Matrix.003 file - promoters50/1010209
aaacaaatttatt

SEQ ID NO: 64570 - DNA, 10 bp, Unknown
  misc_feature (1)..( 10): Matrix.003 file - promoters50/1010346
tataaaaaag

SEQ ID NO: 64571 - DNA, 6 bp, Unknown
  misc_feature (1)..( 6): Matrix.003 file - promoters50/1010346
atttat

SEQ ID NO: 64572 - DNA, 9 bp, Unknown
  misc_feature (1)..( 9): Matrix.003 file - promoters50/1010346
aaaaaaagt

SEQ ID NO: 64573 - DNA, 9 bp, Unknown
  misc_feature (1)..( 9): Matrix.003 file - promoters50/1010357
ttttatatt

SEQ ID NO: 64574 - DNA, 9 bp, Unknown
  misc_feature (1)..( 9): Matrix.003 file - promoters50/1010357
cgtgaattc

SEQ ID NO: 64575 - DNA, 7 bp, Unknown
  misc_feature (1)..( 7): Matrix.003 file - promoters50/1010357
ataaaaa

SEQ ID NO: 64576 - DNA, 10 bp, Unknown
  misc_feature (1)..( 10): Matrix.003 file - promoters50/1010367
atttatgttg

SEQ ID NO: 64577 - DNA, 10 bp, Unknown
  misc_feature (1)..( 10): Matrix.003 file - promoters50/1010367
atttaaaaac

SEQ ID NO: 64578 - DNA, 9 bp, Unknown
  misc_feature (1)..( 9): Matrix.003 file - promoters50/1010367
tacaaaaaa

SEQ ID NO: 64579 - DNA, 13 bp, Unknown
  misc_feature (1)..( 13): Matrix.003 file - promoters50/1010367
aaaccaaataaca

SEQ ID NO: 64580 - DNA, 8 bp, Unknown
  misc_feature (1)..( 8): Matrix.003 file - promoters50/1010367
caaaaatt

SEQ ID NO: 64581 - DNA, 11 bp, Unknown
  misc_feature (1)..( 11): Matrix.003 file - promoters50/1010367
aacgacaaaaa

SEQ ID NO: 64582 - DNA, 9 bp, Unknown
  misc_feature (1)..( 9): Matrix.003 file - promoters50/1010367
caaaaaata

SEQ ID NO: 64583 - DNA, 8 bp, Unknown
  misc_feature (1)..( 8): Matrix.003 file - promoters50/1010367
caaaaaat

SEQ ID NO: 64584 - DNA, 11 bp, Unknown
  misc_feature (1)..( 11): Matrix.003 file - promoters50/1010367
aaaatgaatta

SEQ ID NO: 64585 - DNA, 11 bp, Unknown
  misc_feature (1)..( 11): Matrix.003 file - promoters50/1010373
ataatttacat

SEQ ID NO: 64586 - DNA, 8 bp, Unknown
  misc_feature (1)..( 8): Matrix.003 file - promoters50/1010411
aataattg

SEQ ID NO: 64587 - DNA, 9 bp, Unknown
  misc_feature (1)..( 9): Matrix.003 file - promoters50/1010411
tatgtttgc

SEQ ID NO: 64588 - DNA, 8 bp, Unknown
  misc_feature (1)..( 8): Matrix.003 file - promoters50/1010411
aaagtgaa

SEQ ID NO: 64589 - DNA, 10 bp, Unknown
  misc_feature (1)..( 10): Matrix.003 file - promoters50/1010411
gtaattgatg

SEQ ID NO: 64590 - DNA, 12 bp, Unknown
  misc_feature (1)..( 12): Matrix.003 file - promoters50/1010411
tagaattattaa

SEQ ID NO: 64591 - DNA, 8 bp, Unknown
  misc_feature (1)..( 8): Matrix.003 file - promoters50/1010411
aatctttt

SEQ ID NO: 64592 - DNA, 12 bp, Unknown
  misc_feature (1)..( 12): Matrix.003 file - promoters50/1010411
gttttctacaat

SEQ ID NO: 64593 - DNA, 11 bp, Unknown
  misc_feature (1)..( 11): Matrix.003 file - promoters50/1010418
ccagaagagaa

SEQ ID NO: 64594 - DNA, 8 bp, Unknown
  misc_feature (1)..( 8): Matrix.003 file - promoters50/1010418
ggaaagaa

SEQ ID NO: 64595 - DNA, 7 bp, Unknown
  misc_feature (1)..( 7): Matrix.003 file - promoters50/1010418
tagtgat

SEQ ID NO: 64596 - DNA, 8 bp, Unknown
  misc_feature (1)..( 8): Matrix.003 file - promoters50/1010418
ggcctaat

SEQ ID NO: 64597 - DNA, 10 bp, Unknown
  misc_feature (1)..( 10): Matrix.003 file - promoters50/1010425
aatgaaaaac

SEQ ID NO: 64598 - DNA, 10 bp, Unknown
  misc_feature (1)..( 10): Matrix.003 file - promoters50/1010425
taaaattaga

SEQ ID NO: 64599 - DNA, 9 bp, Unknown
  misc_feature (1)..( 9): Matrix.003 file - promoters50/1010429
ttcattaat

SEQ ID NO: 64600 - DNA, 6 bp, Unknown
  misc_feature (1)..( 6): Matrix.003 file - promoters50/1010429
aaaaaa

SEQ ID NO: 64601 - DNA, 10 bp, Unknown
  misc_feature (1)..( 10): Matrix.003 file - promoters50/1010429
ttatataaat

SEQ ID NO: 64602 - DNA, 11 bp, Unknown
  misc_feature (1)..( 11): Matrix.003 file - promoters50/1010431
tattaaactta

SEQ ID NO: 64603 - DNA, 11 bp, Unknown
  misc_feature (1)..( 11): Matrix.003 file - promoters50/1010491
taataaagaaa

SEQ ID NO: 64604 - DNA, 9 bp, Unknown
  misc_feature (1)..( 9): Matrix.003 file - promoters50/1010491
catgctttt

SEQ ID NO: 64605 - DNA, 9 bp, Unknown
  misc_feature (1)..( 9): Matrix.003 file - promoters50/1010524
acaaacgtt

SEQ ID NO: 64606 - DNA, 8 bp, Unknown
  misc_feature (1)..( 8): Matrix.003 file - promoters50/1010524
gaacaaat

SEQ ID NO: 64607 - DNA, 10 bp, Unknown
  misc_feature (1)..( 10): Matrix.003 file - promoters50/1010524
tattttgaaa

SEQ ID NO: 64608 - DNA, 7 bp, Unknown
  misc_feature (1)..( 7): Matrix.003 file - promoters50/1010524
atatttt

SEQ ID NO: 64609 - DNA, 7 bp, Unknown
  misc_feature (1)..( 7): Matrix.003 file - promoters50/1010524
aaaattt

SEQ ID NO: 64610 - DNA, 7 bp, Unknown
  misc_feature (1)..( 7): Matrix.003 file - promoters50/1010524
tacttgt

SEQ ID NO: 64611 - DNA, 11 bp, Unknown
  misc_feature (1)..( 11): Matrix.003 file - promoters50/1010524
aaatttatcat

SEQ ID NO: 64612 - DNA, 9 bp, Unknown
  misc_feature (1)..( 9): Matrix.003 file - promoters50/1010536
tcaaataga

SEQ ID NO: 64613 - DNA, 10 bp, Unknown
  misc_feature (1)..( 10): Matrix.003 file - promoters50/1010562
catattttta

SEQ ID NO: 64614 - DNA, 11 bp, Unknown
  misc_feature (1)..( 11): Matrix.003 file - promoters50/1010562
actaaagaaaa

SEQ ID NO: 64615 - DNA, 32 bp, Unknown
  misc_feature (1)..( 32): Matrix.003 file - promoters50/1010571
ccttgctttttgtaccaaataataaagaaaat

SEQ ID NO: 64616 - DNA, 10 bp, Unknown
  misc_feature (1)..( 10): Matrix.003 file - promoters50/1010594
aaattgaaac

SEQ ID NO: 64617 - DNA, 9 bp, Unknown
  misc_feature (1)..( 9): Matrix.003 file - promoters50/1010625
tttattttc

SEQ ID NO: 64618 - DNA, 12 bp, Unknown
  misc_feature (1)..( 12): Matrix.003 file - promoters50/1010625
aaaatataaatc

SEQ ID NO: 64619 - DNA, 7 bp, Unknown
  misc_feature (1)..( 7): Matrix.003 file - promoters50/1010625
cataaaa

SEQ ID NO: 64620 - DNA, 9 bp, Unknown
  misc_feature (1)..( 9): Matrix.003 file - promoters50/1010625
ataaacttt

SEQ ID NO: 64621 - DNA, 8 bp, Unknown
  misc_feature (1)..( 8): Matrix.003 file - promoters50/1010625
catgaaat

SEQ ID NO: 64622 - DNA, 11 bp, Unknown
  misc_feature (1)..( 11): Matrix.003 file - promoters50/1010677
ttttcttttat

SEQ ID NO: 64623 - DNA, 11 bp, Unknown
  misc_feature (1)..( 11): Matrix.003 file - promoters50/1010693
ttttaattaat

SEQ ID NO: 64624 - DNA, 13 bp, Unknown
  misc_feature (1)..( 13): Matrix.003 file - promoters50/1010693
gcttttaatttta

SEQ ID NO: 64625 - DNA, 10 bp, Unknown
  misc_feature (1)..( 10): Matrix.003 file - promoters50/1010693
aaaactaaaa

SEQ ID NO: 64626 - DNA, 9 bp, Unknown
  misc_feature (1)..( 9): Matrix.003 file - promoters50/1010710
aattatttt

SEQ ID NO: 64627 - DNA, 11 bp, Unknown
  misc_feature (1)..( 11): Matrix.003 file - promoters50/1010747
ctttggaataa

SEQ ID NO: 64628 - DNA, 9 bp, Unknown
  misc_feature (1)..( 9): Matrix.003 file - promoters50/1010747
gataattta

SEQ ID NO: 64629 - DNA, 14 bp, Unknown
  misc_feature (1)..( 14): Matrix.003 file - promoters50/1010747
aaataactacaaat

SEQ ID NO: 64630 - DNA, 10 bp, Unknown
  misc_feature (1)..( 10): Matrix.003 file - promoters50/1010747
aaaatttatt

SEQ ID NO: 64631 - DNA, 10 bp, Unknown
  misc_feature (1)..( 10): Matrix.003 file - promoters50/1010747
caaaatttat

SEQ ID NO: 64632 - DNA, 9 bp, Unknown
  misc_feature (1)..( 9): Matrix.003 file - promoters50/1010747
tatttagaa

SEQ ID NO: 64633 - DNA, 11 bp, Unknown
  misc_feature (1)..( 11): Matrix.003 file - promoters50/1010770
aaataaattga

SEQ ID NO: 64634 - DNA, 13 bp, Unknown
  misc_feature (1)..( 13): Matrix.003 file - promoters50/1010770
atttgtttaactt

SEQ ID NO: 64635 - DNA, 11 bp, Unknown
  misc_feature (1)..( 11): Matrix.003 file - promoters50/1010815
ccatataaaaa

SEQ ID NO: 64636 - DNA, 12 bp, Unknown
  misc_feature (1)..( 12): Matrix.003 file - promoters50/1010819
ttctaaaagaat

SEQ ID NO: 64637 - DNA, 13 bp, Unknown
  misc_feature (1)..( 13): Matrix.003 file - promoters50/1010836
aaaataaatagaa

SEQ ID NO: 64638 - DNA, 9 bp, Unknown
  misc_feature (1)..( 9): Matrix.003 file - promoters50/1010836
cgaaaaata

SEQ ID NO: 64639 - DNA, 8 bp, Unknown
  misc_feature (1)..( 8): Matrix.003 file - promoters50/1010902
aatgaatt

SEQ ID NO: 64640 - DNA, 8 bp, Unknown
  misc_feature (1)..( 8): Matrix.003 file - promoters50/1010902
atgaaaaa

SEQ ID NO: 64641 - DNA, 8 bp, Unknown
  misc_feature (1)..( 8): Matrix.003 file - promoters50/1010902
taaacaca

SEQ ID NO: 64642 - DNA, 8 bp, Unknown
  misc_feature (1)..( 8): Matrix.003 file - promoters50/1010971
tattatta

SEQ ID NO: 64643 - DNA, 8 bp, Unknown
  misc_feature (1)..( 8): Matrix.003 file - promoters50/1010971
ttttcatt

SEQ ID NO: 64644 - DNA, 9 bp, Unknown
  misc_feature (1)..( 9): Matrix.003 file - promoters50/1010971
aattaaatc

SEQ ID NO: 64645 - DNA, 8 bp, Unknown
  misc_feature (1)..( 8): Matrix.003 file - promoters50/1010971
cctccttg

SEQ ID NO: 64646 - DNA, 12 bp, Unknown
  misc_feature (1)..( 12): Matrix.003 file - promoters50/1010971
aatcatttgaac

SEQ ID NO: 64647 - DNA, 8 bp, Unknown
  misc_feature (1)..( 8): Matrix.003 file - promoters50/1010971
atttgttt

SEQ ID NO: 64648 - DNA, 8 bp, Unknown
  misc_feature (1)..( 8): Matrix.003 file - promoters50/1010971
tctccttt

SEQ ID NO: 64649 - DNA, 13 bp, Unknown
  misc_feature (1)..( 13): Matrix.003 file - promoters50/1010971
atcaaaacctcct

SEQ ID NO: 64650 - DNA, 12 bp, Unknown
  misc_feature (1)..( 12): Matrix.003 file - promoters50/1010993
tacatacacaaa

SEQ ID NO: 64651 - DNA, 9 bp, Unknown
  misc_feature (1)..( 9): Matrix.003 file - promoters50/1010993
tattaaaaa

SEQ ID NO: 64652 - DNA, 10 bp, Unknown
  misc_feature (1)..( 10): Matrix.003 file - promoters50/1010993
tatagaattt

SEQ ID NO: 64653 - DNA, 11 bp, Unknown
  misc_feature (1)..( 11): Matrix.003 file - promoters50/1010993
aatgacaaaat

SEQ ID NO: 64654 - DNA, 9 bp, Unknown
  misc_feature (1)..( 9): Matrix.003 file - promoters50/1011036
aatttgttt

SEQ ID NO: 64655 - DNA, 9 bp, Unknown
  misc_feature (1)..( 9): Matrix.003 file - promoters50/1011036
taatttgtt

SEQ ID NO: 64656 - DNA, 7 bp, Unknown
  misc_feature (1)..( 7): Matrix.003 file - promoters50/1011036
agaaaaa

SEQ ID NO: 64657 - DNA, 8 bp, Unknown
  misc_feature (1)..( 8): Matrix.003 file - promoters50/1011036
attttttt

SEQ ID NO: 64658 - DNA, 8 bp, Unknown
  misc_feature (1)..( 8): Matrix.003 file - promoters50/1011041
ttgaagaa

SEQ ID NO: 64659 - DNA, 15 bp, Unknown
  misc_feature (1)..( 15): Matrix.003 file - promoters50/1011041
ataagaaaaatttaa

SEQ ID NO: 64660 - DNA, 9 bp, Unknown
  misc_feature (1)..( 9): Matrix.003 file - promoters50/1011085
tgaaagaat

SEQ ID NO: 64661 - DNA, 8 bp, Unknown
  misc_feature (1)..( 8): Matrix.003 file - promoters50/1011085
gatgtatt

SEQ ID NO: 64662 - DNA, 8 bp, Unknown
  misc_feature (1)..( 8): Matrix.003 file - promoters50/1011108
tatttttt

SEQ ID NO: 64663 - DNA, 9 bp, Unknown
  misc_feature (1)..( 9): Matrix.003 file - promoters50/1011108
ttttgattc

SEQ ID NO: 64664 - DNA, 12 bp, Unknown
  misc_feature (1)..( 12): Matrix.003 file - promoters50/1011212
acatttatttta

SEQ ID NO: 64665 - DNA, 7 bp, Unknown
  misc_feature (1)..( 7): Matrix.003 file - promoters50/1011212
taatttt

SEQ ID NO: 64666 - DNA, 9 bp, Unknown
  misc_feature (1)..( 9): Matrix.003 file - promoters50/1011250
cataaacca

SEQ ID NO: 64667 - DNA, 9 bp, Unknown
  misc_feature (1)..( 9): Matrix.003 file - promoters50/1011250
attaaccaa

SEQ ID NO: 64668 - DNA, 11 bp, Unknown
  misc_feature (1)..( 11): Matrix.003 file - promoters50/1011250
ttactaaaaat

SEQ ID NO: 64669 - DNA, 7 bp, Unknown
  misc_feature (1)..( 7): Matrix.003 file - promoters50/1011250
tttgatt

SEQ ID NO: 64670 - DNA, 5 bp, Unknown
  misc_feature (1)..( 5): Matrix.003 file - promoters50/1011250
attaa

SEQ ID NO: 64671 - DNA, 7 bp, Unknown
  misc_feature (1)..( 7): Matrix.003 file - promoters50/1011250
taattaa

SEQ ID NO: 64672 - DNA, 11 bp, Unknown
  misc_feature (1)..( 11): Matrix.003 file - promoters50/1011258
cagaaaacaaa

SEQ ID NO: 64673 - DNA, 11 bp, Unknown
  misc_feature (1)..( 11): Matrix.003 file - promoters50/1011258
ccttccttctt

SEQ ID NO: 64674 - DNA, 9 bp, Unknown
  misc_feature (1)..( 9): Matrix.003 file - promoters50/1011303
tcaaaaact

SEQ ID NO: 64675 - DNA, 8 bp, Unknown
  misc_feature (1)..( 8): Matrix.003 file - promoters50/1011337
gtctaatt

SEQ ID NO: 64676 - DNA, 11 bp, Unknown
  misc_feature (1)..( 11): Matrix.003 file - promoters50/1011358
cgatacttgtc

SEQ ID NO: 64677 - DNA, 10 bp, Unknown
  misc_feature (1)..( 10): Matrix.003 file - promoters50/1011358
aagaactcat

SEQ ID NO: 64678 - DNA, 12 bp, Unknown
  misc_feature (1)..( 12): Matrix.003 file - promoters50/1011358
ttaaatgaagat

SEQ ID NO: 64679 - DNA, 10 bp, Unknown
  misc_feature (1)..( 10): Matrix.003 file - promoters50/1011358
tgtggtccat

SEQ ID NO: 64680 - DNA, 9 bp, Unknown
  misc_feature (1)..( 9): Matrix.003 file - promoters50/1011358
aaagaaaaa

SEQ ID NO: 64681 - DNA, 8 bp, Unknown
  misc_feature (1)..( 8): Matrix.003 file - promoters50/1011485
tcaaatca

SEQ ID NO: 64682 - DNA, 8 bp, Unknown
  misc_feature (1)..( 8): Matrix.003 file - promoters50/1011512
gaaaaaaa

SEQ ID NO: 64683 - DNA, 10 bp, Unknown
  misc_feature (1)..( 10): Matrix.003 file - promoters50/1011512
acaaataaac

SEQ ID NO: 64684 - DNA, 7 bp, Unknown
  misc_feature (1)..( 7): Matrix.003 file - promoters50/1011512
gaaaaaa

SEQ ID NO: 64685 - DNA, 8 bp, Unknown
  misc_feature (1)..( 8): Matrix.003 file - promoters50/1011516
caatgaga

SEQ ID NO: 64686 - DNA, 10 bp, Unknown
  misc_feature (1)..( 10): Matrix.003 file - promoters50/1011516
ctatattaat

SEQ ID NO: 64687 - DNA, 12 bp, Unknown
  misc_feature (1)..( 12): Matrix.003 file - promoters50/1011556
gtttaattcgta

SEQ ID NO: 64688 - DNA, 10 bp, Unknown
  misc_feature (1)..( 10): Matrix.003 file - promoters50/1011560
acttgcctct

SEQ ID NO: 64689 - DNA, 10 bp, Unknown
  misc_feature (1)..( 10): Matrix.003 file - promoters50/1011585
aaatcaaacc

SEQ ID NO: 64690 - DNA, 7 bp, Unknown
  misc_feature (1)..( 7): Matrix.003 file - promoters50/1011707
tttcttc

SEQ ID NO: 64691 - DNA, 6 bp, Unknown
  misc_feature (1)..( 6): Matrix.003 file - promoters50/1011707
agtgtg

SEQ ID NO: 64692 - DNA, 8 bp, Unknown
  misc_feature (1)..( 8): Matrix.003 file - promoters50/1011780
aattgttt

SEQ ID NO: 64693 - DNA, 14 bp, Unknown
  misc_feature (1)..( 14): Matrix.003 file - promoters50/1011780
taattttgctaatg

SEQ ID NO: 64694 - DNA, 10 bp, Unknown
  misc_feature (1)..( 10): Matrix.003 file - promoters50/1011780
ttacaaaaat

SEQ ID NO: 64695 - DNA, 8 bp, Unknown
  misc_feature (1)..( 8): Matrix.003 file - promoters50/1011862
ctaaaaac

SEQ ID NO: 64696 - DNA, 10 bp, Unknown
  misc_feature (1)..( 10): Matrix.003 file - promoters50/1011862
cagtttcatt

SEQ ID NO: 64697 - DNA, 10 bp, Unknown
  misc_feature (1)..( 10): Matrix.003 file - promoters50/1011862
caattttgtt

SEQ ID NO: 64698 - DNA, 9 bp, Unknown
  misc_feature (1)..( 9): Matrix.003 file - promoters50/1011862
gagaaaaga

SEQ ID NO: 64699 - DNA, 10 bp, Unknown
  misc_feature (1)..( 10): Matrix.003 file - promoters50/1011862
tttcgtttat

SEQ ID NO: 64700 - DNA, 9 bp, Unknown
  misc_feature (1)..( 9): Matrix.003 file - promoters50/1011900
cccatatcc

SEQ ID NO: 64701 - DNA, 9 bp, Unknown
  misc_feature (1)..( 9): Matrix.003 file - promoters50/1011923
ttaacttca

SEQ ID NO: 64702 - DNA, 11 bp, Unknown
  misc_feature (1)..( 11): Matrix.003 file - promoters50/1011923
tcatttaattt

SEQ ID NO: 64703 - DNA, 12 bp, Unknown
  misc_feature (1)..( 12): Matrix.003 file - promoters50/1011972
agtttttgatat

SEQ ID NO: 64704 - DNA, 11 bp, Unknown
  misc_feature (1)..( 11): Matrix.003 file - promoters50/1011972
aaaaatatatt

SEQ ID NO: 64705 - DNA, 13 bp, Unknown
  misc_feature (1)..( 13): Matrix.003 file - promoters50/1011972
atactaatcaaat

SEQ ID NO: 64706 - DNA, 9 bp, Unknown
  misc_feature (1)..( 9): Matrix.003 file - promoters50/1011972
tctactata

SEQ ID NO: 64707 - DNA, 10 bp, Unknown
  misc_feature (1)..( 10): Matrix.003 file - promoters50/1011972
tatatataaa

SEQ ID NO: 64708 - DNA, 14 bp, Unknown
  misc_feature (1)..( 14): Matrix.003 file - promoters50/1012052
aaaaaattagattt

SEQ ID NO: 64709 - DNA, 7 bp, Unknown
  misc_feature (1)..( 7): Matrix.003 file - promoters50/1012060
cttcttt

SEQ ID NO: 64710 - DNA, 8 bp, Unknown
  misc_feature (1)..( 8): Matrix.003 file - promoters50/1012060
tttgattt

SEQ ID NO: 64711 - DNA, 10 bp, Unknown
  misc_feature (1)..( 10): Matrix.003 file - promoters50/1012060
gacaagtttc

SEQ ID NO: 64712 - DNA, 11 bp, Unknown
  misc_feature (1)..( 11): Matrix.003 file - promoters50/1012074
atttaataaca

SEQ ID NO: 64713 - DNA, 12 bp, Unknown
  misc_feature (1)..( 12): Matrix.003 file - promoters50/1012078
gttataattttt

SEQ ID NO: 64714 - DNA, 11 bp, Unknown
  misc_feature (1)..( 11): Matrix.003 file - promoters50/1012078
tcttgttatat

SEQ ID NO: 64715 - DNA, 9 bp, Unknown
  misc_feature (1)..( 9): Matrix.003 file - promoters50/1012088
atgatttat

SEQ ID NO: 64716 - DNA, 14 bp, Unknown
  misc_feature (1)..( 14): Matrix.003 file - promoters50/1012088
ttgtttctatgaag

SEQ ID NO: 64717 - DNA, 9 bp, Unknown
  misc_feature (1)..( 9): Matrix.003 file - promoters50/1012088
aaaatatat

SEQ ID NO: 64718 - DNA, 12 bp, Unknown
  misc_feature (1)..( 12): Matrix.003 file - promoters50/1012088
ccaacaaaaatc

SEQ ID NO: 64719 - DNA, 10 bp, Unknown
  misc_feature (1)..( 10): Matrix.003 file - promoters50/1012088
aaaatatata

SEQ ID NO: 64720 - DNA, 12 bp, Unknown
  misc_feature (1)..( 12): Matrix.003 file - promoters50/1012088
tatttaaaaaaa

SEQ ID NO: 64721 - DNA, 10 bp, Unknown
  misc_feature (1)..( 10): Matrix.003 file - promoters50/1012088
atttgtatta

SEQ ID NO: 64722 - DNA, 11 bp, Unknown
  misc_feature (1)..( 11): Matrix.003 file - promoters50/1012110
acataattaag

SEQ ID NO: 64723 - DNA, 9 bp, Unknown
  misc_feature (1)..( 9): Matrix.003 file - promoters50/1012110
taaataaaa

SEQ ID NO: 64724 - DNA, 8 bp, Unknown
  misc_feature (1)..( 8): Matrix.003 file - promoters50/1012118
aattattt

SEQ ID NO: 64725 - DNA, 11 bp, Unknown
  misc_feature (1)..( 11): Matrix.003 file - promoters50/1012118
tgaaaaataat

SEQ ID NO: 64726 - DNA, 8 bp, Unknown
  misc_feature (1)..( 8): Matrix.003 file - promoters50/1012118
gatattcg

SEQ ID NO: 64727 - DNA, 14 bp, Unknown
  misc_feature (1)..( 14): Matrix.003 file - promoters50/1012128
gttcaaaacccaca

SEQ ID NO: 64728 - DNA, 9 bp, Unknown
  misc_feature (1)..( 9): Matrix.003 file - promoters50/1012128
aagaagaat

SEQ ID NO: 64729 - DNA, 14 bp, Unknown
  misc_feature (1)..( 14): Matrix.003 file - promoters50/1012128
aagcccatttaatt

SEQ ID NO: 64730 - DNA, 12 bp, Unknown
  misc_feature (1)..( 12): Matrix.003 file - promoters50/1012128
gaatataaaaaa

SEQ ID NO: 64731 - DNA, 9 bp, Unknown
  misc_feature (1)..( 9): Matrix.003 file - promoters50/1012132
gaaacttag

SEQ ID NO: 64732 - DNA, 9 bp, Unknown
  misc_feature (1)..( 9): Matrix.003 file - promoters50/1012132
tttcaaatg

SEQ ID NO: 64733 - DNA, 11 bp, Unknown
  misc_feature (1)..( 11): Matrix.003 file - promoters50/1012132
ttaaaataaac

SEQ ID NO: 64734 - DNA, 12 bp, Unknown
  misc_feature (1)..( 12): Matrix.003 file - promoters50/1012132
aaaaataaattt

SEQ ID NO: 64735 - DNA, 11 bp, Unknown
  misc_feature (1)..( 11): Matrix.003 file - promoters50/1012132
ttaattttcga

SEQ ID NO: 64736 - DNA, 10 bp, Unknown
  misc_feature (1)..( 10): Matrix.003 file - promoters50/1012132
aaaaaatcta

SEQ ID NO: 64737 - DNA, 8 bp, Unknown
  misc_feature (1)..( 8): Matrix.003 file - promoters50/1012132
ttcttcat

SEQ ID NO: 64738 - DNA, 12 bp, Unknown
  misc_feature (1)..( 12): Matrix.003 file - promoters50/1012132
aaaaataaattt

SEQ ID NO: 64739 - DNA, 8 bp, Unknown
  misc_feature (1)..( 8): Matrix.003 file - promoters50/1012132
tttatata

SEQ ID NO: 64740 - DNA, 12 bp, Unknown
  misc_feature (1)..( 12): Matrix.003 file - promoters50/1012132
taaattttatat

SEQ ID NO: 64741 - DNA, 11 bp, Unknown
  misc_feature (1)..( 11): Matrix.003 file - promoters50/1012132
ataaataataa

SEQ ID NO: 64742 - DNA, 8 bp, Unknown
  misc_feature (1)..( 8): Matrix.003 file - promoters50/1012194
taaaaaat

SEQ ID NO: 64743 - DNA, 10 bp, Unknown
  misc_feature (1)..( 10): Matrix.003 file - promoters50/1012194
atatttaact

SEQ ID NO: 64744 - DNA, 9 bp, Unknown
  misc_feature (1)..( 9): Matrix.003 file - promoters50/1012194
ttacttatg

SEQ ID NO: 64745 - DNA, 9 bp, Unknown
  misc_feature (1)..( 9): Matrix.003 file - promoters50/1012205
attataaaa

SEQ ID NO: 64746 - DNA, 9 bp, Unknown
  misc_feature (1)..( 9): Matrix.003 file - promoters50/1012205
atgacaaaa

SEQ ID NO: 64747 - DNA, 8 bp, Unknown
  misc_feature (1)..( 8): Matrix.003 file - promoters50/1012205
gttttatt

SEQ ID NO: 64748 - DNA, 7 bp, Unknown
  misc_feature (1)..( 7): Matrix.003 file - promoters50/1012205
taataaa

SEQ ID NO: 64749 - DNA, 9 bp, Unknown
  misc_feature (1)..( 9): Matrix.003 file - promoters50/1012205
ttaccgtag

SEQ ID NO: 64750 - DNA, 9 bp, Unknown
  misc_feature (1)..( 9): Matrix.003 file - promoters50/1012205
agtttatat

SEQ ID NO: 64751 - DNA, 8 bp, Unknown
  misc_feature (1)..( 8): Matrix.003 file - promoters50/1012205
aaatttga

SEQ ID NO: 64752 - DNA, 9 bp, Unknown
  misc_feature (1)..( 9): Matrix.003 file - promoters50/1012205
aaattttat

SEQ ID NO: 64753 - DNA, 8 bp, Unknown
  misc_feature (1)..( 8): Matrix.003 file - promoters50/1012205
aaaactaa

SEQ ID NO: 64754 - DNA, 7 bp, Unknown
  misc_feature (1)..( 7): Matrix.003 file - promoters50/1012219
aaacaaa

SEQ ID NO: 64755 - DNA, 8 bp, Unknown
  misc_feature (1)..( 8): Matrix.003 file - promoters50/1012219
aaatttat

SEQ ID NO: 64756 - DNA, 8 bp, Unknown
  misc_feature (1)..( 8): Matrix.003 file - promoters50/1012219
catgtatt

SEQ ID NO: 64757 - DNA, 11 bp, Unknown
  misc_feature (1)..( 11): Matrix.003 file - promoters50/1012219
agatttggatt

SEQ ID NO: 64758 - DNA, 11 bp, Unknown
  misc_feature (1)..( 11): Matrix.003 file - promoters50/1012219
ataaaatttta

SEQ ID NO: 64759 - DNA, 8 bp, Unknown
  misc_feature (1)..( 8): Matrix.003 file - promoters50/1012219
aaattata

SEQ ID NO: 64760 - DNA, 7 bp, Unknown
  misc_feature (1)..( 7): Matrix.003 file - promoters50/1012245
ttttggt

SEQ ID NO: 64761 - DNA, 10 bp, Unknown
  misc_feature (1)..( 10): Matrix.003 file - promoters50/1012311
cttgtcagat

SEQ ID NO: 64762 - DNA, 9 bp, Unknown
  misc_feature (1)..( 9): Matrix.003 file - promoters50/1012311
atgtctcag

SEQ ID NO: 64763 - DNA, 38 bp, Unknown
  misc_feature (1)..( 38): Matrix.003 file - promoters50/1012311
attcatacccacatgatcatgtcttctcaccacaagtt

SEQ ID NO: 64764 - DNA, 38 bp, Unknown
  misc_feature (1)..( 38): Matrix.003 file - promoters50/1012311
attcatacccacatgatcatgtcttctcacaacacaac

SEQ ID NO: 64765 - DNA, 17 bp, Unknown
  misc_feature (1)..( 17): Matrix.003 file - promoters50/1012311
tatagtccacaagttga

SEQ ID NO: 64766 - DNA, 15 bp, Unknown
  misc_feature (1)..( 15): Matrix.003 file - promoters50/1012311
gacataattgattac

SEQ ID NO: 64767 - DNA, 15 bp, Unknown
  misc_feature (1)..( 15): Matrix.003 file - promoters50/1012311
aacttgggaccctta

SEQ ID NO: 64768 - DNA, 34 bp, Unknown
  misc_feature (1)..( 34): Matrix.003 file - promoters50/1012311
aacctaatagtttctccttctatataatgaaaca

SEQ ID NO: 64769 - DNA, 13 bp, Unknown
  misc_feature (1)..( 13): Matrix.003 file - promoters50/1012311
catcaacagcctc

SEQ ID NO: 64770 - DNA, 16 bp, Unknown
  misc_feature (1)..( 16): Matrix.003 file - promoters50/1012311
attcttcaataatgtc

SEQ ID NO: 64771 - DNA, 27 bp, Unknown
  misc_feature (1)..( 27): Matrix.003 file - promoters50/1012311
tcttgtcatataaacgtccatatagga

SEQ ID NO: 64772 - DNA, 10 bp, Unknown
  misc_feature (1)..( 10): Matrix.003 file - promoters50/1012311
atatatgttt

SEQ ID NO: 64773 - DNA, 8 bp, Unknown
  misc_feature (1)..( 8): Matrix.003 file - promoters50/1012311
ataagttg

SEQ ID NO: 64774 - DNA, 10 bp, Unknown
  misc_feature (1)..( 10): Matrix.003 file - promoters50/1012349
caactataaa

SEQ ID NO: 64775 - DNA, 12 bp, Unknown
  misc_feature (1)..( 12): Matrix.003 file - promoters50/1012349
aaacgtttgtta

SEQ ID NO: 64776 - DNA, 12 bp, Unknown
  misc_feature (1)..( 12): Matrix.003 file - promoters50/1012388
taaaagtttaaa

SEQ ID NO: 64777 - DNA, 12 bp, Unknown
  misc_feature (1)..( 12): Matrix.003 file - promoters50/1012397
ttaatttattta

SEQ ID NO: 64778 - DNA, 8 bp, Unknown
  misc_feature (1)..( 8): Matrix.003 file - promoters50/1012397
aatttatt

SEQ ID NO: 64779 - DNA, 15 bp, Unknown
  misc_feature (1)..( 15): Matrix.003 file - promoters50/1012397
aatttcttttctatt

SEQ ID NO: 64780 - DNA, 8 bp, Unknown
  misc_feature (1)..( 8): Matrix.003 file - promoters50/1012397
aaaacaaa

SEQ ID NO: 64781 - DNA, 8 bp, Unknown
  misc_feature (1)..( 8): Matrix.003 file - promoters50/1012397
aattaaac

SEQ ID NO: 64782 - DNA, 7 bp, Unknown
  misc_feature (1)..( 7): Matrix.003 file - promoters50/1012403
atgtttc

SEQ ID NO: 64783 - DNA, 11 bp, Unknown
  misc_feature (1)..( 11): Matrix.003 file - promoters50/1012403
cttttgttaaa

SEQ ID NO: 64784 - DNA, 10 bp, Unknown
  misc_feature (1)..( 10): Matrix.003 file - promoters50/1012403
tgtaagaaaa

SEQ ID NO: 64785 - DNA, 8 bp, Unknown
  misc_feature (1)..( 8): Matrix.003 file - promoters50/1012403
ttttatta

SEQ ID NO: 64786 - DNA, 11 bp, Unknown
  misc_feature (1)..( 11): Matrix.003 file - promoters50/1012403
tttagaaaata

SEQ ID NO: 64787 - DNA, 11 bp, Unknown
  misc_feature (1)..( 11): Matrix.003 file - promoters50/1012403
attttttgaat

SEQ ID NO: 64788 - DNA, 12 bp, Unknown
  misc_feature (1)..( 12): Matrix.003 file - promoters50/1012403
tttgaaatcaaa

SEQ ID NO: 64789 - DNA, 16 bp, Unknown
  misc_feature (1)..( 16): Matrix.003 file - promoters50/1012407
taattttaataataaa

SEQ ID NO: 64790 - DNA, 14 bp, Unknown
  misc_feature (1)..( 14): Matrix.003 file - promoters50/1012442
ataagatttacaaa

SEQ ID NO: 64791 - DNA, 8 bp, Unknown
  misc_feature (1)..( 8): Matrix.003 file - promoters50/1012442
aagaaatt

SEQ ID NO: 64792 - DNA, 7 bp, Unknown
  misc_feature (1)..( 7): Matrix.003 file - promoters50/1012442
agatata

SEQ ID NO: 64793 - DNA, 6 bp, Unknown
  misc_feature (1)..( 6): Matrix.003 file - promoters50/1012442
aaataa

SEQ ID NO: 64794 - DNA, 7 bp, Unknown
  misc_feature (1)..( 7): Matrix.003 file - promoters50/1012442
tttttaa

SEQ ID NO: 64795 - DNA, 12 bp, Unknown
  misc_feature (1)..( 12): Matrix.003 file - promoters50/1012442
aaaaacaaaaca

SEQ ID NO: 64796 - DNA, 5 bp, Unknown
  misc_feature (1)..( 5): Matrix.003 file - promoters50/1012561
gaaat

SEQ ID NO: 64797 - DNA, 11 bp, Unknown
  misc_feature (1)..( 11): Matrix.003 file - promoters50/1012561
aatttttgtgt

SEQ ID NO: 64798 - DNA, 9 bp, Unknown
  misc_feature (1)..( 9): Matrix.003 file - promoters50/1012561
atcattttt

SEQ ID NO: 64799 - DNA, 10 bp, Unknown
  misc_feature (1)..( 10): Matrix.003 file - promoters50/1012561
tttctttttt

SEQ ID NO: 64800 - DNA, 10 bp, Unknown
  misc_feature (1)..( 10): Matrix.003 file - promoters50/1012561
aaaaaattat

SEQ ID NO: 64801 - DNA, 9 bp, Unknown
  misc_feature (1)..( 9): Matrix.003 file - promoters50/1012568
attcttctt

SEQ ID NO: 64802 - DNA, 9 bp, Unknown
  misc_feature (1)..( 9): Matrix.003 file - promoters50/1012568
tttaatttt

SEQ ID NO: 64803 - DNA, 6 bp, Unknown
  misc_feature (1)..( 6): Matrix.003 file - promoters50/1012568
ttttta

SEQ ID NO: 64804 - DNA, 7 bp, Unknown
  misc_feature (1)..( 7): Matrix.003 file - promoters50/1012568
tttagta

SEQ ID NO: 64805 - DNA, 6 bp, Unknown
  misc_feature (1)..( 6): Matrix.003 file - promoters50/1012580
cttata

SEQ ID NO: 64806 - DNA, 11 bp, Unknown
  misc_feature (1)..( 11): Matrix.003 file - promoters50/1012620
ataatttgagt

SEQ ID NO: 64807 - DNA, 10 bp, Unknown
  misc_feature (1)..( 10): Matrix.003 file - promoters50/1012620
aatttataaa

SEQ ID NO: 64808 - DNA, 10 bp, Unknown
  misc_feature (1)..( 10): Matrix.003 file - promoters50/1012620
agaaaaaaga

SEQ ID NO: 64809 - DNA, 9 bp, Unknown
  misc_feature (1)..( 9): Matrix.003 file - promoters50/1012620
acttataaa

SEQ ID NO: 64810 - DNA, 8 bp, Unknown
  misc_feature (1)..( 8): Matrix.003 file - promoters50/1012620
aggaggaa

SEQ ID NO: 64811 - DNA, 9 bp, Unknown
  misc_feature (1)..( 9): Matrix.003 file - promoters50/1012620
taatgaaat

SEQ ID NO: 64812 - DNA, 8 bp, Unknown
  misc_feature (1)..( 8): Matrix.003 file - promoters50/1012620
gttacaac

SEQ ID NO: 64813 - DNA, 10 bp, Unknown
  misc_feature (1)..( 10): Matrix.003 file - promoters50/1012659
atgaaaaaat

SEQ ID NO: 64814 - DNA, 10 bp, Unknown
  misc_feature (1)..( 10): Matrix.003 file - promoters50/1012659
tcactttgaa

SEQ ID NO: 64815 - DNA, 10 bp, Unknown
  misc_feature (1)..( 10): Matrix.003 file - promoters50/1012659
tttctttatc

SEQ ID NO: 64816 - DNA, 11 bp, Unknown
  misc_feature (1)..( 11): Matrix.003 file - promoters50/1012720
aaatgttttga

SEQ ID NO: 64817 - DNA, 9 bp, Unknown
  misc_feature (1)..( 9): Matrix.003 file - promoters50/1012720
tgttaaaat

SEQ ID NO: 64818 - DNA, 6 bp, Unknown
  misc_feature (1)..( 6): Matrix.003 file - promoters50/1012720
atattg

SEQ ID NO: 64819 - DNA, 10 bp, Unknown
  misc_feature (1)..( 10): Matrix.003 file - promoters50/1012757
tataataata

SEQ ID NO: 64820 - DNA, 12 bp, Unknown
  misc_feature (1)..( 12): Matrix.003 file - promoters50/1012757
atatattaatgt

SEQ ID NO: 64821 - DNA, 9 bp, Unknown
  misc_feature (1)..( 9): Matrix.003 file - promoters50/1012761
taaaaaaaa

SEQ ID NO: 64822 - DNA, 7 bp, Unknown
  misc_feature (1)..( 7): Matrix.003 file - promoters50/1012761
aaataaa

SEQ ID NO: 64823 - DNA, 7 bp, Unknown
  misc_feature (1)..( 7): Matrix.003 file - promoters50/1012761
aaagaaa

SEQ ID NO: 64824 - DNA, 7 bp, Unknown
  misc_feature (1)..( 7): Matrix.003 file - promoters50/1012761
gatttga

SEQ ID NO: 64825 - DNA, 9 bp, Unknown
  misc_feature (1)..( 9): Matrix.003 file - promoters50/1012761
taaccaaga

SEQ ID NO: 64826 - DNA, 8 bp, Unknown
  misc_feature (1)..( 8): Matrix.003 file - promoters50/1012791
aaacaaaa

SEQ ID NO: 64827 - DNA, 8 bp, Unknown
  misc_feature (1)..( 8): Matrix.003 file - promoters50/1012791
aataaaca

SEQ ID NO: 64828 - DNA, 6 bp, Unknown
  misc_feature (1)..( 6): Matrix.003 file - promoters50/1012791
ttttta

SEQ ID NO: 64829 - DNA, 11 bp, Unknown
  misc_feature (1)..( 11): Matrix.003 file - promoters50/1012791
aaaaaacaaat

SEQ ID NO: 64830 - DNA, 9 bp, Unknown
  misc_feature (1)..( 9): Matrix.003 file - promoters50/1012791
ttctttttt

SEQ ID NO: 64831 - DNA, 9 bp, Unknown
  misc_feature (1)..( 9): Matrix.003 file - promoters50/1012791
ttttaaaaa

SEQ ID NO: 64832 - DNA, 9 bp, Unknown
  misc_feature (1)..( 9): Matrix.003 file - promoters50/1012791
tttattttc

SEQ ID NO: 64833 - DNA, 8 bp, Unknown
  misc_feature (1)..( 8): Matrix.003 file - promoters50/1012791
gaaaatga

SEQ ID NO: 64834 - DNA, 8 bp, Unknown
  misc_feature (1)..( 8): Matrix.003 file - promoters50/1012795
ttatgaaa

SEQ ID NO: 64835 - DNA, 8 bp, Unknown
  misc_feature (1)..( 8): Matrix.003 file - promoters50/1012795
tttggtta

SEQ ID NO: 64836 - DNA, 8 bp, Unknown
  misc_feature (1)..( 8): Matrix.003 file - promoters50/1012803
caagaaaa

SEQ ID NO: 64837 - DNA, 7 bp, Unknown
  misc_feature (1)..( 7): Matrix.003 file - promoters50/1012803
cataata

SEQ ID NO: 64838 - DNA, 7 bp, Unknown
  misc_feature (1)..( 7): Matrix.003 file - promoters50/1012803
aaataaa

SEQ ID NO: 64839 - DNA, 8 bp, Unknown
  misc_feature (1)..( 8): Matrix.003 file - promoters50/1012803
cacaaagt

SEQ ID NO: 64840 - DNA, 10 bp, Unknown
  misc_feature (1)..( 10): Matrix.003 file - promoters50/1012803
ggatattaaa

SEQ ID NO: 64841 - DNA, 8 bp, Unknown
  misc_feature (1)..( 8): Matrix.003 file - promoters50/1012811
tgttgatt

SEQ ID NO: 64842 - DNA, 7 bp, Unknown
  misc_feature (1)..( 7): Matrix.003 file - promoters50/1012811
aaattaa

SEQ ID NO: 64843 - DNA, 8 bp, Unknown
  misc_feature (1)..( 8): Matrix.003 file - promoters50/1012811
aattcaca

SEQ ID NO: 64844 - DNA, 8 bp, Unknown
  misc_feature (1)..( 8): Matrix.003 file - promoters50/1012811
taaaaaca

SEQ ID NO: 64845 - DNA, 9 bp, Unknown
  misc_feature (1)..( 9): Matrix.003 file - promoters50/1012811
aaaataaat

SEQ ID NO: 64846 - DNA, 9 bp, Unknown
  misc_feature (1)..( 9): Matrix.003 file - promoters50/1012811
gttttatta

SEQ ID NO: 64847 - DNA, 8 bp, Unknown
  misc_feature (1)..( 8): Matrix.003 file - promoters50/1012811
tgttttaa

SEQ ID NO: 64848 - DNA, 9 bp, Unknown
  misc_feature (1)..( 9): Matrix.003 file - promoters50/1012811
aatagtata

SEQ ID NO: 64849 - DNA, 7 bp, Unknown
  misc_feature (1)..( 7): Matrix.003 file - promoters50/1012811
aaaaaac

SEQ ID NO: 64850 - DNA, 7 bp, Unknown
  misc_feature (1)..( 7): Matrix.003 file - promoters50/1012811
atttaaa

SEQ ID NO: 64851 - DNA, 8 bp, Unknown
  misc_feature (1)..( 8): Matrix.003 file - promoters50/1012811
gtattaaa

SEQ ID NO: 64852 - DNA, 8 bp, Unknown
  misc_feature (1)..( 8): Matrix.003 file - promoters50/1012835
cttacaca

SEQ ID NO: 64853 - DNA, 10 bp, Unknown
  misc_feature (1)..( 10): Matrix.003 file - promoters50/1012883
ttacaaaaaa

SEQ ID NO: 64854 - DNA, 9 bp, Unknown
  misc_feature (1)..( 9): Matrix.003 file - promoters50/1012883
gaataaatt

SEQ ID NO: 64855 - DNA, 13 bp, Unknown
  misc_feature (1)..( 13): Matrix.003 file - promoters50/1012906
aaaaatatgtttg

SEQ ID NO: 64856 - DNA, 9 bp, Unknown
  misc_feature (1)..( 9): Matrix.003 file - promoters50/1012906
aaaaactta

SEQ ID NO: 64857 - DNA, 12 bp, Unknown
  misc_feature (1)..( 12): Matrix.003 file - promoters50/1012906
taatttatatat

SEQ ID NO: 64858 - DNA, 7 bp, Unknown
  misc_feature (1)..( 7): Matrix.003 file - promoters50/1012906
aaaatca

SEQ ID NO: 64859 - DNA, 22 bp, Unknown
  misc_feature (1)..( 22): Matrix.003 file - promoters50/1012906
tttgaaatattataataaatat

SEQ ID NO: 64860 - DNA, 21 bp, Unknown
  misc_feature (1)..( 21): Matrix.003 file - promoters50/1012906
gtcaatattataaataaattt

SEQ ID NO: 64861 - DNA, 11 bp, Unknown
  misc_feature (1)..( 11): Matrix.003 file - promoters50/1012906
aattgatataa

SEQ ID NO: 64862 - DNA, 14 bp, Unknown
  misc_feature (1)..( 14): Matrix.003 file - promoters50/1012906
gaagaattgatata

SEQ ID NO: 64863 - DNA, 13 bp, Unknown
  misc_feature (1)..( 13): Matrix.003 file - promoters50/1012906
ttttaaattcatt

SEQ ID NO: 64864 - DNA, 16 bp, Unknown
  misc_feature (1)..( 16): Matrix.003 file - promoters50/1012943
aaaaatgttcaaaatt

SEQ ID NO: 64865 - DNA, 7 bp, Unknown
  misc_feature (1)..( 7): Matrix.003 file - promoters50/1012947
acaaaag

SEQ ID NO: 64866 - DNA, 7 bp, Unknown
  misc_feature (1)..( 7): Matrix.003 file - promoters50/1012947
aactatt

SEQ ID NO: 64867 - DNA, 11 bp, Unknown
  misc_feature (1)..( 11): Matrix.003 file - promoters50/1012947
agttattaatc

SEQ ID NO: 64868 - DNA, 11 bp, Unknown
  misc_feature (1)..( 11): Matrix.003 file - promoters50/1012955
ttaattaagtt

SEQ ID NO: 64869 - DNA, 12 bp, Unknown
  misc_feature (1)..( 12): Matrix.003 file - promoters50/1012955
gatatcttataa

SEQ ID NO: 64870 - DNA, 10 bp, Unknown
  misc_feature (1)..( 10): Matrix.003 file - promoters50/1012964
taacaagaat

SEQ ID NO: 64871 - DNA, 9 bp, Unknown
  misc_feature (1)..( 9): Matrix.003 file - promoters50/1012964
tatctcaaa

SEQ ID NO: 64872 - DNA, 8 bp, Unknown
  misc_feature (1)..( 8): Matrix.003 file - promoters50/1012984
atttgtga

SEQ ID NO: 64873 - DNA, 8 bp, Unknown
  misc_feature (1)..( 8): Matrix.003 file - promoters50/1012984
atataaaa

SEQ ID NO: 64874 - DNA, 13 bp, Unknown
  misc_feature (1)..( 13): Matrix.003 file - promoters50/1012984
aattagtttatga

SEQ ID NO: 64875 - DNA, 8 bp, Unknown
  misc_feature (1)..( 8): Matrix.003 file - promoters50/1012988
caaatcga

SEQ ID NO: 64876 - DNA, 9 bp, Unknown
  misc_feature (1)..( 9): Matrix.003 file - promoters50/1012988
tttaaaccg

SEQ ID NO: 64877 - DNA, 9 bp, Unknown
  misc_feature (1)..( 9): Matrix.003 file - promoters50/1012988
attcatcag

SEQ ID NO: 64878 - DNA, 9 bp, Unknown
  misc_feature (1)..( 9): Matrix.003 file - promoters50/1012998
taaaagaag

SEQ ID NO: 64879 - DNA, 12 bp, Unknown
  misc_feature (1)..( 12): Matrix.003 file - promoters50/1012998
cactttctctct

SEQ ID NO: 64880 - DNA, 8 bp, Unknown
  misc_feature (1)..( 8): Matrix.003 file - promoters50/1012998
ttttaatt

SEQ ID NO: 64881 - DNA, 8 bp, Unknown
  misc_feature (1)..( 8): Matrix.003 file - promoters50/1012998
aaaaaaaa

SEQ ID NO: 64882 - DNA, 11 bp, Unknown
  misc_feature (1)..( 11): Matrix.003 file - promoters50/1012998
taaaagaagaa

SEQ ID NO: 64883 - DNA, 8 bp, Unknown
  misc_feature (1)..( 8): Matrix.003 file - promoters50/1012998
tataaata

SEQ ID NO: 64884 - DNA, 13 bp, Unknown
  misc_feature (1)..( 13): Matrix.003 file - promoters50/1013013
agtaattaatcac

SEQ ID NO: 64885 - DNA, 9 bp, Unknown
  misc_feature (1)..( 9): Matrix.003 file - promoters50/1013013
tttattaaa

SEQ ID NO: 64886 - DNA, 12 bp, Unknown
  misc_feature (1)..( 12): Matrix.003 file - promoters50/1013013
aaaagttcatct

SEQ ID NO: 64887 - DNA, 8 bp, Unknown
  misc_feature (1)..( 8): Matrix.003 file - promoters50/1013013
ctgttttt

SEQ ID NO: 64888 - DNA, 8 bp, Unknown
  misc_feature (1)..( 8): Matrix.003 file - promoters50/1013016
agaaatga

SEQ ID NO: 64889 - DNA, 10 bp, Unknown
  misc_feature (1)..( 10): Matrix.003 file - promoters50/1013016
gatcaattga

SEQ ID NO: 64890 - DNA, 13 bp, Unknown
  misc_feature (1)..( 13): Matrix.003 file - promoters50/1013016
aaagacattatat

SEQ ID NO: 64891 - DNA, 8 bp, Unknown
  misc_feature (1)..( 8): Matrix.003 file - promoters50/1013016
gaacagaa

SEQ ID NO: 64892 - DNA, 8 bp, Unknown
  misc_feature (1)..( 8): Matrix.003 file - promoters50/1013016
ttcaaata

SEQ ID NO: 64893 - DNA, 24 bp, Unknown
  misc_feature (1)..( 24): Matrix.003 file - promoters50/1013128
acgtttgataaaaatataaaaatc

SEQ ID NO: 64894 - DNA, 11 bp, Unknown
  misc_feature (1)..( 11): Matrix.003 file - promoters50/1013128
agaaaaaaaag

SEQ ID NO: 64895 - DNA, 11 bp, Unknown
  misc_feature (1)..( 11): Matrix.003 file - promoters50/1013131
taaaataatcc

SEQ ID NO: 64896 - DNA, 10 bp, Unknown
  misc_feature (1)..( 10): Matrix.003 file - promoters50/1013131
tttagattta

SEQ ID NO: 64897 - DNA, 4 bp, Unknown
  misc_feature (1)..( 4): Matrix.003 file - promoters50/1013131
aaat

SEQ ID NO: 64898 - DNA, 9 bp, Unknown
  misc_feature (1)..( 9): Matrix.003 file - promoters50/1013131
tgaataaaa

SEQ ID NO: 64899 - DNA, 12 bp, Unknown
  misc_feature (1)..( 12): Matrix.003 file - promoters50/1013208
cttcttttgtag

SEQ ID NO: 64900 - DNA, 10 bp, Unknown
  misc_feature (1)..( 10): Matrix.003 file - promoters50/1013208
gtttaataaa

SEQ ID NO: 64901 - DNA, 9 bp, Unknown
  misc_feature (1)..( 9): Matrix.003 file - promoters50/1013208
atttttttg

SEQ ID NO: 64902 - DNA, 11 bp, Unknown
  misc_feature (1)..( 11): Matrix.003 file - promoters50/1013208
aaaataattta

SEQ ID NO: 64903 - DNA, 10 bp, Unknown
  misc_feature (1)..( 10): Matrix.003 file - promoters50/1013242
aagtaaagat

SEQ ID NO: 64904 - DNA, 12 bp, Unknown
  misc_feature (1)..( 12): Matrix.003 file - promoters50/1013242
tgtataaaaaga

SEQ ID NO: 64905 - DNA, 11 bp, Unknown
  misc_feature (1)..( 11): Matrix.003 file - promoters50/1013242
aatccaaaata

SEQ ID NO: 64906 - DNA, 9 bp, Unknown
  misc_feature (1)..( 9): Matrix.003 file - promoters50/1013274
aatagaaaa

SEQ ID NO: 64907 - DNA, 13 bp, Unknown
  misc_feature (1)..( 13): Matrix.003 file - promoters50/1013274
attttctttttta

SEQ ID NO: 64908 - DNA, 9 bp, Unknown
  misc_feature (1)..( 9): Matrix.003 file - promoters50/1013274
attttgatt

SEQ ID NO: 64909 - DNA, 11 bp, Unknown
  misc_feature (1)..( 11): Matrix.003 file - promoters50/1013274
cattttttttt

SEQ ID NO: 64910 - DNA, 7 bp, Unknown
  misc_feature (1)..( 7): Matrix.003 file - promoters50/1013274
aacttaa

SEQ ID NO: 64911 - DNA, 10 bp, Unknown
  misc_feature (1)..( 10): Matrix.003 file - promoters50/1013274
tattttcatt

SEQ ID NO: 64912 - DNA, 13 bp, Unknown
  misc_feature (1)..( 13): Matrix.003 file - promoters50/1013274
ttatctatttttc

SEQ ID NO: 64913 - DNA, 8 bp, Unknown
  misc_feature (1)..( 8): Matrix.003 file - promoters50/1013310
taaatata

SEQ ID NO: 64914 - DNA, 11 bp, Unknown
  misc_feature (1)..( 11): Matrix.003 file - promoters50/1013314
aaatattttta

SEQ ID NO: 64915 - DNA, 13 bp, Unknown
  misc_feature (1)..( 13): Matrix.003 file - promoters50/1013314
aaatatttttatt

SEQ ID NO: 64916 - DNA, 12 bp, Unknown
  misc_feature (1)..( 12): Matrix.003 file - promoters50/1013314
aataaaagaatt

SEQ ID NO: 64917 - DNA, 6 bp, Unknown
  misc_feature (1)..( 6): Matrix.003 file - promoters50/1013314
ataaat

SEQ ID NO: 64918 - DNA, 12 bp, Unknown
  misc_feature (1)..( 12): Matrix.003 file - promoters50/1013314
ttttgaaatttt

SEQ ID NO: 64919 - DNA, 10 bp, Unknown
  misc_feature (1)..( 10): Matrix.003 file - promoters50/1013341
taaattattt

SEQ ID NO: 64920 - DNA, 11 bp, Unknown
  misc_feature (1)..( 11): Matrix.003 file - promoters50/1013341
taaataaaacc

SEQ ID NO: 64921 - DNA, 12 bp, Unknown
  misc_feature (1)..( 12): Matrix.003 file - promoters50/1013427
ttcctattttaa

SEQ ID NO: 64922 - DNA, 10 bp, Unknown
  misc_feature (1)..( 10): Matrix.003 file - promoters50/1013427
ttcaatttca

SEQ ID NO: 64923 - DNA, 10 bp, Unknown
  misc_feature (1)..( 10): Matrix.003 file - promoters50/1013441
tataaatgag

SEQ ID NO: 64924 - DNA, 13 bp, Unknown
  misc_feature (1)..( 13): Matrix.003 file - promoters50/1013441
attagattttttt

SEQ ID NO: 64925 - DNA, 10 bp, Unknown
  misc_feature (1)..( 10): Matrix.003 file - promoters50/1013441
agattttgtg

SEQ ID NO: 64926 - DNA, 8 bp, Unknown
  misc_feature (1)..( 8): Matrix.003 file - promoters50/1013441
aattttat

SEQ ID NO: 64927 - DNA, 7 bp, Unknown
  misc_feature (1)..( 7): Matrix.003 file - promoters50/1013529
aaacaaa

SEQ ID NO: 64928 - DNA, 8 bp, Unknown
  misc_feature (1)..( 8): Matrix.003 file - promoters50/1013611
ttttatta

SEQ ID NO: 64929 - DNA, 10 bp, Unknown
  misc_feature (1)..( 10): Matrix.003 file - promoters50/1013611
ataaaacaaa

SEQ ID NO: 64930 - DNA, 6 bp, Unknown
  misc_feature (1)..( 6): Matrix.003 file - promoters50/1013611
aattag

SEQ ID NO: 64931 - DNA, 10 bp, Unknown
  misc_feature (1)..( 10): Matrix.003 file - promoters50/1013611
aaacaaaaaa

SEQ ID NO: 64932 - DNA, 12 bp, Unknown
  misc_feature (1)..( 12): Matrix.003 file - promoters50/1013629
aaacggtttctt

SEQ ID NO: 64933 - DNA, 11 bp, Unknown
  misc_feature (1)..( 11): Matrix.003 file - promoters50/1013629
tcttttcttta

SEQ ID NO: 64934 - DNA, 13 bp, Unknown
  misc_feature (1)..( 13): Matrix.003 file - promoters50/1013641
caattttgatatt

SEQ ID NO: 64935 - DNA, 7 bp, Unknown
  misc_feature (1)..( 7): Matrix.003 file - promoters50/1013641
acaaaac

SEQ ID NO: 64936 - DNA, 9 bp, Unknown
  misc_feature (1)..( 9): Matrix.003 file - promoters50/1013641
tcttgtctt

SEQ ID NO: 64937 - DNA, 8 bp, Unknown
  misc_feature (1)..( 8): Matrix.003 file - promoters50/1013641
ctcttttt

SEQ ID NO: 64938 - DNA, 9 bp, Unknown
  misc_feature (1)..( 9): Matrix.003 file - promoters50/1013645
cttgtatat

SEQ ID NO: 64939 - DNA, 9 bp, Unknown
  misc_feature (1)..( 9): Matrix.003 file - promoters50/1013665
atatttttt

SEQ ID NO: 64940 - DNA, 8 bp, Unknown
  misc_feature (1)..( 8): Matrix.003 file - promoters50/1013674
ttttgttt

SEQ ID NO: 64941 - DNA, 12 bp, Unknown
  misc_feature (1)..( 12): Matrix.003 file - promoters50/1013674
tttttgtttcaa

SEQ ID NO: 64942 - DNA, 8 bp, Unknown
  misc_feature (1)..( 8): Matrix.003 file - promoters50/1013674
ttaaaaat

SEQ ID NO: 64943 - DNA, 8 bp, Unknown
  misc_feature (1)..( 8): Matrix.003 file - promoters50/1013674
cttaaaat

SEQ ID NO: 64944 - DNA, 7 bp, Unknown
  misc_feature (1)..( 7): Matrix.003 file - promoters50/1013674
aacaaaa

SEQ ID NO: 64945 - DNA, 6 bp, Unknown
  misc_feature (1)..( 6): Matrix.003 file - promoters50/1013678
caaatt

SEQ ID NO: 64946 - DNA, 8 bp, Unknown
  misc_feature (1)..( 8): Matrix.003 file - promoters50/1013678
aaacgatt

SEQ ID NO: 64947 - DNA, 6 bp, Unknown
  misc_feature (1)..( 6): Matrix.003 file - promoters50/1013678
ttaaat

SEQ ID NO: 64948 - DNA, 11 bp, Unknown
  misc_feature (1)..( 11): Matrix.003 file - promoters50/1013678
agaatgagatc

SEQ ID NO: 64949 - DNA, 6 bp, Unknown
  misc_feature (1)..( 6): Matrix.003 file - promoters50/1013678
tagctt

SEQ ID NO: 64950 - DNA, 9 bp, Unknown
  misc_feature (1)..( 9): Matrix.003 file - promoters50/1013678
gcagagaag

SEQ ID NO: 64951 - DNA, 9 bp, Unknown
  misc_feature (1)..( 9): Matrix.003 file - promoters50/1013710
gtaatgagt

SEQ ID NO: 64952 - DNA, 8 bp, Unknown
  misc_feature (1)..( 8): Matrix.003 file - promoters50/1013710
gtgatttg

SEQ ID NO: 64953 - DNA, 10 bp, Unknown
  misc_feature (1)..( 10): Matrix.003 file - promoters50/1013710
cttgaataac

SEQ ID NO: 64954 - DNA, 12 bp, Unknown
  misc_feature (1)..( 12): Matrix.003 file - promoters50/1013714
ctatataatacc

SEQ ID NO: 64955 - DNA, 13 bp, Unknown
  misc_feature (1)..( 13): Matrix.003 file - promoters50/1013714
ataatttttttat

SEQ ID NO: 64956 - DNA, 10 bp, Unknown
  misc_feature (1)..( 10): Matrix.003 file - promoters50/1013714
gtaatttttt

SEQ ID NO: 64957 - DNA, 10 bp, Unknown
  misc_feature (1)..( 10): Matrix.003 file - promoters50/1013764
tattgtgtct

SEQ ID NO: 64958 - DNA, 8 bp, Unknown
  misc_feature (1)..( 8): Matrix.003 file - promoters50/1013764
taccaatc

SEQ ID NO: 64959 - DNA, 7 bp, Unknown
  misc_feature (1)..( 7): Matrix.003 file - promoters50/1013764
gtttcta

SEQ ID NO: 64960 - DNA, 8 bp, Unknown
  misc_feature (1)..( 8): Matrix.003 file - promoters50/1013764
tagtaaaa

SEQ ID NO: 64961 - DNA, 7 bp, Unknown
  misc_feature (1)..( 7): Matrix.003 file - promoters50/1013764
atatctg

SEQ ID NO: 64962 - DNA, 11 bp, Unknown
  misc_feature (1)..( 11): Matrix.003 file - promoters50/1013764
acttgtctcct

SEQ ID NO: 64963 - DNA, 9 bp, Unknown
  misc_feature (1)..( 9): Matrix.003 file - promoters50/1013764
tttaatgat

SEQ ID NO: 64964 - DNA, 7 bp, Unknown
  misc_feature (1)..( 7): Matrix.003 file - promoters50/1013764
aatggtt

SEQ ID NO: 64965 - DNA, 6 bp, Unknown
  misc_feature (1)..( 6): Matrix.003 file - promoters50/1013772
aagatt

SEQ ID NO: 64966 - DNA, 13 bp, Unknown
  misc_feature (1)..( 13): Matrix.003 file - promoters50/1013786
ttaagttttacga

SEQ ID NO: 64967 - DNA, 9 bp, Unknown
  misc_feature (1)..( 9): Matrix.003 file - promoters50/1013786
ttaagttta

SEQ ID NO: 64968 - DNA, 9 bp, Unknown
  misc_feature (1)..( 9): Matrix.003 file - promoters50/1013786
ataatttta

SEQ ID NO: 64969 - DNA, 13 bp, Unknown
  misc_feature (1)..( 13): Matrix.003 file - promoters50/1013792
tttttcatattag

SEQ ID NO: 64970 - DNA, 11 bp, Unknown
  misc_feature (1)..( 11): Matrix.003 file - promoters50/1013792
gaacaattaca

SEQ ID NO: 64971 - DNA, 9 bp, Unknown
  misc_feature (1)..( 9): Matrix.003 file - promoters50/1013796
taagttgtt

SEQ ID NO: 64972 - DNA, 8 bp, Unknown
  misc_feature (1)..( 8): Matrix.003 file - promoters50/1013796
gttttaga

SEQ ID NO: 64973 - DNA, 11 bp, Unknown
  misc_feature (1)..( 11): Matrix.003 file - promoters50/1013796
tgaataaaaaa

SEQ ID NO: 64974 - DNA, 6 bp, Unknown
  misc_feature (1)..( 6): Matrix.003 file - promoters50/1013796
aagata

SEQ ID NO: 64975 - DNA, 10 bp, Unknown
  misc_feature (1)..( 10): Matrix.003 file - promoters50/1013796
tttttaaatt

SEQ ID NO: 64976 - DNA, 8 bp, Unknown
  misc_feature (1)..( 8): Matrix.003 file - promoters50/1013796
taaaccaa

SEQ ID NO: 64977 - DNA, 9 bp, Unknown
  misc_feature (1)..( 9): Matrix.003 file - promoters50/1013796
taaggtttt

SEQ ID NO: 64978 - DNA, 12 bp, Unknown
  misc_feature (1)..( 12): Matrix.003 file - promoters50/1013796
cgttttaaaaat

SEQ ID NO: 64979 - DNA, 13 bp, Unknown
  misc_feature (1)..( 13): Matrix.003 file - promoters50/1013805
tgagattacttac

SEQ ID NO: 64980 - DNA, 11 bp, Unknown
  misc_feature (1)..( 11): Matrix.003 file - promoters50/1013805
ttaaattagta

SEQ ID NO: 64981 - DNA, 9 bp, Unknown
  misc_feature (1)..( 9): Matrix.003 file - promoters50/1013805
ttaataact

SEQ ID NO: 64982 - DNA, 10 bp, Unknown
  misc_feature (1)..( 10): Matrix.003 file - promoters50/1013805
tgaaataact

SEQ ID NO: 64983 - DNA, 9 bp, Unknown
  misc_feature (1)..( 9): Matrix.003 file - promoters50/1013850
aaattcttt

SEQ ID NO: 64984 - DNA, 8 bp, Unknown
  misc_feature (1)..( 8): Matrix.003 file - promoters50/1013878
tataatat

SEQ ID NO: 64985 - DNA, 15 bp, Unknown
  misc_feature (1)..( 15): Matrix.003 file - promoters50/1013878
aagaaaaaaaaattg

SEQ ID NO: 64986 - DNA, 11 bp, Unknown
  misc_feature (1)..( 11): Matrix.003 file - promoters50/1013878
agaaaaaaaaa

SEQ ID NO: 64987 - DNA, 12 bp, Unknown
  misc_feature (1)..( 12): Matrix.003 file - promoters50/1013878
aaaatataataa

SEQ ID NO: 64988 - DNA, 8 bp, Unknown
  misc_feature (1)..( 8): Matrix.003 file - promoters50/1013878
aaaaaaaa

SEQ ID NO: 64989 - DNA, 11 bp, Unknown
  misc_feature (1)..( 11): Matrix.003 file - promoters50/1013893
aagaaatttgt

SEQ ID NO: 64990 - DNA, 6 bp, Unknown
  misc_feature (1)..( 6): Matrix.003 file - promoters50/1013893
taagaa

SEQ ID NO: 64991 - DNA, 10 bp, Unknown
  misc_feature (1)..( 10): Matrix.003 file - promoters50/1013904
attctaataa

SEQ ID NO: 64992 - DNA, 9 bp, Unknown
  misc_feature (1)..( 9): Matrix.003 file - promoters50/1013904
caatatttt

SEQ ID NO: 64993 - DNA, 9 bp, Unknown
  misc_feature (1)..( 9): Matrix.003 file - promoters50/1013907
taaaaattg

SEQ ID NO: 64994 - DNA, 9 bp, Unknown
  misc_feature (1)..( 9): Matrix.003 file - promoters50/1013907
aaccattaa

SEQ ID NO: 64995 - DNA, 10 bp, Unknown
  misc_feature (1)..( 10): Matrix.003 file - promoters50/1013907
tttataaaaa

SEQ ID NO: 64996 - DNA, 8 bp, Unknown
  misc_feature (1)..( 8): Matrix.003 file - promoters50/1013907
tttaaaat

SEQ ID NO: 64997 - DNA, 12 bp, Unknown
  misc_feature (1)..( 12): Matrix.003 file - promoters50/1013923
aacaattttggt

SEQ ID NO: 64998 - DNA, 14 bp, Unknown
  misc_feature (1)..( 14): Matrix.003 file - promoters50/1013923
acatgtaaatatat

SEQ ID NO: 64999 - DNA, 10 bp, Unknown
  misc_feature (1)..( 10): Matrix.003 file - promoters50/1013923
aaaattcaca

SEQ ID NO: 65000 - DNA, 10 bp, Unknown
  misc_feature (1)..( 10): Matrix.003 file - promoters50/1013923
gataatattt

SEQ ID NO: 65001 - DNA, 9 bp, Unknown
  misc_feature (1)..( 9): Matrix.003 file - promoters50/1013931
gaaaaattg

SEQ ID NO: 65002 - DNA, 10 bp, Unknown
  misc_feature (1)..( 10): Matrix.003 file - promoters50/1013931
atctctggtg

SEQ ID NO: 65003 - DNA, 9 bp, Unknown
  misc_feature (1)..( 9): Matrix.003 file - promoters50/1013931
agaagcata

SEQ ID NO: 65004 - DNA, 8 bp, Unknown
  misc_feature (1)..( 8): Matrix.003 file - promoters50/1013931
ttagactt

SEQ ID NO: 65005 - DNA, 8 bp, Unknown
  misc_feature (1)..( 8): Matrix.003 file - promoters50/1013931
ttttattt

SEQ ID NO: 65006 - DNA, 9 bp, Unknown
  misc_feature (1)..( 9): Matrix.003 file - promoters50/1013931
aaagttcca

SEQ ID NO: 65007 - DNA, 8 bp, Unknown
  misc_feature (1)..( 8): Matrix.003 file - promoters50/1013931
tttattca

SEQ ID NO: 65008 - DNA, 10 bp, Unknown
  misc_feature (1)..( 10): Matrix.003 file - promoters50/1013957
ataaaaattt

SEQ ID NO: 65009 - DNA, 14 bp, Unknown
  misc_feature (1)..( 14): Matrix.003 file - promoters50/1013957
atctaattatctaa

SEQ ID NO: 65010 - DNA, 12 bp, Unknown
  misc_feature (1)..( 12): Matrix.003 file - promoters50/1013957
cttttctttggt

SEQ ID NO: 65011 - DNA, 13 bp, Unknown
  misc_feature (1)..( 13): Matrix.003 file - promoters50/1014010
taaactttaaagt

SEQ ID NO: 65012 - DNA, 9 bp, Unknown
  misc_feature (1)..( 9): Matrix.003 file - promoters50/1014010
aaacaaaaa

SEQ ID NO: 65013 - DNA, 8 bp, Unknown
  misc_feature (1)..( 8): Matrix.003 file - promoters50/1014010
ttataaaa

SEQ ID NO: 65014 - DNA, 12 bp, Unknown
  misc_feature (1)..( 12): Matrix.003 file - promoters50/1014010
aattagaattac

SEQ ID NO: 65015 - DNA, 7 bp, Unknown
  misc_feature (1)..( 7): Matrix.003 file - promoters50/1014010
aaaaaat

SEQ ID NO: 65016 - DNA, 10 bp, Unknown
  misc_feature (1)..( 10): Matrix.003 file - promoters50/1014010
ataattattt

SEQ ID NO: 65017 - DNA, 12 bp, Unknown
  misc_feature (1)..( 12): Matrix.003 file - promoters50/1014010
gaataataatta

SEQ ID NO: 65018 - DNA, 8 bp, Unknown
  misc_feature (1)..( 8): Matrix.003 file - promoters50/1014117
ttttgttc

SEQ ID NO: 65019 - DNA, 9 bp, Unknown
  misc_feature (1)..( 9): Matrix.003 file - promoters50/1014125
ataatgtga

SEQ ID NO: 65020 - DNA, 7 bp, Unknown
  misc_feature (1)..( 7): Matrix.003 file - promoters50/1014176
tttaaaa

SEQ ID NO: 65021 - DNA, 9 bp, Unknown
  misc_feature (1)..( 9): Matrix.003 file - promoters50/1014180
ttttaatag

SEQ ID NO: 65022 - DNA, 9 bp, Unknown
  misc_feature (1)..( 9): Matrix.003 file - promoters50/1014180
aattaattc

SEQ ID NO: 65023 - DNA, 8 bp, Unknown
  misc_feature (1)..( 8): Matrix.003 file - promoters50/1014259
atgaaaaa

SEQ ID NO: 65024 - DNA, 9 bp, Unknown
  misc_feature (1)..( 9): Matrix.003 file - promoters50/1014259
gtaataaca

SEQ ID NO: 65025 - DNA, 8 bp, Unknown
  misc_feature (1)..( 8): Matrix.003 file - promoters50/1014259
aatatata

SEQ ID NO: 65026 - DNA, 9 bp, Unknown
  misc_feature (1)..( 9): Matrix.003 file - promoters50/1014259
ttcgttttc

SEQ ID NO: 65027 - DNA, 8 bp, Unknown
  misc_feature (1)..( 8): Matrix.003 file - promoters50/1014259
tctattta

SEQ ID NO: 65028 - DNA, 8 bp, Unknown
  misc_feature (1)..( 8): Matrix.003 file - promoters50/1014259
tataaaaa

SEQ ID NO: 65029 - DNA, 15 bp, Unknown
  misc_feature (1)..( 15): Matrix.003 file - promoters50/1014259
taaaaactaatgggc

SEQ ID NO: 65030 - DNA, 10 bp, Unknown
  misc_feature (1)..( 10): Matrix.003 file - promoters50/1014259
acaataaaag

SEQ ID NO: 65031 - DNA, 7 bp, Unknown
  misc_feature (1)..( 7): Matrix.003 file - promoters50/1014387
tgaaata

SEQ ID NO: 65032 - DNA, 9 bp, Unknown
  misc_feature (1)..( 9): Matrix.003 file - promoters50/1014406
aaaaaaaaa

SEQ ID NO: 65033 - DNA, 10 bp, Unknown
  misc_feature (1)..( 10): Matrix.003 file - promoters50/1014452
tatataaata

SEQ ID NO: 65034 - DNA, 10 bp, Unknown
  misc_feature (1)..( 10): Matrix.003 file - promoters50/1014452
tcaatattta

SEQ ID NO: 65035 - DNA, 11 bp, Unknown
  misc_feature (1)..( 11): Matrix.003 file - promoters50/1014452
aattaaaaaaa

SEQ ID NO: 65036 - DNA, 21 bp, Unknown
  misc_feature (1)..( 21): Matrix.003 file - promoters50/1014452
atctttatcgtacataacaat

SEQ ID NO: 65037 - DNA, 13 bp, Unknown
  misc_feature (1)..( 13): Matrix.003 file - promoters50/1014452
aatacaaaattat

SEQ ID NO: 65038 - DNA, 12 bp, Unknown
  misc_feature (1)..( 12): Matrix.003 file - promoters50/1014452
caatatttactc

SEQ ID NO: 65039 - DNA, 7 bp, Unknown
  misc_feature (1)..( 7): Matrix.003 file - promoters50/1014452
taaatat

SEQ ID NO: 65040 - DNA, 9 bp, Unknown
  misc_feature (1)..( 9): Matrix.003 file - promoters50/1014509
ttttatctt

SEQ ID NO: 65041 - DNA, 15 bp, Unknown
  misc_feature (1)..( 15): Matrix.003 file - promoters50/1014525
ttaaataattattta

SEQ ID NO: 65042 - DNA, 11 bp, Unknown
  misc_feature (1)..( 11): Matrix.003 file - promoters50/1014525
aaagtcatata

SEQ ID NO: 65043 - DNA, 10 bp, Unknown
  misc_feature (1)..( 10): Matrix.003 file - promoters50/1014525
gtatatatac

SEQ ID NO: 65044 - DNA, 10 bp, Unknown
  misc_feature (1)..( 10): Matrix.003 file - promoters50/1014525
ttatataaat

SEQ ID NO: 65045 - DNA, 4 bp, Unknown
  misc_feature (1)..( 4): Matrix.003 file - promoters50/1014525
tata

SEQ ID NO: 65046 - DNA, 9 bp, Unknown
  misc_feature (1)..( 9): Matrix.003 file - promoters50/1014525
atatccaaa

SEQ ID NO: 65047 - DNA, 10 bp, Unknown
  misc_feature (1)..( 10): Matrix.003 file - promoters50/1014525
attaattgag

SEQ ID NO: 65048 - DNA, 6 bp, Unknown
  misc_feature (1)..( 6): Matrix.003 file - promoters50/1014573
tttttt

SEQ ID NO: 65049 - DNA, 8 bp, Unknown
  misc_feature (1)..( 8): Matrix.003 file - promoters50/1014573
aagattta

SEQ ID NO: 65050 - DNA, 7 bp, Unknown
  misc_feature (1)..( 7): Matrix.003 file - promoters50/1014611
aattgta

SEQ ID NO: 65051 - DNA, 8 bp, Unknown
  misc_feature (1)..( 8): Matrix.003 file - promoters50/1014611
caaaaata

SEQ ID NO: 65052 - DNA, 9 bp, Unknown
  misc_feature (1)..( 9): Matrix.003 file - promoters50/1014611
gtaatattt

SEQ ID NO: 65053 - DNA, 7 bp, Unknown
  misc_feature (1)..( 7): Matrix.003 file - promoters50/1014611
ttatttt

SEQ ID NO: 65054 - DNA, 8 bp, Unknown
  misc_feature (1)..( 8): Matrix.003 file - promoters50/1014611
ataaatta

SEQ ID NO: 65055 - DNA, 10 bp, Unknown
  misc_feature (1)..( 10): Matrix.003 file - promoters50/1014611
taatattata

SEQ ID NO: 65056 - DNA, 12 bp, Unknown
  misc_feature (1)..( 12): Matrix.003 file - promoters50/1014611
aaattaaaacac

SEQ ID NO: 65057 - DNA, 9 bp, Unknown
  misc_feature (1)..( 9): Matrix.003 file - promoters50/1014611
caaaaaaaa

SEQ ID NO: 65058 - DNA, 13 bp, Unknown
  misc_feature (1)..( 13): Matrix.003 file - promoters50/1014611
ctttgaaaaaaaa

SEQ ID NO: 65059 - DNA, 9 bp, Unknown
  misc_feature (1)..( 9): Matrix.003 file - promoters50/1014611
gcctattta

SEQ ID NO: 65060 - DNA, 9 bp, Unknown
  misc_feature (1)..( 9): Matrix.003 file - promoters50/1014611
aaaaaattt

SEQ ID NO: 65061 - DNA, 7 bp, Unknown
  misc_feature (1)..( 7): Matrix.003 file - promoters50/1014611
tttgaaa

SEQ ID NO: 65062 - DNA, 8 bp, Unknown
  misc_feature (1)..( 8): Matrix.003 file - promoters50/1014631
aaaactct

SEQ ID NO: 65063 - DNA, 9 bp, Unknown
  misc_feature (1)..( 9): Matrix.003 file - promoters50/1014631
ttggtttct

SEQ ID NO: 65064 - DNA, 9 bp, Unknown
  misc_feature (1)..( 9): Matrix.003 file - promoters50/1014631
ttccttaaa

SEQ ID NO: 65065 - DNA, 11 bp, Unknown
  misc_feature (1)..( 11): Matrix.003 file - promoters50/1014631
gattttgttta

SEQ ID NO: 65066 - DNA, 9 bp, Unknown
  misc_feature (1)..( 9): Matrix.003 file - promoters50/1014649
attctttac

SEQ ID NO: 65067 - DNA, 8 bp, Unknown
  misc_feature (1)..( 8): Matrix.003 file - promoters50/1014649
acatatgt

SEQ ID NO: 65068 - DNA, 9 bp, Unknown
  misc_feature (1)..( 9): Matrix.003 file - promoters50/1014649
atttattta

SEQ ID NO: 65069 - DNA, 8 bp, Unknown
  misc_feature (1)..( 8): Matrix.003 file - promoters50/1014649
tctttttt

SEQ ID NO: 65070 - DNA, 9 bp, Unknown
  misc_feature (1)..( 9): Matrix.003 file - promoters50/1014662
atataataa

SEQ ID NO: 65071 - DNA, 11 bp, Unknown
  misc_feature (1)..( 11): Matrix.003 file - promoters50/1014662
tcaatcaaaag

SEQ ID NO: 65072 - DNA, 9 bp, Unknown
  misc_feature (1)..( 9): Matrix.003 file - promoters50/1014662
ccaaaaatg

SEQ ID NO: 65073 - DNA, 10 bp, Unknown
  misc_feature (1)..( 10): Matrix.003 file - promoters50/1014662
ttgtatcaac

SEQ ID NO: 65074 - DNA, 14 bp, Unknown
  misc_feature (1)..( 14): Matrix.003 file - promoters50/1014662
acatataataaatt

SEQ ID NO: 65075 - DNA, 11 bp, Unknown
  misc_feature (1)..( 11): Matrix.003 file - promoters50/1014662
agaaaatcaat

SEQ ID NO: 65076 - DNA, 10 bp, Unknown
  misc_feature (1)..( 10): Matrix.003 file - promoters50/1014662
taattttgtt

SEQ ID NO: 65077 - DNA, 8 bp, Unknown
  misc_feature (1)..( 8): Matrix.003 file - promoters50/1014678
aaactcga

SEQ ID NO: 65078 - DNA, 10 bp, Unknown
  misc_feature (1)..( 10): Matrix.003 file - promoters50/1014678
aaaacaaatc

SEQ ID NO: 65079 - DNA, 7 bp, Unknown
  misc_feature (1)..( 7): Matrix.003 file - promoters50/1014678
ttaatgc

SEQ ID NO: 65080 - DNA, 10 bp, Unknown
  misc_feature (1)..( 10): Matrix.003 file - promoters50/1014681
aattaaacat

SEQ ID NO: 65081 - DNA, 11 bp, Unknown
  misc_feature (1)..( 11): Matrix.003 file - promoters50/1014681
aaatgttgttg

SEQ ID NO: 65082 - DNA, 9 bp, Unknown
  misc_feature (1)..( 9): Matrix.003 file - promoters50/1014689
tgttcattt

SEQ ID NO: 65083 - DNA, 13 bp, Unknown
  misc_feature (1)..( 13): Matrix.003 file - promoters50/1014689
ctgagctagaagg

SEQ ID NO: 65084 - DNA, 9 bp, Unknown
  misc_feature (1)..( 9): Matrix.003 file - promoters50/1014689
aaaaatgtt

SEQ ID NO: 65085 - DNA, 12 bp, Unknown
  misc_feature (1)..( 12): Matrix.003 file - promoters50/1014693
ttttttataaag

SEQ ID NO: 65086 - DNA, 6 bp, Unknown
  misc_feature (1)..( 6): Matrix.003 file - promoters50/1014693
attgat

SEQ ID NO: 65087 - DNA, 10 bp, Unknown
  misc_feature (1)..( 10): Matrix.003 file - promoters50/1014693
aaagcttctc

SEQ ID NO: 65088 - DNA, 11 bp, Unknown
  misc_feature (1)..( 11): Matrix.003 file - promoters50/1014748
aaataaaaaca

SEQ ID NO: 65089 - DNA, 14 bp, Unknown
  misc_feature (1)..( 14): Matrix.003 file - promoters50/1014771
atttctatcaaata

SEQ ID NO: 65090 - DNA, 12 bp, Unknown
  misc_feature (1)..( 12): Matrix.003 file - promoters50/1014771
ctaaaatcttaa

SEQ ID NO: 65091 - DNA, 10 bp, Unknown
  misc_feature (1)..( 10): Matrix.003 file - promoters50/1014771
acttaaaaaa

SEQ ID NO: 65092 - DNA, 9 bp, Unknown
  misc_feature (1)..( 9): Matrix.003 file - promoters50/1014771
tttttctta

SEQ ID NO: 65093 - DNA, 12 bp, Unknown
  misc_feature (1)..( 12): Matrix.003 file - promoters50/1014771
gatttattttta

SEQ ID NO: 65094 - DNA, 11 bp, Unknown
  misc_feature (1)..( 11): Matrix.003 file - promoters50/1014771
tacttgaattg

SEQ ID NO: 65095 - DNA, 8 bp, Unknown
  misc_feature (1)..( 8): Matrix.003 file - promoters50/1014771
aaaaaagc

SEQ ID NO: 65096 - DNA, 9 bp, Unknown
  misc_feature (1)..( 9): Matrix.003 file - promoters50/1014778
aaaatcgaa

SEQ ID NO: 65097 - DNA, 12 bp, Unknown
  misc_feature (1)..( 12): Matrix.003 file - promoters50/1014778
agcttttgattc

SEQ ID NO: 65098 - DNA, 15 bp, Unknown
  misc_feature (1)..( 15): Matrix.003 file - promoters50/1014815
tttaatagcttttaa

SEQ ID NO: 65099 - DNA, 9 bp, Unknown
  misc_feature (1)..( 9): Matrix.003 file - promoters50/1014815
aatttaaat

SEQ ID NO: 65100 - DNA, 10 bp, Unknown
  misc_feature (1)..( 10): Matrix.003 file - promoters50/1014815
taaaagaaaa

SEQ ID NO: 65101 - DNA, 10 bp, Unknown
  misc_feature (1)..( 10): Matrix.003 file - promoters50/1014823
gacaaaaatt

SEQ ID NO: 65102 - DNA, 12 bp, Unknown
  misc_feature (1)..( 12): Matrix.003 file - promoters50/1014823
gagcaaaaccca

SEQ ID NO: 65103 - DNA, 8 bp, Unknown
  misc_feature (1)..( 8): Matrix.003 file - promoters50/1014823
ttattttt

SEQ ID NO: 65104 - DNA, 10 bp, Unknown
  misc_feature (1)..( 10): Matrix.003 file - promoters50/1014823
ttttaatttg

SEQ ID NO: 65105 - DNA, 9 bp, Unknown
  misc_feature (1)..( 9): Matrix.003 file - promoters50/1014823
gattttgat

SEQ ID NO: 65106 - DNA, 8 bp, Unknown
  misc_feature (1)..( 8): Matrix.003 file - promoters50/1014823
ttaaaata

SEQ ID NO: 65107 - DNA, 10 bp, Unknown
  misc_feature (1)..( 10): Matrix.003 file - promoters50/1014823
agtttaatta

SEQ ID NO: 65108 - DNA, 9 bp, Unknown
  misc_feature (1)..( 9): Matrix.003 file - promoters50/1014823
ttcgacttg

SEQ ID NO: 65109 - DNA, 7 bp, Unknown
  misc_feature (1)..( 7): Matrix.003 file - promoters50/1014823
acatttt

SEQ ID NO: 65110 - DNA, 7 bp, Unknown
  misc_feature (1)..( 7): Matrix.003 file - promoters50/1014895
gaataga

SEQ ID NO: 65111 - DNA, 7 bp, Unknown
  misc_feature (1)..( 7): Matrix.003 file - promoters50/1014907
tattttc

SEQ ID NO: 65112 - DNA, 4 bp, Unknown
  misc_feature (1)..( 4): Matrix.003 file - promoters50/1014907
tatt

SEQ ID NO: 65113 - DNA, 9 bp, Unknown
  misc_feature (1)..( 9): Matrix.003 file - promoters50/1014907
aataatcct

SEQ ID NO: 65114 - DNA, 9 bp, Unknown
  misc_feature (1)..( 9): Matrix.003 file - promoters50/1014907
aaaataatc

SEQ ID NO: 65115 - DNA, 7 bp, Unknown
  misc_feature (1)..( 7): Matrix.003 file - promoters50/1014926
ccttcct

SEQ ID NO: 65116 - DNA, 9 bp, Unknown
  misc_feature (1)..( 9): Matrix.003 file - promoters50/1014926
tattgttaa

SEQ ID NO: 65117 - DNA, 8 bp, Unknown
  misc_feature (1)..( 8): Matrix.003 file - promoters50/1014926
taataaat

SEQ ID NO: 65118 - DNA, 7 bp, Unknown
  misc_feature (1)..( 7): Matrix.003 file - promoters50/1014926
gatgggc

SEQ ID NO: 65119 - DNA, 8 bp, Unknown
  misc_feature (1)..( 8): Matrix.003 file - promoters50/1014926
aaataagg

SEQ ID NO: 65120 - DNA, 6 bp, Unknown
  misc_feature (1)..( 6): Matrix.003 file - promoters50/1014926
aagttg

SEQ ID NO: 65121 - DNA, 11 bp, Unknown
  misc_feature (1)..( 11): Matrix.003 file - promoters50/1014926
aaacctaaata

SEQ ID NO: 65122 - DNA, 8 bp, Unknown
  misc_feature (1)..( 8): Matrix.003 file - promoters50/1014981
ggaataaa

SEQ ID NO: 65123 - DNA, 8 bp, Unknown
  misc_feature (1)..( 8): Matrix.003 file - promoters50/1014989
ttttgaaa

SEQ ID NO: 65124 - DNA, 10 bp, Unknown
  misc_feature (1)..( 10): Matrix.003 file - promoters50/1014989
caactaattt

SEQ ID NO: 65125 - DNA, 9 bp, Unknown
  misc_feature (1)..( 9): Matrix.003 file - promoters50/1014989
acattcaat

SEQ ID NO: 65126 - DNA, 8 bp, Unknown
  misc_feature (1)..( 8): Matrix.003 file - promoters50/1014989
aatatttc

SEQ ID NO: 65127 - DNA, 10 bp, Unknown
  misc_feature (1)..( 10): Matrix.003 file - promoters50/1014989
acatattaaa

SEQ ID NO: 65128 - DNA, 7 bp, Unknown
  misc_feature (1)..( 7): Matrix.003 file - promoters50/1014989
atatttc

SEQ ID NO: 65129 - DNA, 13 bp, Unknown
  misc_feature (1)..( 13): Matrix.003 file - promoters50/1015014
atataaatatata

SEQ ID NO: 65130 - DNA, 13 bp, Unknown
  misc_feature (1)..( 13): Matrix.003 file - promoters50/1015033
ttaataaaacctt

SEQ ID NO: 65131 - DNA, 9 bp, Unknown
  misc_feature (1)..( 9): Matrix.003 file - promoters50/1015064
attttagtt

SEQ ID NO: 65132 - DNA, 8 bp, Unknown
  misc_feature (1)..( 8): Matrix.003 file - promoters50/1015064
tattaatg

SEQ ID NO: 65133 - DNA, 7 bp, Unknown
  misc_feature (1)..( 7): Matrix.003 file - promoters50/1015064
aatattt

SEQ ID NO: 65134 - DNA, 8 bp, Unknown
  misc_feature (1)..( 8): Matrix.003 file - promoters50/1015064
tttagttt

SEQ ID NO: 65135 - DNA, 9 bp, Unknown
  misc_feature (1)..( 9): Matrix.003 file - promoters50/1015064
tgaaaccaa

SEQ ID NO: 65136 - DNA, 7 bp, Unknown
  misc_feature (1)..( 7): Matrix.003 file - promoters50/1015064
ttttgat

SEQ ID NO: 65137 - DNA, 9 bp, Unknown
  misc_feature (1)..( 9): Matrix.003 file - promoters50/1015064
aatatattt

SEQ ID NO: 65138 - DNA, 11 bp, Unknown
  misc_feature (1)..( 11): Matrix.003 file - promoters50/1015064
tacgtaacaat

SEQ ID NO: 65139 - DNA, 10 bp, Unknown
  misc_feature (1)..( 10): Matrix.003 file - promoters50/1015092
tgtcgaaaat

SEQ ID NO: 65140 - DNA, 8 bp, Unknown
  misc_feature (1)..( 8): Matrix.003 file - promoters50/1015116
atttgtct

SEQ ID NO: 65141 - DNA, 7 bp, Unknown
  misc_feature (1)..( 7): Matrix.003 file - promoters50/1015116
ttctttg

SEQ ID NO: 65142 - DNA, 9 bp, Unknown
  misc_feature (1)..( 9): Matrix.003 file - promoters50/1015116
aaatatata

SEQ ID NO: 65143 - DNA, 8 bp, Unknown
  misc_feature (1)..( 8): Matrix.003 file - promoters50/1015116
ttttgttg

SEQ ID NO: 65144 - DNA, 9 bp, Unknown
  misc_feature (1)..( 9): Matrix.003 file - promoters50/1015116
aatttactt

SEQ ID NO: 65145 - DNA, 9 bp, Unknown
  misc_feature (1)..( 9): Matrix.003 file - promoters50/1015116
tttttgttt

SEQ ID NO: 65146 - DNA, 8 bp, Unknown
  misc_feature (1)..( 8): Matrix.003 file - promoters50/1015167
gaaaaaat

SEQ ID NO: 65147 - DNA, 8 bp, Unknown
  misc_feature (1)..( 8): Matrix.003 file - promoters50/1015167
tgaaatca

SEQ ID NO: 65148 - DNA, 12 bp, Unknown
  misc_feature (1)..( 12): Matrix.003 file - promoters50/1015179
aaactcttatat

SEQ ID NO: 65149 - DNA, 13 bp, Unknown
  misc_feature (1)..( 13): Matrix.003 file - promoters50/1015179
caaattcatatta

SEQ ID NO: 65150 - DNA, 10 bp, Unknown
  misc_feature (1)..( 10): Matrix.003 file - promoters50/1015179
aaacagagca

SEQ ID NO: 65151 - DNA, 11 bp, Unknown
  misc_feature (1)..( 11): Matrix.003 file - promoters50/1015179
ttttgaaaaga

SEQ ID NO: 65152 - DNA, 8 bp, Unknown
  misc_feature (1)..( 8): Matrix.003 file - promoters50/1015210
ttatcctt

SEQ ID NO: 65153 - DNA, 12 bp, Unknown
  misc_feature (1)..( 12): Matrix.003 file - promoters50/1015210
aaatgcttagta

SEQ ID NO: 65154 - DNA, 13 bp, Unknown
  misc_feature (1)..( 13): Matrix.003 file - promoters50/1015214
tttatgtaaaaag

SEQ ID NO: 65155 - DNA, 9 bp, Unknown
  misc_feature (1)..( 9): Matrix.003 file - promoters50/1015214
tgaaacaaa

SEQ ID NO: 65156 - DNA, 7 bp, Unknown
  misc_feature (1)..( 7): Matrix.003 file - promoters50/1015247
ttcttct

SEQ ID NO: 65157 - DNA, 9 bp, Unknown
  misc_feature (1)..( 9): Matrix.003 file - promoters50/1015247
aaaacaaaa

SEQ ID NO: 65158 - DNA, 10 bp, Unknown
  misc_feature (1)..( 10): Matrix.003 file - promoters50/1015247
attaaaggaa

SEQ ID NO: 65159 - DNA, 7 bp, Unknown
  misc_feature (1)..( 7): Matrix.003 file - promoters50/1015264
tcatttg

SEQ ID NO: 65160 - DNA, 9 bp, Unknown
  misc_feature (1)..( 9): Matrix.003 file - promoters50/1015264
taatttaaa

SEQ ID NO: 65161 - DNA, 10 bp, Unknown
  misc_feature (1)..( 10): Matrix.003 file - promoters50/1015264
ttaaaaaatt

SEQ ID NO: 65162 - DNA, 8 bp, Unknown
  misc_feature (1)..( 8): Matrix.003 file - promoters50/1015264
ctaattaa

SEQ ID NO: 65163 - DNA, 7 bp, Unknown
  misc_feature (1)..( 7): Matrix.003 file - promoters50/1015264
tttatta

SEQ ID NO: 65164 - DNA, 8 bp, Unknown
  misc_feature (1)..( 8): Matrix.003 file - promoters50/1015264
tttattag

SEQ ID NO: 65165 - DNA, 7 bp, Unknown
  misc_feature (1)..( 7): Matrix.003 file - promoters50/1015264
tactaaa

SEQ ID NO: 65166 - DNA, 7 bp, Unknown
  misc_feature (1)..( 7): Matrix.003 file - promoters50/1015264
tttgttt

SEQ ID NO: 65167 - DNA, 11 bp, Unknown
  misc_feature (1)..( 11): Matrix.003 file - promoters50/1015264
tttgtatgatt

SEQ ID NO: 65168 - DNA, 8 bp, Unknown
  misc_feature (1)..( 8): Matrix.003 file - promoters50/1015375
tattctcg

SEQ ID NO: 65169 - DNA, 7 bp, Unknown
  misc_feature (1)..( 7): Matrix.003 file - promoters50/1015427
taatttg

SEQ ID NO: 65170 - DNA, 8 bp, Unknown
  misc_feature (1)..( 8): Matrix.003 file - promoters50/1015427
agaaaaat

SEQ ID NO: 65171 - DNA, 8 bp, Unknown
  misc_feature (1)..( 8): Matrix.003 file - promoters50/1015516
tgatgcca

SEQ ID NO: 65172 - DNA, 9 bp, Unknown
  misc_feature (1)..( 9): Matrix.003 file - promoters50/1015524
catttatta

SEQ ID NO: 65173 - DNA, 17 bp, Unknown
  misc_feature (1)..( 17): Matrix.003 file - promoters50/1015524
cagatatagataaatta

SEQ ID NO: 65174 - DNA, 7 bp, Unknown
  misc_feature (1)..( 7): Matrix.003 file - promoters50/1015524
atataaa

SEQ ID NO: 65175 - DNA, 10 bp, Unknown
  misc_feature (1)..( 10): Matrix.003 file - promoters50/1015524
caaatacatt

SEQ ID NO: 65176 - DNA, 10 bp, Unknown
  misc_feature (1)..( 10): Matrix.003 file - promoters50/1015524
attgtttctg

SEQ ID NO: 65177 - DNA, 10 bp, Unknown
  misc_feature (1)..( 10): Matrix.003 file - promoters50/1015537
ctaatttaag

SEQ ID NO: 65178 - DNA, 9 bp, Unknown
  misc_feature (1)..( 9): Matrix.003 file - promoters50/1015537
aaatttaaa

SEQ ID NO: 65179 - DNA, 9 bp, Unknown
  misc_feature (1)..( 9): Matrix.003 file - promoters50/1015537
aaaatttaa

SEQ ID NO: 65180 - DNA, 9 bp, Unknown
  misc_feature (1)..( 9): Matrix.003 file - promoters50/1015537
acaaaatat

SEQ ID NO: 65181 - DNA, 9 bp, Unknown
  misc_feature (1)..( 9): Matrix.003 file - promoters50/1015537
aactaaaat

SEQ ID NO: 65182 - DNA, 12 bp, Unknown
  misc_feature (1)..( 12): Matrix.003 file - promoters50/1015537
cacacaaaagct

SEQ ID NO: 65183 - DNA, 8 bp, Unknown
  misc_feature (1)..( 8): Matrix.003 file - promoters50/1015537
taaaaata

SEQ ID NO: 65184 - DNA, 8 bp, Unknown
  misc_feature (1)..( 8): Matrix.003 file - promoters50/1015541
aatatatt

SEQ ID NO: 65185 - DNA, 11 bp, Unknown
  misc_feature (1)..( 11): Matrix.003 file - promoters50/1015541
ctattttcttc

SEQ ID NO: 65186 - DNA, 6 bp, Unknown
  misc_feature (1)..( 6): Matrix.003 file - promoters50/1015597
aaatct

SEQ ID NO: 65187 - DNA, 7 bp, Unknown
  misc_feature (1)..( 7): Matrix.003 file - promoters50/1015597
taaaaag

SEQ ID NO: 65188 - DNA, 8 bp, Unknown
  misc_feature (1)..( 8): Matrix.003 file - promoters50/1015606
acaagcga

SEQ ID NO: 65189 - DNA, 10 bp, Unknown
  misc_feature (1)..( 10): Matrix.003 file - promoters50/1015606
aatttgtttg

SEQ ID NO: 65190 - DNA, 12 bp, Unknown
  misc_feature (1)..( 12): Matrix.003 file - promoters50/1015637
taaaaaattaat

SEQ ID NO: 65191 - DNA, 10 bp, Unknown
  misc_feature (1)..( 10): Matrix.003 file - promoters50/1015637
gaaaagtaaa

SEQ ID NO: 65192 - DNA, 11 bp, Unknown
  misc_feature (1)..( 11): Matrix.003 file - promoters50/1015661
caaaaacaaaa

SEQ ID NO: 65193 - DNA, 12 bp, Unknown
  misc_feature (1)..( 12): Matrix.003 file - promoters50/1015661
acattataatat

SEQ ID NO: 65194 - DNA, 7 bp, Unknown
  misc_feature (1)..( 7): Matrix.003 file - promoters50/1015661
gtatatc

SEQ ID NO: 65195 - DNA, 8 bp, Unknown
  misc_feature (1)..( 8): Matrix.003 file - promoters50/1015676
ttttgaaa

SEQ ID NO: 65196 - DNA, 7 bp, Unknown
  misc_feature (1)..( 7): Matrix.003 file - promoters50/1015676
tattttc

SEQ ID NO: 65197 - DNA, 13 bp, Unknown
  misc_feature (1)..( 13): Matrix.003 file - promoters50/1015676
attatatcaacat

SEQ ID NO: 65198 - DNA, 8 bp, Unknown
  misc_feature (1)..( 8): Matrix.003 file - promoters50/1015676
ttaaaaca

SEQ ID NO: 65199 - DNA, 8 bp, Unknown
  misc_feature (1)..( 8): Matrix.003 file - promoters50/1015676
gtttcaaa

SEQ ID NO: 65200 - DNA, 9 bp, Unknown
  misc_feature (1)..( 9): Matrix.003 file - promoters50/1015700
atttcgatc

SEQ ID NO: 65201 - DNA, 8 bp, Unknown
  misc_feature (1)..( 8): Matrix.003 file - promoters50/1015726
caatttga

SEQ ID NO: 65202 - DNA, 10 bp, Unknown
  misc_feature (1)..( 10): Matrix.003 file - promoters50/1015726
gagtaaaaca

SEQ ID NO: 65203 - DNA, 13 bp, Unknown
  misc_feature (1)..( 13): Matrix.003 file - promoters50/1015748
attttaaatttat

SEQ ID NO: 65204 - DNA, 12 bp, Unknown
  misc_feature (1)..( 12): Matrix.003 file - promoters50/1015748
ttaacagaaaac

SEQ ID NO: 65205 - DNA, 7 bp, Unknown
  misc_feature (1)..( 7): Matrix.003 file - promoters50/1015752
gcaaaag

SEQ ID NO: 65206 - DNA, 10 bp, Unknown
  misc_feature (1)..( 10): Matrix.003 file - promoters50/1015752
aataaatgat

SEQ ID NO: 65207 - DNA, 9 bp, Unknown
  misc_feature (1)..( 9): Matrix.003 file - promoters50/1015763
ctaatgttt

SEQ ID NO: 65208 - DNA, 10 bp, Unknown
  misc_feature (1)..( 10): Matrix.003 file - promoters50/1015844
ttcgaaatca

SEQ ID NO: 65209 - DNA, 7 bp, Unknown
  misc_feature (1)..( 7): Matrix.003 file - promoters50/1015901
tatttgt

SEQ ID NO: 65210 - DNA, 10 bp, Unknown
  misc_feature (1)..( 10): Matrix.003 file - promoters50/1015901
taaacataca

SEQ ID NO: 65211 - DNA, 13 bp, Unknown
  misc_feature (1)..( 13): Matrix.003 file - promoters50/1015901
ccaaatttatcat

SEQ ID NO: 65212 - DNA, 11 bp, Unknown
  misc_feature (1)..( 11): Matrix.003 file - promoters50/1016056
aataaaataaa

SEQ ID NO: 65213 - DNA, 11 bp, Unknown
  misc_feature (1)..( 11): Matrix.003 file - promoters50/1016056
aataaaaactt

SEQ ID NO: 65214 - DNA, 6 bp, Unknown
  misc_feature (1)..( 6): Matrix.003 file - promoters50/1016063
aaatca

SEQ ID NO: 65215 - DNA, 6 bp, Unknown
  misc_feature (1)..( 6): Matrix.003 file - promoters50/1016066
acatgt

SEQ ID NO: 65216 - DNA, 9 bp, Unknown
  misc_feature (1)..( 9): Matrix.003 file - promoters50/1016066
tattattaa

SEQ ID NO: 65217 - DNA, 14 bp, Unknown
  misc_feature (1)..( 14): Matrix.003 file - promoters50/1016066
aaatacaaaaaaaa

SEQ ID NO: 65218 - DNA, 12 bp, Unknown
  misc_feature (1)..( 12): Matrix.003 file - promoters50/1016066
aaaaaaaagaaa

SEQ ID NO: 65219 - DNA, 14 bp, Unknown
  misc_feature (1)..( 14): Matrix.003 file - promoters50/1016094
cactgtgattgaat

SEQ ID NO: 65220 - DNA, 9 bp, Unknown
  misc_feature (1)..( 9): Matrix.003 file - promoters50/1016094
gaaaaaaaa

SEQ ID NO: 65221 - DNA, 8 bp, Unknown
  misc_feature (1)..( 8): Matrix.003 file - promoters50/1016133
ataacatt

SEQ ID NO: 65222 - DNA, 10 bp, Unknown
  misc_feature (1)..( 10): Matrix.003 file - promoters50/1016133
gtatatcaaa

SEQ ID NO: 65223 - DNA, 12 bp, Unknown
  misc_feature (1)..( 12): Matrix.003 file - promoters50/1016133
tatctttttctt

SEQ ID NO: 65224 - DNA, 7 bp, Unknown
  misc_feature (1)..( 7): Matrix.003 file - promoters50/1016133
tatttta

SEQ ID NO: 65225 - DNA, 10 bp, Unknown
  misc_feature (1)..( 10): Matrix.003 file - promoters50/1016133
aaaatattac

SEQ ID NO: 65226 - DNA, 8 bp, Unknown
  misc_feature (1)..( 8): Matrix.003 file - promoters50/1016133
aaatatat

SEQ ID NO: 65227 - DNA, 9 bp, Unknown
  misc_feature (1)..( 9): Matrix.003 file - promoters50/1016165
taaacaaaa

SEQ ID NO: 65228 - DNA, 13 bp, Unknown
  misc_feature (1)..( 13): Matrix.003 file - promoters50/1016165
aaattactaatgt

SEQ ID NO: 65229 - DNA, 14 bp, Unknown
  misc_feature (1)..( 14): Matrix.003 file - promoters50/1016176
aaaaataaaagctg

SEQ ID NO: 65230 - DNA, 6 bp, Unknown
  misc_feature (1)..( 6): Matrix.003 file - promoters50/1016176
cagaaa

SEQ ID NO: 65231 - DNA, 8 bp, Unknown
  misc_feature (1)..( 8): Matrix.003 file - promoters50/1016223
aaaacaac

SEQ ID NO: 65232 - DNA, 13 bp, Unknown
  misc_feature (1)..( 13): Matrix.003 file - promoters50/1016226
agatccgaaaatt

SEQ ID NO: 65233 - DNA, 9 bp, Unknown
  misc_feature (1)..( 9): Matrix.003 file - promoters50/1016226
gcaatgtct

SEQ ID NO: 65234 - DNA, 9 bp, Unknown
  misc_feature (1)..( 9): Matrix.003 file - promoters50/1016238
gatgatttt

SEQ ID NO: 65235 - DNA, 8 bp, Unknown
  misc_feature (1)..( 8): Matrix.003 file - promoters50/1016238
ccaatttt

SEQ ID NO: 65236 - DNA, 12 bp, Unknown
  misc_feature (1)..( 12): Matrix.003 file - promoters50/1016246
gatgtcgagaga

SEQ ID NO: 65237 - DNA, 10 bp, Unknown
  misc_feature (1)..( 10): Matrix.003 file - promoters50/1016246
gtgagaaaga

SEQ ID NO: 65238 - DNA, 12 bp, Unknown
  misc_feature (1)..( 12): Matrix.003 file - promoters50/1016250
aattttacatat

SEQ ID NO: 65239 - DNA, 12 bp, Unknown
  misc_feature (1)..( 12): Matrix.003 file - promoters50/1016250
aacattaaaaaa

SEQ ID NO: 65240 - DNA, 12 bp, Unknown
  misc_feature (1)..( 12): Matrix.003 file - promoters50/1016250
tttctataaact

SEQ ID NO: 65241 - DNA, 10 bp, Unknown
  misc_feature (1)..( 10): Matrix.003 file - promoters50/1016261
attaataaat

SEQ ID NO: 65242 - DNA, 7 bp, Unknown
  misc_feature (1)..( 7): Matrix.003 file - promoters50/1016261
aaaaaaa

SEQ ID NO: 65243 - DNA, 8 bp, Unknown
  misc_feature (1)..( 8): Matrix.003 file - promoters50/1016261
tatataaa

SEQ ID NO: 65244 - DNA, 11 bp, Unknown
  misc_feature (1)..( 11): Matrix.003 file - promoters50/1016268
ggattttctaa

SEQ ID NO: 65245 - DNA, 9 bp, Unknown
  misc_feature (1)..( 9): Matrix.003 file - promoters50/1016268
ttaaattct

SEQ ID NO: 65246 - DNA, 8 bp, Unknown
  misc_feature (1)..( 8): Matrix.003 file - promoters50/1016268
gaataaac

SEQ ID NO: 65247 - DNA, 7 bp, Unknown
  misc_feature (1)..( 7): Matrix.003 file - promoters50/1016268
aatacaa

SEQ ID NO: 65248 - DNA, 9 bp, Unknown
  misc_feature (1)..( 9): Matrix.003 file - promoters50/1016268
aagacaaaa

SEQ ID NO: 65249 - DNA, 8 bp, Unknown
  misc_feature (1)..( 8): Matrix.003 file - promoters50/1016268
ctctcttc

SEQ ID NO: 65250 - DNA, 10 bp, Unknown
  misc_feature (1)..( 10): Matrix.003 file - promoters50/1016268
aaaaattcaa

SEQ ID NO: 65251 - DNA, 6 bp, Unknown
  misc_feature (1)..( 6): Matrix.003 file - promoters50/1016268
ttaata

SEQ ID NO: 65252 - DNA, 9 bp, Unknown
  misc_feature (1)..( 9): Matrix.003 file - promoters50/1016268
ttttaggaa

SEQ ID NO: 65253 - DNA, 8 bp, Unknown
  misc_feature (1)..( 8): Matrix.003 file - promoters50/1016268
aaaatatt

SEQ ID NO: 65254 - DNA, 8 bp, Unknown
  misc_feature (1)..( 8): Matrix.003 file - promoters50/1016268
cgtttgat

SEQ ID NO: 65255 - DNA, 9 bp, Unknown
  misc_feature (1)..( 9): Matrix.003 file - promoters50/1016268
aaatatata

SEQ ID NO: 65256 - DNA, 6 bp, Unknown
  misc_feature (1)..( 6): Matrix.003 file - promoters50/1016268
aaataa

SEQ ID NO: 65257 - DNA, 8 bp, Unknown
  misc_feature (1)..( 8): Matrix.003 file - promoters50/1016268
aattattg

SEQ ID NO: 65258 - DNA, 8 bp, Unknown
  misc_feature (1)..( 8): Matrix.003 file - promoters50/1016268
tttccttg

SEQ ID NO: 65259 - DNA, 8 bp, Unknown
  misc_feature (1)..( 8): Matrix.003 file - promoters50/1016268
tataataa

SEQ ID NO: 65260 - DNA, 7 bp, Unknown
  misc_feature (1)..( 7): Matrix.003 file - promoters50/1016268
aaaatat

SEQ ID NO: 65261 - DNA, 8 bp, Unknown
  misc_feature (1)..( 8): Matrix.003 file - promoters50/1016278
taattatt

SEQ ID NO: 65262 - DNA, 9 bp, Unknown
  misc_feature (1)..( 9): Matrix.003 file - promoters50/1016278
tttactgat

SEQ ID NO: 65263 - DNA, 8 bp, Unknown
  misc_feature (1)..( 8): Matrix.003 file - promoters50/1016368
gagaatcg

SEQ ID NO: 65264 - DNA, 11 bp, Unknown
  misc_feature (1)..( 11): Matrix.003 file - promoters50/1016368
tcataatttgt

SEQ ID NO: 65265 - DNA, 12 bp, Unknown
  misc_feature (1)..( 12): Matrix.003 file - promoters50/1016368
aaataaaaaaca

SEQ ID NO: 65266 - DNA, 10 bp, Unknown
  misc_feature (1)..( 10): Matrix.003 file - promoters50/1016368
actatataat

SEQ ID NO: 65267 - DNA, 11 bp, Unknown
  misc_feature (1)..( 11): Matrix.003 file - promoters50/1016382
ttttaatatat

SEQ ID NO: 65268 - DNA, 9 bp, Unknown
  misc_feature (1)..( 9): Matrix.003 file - promoters50/1016418
cataattta

SEQ ID NO: 65269 - DNA, 13 bp, Unknown
  misc_feature (1)..( 13): Matrix.003 file - promoters50/1016418
tcattaatcaatg

SEQ ID NO: 65270 - DNA, 13 bp, Unknown
  misc_feature (1)..( 13): Matrix.003 file - promoters50/1016418
attatttgttgat

SEQ ID NO: 65271 - DNA, 9 bp, Unknown
  misc_feature (1)..( 9): Matrix.003 file - promoters50/1016426
gaaagttaa

SEQ ID NO: 65272 - DNA, 6 bp, Unknown
  misc_feature (1)..( 6): Matrix.003 file - promoters50/1016426
aatttt

SEQ ID NO: 65273 - DNA, 8 bp, Unknown
  misc_feature (1)..( 8): Matrix.003 file - promoters50/1016426
tttaaatt

SEQ ID NO: 65274 - DNA, 11 bp, Unknown
  misc_feature (1)..( 11): Matrix.003 file - promoters50/1016426
ttatacctaaa

SEQ ID NO: 65275 - DNA, 8 bp, Unknown
  misc_feature (1)..( 8): Matrix.003 file - promoters50/1016426
tttcttcc

SEQ ID NO: 65276 - DNA, 11 bp, Unknown
  misc_feature (1)..( 11): Matrix.003 file - promoters50/1016468
ttcaatttttt

SEQ ID NO: 65277 - DNA, 11 bp, Unknown
  misc_feature (1)..( 11): Matrix.003 file - promoters50/1016468
ataaaaaaaca

SEQ ID NO: 65278 - DNA, 9 bp, Unknown
  misc_feature (1)..( 9): Matrix.003 file - promoters50/1016468
tggccaaaa

SEQ ID NO: 65279 - DNA, 15 bp, Unknown
  misc_feature (1)..( 15): Matrix.003 file - promoters50/1016514
ttttccgaaatagtt

SEQ ID NO: 65280 - DNA, 9 bp, Unknown
  misc_feature (1)..( 9): Matrix.003 file - promoters50/1016514
taagaaaat

SEQ ID NO: 65281 - DNA, 7 bp, Unknown
  misc_feature (1)..( 7): Matrix.003 file - promoters50/1016525
tttttta

SEQ ID NO: 65282 - DNA, 8 bp, Unknown
  misc_feature (1)..( 8): Matrix.003 file - promoters50/1016525
caataaac

SEQ ID NO: 65283 - DNA, 11 bp, Unknown
  misc_feature (1)..( 11): Matrix.003 file - promoters50/1016525
agaaaaacttg

SEQ ID NO: 65284 - DNA, 6 bp, Unknown
  misc_feature (1)..( 6): Matrix.003 file - promoters50/1016525
caataa

SEQ ID NO: 65285 - DNA, 9 bp, Unknown
  misc_feature (1)..( 9): Matrix.003 file - promoters50/1016525
cagaaaaaa

SEQ ID NO: 65286 - DNA, 8 bp, Unknown
  misc_feature (1)..( 8): Matrix.003 file - promoters50/1016525
attctaaa

SEQ ID NO: 65287 - DNA, 10 bp, Unknown
  misc_feature (1)..( 10): Matrix.003 file - promoters50/1016525
aaaacaaatt

SEQ ID NO: 65288 - DNA, 9 bp, Unknown
  misc_feature (1)..( 9): Matrix.003 file - promoters50/1016525
aaataataa

SEQ ID NO: 65289 - DNA, 6 bp, Unknown
  misc_feature (1)..( 6): Matrix.003 file - promoters50/1016624
cttctt

SEQ ID NO: 65290 - DNA, 8 bp, Unknown
  misc_feature (1)..( 8): Matrix.003 file - promoters50/1016643
ttcatcta

SEQ ID NO: 65291 - DNA, 13 bp, Unknown
  misc_feature (1)..( 13): Matrix.003 file - promoters50/1016665
ccaaatatatcat

SEQ ID NO: 65292 - DNA, 10 bp, Unknown
  misc_feature (1)..( 10): Matrix.003 file - promoters50/1016692
gaaacttata

SEQ ID NO: 65293 - DNA, 10 bp, Unknown
  misc_feature (1)..( 10): Matrix.003 file - promoters50/1016692
aaaataagtt

SEQ ID NO: 65294 - DNA, 6 bp, Unknown
  misc_feature (1)..( 6): Matrix.003 file - promoters50/1016729
ttcata

SEQ ID NO: 65295 - DNA, 7 bp, Unknown
  misc_feature (1)..( 7): Matrix.003 file - promoters50/1016729
agcaaca

SEQ ID NO: 65296 - DNA, 9 bp, Unknown
  misc_feature (1)..( 9): Matrix.003 file - promoters50/1016729
agcaacaat

SEQ ID NO: 65297 - DNA, 12 bp, Unknown
  misc_feature (1)..( 12): Matrix.003 file - promoters50/1016767
taataaatttag

SEQ ID NO: 65298 - DNA, 10 bp, Unknown
  misc_feature (1)..( 10): Matrix.003 file - promoters50/1016767
ccaaatttct

SEQ ID NO: 65299 - DNA, 9 bp, Unknown
  misc_feature (1)..( 9): Matrix.003 file - promoters50/1016771
attgttcct

SEQ ID NO: 65300 - DNA, 12 bp, Unknown
  misc_feature (1)..( 12): Matrix.003 file - promoters50/1016771
ctctactttatt

SEQ ID NO: 65301 - DNA, 11 bp, Unknown
  misc_feature (1)..( 11): Matrix.003 file - promoters50/1016814
aaaacttttat

SEQ ID NO: 65302 - DNA, 9 bp, Unknown
  misc_feature (1)..( 9): Matrix.003 file - promoters50/1016814
aattttatg

SEQ ID NO: 65303 - DNA, 8 bp, Unknown
  misc_feature (1)..( 8): Matrix.003 file - promoters50/1016854
aatcttat

SEQ ID NO: 65304 - DNA, 11 bp, Unknown
  misc_feature (1)..( 11): Matrix.003 file - promoters50/1016881
ttgtaattaat

SEQ ID NO: 65305 - DNA, 8 bp, Unknown
  misc_feature (1)..( 8): Matrix.003 file - promoters50/1016881
attcattt

SEQ ID NO: 65306 - DNA, 7 bp, Unknown
  misc_feature (1)..( 7): Matrix.003 file - promoters50/1016881
gtttatt

SEQ ID NO: 65307 - DNA, 9 bp, Unknown
  misc_feature (1)..( 9): Matrix.003 file - promoters50/1016881
ttaactttt

SEQ ID NO: 65308 - DNA, 9 bp, Unknown
  misc_feature (1)..( 9): Matrix.003 file - promoters50/1016881
attattata

SEQ ID NO: 65309 - DNA, 7 bp, Unknown
  misc_feature (1)..( 7): Matrix.003 file - promoters50/1016881
aacatct

SEQ ID NO: 65310 - DNA, 11 bp, Unknown
  misc_feature (1)..( 11): Matrix.003 file - promoters50/1016915
caataaaataa

SEQ ID NO: 65311 - DNA, 8 bp, Unknown
  misc_feature (1)..( 8): Matrix.003 file - promoters50/1016915
aaaataag

SEQ ID NO: 65312 - DNA, 8 bp, Unknown
  misc_feature (1)..( 8): Matrix.003 file - promoters50/1016915
agatatat

SEQ ID NO: 65313 - DNA, 8 bp, Unknown
  misc_feature (1)..( 8): Matrix.003 file - promoters50/1016915
caaaaaat

SEQ ID NO: 65314 - DNA, 7 bp, Unknown
  misc_feature (1)..( 7): Matrix.003 file - promoters50/1016931
taaacaa

SEQ ID NO: 65315 - DNA, 10 bp, Unknown
  misc_feature (1)..( 10): Matrix.003 file - promoters50/1016931
cttatagatc

SEQ ID NO: 65316 - DNA, 9 bp, Unknown
  misc_feature (1)..( 9): Matrix.003 file - promoters50/1016931
aaatctttt

SEQ ID NO: 65317 - DNA, 7 bp, Unknown
  misc_feature (1)..( 7): Matrix.003 file - promoters50/1016931
gatatat

SEQ ID NO: 65318 - DNA, 7 bp, Unknown
  misc_feature (1)..( 7): Matrix.003 file - promoters50/1016931
atatcta

SEQ ID NO: 65319 - DNA, 10 bp, Unknown
  misc_feature (1)..( 10): Matrix.003 file - promoters50/1016931
attattgttt

SEQ ID NO: 65320 - DNA, 6 bp, Unknown
  misc_feature (1)..( 6): Matrix.003 file - promoters50/1016931
ttatct

SEQ ID NO: 65321 - DNA, 7 bp, Unknown
  misc_feature (1)..( 7): Matrix.003 file - promoters50/1016931
acaaaag

SEQ ID NO: 65322 - DNA, 12 bp, Unknown
  misc_feature (1)..( 12): Matrix.003 file - promoters50/1016931
tgataaatattt

SEQ ID NO: 65323 - DNA, 8 bp, Unknown
  misc_feature (1)..( 8): Matrix.003 file - promoters50/1016936
gttttaat

SEQ ID NO: 65324 - DNA, 9 bp, Unknown
  misc_feature (1)..( 9): Matrix.003 file - promoters50/1016936
cattttcta

SEQ ID NO: 65325 - DNA, 8 bp, Unknown
  misc_feature (1)..( 8): Matrix.003 file - promoters50/1016936
atatattt

SEQ ID NO: 65326 - DNA, 7 bp, Unknown
  misc_feature (1)..( 7): Matrix.003 file - promoters50/1016951
agatttt

SEQ ID NO: 65327 - DNA, 7 bp, Unknown
  misc_feature (1)..( 7): Matrix.003 file - promoters50/1016951
caaacac

SEQ ID NO: 65328 - DNA, 7 bp, Unknown
  misc_feature (1)..( 7): Matrix.003 file - promoters50/1016951
ttaaata

SEQ ID NO: 65329 - DNA, 7 bp, Unknown
  misc_feature (1)..( 7): Matrix.003 file - promoters50/1016951
atatata

SEQ ID NO: 65330 - DNA, 7 bp, Unknown
  misc_feature (1)..( 7): Matrix.003 file - promoters50/1016951
aattttt

SEQ ID NO: 65331 - DNA, 7 bp, Unknown
  misc_feature (1)..( 7): Matrix.003 file - promoters50/1016951
aacataa

SEQ ID NO: 65332 - DNA, 8 bp, Unknown
  misc_feature (1)..( 8): Matrix.003 file - promoters50/1016951
atacataa

SEQ ID NO: 65333 - DNA, 14 bp, Unknown
  misc_feature (1)..( 14): Matrix.003 file - promoters50/1017020
ttgaatcaaaatat

SEQ ID NO: 65334 - DNA, 8 bp, Unknown
  misc_feature (1)..( 8): Matrix.003 file - promoters50/1017020
ttaatagc

SEQ ID NO: 65335 - DNA, 7 bp, Unknown
  misc_feature (1)..( 7): Matrix.003 file - promoters50/1017020
aaaacat

SEQ ID NO: 65336 - DNA, 10 bp, Unknown
  misc_feature (1)..( 10): Matrix.003 file - promoters50/1017020
ctatactttg

SEQ ID NO: 65337 - DNA, 6 bp, Unknown
  misc_feature (1)..( 6): Matrix.003 file - promoters50/1017041
aagttt

SEQ ID NO: 65338 - DNA, 8 bp, Unknown
  misc_feature (1)..( 8): Matrix.003 file - promoters50/1017046
taatattt

SEQ ID NO: 65339 - DNA, 8 bp, Unknown
  misc_feature (1)..( 8): Matrix.003 file - promoters50/1017046
aatacttt

SEQ ID NO: 65340 - DNA, 9 bp, Unknown
  misc_feature (1)..( 9): Matrix.003 file - promoters50/1017046
cctttttta

SEQ ID NO: 65341 - DNA, 8 bp, Unknown
  misc_feature (1)..( 8): Matrix.003 file - promoters50/1017046
taaatttc

SEQ ID NO: 65342 - DNA, 14 bp, Unknown
  misc_feature (1)..( 14): Matrix.003 file - promoters50/1017046
ttaacaatttattt

SEQ ID NO: 65343 - DNA, 10 bp, Unknown
  misc_feature (1)..( 10): Matrix.003 file - promoters50/1017046
atgggttgga

SEQ ID NO: 65344 - DNA, 9 bp, Unknown
  misc_feature (1)..( 9): Matrix.003 file - promoters50/1017050
atgattaca

SEQ ID NO: 65345 - DNA, 11 bp, Unknown
  misc_feature (1)..( 11): Matrix.003 file - promoters50/1017050
tagattgatat

SEQ ID NO: 65346 - DNA, 8 bp, Unknown
  misc_feature (1)..( 8): Matrix.003 file - promoters50/1017109
ttatttac

SEQ ID NO: 65347 - DNA, 11 bp, Unknown
  misc_feature (1)..( 11): Matrix.003 file - promoters50/1017113
taaaatgaaaa

SEQ ID NO: 65348 - DNA, 9 bp, Unknown
  misc_feature (1)..( 9): Matrix.003 file - promoters50/1017113
tcaaaatac

SEQ ID NO: 65349 - DNA, 9 bp, Unknown
  misc_feature (1)..( 9): Matrix.003 file - promoters50/1017113
ttttatgtt

SEQ ID NO: 65350 - DNA, 14 bp, Unknown
  misc_feature (1)..( 14): Matrix.003 file - promoters50/1017113
ttaaggccgtatgt

SEQ ID NO: 65351 - DNA, 12 bp, Unknown
  misc_feature (1)..( 12): Matrix.003 file - promoters50/1017113
gaaagaaaatat

SEQ ID NO: 65352 - DNA, 10 bp, Unknown
  misc_feature (1)..( 10): Matrix.003 file - promoters50/1017113
attttgtttt

SEQ ID NO: 65353 - DNA, 11 bp, Unknown
  misc_feature (1)..( 11): Matrix.003 file - promoters50/1017113
aatataagata

SEQ ID NO: 65354 - DNA, 8 bp, Unknown
  misc_feature (1)..( 8): Matrix.003 file - promoters50/1017113
ttttattt

SEQ ID NO: 65355 - DNA, 9 bp, Unknown
  misc_feature (1)..( 9): Matrix.003 file - promoters50/1017131
attaataaa

SEQ ID NO: 65356 - DNA, 13 bp, Unknown
  misc_feature (1)..( 13): Matrix.003 file - promoters50/1017131
attggataaaaga

SEQ ID NO: 65357 - DNA, 10 bp, Unknown
  misc_feature (1)..( 10): Matrix.003 file - promoters50/1017131
acaaaaaaag

SEQ ID NO: 65358 - DNA, 9 bp, Unknown
  misc_feature (1)..( 9): Matrix.003 file - promoters50/1017189
aagattgat

SEQ ID NO: 65359 - DNA, 6 bp, Unknown
  misc_feature (1)..( 6): Matrix.003 file - promoters50/1017189
ttttgt

SEQ ID NO: 65360 - DNA, 9 bp, Unknown
  misc_feature (1)..( 9): Matrix.003 file - promoters50/1017189
atgttatgt

SEQ ID NO: 65361 - DNA, 9 bp, Unknown
  misc_feature (1)..( 9): Matrix.003 file - promoters50/1017189
ttttgtttt

SEQ ID NO: 65362 - DNA, 9 bp, Unknown
  misc_feature (1)..( 9): Matrix.003 file - promoters50/1017282
tctaacaac

SEQ ID NO: 65363 - DNA, 10 bp, Unknown
  misc_feature (1)..( 10): Matrix.003 file - promoters50/1017286
caatatgtga

SEQ ID NO: 65364 - DNA, 9 bp, Unknown
  misc_feature (1)..( 9): Matrix.003 file - promoters50/1017316
aaaatttga

SEQ ID NO: 65365 - DNA, 10 bp, Unknown
  misc_feature (1)..( 10): Matrix.003 file - promoters50/1017316
agaaaatcat

SEQ ID NO: 65366 - DNA, 8 bp, Unknown
  misc_feature (1)..( 8): Matrix.003 file - promoters50/1017316
tttgtctg

SEQ ID NO: 65367 - DNA, 9 bp, Unknown
  misc_feature (1)..( 9): Matrix.003 file - promoters50/1017316
aaattaatt

SEQ ID NO: 65368 - DNA, 11 bp, Unknown
  misc_feature (1)..( 11): Matrix.003 file - promoters50/1017316
atgggcctata

SEQ ID NO: 65369 - DNA, 9 bp, Unknown
  misc_feature (1)..( 9): Matrix.003 file - promoters50/1017316
tttttactt

SEQ ID NO: 65370 - DNA, 7 bp, Unknown
  misc_feature (1)..( 7): Matrix.003 file - promoters50/1017316
ttacttt

SEQ ID NO: 65371 - DNA, 9 bp, Unknown
  misc_feature (1)..( 9): Matrix.003 file - promoters50/1017316
atgtttcaa

SEQ ID NO: 65372 - DNA, 10 bp, Unknown
  misc_feature (1)..( 10): Matrix.003 file - promoters50/1017354
aaaattcgat

SEQ ID NO: 65373 - DNA, 11 bp, Unknown
  misc_feature (1)..( 11): Matrix.003 file - promoters50/1017358
aatcaaaaaag

SEQ ID NO: 65374 - DNA, 11 bp, Unknown
  misc_feature (1)..( 11): Matrix.003 file - promoters50/1017358
ccttatatata

SEQ ID NO: 65375 - DNA, 11 bp, Unknown
  misc_feature (1)..( 11): Matrix.003 file - promoters50/1017434
aagataaagaa

SEQ ID NO: 65376 - DNA, 10 bp, Unknown
  misc_feature (1)..( 10): Matrix.003 file - promoters50/1017434
cctttttatt

SEQ ID NO: 65377 - DNA, 7 bp, Unknown
  misc_feature (1)..( 7): Matrix.003 file - promoters50/1017542
caattca

SEQ ID NO: 65378 - DNA, 7 bp, Unknown
  misc_feature (1)..( 7): Matrix.003 file - promoters50/1017552
ttagaac

SEQ ID NO: 65379 - DNA, 10 bp, Unknown
  misc_feature (1)..( 10): Matrix.003 file - promoters50/1017552
agaattataa

SEQ ID NO: 65380 - DNA, 8 bp, Unknown
  misc_feature (1)..( 8): Matrix.003 file - promoters50/1017552
aggaaaaa

SEQ ID NO: 65381 - DNA, 7 bp, Unknown
  misc_feature (1)..( 7): Matrix.003 file - promoters50/1017552
aaaaaat

SEQ ID NO: 65382 - DNA, 11 bp, Unknown
  misc_feature (1)..( 11): Matrix.003 file - promoters50/1017562
atataatacta

SEQ ID NO: 65383 - DNA, 10 bp, Unknown
  misc_feature (1)..( 10): Matrix.003 file - promoters50/1017562
tatatatact

SEQ ID NO: 65384 - DNA, 10 bp, Unknown
  misc_feature (1)..( 10): Matrix.003 file - promoters50/1017562
atataatact

SEQ ID NO: 65385 - DNA, 11 bp, Unknown
  misc_feature (1)..( 11): Matrix.003 file - promoters50/1017562
aataatcaaac

SEQ ID NO: 65386 - DNA, 9 bp, Unknown
  misc_feature (1)..( 9): Matrix.003 file - promoters50/1017562
aaatataaa

SEQ ID NO: 65387 - DNA, 13 bp, Unknown
  misc_feature (1)..( 13): Matrix.003 file - promoters50/1017562
tatatatatctac

SEQ ID NO: 65388 - DNA, 8 bp, Unknown
  misc_feature (1)..( 8): Matrix.003 file - promoters50/1017562
agaataaa

SEQ ID NO: 65389 - DNA, 9 bp, Unknown
  misc_feature (1)..( 9): Matrix.003 file - promoters50/1017568
ttaatttag

SEQ ID NO: 65390 - DNA, 15 bp, Unknown
  misc_feature (1)..( 15): Matrix.003 file - promoters50/1017568
tttaatctgaaaaac

SEQ ID NO: 65391 - DNA, 8 bp, Unknown
  misc_feature (1)..( 8): Matrix.003 file - promoters50/1017593
ttgtttta

SEQ ID NO: 65392 - DNA, 8 bp, Unknown
  misc_feature (1)..( 8): Matrix.003 file - promoters50/1017596
tttgtttt

SEQ ID NO: 65393 - DNA, 8 bp, Unknown
  misc_feature (1)..( 8): Matrix.003 file - promoters50/1017596
tatttaac

SEQ ID NO: 65394 - DNA, 8 bp, Unknown
  misc_feature (1)..( 8): Matrix.003 file - promoters50/1017596
cttatgag

SEQ ID NO: 65395 - DNA, 14 bp, Unknown
  misc_feature (1)..( 14): Matrix.003 file - promoters50/1017618
tatcctataaataa

SEQ ID NO: 65396 - DNA, 12 bp, Unknown
  misc_feature (1)..( 12): Matrix.003 file - promoters50/1017618
cctataaataaa

SEQ ID NO: 65397 - DNA, 10 bp, Unknown
  misc_feature (1)..( 10): Matrix.003 file - promoters50/1017618
aaaataaaac

SEQ ID NO: 65398 - DNA, 12 bp, Unknown
  misc_feature (1)..( 12): Matrix.003 file - promoters50/1017626
tcaataacaaaa

SEQ ID NO: 65399 - DNA, 9 bp, Unknown
  misc_feature (1)..( 9): Matrix.003 file - promoters50/1017626
ttttataaa

SEQ ID NO: 65400 - DNA, 7 bp, Unknown
  misc_feature (1)..( 7): Matrix.003 file - promoters50/1017626
tctctct

SEQ ID NO: 65401 - DNA, 9 bp, Unknown
  misc_feature (1)..( 9): Matrix.003 file - promoters50/1017626
caaattgga

SEQ ID NO: 65402 - DNA, 8 bp, Unknown
  misc_feature (1)..( 8): Matrix.003 file - promoters50/1017626
aaatagta

SEQ ID NO: 65403 - DNA, 11 bp, Unknown
  misc_feature (1)..( 11): Matrix.003 file - promoters50/1017626
gcctatataaa

SEQ ID NO: 65404 - DNA, 10 bp, Unknown
  misc_feature (1)..( 10): Matrix.003 file - promoters50/1017626
gcctatataa

SEQ ID NO: 65405 - DNA, 8 bp, Unknown
  misc_feature (1)..( 8): Matrix.003 file - promoters50/1017626
aaacgaat

SEQ ID NO: 65406 - DNA, 8 bp, Unknown
  misc_feature (1)..( 8): Matrix.003 file - promoters50/1017626
ttaataac

SEQ ID NO: 65407 - DNA, 11 bp, Unknown
  misc_feature (1)..( 11): Matrix.003 file - promoters50/1017649
gaaataaaaag

SEQ ID NO: 65408 - DNA, 12 bp, Unknown
  misc_feature (1)..( 12): Matrix.003 file - promoters50/1017681
aaaagactaaaa

SEQ ID NO: 65409 - DNA, 8 bp, Unknown
  misc_feature (1)..( 8): Matrix.003 file - promoters50/1017693
aatatagt

SEQ ID NO: 65410 - DNA, 8 bp, Unknown
  misc_feature (1)..( 8): Matrix.003 file - promoters50/1017693
atttgtat

SEQ ID NO: 65411 - DNA, 9 bp, Unknown
  misc_feature (1)..( 9): Matrix.003 file - promoters50/1017693
atgtttttg

SEQ ID NO: 65412 - DNA, 8 bp, Unknown
  misc_feature (1)..( 8): Matrix.003 file - promoters50/1017693
aaaaacaa

SEQ ID NO: 65413 - DNA, 20 bp, Unknown
  misc_feature (1)..( 20): Matrix.003 file - promoters50/1017802
aaagttgctacaaattatag

SEQ ID NO: 65414 - DNA, 22 bp, Unknown
  misc_feature (1)..( 22): Matrix.003 file - promoters50/1017802
tcttttctgattttgtttctca

SEQ ID NO: 65415 - DNA, 7 bp, Unknown
  misc_feature (1)..( 7): Matrix.003 file - promoters50/1017802
aaatata

SEQ ID NO: 65416 - DNA, 8 bp, Unknown
  misc_feature (1)..( 8): Matrix.003 file - promoters50/1017802
gataaaat

SEQ ID NO: 65417 - DNA, 6 bp, Unknown
  misc_feature (1)..( 6): Matrix.003 file - promoters50/1017802
atagga

SEQ ID NO: 65418 - DNA, 8 bp, Unknown
  misc_feature (1)..( 8): Matrix.003 file - promoters50/1017802
ataaaatt

SEQ ID NO: 65419 - DNA, 12 bp, Unknown
  misc_feature (1)..( 12): Matrix.003 file - promoters50/1017802
aaaaaataaaaa

SEQ ID NO: 65420 - DNA, 10 bp, Unknown
  misc_feature (1)..( 10): Matrix.003 file - promoters50/1017883
aaagaaacat

SEQ ID NO: 65421 - DNA, 12 bp, Unknown
  misc_feature (1)..( 12): Matrix.003 file - promoters50/1017883
tccctttataaa

SEQ ID NO: 65422 - DNA, 8 bp, Unknown
  misc_feature (1)..( 8): Matrix.003 file - promoters50/1017883
tttattta

SEQ ID NO: 65423 - DNA, 12 bp, Unknown
  misc_feature (1)..( 12): Matrix.003 file - promoters50/1017883
aaaaaaaatgtt

SEQ ID NO: 65424 - DNA, 9 bp, Unknown
  misc_feature (1)..( 9): Matrix.003 file - promoters50/1017887
tttaaataa

SEQ ID NO: 65425 - DNA, 10 bp, Unknown
  misc_feature (1)..( 10): Matrix.003 file - promoters50/1017887
ttttattttt

SEQ ID NO: 65426 - DNA, 9 bp, Unknown
  misc_feature (1)..( 9): Matrix.003 file - promoters50/1017887
cattatatt

SEQ ID NO: 65427 - DNA, 12 bp, Unknown
  misc_feature (1)..( 12): Matrix.003 file - promoters50/1017887
actctcatgcat

SEQ ID NO: 65428 - DNA, 9 bp, Unknown
  misc_feature (1)..( 9): Matrix.003 file - promoters50/1017887
gatcaatgg

SEQ ID NO: 65429 - DNA, 11 bp, Unknown
  misc_feature (1)..( 11): Matrix.003 file - promoters50/1017964
aaagtataaaa

SEQ ID NO: 65430 - DNA, 9 bp, Unknown
  misc_feature (1)..( 9): Matrix.003 file - promoters50/1018052
atcaatttt

SEQ ID NO: 65431 - DNA, 13 bp, Unknown
  misc_feature (1)..( 13): Matrix.003 file - promoters50/1018052
atgattgttttaa

SEQ ID NO: 65432 - DNA, 9 bp, Unknown
  misc_feature (1)..( 9): Matrix.003 file - promoters50/1018052
aatgtttta

SEQ ID NO: 65433 - DNA, 16 bp, Unknown
  misc_feature (1)..( 16): Matrix.003 file - promoters50/1018077
cataaaatcattatat

SEQ ID NO: 65434 - DNA, 9 bp, Unknown
  misc_feature (1)..( 9): Matrix.003 file - promoters50/1018077
agtatctcc

SEQ ID NO: 65435 - DNA, 10 bp, Unknown
  misc_feature (1)..( 10): Matrix.003 file - promoters50/1018077
tcaaacaaaa

SEQ ID NO: 65436 - DNA, 7 bp, Unknown
  misc_feature (1)..( 7): Matrix.003 file - promoters50/1018077
actgttt

SEQ ID NO: 65437 - DNA, 10 bp, Unknown
  misc_feature (1)..( 10): Matrix.003 file - promoters50/1018085
aaataatttt

SEQ ID NO: 65438 - DNA, 8 bp, Unknown
  misc_feature (1)..( 8): Matrix.003 file - promoters50/1018085
gttttaag

SEQ ID NO: 65439 - DNA, 10 bp, Unknown
  misc_feature (1)..( 10): Matrix.003 file - promoters50/1018085
gagaataaag

SEQ ID NO: 65440 - DNA, 9 bp, Unknown
  misc_feature (1)..( 9): Matrix.003 file - promoters50/1018151
ggttattat

SEQ ID NO: 65441 - DNA, 7 bp, Unknown
  misc_feature (1)..( 7): Matrix.003 file - promoters50/1018151
atttaaa

SEQ ID NO: 65442 - DNA, 12 bp, Unknown
  misc_feature (1)..( 12): Matrix.003 file - promoters50/1018151
ggtctatataag

SEQ ID NO: 65443 - DNA, 8 bp, Unknown
  misc_feature (1)..( 8): Matrix.003 file - promoters50/1018151
taaaataa

SEQ ID NO: 65444 - DNA, 4 bp, Unknown
  misc_feature (1)..( 4): Matrix.003 file - promoters50/1018155
tttt

SEQ ID NO: 65445 - DNA, 11 bp, Unknown
  misc_feature (1)..( 11): Matrix.003 file - promoters50/1018155
aaattaaaaaa

SEQ ID NO: 65446 - DNA, 9 bp, Unknown
  misc_feature (1)..( 9): Matrix.003 file - promoters50/1018155
ccaaaaaaa

SEQ ID NO: 65447 - DNA, 9 bp, Unknown
  misc_feature (1)..( 9): Matrix.003 file - promoters50/1018155
tttaaataa

SEQ ID NO: 65448 - DNA, 11 bp, Unknown
  misc_feature (1)..( 11): Matrix.003 file - promoters50/1018155
aataaaaactg

SEQ ID NO: 65449 - DNA, 13 bp, Unknown
  misc_feature (1)..( 13): Matrix.003 file - promoters50/1018155
ttaattttttaca

SEQ ID NO: 65450 - DNA, 9 bp, Unknown
  misc_feature (1)..( 9): Matrix.003 file - promoters50/1018159
gaaatcgaa

SEQ ID NO: 65451 - DNA, 8 bp, Unknown
  misc_feature (1)..( 8): Matrix.003 file - promoters50/1018159
ataaattc

SEQ ID NO: 65452 - DNA, 12 bp, Unknown
  misc_feature (1)..( 12): Matrix.003 file - promoters50/1018163
ctcatgaaaaaa

SEQ ID NO: 65453 - DNA, 13 bp, Unknown
  misc_feature (1)..( 13): Matrix.003 file - promoters50/1018190
atcatttttttat

SEQ ID NO: 65454 - DNA, 9 bp, Unknown
  misc_feature (1)..( 9): Matrix.003 file - promoters50/1018206
aaatgatcc

SEQ ID NO: 65455 - DNA, 8 bp, Unknown
  misc_feature (1)..( 8): Matrix.003 file - promoters50/1018206
aaatgatc

SEQ ID NO: 65456 - DNA, 15 bp, Unknown
  misc_feature (1)..( 15): Matrix.003 file - promoters50/1018206
tgaaaaaaaaagaaa

SEQ ID NO: 65457 - DNA, 12 bp, Unknown
  misc_feature (1)..( 12): Matrix.003 file - promoters50/1018206
aaaaaaaaaaaa

SEQ ID NO: 65458 - DNA, 10 bp, Unknown
  misc_feature (1)..( 10): Matrix.003 file - promoters50/1018213
tattgtatat

SEQ ID NO: 65459 - DNA, 8 bp, Unknown
  misc_feature (1)..( 8): Matrix.003 file - promoters50/1018213
ttttttaa

SEQ ID NO: 65460 - DNA, 8 bp, Unknown
  misc_feature (1)..( 8): Matrix.003 file - promoters50/1018213
taaaaaat

SEQ ID NO: 65461 - DNA, 8 bp, Unknown
  misc_feature (1)..( 8): Matrix.003 file - promoters50/1018213
agaaattg

SEQ ID NO: 65462 - DNA, 8 bp, Unknown
  misc_feature (1)..( 8): Matrix.003 file - promoters50/1018213
aatttttt

SEQ ID NO: 65463 - DNA, 11 bp, Unknown
  misc_feature (1)..( 11): Matrix.003 file - promoters50/1018213
agacaaaaata

SEQ ID NO: 65464 - DNA, 11 bp, Unknown
  misc_feature (1)..( 11): Matrix.003 file - promoters50/1018217
ataaaaaaata

SEQ ID NO: 65465 - DNA, 8 bp, Unknown
  misc_feature (1)..( 8): Matrix.003 file - promoters50/1018217
aaaaaaaa

SEQ ID NO: 65466 - DNA, 8 bp, Unknown
  misc_feature (1)..( 8): Matrix.003 file - promoters50/1018217
tcaaatct

SEQ ID NO: 65467 - DNA, 12 bp, Unknown
  misc_feature (1)..( 12): Matrix.003 file - promoters50/1018220
tgttgtaagttt

SEQ ID NO: 65468 - DNA, 9 bp, Unknown
  misc_feature (1)..( 9): Matrix.003 file - promoters50/1018220
tcattttta

SEQ ID NO: 65469 - DNA, 10 bp, Unknown
  misc_feature (1)..( 10): Matrix.003 file - promoters50/1018220
atcaaatgca

SEQ ID NO: 65470 - DNA, 8 bp, Unknown
  misc_feature (1)..( 8): Matrix.003 file - promoters50/1018220
aagtaaac

SEQ ID NO: 65471 - DNA, 7 bp, Unknown
  misc_feature (1)..( 7): Matrix.003 file - promoters50/1018220
tagatag

SEQ ID NO: 65472 - DNA, 11 bp, Unknown
  misc_feature (1)..( 11): Matrix.003 file - promoters50/1018220
tttaagaaacg

SEQ ID NO: 65473 - DNA, 9 bp, Unknown
  misc_feature (1)..( 9): Matrix.003 file - promoters50/1018220
tcagaaaat

SEQ ID NO: 65474 - DNA, 10 bp, Unknown
  misc_feature (1)..( 10): Matrix.003 file - promoters50/1018276
taatttgtat

SEQ ID NO: 65475 - DNA, 5 bp, Unknown
  misc_feature (1)..( 5): Matrix.003 file - promoters50/1018276
ttttg

SEQ ID NO: 65476 - DNA, 6 bp, Unknown
  misc_feature (1)..( 6): Matrix.003 file - promoters50/1018382
aaaaaa

SEQ ID NO: 65477 - DNA, 10 bp, Unknown
  misc_feature (1)..( 10): Matrix.003 file - promoters50/1018382
aaaatattgt

SEQ ID NO: 65478 - DNA, 13 bp, Unknown
  misc_feature (1)..( 13): Matrix.003 file - promoters50/1018382
aaatttgtatttt

SEQ ID NO: 65479 - DNA, 9 bp, Unknown
  misc_feature (1)..( 9): Matrix.003 file - promoters50/1018382
ttttactat

SEQ ID NO: 65480 - DNA, 13 bp, Unknown
  misc_feature (1)..( 13): Matrix.003 file - promoters50/1018382
gatgttaaaaaaa

SEQ ID NO: 65481 - DNA, 8 bp, Unknown
  misc_feature (1)..( 8): Matrix.003 file - promoters50/1018391
acctaaat

SEQ ID NO: 65482 - DNA, 12 bp, Unknown
  misc_feature (1)..( 12): Matrix.003 file - promoters50/1018454
cacattttctat

SEQ ID NO: 65483 - DNA, 9 bp, Unknown
  misc_feature (1)..( 9): Matrix.003 file - promoters50/1018454
agaaaaata

SEQ ID NO: 65484 - DNA, 12 bp, Unknown
  misc_feature (1)..( 12): Matrix.003 file - promoters50/1018472
aaattttcaaat

SEQ ID NO: 65485 - DNA, 6 bp, Unknown
  misc_feature (1)..( 6): Matrix.003 file - promoters50/1018472
aaaaaa

SEQ ID NO: 65486 - DNA, 6 bp, Unknown
  misc_feature (1)..( 6): Matrix.003 file - promoters50/1018472
taaatt

SEQ ID NO: 65487 - DNA, 8 bp, Unknown
  misc_feature (1)..( 8): Matrix.003 file - promoters50/1018472
acaaaatt

SEQ ID NO: 65488 - DNA, 7 bp, Unknown
  misc_feature (1)..( 7): Matrix.003 file - promoters50/1018472
ctcaatt

SEQ ID NO: 65489 - DNA, 9 bp, Unknown
  misc_feature (1)..( 9): Matrix.003 file - promoters50/1018472
agatatttt

SEQ ID NO: 65490 - DNA, 7 bp, Unknown
  misc_feature (1)..( 7): Matrix.003 file - promoters50/1018472
ataaata

SEQ ID NO: 65491 - DNA, 8 bp, Unknown
  misc_feature (1)..( 8): Matrix.003 file - promoters50/1018523
taaaaatt

SEQ ID NO: 65492 - DNA, 10 bp, Unknown
  misc_feature (1)..( 10): Matrix.003 file - promoters50/1018523
agttaaaaaa

SEQ ID NO: 65493 - DNA, 10 bp, Unknown
  misc_feature (1)..( 10): Matrix.003 file - promoters50/1018523
tacaaaaaaa

SEQ ID NO: 65494 - DNA, 7 bp, Unknown
  misc_feature (1)..( 7): Matrix.003 file - promoters50/1018523
aaaaaat

SEQ ID NO: 65495 - DNA, 10 bp, Unknown
  misc_feature (1)..( 10): Matrix.003 file - promoters50/1018523
attaatatat

SEQ ID NO: 65496 - DNA, 15 bp, Unknown
  misc_feature (1)..( 15): Matrix.003 file - promoters50/1018523
taaaacaaatattga

SEQ ID NO: 65497 - DNA, 10 bp, Unknown
  misc_feature (1)..( 10): Matrix.003 file - promoters50/1018523
aataatatta

SEQ ID NO: 65498 - DNA, 11 bp, Unknown
  misc_feature (1)..( 11): Matrix.003 file - promoters50/1018523
ttacaaaaaaa

SEQ ID NO: 65499 - DNA, 10 bp, Unknown
  misc_feature (1)..( 10): Matrix.003 file - promoters50/1018523
aatgatatac

SEQ ID NO: 65500 - DNA, 8 bp, Unknown
  misc_feature (1)..( 8): Matrix.003 file - promoters50/1018523
tatatata

SEQ ID NO: 65501 - DNA, 14 bp, Unknown
  misc_feature (1)..( 14): Matrix.003 file - promoters50/1018529
atttatttaaaaat

SEQ ID NO: 65502 - DNA, 14 bp, Unknown
  misc_feature (1)..( 14): Matrix.003 file - promoters50/1018536
tatatttgttaaac

SEQ ID NO: 65503 - DNA, 11 bp, Unknown
  misc_feature (1)..( 11): Matrix.003 file - promoters50/1018536
atatttataat

SEQ ID NO: 65504 - DNA, 12 bp, Unknown
  misc_feature (1)..( 12): Matrix.003 file - promoters50/1018536
tatataaaaaaa

SEQ ID NO: 65505 - DNA, 11 bp, Unknown
  misc_feature (1)..( 11): Matrix.003 file - promoters50/1018536
attgatgaaga

SEQ ID NO: 65506 - DNA, 15 bp, Unknown
  misc_feature (1)..( 15): Matrix.003 file - promoters50/1018536
taaattttaaaaata

SEQ ID NO: 65507 - DNA, 9 bp, Unknown
  misc_feature (1)..( 9): Matrix.003 file - promoters50/1018536
ctaatgtaa

SEQ ID NO: 65508 - DNA, 12 bp, Unknown
  misc_feature (1)..( 12): Matrix.003 file - promoters50/1018536
ataaaaatatca

SEQ ID NO: 65509 - DNA, 12 bp, Unknown
  misc_feature (1)..( 12): Matrix.003 file - promoters50/1018536
aatataatttag

SEQ ID NO: 65510 - DNA, 12 bp, Unknown
  misc_feature (1)..( 12): Matrix.003 file - promoters50/1018691
gaaaaaggcaaa

SEQ ID NO: 65511 - DNA, 7 bp, Unknown
  misc_feature (1)..( 7): Matrix.003 file - promoters50/1018691
tacattt

SEQ ID NO: 65512 - DNA, 10 bp, Unknown
  misc_feature (1)..( 10): Matrix.003 file - promoters50/1018698
aatcgaaaag

SEQ ID NO: 65513 - DNA, 10 bp, Unknown
  misc_feature (1)..( 10): Matrix.003 file - promoters50/1018743
gtccttgtcg

SEQ ID NO: 65514 - DNA, 8 bp, Unknown
  misc_feature (1)..( 8): Matrix.003 file - promoters50/1018755
aactgctt

SEQ ID NO: 65515 - DNA, 11 bp, Unknown
  misc_feature (1)..( 11): Matrix.003 file - promoters50/1018755
tttttatttac

SEQ ID NO: 65516 - DNA, 15 bp, Unknown
  misc_feature (1)..( 15): Matrix.003 file - promoters50/1018770
gacataaattttttt

SEQ ID NO: 65517 - DNA, 15 bp, Unknown
  misc_feature (1)..( 15): Matrix.003 file - promoters50/1018770
ccaaaactttttgat

SEQ ID NO: 65518 - DNA, 11 bp, Unknown
  misc_feature (1)..( 11): Matrix.003 file - promoters50/1018783
tttataatatt

SEQ ID NO: 65519 - DNA, 9 bp, Unknown
  misc_feature (1)..( 9): Matrix.003 file - promoters50/1018783
aaaaataat

SEQ ID NO: 65520 - DNA, 16 bp, Unknown
  misc_feature (1)..( 16): Matrix.003 file - promoters50/1018783
actcaataatttaaat

SEQ ID NO: 65521 - DNA, 7 bp, Unknown
  misc_feature (1)..( 7): Matrix.003 file - promoters50/1018786
tattttt

SEQ ID NO: 65522 - DNA, 8 bp, Unknown
  misc_feature (1)..( 8): Matrix.003 file - promoters50/1018786
cttattat

SEQ ID NO: 65523 - DNA, 10 bp, Unknown
  misc_feature (1)..( 10): Matrix.003 file - promoters50/1018786
attggttggt

SEQ ID NO: 65524 - DNA, 9 bp, Unknown
  misc_feature (1)..( 9): Matrix.003 file - promoters50/1018835
gtttcaata

SEQ ID NO: 65525 - DNA, 8 bp, Unknown
  misc_feature (1)..( 8): Matrix.003 file - promoters50/1018835
gaaatgcg

SEQ ID NO: 65526 - DNA, 8 bp, Unknown
  misc_feature (1)..( 8): Matrix.003 file - promoters50/1018890
ttaatatt

SEQ ID NO: 65527 - DNA, 7 bp, Unknown
  misc_feature (1)..( 7): Matrix.003 file - promoters50/1018890
aaaaatg

SEQ ID NO: 65528 - DNA, 8 bp, Unknown
  misc_feature (1)..( 8): Matrix.003 file - promoters50/1018890
attattga

SEQ ID NO: 65529 - DNA, 7 bp, Unknown
  misc_feature (1)..( 7): Matrix.003 file - promoters50/1018890
aaaataa

SEQ ID NO: 65530 - DNA, 9 bp, Unknown
  misc_feature (1)..( 9): Matrix.003 file - promoters50/1018890
aaataaatt

SEQ ID NO: 65531 - DNA, 9 bp, Unknown
  misc_feature (1)..( 9): Matrix.003 file - promoters50/1018890
ctatatata

SEQ ID NO: 65532 - DNA, 8 bp, Unknown
  misc_feature (1)..( 8): Matrix.003 file - promoters50/1018890
aatttatt

SEQ ID NO: 65533 - DNA, 8 bp, Unknown
  misc_feature (1)..( 8): Matrix.003 file - promoters50/1018890
actagttc

SEQ ID NO: 65534 - DNA, 11 bp, Unknown
  misc_feature (1)..( 11): Matrix.003 file - promoters50/1018890
gcaattttatt

SEQ ID NO: 65535 - DNA, 13 bp, Unknown
  misc_feature (1)..( 13): Matrix.003 file - promoters50/1018890
ggtggaacatgaa

SEQ ID NO: 65536 - DNA, 8 bp, Unknown
  misc_feature (1)..( 8): Matrix.003 file - promoters50/1018890
gcatccaa

SEQ ID NO: 65537 - DNA, 7 bp, Unknown
  misc_feature (1)..( 7): Matrix.003 file - promoters50/1018890
atacata

SEQ ID NO: 65538 - DNA, 11 bp, Unknown
  misc_feature (1)..( 11): Matrix.003 file - promoters50/1018920
ctaatttcaca

SEQ ID NO: 65539 - DNA, 7 bp, Unknown
  misc_feature (1)..( 7): Matrix.003 file - promoters50/1018956
aaaagaa

SEQ ID NO: 65540 - DNA, 11 bp, Unknown
  misc_feature (1)..( 11): Matrix.003 file - promoters50/1018973
aataagttata

SEQ ID NO: 65541 - DNA, 11 bp, Unknown
  misc_feature (1)..( 11): Matrix.003 file - promoters50/1018973
ctataaataaa

SEQ ID NO: 65542 - DNA, 11 bp, Unknown
  misc_feature (1)..( 11): Matrix.003 file - promoters50/1018973
atatttttaaa

SEQ ID NO: 65543 - DNA, 10 bp, Unknown
  misc_feature (1)..( 10): Matrix.003 file - promoters50/1018973
aatttgttat

SEQ ID NO: 65544 - DNA, 10 bp, Unknown
  misc_feature (1)..( 10): Matrix.003 file - promoters50/1019024
atttatttat

SEQ ID NO: 65545 - DNA, 12 bp, Unknown
  misc_feature (1)..( 12): Matrix.003 file - promoters50/1019030
taaattttgaaa

SEQ ID NO: 65546 - DNA, 10 bp, Unknown
  misc_feature (1)..( 10): Matrix.003 file - promoters50/1019030
ttacaaaata

SEQ ID NO: 65547 - DNA, 11 bp, Unknown
  misc_feature (1)..( 11): Matrix.003 file - promoters50/1019030
tcaaagaaaaa

SEQ ID NO: 65548 - DNA, 7 bp, Unknown
  misc_feature (1)..( 7): Matrix.003 file - promoters50/1019030
attttag

SEQ ID NO: 65549 - DNA, 7 bp, Unknown
  misc_feature (1)..( 7): Matrix.003 file - promoters50/1019030
ataaaaa

SEQ ID NO: 65550 - DNA, 9 bp, Unknown
  misc_feature (1)..( 9): Matrix.003 file - promoters50/1019030
aaaacaaaa

SEQ ID NO: 65551 - DNA, 8 bp, Unknown
  misc_feature (1)..( 8): Matrix.003 file - promoters50/1019030
tattttag

SEQ ID NO: 65552 - DNA, 7 bp, Unknown
  misc_feature (1)..( 7): Matrix.003 file - promoters50/1019030
ataaaaa

SEQ ID NO: 65553 - DNA, 8 bp, Unknown
  misc_feature (1)..( 8): Matrix.003 file - promoters50/1019030
aaaacatg

SEQ ID NO: 65554 - DNA, 8 bp, Unknown
  misc_feature (1)..( 8): Matrix.003 file - promoters50/1019030
tattataa

SEQ ID NO: 65555 - DNA, 8 bp, Unknown
  misc_feature (1)..( 8): Matrix.003 file - promoters50/1019030
aattatag

SEQ ID NO: 65556 - DNA, 6 bp, Unknown
  misc_feature (1)..( 6): Matrix.003 file - promoters50/1019030
ataaaa

SEQ ID NO: 65557 - DNA, 7 bp, Unknown
  misc_feature (1)..( 7): Matrix.003 file - promoters50/1019030
tgtataa

SEQ ID NO: 65558 - DNA, 9 bp, Unknown
  misc_feature (1)..( 9): Matrix.003 file - promoters50/1019030
aaaataaaa

SEQ ID NO: 65559 - DNA, 11 bp, Unknown
  misc_feature (1)..( 11): Matrix.003 file - promoters50/1019048
cgatgatataa

SEQ ID NO: 65560 - DNA, 12 bp, Unknown
  misc_feature (1)..( 12): Matrix.003 file - promoters50/1019048
ttttaacgaaaa

SEQ ID NO: 65561 - DNA, 8 bp, Unknown
  misc_feature (1)..( 8): Matrix.003 file - promoters50/1019052
catatgtt

SEQ ID NO: 65562 - DNA, 7 bp, Unknown
  misc_feature (1)..( 7): Matrix.003 file - promoters50/1019052
ttataaa

SEQ ID NO: 65563 - DNA, 10 bp, Unknown
  misc_feature (1)..( 10): Matrix.003 file - promoters50/1019052
ttaacagaga

SEQ ID NO: 65564 - DNA, 9 bp, Unknown
  misc_feature (1)..( 9): Matrix.003 file - promoters50/1019067
aaaaaaatg

SEQ ID NO: 65565 - DNA, 10 bp, Unknown
  misc_feature (1)..( 10): Matrix.003 file - promoters50/1019067
tatatatata

SEQ ID NO: 65566 - DNA, 10 bp, Unknown
  misc_feature (1)..( 10): Matrix.003 file - promoters50/1019067
aatccaatta

SEQ ID NO: 65567 - DNA, 10 bp, Unknown
  misc_feature (1)..( 10): Matrix.003 file - promoters50/1019067
taaaagaaaa

SEQ ID NO: 65568 - DNA, 11 bp, Unknown
  misc_feature (1)..( 11): Matrix.003 file - promoters50/1019105
gctacgaaaat

SEQ ID NO: 65569 - DNA, 10 bp, Unknown
  misc_feature (1)..( 10): Matrix.003 file - promoters50/1019105
gcaacgaaaa

SEQ ID NO: 65570 - DNA, 8 bp, Unknown
  misc_feature (1)..( 8): Matrix.003 file - promoters50/1019111
ataagata

SEQ ID NO: 65571 - DNA, 7 bp, Unknown
  misc_feature (1)..( 7): Matrix.003 file - promoters50/1019111
gttttag

SEQ ID NO: 65572 - DNA, 11 bp, Unknown
  misc_feature (1)..( 11): Matrix.003 file - promoters50/1019111
ttatattttag

SEQ ID NO: 65573 - DNA, 8 bp, Unknown
  misc_feature (1)..( 8): Matrix.003 file - promoters50/1019111
attttttt

SEQ ID NO: 65574 - DNA, 15 bp, Unknown
  misc_feature (1)..( 15): Matrix.003 file - promoters50/1019111
ttttatttatttcaa

SEQ ID NO: 65575 - DNA, 7 bp, Unknown
  misc_feature (1)..( 7): Matrix.003 file - promoters50/1019253
tttcttc

SEQ ID NO: 65576 - DNA, 9 bp, Unknown
  misc_feature (1)..( 9): Matrix.003 file - promoters50/1019253
tattatttc

SEQ ID NO: 65577 - DNA, 11 bp, Unknown
  misc_feature (1)..( 11): Matrix.003 file - promoters50/1019253
attaaagaaaa

SEQ ID NO: 65578 - DNA, 9 bp, Unknown
  misc_feature (1)..( 9): Matrix.003 file - promoters50/1019253
tttttcttt

SEQ ID NO: 65579 - DNA, 11 bp, Unknown
  misc_feature (1)..( 11): Matrix.003 file - promoters50/1019253
attaaagaaaa

SEQ ID NO: 65580 - DNA, 12 bp, Unknown
  misc_feature (1)..( 12): Matrix.003 file - promoters50/1019257
agatttttaatt

SEQ ID NO: 65581 - DNA, 10 bp, Unknown
  misc_feature (1)..( 10): Matrix.003 file - promoters50/1019257
atttgactta

SEQ ID NO: 65582 - DNA, 15 bp, Unknown
  misc_feature (1)..( 15): Matrix.003 file - promoters50/1019257
aggattttgttatta

SEQ ID NO: 65583 - DNA, 8 bp, Unknown
  misc_feature (1)..( 8): Matrix.003 file - promoters50/1019260
aaaacctg

SEQ ID NO: 65584 - DNA, 10 bp, Unknown
  misc_feature (1)..( 10): Matrix.003 file - promoters50/1019260
gttatgcttt

SEQ ID NO: 65585 - DNA, 11 bp, Unknown
  misc_feature (1)..( 11): Matrix.003 file - promoters50/1019287
tatcaaaaaca

SEQ ID NO: 65586 - DNA, 12 bp, Unknown
  misc_feature (1)..( 12): Matrix.003 file - promoters50/1019287
gaaatattttta

SEQ ID NO: 65587 - DNA, 11 bp, Unknown
  misc_feature (1)..( 11): Matrix.003 file - promoters50/1019287
acaaaagataa

SEQ ID NO: 65588 - DNA, 12 bp, Unknown
  misc_feature (1)..( 12): Matrix.003 file - promoters50/1019494
aattaacttttt

SEQ ID NO: 65589 - DNA, 7 bp, Unknown
  misc_feature (1)..( 7): Matrix.003 file - promoters50/1019494
atatata

SEQ ID NO: 65590 - DNA, 10 bp, Unknown
  misc_feature (1)..( 10): Matrix.003 file - promoters50/1019498
gcggtaacta

SEQ ID NO: 65591 - DNA, 15 bp, Unknown
  misc_feature (1)..( 15): Matrix.003 file - promoters50/1019498
caaagtataataaac

SEQ ID NO: 65592 - DNA, 9 bp, Unknown
  misc_feature (1)..( 9): Matrix.003 file - promoters50/1019498
cttatttaa

SEQ ID NO: 65593 - DNA, 8 bp, Unknown
  misc_feature (1)..( 8): Matrix.003 file - promoters50/1019498
atatatgt

SEQ ID NO: 65594 - DNA, 10 bp, Unknown
  misc_feature (1)..( 10): Matrix.003 file - promoters50/1019498
aatcatgtat

SEQ ID NO: 65595 - DNA, 12 bp, Unknown
  misc_feature (1)..( 12): Matrix.003 file - promoters50/1019498
agtataataaac

SEQ ID NO: 65596 - DNA, 8 bp, Unknown
  misc_feature (1)..( 8): Matrix.003 file - promoters50/1019498
ctttttca

SEQ ID NO: 65597 - DNA, 9 bp, Unknown
  misc_feature (1)..( 9): Matrix.003 file - promoters50/1019524
gaatgtaga

SEQ ID NO: 65598 - DNA, 9 bp, Unknown
  misc_feature (1)..( 9): Matrix.003 file - promoters50/1019537
tgtattttt

SEQ ID NO: 65599 - DNA, 10 bp, Unknown
  misc_feature (1)..( 10): Matrix.003 file - promoters50/1019537
aatagataga

SEQ ID NO: 65600 - DNA, 8 bp, Unknown
  misc_feature (1)..( 8): Matrix.003 file - promoters50/1019537
tatataaa

SEQ ID NO: 65601 - DNA, 10 bp, Unknown
  misc_feature (1)..( 10): Matrix.003 file - promoters50/1019537
agtgaatgaa

SEQ ID NO: 65602 - DNA, 8 bp, Unknown
  misc_feature (1)..( 8): Matrix.003 file - promoters50/1019545
atatactc

SEQ ID NO: 65603 - DNA, 8 bp, Unknown
  misc_feature (1)..( 8): Matrix.003 file - promoters50/1019545
gaagcaga

SEQ ID NO: 65604 - DNA, 7 bp, Unknown
  misc_feature (1)..( 7): Matrix.003 file - promoters50/1019545
ttttatt

SEQ ID NO: 65605 - DNA, 10 bp, Unknown
  misc_feature (1)..( 10): Matrix.003 file - promoters50/1019545
atagtataga

SEQ ID NO: 65606 - DNA, 10 bp, Unknown
  misc_feature (1)..( 10): Matrix.003 file - promoters50/1019545
ataatataat

SEQ ID NO: 65607 - DNA, 10 bp, Unknown
  misc_feature (1)..( 10): Matrix.003 file - promoters50/1019559
taaagtaaag

SEQ ID NO: 65608 - DNA, 11 bp, Unknown
  misc_feature (1)..( 11): Matrix.003 file - promoters50/1019559
aaaagttgcag

SEQ ID NO: 65609 - DNA, 10 bp, Unknown
  misc_feature (1)..( 10): Matrix.003 file - promoters50/1019559
aattttgaaa

SEQ ID NO: 65610 - DNA, 11 bp, Unknown
  misc_feature (1)..( 11): Matrix.003 file - promoters50/1019559
ggagaaagaaa

SEQ ID NO: 65611 - DNA, 9 bp, Unknown
  misc_feature (1)..( 9): Matrix.003 file - promoters50/1019559
ttcttagct

SEQ ID NO: 65612 - DNA, 8 bp, Unknown
  misc_feature (1)..( 8): Matrix.003 file - promoters50/1019559
gaaagatt

SEQ ID NO: 65613 - DNA, 15 bp, Unknown
  misc_feature (1)..( 15): Matrix.003 file - promoters50/1019604
tctcaactatataaa

SEQ ID NO: 65614 - DNA, 13 bp, Unknown
  misc_feature (1)..( 13): Matrix.003 file - promoters50/1019604
tgtctaaaaataa

SEQ ID NO: 65615 - DNA, 9 bp, Unknown
  misc_feature (1)..( 9): Matrix.003 file - promoters50/1019604
acaagacat

SEQ ID NO: 65616 - DNA, 8 bp, Unknown
  misc_feature (1)..( 8): Matrix.003 file - promoters50/1019659
gttctatt

SEQ ID NO: 65617 - DNA, 8 bp, Unknown
  misc_feature (1)..( 8): Matrix.003 file - promoters50/1019659
tttatttt

SEQ ID NO: 65618 - DNA, 8 bp, Unknown
  misc_feature (1)..( 8): Matrix.003 file - promoters50/1019663
gttttgaa

SEQ ID NO: 65619 - DNA, 10 bp, Unknown
  misc_feature (1)..( 10): Matrix.003 file - promoters50/1019663
aacatacaac

SEQ ID NO: 65620 - DNA, 9 bp, Unknown
  misc_feature (1)..( 9): Matrix.003 file - promoters50/1019663
ttttgaaat

SEQ ID NO: 65621 - DNA, 7 bp, Unknown
  misc_feature (1)..( 7): Matrix.003 file - promoters50/1019663
ttttgaa

SEQ ID NO: 65622 - DNA, 7 bp, Unknown
  misc_feature (1)..( 7): Matrix.003 file - promoters50/1019663
cttatat

SEQ ID NO: 65623 - DNA, 8 bp, Unknown
  misc_feature (1)..( 8): Matrix.003 file - promoters50/1019695
atttgtta

SEQ ID NO: 65624 - DNA, 9 bp, Unknown
  misc_feature (1)..( 9): Matrix.003 file - promoters50/1019695
gttgatgga

SEQ ID NO: 65625 - DNA, 8 bp, Unknown
  misc_feature (1)..( 8): Matrix.003 file - promoters50/1019695
ttttcaac

SEQ ID NO: 65626 - DNA, 11 bp, Unknown
  misc_feature (1)..( 11): Matrix.003 file - promoters50/1019734
aaaataagttt

SEQ ID NO: 65627 - DNA, 10 bp, Unknown
  misc_feature (1)..( 10): Matrix.003 file - promoters50/1019746
gaattgattc

SEQ ID NO: 65628 - DNA, 10 bp, Unknown
  misc_feature (1)..( 10): Matrix.003 file - promoters50/1019746
taaggcccaa

SEQ ID NO: 65629 - DNA, 12 bp, Unknown
  misc_feature (1)..( 12): Matrix.003 file - promoters50/1019746
agtatgttatat

SEQ ID NO: 65630 - DNA, 7 bp, Unknown
  misc_feature (1)..( 7): Matrix.003 file - promoters50/1019764
tttgttt

SEQ ID NO: 65631 - DNA, 9 bp, Unknown
  misc_feature (1)..( 9): Matrix.003 file - promoters50/1019764
agatgtatt

SEQ ID NO: 65632 - DNA, 11 bp, Unknown
  misc_feature (1)..( 11): Matrix.003 file - promoters50/1019776
ataatttgttt

SEQ ID NO: 65633 - DNA, 9 bp, Unknown
  misc_feature (1)..( 9): Matrix.003 file - promoters50/1019776
gtatataaa

SEQ ID NO: 65634 - DNA, 9 bp, Unknown
  misc_feature (1)..( 9): Matrix.003 file - promoters50/1019776
aaagtaaag

SEQ ID NO: 65635 - DNA, 8 bp, Unknown
  misc_feature (1)..( 8): Matrix.003 file - promoters50/1019776
ttaattca

SEQ ID NO: 65636 - DNA, 10 bp, Unknown
  misc_feature (1)..( 10): Matrix.003 file - promoters50/1019907
ttttcactaa

SEQ ID NO: 65637 - DNA, 11 bp, Unknown
  misc_feature (1)..( 11): Matrix.003 file - promoters50/1019907
tcacaaactta

SEQ ID NO: 65638 - DNA, 8 bp, Unknown
  misc_feature (1)..( 8): Matrix.003 file - promoters50/1019907
atataatt

SEQ ID NO: 65639 - DNA, 7 bp, Unknown
  misc_feature (1)..( 7): Matrix.003 file - promoters50/1019915
aactaga

SEQ ID NO: 65640 - DNA, 8 bp, Unknown
  misc_feature (1)..( 8): Matrix.003 file - promoters50/1019915
tgtcaaat

SEQ ID NO: 65641 - DNA, 10 bp, Unknown
  misc_feature (1)..( 10): Matrix.003 file - promoters50/1019915
ttaagaaaaa

SEQ ID NO: 65642 - DNA, 8 bp, Unknown
  misc_feature (1)..( 8): Matrix.003 file - promoters50/1019915
ctaaaaac

SEQ ID NO: 65643 - DNA, 8 bp, Unknown
  misc_feature (1)..( 8): Matrix.003 file - promoters50/1019915
aaaataaa

SEQ ID NO: 65644 - DNA, 8 bp, Unknown
  misc_feature (1)..( 8): Matrix.003 file - promoters50/1019915
tttttagt

SEQ ID NO: 65645 - DNA, 12 bp, Unknown
  misc_feature (1)..( 12): Matrix.003 file - promoters50/1019915
ataaaaccatta

SEQ ID NO: 65646 - DNA, 10 bp, Unknown
  misc_feature (1)..( 10): Matrix.003 file - promoters50/1019915
ttatattgat

SEQ ID NO: 65647 - DNA, 16 bp, Unknown
  misc_feature (1)..( 16): Matrix.003 file - promoters50/1019928
ataactttataattat

SEQ ID NO: 65648 - DNA, 13 bp, Unknown
  misc_feature (1)..( 13): Matrix.003 file - promoters50/1019928
aaattatattgtt

SEQ ID NO: 65649 - DNA, 13 bp, Unknown
  misc_feature (1)..( 13): Matrix.003 file - promoters50/1019928
aattttaaaattt

SEQ ID NO: 65650 - DNA, 8 bp, Unknown
  misc_feature (1)..( 8): Matrix.003 file - promoters50/1019928
ctataaaa

SEQ ID NO: 65651 - DNA, 11 bp, Unknown
  misc_feature (1)..( 11): Matrix.003 file - promoters50/1019928
atataaataac

SEQ ID NO: 65652 - DNA, 9 bp, Unknown
  misc_feature (1)..( 9): Matrix.003 file - promoters50/1019928
agaaaattt

SEQ ID NO: 65653 - DNA, 10 bp, Unknown
  misc_feature (1)..( 10): Matrix.003 file - promoters50/1019979
ataaaatatg

SEQ ID NO: 65654 - DNA, 8 bp, Unknown
  misc_feature (1)..( 8): Matrix.003 file - promoters50/1020005
tctaaaac

SEQ ID NO: 65655 - DNA, 11 bp, Unknown
  misc_feature (1)..( 11): Matrix.003 file - promoters50/1020005
aagaaaaaagg

SEQ ID NO: 65656 - DNA, 7 bp, Unknown
  misc_feature (1)..( 7): Matrix.003 file - promoters50/1020019
agttttt

SEQ ID NO: 65657 - DNA, 9 bp, Unknown
  misc_feature (1)..( 9): Matrix.003 file - promoters50/1020019
tttttaatc

SEQ ID NO: 65658 - DNA, 9 bp, Unknown
  misc_feature (1)..( 9): Matrix.003 file - promoters50/1020019
atatatttt

SEQ ID NO: 65659 - DNA, 8 bp, Unknown
  misc_feature (1)..( 8): Matrix.003 file - promoters50/1020019
agacaaac

SEQ ID NO: 65660 - DNA, 8 bp, Unknown
  misc_feature (1)..( 8): Matrix.003 file - promoters50/1020019
gacattta

SEQ ID NO: 65661 - DNA, 9 bp, Unknown
  misc_feature (1)..( 9): Matrix.003 file - promoters50/1020019
ataatatat

SEQ ID NO: 65662 - DNA, 12 bp, Unknown
  misc_feature (1)..( 12): Matrix.003 file - promoters50/1020019
tattgacaaaat

SEQ ID NO: 65663 - DNA, 8 bp, Unknown
  misc_feature (1)..( 8): Matrix.003 file - promoters50/1020019
cattaaaa

SEQ ID NO: 65664 - DNA, 11 bp, Unknown
  misc_feature (1)..( 11): Matrix.003 file - promoters50/1020023
aattttatata

SEQ ID NO: 65665 - DNA, 12 bp, Unknown
  misc_feature (1)..( 12): Matrix.003 file - promoters50/1020023
tcctataaatat

SEQ ID NO: 65666 - DNA, 14 bp, Unknown
  misc_feature (1)..( 14): Matrix.003 file - promoters50/1020023
accataattaaatt

SEQ ID NO: 65667 - DNA, 12 bp, Unknown
  misc_feature (1)..( 12): Matrix.003 file - promoters50/1020023
gattttatgtat

SEQ ID NO: 65668 - DNA, 10 bp, Unknown
  misc_feature (1)..( 10): Matrix.003 file - promoters50/1020046
atcttaataa

SEQ ID NO: 65669 - DNA, 8 bp, Unknown
  misc_feature (1)..( 8): Matrix.003 file - promoters50/1020046
tttataaa

SEQ ID NO: 65670 - DNA, 9 bp, Unknown
  misc_feature (1)..( 9): Matrix.003 file - promoters50/1020046
aatttatat

SEQ ID NO: 65671 - DNA, 14 bp, Unknown
  misc_feature (1)..( 14): Matrix.003 file - promoters50/1020046
taataaaaaacaaa

SEQ ID NO: 65672 - DNA, 10 bp, Unknown
  misc_feature (1)..( 10): Matrix.003 file - promoters50/1020046
aaaaaattta

SEQ ID NO: 65673 - DNA, 10 bp, Unknown
  misc_feature (1)..( 10): Matrix.003 file - promoters50/1020046
tttataaaca

SEQ ID NO: 65674 - DNA, 13 bp, Unknown
  misc_feature (1)..( 13): Matrix.003 file - promoters50/1020046
tttcaaaattgag

SEQ ID NO: 65675 - DNA, 11 bp, Unknown
  misc_feature (1)..( 11): Matrix.003 file - promoters50/1020046
aacaaaatata

SEQ ID NO: 65676 - DNA, 12 bp, Unknown
  misc_feature (1)..( 12): Matrix.003 file - promoters50/1020046
aataaaaaataa

SEQ ID NO: 65677 - DNA, 8 bp, Unknown
  misc_feature (1)..( 8): Matrix.003 file - promoters50/1020145
atttgaat

SEQ ID NO: 65678 - DNA, 9 bp, Unknown
  misc_feature (1)..( 9): Matrix.003 file - promoters50/1020208
caataaatg

SEQ ID NO: 65679 - DNA, 12 bp, Unknown
  misc_feature (1)..( 12): Matrix.003 file - promoters50/1020208
actgatgaatgt

SEQ ID NO: 65680 - DNA, 9 bp, Unknown
  misc_feature (1)..( 9): Matrix.003 file - promoters50/1020223
tttgtagtg

SEQ ID NO: 65681 - DNA, 8 bp, Unknown
  misc_feature (1)..( 8): Matrix.003 file - promoters50/1020223
gatttgtt

SEQ ID NO: 65682 - DNA, 8 bp, Unknown
  misc_feature (1)..( 8): Matrix.003 file - promoters50/1020223
tgatttgt

SEQ ID NO: 65683 - DNA, 12 bp, Unknown
  misc_feature (1)..( 12): Matrix.003 file - promoters50/1020223
gatttgttcaat

SEQ ID NO: 65684 - DNA, 7 bp, Unknown
  misc_feature (1)..( 7): Matrix.003 file - promoters50/1020223
gtttgtt

SEQ ID NO: 65685 - DNA, 8 bp, Unknown
  misc_feature (1)..( 8): Matrix.003 file - promoters50/1020223
atcatatt

SEQ ID NO: 65686 - DNA, 8 bp, Unknown
  misc_feature (1)..( 8): Matrix.003 file - promoters50/1020265
atgactta

SEQ ID NO: 65687 - DNA, 7 bp, Unknown
  misc_feature (1)..( 7): Matrix.003 file - promoters50/1020265
attgtgt

SEQ ID NO: 65688 - DNA, 8 bp, Unknown
  misc_feature (1)..( 8): Matrix.003 file - promoters50/1020265
attattct

SEQ ID NO: 65689 - DNA, 8 bp, Unknown
  misc_feature (1)..( 8): Matrix.003 file - promoters50/1020265
tgaagaaa

SEQ ID NO: 65690 - DNA, 8 bp, Unknown
  misc_feature (1)..( 8): Matrix.003 file - promoters50/1020272
gcggcaac

SEQ ID NO: 65691 - DNA, 8 bp, Unknown
  misc_feature (1)..( 8): Matrix.003 file - promoters50/1020272
aaacgttt

SEQ ID NO: 65692 - DNA, 7 bp, Unknown
  misc_feature (1)..( 7): Matrix.003 file - promoters50/1020272
tttattt

SEQ ID NO: 65693 - DNA, 11 bp, Unknown
  misc_feature (1)..( 11): Matrix.003 file - promoters50/1020272
gcggtaactaa

SEQ ID NO: 65694 - DNA, 9 bp, Unknown
  misc_feature (1)..( 9): Matrix.003 file - promoters50/1020272
ttgagattg

SEQ ID NO: 65695 - DNA, 11 bp, Unknown
  misc_feature (1)..( 11): Matrix.003 file - promoters50/1020274
aaatttaaaaa

SEQ ID NO: 65696 - DNA, 11 bp, Unknown
  misc_feature (1)..( 11): Matrix.003 file - promoters50/1020274
aaagaataaaa

SEQ ID NO: 65697 - DNA, 15 bp, Unknown
  misc_feature (1)..( 15): Matrix.003 file - promoters50/1020274
tgaaaataacaacaa

SEQ ID NO: 65698 - DNA, 9 bp, Unknown
  misc_feature (1)..( 9): Matrix.003 file - promoters50/1020274
tattaatat

SEQ ID NO: 65699 - DNA, 16 bp, Unknown
  misc_feature (1)..( 16): Matrix.003 file - promoters50/1020274
aaagtaacaacaaata

SEQ ID NO: 65700 - DNA, 9 bp, Unknown
  misc_feature (1)..( 9): Matrix.003 file - promoters50/1020274
aatatttaa

SEQ ID NO: 65701 - DNA, 9 bp, Unknown
  misc_feature (1)..( 9): Matrix.003 file - promoters50/1020274
tatttaatt

SEQ ID NO: 65702 - DNA, 7 bp, Unknown
  misc_feature (1)..( 7): Matrix.003 file - promoters50/1020313
tgtttat

SEQ ID NO: 65703 - DNA, 11 bp, Unknown
  misc_feature (1)..( 11): Matrix.003 file - promoters50/1020313
ataacgtcatc

SEQ ID NO: 65704 - DNA, 11 bp, Unknown
  misc_feature (1)..( 11): Matrix.003 file - promoters50/1020362
ccccaaacaaa

SEQ ID NO: 65705 - DNA, 7 bp, Unknown
  misc_feature (1)..( 7): Matrix.003 file - promoters50/1020362
attgtgg

SEQ ID NO: 65706 - DNA, 7 bp, Unknown
  misc_feature (1)..( 7): Matrix.003 file - promoters50/1020362
atgtaag

SEQ ID NO: 65707 - DNA, 8 bp, Unknown
  misc_feature (1)..( 8): Matrix.003 file - promoters50/1020362
caaatctc

SEQ ID NO: 65708 - DNA, 12 bp, Unknown
  misc_feature (1)..( 12): Matrix.003 file - promoters50/1020364
tgataaataaat

SEQ ID NO: 65709 - DNA, 12 bp, Unknown
  misc_feature (1)..( 12): Matrix.003 file - promoters50/1020364
aactaaaaaatt

SEQ ID NO: 65710 - DNA, 9 bp, Unknown
  misc_feature (1)..( 9): Matrix.003 file - promoters50/1020430
tatatatac

SEQ ID NO: 65711 - DNA, 11 bp, Unknown
  misc_feature (1)..( 11): Matrix.003 file - promoters50/1020430
taaacaaatgg

SEQ ID NO: 65712 - DNA, 9 bp, Unknown
  misc_feature (1)..( 9): Matrix.003 file - promoters50/1020430
aaaacaaaa

SEQ ID NO: 65713 - DNA, 9 bp, Unknown
  misc_feature (1)..( 9): Matrix.003 file - promoters50/1020430
tcacaaatt

SEQ ID NO: 65714 - DNA, 10 bp, Unknown
  misc_feature (1)..( 10): Matrix.003 file - promoters50/1020508
acaacattaa

SEQ ID NO: 65715 - DNA, 10 bp, Unknown
  misc_feature (1)..( 10): Matrix.003 file - promoters50/1020512
atctaatata

SEQ ID NO: 65716 - DNA, 12 bp, Unknown
  misc_feature (1)..( 12): Matrix.003 file - promoters50/1020512
aaaataaaaaaa

SEQ ID NO: 65717 - DNA, 12 bp, Unknown
  misc_feature (1)..( 12): Matrix.003 file - promoters50/1020512
atataaaaaaaa

SEQ ID NO: 65718 - DNA, 6 bp, Unknown
  misc_feature (1)..( 6): Matrix.003 file - promoters50/1020535
gaaaat

SEQ ID NO: 65719 - DNA, 10 bp, Unknown
  misc_feature (1)..( 10): Matrix.003 file - promoters50/1020535
tgagaaaatt

SEQ ID NO: 65720 - DNA, 13 bp, Unknown
  misc_feature (1)..( 13): Matrix.003 file - promoters50/1020543
caaaaatgtaaat

SEQ ID NO: 65721 - DNA, 8 bp, Unknown
  misc_feature (1)..( 8): Matrix.003 file - promoters50/1020543
gaaaaaaa

SEQ ID NO: 65722 - DNA, 8 bp, Unknown
  misc_feature (1)..( 8): Matrix.003 file - promoters50/1020543
tttcatgt

SEQ ID NO: 65723 - DNA, 12 bp, Unknown
  misc_feature (1)..( 12): Matrix.003 file - promoters50/1020543
aaaaaagaagaa

SEQ ID NO: 65724 - DNA, 9 bp, Unknown
  misc_feature (1)..( 9): Matrix.003 file - promoters50/1020557
ttactacta

SEQ ID NO: 65725 - DNA, 11 bp, Unknown
  misc_feature (1)..( 11): Matrix.003 file - promoters50/1020596
tatggaaatta

SEQ ID NO: 65726 - DNA, 8 bp, Unknown
  misc_feature (1)..( 8): Matrix.003 file - promoters50/1020596
cataaata

SEQ ID NO: 65727 - DNA, 12 bp, Unknown
  misc_feature (1)..( 12): Matrix.003 file - promoters50/1020619
tttaaatacata

SEQ ID NO: 65728 - DNA, 8 bp, Unknown
  misc_feature (1)..( 8): Matrix.003 file - promoters50/1020619
atctattt

SEQ ID NO: 65729 - DNA, 9 bp, Unknown
  misc_feature (1)..( 9): Matrix.003 file - promoters50/1020634
ccaaaatca

SEQ ID NO: 65730 - DNA, 11 bp, Unknown
  misc_feature (1)..( 11): Matrix.003 file - promoters50/1020634
agtttaaaata

SEQ ID NO: 65731 - DNA, 11 bp, Unknown
  misc_feature (1)..( 11): Matrix.003 file - promoters50/1020646
aataatttata

SEQ ID NO: 65732 - DNA, 11 bp, Unknown
  misc_feature (1)..( 11): Matrix.003 file - promoters50/1020666
aaaataaatct

SEQ ID NO: 65733 - DNA, 7 bp, Unknown
  misc_feature (1)..( 7): Matrix.003 file - promoters50/1020666
caacaaa

SEQ ID NO: 65734 - DNA, 14 bp, Unknown
  misc_feature (1)..( 14): Matrix.003 file - promoters50/1020666
aactaatactttga

SEQ ID NO: 65735 - DNA, 7 bp, Unknown
  misc_feature (1)..( 7): Matrix.003 file - promoters50/1020666
tattaaa

SEQ ID NO: 65736 - DNA, 11 bp, Unknown
  misc_feature (1)..( 11): Matrix.003 file - promoters50/1020666
gatttactttt

SEQ ID NO: 65737 - DNA, 8 bp, Unknown
  misc_feature (1)..( 8): Matrix.003 file - promoters50/1020680
tttgagtg

SEQ ID NO: 65738 - DNA, 10 bp, Unknown
  misc_feature (1)..( 10): Matrix.003 file - promoters50/1020680
gttaaacaaa

SEQ ID NO: 65739 - DNA, 11 bp, Unknown
  misc_feature (1)..( 11): Matrix.003 file - promoters50/1020690
aattgatttta

SEQ ID NO: 65740 - DNA, 9 bp, Unknown
  misc_feature (1)..( 9): Matrix.003 file - promoters50/1020690
attgaatat

SEQ ID NO: 65741 - DNA, 8 bp, Unknown
  misc_feature (1)..( 8): Matrix.003 file - promoters50/1020697
aaattaaa

SEQ ID NO: 65742 - DNA, 17 bp, Unknown
  misc_feature (1)..( 17): Matrix.003 file - promoters50/1020697
attaattattaatgata

SEQ ID NO: 65743 - DNA, 7 bp, Unknown
  misc_feature (1)..( 7): Matrix.003 file - promoters50/1020697
agagcat

SEQ ID NO: 65744 - DNA, 8 bp, Unknown
  misc_feature (1)..( 8): Matrix.003 file - promoters50/1020697
ctaattag

SEQ ID NO: 65745 - DNA, 11 bp, Unknown
  misc_feature (1)..( 11): Matrix.003 file - promoters50/1020697
taattaaattt

SEQ ID NO: 65746 - DNA, 9 bp, Unknown
  misc_feature (1)..( 9): Matrix.003 file - promoters50/1020697
taaaaaaga

SEQ ID NO: 65747 - DNA, 7 bp, Unknown
  misc_feature (1)..( 7): Matrix.003 file - promoters50/1020697
tttaaat

SEQ ID NO: 65748 - DNA, 9 bp, Unknown
  misc_feature (1)..( 9): Matrix.003 file - promoters50/1020697
agagagaag

SEQ ID NO: 65749 - DNA, 12 bp, Unknown
  misc_feature (1)..( 12): Matrix.003 file - promoters50/1020701
ataaattaatgt

SEQ ID NO: 65750 - DNA, 8 bp, Unknown
  misc_feature (1)..( 8): Matrix.003 file - promoters50/1020701
taataatt

SEQ ID NO: 65751 - DNA, 7 bp, Unknown
  misc_feature (1)..( 7): Matrix.003 file - promoters50/1020713
taagtta

SEQ ID NO: 65752 - DNA, 5 bp, Unknown
  misc_feature (1)..( 5): Matrix.003 file - promoters50/1020713
agaaa

SEQ ID NO: 65753 - DNA, 7 bp, Unknown
  misc_feature (1)..( 7): Matrix.003 file - promoters50/1020713
gaaattt

SEQ ID NO: 65754 - DNA, 8 bp, Unknown
  misc_feature (1)..( 8): Matrix.003 file - promoters50/1020713
gttagtta

SEQ ID NO: 65755 - DNA, 8 bp, Unknown
  misc_feature (1)..( 8): Matrix.003 file - promoters50/1020713
ataagagg

SEQ ID NO: 65756 - DNA, 9 bp, Unknown
  misc_feature (1)..( 9): Matrix.003 file - promoters50/1020713
aggcccatt

SEQ ID NO: 65757 - DNA, 7 bp, Unknown
  misc_feature (1)..( 7): Matrix.003 file - promoters50/1020730
taattta

SEQ ID NO: 65758 - DNA, 11 bp, Unknown
  misc_feature (1)..( 11): Matrix.003 file - promoters50/1020730
attaatctctt

SEQ ID NO: 65759 - DNA, 10 bp, Unknown
  misc_feature (1)..( 10): Matrix.003 file - promoters50/1020730
aaaataattt

SEQ ID NO: 65760 - DNA, 11 bp, Unknown
  misc_feature (1)..( 11): Matrix.003 file - promoters50/1020730
ttgtctgaata

SEQ ID NO: 65761 - DNA, 8 bp, Unknown
  misc_feature (1)..( 8): Matrix.003 file - promoters50/1020730
gtagaaaa

SEQ ID NO: 65762 - DNA, 12 bp, Unknown
  misc_feature (1)..( 12): Matrix.003 file - promoters50/1020786
aaatttatgtcg

SEQ ID NO: 65763 - DNA, 12 bp, Unknown
  misc_feature (1)..( 12): Matrix.003 file - promoters50/1020786
ttaacaaattaa

SEQ ID NO: 65764 - DNA, 11 bp, Unknown
  misc_feature (1)..( 11): Matrix.003 file - promoters50/1020786
tctctatataa

SEQ ID NO: 65765 - DNA, 16 bp, Unknown
  misc_feature (1)..( 16): Matrix.003 file - promoters50/1020786
ttataatgcaaaaaat

SEQ ID NO: 65766 - DNA, 14 bp, Unknown
  misc_feature (1)..( 14): Matrix.003 file - promoters50/1020786
aacaacaaaacatg

SEQ ID NO: 65767 - DNA, 8 bp, Unknown
  misc_feature (1)..( 8): Matrix.003 file - promoters50/1020786
caaaaata

SEQ ID NO: 65768 - DNA, 9 bp, Unknown
  misc_feature (1)..( 9): Matrix.003 file - promoters50/1020786
caaaaataa

SEQ ID NO: 65769 - DNA, 8 bp, Unknown
  misc_feature (1)..( 8): Matrix.003 file - promoters50/1020786
agatataa

SEQ ID NO: 65770 - DNA, 13 bp, Unknown
  misc_feature (1)..( 13): Matrix.003 file - promoters50/1020818
ataatttttcctt

SEQ ID NO: 65771 - DNA, 9 bp, Unknown
  misc_feature (1)..( 9): Matrix.003 file - promoters50/1020818
caaaaattt

SEQ ID NO: 65772 - DNA, 10 bp, Unknown
  misc_feature (1)..( 10): Matrix.003 file - promoters50/1020818
taaaaaagaa

SEQ ID NO: 65773 - DNA, 9 bp, Unknown
  misc_feature (1)..( 9): Matrix.003 file - promoters50/1020818
gtcaaaaaa

SEQ ID NO: 65774 - DNA, 8 bp, Unknown
  misc_feature (1)..( 8): Matrix.003 file - promoters50/1020834
agaatacc

SEQ ID NO: 65775 - DNA, 7 bp, Unknown
  misc_feature (1)..( 7): Matrix.003 file - promoters50/1020838
gaaagaa

SEQ ID NO: 65776 - DNA, 8 bp, Unknown
  misc_feature (1)..( 8): Matrix.003 file - promoters50/1020838
cttttgaa

SEQ ID NO: 65777 - DNA, 8 bp, Unknown
  misc_feature (1)..( 8): Matrix.003 file - promoters50/1020838
atttttaa

SEQ ID NO: 65778 - DNA, 7 bp, Unknown
  misc_feature (1)..( 7): Matrix.003 file - promoters50/1020838
aataaaa

SEQ ID NO: 65779 - DNA, 8 bp, Unknown
  misc_feature (1)..( 8): Matrix.003 file - promoters50/1020842
taaaagga

SEQ ID NO: 65780 - DNA, 10 bp, Unknown
  misc_feature (1)..( 10): Matrix.003 file - promoters50/1020842
tcatcaattt

SEQ ID NO: 65781 - DNA, 8 bp, Unknown
  misc_feature (1)..( 8): Matrix.003 file - promoters50/1020842
taaaaatt

SEQ ID NO: 65782 - DNA, 8 bp, Unknown
  misc_feature (1)..( 8): Matrix.003 file - promoters50/1020842
aaaattct

SEQ ID NO: 65783 - DNA, 8 bp, Unknown
  misc_feature (1)..( 8): Matrix.003 file - promoters50/1020842
gaaacaaa

SEQ ID NO: 65784 - DNA, 8 bp, Unknown
  misc_feature (1)..( 8): Matrix.003 file - promoters50/1020848
aaatttgt

SEQ ID NO: 65785 - DNA, 8 bp, Unknown
  misc_feature (1)..( 8): Matrix.003 file - promoters50/1020848
ctacattt

SEQ ID NO: 65786 - DNA, 12 bp, Unknown
  misc_feature (1)..( 12): Matrix.003 file - promoters50/1020863
aaacaaatgtgt

SEQ ID NO: 65787 - DNA, 9 bp, Unknown
  misc_feature (1)..( 9): Matrix.003 file - promoters50/1020863
atattatta

SEQ ID NO: 65788 - DNA, 11 bp, Unknown
  misc_feature (1)..( 11): Matrix.003 file - promoters50/1020863
gattaaaagac

SEQ ID NO: 65789 - DNA, 10 bp, Unknown
  misc_feature (1)..( 10): Matrix.003 file - promoters50/1020863
gtacaatact

SEQ ID NO: 65790 - DNA, 6 bp, Unknown
  misc_feature (1)..( 6): Matrix.003 file - promoters50/1020863
aatgaa

SEQ ID NO: 65791 - DNA, 12 bp, Unknown
  misc_feature (1)..( 12): Matrix.003 file - promoters50/1020863
ttttatttctca

SEQ ID NO: 65792 - DNA, 14 bp, Unknown
  misc_feature (1)..( 14): Matrix.003 file - promoters50/1020892
cgaacaagtagaag

SEQ ID NO: 65793 - DNA, 14 bp, Unknown
  misc_feature (1)..( 14): Matrix.003 file - promoters50/1020892
aattactgaagaat

SEQ ID NO: 65794 - DNA, 9 bp, Unknown
  misc_feature (1)..( 9): Matrix.003 file - promoters50/1020940
aaaaattaa

SEQ ID NO: 65795 - DNA, 10 bp, Unknown
  misc_feature (1)..( 10): Matrix.003 file - promoters50/1020940
tatataatag

SEQ ID NO: 65796 - DNA, 9 bp, Unknown
  misc_feature (1)..( 9): Matrix.003 file - promoters50/1020940
aaataaaat

SEQ ID NO: 65797 - DNA, 8 bp, Unknown
  misc_feature (1)..( 8): Matrix.003 file - promoters50/1020940
acaaaaat

SEQ ID NO: 65798 - DNA, 12 bp, Unknown
  misc_feature (1)..( 12): Matrix.003 file - promoters50/1020940
taagaatttttt

SEQ ID NO: 65799 - DNA, 12 bp, Unknown
  misc_feature (1)..( 12): Matrix.003 file - promoters50/1020940
ataatttcttat

SEQ ID NO: 65800 - DNA, 9 bp, Unknown
  misc_feature (1)..( 9): Matrix.003 file - promoters50/1020940
aacaatctc

SEQ ID NO: 65801 - DNA, 13 bp, Unknown
  misc_feature (1)..( 13): Matrix.003 file - promoters50/1020940
tgattgtcagtaa

SEQ ID NO: 65802 - DNA, 6 bp, Unknown
  misc_feature (1)..( 6): Matrix.003 file - promoters50/1020940
gatttt

SEQ ID NO: 65803 - DNA, 10 bp, Unknown
  misc_feature (1)..( 10): Matrix.003 file - promoters50/1020940
atttttacat

SEQ ID NO: 65804 - DNA, 9 bp, Unknown
  misc_feature (1)..( 9): Matrix.003 file - promoters50/1020940
agttttgat

SEQ ID NO: 65805 - DNA, 12 bp, Unknown
  misc_feature (1)..( 12): Matrix.003 file - promoters50/1020968
gtaatttaaaat

SEQ ID NO: 65806 - DNA, 15 bp, Unknown
  misc_feature (1)..( 15): Matrix.003 file - promoters50/1020968
catattaaactttta

SEQ ID NO: 65807 - DNA, 11 bp, Unknown
  misc_feature (1)..( 11): Matrix.003 file - promoters50/1020968
attataaatta

SEQ ID NO: 65808 - DNA, 9 bp, Unknown
  misc_feature (1)..( 9): Matrix.003 file - promoters50/1020968
gaaaataaa

SEQ ID NO: 65809 - DNA, 10 bp, Unknown
  misc_feature (1)..( 10): Matrix.003 file - promoters50/1020968
tttaaaatat

SEQ ID NO: 65810 - DNA, 8 bp, Unknown
  misc_feature (1)..( 8): Matrix.003 file - promoters50/1021047
tatgattt

SEQ ID NO: 65811 - DNA, 11 bp, Unknown
  misc_feature (1)..( 11): Matrix.003 file - promoters50/1021047
ataagtagttt

SEQ ID NO: 65812 - DNA, 12 bp, Unknown
  misc_feature (1)..( 12): Matrix.003 file - promoters50/1021047
caagaatataaa

SEQ ID NO: 65813 - DNA, 12 bp, Unknown
  misc_feature (1)..( 12): Matrix.003 file - promoters50/1021047
aagtatataaat

SEQ ID NO: 65814 - DNA, 8 bp, Unknown
  misc_feature (1)..( 8): Matrix.003 file - promoters50/1021079
agataaaa

SEQ ID NO: 65815 - DNA, 12 bp, Unknown
  misc_feature (1)..( 12): Matrix.003 file - promoters50/1021079
attttgatacaa

SEQ ID NO: 65816 - DNA, 11 bp, Unknown
  misc_feature (1)..( 11): Matrix.003 file - promoters50/1021104
tgttctaaatt

SEQ ID NO: 65817 - DNA, 9 bp, Unknown
  misc_feature (1)..( 9): Matrix.003 file - promoters50/1021136
ataaaaata

SEQ ID NO: 65818 - DNA, 7 bp, Unknown
  misc_feature (1)..( 7): Matrix.003 file - promoters50/1021136
gtttgtt

SEQ ID NO: 65819 - DNA, 8 bp, Unknown
  misc_feature (1)..( 8): Matrix.003 file - promoters50/1021136
aaagaaaa

SEQ ID NO: 65820 - DNA, 11 bp, Unknown
  misc_feature (1)..( 11): Matrix.003 file - promoters50/1021136
tctttgaattt

SEQ ID NO: 65821 - DNA, 8 bp, Unknown
  misc_feature (1)..( 8): Matrix.003 file - promoters50/1021136
aaaaaata

SEQ ID NO: 65822 - DNA, 7 bp, Unknown
  misc_feature (1)..( 7): Matrix.003 file - promoters50/1021148
ataataa

SEQ ID NO: 65823 - DNA, 11 bp, Unknown
  misc_feature (1)..( 11): Matrix.003 file - promoters50/1021148
acatttgtaaa

SEQ ID NO: 65824 - DNA, 11 bp, Unknown
  misc_feature (1)..( 11): Matrix.003 file - promoters50/1021148
caaaaaaattt

SEQ ID NO: 65825 - DNA, 9 bp, Unknown
  misc_feature (1)..( 9): Matrix.003 file - promoters50/1021148
agaaaaaaa

SEQ ID NO: 65826 - DNA, 8 bp, Unknown
  misc_feature (1)..( 8): Matrix.003 file - promoters50/1021148
attttaca

SEQ ID NO: 65827 - DNA, 8 bp, Unknown
  misc_feature (1)..( 8): Matrix.003 file - promoters50/1021148
aaaaataa

SEQ ID NO: 65828 - DNA, 9 bp, Unknown
  misc_feature (1)..( 9): Matrix.003 file - promoters50/1021148
ttttattta

SEQ ID NO: 65829 - DNA, 15 bp, Unknown
  misc_feature (1)..( 15): Matrix.003 file - promoters50/1021148
ataatttttatcaac

SEQ ID NO: 65830 - DNA, 13 bp, Unknown
  misc_feature (1)..( 13): Matrix.003 file - promoters50/1021218
agtgaaaacataa

SEQ ID NO: 65831 - DNA, 16 bp, Unknown
  misc_feature (1)..( 16): Matrix.003 file - promoters50/1021218
aaaacaacgccatcat

SEQ ID NO: 65832 - DNA, 10 bp, Unknown
  misc_feature (1)..( 10): Matrix.003 file - promoters50/1021239
caaaaacaaa

SEQ ID NO: 65833 - DNA, 8 bp, Unknown
  misc_feature (1)..( 8): Matrix.003 file - promoters50/1021239
ttcaatga

SEQ ID NO: 65834 - DNA, 7 bp, Unknown
  misc_feature (1)..( 7): Matrix.003 file - promoters50/1021239
cacttaa

SEQ ID NO: 65835 - DNA, 11 bp, Unknown
  misc_feature (1)..( 11): Matrix.003 file - promoters50/1021242
aaaaaatgtga

SEQ ID NO: 65836 - DNA, 11 bp, Unknown
  misc_feature (1)..( 11): Matrix.003 file - promoters50/1021323
tagaaaaataa

SEQ ID NO: 65837 - DNA, 10 bp, Unknown
  misc_feature (1)..( 10): Matrix.003 file - promoters50/1021323
cgaaaaaaag

SEQ ID NO: 65838 - DNA, 10 bp, Unknown
  misc_feature (1)..( 10): Matrix.003 file - promoters50/1021323
atgatttggt

SEQ ID NO: 65839 - DNA, 9 bp, Unknown
  misc_feature (1)..( 9): Matrix.003 file - promoters50/1021334
atagaaaag

SEQ ID NO: 65840 - DNA, 11 bp, Unknown
  misc_feature (1)..( 11): Matrix.003 file - promoters50/1021334
tattttttgtt

SEQ ID NO: 65841 - DNA, 7 bp, Unknown
  misc_feature (1)..( 7): Matrix.003 file - promoters50/1021334
aaaatga

SEQ ID NO: 65842 - DNA, 8 bp, Unknown
  misc_feature (1)..( 8): Matrix.003 file - promoters50/1021334
aagaaatg

SEQ ID NO: 65843 - DNA, 7 bp, Unknown
  misc_feature (1)..( 7): Matrix.003 file - promoters50/1021334
tgtggac

SEQ ID NO: 65844 - DNA, 11 bp, Unknown
  misc_feature (1)..( 11): Matrix.003 file - promoters50/1021334
aattttgtgtt

SEQ ID NO: 65845 - DNA, 9 bp, Unknown
  misc_feature (1)..( 9): Matrix.003 file - promoters50/1021419
attaaatgc

SEQ ID NO: 65846 - DNA, 10 bp, Unknown
  misc_feature (1)..( 10): Matrix.003 file - promoters50/1021438
ttttgtttgt

SEQ ID NO: 65847 - DNA, 13 bp, Unknown
  misc_feature (1)..( 13): Matrix.003 file - promoters50/1021445
agtattaaagttt

SEQ ID NO: 65848 - DNA, 11 bp, Unknown
  misc_feature (1)..( 11): Matrix.003 file - promoters50/1021445
acttaaaaaag

SEQ ID NO: 65849 - DNA, 10 bp, Unknown
  misc_feature (1)..( 10): Matrix.003 file - promoters50/1021445
aaaagaaatt

SEQ ID NO: 65850 - DNA, 9 bp, Unknown
  misc_feature (1)..( 9): Matrix.003 file - promoters50/1021445
aaaacaaat

SEQ ID NO: 65851 - DNA, 12 bp, Unknown
  misc_feature (1)..( 12): Matrix.003 file - promoters50/1021445
atataaaagctt

SEQ ID NO: 65852 - DNA, 11 bp, Unknown
  misc_feature (1)..( 11): Matrix.003 file - promoters50/1021445
cactaaaaaag

SEQ ID NO: 65853 - DNA, 9 bp, Unknown
  misc_feature (1)..( 9): Matrix.003 file - promoters50/1021549
gattcattc

SEQ ID NO: 65854 - DNA, 12 bp, Unknown
  misc_feature (1)..( 12): Matrix.003 file - promoters50/1021549
aaagcccaatag

SEQ ID NO: 65855 - DNA, 8 bp, Unknown
  misc_feature (1)..( 8): Matrix.003 file - promoters50/1021645
cttccatg

SEQ ID NO: 65856 - DNA, 9 bp, Unknown
  misc_feature (1)..( 9): Matrix.003 file - promoters50/1021645
tttgcaatt

SEQ ID NO: 65857 - DNA, 7 bp, Unknown
  misc_feature (1)..( 7): Matrix.003 file - promoters50/1021719
atttatt

SEQ ID NO: 65858 - DNA, 9 bp, Unknown
  misc_feature (1)..( 9): Matrix.003 file - promoters50/1021772
aaatctata

SEQ ID NO: 65859 - DNA, 10 bp, Unknown
  misc_feature (1)..( 10): Matrix.003 file - promoters50/1021772
tatataaaaa

SEQ ID NO: 65860 - DNA, 10 bp, Unknown
  misc_feature (1)..( 10): Matrix.003 file - promoters50/1021772
caataaaagt

SEQ ID NO: 65861 - DNA, 14 bp, Unknown
  misc_feature (1)..( 14): Matrix.003 file - promoters50/1021833
agatcttttgatta

SEQ ID NO: 65862 - DNA, 10 bp, Unknown
  misc_feature (1)..( 10): Matrix.003 file - promoters50/1021833
gtttgattta

SEQ ID NO: 65863 - DNA, 10 bp, Unknown
  misc_feature (1)..( 10): Matrix.003 file - promoters50/1021840
aaataataaa

SEQ ID NO: 65864 - DNA, 9 bp, Unknown
  misc_feature (1)..( 9): Matrix.003 file - promoters50/1021840
tatttattt

SEQ ID NO: 65865 - DNA, 13 bp, Unknown
  misc_feature (1)..( 13): Matrix.003 file - promoters50/1021840
acaaaaattataa

SEQ ID NO: 65866 - DNA, 7 bp, Unknown
  misc_feature (1)..( 7): Matrix.003 file - promoters50/1021862
tattgta

SEQ ID NO: 65867 - DNA, 14 bp, Unknown
  misc_feature (1)..( 14): Matrix.003 file - promoters50/1021862
catttaaattttaa

SEQ ID NO: 65868 - DNA, 10 bp, Unknown
  misc_feature (1)..( 10): Matrix.003 file - promoters50/1021862
ataattttaa

SEQ ID NO: 65869 - DNA, 8 bp, Unknown
  misc_feature (1)..( 8): Matrix.003 file - promoters50/1021862
aaataaat

SEQ ID NO: 65870 - DNA, 9 bp, Unknown
  misc_feature (1)..( 9): Matrix.003 file - promoters50/1021862
gtaaaatgt

SEQ ID NO: 65871 - DNA, 10 bp, Unknown
  misc_feature (1)..( 10): Matrix.003 file - promoters50/1021862
gacaaaataa

SEQ ID NO: 65872 - DNA, 10 bp, Unknown
  misc_feature (1)..( 10): Matrix.003 file - promoters50/1021870
aatcaaaatt

SEQ ID NO: 65873 - DNA, 9 bp, Unknown
  misc_feature (1)..( 9): Matrix.003 file - promoters50/1021870
acataatta

SEQ ID NO: 65874 - DNA, 12 bp, Unknown
  misc_feature (1)..( 12): Matrix.003 file - promoters50/1021870
caattttattat

SEQ ID NO: 65875 - DNA, 10 bp, Unknown
  misc_feature (1)..( 10): Matrix.003 file - promoters50/1021870
tttaaatata

SEQ ID NO: 65876 - DNA, 10 bp, Unknown
  misc_feature (1)..( 10): Matrix.003 file - promoters50/1021870
ttaacaaaca

SEQ ID NO: 65877 - DNA, 9 bp, Unknown
  misc_feature (1)..( 9): Matrix.003 file - promoters50/1021870
aatttaaat

SEQ ID NO: 65878 - DNA, 6 bp, Unknown
  misc_feature (1)..( 6): Matrix.003 file - promoters50/1021935
ttttgt

SEQ ID NO: 65879 - DNA, 9 bp, Unknown
  misc_feature (1)..( 9): Matrix.003 file - promoters50/1021935
gtgttcaga

SEQ ID NO: 65880 - DNA, 12 bp, Unknown
  misc_feature (1)..( 12): Matrix.003 file - promoters50/1021968
tcaataatttta

SEQ ID NO: 65881 - DNA, 7 bp, Unknown
  misc_feature (1)..( 7): Matrix.003 file - promoters50/1021968
tagtttt

SEQ ID NO: 65882 - DNA, 8 bp, Unknown
  misc_feature (1)..( 8): Matrix.003 file - promoters50/1021968
aaaaaaaa

SEQ ID NO: 65883 - DNA, 11 bp, Unknown
  misc_feature (1)..( 11): Matrix.003 file - promoters50/1021968
atgtttacaaa

SEQ ID NO: 65884 - DNA, 9 bp, Unknown
  misc_feature (1)..( 9): Matrix.003 file - promoters50/1021976
gtagagaag

SEQ ID NO: 65885 - DNA, 12 bp, Unknown
  misc_feature (1)..( 12): Matrix.003 file - promoters50/1022005
taaatcaaatct

SEQ ID NO: 65886 - DNA, 11 bp, Unknown
  misc_feature (1)..( 11): Matrix.003 file - promoters50/1022005
aataaaaactc

SEQ ID NO: 65887 - DNA, 10 bp, Unknown
  misc_feature (1)..( 10): Matrix.003 file - promoters50/1022014
cttctttatt

SEQ ID NO: 65888 - DNA, 7 bp, Unknown
  misc_feature (1)..( 7): Matrix.003 file - promoters50/1022014
tttgaaa

SEQ ID NO: 65889 - DNA, 8 bp, Unknown
  misc_feature (1)..( 8): Matrix.003 file - promoters50/1022014
gtcaaaat

SEQ ID NO: 65890 - DNA, 11 bp, Unknown
  misc_feature (1)..( 11): Matrix.003 file - promoters50/1022059
gattaggtcat

SEQ ID NO: 65891 - DNA, 9 bp, Unknown
  misc_feature (1)..( 9): Matrix.003 file - promoters50/1022088
ctaattgtt

SEQ ID NO: 65892 - DNA, 8 bp, Unknown
  misc_feature (1)..( 8): Matrix.003 file - promoters50/1022088
caaaaaag

SEQ ID NO: 65893 - DNA, 11 bp, Unknown
  misc_feature (1)..( 11): Matrix.003 file - promoters50/1022088
ttatgatttga

SEQ ID NO: 65894 - DNA, 9 bp, Unknown
  misc_feature (1)..( 9): Matrix.003 file - promoters50/1022088
aaaaaattg

SEQ ID NO: 65895 - DNA, 9 bp, Unknown
  misc_feature (1)..( 9): Matrix.003 file - promoters50/1022088
aaattgaat

SEQ ID NO: 65896 - DNA, 11 bp, Unknown
  misc_feature (1)..( 11): Matrix.003 file - promoters50/1022088
tacaaaataaa

SEQ ID NO: 65897 - DNA, 8 bp, Unknown
  misc_feature (1)..( 8): Matrix.003 file - promoters50/1022111
ttatttaa

SEQ ID NO: 65898 - DNA, 8 bp, Unknown
  misc_feature (1)..( 8): Matrix.003 file - promoters50/1022127
caaacgat

SEQ ID NO: 65899 - DNA, 8 bp, Unknown
  misc_feature (1)..( 8): Matrix.003 file - promoters50/1022127
caaagaaa

SEQ ID NO: 65900 - DNA, 12 bp, Unknown
  misc_feature (1)..( 12): Matrix.003 file - promoters50/1022131
atttaaaacaaa

SEQ ID NO: 65901 - DNA, 9 bp, Unknown
  misc_feature (1)..( 9): Matrix.003 file - promoters50/1022131
ttaaaaaaa

SEQ ID NO: 65902 - DNA, 9 bp, Unknown
  misc_feature (1)..( 9): Matrix.003 file - promoters50/1022182
tgctaaatt

SEQ ID NO: 65903 - DNA, 9 bp, Unknown
  misc_feature (1)..( 9): Matrix.003 file - promoters50/1022182
tggctgttt

SEQ ID NO: 65904 - DNA, 10 bp, Unknown
  misc_feature (1)..( 10): Matrix.003 file - promoters50/1022182
aatttaattc

SEQ ID NO: 65905 - DNA, 10 bp, Unknown
  misc_feature (1)..( 10): Matrix.003 file - promoters50/1022182
tagttttctg

SEQ ID NO: 65906 - DNA, 8 bp, Unknown
  misc_feature (1)..( 8): Matrix.003 file - promoters50/1022182
ggaatctg

SEQ ID NO: 65907 - DNA, 8 bp, Unknown
  misc_feature (1)..( 8): Matrix.003 file - promoters50/1022192
ttgtttag

SEQ ID NO: 65908 - DNA, 8 bp, Unknown
  misc_feature (1)..( 8): Matrix.003 file - promoters50/1022192
tcatagtt

SEQ ID NO: 65909 - DNA, 10 bp, Unknown
  misc_feature (1)..( 10): Matrix.003 file - promoters50/1022192
cttatgaaat

SEQ ID NO: 65910 - DNA, 13 bp, Unknown
  misc_feature (1)..( 13): Matrix.003 file - promoters50/1022192
ggacttatgaaat

SEQ ID NO: 65911 - DNA, 10 bp, Unknown
  misc_feature (1)..( 10): Matrix.003 file - promoters50/1022192
actttttaaa

SEQ ID NO: 65912 - DNA, 11 bp, Unknown
  misc_feature (1)..( 11): Matrix.003 file - promoters50/1022192
tttcttactaa

SEQ ID NO: 65913 - DNA, 10 bp, Unknown
  misc_feature (1)..( 10): Matrix.003 file - promoters50/1022192
cttttgaaat

SEQ ID NO: 65914 - DNA, 11 bp, Unknown
  misc_feature (1)..( 11): Matrix.003 file - promoters50/1022227
tttgcagtttc

SEQ ID NO: 65915 - DNA, 12 bp, Unknown
  misc_feature (1)..( 12): Matrix.003 file - promoters50/1022242
agcatatatgta

SEQ ID NO: 65916 - DNA, 6 bp, Unknown
  misc_feature (1)..( 6): Matrix.003 file - promoters50/1022242
acataa

SEQ ID NO: 65917 - DNA, 11 bp, Unknown
  misc_feature (1)..( 11): Matrix.003 file - promoters50/1022242
tctaaagcatt

SEQ ID NO: 65918 - DNA, 8 bp, Unknown
  misc_feature (1)..( 8): Matrix.003 file - promoters50/1022252
taaaaatt

SEQ ID NO: 65919 - DNA, 8 bp, Unknown
  misc_feature (1)..( 8): Matrix.003 file - promoters50/1022252
aaaaaatt

SEQ ID NO: 65920 - DNA, 7 bp, Unknown
  misc_feature (1)..( 7): Matrix.003 file - promoters50/1022252
aaaatta

SEQ ID NO: 65921 - DNA, 11 bp, Unknown
  misc_feature (1)..( 11): Matrix.003 file - promoters50/1022256
aaatattaaat

SEQ ID NO: 65922 - DNA, 10 bp, Unknown
  misc_feature (1)..( 10): Matrix.003 file - promoters50/1022256
agataatgag

SEQ ID NO: 65923 - DNA, 8 bp, Unknown
  misc_feature (1)..( 8): Matrix.003 file - promoters50/1022256
ttttatca

SEQ ID NO: 65924 - DNA, 9 bp, Unknown
  misc_feature (1)..( 9): Matrix.003 file - promoters50/1022256
tatataaat

SEQ ID NO: 65925 - DNA, 7 bp, Unknown
  misc_feature (1)..( 7): Matrix.003 file - promoters50/1022256
aaaagaa

SEQ ID NO: 65926 - DNA, 7 bp, Unknown
  misc_feature (1)..( 7): Matrix.003 file - promoters50/1022256
aaaacta

SEQ ID NO: 65927 - DNA, 10 bp, Unknown
  misc_feature (1)..( 10): Matrix.003 file - promoters50/1022264
aaagatttat

SEQ ID NO: 65928 - DNA, 9 bp, Unknown
  misc_feature (1)..( 9): Matrix.003 file - promoters50/1022264
gctcatttt

SEQ ID NO: 65929 - DNA, 15 bp, Unknown
  misc_feature (1)..( 15): Matrix.003 file - promoters50/1022264
attttttgttatcaa

SEQ ID NO: 65930 - DNA, 9 bp, Unknown
  misc_feature (1)..( 9): Matrix.003 file - promoters50/1022264
tttgttaat

SEQ ID NO: 65931 - DNA, 7 bp, Unknown
  misc_feature (1)..( 7): Matrix.003 file - promoters50/1022264
taaaatt

SEQ ID NO: 65932 - DNA, 10 bp, Unknown
  misc_feature (1)..( 10): Matrix.003 file - promoters50/1022264
aaagttttat

SEQ ID NO: 65933 - DNA, 9 bp, Unknown
  misc_feature (1)..( 9): Matrix.003 file - promoters50/1022268
ctccgccga

SEQ ID NO: 65934 - DNA, 12 bp, Unknown
  misc_feature (1)..( 12): Matrix.003 file - promoters50/1022292
aatgaataaaaa

SEQ ID NO: 65935 - DNA, 11 bp, Unknown
  misc_feature (1)..( 11): Matrix.003 file - promoters50/1022292
aaaaacaaaaa

SEQ ID NO: 65936 - DNA, 7 bp, Unknown
  misc_feature (1)..( 7): Matrix.003 file - promoters50/1022292
aaataaa

SEQ ID NO: 65937 - DNA, 9 bp, Unknown
  misc_feature (1)..( 9): Matrix.003 file - promoters50/1022292
aaaagaata

SEQ ID NO: 65938 - DNA, 8 bp, Unknown
  misc_feature (1)..( 8): Matrix.003 file - promoters50/1022296
aatttatt

SEQ ID NO: 65939 - DNA, 11 bp, Unknown
  misc_feature (1)..( 11): Matrix.003 file - promoters50/1022370
caactatatat

SEQ ID NO: 65940 - DNA, 8 bp, Unknown
  misc_feature (1)..( 8): Matrix.003 file - promoters50/1022383
attgccat

SEQ ID NO: 65941 - DNA, 9 bp, Unknown
  misc_feature (1)..( 9): Matrix.003 file - promoters50/1022383
caaaatgaa

SEQ ID NO: 65942 - DNA, 7 bp, Unknown
  misc_feature (1)..( 7): Matrix.003 file - promoters50/1022383
agatctc

SEQ ID NO: 65943 - DNA, 8 bp, Unknown
  misc_feature (1)..( 8): Matrix.003 file - promoters50/1022383
ctttttgc

SEQ ID NO: 65944 - DNA, 9 bp, Unknown
  misc_feature (1)..( 9): Matrix.003 file - promoters50/1022383
atttccatg

SEQ ID NO: 65945 - DNA, 11 bp, Unknown
  misc_feature (1)..( 11): Matrix.003 file - promoters50/1022389
gcttcaatttt

SEQ ID NO: 65946 - DNA, 8 bp, Unknown
  misc_feature (1)..( 8): Matrix.003 file - promoters50/1022389
aaatatta

SEQ ID NO: 65947 - DNA, 8 bp, Unknown
  misc_feature (1)..( 8): Matrix.003 file - promoters50/1022401
taaaaata

SEQ ID NO: 65948 - DNA, 8 bp, Unknown
  misc_feature (1)..( 8): Matrix.003 file - promoters50/1022401
ataaaaaa

SEQ ID NO: 65949 - DNA, 9 bp, Unknown
  misc_feature (1)..( 9): Matrix.003 file - promoters50/1022401
aaatataaa

SEQ ID NO: 65950 - DNA, 10 bp, Unknown
  misc_feature (1)..( 10): Matrix.003 file - promoters50/1022401
ttatttaata

SEQ ID NO: 65951 - DNA, 11 bp, Unknown
  misc_feature (1)..( 11): Matrix.003 file - promoters50/1022401
tcatttttaat

SEQ ID NO: 65952 - DNA, 11 bp, Unknown
  misc_feature (1)..( 11): Matrix.003 file - promoters50/1022401
ttataaaaagt

SEQ ID NO: 65953 - DNA, 11 bp, Unknown
  misc_feature (1)..( 11): Matrix.003 file - promoters50/1022401
tatcaaagaat

SEQ ID NO: 65954 - DNA, 9 bp, Unknown
  misc_feature (1)..( 9): Matrix.003 file - promoters50/1022434
agattatcg

SEQ ID NO: 65955 - DNA, 12 bp, Unknown
  misc_feature (1)..( 12): Matrix.003 file - promoters50/1022441
aattgattattt

SEQ ID NO: 65956 - DNA, 7 bp, Unknown
  misc_feature (1)..( 7): Matrix.003 file - promoters50/1022527
tgtgaag

SEQ ID NO: 65957 - DNA, 7 bp, Unknown
  misc_feature (1)..( 7): Matrix.003 file - promoters50/1022527
tatgaaa

SEQ ID NO: 65958 - DNA, 11 bp, Unknown
  misc_feature (1)..( 11): Matrix.003 file - promoters50/1022527
aataaaataaa

SEQ ID NO: 65959 - DNA, 8 bp, Unknown
  misc_feature (1)..( 8): Matrix.003 file - promoters50/1022527
ataaaact

SEQ ID NO: 65960 - DNA, 10 bp, Unknown
  misc_feature (1)..( 10): Matrix.003 file - promoters50/1022527
aatgtctaat

SEQ ID NO: 65961 - DNA, 11 bp, Unknown
  misc_feature (1)..( 11): Matrix.003 file - promoters50/1022546
aagatttaatt

SEQ ID NO: 65962 - DNA, 8 bp, Unknown
  misc_feature (1)..( 8): Matrix.003 file - promoters50/1022546
caaccaat

SEQ ID NO: 65963 - DNA, 13 bp, Unknown
  misc_feature (1)..( 13): Matrix.003 file - promoters50/1022546
gttaatctcaaaa

SEQ ID NO: 65964 - DNA, 8 bp, Unknown
  misc_feature (1)..( 8): Matrix.003 file - promoters50/1022546
tttccgtg

SEQ ID NO: 65965 - DNA, 7 bp, Unknown
  misc_feature (1)..( 7): Matrix.003 file - promoters50/1022546
taaaaaa

SEQ ID NO: 65966 - DNA, 9 bp, Unknown
  misc_feature (1)..( 9): Matrix.003 file - promoters50/1022546
ttctcttta

SEQ ID NO: 65967 - DNA, 9 bp, Unknown
  misc_feature (1)..( 9): Matrix.003 file - promoters50/1022561
caaaaaaga

SEQ ID NO: 65968 - DNA, 9 bp, Unknown
  misc_feature (1)..( 9): Matrix.003 file - promoters50/1022561
caaaaaaga

SEQ ID NO: 65969 - DNA, 8 bp, Unknown
  misc_feature (1)..( 8): Matrix.003 file - promoters50/1022578
aaggaaaa

SEQ ID NO: 65970 - DNA, 9 bp, Unknown
  misc_feature (1)..( 9): Matrix.003 file - promoters50/1022586
aaacatttc

SEQ ID NO: 65971 - DNA, 8 bp, Unknown
  misc_feature (1)..( 8): Matrix.003 file - promoters50/1022586
tataaata

SEQ ID NO: 65972 - DNA, 7 bp, Unknown
  misc_feature (1)..( 7): Matrix.003 file - promoters50/1022586
tttaata

SEQ ID NO: 65973 - DNA, 7 bp, Unknown
  misc_feature (1)..( 7): Matrix.003 file - promoters50/1022586
aaaattc

SEQ ID NO: 65974 - DNA, 7 bp, Unknown
  misc_feature (1)..( 7): Matrix.003 file - promoters50/1022586
tttgtag

SEQ ID NO: 65975 - DNA, 9 bp, Unknown
  misc_feature (1)..( 9): Matrix.003 file - promoters50/1022586
accaaaaaa

SEQ ID NO: 65976 - DNA, 7 bp, Unknown
  misc_feature (1)..( 7): Matrix.003 file - promoters50/1022594
aaaacta

SEQ ID NO: 65977 - DNA, 9 bp, Unknown
  misc_feature (1)..( 9): Matrix.003 file - promoters50/1022594
actaaataa

SEQ ID NO: 65978 - DNA, 9 bp, Unknown
  misc_feature (1)..( 9): Matrix.003 file - promoters50/1022594
aatagaaaa

SEQ ID NO: 65979 - DNA, 14 bp, Unknown
  misc_feature (1)..( 14): Matrix.003 file - promoters50/1022610
aaaaatgtaaataa

SEQ ID NO: 65980 - DNA, 10 bp, Unknown
  misc_feature (1)..( 10): Matrix.003 file - promoters50/1022662
aatattttat

SEQ ID NO: 65981 - DNA, 11 bp, Unknown
  misc_feature (1)..( 11): Matrix.003 file - promoters50/1022687
atttattttga

SEQ ID NO: 65982 - DNA, 20 bp, Unknown
  misc_feature (1)..( 20): Matrix.003 file - promoters50/1022687
agagattttaatttgaatag

SEQ ID NO: 65983 - DNA, 9 bp, Unknown
  misc_feature (1)..( 9): Matrix.003 file - promoters50/1022687
atttttatt

SEQ ID NO: 65984 - DNA, 9 bp, Unknown
  misc_feature (1)..( 9): Matrix.003 file - promoters50/1022687
tttgagttc

SEQ ID NO: 65985 - DNA, 13 bp, Unknown
  misc_feature (1)..( 13): Matrix.003 file - promoters50/1022687
tattccttttgta

SEQ ID NO: 65986 - DNA, 8 bp, Unknown
  misc_feature (1)..( 8): Matrix.003 file - promoters50/1022687
atttgaat

SEQ ID NO: 65987 - DNA, 8 bp, Unknown
  misc_feature (1)..( 8): Matrix.003 file - promoters50/1022728
agtaaaga

SEQ ID NO: 65988 - DNA, 8 bp, Unknown
  misc_feature (1)..( 8): Matrix.003 file - promoters50/1022728
gatttttt

SEQ ID NO: 65989 - DNA, 7 bp, Unknown
  misc_feature (1)..( 7): Matrix.003 file - promoters50/1022728
aaaaact

SEQ ID NO: 65990 - DNA, 7 bp, Unknown
  misc_feature (1)..( 7): Matrix.003 file - promoters50/1022728
agaaaga

SEQ ID NO: 65991 - DNA, 11 bp, Unknown
  misc_feature (1)..( 11): Matrix.003 file - promoters50/1022728
caattataata

SEQ ID NO: 65992 - DNA, 9 bp, Unknown
  misc_feature (1)..( 9): Matrix.003 file - promoters50/1022728
aagaaaata

SEQ ID NO: 65993 - DNA, 7 bp, Unknown
  misc_feature (1)..( 7): Matrix.003 file - promoters50/1022742
cgttttt

SEQ ID NO: 65994 - DNA, 8 bp, Unknown
  misc_feature (1)..( 8): Matrix.003 file - promoters50/1022742
ttttgaat

SEQ ID NO: 65995 - DNA, 9 bp, Unknown
  misc_feature (1)..( 9): Matrix.003 file - promoters50/1022742
aaaaaagaa

SEQ ID NO: 65996 - DNA, 9 bp, Unknown
  misc_feature (1)..( 9): Matrix.003 file - promoters50/1022748
aaaagtttt

SEQ ID NO: 65997 - DNA, 13 bp, Unknown
  misc_feature (1)..( 13): Matrix.003 file - promoters50/1022748
tattaaaaaaggg

SEQ ID NO: 65998 - DNA, 13 bp, Unknown
  misc_feature (1)..( 13): Matrix.003 file - promoters50/1022748
atagttaaaaaat

SEQ ID NO: 65999 - DNA, 9 bp, Unknown
  misc_feature (1)..( 9): Matrix.003 file - promoters50/1022748
ataaataaa

SEQ ID NO: 66000 - DNA, 10 bp, Unknown
  misc_feature (1)..( 10): Matrix.003 file - promoters50/1022785
gcaaaagaag

SEQ ID NO: 66001 - DNA, 7 bp, Unknown
  misc_feature (1)..( 7): Matrix.003 file - promoters50/1022785
gtaagag

SEQ ID NO: 66002 - DNA, 14 bp, Unknown
  misc_feature (1)..( 14): Matrix.003 file - promoters50/1022785
ttgataaaaccaaa

SEQ ID NO: 66003 - DNA, 11 bp, Unknown
  misc_feature (1)..( 11): Matrix.003 file - promoters50/1022793
caattaggttt

SEQ ID NO: 66004 - DNA, 11 bp, Unknown
  misc_feature (1)..( 11): Matrix.003 file - promoters50/1022814
tataaataata

SEQ ID NO: 66005 - DNA, 9 bp, Unknown
  misc_feature (1)..( 9): Matrix.003 file - promoters50/1022814
ataaaaata

SEQ ID NO: 66006 - DNA, 10 bp, Unknown
  misc_feature (1)..( 10): Matrix.003 file - promoters50/1022824
ataaactaaa

SEQ ID NO: 66007 - DNA, 12 bp, Unknown
  misc_feature (1)..( 12): Matrix.003 file - promoters50/1022824
cccttttaagtt

SEQ ID NO: 66008 - DNA, 9 bp, Unknown
  misc_feature (1)..( 9): Matrix.003 file - promoters50/1022824
aaactaaat

SEQ ID NO: 66009 - DNA, 9 bp, Unknown
  misc_feature (1)..( 9): Matrix.003 file - promoters50/1022932
cttaatttc

SEQ ID NO: 66010 - DNA, 9 bp, Unknown
  misc_feature (1)..( 9): Matrix.003 file - promoters50/1022979
taacatttt

SEQ ID NO: 66011 - DNA, 9 bp, Unknown
  misc_feature (1)..( 9): Matrix.003 file - promoters50/1022979
tttttctct

SEQ ID NO: 66012 - DNA, 9 bp, Unknown
  misc_feature (1)..( 9): Matrix.003 file - promoters50/1022983
atttattat

SEQ ID NO: 66013 - DNA, 6 bp, Unknown
  misc_feature (1)..( 6): Matrix.003 file - promoters50/1022987
agtctt

SEQ ID NO: 66014 - DNA, 7 bp, Unknown
  misc_feature (1)..( 7): Matrix.003 file - promoters50/1023029
cgtatat

SEQ ID NO: 66015 - DNA, 9 bp, Unknown
  misc_feature (1)..( 9): Matrix.003 file - promoters50/1023029
ataggttac

SEQ ID NO: 66016 - DNA, 9 bp, Unknown
  misc_feature (1)..( 9): Matrix.003 file - promoters50/1023029
gatatttta

SEQ ID NO: 66017 - DNA, 11 bp, Unknown
  misc_feature (1)..( 11): Matrix.003 file - promoters50/1023029
aagtatatgaa

SEQ ID NO: 66018 - DNA, 9 bp, Unknown
  misc_feature (1)..( 9): Matrix.003 file - promoters50/1023029
caatataaa

SEQ ID NO: 66019 - DNA, 10 bp, Unknown
  misc_feature (1)..( 10): Matrix.003 file - promoters50/1023029
tttactcaat

SEQ ID NO: 66020 - DNA, 8 bp, Unknown
  misc_feature (1)..( 8): Matrix.003 file - promoters50/1023029
aagcatat

SEQ ID NO: 66021 - DNA, 8 bp, Unknown
  misc_feature (1)..( 8): Matrix.003 file - promoters50/1023029
tttatatt

SEQ ID NO: 66022 - DNA, 9 bp, Unknown
  misc_feature (1)..( 9): Matrix.003 file - promoters50/1023037
gggtatata

SEQ ID NO: 66023 - DNA, 11 bp, Unknown
  misc_feature (1)..( 11): Matrix.003 file - promoters50/1023037
acagtttataa

SEQ ID NO: 66024 - DNA, 9 bp, Unknown
  misc_feature (1)..( 9): Matrix.003 file - promoters50/1023037
aaattcact

SEQ ID NO: 66025 - DNA, 11 bp, Unknown
  misc_feature (1)..( 11): Matrix.003 file - promoters50/1023062
ctaaaaaaatc

SEQ ID NO: 66026 - DNA, 10 bp, Unknown
  misc_feature (1)..( 10): Matrix.003 file - promoters50/1023062
ttttcttatc

SEQ ID NO: 66027 - DNA, 8 bp, Unknown
  misc_feature (1)..( 8): Matrix.003 file - promoters50/1023079
tttgtttg

SEQ ID NO: 66028 - DNA, 13 bp, Unknown
  misc_feature (1)..( 13): Matrix.003 file - promoters50/1023079
gatttaattcaat

SEQ ID NO: 66029 - DNA, 11 bp, Unknown
  misc_feature (1)..( 11): Matrix.003 file - promoters50/1023089
atacaaaaatt

SEQ ID NO: 66030 - DNA, 11 bp, Unknown
  misc_feature (1)..( 11): Matrix.003 file - promoters50/1023089
gattaatactt

SEQ ID NO: 66031 - DNA, 10 bp, Unknown
  misc_feature (1)..( 10): Matrix.003 file - promoters50/1023089
ataaattctt

SEQ ID NO: 66032 - DNA, 12 bp, Unknown
  misc_feature (1)..( 12): Matrix.003 file - promoters50/1023089
ataaatttgata

SEQ ID NO: 66033 - DNA, 9 bp, Unknown
  misc_feature (1)..( 9): Matrix.003 file - promoters50/1023089
ataaaaaat

SEQ ID NO: 66034 - DNA, 16 bp, Unknown
  misc_feature (1)..( 16): Matrix.003 file - promoters50/1023124
attttcaaaaaaaaaa

SEQ ID NO: 66035 - DNA, 9 bp, Unknown
  misc_feature (1)..( 9): Matrix.003 file - promoters50/1023128
tatataaaa

SEQ ID NO: 66036 - DNA, 7 bp, Unknown
  misc_feature (1)..( 7): Matrix.003 file - promoters50/1023143
tattatg

SEQ ID NO: 66037 - DNA, 7 bp, Unknown
  misc_feature (1)..( 7): Matrix.003 file - promoters50/1023155
attcaaa

SEQ ID NO: 66038 - DNA, 10 bp, Unknown
  misc_feature (1)..( 10): Matrix.003 file - promoters50/1023155
tttctccata

SEQ ID NO: 66039 - DNA, 9 bp, Unknown
  misc_feature (1)..( 9): Matrix.003 file - promoters50/1023185
aatgaactt

SEQ ID NO: 66040 - DNA, 8 bp, Unknown
  misc_feature (1)..( 8): Matrix.003 file - promoters50/1023185
acacattt

SEQ ID NO: 66041 - DNA, 8 bp, Unknown
  misc_feature (1)..( 8): Matrix.003 file - promoters50/1023210
ttcttgcc

SEQ ID NO: 66042 - DNA, 10 bp, Unknown
  misc_feature (1)..( 10): Matrix.003 file - promoters50/1023210
tacgtgtcaa

SEQ ID NO: 66043 - DNA, 20 bp, Unknown
  misc_feature (1)..( 20): Matrix.003 file - promoters50/1023210
ttggctattgcttcaccgcc

SEQ ID NO: 66044 - DNA, 15 bp, Unknown
  misc_feature (1)..( 15): Matrix.003 file - promoters50/1023210
cgccttagctttctc

SEQ ID NO: 66045 - DNA, 22 bp, Unknown
  misc_feature (1)..( 22): Matrix.003 file - promoters50/1023210
gaccgagtcgtcctcgtctttt

SEQ ID NO: 66046 - DNA, 9 bp, Unknown
  misc_feature (1)..( 9): Matrix.003 file - promoters50/1023210
caaaaaaac

SEQ ID NO: 66047 - DNA, 6 bp, Unknown
  misc_feature (1)..( 6): Matrix.003 file - promoters50/1023210
aaaaca

SEQ ID NO: 66048 - DNA, 18 bp, Unknown
  misc_feature (1)..( 18): Matrix.003 file - promoters50/1023210
ttcttcttctataaatca

SEQ ID NO: 66049 - DNA, 10 bp, Unknown
  misc_feature (1)..( 10): Matrix.003 file - promoters50/1023221
acaagtagaa

SEQ ID NO: 66050 - DNA, 12 bp, Unknown
  misc_feature (1)..( 12): Matrix.003 file - promoters50/1023237
ttttggttcttt

SEQ ID NO: 66051 - DNA, 13 bp, Unknown
  misc_feature (1)..( 13): Matrix.003 file - promoters50/1023237
gagaaaattggtt

SEQ ID NO: 66052 - DNA, 14 bp, Unknown
  misc_feature (1)..( 14): Matrix.003 file - promoters50/1023237
aaatggttttgatt

SEQ ID NO: 66053 - DNA, 7 bp, Unknown
  misc_feature (1)..( 7): Matrix.003 file - promoters50/1023237
tttttaa

SEQ ID NO: 66054 - DNA, 8 bp, Unknown
  misc_feature (1)..( 8): Matrix.003 file - promoters50/1023270
cagttttg

SEQ ID NO: 66055 - DNA, 8 bp, Unknown
  misc_feature (1)..( 8): Matrix.003 file - promoters50/1023270
atataatt

SEQ ID NO: 66056 - DNA, 9 bp, Unknown
  misc_feature (1)..( 9): Matrix.003 file - promoters50/1023270
tttgaactc

SEQ ID NO: 66057 - DNA, 8 bp, Unknown
  misc_feature (1)..( 8): Matrix.003 file - promoters50/1023297
ttttctct

SEQ ID NO: 66058 - DNA, 10 bp, Unknown
  misc_feature (1)..( 10): Matrix.003 file - promoters50/1023299
ctataaacac

SEQ ID NO: 66059 - DNA, 8 bp, Unknown
  misc_feature (1)..( 8): Matrix.003 file - promoters50/1023324
atttaaaa

SEQ ID NO: 66060 - DNA, 7 bp, Unknown
  misc_feature (1)..( 7): Matrix.003 file - promoters50/1023324
ataaatt

SEQ ID NO: 66061 - DNA, 10 bp, Unknown
  misc_feature (1)..( 10): Matrix.003 file - promoters50/1023339
aaagaacatg

SEQ ID NO: 66062 - DNA, 14 bp, Unknown
  misc_feature (1)..( 14): Matrix.003 file - promoters50/1023397
ttcttttttgtttt

SEQ ID NO: 66063 - DNA, 8 bp, Unknown
  misc_feature (1)..( 8): Matrix.003 file - promoters50/1023397
taaattat

SEQ ID NO: 66064 - DNA, 12 bp, Unknown
  misc_feature (1)..( 12): Matrix.003 file - promoters50/1023397
cttttttttggt

SEQ ID NO: 66065 - DNA, 10 bp, Unknown
  misc_feature (1)..( 10): Matrix.003 file - promoters50/1023407
ataatacaca

SEQ ID NO: 66066 - DNA, 9 bp, Unknown
  misc_feature (1)..( 9): Matrix.003 file - promoters50/1023407
aggtttctc

SEQ ID NO: 66067 - DNA, 8 bp, Unknown
  misc_feature (1)..( 8): Matrix.003 file - promoters50/1023426
tcagaatt

SEQ ID NO: 66068 - DNA, 8 bp, Unknown
  misc_feature (1)..( 8): Matrix.003 file - promoters50/1023426
atttaatt

SEQ ID NO: 66069 - DNA, 12 bp, Unknown
  misc_feature (1)..( 12): Matrix.003 file - promoters50/1023432
acagcatttttg

SEQ ID NO: 66070 - DNA, 10 bp, Unknown
  misc_feature (1)..( 10): Matrix.003 file - promoters50/1023432
aaatttaatt

SEQ ID NO: 66071 - DNA, 11 bp, Unknown
  misc_feature (1)..( 11): Matrix.003 file - promoters50/1023432
aacgaaaaata

SEQ ID NO: 66072 - DNA, 12 bp, Unknown
  misc_feature (1)..( 12): Matrix.003 file - promoters50/1023453
agaaaagaaaaa

SEQ ID NO: 66073 - DNA, 10 bp, Unknown
  misc_feature (1)..( 10): Matrix.003 file - promoters50/1023453
gtttcaatct

SEQ ID NO: 66074 - DNA, 9 bp, Unknown
  misc_feature (1)..( 9): Matrix.003 file - promoters50/1023453
caaatgtta

SEQ ID NO: 66075 - DNA, 9 bp, Unknown
  misc_feature (1)..( 9): Matrix.003 file - promoters50/1023579
taatatcat

SEQ ID NO: 66076 - DNA, 10 bp, Unknown
  misc_feature (1)..( 10): Matrix.003 file - promoters50/1023579
aaataatcat

SEQ ID NO: 66077 - DNA, 9 bp, Unknown
  misc_feature (1)..( 9): Matrix.003 file - promoters50/1023583
gtttttata

SEQ ID NO: 66078 - DNA, 9 bp, Unknown
  misc_feature (1)..( 9): Matrix.003 file - promoters50/1023583
atcgtcttc

SEQ ID NO: 66079 - DNA, 10 bp, Unknown
  misc_feature (1)..( 10): Matrix.003 file - promoters50/1023583
acaaaagaaa

SEQ ID NO: 66080 - DNA, 11 bp, Unknown
  misc_feature (1)..( 11): Matrix.003 file - promoters50/1023583
agagtttataa

SEQ ID NO: 66081 - DNA, 9 bp, Unknown
  misc_feature (1)..( 9): Matrix.003 file - promoters50/1023594
agaaaaatt

SEQ ID NO: 66082 - DNA, 10 bp, Unknown
  misc_feature (1)..( 10): Matrix.003 file - promoters50/1023594
ttaaagaaat

SEQ ID NO: 66083 - DNA, 9 bp, Unknown
  misc_feature (1)..( 9): Matrix.003 file - promoters50/1023594
ccaaaaaca

SEQ ID NO: 66084 - DNA, 10 bp, Unknown
  misc_feature (1)..( 10): Matrix.003 file - promoters50/1023594
taattattat

SEQ ID NO: 66085 - DNA, 11 bp, Unknown
  misc_feature (1)..( 11): Matrix.003 file - promoters50/1023594
tcaactaatca

SEQ ID NO: 66086 - DNA, 12 bp, Unknown
  misc_feature (1)..( 12): Matrix.003 file - promoters50/1023594
tttgaattttaa

SEQ ID NO: 66087 - DNA, 9 bp, Unknown
  misc_feature (1)..( 9): Matrix.003 file - promoters50/1023594
ttaaacaat

SEQ ID NO: 66088 - DNA, 12 bp, Unknown
  misc_feature (1)..( 12): Matrix.003 file - promoters50/1023594
aaacaatagaaa

SEQ ID NO: 66089 - DNA, 9 bp, Unknown
  misc_feature (1)..( 9): Matrix.003 file - promoters50/1023594
caaaacaaa

SEQ ID NO: 66090 - DNA, 10 bp, Unknown
  misc_feature (1)..( 10): Matrix.003 file - promoters50/1023594
atgataaaat

SEQ ID NO: 66091 - DNA, 9 bp, Unknown
  misc_feature (1)..( 9): Matrix.003 file - promoters50/1023594
tattattaa

SEQ ID NO: 66092 - DNA, 14 bp, Unknown
  misc_feature (1)..( 14): Matrix.003 file - promoters50/1023619
aatgaaaaagttaa

SEQ ID NO: 66093 - DNA, 8 bp, Unknown
  misc_feature (1)..( 8): Matrix.003 file - promoters50/1023619
aattgatt

SEQ ID NO: 66094 - DNA, 12 bp, Unknown
  misc_feature (1)..( 12): Matrix.003 file - promoters50/1023619
gttgaatctgac

SEQ ID NO: 66095 - DNA, 11 bp, Unknown
  misc_feature (1)..( 11): Matrix.003 file - promoters50/1023634
aaaaattgtga

SEQ ID NO: 66096 - DNA, 16 bp, Unknown
  misc_feature (1)..( 16): Matrix.003 file - promoters50/1023634
tatttaaaaaaaaata

SEQ ID NO: 66097 - DNA, 8 bp, Unknown
  misc_feature (1)..( 8): Matrix.003 file - promoters50/1023681
aaatgaaa

SEQ ID NO: 66098 - DNA, 9 bp, Unknown
  misc_feature (1)..( 9): Matrix.003 file - promoters50/1023698
aagcaaaaa

SEQ ID NO: 66099 - DNA, 8 bp, Unknown
  misc_feature (1)..( 8): Matrix.003 file - promoters50/1023698
ctttattt

SEQ ID NO: 66100 - DNA, 10 bp, Unknown
  misc_feature (1)..( 10): Matrix.003 file - promoters50/1023698
taaaaaataa

SEQ ID NO: 66101 - DNA, 10 bp, Unknown
  misc_feature (1)..( 10): Matrix.003 file - promoters50/1023698
acattattgt

SEQ ID NO: 66102 - DNA, 7 bp, Unknown
  misc_feature (1)..( 7): Matrix.003 file - promoters50/1023747
ataaatc

SEQ ID NO: 66103 - DNA, 7 bp, Unknown
  misc_feature (1)..( 7): Matrix.003 file - promoters50/1023747
aattata

SEQ ID NO: 66104 - DNA, 8 bp, Unknown
  misc_feature (1)..( 8): Matrix.003 file - promoters50/1023747
aaatcatt

SEQ ID NO: 66105 - DNA, 10 bp, Unknown
  misc_feature (1)..( 10): Matrix.003 file - promoters50/1023782
agaaaagaaa

SEQ ID NO: 66106 - DNA, 7 bp, Unknown
  misc_feature (1)..( 7): Matrix.003 file - promoters50/1023782
agtttgg

SEQ ID NO: 66107 - DNA, 7 bp, Unknown
  misc_feature (1)..( 7): Matrix.003 file - promoters50/1023786
ctaattt

SEQ ID NO: 66108 - DNA, 18 bp, Unknown
  misc_feature (1)..( 18): Matrix.003 file - promoters50/1023851
aaaccatagttttgacat

SEQ ID NO: 66109 - DNA, 21 bp, Unknown
  misc_feature (1)..( 21): Matrix.003 file - promoters50/1023851
aaaaaccaaaaataccgtaat

SEQ ID NO: 66110 - DNA, 8 bp, Unknown
  misc_feature (1)..( 8): Matrix.003 file - promoters50/1023851
caaaacaa

SEQ ID NO: 66111 - DNA, 10 bp, Unknown
  misc_feature (1)..( 10): Matrix.003 file - promoters50/1023891
cattgaatta

SEQ ID NO: 66112 - DNA, 13 bp, Unknown
  misc_feature (1)..( 13): Matrix.003 file - promoters50/1023891
aaaattttaaaga

SEQ ID NO: 66113 - DNA, 13 bp, Unknown
  misc_feature (1)..( 13): Matrix.003 file - promoters50/1023963
agaacacataaaa

SEQ ID NO: 66114 - DNA, 6 bp, Unknown
  misc_feature (1)..( 6): Matrix.003 file - promoters50/1023963
acatta

SEQ ID NO: 66115 - DNA, 8 bp, Unknown
  misc_feature (1)..( 8): Matrix.003 file - promoters50/1024003
ttttatct

SEQ ID NO: 66116 - DNA, 7 bp, Unknown
  misc_feature (1)..( 7): Matrix.003 file - promoters50/1024015
tacatac

SEQ ID NO: 66117 - DNA, 10 bp, Unknown
  misc_feature (1)..( 10): Matrix.003 file - promoters50/1024045
aatttgagac

SEQ ID NO: 66118 - DNA, 9 bp, Unknown
  misc_feature (1)..( 9): Matrix.003 file - promoters50/1024045
aaatttggg

SEQ ID NO: 66119 - DNA, 8 bp, Unknown
  misc_feature (1)..( 8): Matrix.003 file - promoters50/1024045
aagaaata

SEQ ID NO: 66120 - DNA, 7 bp, Unknown
  misc_feature (1)..( 7): Matrix.003 file - promoters50/1024045
aattaat

SEQ ID NO: 66121 - DNA, 6 bp, Unknown
  misc_feature (1)..( 6): Matrix.003 file - promoters50/1024045
taatta

SEQ ID NO: 66122 - DNA, 13 bp, Unknown
  misc_feature (1)..( 13): Matrix.003 file - promoters50/1024126
agattgaaaatga

SEQ ID NO: 66123 - DNA, 10 bp, Unknown
  misc_feature (1)..( 10): Matrix.003 file - promoters50/1024126
tcagataaaa

SEQ ID NO: 66124 - DNA, 11 bp, Unknown
  misc_feature (1)..( 11): Matrix.003 file - promoters50/1024126
aattaaaaaaa

SEQ ID NO: 66125 - DNA, 10 bp, Unknown
  misc_feature (1)..( 10): Matrix.003 file - promoters50/1024126
gaaaaattct

SEQ ID NO: 66126 - DNA, 8 bp, Unknown
  misc_feature (1)..( 8): Matrix.003 file - promoters50/1024126
aaacaaat

SEQ ID NO: 66127 - DNA, 8 bp, Unknown
  misc_feature (1)..( 8): Matrix.003 file - promoters50/1024130
ttgtcaac

SEQ ID NO: 66128 - DNA, 12 bp, Unknown
  misc_feature (1)..( 12): Matrix.003 file - promoters50/1024166
attaaaaaaaaa

SEQ ID NO: 66129 - DNA, 13 bp, Unknown
  misc_feature (1)..( 13): Matrix.003 file - promoters50/1024166
aattatgtattgt

SEQ ID NO: 66130 - DNA, 10 bp, Unknown
  misc_feature (1)..( 10): Matrix.003 file - promoters50/1024189
actttacatt

SEQ ID NO: 66131 - DNA, 8 bp, Unknown
  misc_feature (1)..( 8): Matrix.003 file - promoters50/1024189
atataata

SEQ ID NO: 66132 - DNA, 10 bp, Unknown
  misc_feature (1)..( 10): Matrix.003 file - promoters50/1024189
ataaaaaata

SEQ ID NO: 66133 - DNA, 12 bp, Unknown
  misc_feature (1)..( 12): Matrix.003 file - promoters50/1024189
aataaaaaatta

SEQ ID NO: 66134 - DNA, 11 bp, Unknown
  misc_feature (1)..( 11): Matrix.003 file - promoters50/1024189
tttattgattt

SEQ ID NO: 66135 - DNA, 13 bp, Unknown
  misc_feature (1)..( 13): Matrix.003 file - promoters50/1024189
attaattttattt

SEQ ID NO: 66136 - DNA, 14 bp, Unknown
  misc_feature (1)..( 14): Matrix.003 file - promoters50/1024199
attaatgaatttta

SEQ ID NO: 66137 - DNA, 16 bp, Unknown
  misc_feature (1)..( 16): Matrix.003 file - promoters50/1024199
tttataaacacactat

SEQ ID NO: 66138 - DNA, 10 bp, Unknown
  misc_feature (1)..( 10): Matrix.003 file - promoters50/1024199
aacaattatt

SEQ ID NO: 66139 - DNA, 7 bp, Unknown
  misc_feature (1)..( 7): Matrix.003 file - promoters50/1024203
aaatgtc

SEQ ID NO: 66140 - DNA, 13 bp, Unknown
  misc_feature (1)..( 13): Matrix.003 file - promoters50/1024206
atgttattgatat

SEQ ID NO: 66141 - DNA, 9 bp, Unknown
  misc_feature (1)..( 9): Matrix.003 file - promoters50/1024206
tggttatgt

SEQ ID NO: 66142 - DNA, 11 bp, Unknown
  misc_feature (1)..( 11): Matrix.003 file - promoters50/1024214
gctgatattaa

SEQ ID NO: 66143 - DNA, 12 bp, Unknown
  misc_feature (1)..( 12): Matrix.003 file - promoters50/1024214
gtcaaattgttg

SEQ ID NO: 66144 - DNA, 13 bp, Unknown
  misc_feature (1)..( 13): Matrix.003 file - promoters50/1024214
aaattgattttag

SEQ ID NO: 66145 - DNA, 13 bp, Unknown
  misc_feature (1)..( 13): Matrix.003 file - promoters50/1024214
aattgattaaaga

SEQ ID NO: 66146 - DNA, 6 bp, Unknown
  misc_feature (1)..( 6): Matrix.003 file - promoters50/1024236
aataat

SEQ ID NO: 66147 - DNA, 15 bp, Unknown
  misc_feature (1)..( 15): Matrix.003 file - promoters50/1024236
aaaccctagacttgg

SEQ ID NO: 66148 - DNA, 8 bp, Unknown
  misc_feature (1)..( 8): Matrix.003 file - promoters50/1024236
taaaaaaa

SEQ ID NO: 66149 - DNA, 13 bp, Unknown
  misc_feature (1)..( 13): Matrix.003 file - promoters50/1024236
taaaatatttata

SEQ ID NO: 66150 - DNA, 8 bp, Unknown
  misc_feature (1)..( 8): Matrix.003 file - promoters50/1024247
aactttgc

SEQ ID NO: 66151 - DNA, 11 bp, Unknown
  misc_feature (1)..( 11): Matrix.003 file - promoters50/1024247
acatctctctt

SEQ ID NO: 66152 - DNA, 9 bp, Unknown
  misc_feature (1)..( 9): Matrix.003 file - promoters50/1024247
gcaaagaaa

SEQ ID NO: 66153 - DNA, 8 bp, Unknown
  misc_feature (1)..( 8): Matrix.003 file - promoters50/1024247
tctttttc

SEQ ID NO: 66154 - DNA, 11 bp, Unknown
  misc_feature (1)..( 11): Matrix.003 file - promoters50/1024247
taacataaaga

SEQ ID NO: 66155 - DNA, 8 bp, Unknown
  misc_feature (1)..( 8): Matrix.003 file - promoters50/1024251
caaataaa

SEQ ID NO: 66156 - DNA, 7 bp, Unknown
  misc_feature (1)..( 7): Matrix.003 file - promoters50/1024251
attttat

SEQ ID NO: 66157 - DNA, 9 bp, Unknown
  misc_feature (1)..( 9): Matrix.003 file - promoters50/1024251
acaacaata

SEQ ID NO: 66158 - DNA, 8 bp, Unknown
  misc_feature (1)..( 8): Matrix.003 file - promoters50/1024251
taaattaa

SEQ ID NO: 66159 - DNA, 9 bp, Unknown
  misc_feature (1)..( 9): Matrix.003 file - promoters50/1024257
attctaaaa

SEQ ID NO: 66160 - DNA, 9 bp, Unknown
  misc_feature (1)..( 9): Matrix.003 file - promoters50/1024277
taaacaaaa

SEQ ID NO: 66161 - DNA, 7 bp, Unknown
  misc_feature (1)..( 7): Matrix.003 file - promoters50/1024277
ttctaat

SEQ ID NO: 66162 - DNA, 7 bp, Unknown
  misc_feature (1)..( 7): Matrix.003 file - promoters50/1024288
gattttt

SEQ ID NO: 66163 - DNA, 11 bp, Unknown
  misc_feature (1)..( 11): Matrix.003 file - promoters50/1024288
aacaaaaaata

SEQ ID NO: 66164 - DNA, 7 bp, Unknown
  misc_feature (1)..( 7): Matrix.003 file - promoters50/1024288
aagatat

SEQ ID NO: 66165 - DNA, 9 bp, Unknown
  misc_feature (1)..( 9): Matrix.003 file - promoters50/1024288
tcaaagaat

SEQ ID NO: 66166 - DNA, 9 bp, Unknown
  misc_feature (1)..( 9): Matrix.003 file - promoters50/1024355
tttgattta

SEQ ID NO: 66167 - DNA, 10 bp, Unknown
  misc_feature (1)..( 10): Matrix.003 file - promoters50/1024355
ctatactatg

SEQ ID NO: 66168 - DNA, 10 bp, Unknown
  misc_feature (1)..( 10): Matrix.003 file - promoters50/1024367
ataagtttaa

SEQ ID NO: 66169 - DNA, 9 bp, Unknown
  misc_feature (1)..( 9): Matrix.003 file - promoters50/1024367
aaaataaaa

SEQ ID NO: 66170 - DNA, 10 bp, Unknown
  misc_feature (1)..( 10): Matrix.003 file - promoters50/1024367
tatatataat

SEQ ID NO: 66171 - DNA, 8 bp, Unknown
  misc_feature (1)..( 8): Matrix.003 file - promoters50/1024367
ataaaaaa

SEQ ID NO: 66172 - DNA, 8 bp, Unknown
  misc_feature (1)..( 8): Matrix.003 file - promoters50/1024367
aattttta

SEQ ID NO: 66173 - DNA, 11 bp, Unknown
  misc_feature (1)..( 11): Matrix.003 file - promoters50/1024367
gattgattttc

SEQ ID NO: 66174 - DNA, 9 bp, Unknown
  misc_feature (1)..( 9): Matrix.003 file - promoters50/1024367
atttttaat

SEQ ID NO: 66175 - DNA, 8 bp, Unknown
  misc_feature (1)..( 8): Matrix.003 file - promoters50/1024375
aatttgta

SEQ ID NO: 66176 - DNA, 8 bp, Unknown
  misc_feature (1)..( 8): Matrix.003 file - promoters50/1024375
aataaaaa

SEQ ID NO: 66177 - DNA, 8 bp, Unknown
  misc_feature (1)..( 8): Matrix.003 file - promoters50/1024408
tttgttaa

SEQ ID NO: 66178 - DNA, 8 bp, Unknown
  misc_feature (1)..( 8): Matrix.003 file - promoters50/1024408
actataat

SEQ ID NO: 66179 - DNA, 12 bp, Unknown
  misc_feature (1)..( 12): Matrix.003 file - promoters50/1024420
ataaaaaaaaaa

SEQ ID NO: 66180 - DNA, 15 bp, Unknown
  misc_feature (1)..( 15): Matrix.003 file - promoters50/1024431
caaaatataatttaa

SEQ ID NO: 66181 - DNA, 13 bp, Unknown
  misc_feature (1)..( 13): Matrix.003 file - promoters50/1024431
tatattttcttag

SEQ ID NO: 66182 - DNA, 12 bp, Unknown
  misc_feature (1)..( 12): Matrix.003 file - promoters50/1024431
gaaataaatcac

SEQ ID NO: 66183 - DNA, 9 bp, Unknown
  misc_feature (1)..( 9): Matrix.003 file - promoters50/1024454
aaacagaaa

SEQ ID NO: 66184 - DNA, 10 bp, Unknown
  misc_feature (1)..( 10): Matrix.003 file - promoters50/1024470
ggaaggagaa

SEQ ID NO: 66185 - DNA, 7 bp, Unknown
  misc_feature (1)..( 7): Matrix.003 file - promoters50/1024470
tttttaa

SEQ ID NO: 66186 - DNA, 7 bp, Unknown
  misc_feature (1)..( 7): Matrix.003 file - promoters50/1024470
tttaaac

SEQ ID NO: 66187 - DNA, 9 bp, Unknown
  misc_feature (1)..( 9): Matrix.003 file - promoters50/1024470
taaatttaa

SEQ ID NO: 66188 - DNA, 9 bp, Unknown
  misc_feature (1)..( 9): Matrix.003 file - promoters50/1024470
attttctta

SEQ ID NO: 66189 - DNA, 11 bp, Unknown
  misc_feature (1)..( 11): Matrix.003 file - promoters50/1024470
tttaaaaagga

SEQ ID NO: 66190 - DNA, 6 bp, Unknown
  misc_feature (1)..( 6): Matrix.003 file - promoters50/1024470
aaattg

SEQ ID NO: 66191 - DNA, 12 bp, Unknown
  misc_feature (1)..( 12): Matrix.003 file - promoters50/1024499
attaactaaaaa

SEQ ID NO: 66192 - DNA, 11 bp, Unknown
  misc_feature (1)..( 11): Matrix.003 file - promoters50/1024499
aacattttaat

SEQ ID NO: 66193 - DNA, 16 bp, Unknown
  misc_feature (1)..( 16): Matrix.003 file - promoters50/1024499
agtataaaatattttt

SEQ ID NO: 66194 - DNA, 11 bp, Unknown
  misc_feature (1)..( 11): Matrix.003 file - promoters50/1024499
tatataaataa

SEQ ID NO: 66195 - DNA, 14 bp, Unknown
  misc_feature (1)..( 14): Matrix.003 file - promoters50/1024499
attaaatttttaat

SEQ ID NO: 66196 - DNA, 17 bp, Unknown
  misc_feature (1)..( 17): Matrix.003 file - promoters50/1024499
ttaaattaacagtataa

SEQ ID NO: 66197 - DNA, 13 bp, Unknown
  misc_feature (1)..( 13): Matrix.003 file - promoters50/1024499
taaaatatttttt

SEQ ID NO: 66198 - DNA, 11 bp, Unknown
  misc_feature (1)..( 11): Matrix.003 file - promoters50/1024499
aatatttttat

SEQ ID NO: 66199 - DNA, 7 bp, Unknown
  misc_feature (1)..( 7): Matrix.003 file - promoters50/1024499
aatcaat

SEQ ID NO: 66200 - DNA, 12 bp, Unknown
  misc_feature (1)..( 12): Matrix.003 file - promoters50/1024499
aatcaatttttt

SEQ ID NO: 66201 - DNA, 13 bp, Unknown
  misc_feature (1)..( 13): Matrix.003 file - promoters50/1024499
tttattaatttga

SEQ ID NO: 66202 - DNA, 11 bp, Unknown
  misc_feature (1)..( 11): Matrix.003 file - promoters50/1024499
ttttattaact

SEQ ID NO: 66203 - DNA, 9 bp, Unknown
  misc_feature (1)..( 9): Matrix.003 file - promoters50/1024550
aaaatctgg

SEQ ID NO: 66204 - DNA, 10 bp, Unknown
  misc_feature (1)..( 10): Matrix.003 file - promoters50/1024570
atgaaaaacc

SEQ ID NO: 66205 - DNA, 7 bp, Unknown
  misc_feature (1)..( 7): Matrix.003 file - promoters50/1024603
atatata

SEQ ID NO: 66206 - DNA, 7 bp, Unknown
  misc_feature (1)..( 7): Matrix.003 file - promoters50/1024603
taacatg

SEQ ID NO: 66207 - DNA, 12 bp, Unknown
  misc_feature (1)..( 12): Matrix.003 file - promoters50/1024603
aattttccacaa

SEQ ID NO: 66208 - DNA, 12 bp, Unknown
  misc_feature (1)..( 12): Matrix.003 file - promoters50/1024603
tattagatatca

SEQ ID NO: 66209 - DNA, 8 bp, Unknown
  misc_feature (1)..( 8): Matrix.003 file - promoters50/1024603
agattaga

SEQ ID NO: 66210 - DNA, 9 bp, Unknown
  misc_feature (1)..( 9): Matrix.003 file - promoters50/1024603
aaattgtgt

SEQ ID NO: 66211 - DNA, 10 bp, Unknown
  misc_feature (1)..( 10): Matrix.003 file - promoters50/1024611
tcaaaagagc

SEQ ID NO: 66212 - DNA, 9 bp, Unknown
  misc_feature (1)..( 9): Matrix.003 file - promoters50/1024639
gtaaaaatt

SEQ ID NO: 66213 - DNA, 7 bp, Unknown
  misc_feature (1)..( 7): Matrix.003 file - promoters50/1024639
taataaa

SEQ ID NO: 66214 - DNA, 6 bp, Unknown
  misc_feature (1)..( 6): Matrix.003 file - promoters50/1024639
tttaaa

SEQ ID NO: 66215 - DNA, 10 bp, Unknown
  misc_feature (1)..( 10): Matrix.003 file - promoters50/1024639
ttatcttaaa

SEQ ID NO: 66216 - DNA, 9 bp, Unknown
  misc_feature (1)..( 9): Matrix.003 file - promoters50/1024639
tgatttttt

SEQ ID NO: 66217 - DNA, 7 bp, Unknown
  misc_feature (1)..( 7): Matrix.003 file - promoters50/1024639
taattat

SEQ ID NO: 66218 - DNA, 8 bp, Unknown
  misc_feature (1)..( 8): Matrix.003 file - promoters50/1024639
actaattt

SEQ ID NO: 66219 - DNA, 12 bp, Unknown
  misc_feature (1)..( 12): Matrix.003 file - promoters50/1024662
aaataagaaaat

SEQ ID NO: 66220 - DNA, 9 bp, Unknown
  misc_feature (1)..( 9): Matrix.003 file - promoters50/1024713
gaaatttgc

SEQ ID NO: 66221 - DNA, 11 bp, Unknown
  misc_feature (1)..( 11): Matrix.003 file - promoters50/1024713
gaaatttgctt

SEQ ID NO: 66222 - DNA, 10 bp, Unknown
  misc_feature (1)..( 10): Matrix.003 file - promoters50/1024713
aaatttgttt

SEQ ID NO: 66223 - DNA, 8 bp, Unknown
  misc_feature (1)..( 8): Matrix.003 file - promoters50/1024713
catatttt

SEQ ID NO: 66224 - DNA, 13 bp, Unknown
  misc_feature (1)..( 13): Matrix.003 file - promoters50/1024713
tttaaaactaaaa

SEQ ID NO: 66225 - DNA, 13 bp, Unknown
  misc_feature (1)..( 13): Matrix.003 file - promoters50/1024756
taaaagtcaaaaa

SEQ ID NO: 66226 - DNA, 7 bp, Unknown
  misc_feature (1)..( 7): Matrix.003 file - promoters50/1024783
atttttt

SEQ ID NO: 66227 - DNA, 8 bp, Unknown
  misc_feature (1)..( 8): Matrix.003 file - promoters50/1024783
cttttttt

SEQ ID NO: 66228 - DNA, 7 bp, Unknown
  misc_feature (1)..( 7): Matrix.003 file - promoters50/1024787
aaaattc

SEQ ID NO: 66229 - DNA, 8 bp, Unknown
  misc_feature (1)..( 8): Matrix.003 file - promoters50/1024787
acagtttc

SEQ ID NO: 66230 - DNA, 7 bp, Unknown
  misc_feature (1)..( 7): Matrix.003 file - promoters50/1024787
tgttttt

SEQ ID NO: 66231 - DNA, 8 bp, Unknown
  misc_feature (1)..( 8): Matrix.003 file - promoters50/1024787
gggcttta

SEQ ID NO: 66232 - DNA, 9 bp, Unknown
  misc_feature (1)..( 9): Matrix.003 file - promoters50/1024787
aattctctt

SEQ ID NO: 66233 - DNA, 8 bp, Unknown
  misc_feature (1)..( 8): Matrix.003 file - promoters50/1024787
ttttctta

SEQ ID NO: 66234 - DNA, 8 bp, Unknown
  misc_feature (1)..( 8): Matrix.003 file - promoters50/1024821
ttcctttg

SEQ ID NO: 66235 - DNA, 10 bp, Unknown
  misc_feature (1)..( 10): Matrix.003 file - promoters50/1024821
aagaagaagc

SEQ ID NO: 66236 - DNA, 9 bp, Unknown
  misc_feature (1)..( 9): Matrix.003 file - promoters50/1024837
tctttggat

SEQ ID NO: 66237 - DNA, 12 bp, Unknown
  misc_feature (1)..( 12): Matrix.003 file - promoters50/1024837
aaattaaaaaat

SEQ ID NO: 66238 - DNA, 11 bp, Unknown
  misc_feature (1)..( 11): Matrix.003 file - promoters50/1024837
atcaaataatc

SEQ ID NO: 66239 - DNA, 8 bp, Unknown
  misc_feature (1)..( 8): Matrix.003 file - promoters50/1024837
aaatattg

SEQ ID NO: 66240 - DNA, 7 bp, Unknown
  misc_feature (1)..( 7): Matrix.003 file - promoters50/1024840
cataaga

SEQ ID NO: 66241 - DNA, 8 bp, Unknown
  misc_feature (1)..( 8): Matrix.003 file - promoters50/1024840
aaaaagaa

SEQ ID NO: 66242 - DNA, 9 bp, Unknown
  misc_feature (1)..( 9): Matrix.003 file - promoters50/1024840
agaaaaaag

SEQ ID NO: 66243 - DNA, 7 bp, Unknown
  misc_feature (1)..( 7): Matrix.003 file - promoters50/1024840
taataat

SEQ ID NO: 66244 - DNA, 11 bp, Unknown
  misc_feature (1)..( 11): Matrix.003 file - promoters50/1024853
ctactataaaa

SEQ ID NO: 66245 - DNA, 11 bp, Unknown
  misc_feature (1)..( 11): Matrix.003 file - promoters50/1024872
aataactaaaa

SEQ ID NO: 66246 - DNA, 7 bp, Unknown
  misc_feature (1)..( 7): Matrix.003 file - promoters50/1024872
aatcttt

SEQ ID NO: 66247 - DNA, 9 bp, Unknown
  misc_feature (1)..( 9): Matrix.003 file - promoters50/1024872
tatttatta

SEQ ID NO: 66248 - DNA, 11 bp, Unknown
  misc_feature (1)..( 11): Matrix.003 file - promoters50/1024872
aaagaaaaaaa

SEQ ID NO: 66249 - DNA, 11 bp, Unknown
  misc_feature (1)..( 11): Matrix.003 file - promoters50/1024872
taaaataagtt

SEQ ID NO: 66250 - DNA, 11 bp, Unknown
  misc_feature (1)..( 11): Matrix.003 file - promoters50/1024872
aaagaaaaaca

SEQ ID NO: 66251 - DNA, 10 bp, Unknown
  misc_feature (1)..( 10): Matrix.003 file - promoters50/1024889
aaaatttaaa

SEQ ID NO: 66252 - DNA, 3 bp, Unknown
  misc_feature (1)..( 3): Matrix.003 file - promoters50/1024889
ttt

SEQ ID NO: 66253 - DNA, 7 bp, Unknown
  misc_feature (1)..( 7): Matrix.003 file - promoters50/1024889
aaaaaaa

SEQ ID NO: 66254 - DNA, 10 bp, Unknown
  misc_feature (1)..( 10): Matrix.003 file - promoters50/1024889
tggtaataaa

SEQ ID NO: 66255 - DNA, 10 bp, Unknown
  misc_feature (1)..( 10): Matrix.003 file - promoters50/1024905
caaaaagaaa

SEQ ID NO: 66256 - DNA, 7 bp, Unknown
  misc_feature (1)..( 7): Matrix.003 file - promoters50/1024924
ttaattt

SEQ ID NO: 66257 - DNA, 10 bp, Unknown
  misc_feature (1)..( 10): Matrix.003 file - promoters50/1024924
tttggcatct

SEQ ID NO: 66258 - DNA, 7 bp, Unknown
  misc_feature (1)..( 7): Matrix.003 file - promoters50/1024924
tttatta

SEQ ID NO: 66259 - DNA, 8 bp, Unknown
  misc_feature (1)..( 8): Matrix.003 file - promoters50/1024924
atatatat

SEQ ID NO: 66260 - DNA, 7 bp, Unknown
  misc_feature (1)..( 7): Matrix.003 file - promoters50/1024924
tctaatt

SEQ ID NO: 66261 - DNA, 9 bp, Unknown
  misc_feature (1)..( 9): Matrix.003 file - promoters50/1024924
cattaaatt

SEQ ID NO: 66262 - DNA, 8 bp, Unknown
  misc_feature (1)..( 8): Matrix.003 file - promoters50/1024924
aattcaaa

SEQ ID NO: 66263 - DNA, 7 bp, Unknown
  misc_feature (1)..( 7): Matrix.003 file - promoters50/1024924
aatttga

SEQ ID NO: 66264 - DNA, 7 bp, Unknown
  misc_feature (1)..( 7): Matrix.003 file - promoters50/1024924
aaactat

SEQ ID NO: 66265 - DNA, 8 bp, Unknown
  misc_feature (1)..( 8): Matrix.003 file - promoters50/1024958
caattatt

SEQ ID NO: 66266 - DNA, 8 bp, Unknown
  misc_feature (1)..( 8): Matrix.003 file - promoters50/1024958
tgattaaa

SEQ ID NO: 66267 - DNA, 8 bp, Unknown
  misc_feature (1)..( 8): Matrix.003 file - promoters50/1024958
gaaaaagc

SEQ ID NO: 66268 - DNA, 8 bp, Unknown
  misc_feature (1)..( 8): Matrix.003 file - promoters50/1024958
gaataaaa

SEQ ID NO: 66269 - DNA, 7 bp, Unknown
  misc_feature (1)..( 7): Matrix.003 file - promoters50/1024958
aaagttg

SEQ ID NO: 66270 - DNA, 8 bp, Unknown
  misc_feature (1)..( 8): Matrix.003 file - promoters50/1024958
gatatttg

SEQ ID NO: 66271 - DNA, 7 bp, Unknown
  misc_feature (1)..( 7): Matrix.003 file - promoters50/1024961
aaacaat

SEQ ID NO: 66272 - DNA, 14 bp, Unknown
  misc_feature (1)..( 14): Matrix.003 file - promoters50/1024961
cttggttttgcttg

SEQ ID NO: 66273 - DNA, 7 bp, Unknown
  misc_feature (1)..( 7): Matrix.003 file - promoters50/1024961
aaaaaag

SEQ ID NO: 66274 - DNA, 8 bp, Unknown
  misc_feature (1)..( 8): Matrix.003 file - promoters50/1024961
aaataaat

SEQ ID NO: 66275 - DNA, 11 bp, Unknown
  misc_feature (1)..( 11): Matrix.003 file - promoters50/1025028
aattaatcaaa

SEQ ID NO: 66276 - DNA, 8 bp, Unknown
  misc_feature (1)..( 8): Matrix.003 file - promoters50/1025028
atatatta

SEQ ID NO: 66277 - DNA, 7 bp, Unknown
  misc_feature (1)..( 7): Matrix.003 file - promoters50/1025028
aatttta

SEQ ID NO: 66278 - DNA, 9 bp, Unknown
  misc_feature (1)..( 9): Matrix.003 file - promoters50/1025028
agtcaaagt

SEQ ID NO: 66279 - DNA, 9 bp, Unknown
  misc_feature (1)..( 9): Matrix.003 file - promoters50/1025053
ctagtctat

SEQ ID NO: 66280 - DNA, 15 bp, Unknown
  misc_feature (1)..( 15): Matrix.003 file - promoters50/1025087
tttgaaaatcggagt

SEQ ID NO: 66281 - DNA, 13 bp, Unknown
  misc_feature (1)..( 13): Matrix.003 file - promoters50/1025100
gataaaaaaaata

SEQ ID NO: 66282 - DNA, 8 bp, Unknown
  misc_feature (1)..( 8): Matrix.003 file - promoters50/1025100
acaatttt

SEQ ID NO: 66283 - DNA, 9 bp, Unknown
  misc_feature (1)..( 9): Matrix.003 file - promoters50/1025113
tttaaaaaa

SEQ ID NO: 66284 - DNA, 12 bp, Unknown
  misc_feature (1)..( 12): Matrix.003 file - promoters50/1025113
gaaaatatatat

SEQ ID NO: 66285 - DNA, 9 bp, Unknown
  misc_feature (1)..( 9): Matrix.003 file - promoters50/1025113
atatagctt

SEQ ID NO: 66286 - DNA, 9 bp, Unknown
  misc_feature (1)..( 9): Matrix.003 file - promoters50/1025117
ttttattat

SEQ ID NO: 66287 - DNA, 14 bp, Unknown
  misc_feature (1)..( 14): Matrix.003 file - promoters50/1025117
ttatttaatatttt

SEQ ID NO: 66288 - DNA, 11 bp, Unknown
  misc_feature (1)..( 11): Matrix.003 file - promoters50/1025117
atagagtttgc

SEQ ID NO: 66289 - DNA, 9 bp, Unknown
  misc_feature (1)..( 9): Matrix.003 file - promoters50/1025117
ttattaaaa

SEQ ID NO: 66290 - DNA, 7 bp, Unknown
  misc_feature (1)..( 7): Matrix.003 file - promoters50/1025178
ccaaatg

SEQ ID NO: 66291 - DNA, 13 bp, Unknown
  misc_feature (1)..( 13): Matrix.003 file - promoters50/1025178
aaggtatccgagc

SEQ ID NO: 66292 - DNA, 9 bp, Unknown
  misc_feature (1)..( 9): Matrix.003 file - promoters50/1025185
aagaagaaa

SEQ ID NO: 66293 - DNA, 11 bp, Unknown
  misc_feature (1)..( 11): Matrix.003 file - promoters50/1025185
aatttttgata

SEQ ID NO: 66294 - DNA, 9 bp, Unknown
  misc_feature (1)..( 9): Matrix.003 file - promoters50/1025185
ttttatcat

SEQ ID NO: 66295 - DNA, 10 bp, Unknown
  misc_feature (1)..( 10): Matrix.003 file - promoters50/1025194
acaatatttc

SEQ ID NO: 66296 - DNA, 8 bp, Unknown
  misc_feature (1)..( 8): Matrix.003 file - promoters50/1025194
acaaataa

SEQ ID NO: 66297 - DNA, 8 bp, Unknown
  misc_feature (1)..( 8): Matrix.003 file - promoters50/1025202
atttctgt

SEQ ID NO: 66298 - DNA, 7 bp, Unknown
  misc_feature (1)..( 7): Matrix.003 file - promoters50/1025202
cttaatt

SEQ ID NO: 66299 - DNA, 13 bp, Unknown
  misc_feature (1)..( 13): Matrix.003 file - promoters50/1025211
tataaaatatata

SEQ ID NO: 66300 - DNA, 12 bp, Unknown
  misc_feature (1)..( 12): Matrix.003 file - promoters50/1025211
atataattattt

SEQ ID NO: 66301 - DNA, 12 bp, Unknown
  misc_feature (1)..( 12): Matrix.003 file - promoters50/1025211
gtttatttctta

SEQ ID NO: 66302 - DNA, 14 bp, Unknown
  misc_feature (1)..( 14): Matrix.003 file - promoters50/1025211
taaaaaattaaata

SEQ ID NO: 66303 - DNA, 9 bp, Unknown
  misc_feature (1)..( 9): Matrix.003 file - promoters50/1025233
acagaatct

SEQ ID NO: 66304 - DNA, 8 bp, Unknown
  misc_feature (1)..( 8): Matrix.003 file - promoters50/1025233
attttttt

SEQ ID NO: 66305 - DNA, 7 bp, Unknown
  misc_feature (1)..( 7): Matrix.003 file - promoters50/1025262
tcagatt

SEQ ID NO: 66306 - DNA, 8 bp, Unknown
  misc_feature (1)..( 8): Matrix.003 file - promoters50/1025262
atatgtaa

SEQ ID NO: 66307 - DNA, 6 bp, Unknown
  misc_feature (1)..( 6): Matrix.003 file - promoters50/1025262
agaaaa

SEQ ID NO: 66308 - DNA, 10 bp, Unknown
  misc_feature (1)..( 10): Matrix.003 file - promoters50/1025288
tgataaataa

SEQ ID NO: 66309 - DNA, 8 bp, Unknown
  misc_feature (1)..( 8): Matrix.003 file - promoters50/1025288
tttgatca

SEQ ID NO: 66310 - DNA, 12 bp, Unknown
  misc_feature (1)..( 12): Matrix.003 file - promoters50/1025288
gttggtcaaatc

SEQ ID NO: 66311 - DNA, 9 bp, Unknown
  misc_feature (1)..( 9): Matrix.003 file - promoters50/1025288
taaatatga

SEQ ID NO: 66312 - DNA, 6 bp, Unknown
  misc_feature (1)..( 6): Matrix.003 file - promoters50/1025288
ttattt

SEQ ID NO: 66313 - DNA, 8 bp, Unknown
  misc_feature (1)..( 8): Matrix.003 file - promoters50/1025288
tttaaaag

SEQ ID NO: 66314 - DNA, 8 bp, Unknown
  misc_feature (1)..( 8): Matrix.003 file - promoters50/1025288
ctatttct

SEQ ID NO: 66315 - DNA, 8 bp, Unknown
  misc_feature (1)..( 8): Matrix.003 file - promoters50/1025288
aaatggag

SEQ ID NO: 66316 - DNA, 12 bp, Unknown
  misc_feature (1)..( 12): Matrix.003 file - promoters50/1025288
ctgaatttattt

SEQ ID NO: 66317 - DNA, 7 bp, Unknown
  misc_feature (1)..( 7): Matrix.003 file - promoters50/1025322
aaattag

SEQ ID NO: 66318 - DNA, 8 bp, Unknown
  misc_feature (1)..( 8): Matrix.003 file - promoters50/1025322
tttctttc

SEQ ID NO: 66319 - DNA, 7 bp, Unknown
  misc_feature (1)..( 7): Matrix.003 file - promoters50/1025340
aagttaa

SEQ ID NO: 66320 - DNA, 6 bp, Unknown
  misc_feature (1)..( 6): Matrix.003 file - promoters50/1025340
tatata

SEQ ID NO: 66321 - DNA, 11 bp, Unknown
  misc_feature (1)..( 11): Matrix.003 file - promoters50/1025348
ctagtttcttt

SEQ ID NO: 66322 - DNA, 10 bp, Unknown
  misc_feature (1)..( 10): Matrix.003 file - promoters50/1025348
gaaaaacgtt

SEQ ID NO: 66323 - DNA, 12 bp, Unknown
  misc_feature (1)..( 12): Matrix.003 file - promoters50/1025348
ataattttttat

SEQ ID NO: 66324 - DNA, 10 bp, Unknown
  misc_feature (1)..( 10): Matrix.003 file - promoters50/1025348
cttcccttta

SEQ ID NO: 66325 - DNA, 8 bp, Unknown
  misc_feature (1)..( 8): Matrix.003 file - promoters50/1025348
tttatttc

SEQ ID NO: 66326 - DNA, 7 bp, Unknown
  misc_feature (1)..( 7): Matrix.003 file - promoters50/1025348
cttttaa

SEQ ID NO: 66327 - DNA, 7 bp, Unknown
  misc_feature (1)..( 7): Matrix.003 file - promoters50/1025348
taaaaac

SEQ ID NO: 66328 - DNA, 7 bp, Unknown
  misc_feature (1)..( 7): Matrix.003 file - promoters50/1025372
gttgaaa

SEQ ID NO: 66329 - DNA, 8 bp, Unknown
  misc_feature (1)..( 8): Matrix.003 file - promoters50/1025372
tatatttt

SEQ ID NO: 66330 - DNA, 9 bp, Unknown
  misc_feature (1)..( 9): Matrix.003 file - promoters50/1025372
tcatctgat

SEQ ID NO: 66331 - DNA, 9 bp, Unknown
  misc_feature (1)..( 9): Matrix.003 file - promoters50/1025372
catcattat

SEQ ID NO: 66332 - DNA, 7 bp, Unknown
  misc_feature (1)..( 7): Matrix.003 file - promoters50/1025372
tttttgt

SEQ ID NO: 66333 - DNA, 7 bp, Unknown
  misc_feature (1)..( 7): Matrix.003 file - promoters50/1025372
ttttata

SEQ ID NO: 66334 - DNA, 10 bp, Unknown
  misc_feature (1)..( 10): Matrix.003 file - promoters50/1025443
agaaaataca

SEQ ID NO: 66335 - DNA, 12 bp, Unknown
  misc_feature (1)..( 12): Matrix.003 file - promoters50/1025443
taaaaatacaaa

SEQ ID NO: 66336 - DNA, 10 bp, Unknown
  misc_feature (1)..( 10): Matrix.003 file - promoters50/1025443
gttgggaaat

SEQ ID NO: 66337 - DNA, 12 bp, Unknown
  misc_feature (1)..( 12): Matrix.003 file - promoters50/1025443
ctttatttctta

SEQ ID NO: 66338 - DNA, 10 bp, Unknown
  misc_feature (1)..( 10): Matrix.003 file - promoters50/1025468
gtaaatatat

SEQ ID NO: 66339 - DNA, 11 bp, Unknown
  misc_feature (1)..( 11): Matrix.003 file - promoters50/1025468
aaaaaaaacat

SEQ ID NO: 66340 - DNA, 8 bp, Unknown
  misc_feature (1)..( 8): Matrix.003 file - promoters50/1025471
attaaaaa

SEQ ID NO: 66341 - DNA, 10 bp, Unknown
  misc_feature (1)..( 10): Matrix.003 file - promoters50/1025491
tattgctaaa

SEQ ID NO: 66342 - DNA, 10 bp, Unknown
  misc_feature (1)..( 10): Matrix.003 file - promoters50/1025491
acaatttttt

SEQ ID NO: 66343 - DNA, 7 bp, Unknown
  misc_feature (1)..( 7): Matrix.003 file - promoters50/1025491
attatat

SEQ ID NO: 66344 - DNA, 12 bp, Unknown
  misc_feature (1)..( 12): Matrix.003 file - promoters50/1025491
tagaatcaaaat

SEQ ID NO: 66345 - DNA, 6 bp, Unknown
  misc_feature (1)..( 6): Matrix.003 file - promoters50/1025511
taaata

SEQ ID NO: 66346 - DNA, 11 bp, Unknown
  misc_feature (1)..( 11): Matrix.003 file - promoters50/1025515
gtttgagtata

SEQ ID NO: 66347 - DNA, 9 bp, Unknown
  misc_feature (1)..( 9): Matrix.003 file - promoters50/1025515
ctgttttac

SEQ ID NO: 66348 - DNA, 8 bp, Unknown
  misc_feature (1)..( 8): Matrix.003 file - promoters50/1025540
ttgtttta

SEQ ID NO: 66349 - DNA, 9 bp, Unknown
  misc_feature (1)..( 9): Matrix.003 file - promoters50/1025642
aaaaatatt

SEQ ID NO: 66350 - DNA, 13 bp, Unknown
  misc_feature (1)..( 13): Matrix.003 file - promoters50/1025642
ttttaaaaatcta

SEQ ID NO: 66351 - DNA, 13 bp, Unknown
  misc_feature (1)..( 13): Matrix.003 file - promoters50/1025642
gaaataataatta

SEQ ID NO: 66352 - DNA, 11 bp, Unknown
  misc_feature (1)..( 11): Matrix.003 file - promoters50/1025642
atttttaaatg

SEQ ID NO: 66353 - DNA, 12 bp, Unknown
  misc_feature (1)..( 12): Matrix.003 file - promoters50/1025642
acatcataatta

SEQ ID NO: 66354 - DNA, 17 bp, Unknown
  misc_feature (1)..( 17): Matrix.003 file - promoters50/1025642
tttctaaaaagatatat

SEQ ID NO: 66355 - DNA, 9 bp, Unknown
  misc_feature (1)..( 9): Matrix.003 file - promoters50/1025683
agaacatta

SEQ ID NO: 66356 - DNA, 10 bp, Unknown
  misc_feature (1)..( 10): Matrix.003 file - promoters50/1025683
ctatatataa

SEQ ID NO: 66357 - DNA, 13 bp, Unknown
  misc_feature (1)..( 13): Matrix.003 file - promoters50/1025683
gattattaataat

SEQ ID NO: 66358 - DNA, 6 bp, Unknown
  misc_feature (1)..( 6): Matrix.003 file - promoters50/1025729
tatata

SEQ ID NO: 66359 - DNA, 13 bp, Unknown
  misc_feature (1)..( 13): Matrix.003 file - promoters50/1025744
attttgaatattc

SEQ ID NO: 66360 - DNA, 12 bp, Unknown
  misc_feature (1)..( 12): Matrix.003 file - promoters50/1025744
atttaaaacata

SEQ ID NO: 66361 - DNA, 13 bp, Unknown
  misc_feature (1)..( 13): Matrix.003 file - promoters50/1025791
cattaatttcctc

SEQ ID NO: 66362 - DNA, 16 bp, Unknown
  misc_feature (1)..( 16): Matrix.003 file - promoters50/1025791
agaagaagagcatttt

SEQ ID NO: 66363 - DNA, 9 bp, Unknown
  misc_feature (1)..( 9): Matrix.003 file - promoters50/1025883
ctcactaag

SEQ ID NO: 66364 - DNA, 8 bp, Unknown
  misc_feature (1)..( 8): Matrix.003 file - promoters50/1025883
ccagaagg

SEQ ID NO: 66365 - DNA, 7 bp, Unknown
  misc_feature (1)..( 7): Matrix.003 file - promoters50/1026000
ttgaaaa

SEQ ID NO: 66366 - DNA, 8 bp, Unknown
  misc_feature (1)..( 8): Matrix.003 file - promoters50/1026000
tttcaaat

SEQ ID NO: 66367 - DNA, 9 bp, Unknown
  misc_feature (1)..( 9): Matrix.003 file - promoters50/1026000
atggatact

SEQ ID NO: 66368 - DNA, 8 bp, Unknown
  misc_feature (1)..( 8): Matrix.003 file - promoters50/1026000
gaaggagc

SEQ ID NO: 66369 - DNA, 7 bp, Unknown
  misc_feature (1)..( 7): Matrix.003 file - promoters50/1026000
taaagag

SEQ ID NO: 66370 - DNA, 10 bp, Unknown
  misc_feature (1)..( 10): Matrix.003 file - promoters50/1026014
aaatgatttt

SEQ ID NO: 66371 - DNA, 12 bp, Unknown
  misc_feature (1)..( 12): Matrix.003 file - promoters50/1026014
ttatgtcaaatt

SEQ ID NO: 66372 - DNA, 15 bp, Unknown
  misc_feature (1)..( 15): Matrix.003 file - promoters50/1026014
ccaaaaaaaaataaa

SEQ ID NO: 66373 - DNA, 10 bp, Unknown
  misc_feature (1)..( 10): Matrix.003 file - promoters50/1026014
tttttataat

SEQ ID NO: 66374 - DNA, 13 bp, Unknown
  misc_feature (1)..( 13): Matrix.003 file - promoters50/1026014
ctttaaaaatatc

SEQ ID NO: 66375 - DNA, 7 bp, Unknown
  misc_feature (1)..( 7): Matrix.003 file - promoters50/1026039
attattt

SEQ ID NO: 66376 - DNA, 7 bp, Unknown
  misc_feature (1)..( 7): Matrix.003 file - promoters50/1026039
cattata

SEQ ID NO: 66377 - DNA, 8 bp, Unknown
  misc_feature (1)..( 8): Matrix.003 file - promoters50/1026160
caaaaaac

SEQ ID NO: 66378 - DNA, 13 bp, Unknown
  misc_feature (1)..( 13): Matrix.003 file - promoters50/1026160
aataaaaagtttt

SEQ ID NO: 66379 - DNA, 7 bp, Unknown
  misc_feature (1)..( 7): Matrix.003 file - promoters50/1026235
ttttaaa

SEQ ID NO: 66380 - DNA, 10 bp, Unknown
  misc_feature (1)..( 10): Matrix.003 file - promoters50/1026235
aaattcttca

SEQ ID NO: 66381 - DNA, 10 bp, Unknown
  misc_feature (1)..( 10): Matrix.003 file - promoters50/1026412
caaaagaaac

SEQ ID NO: 66382 - DNA, 9 bp, Unknown
  misc_feature (1)..( 9): Matrix.003 file - promoters50/1026416
ttttggtga

SEQ ID NO: 66383 - DNA, 6 bp, Unknown
  misc_feature (1)..( 6): Matrix.003 file - promoters50/1026416
aaagaa

SEQ ID NO: 66384 - DNA, 7 bp, Unknown
  misc_feature (1)..( 7): Matrix.003 file - promoters50/1026416
atttaaa

SEQ ID NO: 66385 - DNA, 11 bp, Unknown
  misc_feature (1)..( 11): Matrix.003 file - promoters50/1026416
aaaaacaaaga

SEQ ID NO: 66386 - DNA, 9 bp, Unknown
  misc_feature (1)..( 9): Matrix.003 file - promoters50/1026419
gaaaaaagt

SEQ ID NO: 66387 - DNA, 9 bp, Unknown
  misc_feature (1)..( 9): Matrix.003 file - promoters50/1026419
ttgggtcat

SEQ ID NO: 66388 - DNA, 9 bp, Unknown
  misc_feature (1)..( 9): Matrix.003 file - promoters50/1026439
aaattacag

SEQ ID NO: 66389 - DNA, 8 bp, Unknown
  misc_feature (1)..( 8): Matrix.003 file - promoters50/1026514
catcaaat

SEQ ID NO: 66390 - DNA, 14 bp, Unknown
  misc_feature (1)..( 14): Matrix.003 file - promoters50/1026514
aaagttgaataatt

SEQ ID NO: 66391 - DNA, 8 bp, Unknown
  misc_feature (1)..( 8): Matrix.003 file - promoters50/1026514
cattcatg

SEQ ID NO: 66392 - DNA, 11 bp, Unknown
  misc_feature (1)..( 11): Matrix.003 file - promoters50/1026514
tacaaaattaa

SEQ ID NO: 66393 - DNA, 10 bp, Unknown
  misc_feature (1)..( 10): Matrix.003 file - promoters50/1026514
ttttataaat

SEQ ID NO: 66394 - DNA, 7 bp, Unknown
  misc_feature (1)..( 7): Matrix.003 file - promoters50/1026514
attgata

SEQ ID NO: 66395 - DNA, 9 bp, Unknown
  misc_feature (1)..( 9): Matrix.003 file - promoters50/1026514
aaaaaccca

SEQ ID NO: 66396 - DNA, 7 bp, Unknown
  misc_feature (1)..( 7): Matrix.003 file - promoters50/1026514
caccaaa

SEQ ID NO: 66397 - DNA, 9 bp, Unknown
  misc_feature (1)..( 9): Matrix.003 file - promoters50/1026540
aatctttaa

SEQ ID NO: 66398 - DNA, 10 bp, Unknown
  misc_feature (1)..( 10): Matrix.003 file - promoters50/1026540
ttaaaataga

SEQ ID NO: 66399 - DNA, 10 bp, Unknown
  misc_feature (1)..( 10): Matrix.003 file - promoters50/1026544
gagatttttt

SEQ ID NO: 66400 - DNA, 11 bp, Unknown
  misc_feature (1)..( 11): Matrix.003 file - promoters50/1026544
aaaaataagaa

SEQ ID NO: 66401 - DNA, 9 bp, Unknown
  misc_feature (1)..( 9): Matrix.003 file - promoters50/1026544
atagaaaat

SEQ ID NO: 66402 - DNA, 8 bp, Unknown
  misc_feature (1)..( 8): Matrix.003 file - promoters50/1026544
ggcccaat

SEQ ID NO: 66403 - DNA, 10 bp, Unknown
  misc_feature (1)..( 10): Matrix.003 file - promoters50/1026544
aaaaaaataa

SEQ ID NO: 66404 - DNA, 10 bp, Unknown
  misc_feature (1)..( 10): Matrix.003 file - promoters50/1026551
ttaatttata

SEQ ID NO: 66405 - DNA, 11 bp, Unknown
  misc_feature (1)..( 11): Matrix.003 file - promoters50/1026551
aagtataaaat

SEQ ID NO: 66406 - DNA, 17 bp, Unknown
  misc_feature (1)..( 17): Matrix.003 file - promoters50/1026551
taaaggatgatggacca

SEQ ID NO: 66407 - DNA, 20 bp, Unknown
  misc_feature (1)..( 20): Matrix.003 file - promoters50/1026551
tacacataaataacgtggtc

SEQ ID NO: 66408 - DNA, 23 bp, Unknown
  misc_feature (1)..( 23): Matrix.003 file - promoters50/1026551
cgtttaccaaaataaagaaaata

SEQ ID NO: 66409 - DNA, 6 bp, Unknown
  misc_feature (1)..( 6): Matrix.003 file - promoters50/1026551
atttta

SEQ ID NO: 66410 - DNA, 8 bp, Unknown
  misc_feature (1)..( 8): Matrix.003 file - promoters50/1026562
aaagtctt

SEQ ID NO: 66411 - DNA, 10 bp, Unknown
  misc_feature (1)..( 10): Matrix.003 file - promoters50/1026562
aatcaattgc

SEQ ID NO: 66412 - DNA, 8 bp, Unknown
  misc_feature (1)..( 8): Matrix.003 file - promoters50/1026562
tttcgtat

SEQ ID NO: 66413 - DNA, 8 bp, Unknown
  misc_feature (1)..( 8): Matrix.003 file - promoters50/1026562
acaaatgg

SEQ ID NO: 66414 - DNA, 8 bp, Unknown
  misc_feature (1)..( 8): Matrix.003 file - promoters50/1026562
aatattag

SEQ ID NO: 66415 - DNA, 7 bp, Unknown
  misc_feature (1)..( 7): Matrix.003 file - promoters50/1026562
aatataa

SEQ ID NO: 66416 - DNA, 8 bp, Unknown
  misc_feature (1)..( 8): Matrix.003 file - promoters50/1026562
ttccattc

SEQ ID NO: 66417 - DNA, 8 bp, Unknown
  misc_feature (1)..( 8): Matrix.003 file - promoters50/1026565
tgaagaaa

SEQ ID NO: 66418 - DNA, 8 bp, Unknown
  misc_feature (1)..( 8): Matrix.003 file - promoters50/1026565
agacatga

SEQ ID NO: 66419 - DNA, 9 bp, Unknown
  misc_feature (1)..( 9): Matrix.003 file - promoters50/1026565
caaacaaaa

SEQ ID NO: 66420 - DNA, 8 bp, Unknown
  misc_feature (1)..( 8): Matrix.003 file - promoters50/1026574
attttttt

SEQ ID NO: 66421 - DNA, 7 bp, Unknown
  misc_feature (1)..( 7): Matrix.003 file - promoters50/1026574
gaaaaaa

SEQ ID NO: 66422 - DNA, 8 bp, Unknown
  misc_feature (1)..( 8): Matrix.003 file - promoters50/1026574
acattata

SEQ ID NO: 66423 - DNA, 9 bp, Unknown
  misc_feature (1)..( 9): Matrix.003 file - promoters50/1026574
tatacgttt

SEQ ID NO: 66424 - DNA, 8 bp, Unknown
  misc_feature (1)..( 8): Matrix.003 file - promoters50/1026574
tggatttt

SEQ ID NO: 66425 - DNA, 8 bp, Unknown
  misc_feature (1)..( 8): Matrix.003 file - promoters50/1026578
taaaagat

SEQ ID NO: 66426 - DNA, 10 bp, Unknown
  misc_feature (1)..( 10): Matrix.003 file - promoters50/1026618
aaataaatat

SEQ ID NO: 66427 - DNA, 13 bp, Unknown
  misc_feature (1)..( 13): Matrix.003 file - promoters50/1026618
aaatttaaaaaaa

SEQ ID NO: 66428 - DNA, 8 bp, Unknown
  misc_feature (1)..( 8): Matrix.003 file - promoters50/1026667
atatttta

SEQ ID NO: 66429 - DNA, 9 bp, Unknown
  misc_feature (1)..( 9): Matrix.003 file - promoters50/1026667
gcttatgga

SEQ ID NO: 66430 - DNA, 11 bp, Unknown
  misc_feature (1)..( 11): Matrix.003 file - promoters50/1026705
aattttaatga

SEQ ID NO: 66431 - DNA, 8 bp, Unknown
  misc_feature (1)..( 8): Matrix.003 file - promoters50/1026705
ttttcatt

SEQ ID NO: 66432 - DNA, 10 bp, Unknown
  misc_feature (1)..( 10): Matrix.003 file - promoters50/1026742
ctcttactgt

SEQ ID NO: 66433 - DNA, 9 bp, Unknown
  misc_feature (1)..( 9): Matrix.003 file - promoters50/1026822
acaaaatag

SEQ ID NO: 66434 - DNA, 8 bp, Unknown
  misc_feature (1)..( 8): Matrix.003 file - promoters50/1026822
taatacat

SEQ ID NO: 66435 - DNA, 8 bp, Unknown
  misc_feature (1)..( 8): Matrix.003 file - promoters50/1026861
ttatataa

SEQ ID NO: 66436 - DNA, 9 bp, Unknown
  misc_feature (1)..( 9): Matrix.003 file - promoters50/1026880
ttttgatta

SEQ ID NO: 66437 - DNA, 11 bp, Unknown
  misc_feature (1)..( 11): Matrix.003 file - promoters50/1026931
ttataaagaaa

SEQ ID NO: 66438 - DNA, 7 bp, Unknown
  misc_feature (1)..( 7): Matrix.003 file - promoters50/1026931
tatattt

SEQ ID NO: 66439 - DNA, 13 bp, Unknown
  misc_feature (1)..( 13): Matrix.003 file - promoters50/1026976
ttgaataaaaatt

SEQ ID NO: 66440 - DNA, 13 bp, Unknown
  misc_feature (1)..( 13): Matrix.003 file - promoters50/1026976
gaatttgctaaaa

SEQ ID NO: 66441 - DNA, 8 bp, Unknown
  misc_feature (1)..( 8): Matrix.003 file - promoters50/1026987
tatttaag

SEQ ID NO: 66442 - DNA, 9 bp, Unknown
  misc_feature (1)..( 9): Matrix.003 file - promoters50/1026987
tatataaac

SEQ ID NO: 66443 - DNA, 9 bp, Unknown
  misc_feature (1)..( 9): Matrix.003 file - promoters50/1026987
tgatttttt

SEQ ID NO: 66444 - DNA, 8 bp, Unknown
  misc_feature (1)..( 8): Matrix.003 file - promoters50/1026991
cataaaaa

SEQ ID NO: 66445 - DNA, 9 bp, Unknown
  misc_feature (1)..( 9): Matrix.003 file - promoters50/1026991
aaaattaga

SEQ ID NO: 66446 - DNA, 7 bp, Unknown
  misc_feature (1)..( 7): Matrix.003 file - promoters50/1026991
taaattg

SEQ ID NO: 66447 - DNA, 11 bp, Unknown
  misc_feature (1)..( 11): Matrix.003 file - promoters50/1027032
atttaattata

SEQ ID NO: 66448 - DNA, 14 bp, Unknown
  misc_feature (1)..( 14): Matrix.003 file - promoters50/1027032
ccatcaaaatgatt

SEQ ID NO: 66449 - DNA, 10 bp, Unknown
  misc_feature (1)..( 10): Matrix.003 file - promoters50/1027032
tatggaatta

SEQ ID NO: 66450 - DNA, 8 bp, Unknown
  misc_feature (1)..( 8): Matrix.003 file - promoters50/1027040
gattttta

SEQ ID NO: 66451 - DNA, 9 bp, Unknown
  misc_feature (1)..( 9): Matrix.003 file - promoters50/1027040
tcaaagaat

SEQ ID NO: 66452 - DNA, 12 bp, Unknown
  misc_feature (1)..( 12): Matrix.003 file - promoters50/1027040
aaaaaaacaaaa

SEQ ID NO: 66453 - DNA, 10 bp, Unknown
  misc_feature (1)..( 10): Matrix.003 file - promoters50/1027040
tcaagatatg

SEQ ID NO: 66454 - DNA, 10 bp, Unknown
  misc_feature (1)..( 10): Matrix.003 file - promoters50/1027040
tttgattttt

SEQ ID NO: 66455 - DNA, 11 bp, Unknown
  misc_feature (1)..( 11): Matrix.003 file - promoters50/1027064
tatagttaaaa

SEQ ID NO: 66456 - DNA, 9 bp, Unknown
  misc_feature (1)..( 9): Matrix.003 file - promoters50/1027064
tggttatgt

SEQ ID NO: 66457 - DNA, 10 bp, Unknown
  misc_feature (1)..( 10): Matrix.003 file - promoters50/1027108
gttaaaacaa

SEQ ID NO: 66458 - DNA, 10 bp, Unknown
  misc_feature (1)..( 10): Matrix.003 file - promoters50/1027121
attataataa

SEQ ID NO: 66459 - DNA, 9 bp, Unknown
  misc_feature (1)..( 9): Matrix.003 file - promoters50/1027125
atttgtaaa

SEQ ID NO: 66460 - DNA, 8 bp, Unknown
  misc_feature (1)..( 8): Matrix.003 file - promoters50/1027156
atacaata

SEQ ID NO: 66461 - DNA, 9 bp, Unknown
  misc_feature (1)..( 9): Matrix.003 file - promoters50/1027156
aaagtaaac

SEQ ID NO: 66462 - DNA, 10 bp, Unknown
  misc_feature (1)..( 10): Matrix.003 file - promoters50/1027156
aaaataagtt

SEQ ID NO: 66463 - DNA, 9 bp, Unknown
  misc_feature (1)..( 9): Matrix.003 file - promoters50/1027156
caaaaacta

SEQ ID NO: 66464 - DNA, 15 bp, Unknown
  misc_feature (1)..( 15): Matrix.003 file - promoters50/1027171
tatattttcttattg

SEQ ID NO: 66465 - DNA, 11 bp, Unknown
  misc_feature (1)..( 11): Matrix.003 file - promoters50/1027171
tagaaaaacca

SEQ ID NO: 66466 - DNA, 12 bp, Unknown
  misc_feature (1)..( 12): Matrix.003 file - promoters50/1027171
aaaataaatcac

SEQ ID NO: 66467 - DNA, 14 bp, Unknown
  misc_feature (1)..( 14): Matrix.003 file - promoters50/1027171
caaaacattaatct

SEQ ID NO: 66468 - DNA, 11 bp, Unknown
  misc_feature (1)..( 11): Matrix.003 file - promoters50/1027171
aaaacttaaaa

SEQ ID NO: 66469 - DNA, 10 bp, Unknown
  misc_feature (1)..( 10): Matrix.003 file - promoters50/1027175
gttttgacca

SEQ ID NO: 66470 - DNA, 11 bp, Unknown
  misc_feature (1)..( 11): Matrix.003 file - promoters50/1027175
tattatgtggc

SEQ ID NO: 66471 - DNA, 11 bp, Unknown
  misc_feature (1)..( 11): Matrix.003 file - promoters50/1027175
tcttttttttt

SEQ ID NO: 66472 - DNA, 8 bp, Unknown
  misc_feature (1)..( 8): Matrix.003 file - promoters50/1027189
taaaaaaa

SEQ ID NO: 66473 - DNA, 7 bp, Unknown
  misc_feature (1)..( 7): Matrix.003 file - promoters50/1027189
aaacaaa

SEQ ID NO: 66474 - DNA, 9 bp, Unknown
  misc_feature (1)..( 9): Matrix.003 file - promoters50/1027189
tatacatat

SEQ ID NO: 66475 - DNA, 10 bp, Unknown
  misc_feature (1)..( 10): Matrix.003 file - promoters50/1027189
aaatatgata

SEQ ID NO: 66476 - DNA, 6 bp, Unknown
  misc_feature (1)..( 6): Matrix.003 file - promoters50/1027189
tatgag

SEQ ID NO: 66477 - DNA, 6 bp, Unknown
  misc_feature (1)..( 6): Matrix.003 file - promoters50/1027201
gatgaa

SEQ ID NO: 66478 - DNA, 9 bp, Unknown
  misc_feature (1)..( 9): Matrix.003 file - promoters50/1027201
aagctcgat

SEQ ID NO: 66479 - DNA, 7 bp, Unknown
  misc_feature (1)..( 7): Matrix.003 file - promoters50/1027201
aaaaaat

SEQ ID NO: 66480 - DNA, 8 bp, Unknown
  misc_feature (1)..( 8): Matrix.003 file - promoters50/1027204
aaataatg

SEQ ID NO: 66481 - DNA, 8 bp, Unknown
  misc_feature (1)..( 8): Matrix.003 file - promoters50/1027204
aaaattta

SEQ ID NO: 66482 - DNA, 8 bp, Unknown
  misc_feature (1)..( 8): Matrix.003 file - promoters50/1027204
aaaaaaat

SEQ ID NO: 66483 - DNA, 13 bp, Unknown
  misc_feature (1)..( 13): Matrix.003 file - promoters50/1027204
aaataaaaagatt

SEQ ID NO: 66484 - DNA, 8 bp, Unknown
  misc_feature (1)..( 8): Matrix.003 file - promoters50/1027204
atatatat

SEQ ID NO: 66485 - DNA, 10 bp, Unknown
  misc_feature (1)..( 10): Matrix.003 file - promoters50/1027204
taaaaaaatt

SEQ ID NO: 66486 - DNA, 8 bp, Unknown
  misc_feature (1)..( 8): Matrix.003 file - promoters50/1027204
gagagatc

SEQ ID NO: 66487 - DNA, 7 bp, Unknown
  misc_feature (1)..( 7): Matrix.003 file - promoters50/1027204
taacgaa

SEQ ID NO: 66488 - DNA, 7 bp, Unknown
  misc_feature (1)..( 7): Matrix.003 file - promoters50/1027204
aaaatta

SEQ ID NO: 66489 - DNA, 10 bp, Unknown
  misc_feature (1)..( 10): Matrix.003 file - promoters50/1027212
atattaaaaa

SEQ ID NO: 66490 - DNA, 8 bp, Unknown
  misc_feature (1)..( 8): Matrix.003 file - promoters50/1027212
gaatgcat

SEQ ID NO: 66491 - DNA, 10 bp, Unknown
  misc_feature (1)..( 10): Matrix.003 file - promoters50/1027212
tgtctaaaaa

SEQ ID NO: 66492 - DNA, 8 bp, Unknown
  misc_feature (1)..( 8): Matrix.003 file - promoters50/1027212
actatata

SEQ ID NO: 66493 - DNA, 8 bp, Unknown
  misc_feature (1)..( 8): Matrix.003 file - promoters50/1027212
ttttaaat

SEQ ID NO: 66494 - DNA, 9 bp, Unknown
  misc_feature (1)..( 9): Matrix.003 file - promoters50/1027212
atttaaaaa

SEQ ID NO: 66495 - DNA, 5 bp, Unknown
  misc_feature (1)..( 5): Matrix.003 file - promoters50/1027212
aaaaa

SEQ ID NO: 66496 - DNA, 7 bp, Unknown
  misc_feature (1)..( 7): Matrix.003 file - promoters50/1027212
taaaatt

SEQ ID NO: 66497 - DNA, 8 bp, Unknown
  misc_feature (1)..( 8): Matrix.003 file - promoters50/1027212
caaaaaaa

SEQ ID NO: 66498 - DNA, 4 bp, Unknown
  misc_feature (1)..( 4): Matrix.003 file - promoters50/1027212
aaaa

SEQ ID NO: 66499 - DNA, 7 bp, Unknown
  misc_feature (1)..( 7): Matrix.003 file - promoters50/1027237
gaacaag

SEQ ID NO: 66500 - DNA, 12 bp, Unknown
  misc_feature (1)..( 12): Matrix.003 file - promoters50/1027237
tctaatatataa

SEQ ID NO: 66501 - DNA, 10 bp, Unknown
  misc_feature (1)..( 10): Matrix.003 file - promoters50/1027237
tttatctctt

SEQ ID NO: 66502 - DNA, 11 bp, Unknown
  misc_feature (1)..( 11): Matrix.003 file - promoters50/1027237
tatatttgagt

SEQ ID NO: 66503 - DNA, 9 bp, Unknown
  misc_feature (1)..( 9): Matrix.003 file - promoters50/1027237
gaagaagaa

SEQ ID NO: 66504 - DNA, 9 bp, Unknown
  misc_feature (1)..( 9): Matrix.003 file - promoters50/1027237
tattatttt

SEQ ID NO: 66505 - DNA, 9 bp, Unknown
  misc_feature (1)..( 9): Matrix.003 file - promoters50/1027240
aatcaaaag

SEQ ID NO: 66506 - DNA, 11 bp, Unknown
  misc_feature (1)..( 11): Matrix.003 file - promoters50/1027240
tcaaaaatata

SEQ ID NO: 66507 - DNA, 13 bp, Unknown
  misc_feature (1)..( 13): Matrix.003 file - promoters50/1027240
ctaacccaaaaat

SEQ ID NO: 66508 - DNA, 6 bp, Unknown
  misc_feature (1)..( 6): Matrix.003 file - promoters50/1027240
aaaaaa

SEQ ID NO: 66509 - DNA, 9 bp, Unknown
  misc_feature (1)..( 9): Matrix.003 file - promoters50/1027240
tttaaaata

SEQ ID NO: 66510 - DNA, 8 bp, Unknown
  misc_feature (1)..( 8): Matrix.003 file - promoters50/1027240
tttaaaat

SEQ ID NO: 66511 - DNA, 9 bp, Unknown
  misc_feature (1)..( 9): Matrix.003 file - promoters50/1027240
ccaaaaaat

SEQ ID NO: 66512 - DNA, 10 bp, Unknown
  misc_feature (1)..( 10): Matrix.003 file - promoters50/1027243
ttatactatt

SEQ ID NO: 66513 - DNA, 11 bp, Unknown
  misc_feature (1)..( 11): Matrix.004 file - promoters50/1027346
ttaaatttttt

SEQ ID NO: 66514 - DNA, 9 bp, Unknown
  misc_feature (1)..( 9): Matrix.004 file - promoters50/1027346
ttacatgtt

SEQ ID NO: 66515 - DNA, 13 bp, Unknown
  misc_feature (1)..( 13): Matrix.004 file - promoters50/1027346
aataaaataataa

SEQ ID NO: 66516 - DNA, 9 bp, Unknown
  misc_feature (1)..( 9): Matrix.004 file - promoters50/1027346
tttcataat

SEQ ID NO: 66517 - DNA, 8 bp, Unknown
  misc_feature (1)..( 8): Matrix.004 file - promoters50/1027346
cataaaat

SEQ ID NO: 66518 - DNA, 8 bp, Unknown
  misc_feature (1)..( 8): Matrix.004 file - promoters50/1027346
tgttattt

SEQ ID NO: 66519 - DNA, 8 bp, Unknown
  misc_feature (1)..( 8): Matrix.004 file - promoters50/1027346
atttataa

SEQ ID NO: 66520 - DNA, 8 bp, Unknown
  misc_feature (1)..( 8): Matrix.004 file - promoters50/1027346
aatgaaat

SEQ ID NO: 66521 - DNA, 8 bp, Unknown
  misc_feature (1)..( 8): Matrix.004 file - promoters50/1027346
attcaact

SEQ ID NO: 66522 - DNA, 7 bp, Unknown
  misc_feature (1)..( 7): Matrix.004 file - promoters50/1027346
atgtaaa

SEQ ID NO: 66523 - DNA, 7 bp, Unknown
  misc_feature (1)..( 7): Matrix.004 file - promoters50/1027350
aatattt

SEQ ID NO: 66524 - DNA, 11 bp, Unknown
  misc_feature (1)..( 11): Matrix.004 file - promoters50/1027350
aaacaaaatta

SEQ ID NO: 66525 - DNA, 14 bp, Unknown
  misc_feature (1)..( 14): Matrix.004 file - promoters50/1027350
aaagtatttatact

SEQ ID NO: 66526 - DNA, 8 bp, Unknown
  misc_feature (1)..( 8): Matrix.004 file - promoters50/1027378
attccaaa

SEQ ID NO: 66527 - DNA, 14 bp, Unknown
  misc_feature (1)..( 14): Matrix.004 file - promoters50/1027378
gttgaatcaatatc

SEQ ID NO: 66528 - DNA, 11 bp, Unknown
  misc_feature (1)..( 11): Matrix.004 file - promoters50/1027399
ttgtatcaata

SEQ ID NO: 66529 - DNA, 12 bp, Unknown
  misc_feature (1)..( 12): Matrix.004 file - promoters50/1027399
ataatatattct

SEQ ID NO: 66530 - DNA, 11 bp, Unknown
  misc_feature (1)..( 11): Matrix.004 file - promoters50/1027399
atatatagtat

SEQ ID NO: 66531 - DNA, 10 bp, Unknown
  misc_feature (1)..( 10): Matrix.004 file - promoters50/1027406
agaaatatat

SEQ ID NO: 66532 - DNA, 9 bp, Unknown
  misc_feature (1)..( 9): Matrix.004 file - promoters50/1027406
ttttaaaaa

SEQ ID NO: 66533 - DNA, 9 bp, Unknown
  misc_feature (1)..( 9): Matrix.004 file - promoters50/1027406
ttttttgaa

SEQ ID NO: 66534 - DNA, 8 bp, Unknown
  misc_feature (1)..( 8): Matrix.004 file - promoters50/1027406
atttttta

SEQ ID NO: 66535 - DNA, 15 bp, Unknown
  misc_feature (1)..( 15): Matrix.004 file - promoters50/1027406
tttagaaaatgggat

SEQ ID NO: 66536 - DNA, 12 bp, Unknown
  misc_feature (1)..( 12): Matrix.004 file - promoters50/1027406
aactataaaata

SEQ ID NO: 66537 - DNA, 7 bp, Unknown
  misc_feature (1)..( 7): Matrix.004 file - promoters50/1027406
ttataac

SEQ ID NO: 66538 - DNA, 12 bp, Unknown
  misc_feature (1)..( 12): Matrix.004 file - promoters50/1027452
acaaattttttt

SEQ ID NO: 66539 - DNA, 11 bp, Unknown
  misc_feature (1)..( 11): Matrix.004 file - promoters50/1027456
taatttcgtaa

SEQ ID NO: 66540 - DNA, 9 bp, Unknown
  misc_feature (1)..( 9): Matrix.004 file - promoters50/1027456
taaatttct

SEQ ID NO: 66541 - DNA, 10 bp, Unknown
  misc_feature (1)..( 10): Matrix.004 file - promoters50/1027460
taaaaacaat

SEQ ID NO: 66542 - DNA, 13 bp, Unknown
  misc_feature (1)..( 13): Matrix.004 file - promoters50/1027460
acaaaaatatatc

SEQ ID NO: 66543 - DNA, 11 bp, Unknown
  misc_feature (1)..( 11): Matrix.004 file - promoters50/1027460
aaaaataaaat

SEQ ID NO: 66544 - DNA, 12 bp, Unknown
  misc_feature (1)..( 12): Matrix.004 file - promoters50/1027467
accaaaaataat

SEQ ID NO: 66545 - DNA, 7 bp, Unknown
  misc_feature (1)..( 7): Matrix.004 file - promoters50/1027467
tgtaaaa

SEQ ID NO: 66546 - DNA, 8 bp, Unknown
  misc_feature (1)..( 8): Matrix.004 file - promoters50/1027492
tgtaaaaa

SEQ ID NO: 66547 - DNA, 19 bp, Unknown
  misc_feature (1)..( 19): Matrix.004 file - promoters50/1027523
ccttatataaaatcccatt

SEQ ID NO: 66548 - DNA, 10 bp, Unknown
  misc_feature (1)..( 10): Matrix.004 file - promoters50/1027590
ttttcatata

SEQ ID NO: 66549 - DNA, 10 bp, Unknown
  misc_feature (1)..( 10): Matrix.004 file - promoters50/1027590
gattcttttt

SEQ ID NO: 66550 - DNA, 13 bp, Unknown
  misc_feature (1)..( 13): Matrix.004 file - promoters50/1027596
aatttttgtatga

SEQ ID NO: 66551 - DNA, 9 bp, Unknown
  misc_feature (1)..( 9): Matrix.004 file - promoters50/1027596
ttactttct

SEQ ID NO: 66552 - DNA, 10 bp, Unknown
  misc_feature (1)..( 10): Matrix.004 file - promoters50/1027652
aatttgaaaa

SEQ ID NO: 66553 - DNA, 10 bp, Unknown
  misc_feature (1)..( 10): Matrix.004 file - promoters50/1027652
atcaattaat

SEQ ID NO: 66554 - DNA, 8 bp, Unknown
  misc_feature (1)..( 8): Matrix.004 file - promoters50/1027652
ttaagaaa

SEQ ID NO: 66555 - DNA, 12 bp, Unknown
  misc_feature (1)..( 12): Matrix.004 file - promoters50/1027652
acaaaatctcta

SEQ ID NO: 66556 - DNA, 11 bp, Unknown
  misc_feature (1)..( 11): Matrix.004 file - promoters50/1027725
aaaaattaaga

SEQ ID NO: 66557 - DNA, 6 bp, Unknown
  misc_feature (1)..( 6): Matrix.004 file - promoters50/1027725
ttgatt

SEQ ID NO: 66558 - DNA, 5 bp, Unknown
  misc_feature (1)..( 5): Matrix.004 file - promoters50/1027760
atagt

SEQ ID NO: 66559 - DNA, 14 bp, Unknown
  misc_feature (1)..( 14): Matrix.004 file - promoters50/1027760
ataaatgaaattac

SEQ ID NO: 66560 - DNA, 12 bp, Unknown
  misc_feature (1)..( 12): Matrix.004 file - promoters50/1027760
atatcatttttt

SEQ ID NO: 66561 - DNA, 14 bp, Unknown
  misc_feature (1)..( 14): Matrix.004 file - promoters50/1027762
aataagttactaat

SEQ ID NO: 66562 - DNA, 8 bp, Unknown
  misc_feature (1)..( 8): Matrix.004 file - promoters50/1027762
ttgttttg

SEQ ID NO: 66563 - DNA, 8 bp, Unknown
  misc_feature (1)..( 8): Matrix.004 file - promoters50/1027762
aataaaaa

SEQ ID NO: 66564 - DNA, 7 bp, Unknown
  misc_feature (1)..( 7): Matrix.004 file - promoters50/1027765
agtaaaa

SEQ ID NO: 66565 - DNA, 8 bp, Unknown
  misc_feature (1)..( 8): Matrix.004 file - promoters50/1027765
aaatacaa

SEQ ID NO: 66566 - DNA, 11 bp, Unknown
  misc_feature (1)..( 11): Matrix.004 file - promoters50/1027850
aattaaaaaat

SEQ ID NO: 66567 - DNA, 7 bp, Unknown
  misc_feature (1)..( 7): Matrix.004 file - promoters50/1027869
attgctt

SEQ ID NO: 66568 - DNA, 8 bp, Unknown
  misc_feature (1)..( 8): Matrix.004 file - promoters50/1027869
atcctttt

SEQ ID NO: 66569 - DNA, 8 bp, Unknown
  misc_feature (1)..( 8): Matrix.004 file - promoters50/1027873
attttatt

SEQ ID NO: 66570 - DNA, 7 bp, Unknown
  misc_feature (1)..( 7): Matrix.004 file - promoters50/1027873
ttttggt

SEQ ID NO: 66571 - DNA, 11 bp, Unknown
  misc_feature (1)..( 11): Matrix.004 file - promoters50/1027873
accaaaatcat

SEQ ID NO: 66572 - DNA, 7 bp, Unknown
  misc_feature (1)..( 7): Matrix.004 file - promoters50/1027873
attaaca

SEQ ID NO: 66573 - DNA, 13 bp, Unknown
  misc_feature (1)..( 13): Matrix.004 file - promoters50/1027877
aatgtatttttgt

SEQ ID NO: 66574 - DNA, 9 bp, Unknown
  misc_feature (1)..( 9): Matrix.004 file - promoters50/1027877
atcaagaaa

SEQ ID NO: 66575 - DNA, 8 bp, Unknown
  misc_feature (1)..( 8): Matrix.004 file - promoters50/1027885
caagaatt

SEQ ID NO: 66576 - DNA, 8 bp, Unknown
  misc_feature (1)..( 8): Matrix.004 file - promoters50/1027885
aaattctt

SEQ ID NO: 66577 - DNA, 7 bp, Unknown
  misc_feature (1)..( 7): Matrix.004 file - promoters50/1027914
tttgaaa

SEQ ID NO: 66578 - DNA, 7 bp, Unknown
  misc_feature (1)..( 7): Matrix.004 file - promoters50/1027914
ttgatta

SEQ ID NO: 66579 - DNA, 8 bp, Unknown
  misc_feature (1)..( 8): Matrix.004 file - promoters50/1027914
tctattct

SEQ ID NO: 66580 - DNA, 11 bp, Unknown
  misc_feature (1)..( 11): Matrix.004 file - promoters50/1027928
tatataataac

SEQ ID NO: 66581 - DNA, 12 bp, Unknown
  misc_feature (1)..( 12): Matrix.004 file - promoters50/1027928
ataaatttagta

SEQ ID NO: 66582 - DNA, 16 bp, Unknown
  misc_feature (1)..( 16): Matrix.004 file - promoters50/1027928
ttttaatttttttata

SEQ ID NO: 66583 - DNA, 6 bp, Unknown
  misc_feature (1)..( 6): Matrix.004 file - promoters50/1027928
tataaa

SEQ ID NO: 66584 - DNA, 9 bp, Unknown
  misc_feature (1)..( 9): Matrix.004 file - promoters50/1027928
tttttttta

SEQ ID NO: 66585 - DNA, 7 bp, Unknown
  misc_feature (1)..( 7): Matrix.004 file - promoters50/1027943
aataaaa

SEQ ID NO: 66586 - DNA, 9 bp, Unknown
  misc_feature (1)..( 9): Matrix.004 file - promoters50/1027970
agagaaaga

SEQ ID NO: 66587 - DNA, 8 bp, Unknown
  misc_feature (1)..( 8): Matrix.004 file - promoters50/1027982
taagattc

SEQ ID NO: 66588 - DNA, 10 bp, Unknown
  misc_feature (1)..( 10): Matrix.004 file - promoters50/1027982
aaattttttt

SEQ ID NO: 66589 - DNA, 6 bp, Unknown
  misc_feature (1)..( 6): Matrix.004 file - promoters50/1027982
atatat

SEQ ID NO: 66590 - DNA, 14 bp, Unknown
  misc_feature (1)..( 14): Matrix.004 file - promoters50/1027982
ttaaaataaataaa

SEQ ID NO: 66591 - DNA, 7 bp, Unknown
  misc_feature (1)..( 7): Matrix.004 file - promoters50/1027990
aaatatt

SEQ ID NO: 66592 - DNA, 9 bp, Unknown
  misc_feature (1)..( 9): Matrix.004 file - promoters50/1027990
tgtttaatt

SEQ ID NO: 66593 - DNA, 9 bp, Unknown
  misc_feature (1)..( 9): Matrix.004 file - promoters50/1028042
aagattttg

SEQ ID NO: 66594 - DNA, 7 bp, Unknown
  misc_feature (1)..( 7): Matrix.004 file - promoters50/1028042
acatgtt

SEQ ID NO: 66595 - DNA, 7 bp, Unknown
  misc_feature (1)..( 7): Matrix.004 file - promoters50/1028042
aatgtaa

SEQ ID NO: 66596 - DNA, 13 bp, Unknown
  misc_feature (1)..( 13): Matrix.004 file - promoters50/1028042
cagaaaagaaaaa

SEQ ID NO: 66597 - DNA, 8 bp, Unknown
  misc_feature (1)..( 8): Matrix.004 file - promoters50/1028042
agacgaaa

SEQ ID NO: 66598 - DNA, 12 bp, Unknown
  misc_feature (1)..( 12): Matrix.004 file - promoters50/1028049
agatcaattaac

SEQ ID NO: 66599 - DNA, 8 bp, Unknown
  misc_feature (1)..( 8): Matrix.004 file - promoters50/1028049
atttattg

SEQ ID NO: 66600 - DNA, 9 bp, Unknown
  misc_feature (1)..( 9): Matrix.004 file - promoters50/1028049
aatgttgaa

SEQ ID NO: 66601 - DNA, 10 bp, Unknown
  misc_feature (1)..( 10): Matrix.004 file - promoters50/1028049
atgaatcaat

SEQ ID NO: 66602 - DNA, 9 bp, Unknown
  misc_feature (1)..( 9): Matrix.004 file - promoters50/1028049
ggttataat

SEQ ID NO: 66603 - DNA, 10 bp, Unknown
  misc_feature (1)..( 10): Matrix.004 file - promoters50/1028084
cgattttgtt

SEQ ID NO: 66604 - DNA, 12 bp, Unknown
  misc_feature (1)..( 12): Matrix.004 file - promoters50/1028084
gaaattttattt

SEQ ID NO: 66605 - DNA, 11 bp, Unknown
  misc_feature (1)..( 11): Matrix.004 file - promoters50/1028095
ataacaatttt

SEQ ID NO: 66606 - DNA, 17 bp, Unknown
  misc_feature (1)..( 17): Matrix.004 file - promoters50/1028095
taatatgataaaattat

SEQ ID NO: 66607 - DNA, 13 bp, Unknown
  misc_feature (1)..( 13): Matrix.004 file - promoters50/1028095
taattttatttat

SEQ ID NO: 66608 - DNA, 16 bp, Unknown
  misc_feature (1)..( 16): Matrix.004 file - promoters50/1028095
ttgatataaaattata

SEQ ID NO: 66609 - DNA, 10 bp, Unknown
  misc_feature (1)..( 10): Matrix.004 file - promoters50/1028151
aatttgtttg

SEQ ID NO: 66610 - DNA, 9 bp, Unknown
  misc_feature (1)..( 9): Matrix.004 file - promoters50/1028177
tgattattt

SEQ ID NO: 66611 - DNA, 12 bp, Unknown
  misc_feature (1)..( 12): Matrix.004 file - promoters50/1028216
tcttctatcttt

SEQ ID NO: 66612 - DNA, 8 bp, Unknown
  misc_feature (1)..( 8): Matrix.004 file - promoters50/1028224
ttcttttt

SEQ ID NO: 66613 - DNA, 8 bp, Unknown
  misc_feature (1)..( 8): Matrix.004 file - promoters50/1028224
taatcagt

SEQ ID NO: 66614 - DNA, 8 bp, Unknown
  misc_feature (1)..( 8): Matrix.004 file - promoters50/1028224
atgtttat

SEQ ID NO: 66615 - DNA, 8 bp, Unknown
  misc_feature (1)..( 8): Matrix.004 file - promoters50/1028238
ttatgttt

SEQ ID NO: 66616 - DNA, 7 bp, Unknown
  misc_feature (1)..( 7): Matrix.004 file - promoters50/1028238
ctatata

SEQ ID NO: 66617 - DNA, 9 bp, Unknown
  misc_feature (1)..( 9): Matrix.004 file - promoters50/1028238
ttatatatg

SEQ ID NO: 66618 - DNA, 7 bp, Unknown
  misc_feature (1)..( 7): Matrix.004 file - promoters50/1028241
atatata

SEQ ID NO: 66619 - DNA, 8 bp, Unknown
  misc_feature (1)..( 8): Matrix.004 file - promoters50/1028241
attaaatt

SEQ ID NO: 66620 - DNA, 8 bp, Unknown
  misc_feature (1)..( 8): Matrix.004 file - promoters50/1028241
cattaaaa

SEQ ID NO: 66621 - DNA, 7 bp, Unknown
  misc_feature (1)..( 7): Matrix.004 file - promoters50/1028243
ttgttta

SEQ ID NO: 66622 - DNA, 11 bp, Unknown
  misc_feature (1)..( 11): Matrix.004 file - promoters50/1028243
aaaataaatta

SEQ ID NO: 66623 - DNA, 12 bp, Unknown
  misc_feature (1)..( 12): Matrix.004 file - promoters50/1028304
gtattatttcct

SEQ ID NO: 66624 - DNA, 11 bp, Unknown
  misc_feature (1)..( 11): Matrix.004 file - promoters50/1028304
aaacatttttt

SEQ ID NO: 66625 - DNA, 12 bp, Unknown
  misc_feature (1)..( 12): Matrix.004 file - promoters50/1028304
aaaaattttgca

SEQ ID NO: 66626 - DNA, 10 bp, Unknown
  misc_feature (1)..( 10): Matrix.004 file - promoters50/1028318
agaaaaacat

SEQ ID NO: 66627 - DNA, 11 bp, Unknown
  misc_feature (1)..( 11): Matrix.004 file - promoters50/1028318
ttttcaagaag

SEQ ID NO: 66628 - DNA, 10 bp, Unknown
  misc_feature (1)..( 10): Matrix.004 file - promoters50/1028318
ttcttaaaga

SEQ ID NO: 66629 - DNA, 12 bp, Unknown
  misc_feature (1)..( 12): Matrix.004 file - promoters50/1028318
aattaataaaaa

SEQ ID NO: 66630 - DNA, 10 bp, Unknown
  misc_feature (1)..( 10): Matrix.004 file - promoters50/1028331
gaaagtttaa

SEQ ID NO: 66631 - DNA, 10 bp, Unknown
  misc_feature (1)..( 10): Matrix.004 file - promoters50/1028331
caaaagagaa

SEQ ID NO: 66632 - DNA, 10 bp, Unknown
  misc_feature (1)..( 10): Matrix.004 file - promoters50/1028352
tgaagacgga

SEQ ID NO: 66633 - DNA, 8 bp, Unknown
  misc_feature (1)..( 8): Matrix.004 file - promoters50/1028352
aaaaaatt

SEQ ID NO: 66634 - DNA, 11 bp, Unknown
  misc_feature (1)..( 11): Matrix.004 file - promoters50/1028352
aaaaaacaaaa

SEQ ID NO: 66635 - DNA, 7 bp, Unknown
  misc_feature (1)..( 7): Matrix.004 file - promoters50/1028352
aaacacc

SEQ ID NO: 66636 - DNA, 8 bp, Unknown
  misc_feature (1)..( 8): Matrix.004 file - promoters50/1028352
aaaaaccg

SEQ ID NO: 66637 - DNA, 7 bp, Unknown
  misc_feature (1)..( 7): Matrix.004 file - promoters50/1028352
caaacac

SEQ ID NO: 66638 - DNA, 9 bp, Unknown
  misc_feature (1)..( 9): Matrix.004 file - promoters50/1028355
gaaactaaa

SEQ ID NO: 66639 - DNA, 18 bp, Unknown
  misc_feature (1)..( 18): Matrix.004 file - promoters50/1028355
attgtattatttattatt

SEQ ID NO: 66640 - DNA, 10 bp, Unknown
  misc_feature (1)..( 10): Matrix.004 file - promoters50/1028368
tatcaaatat

SEQ ID NO: 66641 - DNA, 9 bp, Unknown
  misc_feature (1)..( 9): Matrix.004 file - promoters50/1028368
attgttttc

SEQ ID NO: 66642 - DNA, 10 bp, Unknown
  misc_feature (1)..( 10): Matrix.004 file - promoters50/1028368
aaaatatata

SEQ ID NO: 66643 - DNA, 13 bp, Unknown
  misc_feature (1)..( 13): Matrix.004 file - promoters50/1028382
caaaagttttgat

SEQ ID NO: 66644 - DNA, 8 bp, Unknown
  misc_feature (1)..( 8): Matrix.004 file - promoters50/1028382
tgaagaaa

SEQ ID NO: 66645 - DNA, 8 bp, Unknown
  misc_feature (1)..( 8): Matrix.004 file - promoters50/1028402
ttggtgtt

SEQ ID NO: 66646 - DNA, 8 bp, Unknown
  misc_feature (1)..( 8): Matrix.004 file - promoters50/1028402
aaaaatgc

SEQ ID NO: 66647 - DNA, 11 bp, Unknown
  misc_feature (1)..( 11): Matrix.004 file - promoters50/1028413
ccaaagtcaac

SEQ ID NO: 66648 - DNA, 13 bp, Unknown
  misc_feature (1)..( 13): Matrix.004 file - promoters50/1028459
ttaaatttttaaa

SEQ ID NO: 66649 - DNA, 8 bp, Unknown
  misc_feature (1)..( 8): Matrix.004 file - promoters50/1028459
gtttattc

SEQ ID NO: 66650 - DNA, 9 bp, Unknown
  misc_feature (1)..( 9): Matrix.004 file - promoters50/1028459
attttggca

SEQ ID NO: 66651 - DNA, 9 bp, Unknown
  misc_feature (1)..( 9): Matrix.004 file - promoters50/1028459
taacaaatc

SEQ ID NO: 66652 - DNA, 9 bp, Unknown
  misc_feature (1)..( 9): Matrix.004 file - promoters50/1028470
cgttttgac

SEQ ID NO: 66653 - DNA, 12 bp, Unknown
  misc_feature (1)..( 12): Matrix.004 file - promoters50/1028470
ttactagatacg

SEQ ID NO: 66654 - DNA, 8 bp, Unknown
  misc_feature (1)..( 8): Matrix.004 file - promoters50/1028545
gaaataga

SEQ ID NO: 66655 - DNA, 15 bp, Unknown
  misc_feature (1)..( 15): Matrix.004 file - promoters50/1028545
ttattttaaaattgg

SEQ ID NO: 66656 - DNA, 9 bp, Unknown
  misc_feature (1)..( 9): Matrix.004 file - promoters50/1028590
ctaatttca

SEQ ID NO: 66657 - DNA, 8 bp, Unknown
  misc_feature (1)..( 8): Matrix.004 file - promoters50/1028623
aatgattg

SEQ ID NO: 66658 - DNA, 7 bp, Unknown
  misc_feature (1)..( 7): Matrix.004 file - promoters50/1028623
taagctc

SEQ ID NO: 66659 - DNA, 8 bp, Unknown
  misc_feature (1)..( 8): Matrix.004 file - promoters50/1028629
aaaacagc

SEQ ID NO: 66660 - DNA, 8 bp, Unknown
  misc_feature (1)..( 8): Matrix.004 file - promoters50/1028629
attgttga

SEQ ID NO: 66661 - DNA, 7 bp, Unknown
  misc_feature (1)..( 7): Matrix.004 file - promoters50/1028674
caattat

SEQ ID NO: 66662 - DNA, 9 bp, Unknown
  misc_feature (1)..( 9): Matrix.004 file - promoters50/1028674
ttaaaataa

SEQ ID NO: 66663 - DNA, 12 bp, Unknown
  misc_feature (1)..( 12): Matrix.004 file - promoters50/1028674
aaaatatttaaa

SEQ ID NO: 66664 - DNA, 6 bp, Unknown
  misc_feature (1)..( 6): Matrix.004 file - promoters50/1028674
atttaa

SEQ ID NO: 66665 - DNA, 10 bp, Unknown
  misc_feature (1)..( 10): Matrix.004 file - promoters50/1028674
acaattaatt

SEQ ID NO: 66666 - DNA, 6 bp, Unknown
  misc_feature (1)..( 6): Matrix.004 file - promoters50/1028674
aaataa

SEQ ID NO: 66667 - DNA, 8 bp, Unknown
  misc_feature (1)..( 8): Matrix.004 file - promoters50/1028682
attcaaat

SEQ ID NO: 66668 - DNA, 10 bp, Unknown
  misc_feature (1)..( 10): Matrix.004 file - promoters50/1028763
aaccatatta

SEQ ID NO: 66669 - DNA, 10 bp, Unknown
  misc_feature (1)..( 10): Matrix.004 file - promoters50/1028785
ctaaactaaa

SEQ ID NO: 66670 - DNA, 7 bp, Unknown
  misc_feature (1)..( 7): Matrix.004 file - promoters50/1028785
acatttt

SEQ ID NO: 66671 - DNA, 7 bp, Unknown
  misc_feature (1)..( 7): Matrix.004 file - promoters50/1028793
attacca

SEQ ID NO: 66672 - DNA, 7 bp, Unknown
  misc_feature (1)..( 7): Matrix.004 file - promoters50/1028826
ttttaaa

SEQ ID NO: 66673 - DNA, 8 bp, Unknown
  misc_feature (1)..( 8): Matrix.004 file - promoters50/1028826
aaacgttt

SEQ ID NO: 66674 - DNA, 11 bp, Unknown
  misc_feature (1)..( 11): Matrix.004 file - promoters50/1028826
tgattaatttt

SEQ ID NO: 66675 - DNA, 9 bp, Unknown
  misc_feature (1)..( 9): Matrix.004 file - promoters50/1028826
taattaaaa

SEQ ID NO: 66676 - DNA, 13 bp, Unknown
  misc_feature (1)..( 13): Matrix.004 file - promoters50/1028835
aatgttttttaaa

SEQ ID NO: 66677 - DNA, 10 bp, Unknown
  misc_feature (1)..( 10): Matrix.004 file - promoters50/1028835
ttttattaat

SEQ ID NO: 66678 - DNA, 13 bp, Unknown
  misc_feature (1)..( 13): Matrix.004 file - promoters50/1028851
tttatgaatacta

SEQ ID NO: 66679 - DNA, 11 bp, Unknown
  misc_feature (1)..( 11): Matrix.004 file - promoters50/1028851
tatatcaacca

SEQ ID NO: 66680 - DNA, 9 bp, Unknown
  misc_feature (1)..( 9): Matrix.004 file - promoters50/1028851
acaaatttt

SEQ ID NO: 66681 - DNA, 9 bp, Unknown
  misc_feature (1)..( 9): Matrix.004 file - promoters50/1028851
tcaaatttt

SEQ ID NO: 66682 - DNA, 6 bp, Unknown
  misc_feature (1)..( 6): Matrix.004 file - promoters50/1028859
acatta

SEQ ID NO: 66683 - DNA, 11 bp, Unknown
  misc_feature (1)..( 11): Matrix.004 file - promoters50/1028859
aaagatatatt

SEQ ID NO: 66684 - DNA, 15 bp, Unknown
  misc_feature (1)..( 15): Matrix.004 file - promoters50/1028859
attaaagtttaatta

SEQ ID NO: 66685 - DNA, 9 bp, Unknown
  misc_feature (1)..( 9): Matrix.004 file - promoters50/1028863
tctcttttt

SEQ ID NO: 66686 - DNA, 11 bp, Unknown
  misc_feature (1)..( 11): Matrix.004 file - promoters50/1028863
caatatgtgta

SEQ ID NO: 66687 - DNA, 12 bp, Unknown
  misc_feature (1)..( 12): Matrix.004 file - promoters50/1028866
ataaaaaaattc

SEQ ID NO: 66688 - DNA, 10 bp, Unknown
  misc_feature (1)..( 10): Matrix.004 file - promoters50/1028908
gatgcaaatt

SEQ ID NO: 66689 - DNA, 11 bp, Unknown
  misc_feature (1)..( 11): Matrix.004 file - promoters50/1028908
acaaatacgaa

SEQ ID NO: 66690 - DNA, 12 bp, Unknown
  misc_feature (1)..( 12): Matrix.004 file - promoters50/1028937
aatggttaatca

SEQ ID NO: 66691 - DNA, 11 bp, Unknown
  misc_feature (1)..( 11): Matrix.004 file - promoters50/1028937
ttaataataat

SEQ ID NO: 66692 - DNA, 10 bp, Unknown
  misc_feature (1)..( 10): Matrix.004 file - promoters50/1028937
taattatata

SEQ ID NO: 66693 - DNA, 13 bp, Unknown
  misc_feature (1)..( 13): Matrix.004 file - promoters50/1028937
acataaaaaataa

SEQ ID NO: 66694 - DNA, 7 bp, Unknown
  misc_feature (1)..( 7): Matrix.004 file - promoters50/1028937
aaaacaa

SEQ ID NO: 66695 - DNA, 10 bp, Unknown
  misc_feature (1)..( 10): Matrix.004 file - promoters50/1028937
aacctatttt

SEQ ID NO: 66696 - DNA, 10 bp, Unknown
  misc_feature (1)..( 10): Matrix.004 file - promoters50/1028937
ttaattttat

SEQ ID NO: 66697 - DNA, 9 bp, Unknown
  misc_feature (1)..( 9): Matrix.004 file - promoters50/1028937
atatattta

SEQ ID NO: 66698 - DNA, 10 bp, Unknown
  misc_feature (1)..( 10): Matrix.004 file - promoters50/1028955
gatatatttt

SEQ ID NO: 66699 - DNA, 8 bp, Unknown
  misc_feature (1)..( 8): Matrix.004 file - promoters50/1028955
ataaaatg

SEQ ID NO: 66700 - DNA, 8 bp, Unknown
  misc_feature (1)..( 8): Matrix.004 file - promoters50/1028955
atttacaa

SEQ ID NO: 66701 - DNA, 10 bp, Unknown
  misc_feature (1)..( 10): Matrix.004 file - promoters50/1028963
aaagataaat

SEQ ID NO: 66702 - DNA, 10 bp, Unknown
  misc_feature (1)..( 10): Matrix.004 file - promoters50/1028963
aaataaaata

SEQ ID NO: 66703 - DNA, 8 bp, Unknown
  misc_feature (1)..( 8): Matrix.004 file - promoters50/1028984
tatcttct

SEQ ID NO: 66704 - DNA, 7 bp, Unknown
  misc_feature (1)..( 7): Matrix.004 file - promoters50/1029005
taaaatg

SEQ ID NO: 66705 - DNA, 9 bp, Unknown
  misc_feature (1)..( 9): Matrix.004 file - promoters50/1029085
aaatttttt

SEQ ID NO: 66706 - DNA, 13 bp, Unknown
  misc_feature (1)..( 13): Matrix.004 file - promoters50/1029085
tattaaagaaaag

SEQ ID NO: 66707 - DNA, 13 bp, Unknown
  misc_feature (1)..( 13): Matrix.004 file - promoters50/1029089
tgactaatttttg

SEQ ID NO: 66708 - DNA, 9 bp, Unknown
  misc_feature (1)..( 9): Matrix.004 file - promoters50/1029089
tcaatatat

SEQ ID NO: 66709 - DNA, 7 bp, Unknown
  misc_feature (1)..( 7): Matrix.004 file - promoters50/1029089
gttaaaa

SEQ ID NO: 66710 - DNA, 9 bp, Unknown
  misc_feature (1)..( 9): Matrix.004 file - promoters50/1029089
aaaaaataa

SEQ ID NO: 66711 - DNA, 9 bp, Unknown
  misc_feature (1)..( 9): Matrix.004 file - promoters50/1029089
aaaataaaa

SEQ ID NO: 66712 - DNA, 9 bp, Unknown
  misc_feature (1)..( 9): Matrix.004 file - promoters50/1029309
tttcaatat

SEQ ID NO: 66713 - DNA, 9 bp, Unknown
  misc_feature (1)..( 9): Matrix.004 file - promoters50/1029309
tgtgactca

SEQ ID NO: 66714 - DNA, 8 bp, Unknown
  misc_feature (1)..( 8): Matrix.004 file - promoters50/1029315
ttgatgaa

SEQ ID NO: 66715 - DNA, 11 bp, Unknown
  misc_feature (1)..( 11): Matrix.004 file - promoters50/1029315
aggatttgatc

SEQ ID NO: 66716 - DNA, 12 bp, Unknown
  misc_feature (1)..( 12): Matrix.004 file - promoters50/1029315
aacaatccacgc

SEQ ID NO: 66717 - DNA, 9 bp, Unknown
  misc_feature (1)..( 9): Matrix.004 file - promoters50/1029315
ccaatataa

SEQ ID NO: 66718 - DNA, 11 bp, Unknown
  misc_feature (1)..( 11): Matrix.004 file - promoters50/1029349
agaaaaagtaa

SEQ ID NO: 66719 - DNA, 7 bp, Unknown
  misc_feature (1)..( 7): Matrix.004 file - promoters50/1029349
tatgaat

SEQ ID NO: 66720 - DNA, 8 bp, Unknown
  misc_feature (1)..( 8): Matrix.004 file - promoters50/1029395
ctaaaaac

SEQ ID NO: 66721 - DNA, 9 bp, Unknown
  misc_feature (1)..( 9): Matrix.004 file - promoters50/1029395
aattgatga

SEQ ID NO: 66722 - DNA, 9 bp, Unknown
  misc_feature (1)..( 9): Matrix.004 file - promoters50/1029395
tttatttga

SEQ ID NO: 66723 - DNA, 10 bp, Unknown
  misc_feature (1)..( 10): Matrix.004 file - promoters50/1029395
tttaaagttt

SEQ ID NO: 66724 - DNA, 9 bp, Unknown
  misc_feature (1)..( 9): Matrix.004 file - promoters50/1029395
aaaagatta

SEQ ID NO: 66725 - DNA, 15 bp, Unknown
  misc_feature (1)..( 15): Matrix.004 file - promoters50/1029433
attgtatcttattac

SEQ ID NO: 66726 - DNA, 9 bp, Unknown
  misc_feature (1)..( 9): Matrix.004 file - promoters50/1029444
tattataaa

SEQ ID NO: 66727 - DNA, 11 bp, Unknown
  misc_feature (1)..( 11): Matrix.004 file - promoters50/1029444
aaaattttgat

SEQ ID NO: 66728 - DNA, 8 bp, Unknown
  misc_feature (1)..( 8): Matrix.004 file - promoters50/1029444
tataattt

SEQ ID NO: 66729 - DNA, 10 bp, Unknown
  misc_feature (1)..( 10): Matrix.004 file - promoters50/1029543
actaaaaaaa

SEQ ID NO: 66730 - DNA, 8 bp, Unknown
  misc_feature (1)..( 8): Matrix.004 file - promoters50/1029543
tttattat

SEQ ID NO: 66731 - DNA, 8 bp, Unknown
  misc_feature (1)..( 8): Matrix.004 file - promoters50/1029576
attacttc

SEQ ID NO: 66732 - DNA, 9 bp, Unknown
  misc_feature (1)..( 9): Matrix.004 file - promoters50/1029576
tttaacatt

SEQ ID NO: 66733 - DNA, 11 bp, Unknown
  misc_feature (1)..( 11): Matrix.004 file - promoters50/1029576
tttaacattct

SEQ ID NO: 66734 - DNA, 7 bp, Unknown
  misc_feature (1)..( 7): Matrix.004 file - promoters50/1029576
aaaaatt

SEQ ID NO: 66735 - DNA, 13 bp, Unknown
  misc_feature (1)..( 13): Matrix.004 file - promoters50/1029576
gagagatgtattt

SEQ ID NO: 66736 - DNA, 7 bp, Unknown
  misc_feature (1)..( 7): Matrix.004 file - promoters50/1029576
ataaaaa

SEQ ID NO: 66737 - DNA, 8 bp, Unknown
  misc_feature (1)..( 8): Matrix.004 file - promoters50/1029590
tatttgag

SEQ ID NO: 66738 - DNA, 7 bp, Unknown
  misc_feature (1)..( 7): Matrix.004 file - promoters50/1029590
atctgat

SEQ ID NO: 66739 - DNA, 9 bp, Unknown
  misc_feature (1)..( 9): Matrix.004 file - promoters50/1029636
ttttcctaa

SEQ ID NO: 66740 - DNA, 15 bp, Unknown
  misc_feature (1)..( 15): Matrix.004 file - promoters50/1029636
attgttataaaaaaa

SEQ ID NO: 66741 - DNA, 12 bp, Unknown
  misc_feature (1)..( 12): Matrix.004 file - promoters50/1029636
gttcggttcgat

SEQ ID NO: 66742 - DNA, 11 bp, Unknown
  misc_feature (1)..( 11): Matrix.004 file - promoters50/1029791
aataaatttat

SEQ ID NO: 66743 - DNA, 7 bp, Unknown
  misc_feature (1)..( 7): Matrix.004 file - promoters50/1029794
gaacaat

SEQ ID NO: 66744 - DNA, 8 bp, Unknown
  misc_feature (1)..( 8): Matrix.004 file - promoters50/1029837
ttaataaa

SEQ ID NO: 66745 - DNA, 10 bp, Unknown
  misc_feature (1)..( 10): Matrix.004 file - promoters50/1029837
aataatatac

SEQ ID NO: 66746 - DNA, 10 bp, Unknown
  misc_feature (1)..( 10): Matrix.004 file - promoters50/1029841
aagttttgtg

SEQ ID NO: 66747 - DNA, 11 bp, Unknown
  misc_feature (1)..( 11): Matrix.004 file - promoters50/1029892
cttaaataatc

SEQ ID NO: 66748 - DNA, 9 bp, Unknown
  misc_feature (1)..( 9): Matrix.004 file - promoters50/1029908
gaagaagaa

SEQ ID NO: 66749 - DNA, 11 bp, Unknown
  misc_feature (1)..( 11): Matrix.004 file - promoters50/1029908
aaaaaagattt

SEQ ID NO: 66750 - DNA, 9 bp, Unknown
  misc_feature (1)..( 9): Matrix.004 file - promoters50/1029952
ttaatatat

SEQ ID NO: 66751 - DNA, 9 bp, Unknown
  misc_feature (1)..( 9): Matrix.004 file - promoters50/1029952
cttatatac

SEQ ID NO: 66752 - DNA, 11 bp, Unknown
  misc_feature (1)..( 11): Matrix.004 file - promoters50/1029952
tcaagaaaaaa

SEQ ID NO: 66753 - DNA, 10 bp, Unknown
  misc_feature (1)..( 10): Matrix.004 file - promoters50/1030069
aataggccca

SEQ ID NO: 66754 - DNA, 8 bp, Unknown
  misc_feature (1)..( 8): Matrix.004 file - promoters50/1030069
aataataa

SEQ ID NO: 66755 - DNA, 7 bp, Unknown
  misc_feature (1)..( 7): Matrix.004 file - promoters50/1030069
aataata

SEQ ID NO: 66756 - DNA, 8 bp, Unknown
  misc_feature (1)..( 8): Matrix.004 file - promoters50/1030126
aatagtgg

SEQ ID NO: 66757 - DNA, 10 bp, Unknown
  misc_feature (1)..( 10): Matrix.004 file - promoters50/1030126
taatcaaaaa

SEQ ID NO: 66758 - DNA, 19 bp, Unknown
  misc_feature (1)..( 19): Matrix.004 file - promoters50/1030126
aaataaatttttgaattta

SEQ ID NO: 66759 - DNA, 11 bp, Unknown
  misc_feature (1)..( 11): Matrix.004 file - promoters50/1030126
aaatgtatgat

SEQ ID NO: 66760 - DNA, 7 bp, Unknown
  misc_feature (1)..( 7): Matrix.004 file - promoters50/1030126
taatcaa

SEQ ID NO: 66761 - DNA, 9 bp, Unknown
  misc_feature (1)..( 9): Matrix.004 file - promoters50/1030126
attattata

SEQ ID NO: 66762 - DNA, 9 bp, Unknown
  misc_feature (1)..( 9): Matrix.004 file - promoters50/1030139
aaacaaaat

SEQ ID NO: 66763 - DNA, 9 bp, Unknown
  misc_feature (1)..( 9): Matrix.004 file - promoters50/1030139
ataagaaac

SEQ ID NO: 66764 - DNA, 10 bp, Unknown
  misc_feature (1)..( 10): Matrix.004 file - promoters50/1030157
tgattagtaa

SEQ ID NO: 66765 - DNA, 10 bp, Unknown
  misc_feature (1)..( 10): Matrix.004 file - promoters50/1030192
tgaaatatca

SEQ ID NO: 66766 - DNA, 8 bp, Unknown
  misc_feature (1)..( 8): Matrix.004 file - promoters50/1030223
ttgtttta

SEQ ID NO: 66767 - DNA, 16 bp, Unknown
  misc_feature (1)..( 16): Matrix.004 file - promoters50/1030223
tataatactctgatac

SEQ ID NO: 66768 - DNA, 26 bp, Unknown
  misc_feature (1)..( 26): Matrix.004 file - promoters50/1030223
tgtgataaatttcctttaactttact

SEQ ID NO: 66769 - DNA, 15 bp, Unknown
  misc_feature (1)..( 15): Matrix.004 file - promoters50/1030223
ttttgataaaatatt

SEQ ID NO: 66770 - DNA, 9 bp, Unknown
  misc_feature (1)..( 9): Matrix.004 file - promoters50/1030223
ttcgtttct

SEQ ID NO: 66771 - DNA, 16 bp, Unknown
  misc_feature (1)..( 16): Matrix.004 file - promoters50/1030223
cgtttctataaataga

SEQ ID NO: 66772 - DNA, 10 bp, Unknown
  misc_feature (1)..( 10): Matrix.004 file - promoters50/1030231
aaatttgatc

SEQ ID NO: 66773 - DNA, 9 bp, Unknown
  misc_feature (1)..( 9): Matrix.004 file - promoters50/1030242
cgaaaattg

SEQ ID NO: 66774 - DNA, 8 bp, Unknown
  misc_feature (1)..( 8): Matrix.004 file - promoters50/1030242
caattatt

SEQ ID NO: 66775 - DNA, 8 bp, Unknown
  misc_feature (1)..( 8): Matrix.004 file - promoters50/1030283
taaaaaac

SEQ ID NO: 66776 - DNA, 13 bp, Unknown
  misc_feature (1)..( 13): Matrix.004 file - promoters50/1030312
aaaatttttacct

SEQ ID NO: 66777 - DNA, 12 bp, Unknown
  misc_feature (1)..( 12): Matrix.004 file - promoters50/1030312
caggttctgaga

SEQ ID NO: 66778 - DNA, 9 bp, Unknown
  misc_feature (1)..( 9): Matrix.004 file - promoters50/1030321
gatctcaga

SEQ ID NO: 66779 - DNA, 8 bp, Unknown
  misc_feature (1)..( 8): Matrix.004 file - promoters50/1030324
gatgttgt

SEQ ID NO: 66780 - DNA, 19 bp, Unknown
  misc_feature (1)..( 19): Matrix.004 file - promoters50/1030324
aatatataaatcccttaaa

SEQ ID NO: 66781 - DNA, 14 bp, Unknown
  misc_feature (1)..( 14): Matrix.004 file - promoters50/1030324
tctatgaatcatgt

SEQ ID NO: 66782 - DNA, 12 bp, Unknown
  misc_feature (1)..( 12): Matrix.004 file - promoters50/1030324
tttataaaacac

SEQ ID NO: 66783 - DNA, 14 bp, Unknown
  misc_feature (1)..( 14): Matrix.004 file - promoters50/1030329
gatcataatttagc

SEQ ID NO: 66784 - DNA, 9 bp, Unknown
  misc_feature (1)..( 9): Matrix.004 file - promoters50/1030329
tttagaaaa

SEQ ID NO: 66785 - DNA, 8 bp, Unknown
  misc_feature (1)..( 8): Matrix.004 file - promoters50/1030336
tttgaaac

SEQ ID NO: 66786 - DNA, 6 bp, Unknown
  misc_feature (1)..( 6): Matrix.004 file - promoters50/1030336
aggaaa

SEQ ID NO: 66787 - DNA, 9 bp, Unknown
  misc_feature (1)..( 9): Matrix.004 file - promoters50/1030336
ccagaagaa

SEQ ID NO: 66788 - DNA, 8 bp, Unknown
  misc_feature (1)..( 8): Matrix.004 file - promoters50/1030336
aagagatt

SEQ ID NO: 66789 - DNA, 10 bp, Unknown
  misc_feature (1)..( 10): Matrix.004 file - promoters50/1030336
aatccttcaa

SEQ ID NO: 66790 - DNA, 9 bp, Unknown
  misc_feature (1)..( 9): Matrix.004 file - promoters50/1030410
ttgagaatg

SEQ ID NO: 66791 - DNA, 8 bp, Unknown
  misc_feature (1)..( 8): Matrix.004 file - promoters50/1030428
cttttttc

SEQ ID NO: 66792 - DNA, 7 bp, Unknown
  misc_feature (1)..( 7): Matrix.004 file - promoters50/1030481
tataaag

SEQ ID NO: 66793 - DNA, 8 bp, Unknown
  misc_feature (1)..( 8): Matrix.004 file - promoters50/1030481
caataaaa

SEQ ID NO: 66794 - DNA, 7 bp, Unknown
  misc_feature (1)..( 7): Matrix.004 file - promoters50/1030481
caagaaa

SEQ ID NO: 66795 - DNA, 11 bp, Unknown
  misc_feature (1)..( 11): Matrix.004 file - promoters50/1030481
aattaacagaa

SEQ ID NO: 66796 - DNA, 8 bp, Unknown
  misc_feature (1)..( 8): Matrix.004 file - promoters50/1030481
tctcatga

SEQ ID NO: 66797 - DNA, 8 bp, Unknown
  misc_feature (1)..( 8): Matrix.004 file - promoters50/1030481
gacgatat

SEQ ID NO: 66798 - DNA, 9 bp, Unknown
  misc_feature (1)..( 9): Matrix.004 file - promoters50/1030481
actcatctt

SEQ ID NO: 66799 - DNA, 9 bp, Unknown
  misc_feature (1)..( 9): Matrix.004 file - promoters50/1030519
ctcacccat

SEQ ID NO: 66800 - DNA, 10 bp, Unknown
  misc_feature (1)..( 10): Matrix.004 file - promoters50/1030519
aagaacaaaa

SEQ ID NO: 66801 - DNA, 8 bp, Unknown
  misc_feature (1)..( 8): Matrix.004 file - promoters50/1030519
aaaacaaa

SEQ ID NO: 66802 - DNA, 9 bp, Unknown
  misc_feature (1)..( 9): Matrix.004 file - promoters50/1030519
attcttatc

SEQ ID NO: 66803 - DNA, 8 bp, Unknown
  misc_feature (1)..( 8): Matrix.004 file - promoters50/1030528
aaagcttg

SEQ ID NO: 66804 - DNA, 10 bp, Unknown
  misc_feature (1)..( 10): Matrix.004 file - promoters50/1030528
ttattaaaaa

SEQ ID NO: 66805 - DNA, 10 bp, Unknown
  misc_feature (1)..( 10): Matrix.004 file - promoters50/1030528
aataataata

SEQ ID NO: 66806 - DNA, 12 bp, Unknown
  misc_feature (1)..( 12): Matrix.004 file - promoters50/1030528
gttaattttatt

SEQ ID NO: 66807 - DNA, 12 bp, Unknown
  misc_feature (1)..( 12): Matrix.004 file - promoters50/1030528
taaatgattaaa

SEQ ID NO: 66808 - DNA, 13 bp, Unknown
  misc_feature (1)..( 13): Matrix.004 file - promoters50/1030528
gtataaattatat

SEQ ID NO: 66809 - DNA, 10 bp, Unknown
  misc_feature (1)..( 10): Matrix.004 file - promoters50/1030528
aaaattgtta

SEQ ID NO: 66810 - DNA, 13 bp, Unknown
  misc_feature (1)..( 13): Matrix.004 file - promoters50/1030530
ttatcaaaagaat

SEQ ID NO: 66811 - DNA, 9 bp, Unknown
  misc_feature (1)..( 9): Matrix.004 file - promoters50/1030530
tgaaaaaaa

SEQ ID NO: 66812 - DNA, 11 bp, Unknown
  misc_feature (1)..( 11): Matrix.004 file - promoters50/1030581
ggaaaaaaaaa

SEQ ID NO: 66813 - DNA, 9 bp, Unknown
  misc_feature (1)..( 9): Matrix.004 file - promoters50/1030581
gaagtgtaa

SEQ ID NO: 66814 - DNA, 10 bp, Unknown
  misc_feature (1)..( 10): Matrix.004 file - promoters50/1030591
acaaaaatca

SEQ ID NO: 66815 - DNA, 8 bp, Unknown
  misc_feature (1)..( 8): Matrix.004 file - promoters50/1030591
gttattgg

SEQ ID NO: 66816 - DNA, 8 bp, Unknown
  misc_feature (1)..( 8): Matrix.004 file - promoters50/1030605
aaatagat

SEQ ID NO: 66817 - DNA, 14 bp, Unknown
  misc_feature (1)..( 14): Matrix.004 file - promoters50/1030605
attttgaaatcatg

SEQ ID NO: 66818 - DNA, 11 bp, Unknown
  misc_feature (1)..( 11): Matrix.004 file - promoters50/1030605
aaaaaaatatt

SEQ ID NO: 66819 - DNA, 11 bp, Unknown
  misc_feature (1)..( 11): Matrix.004 file - promoters50/1030605
aaaatatattt

SEQ ID NO: 66820 - DNA, 7 bp, Unknown
  misc_feature (1)..( 7): Matrix.004 file - promoters50/1030605
aaaaaaa

SEQ ID NO: 66821 - DNA, 14 bp, Unknown
  misc_feature (1)..( 14): Matrix.004 file - promoters50/1030605
atattgaaataatg

SEQ ID NO: 66822 - DNA, 13 bp, Unknown
  misc_feature (1)..( 13): Matrix.004 file - promoters50/1030616
acaaataaattaa

SEQ ID NO: 66823 - DNA, 8 bp, Unknown
  misc_feature (1)..( 8): Matrix.004 file - promoters50/1030616
gaaaatat

SEQ ID NO: 66824 - DNA, 11 bp, Unknown
  misc_feature (1)..( 11): Matrix.004 file - promoters50/1030616
atgtaaaatat

SEQ ID NO: 66825 - DNA, 13 bp, Unknown
  misc_feature (1)..( 13): Matrix.004 file - promoters50/1030616
aaaaatttaattt

SEQ ID NO: 66826 - DNA, 8 bp, Unknown
  misc_feature (1)..( 8): Matrix.004 file - promoters50/1030616
aataaaag

SEQ ID NO: 66827 - DNA, 13 bp, Unknown
  misc_feature (1)..( 13): Matrix.004 file - promoters50/1030715
atataattaaacg

SEQ ID NO: 66828 - DNA, 11 bp, Unknown
  misc_feature (1)..( 11): Matrix.004 file - promoters50/1030715
atatatttcaa

SEQ ID NO: 66829 - DNA, 10 bp, Unknown
  misc_feature (1)..( 10): Matrix.004 file - promoters50/1030757
ttcttaaaga

SEQ ID NO: 66830 - DNA, 11 bp, Unknown
  misc_feature (1)..( 11): Matrix.004 file - promoters50/1030757
caaatacattt

SEQ ID NO: 66831 - DNA, 9 bp, Unknown
  misc_feature (1)..( 9): Matrix.004 file - promoters50/1030757
caatttatt

SEQ ID NO: 66832 - DNA, 12 bp, Unknown
  misc_feature (1)..( 12): Matrix.004 file - promoters50/1030757
aacacttttata

SEQ ID NO: 66833 - DNA, 10 bp, Unknown
  misc_feature (1)..( 10): Matrix.004 file - promoters50/1030771
acggatatag

SEQ ID NO: 66834 - DNA, 9 bp, Unknown
  misc_feature (1)..( 9): Matrix.004 file - promoters50/1030771
tgaaaaaaa

SEQ ID NO: 66835 - DNA, 8 bp, Unknown
  misc_feature (1)..( 8): Matrix.004 file - promoters50/1030803
aaaaaaaa

SEQ ID NO: 66836 - DNA, 9 bp, Unknown
  misc_feature (1)..( 9): Matrix.004 file - promoters50/1030821
tcggtgaag

SEQ ID NO: 66837 - DNA, 14 bp, Unknown
  misc_feature (1)..( 14): Matrix.004 file - promoters50/1030821
aaacaatgtactga

SEQ ID NO: 66838 - DNA, 9 bp, Unknown
  misc_feature (1)..( 9): Matrix.004 file - promoters50/1030821
ctatccaaa

SEQ ID NO: 66839 - DNA, 10 bp, Unknown
  misc_feature (1)..( 10): Matrix.004 file - promoters50/1030916
atattgttgc

SEQ ID NO: 66840 - DNA, 13 bp, Unknown
  misc_feature (1)..( 13): Matrix.004 file - promoters50/1030916
aattcaaaatcat

SEQ ID NO: 66841 - DNA, 10 bp, Unknown
  misc_feature (1)..( 10): Matrix.004 file - promoters50/1030916
gtttgctttt

SEQ ID NO: 66842 - DNA, 12 bp, Unknown
  misc_feature (1)..( 12): Matrix.004 file - promoters50/1030916
gttaattgttgt

SEQ ID NO: 66843 - DNA, 8 bp, Unknown
  misc_feature (1)..( 8): Matrix.004 file - promoters50/1030916
tcaaaata

SEQ ID NO: 66844 - DNA, 12 bp, Unknown
  misc_feature (1)..( 12): Matrix.004 file - promoters50/1030918
attaattgttgt

SEQ ID NO: 66845 - DNA, 8 bp, Unknown
  misc_feature (1)..( 8): Matrix.004 file - promoters50/1030933
tttattga

SEQ ID NO: 66846 - DNA, 14 bp, Unknown
  misc_feature (1)..( 14): Matrix.004 file - promoters50/1030940
agaagatactaaaa

SEQ ID NO: 66847 - DNA, 9 bp, Unknown
  misc_feature (1)..( 9): Matrix.004 file - promoters50/1030940
tcaaatgat

SEQ ID NO: 66848 - DNA, 11 bp, Unknown
  misc_feature (1)..( 11): Matrix.004 file - promoters50/1030940
aaaaatatgtt

SEQ ID NO: 66849 - DNA, 10 bp, Unknown
  misc_feature (1)..( 10): Matrix.004 file - promoters50/1030940
aaaaaagaaa

SEQ ID NO: 66850 - DNA, 10 bp, Unknown
  misc_feature (1)..( 10): Matrix.004 file - promoters50/1030940
aaagaaatat

SEQ ID NO: 66851 - DNA, 17 bp, Unknown
  misc_feature (1)..( 17): Matrix.004 file - promoters50/1030940
ctaaattttatttgatc

SEQ ID NO: 66852 - DNA, 9 bp, Unknown
  misc_feature (1)..( 9): Matrix.004 file - promoters50/1030956
aaactttta

SEQ ID NO: 66853 - DNA, 9 bp, Unknown
  misc_feature (1)..( 9): Matrix.004 file - promoters50/1030956
ttttttact

SEQ ID NO: 66854 - DNA, 9 bp, Unknown
  misc_feature (1)..( 9): Matrix.004 file - promoters50/1030956
aaatcaaat

SEQ ID NO: 66855 - DNA, 12 bp, Unknown
  misc_feature (1)..( 12): Matrix.004 file - promoters50/1030956
aattatgacaat

SEQ ID NO: 66856 - DNA, 12 bp, Unknown
  misc_feature (1)..( 12): Matrix.004 file - promoters50/1030956
ccaactaaggca

SEQ ID NO: 66857 - DNA, 7 bp, Unknown
  misc_feature (1)..( 7): Matrix.004 file - promoters50/1030956
aataaaa

SEQ ID NO: 66858 - DNA, 7 bp, Unknown
  misc_feature (1)..( 7): Matrix.004 file - promoters50/1030956
aatataa

SEQ ID NO: 66859 - DNA, 8 bp, Unknown
  misc_feature (1)..( 8): Matrix.004 file - promoters50/1031035
aaaacaaa

SEQ ID NO: 66860 - DNA, 10 bp, Unknown
  misc_feature (1)..( 10): Matrix.004 file - promoters50/1031035
acaaacaaaa

SEQ ID NO: 66861 - DNA, 8 bp, Unknown
  misc_feature (1)..( 8): Matrix.004 file - promoters50/1031035
ttttgatt

SEQ ID NO: 66862 - DNA, 7 bp, Unknown
  misc_feature (1)..( 7): Matrix.004 file - promoters50/1031045
acaaaaa

SEQ ID NO: 66863 - DNA, 9 bp, Unknown
  misc_feature (1)..( 9): Matrix.004 file - promoters50/1031045
acatttaaa

SEQ ID NO: 66864 - DNA, 8 bp, Unknown
  misc_feature (1)..( 8): Matrix.004 file - promoters50/1031048
ttccaaaa

SEQ ID NO: 66865 - DNA, 9 bp, Unknown
  misc_feature (1)..( 9): Matrix.004 file - promoters50/1031052
aaaattaaa

SEQ ID NO: 66866 - DNA, 10 bp, Unknown
  misc_feature (1)..( 10): Matrix.004 file - promoters50/1031052
ttgataaaaa

SEQ ID NO: 66867 - DNA, 16 bp, Unknown
  misc_feature (1)..( 16): Matrix.004 file - promoters50/1031070
catcttctaaaattca

SEQ ID NO: 66868 - DNA, 9 bp, Unknown
  misc_feature (1)..( 9): Matrix.004 file - promoters50/1031070
ttgatttgt

SEQ ID NO: 66869 - DNA, 11 bp, Unknown
  misc_feature (1)..( 11): Matrix.004 file - promoters50/1031070
tttaaagatat

SEQ ID NO: 66870 - DNA, 8 bp, Unknown
  misc_feature (1)..( 8): Matrix.004 file - promoters50/1031074
gtttttct

SEQ ID NO: 66871 - DNA, 7 bp, Unknown
  misc_feature (1)..( 7): Matrix.004 file - promoters50/1031084
taataaa

SEQ ID NO: 66872 - DNA, 9 bp, Unknown
  misc_feature (1)..( 9): Matrix.004 file - promoters50/1031084
tagagaatg

SEQ ID NO: 66873 - DNA, 8 bp, Unknown
  misc_feature (1)..( 8): Matrix.004 file - promoters50/1031084
taataagt

SEQ ID NO: 66874 - DNA, 12 bp, Unknown
  misc_feature (1)..( 12): Matrix.004 file - promoters50/1031084
aaaatagaaaaa

SEQ ID NO: 66875 - DNA, 7 bp, Unknown
  misc_feature (1)..( 7): Matrix.004 file - promoters50/1031084
atcaaaa

SEQ ID NO: 66876 - DNA, 7 bp, Unknown
  misc_feature (1)..( 7): Matrix.004 file - promoters50/1031084
tcaaaag

SEQ ID NO: 66877 - DNA, 7 bp, Unknown
  misc_feature (1)..( 7): Matrix.004 file - promoters50/1031084
attaaaa

SEQ ID NO: 66878 - DNA, 7 bp, Unknown
  misc_feature (1)..( 7): Matrix.004 file - promoters50/1031084
taaacca

SEQ ID NO: 66879 - DNA, 9 bp, Unknown
  misc_feature (1)..( 9): Matrix.004 file - promoters50/1031103
acaagcagt

SEQ ID NO: 66880 - DNA, 12 bp, Unknown
  misc_feature (1)..( 12): Matrix.004 file - promoters50/1031198
tgtgttatttca

SEQ ID NO: 66881 - DNA, 8 bp, Unknown
  misc_feature (1)..( 8): Matrix.004 file - promoters50/1031198
ttactaaa

SEQ ID NO: 66882 - DNA, 11 bp, Unknown
  misc_feature (1)..( 11): Matrix.004 file - promoters50/1031198
tcaaatgaaat

SEQ ID NO: 66883 - DNA, 7 bp, Unknown
  misc_feature (1)..( 7): Matrix.004 file - promoters50/1031198
aatttgt

SEQ ID NO: 66884 - DNA, 9 bp, Unknown
  misc_feature (1)..( 9): Matrix.004 file - promoters50/1031198
tttgaatat

SEQ ID NO: 66885 - DNA, 14 bp, Unknown
  misc_feature (1)..( 14): Matrix.004 file - promoters50/1031198
ataagttattaatc

SEQ ID NO: 66886 - DNA, 11 bp, Unknown
  misc_feature (1)..( 11): Matrix.004 file - promoters50/1031198
agttattaaac

SEQ ID NO: 66887 - DNA, 8 bp, Unknown
  misc_feature (1)..( 8): Matrix.004 file - promoters50/1031198
taagatta

SEQ ID NO: 66888 - DNA, 9 bp, Unknown
  misc_feature (1)..( 9): Matrix.004 file - promoters50/1031198
ctaacaaga

SEQ ID NO: 66889 - DNA, 8 bp, Unknown
  misc_feature (1)..( 8): Matrix.004 file - promoters50/1031198
aaaagttt

SEQ ID NO: 66890 - DNA, 10 bp, Unknown
  misc_feature (1)..( 10): Matrix.004 file - promoters50/1031198
agttattcat

SEQ ID NO: 66891 - DNA, 11 bp, Unknown
  misc_feature (1)..( 11): Matrix.004 file - promoters50/1031198
aaaacttcatc

SEQ ID NO: 66892 - DNA, 8 bp, Unknown
  misc_feature (1)..( 8): Matrix.004 file - promoters50/1031208
attttttt

SEQ ID NO: 66893 - DNA, 7 bp, Unknown
  misc_feature (1)..( 7): Matrix.004 file - promoters50/1031208
ttttgtt

SEQ ID NO: 66894 - DNA, 7 bp, Unknown
  misc_feature (1)..( 7): Matrix.004 file - promoters50/1031208
ttatttg

SEQ ID NO: 66895 - DNA, 10 bp, Unknown
  misc_feature (1)..( 10): Matrix.004 file - promoters50/1031208
ttattctcta

SEQ ID NO: 66896 - DNA, 11 bp, Unknown
  misc_feature (1)..( 11): Matrix.004 file - promoters50/1031208
aaaagtaaaaa

SEQ ID NO: 66897 - DNA, 8 bp, Unknown
  misc_feature (1)..( 8): Matrix.004 file - promoters50/1031208
aatttttt

SEQ ID NO: 66898 - DNA, 10 bp, Unknown
  misc_feature (1)..( 10): Matrix.004 file - promoters50/1031225
tcaattaaaa

SEQ ID NO: 66899 - DNA, 7 bp, Unknown
  misc_feature (1)..( 7): Matrix.004 file - promoters50/1031225
ttttgat

SEQ ID NO: 66900 - DNA, 10 bp, Unknown
  misc_feature (1)..( 10): Matrix.004 file - promoters50/1031267
gattatctac

SEQ ID NO: 66901 - DNA, 9 bp, Unknown
  misc_feature (1)..( 9): Matrix.004 file - promoters50/1031267
tttactttt

SEQ ID NO: 66902 - DNA, 7 bp, Unknown
  misc_feature (1)..( 7): Matrix.004 file - promoters50/1031267
gtttcat

SEQ ID NO: 66903 - DNA, 12 bp, Unknown
  misc_feature (1)..( 12): Matrix.004 file - promoters50/1031267
aaaaattttaat

SEQ ID NO: 66904 - DNA, 13 bp, Unknown
  misc_feature (1)..( 13): Matrix.004 file - promoters50/1031267
ttaaacaaaagaa

SEQ ID NO: 66905 - DNA, 14 bp, Unknown
  misc_feature (1)..( 14): Matrix.004 file - promoters50/1031267
tataacaaaaaaat

SEQ ID NO: 66906 - DNA, 15 bp, Unknown
  misc_feature (1)..( 15): Matrix.004 file - promoters50/1031267
cacaaattttatttt

SEQ ID NO: 66907 - DNA, 14 bp, Unknown
  misc_feature (1)..( 14): Matrix.004 file - promoters50/1031267
caaacttttacttt

SEQ ID NO: 66908 - DNA, 11 bp, Unknown
  misc_feature (1)..( 11): Matrix.004 file - promoters50/1031299
aaacttttatt

SEQ ID NO: 66909 - DNA, 7 bp, Unknown
  misc_feature (1)..( 7): Matrix.004 file - promoters50/1031299
taaacat

SEQ ID NO: 66910 - DNA, 16 bp, Unknown
  misc_feature (1)..( 16): Matrix.004 file - promoters50/1031299
ttaatttaactgataa

SEQ ID NO: 66911 - DNA, 8 bp, Unknown
  misc_feature (1)..( 8): Matrix.004 file - promoters50/1031299
agatttta

SEQ ID NO: 66912 - DNA, 8 bp, Unknown
  misc_feature (1)..( 8): Matrix.004 file - promoters50/1031299
aaatatat

SEQ ID NO: 66913 - DNA, 10 bp, Unknown
  misc_feature (1)..( 10): Matrix.004 file - promoters50/1031299
acaattttta

SEQ ID NO: 66914 - DNA, 8 bp, Unknown
  misc_feature (1)..( 8): Matrix.004 file - promoters50/1031299
tttaaaat

SEQ ID NO: 66915 - DNA, 7 bp, Unknown
  misc_feature (1)..( 7): Matrix.004 file - promoters50/1031299
aatgtta

SEQ ID NO: 66916 - DNA, 14 bp, Unknown
  misc_feature (1)..( 14): Matrix.004 file - promoters50/1031299
taatttaaaataaa

SEQ ID NO: 66917 - DNA, 8 bp, Unknown
  misc_feature (1)..( 8): Matrix.004 file - promoters50/1031332
tataaata

SEQ ID NO: 66918 - DNA, 8 bp, Unknown
  misc_feature (1)..( 8): Matrix.004 file - promoters50/1031332
acatatgt

SEQ ID NO: 66919 - DNA, 7 bp, Unknown
  misc_feature (1)..( 7): Matrix.004 file - promoters50/1031332
cattttc

SEQ ID NO: 66920 - DNA, 8 bp, Unknown
  misc_feature (1)..( 8): Matrix.004 file - promoters50/1031336
aagtataa

SEQ ID NO: 66921 - DNA, 7 bp, Unknown
  misc_feature (1)..( 7): Matrix.004 file - promoters50/1031336
ttcttct

SEQ ID NO: 66922 - DNA, 10 bp, Unknown
  misc_feature (1)..( 10): Matrix.004 file - promoters50/1031336
aaaacaaaaa

SEQ ID NO: 66923 - DNA, 10 bp, Unknown
  misc_feature (1)..( 10): Matrix.004 file - promoters50/1031344
attaaaggaa

SEQ ID NO: 66924 - DNA, 9 bp, Unknown
  misc_feature (1)..( 9): Matrix.004 file - promoters50/1031344
taattatta

SEQ ID NO: 66925 - DNA, 7 bp, Unknown
  misc_feature (1)..( 7): Matrix.004 file - promoters50/1031344
aaaattg

SEQ ID NO: 66926 - DNA, 9 bp, Unknown
  misc_feature (1)..( 9): Matrix.004 file - promoters50/1031344
ctaataaaa

SEQ ID NO: 66927 - DNA, 14 bp, Unknown
  misc_feature (1)..( 14): Matrix.004 file - promoters50/1031344
gtgaaattcatttg

SEQ ID NO: 66928 - DNA, 11 bp, Unknown
  misc_feature (1)..( 11): Matrix.004 file - promoters50/1031344
aaaactattta

SEQ ID NO: 66929 - DNA, 8 bp, Unknown
  misc_feature (1)..( 8): Matrix.004 file - promoters50/1031368
ataaaaag

SEQ ID NO: 66930 - DNA, 10 bp, Unknown
  misc_feature (1)..( 10): Matrix.004 file - promoters50/1031368
ttcgtagaca

SEQ ID NO: 66931 - DNA, 7 bp, Unknown
  misc_feature (1)..( 7): Matrix.004 file - promoters50/1031368
tgactat

SEQ ID NO: 66932 - DNA, 9 bp, Unknown
  misc_feature (1)..( 9): Matrix.004 file - promoters50/1031386
cataaattt

SEQ ID NO: 66933 - DNA, 8 bp, Unknown
  misc_feature (1)..( 8): Matrix.004 file - promoters50/1031390
tatataaa

SEQ ID NO: 66934 - DNA, 15 bp, Unknown
  misc_feature (1)..( 15): Matrix.004 file - promoters50/1031390
tcaagaaaatttttt

SEQ ID NO: 66935 - DNA, 11 bp, Unknown
  misc_feature (1)..( 11): Matrix.004 file - promoters50/1031390
taagttttcaa

SEQ ID NO: 66936 - DNA, 14 bp, Unknown
  misc_feature (1)..( 14): Matrix.004 file - promoters50/1031429
taaaaacatttgaa

SEQ ID NO: 66937 - DNA, 13 bp, Unknown
  misc_feature (1)..( 13): Matrix.004 file - promoters50/1031429
ctttcgaccaata

SEQ ID NO: 66938 - DNA, 8 bp, Unknown
  misc_feature (1)..( 8): Matrix.004 file - promoters50/1031429
aaaaaaaa

SEQ ID NO: 66939 - DNA, 9 bp, Unknown
  misc_feature (1)..( 9): Matrix.004 file - promoters50/1031429
aatacaaat

SEQ ID NO: 66940 - DNA, 8 bp, Unknown
  misc_feature (1)..( 8): Matrix.004 file - promoters50/1031429
taatgatt

SEQ ID NO: 66941 - DNA, 10 bp, Unknown
  misc_feature (1)..( 10): Matrix.004 file - promoters50/1031429
atcattctaa

SEQ ID NO: 66942 - DNA, 10 bp, Unknown
  misc_feature (1)..( 10): Matrix.004 file - promoters50/1031484
caatctttta

SEQ ID NO: 66943 - DNA, 8 bp, Unknown
  misc_feature (1)..( 8): Matrix.004 file - promoters50/1031484
aaaataaa

SEQ ID NO: 66944 - DNA, 6 bp, Unknown
  misc_feature (1)..( 6): Matrix.004 file - promoters50/1031484
aataaa

SEQ ID NO: 66945 - DNA, 7 bp, Unknown
  misc_feature (1)..( 7): Matrix.004 file - promoters50/1031484
aataaaa

SEQ ID NO: 66946 - DNA, 7 bp, Unknown
  misc_feature (1)..( 7): Matrix.004 file - promoters50/1031488
aaagaaa

SEQ ID NO: 66947 - DNA, 12 bp, Unknown
  misc_feature (1)..( 12): Matrix.004 file - promoters50/1031488
gataaaaataca

SEQ ID NO: 66948 - DNA, 9 bp, Unknown
  misc_feature (1)..( 9): Matrix.004 file - promoters50/1031563
caacaaaca

SEQ ID NO: 66949 - DNA, 7 bp, Unknown
  misc_feature (1)..( 7): Matrix.004 file - promoters50/1031563
caaaagt

SEQ ID NO: 66950 - DNA, 8 bp, Unknown
  misc_feature (1)..( 8): Matrix.004 file - promoters50/1031563
acttaaac

SEQ ID NO: 66951 - DNA, 8 bp, Unknown
  misc_feature (1)..( 8): Matrix.004 file - promoters50/1031576
ctaaagag

SEQ ID NO: 66952 - DNA, 7 bp, Unknown
  misc_feature (1)..( 7): Matrix.004 file - promoters50/1031576
aaaaata

SEQ ID NO: 66953 - DNA, 9 bp, Unknown
  misc_feature (1)..( 9): Matrix.004 file - promoters50/1031576
ataaactca

SEQ ID NO: 66954 - DNA, 9 bp, Unknown
  misc_feature (1)..( 9): Matrix.004 file - promoters50/1031576
acaataaac

SEQ ID NO: 66955 - DNA, 8 bp, Unknown
  misc_feature (1)..( 8): Matrix.004 file - promoters50/1031576
acaataaa

SEQ ID NO: 66956 - DNA, 10 bp, Unknown
  misc_feature (1)..( 10): Matrix.004 file - promoters50/1031576
catctctaag

SEQ ID NO: 66957 - DNA, 8 bp, Unknown
  misc_feature (1)..( 8): Matrix.004 file - promoters50/1031638
acaacaaa

SEQ ID NO: 66958 - DNA, 9 bp, Unknown
  misc_feature (1)..( 9): Matrix.004 file - promoters50/1031638
aatcaaaac

SEQ ID NO: 66959 - DNA, 7 bp, Unknown
  misc_feature (1)..( 7): Matrix.004 file - promoters50/1031638
aaaacaa

SEQ ID NO: 66960 - DNA, 8 bp, Unknown
  misc_feature (1)..( 8): Matrix.004 file - promoters50/1031638
aaaacaaa

SEQ ID NO: 66961 - DNA, 9 bp, Unknown
  misc_feature (1)..( 9): Matrix.004 file - promoters50/1031638
ttttttaaa

SEQ ID NO: 66962 - DNA, 7 bp, Unknown
  misc_feature (1)..( 7): Matrix.004 file - promoters50/1031638
gtaaaat

SEQ ID NO: 66963 - DNA, 8 bp, Unknown
  misc_feature (1)..( 8): Matrix.004 file - promoters50/1031638
aatatata

SEQ ID NO: 66964 - DNA, 9 bp, Unknown
  misc_feature (1)..( 9): Matrix.004 file - promoters50/1031638
ttaaaaata

SEQ ID NO: 66965 - DNA, 9 bp, Unknown
  misc_feature (1)..( 9): Matrix.004 file - promoters50/1031638
ttaaaaata

SEQ ID NO: 66966 - DNA, 8 bp, Unknown
  misc_feature (1)..( 8): Matrix.004 file - promoters50/1031638
aatatttt

SEQ ID NO: 66967 - DNA, 6 bp, Unknown
  misc_feature (1)..( 6): Matrix.004 file - promoters50/1031638
ttcaaa

SEQ ID NO: 66968 - DNA, 7 bp, Unknown
  misc_feature (1)..( 7): Matrix.004 file - promoters50/1031638
tccaaaa

SEQ ID NO: 66969 - DNA, 10 bp, Unknown
  misc_feature (1)..( 10): Matrix.004 file - promoters50/1031638
attaatgttc

SEQ ID NO: 66970 - DNA, 7 bp, Unknown
  misc_feature (1)..( 7): Matrix.004 file - promoters50/1031638
cccacga

SEQ ID NO: 66971 - DNA, 8 bp, Unknown
  misc_feature (1)..( 8): Matrix.004 file - promoters50/1031638
aaattata

SEQ ID NO: 66972 - DNA, 10 bp, Unknown
  misc_feature (1)..( 10): Matrix.004 file - promoters50/1031638
aaatatttaa

SEQ ID NO: 66973 - DNA, 9 bp, Unknown
  misc_feature (1)..( 9): Matrix.004 file - promoters50/1031642
attttgtaa

SEQ ID NO: 66974 - DNA, 9 bp, Unknown
  misc_feature (1)..( 9): Matrix.004 file - promoters50/1031642
gtcaaaaaa

SEQ ID NO: 66975 - DNA, 12 bp, Unknown
  misc_feature (1)..( 12): Matrix.004 file - promoters50/1031646
gttcggctaaaa

SEQ ID NO: 66976 - DNA, 9 bp, Unknown
  misc_feature (1)..( 9): Matrix.004 file - promoters50/1031646
acaaaatta

SEQ ID NO: 66977 - DNA, 8 bp, Unknown
  misc_feature (1)..( 8): Matrix.004 file - promoters50/1031646
aaaaccca

SEQ ID NO: 66978 - DNA, 9 bp, Unknown
  misc_feature (1)..( 9): Matrix.004 file - promoters50/1031706
aattgataa

SEQ ID NO: 66979 - DNA, 12 bp, Unknown
  misc_feature (1)..( 12): Matrix.004 file - promoters50/1031706
attttaatattt

SEQ ID NO: 66980 - DNA, 14 bp, Unknown
  misc_feature (1)..( 14): Matrix.004 file - promoters50/1031706
tcctatatatataa

SEQ ID NO: 66981 - DNA, 8 bp, Unknown
  misc_feature (1)..( 8): Matrix.004 file - promoters50/1031706
tttaattt

SEQ ID NO: 66982 - DNA, 10 bp, Unknown
  misc_feature (1)..( 10): Matrix.004 file - promoters50/1031706
taagaaactt

SEQ ID NO: 66983 - DNA, 5 bp, Unknown
  misc_feature (1)..( 5): Matrix.004 file - promoters50/1031706
tattt

SEQ ID NO: 66984 - DNA, 12 bp, Unknown
  misc_feature (1)..( 12): Matrix.004 file - promoters50/1031706
aaagaacaaaac

SEQ ID NO: 66985 - DNA, 10 bp, Unknown
  misc_feature (1)..( 10): Matrix.004 file - promoters50/1031752
caaaacaaac

SEQ ID NO: 66986 - DNA, 12 bp, Unknown
  misc_feature (1)..( 12): Matrix.004 file - promoters50/1031752
tttacttaataa

SEQ ID NO: 66987 - DNA, 8 bp, Unknown
  misc_feature (1)..( 8): Matrix.004 file - promoters50/1031752
ttcaagag

SEQ ID NO: 66988 - DNA, 9 bp, Unknown
  misc_feature (1)..( 9): Matrix.004 file - promoters50/1031777
ttttatctt

SEQ ID NO: 66989 - DNA, 9 bp, Unknown
  misc_feature (1)..( 9): Matrix.004 file - promoters50/1031781
aagaaaata

SEQ ID NO: 66990 - DNA, 8 bp, Unknown
  misc_feature (1)..( 8): Matrix.004 file - promoters50/1031781
atatttat

SEQ ID NO: 66991 - DNA, 7 bp, Unknown
  misc_feature (1)..( 7): Matrix.004 file - promoters50/1031781
atttatt

SEQ ID NO: 66992 - DNA, 7 bp, Unknown
  misc_feature (1)..( 7): Matrix.004 file - promoters50/1031781
gaaagaa

SEQ ID NO: 66993 - DNA, 8 bp, Unknown
  misc_feature (1)..( 8): Matrix.004 file - promoters50/1031781
tagaatgc

SEQ ID NO: 66994 - DNA, 8 bp, Unknown
  misc_feature (1)..( 8): Matrix.004 file - promoters50/1031799
attaaaaa

SEQ ID NO: 66995 - DNA, 11 bp, Unknown
  misc_feature (1)..( 11): Matrix.004 file - promoters50/1031799
ttttttagtta

SEQ ID NO: 66996 - DNA, 7 bp, Unknown
  misc_feature (1)..( 7): Matrix.004 file - promoters50/1031806
tttcttt

SEQ ID NO: 66997 - DNA, 10 bp, Unknown
  misc_feature (1)..( 10): Matrix.004 file - promoters50/1031806
acttttgttt

SEQ ID NO: 66998 - DNA, 7 bp, Unknown
  misc_feature (1)..( 7): Matrix.004 file - promoters50/1031806
attagaa

SEQ ID NO: 66999 - DNA, 13 bp, Unknown
  misc_feature (1)..( 13): Matrix.004 file - promoters50/1031806
tgaatttttctga

SEQ ID NO: 67000 - DNA, 16 bp, Unknown
  misc_feature (1)..( 16): Matrix.004 file - promoters50/1032149
gaagaaataacagtaa

SEQ ID NO: 67001 - DNA, 7 bp, Unknown
  misc_feature (1)..( 7): Matrix.004 file - promoters50/1032149
tatagtt

SEQ ID NO: 67002 - DNA, 12 bp, Unknown
  misc_feature (1)..( 12): Matrix.004 file - promoters50/1032149
agtgattaatca

SEQ ID NO: 67003 - DNA, 11 bp, Unknown
  misc_feature (1)..( 11): Matrix.004 file - promoters50/1032149
agttattaatc

SEQ ID NO: 67004 - DNA, 7 bp, Unknown
  misc_feature (1)..( 7): Matrix.004 file - promoters50/1032149
attttac

SEQ ID NO: 67005 - DNA, 10 bp, Unknown
  misc_feature (1)..( 10): Matrix.004 file - promoters50/1032149
aacaattaaa

SEQ ID NO: 67006 - DNA, 9 bp, Unknown
  misc_feature (1)..( 9): Matrix.004 file - promoters50/1032149
tatgaaaaa

SEQ ID NO: 67007 - DNA, 8 bp, Unknown
  misc_feature (1)..( 8): Matrix.004 file - promoters50/1032149
atatatgt

SEQ ID NO: 67008 - DNA, 13 bp, Unknown
  misc_feature (1)..( 13): Matrix.004 file - promoters50/1032149
aaattatttttaa

SEQ ID NO: 67009 - DNA, 8 bp, Unknown
  misc_feature (1)..( 8): Matrix.004 file - promoters50/1032149
aaatattt

SEQ ID NO: 67010 - DNA, 9 bp, Unknown
  misc_feature (1)..( 9): Matrix.004 file - promoters50/1032149
tttattaaa

SEQ ID NO: 67011 - DNA, 12 bp, Unknown
  misc_feature (1)..( 12): Matrix.004 file - promoters50/1032149
aaaactttaatt

SEQ ID NO: 67012 - DNA, 8 bp, Unknown
  misc_feature (1)..( 8): Matrix.004 file - promoters50/1032160
ttcttttt

SEQ ID NO: 67013 - DNA, 12 bp, Unknown
  misc_feature (1)..( 12): Matrix.004 file - promoters50/1032160
aattttacgatt

SEQ ID NO: 67014 - DNA, 14 bp, Unknown
  misc_feature (1)..( 14): Matrix.004 file - promoters50/1032160
caaagagacataac

SEQ ID NO: 67015 - DNA, 12 bp, Unknown
  misc_feature (1)..( 12): Matrix.004 file - promoters50/1032266
tattaaaaaaat

SEQ ID NO: 67016 - DNA, 12 bp, Unknown
  misc_feature (1)..( 12): Matrix.004 file - promoters50/1032266
agtgtttggtgt

SEQ ID NO: 67017 - DNA, 10 bp, Unknown
  misc_feature (1)..( 10): Matrix.004 file - promoters50/1032274
atattttcaa

SEQ ID NO: 67018 - DNA, 11 bp, Unknown
  misc_feature (1)..( 11): Matrix.004 file - promoters50/1032274
ttatatgtaat

SEQ ID NO: 67019 - DNA, 10 bp, Unknown
  misc_feature (1)..( 10): Matrix.004 file - promoters50/1032291
taatttgata

SEQ ID NO: 67020 - DNA, 7 bp, Unknown
  misc_feature (1)..( 7): Matrix.004 file - promoters50/1032313
atttgtt

SEQ ID NO: 67021 - DNA, 13 bp, Unknown
  misc_feature (1)..( 13): Matrix.004 file - promoters50/1032313
taaaaaagtgtta

SEQ ID NO: 67022 - DNA, 15 bp, Unknown
  misc_feature (1)..( 15): Matrix.004 file - promoters50/1032313
caacttcaaaaaaaa

SEQ ID NO: 67023 - DNA, 14 bp, Unknown
  misc_feature (1)..( 14): Matrix.004 file - promoters50/1032316
gtcttccaaaaaat

SEQ ID NO: 67024 - DNA, 13 bp, Unknown
  misc_feature (1)..( 13): Matrix.004 file - promoters50/1032381
gttctttaatttg

SEQ ID NO: 67025 - DNA, 8 bp, Unknown
  misc_feature (1)..( 8): Matrix.004 file - promoters50/1032381
tttacttt

SEQ ID NO: 67026 - DNA, 10 bp, Unknown
  misc_feature (1)..( 10): Matrix.004 file - promoters50/1032381
aaattaaaaa

SEQ ID NO: 67027 - DNA, 14 bp, Unknown
  misc_feature (1)..( 14): Matrix.004 file - promoters50/1032381
actcactataaaaa

SEQ ID NO: 67028 - DNA, 11 bp, Unknown
  misc_feature (1)..( 11): Matrix.004 file - promoters50/1032381
tttttttactt

SEQ ID NO: 67029 - DNA, 10 bp, Unknown
  misc_feature (1)..( 10): Matrix.004 file - promoters50/1032381
caaaaagtat

SEQ ID NO: 67030 - DNA, 8 bp, Unknown
  misc_feature (1)..( 8): Matrix.004 file - promoters50/1032381
tgtttttg

SEQ ID NO: 67031 - DNA, 11 bp, Unknown
  misc_feature (1)..( 11): Matrix.004 file - promoters50/1032389
tatgtaaatta

SEQ ID NO: 67032 - DNA, 11 bp, Unknown
  misc_feature (1)..( 11): Matrix.004 file - promoters50/1032389
ttttgtttcat

SEQ ID NO: 67033 - DNA, 10 bp, Unknown
  misc_feature (1)..( 10): Matrix.004 file - promoters50/1032400
aattttgttt

SEQ ID NO: 67034 - DNA, 8 bp, Unknown
  misc_feature (1)..( 8): Matrix.004 file - promoters50/1032436
aattgatt

SEQ ID NO: 67035 - DNA, 10 bp, Unknown
  misc_feature (1)..( 10): Matrix.004 file - promoters50/1032436
aatactcaaa

SEQ ID NO: 67036 - DNA, 7 bp, Unknown
  misc_feature (1)..( 7): Matrix.004 file - promoters50/1032436
attattt

SEQ ID NO: 67037 - DNA, 14 bp, Unknown
  misc_feature (1)..( 14): Matrix.004 file - promoters50/1032436
tcaaatgaagaaaa

SEQ ID NO: 67038 - DNA, 9 bp, Unknown
  misc_feature (1)..( 9): Matrix.004 file - promoters50/1032436
aataatgtt

SEQ ID NO: 67039 - DNA, 8 bp, Unknown
  misc_feature (1)..( 8): Matrix.004 file - promoters50/1032498
acttttca

SEQ ID NO: 67040 - DNA, 9 bp, Unknown
  misc_feature (1)..( 9): Matrix.004 file - promoters50/1032498
aatataaaa

SEQ ID NO: 67041 - DNA, 10 bp, Unknown
  misc_feature (1)..( 10): Matrix.004 file - promoters50/1032614
gagttggata

SEQ ID NO: 67042 - DNA, 10 bp, Unknown
  misc_feature (1)..( 10): Matrix.004 file - promoters50/1032668
tcttgaagct

SEQ ID NO: 67043 - DNA, 8 bp, Unknown
  misc_feature (1)..( 8): Matrix.004 file - promoters50/1032668
ttttttat

SEQ ID NO: 67044 - DNA, 15 bp, Unknown
  misc_feature (1)..( 15): Matrix.004 file - promoters50/1032676
agaaaatttagacca

SEQ ID NO: 67045 - DNA, 10 bp, Unknown
  misc_feature (1)..( 10): Matrix.004 file - promoters50/1032676
agatattaat

SEQ ID NO: 67046 - DNA, 7 bp, Unknown
  misc_feature (1)..( 7): Matrix.004 file - promoters50/1032676
aaaaaaa

SEQ ID NO: 67047 - DNA, 13 bp, Unknown
  misc_feature (1)..( 13): Matrix.004 file - promoters50/1032678
ttattaataaaag

SEQ ID NO: 67048 - DNA, 9 bp, Unknown
  misc_feature (1)..( 9): Matrix.004 file - promoters50/1032698
gaaaaacct

SEQ ID NO: 67049 - DNA, 9 bp, Unknown
  misc_feature (1)..( 9): Matrix.004 file - promoters50/1032698
tattttttt

SEQ ID NO: 67050 - DNA, 10 bp, Unknown
  misc_feature (1)..( 10): Matrix.004 file - promoters50/1032698
aaaaatagat

SEQ ID NO: 67051 - DNA, 11 bp, Unknown
  misc_feature (1)..( 11): Matrix.004 file - promoters50/1032698
ttttgaactta

SEQ ID NO: 67052 - DNA, 14 bp, Unknown
  misc_feature (1)..( 14): Matrix.004 file - promoters50/1032698
aatttaattttatg

SEQ ID NO: 67053 - DNA, 11 bp, Unknown
  misc_feature (1)..( 11): Matrix.004 file - promoters50/1032698
aatcaaaaaaa

SEQ ID NO: 67054 - DNA, 8 bp, Unknown
  misc_feature (1)..( 8): Matrix.004 file - promoters50/1032698
aatacaaa

SEQ ID NO: 67055 - DNA, 12 bp, Unknown
  misc_feature (1)..( 12): Matrix.004 file - promoters50/1032698
aataaaaaatag

SEQ ID NO: 67056 - DNA, 11 bp, Unknown
  misc_feature (1)..( 11): Matrix.004 file - promoters50/1032713
ttataaaaata

SEQ ID NO: 67057 - DNA, 9 bp, Unknown
  misc_feature (1)..( 9): Matrix.004 file - promoters50/1032713
aaaagccaa

SEQ ID NO: 67058 - DNA, 7 bp, Unknown
  misc_feature (1)..( 7): Matrix.004 file - promoters50/1032713
caaaata

SEQ ID NO: 67059 - DNA, 10 bp, Unknown
  misc_feature (1)..( 10): Matrix.004 file - promoters50/1032713
attacttact

SEQ ID NO: 67060 - DNA, 9 bp, Unknown
  misc_feature (1)..( 9): Matrix.004 file - promoters50/1032730
tttgaaaca

SEQ ID NO: 67061 - DNA, 10 bp, Unknown
  misc_feature (1)..( 10): Matrix.004 file - promoters50/1032730
gataatttca

SEQ ID NO: 67062 - DNA, 7 bp, Unknown
  misc_feature (1)..( 7): Matrix.004 file - promoters50/1032752
atttaga

SEQ ID NO: 67063 - DNA, 9 bp, Unknown
  misc_feature (1)..( 9): Matrix.004 file - promoters50/1032752
aatttataa

SEQ ID NO: 67064 - DNA, 10 bp, Unknown
  misc_feature (1)..( 10): Matrix.004 file - promoters50/1032752
catgtataag

SEQ ID NO: 67065 - DNA, 13 bp, Unknown
  misc_feature (1)..( 13): Matrix.004 file - promoters50/1032756
aaaaaatatctat

SEQ ID NO: 67066 - DNA, 9 bp, Unknown
  misc_feature (1)..( 9): Matrix.004 file - promoters50/1032756
tttactttt

SEQ ID NO: 67067 - DNA, 5 bp, Unknown
  misc_feature (1)..( 5): Matrix.004 file - promoters50/1032756
tcaat

SEQ ID NO: 67068 - DNA, 10 bp, Unknown
  misc_feature (1)..( 10): Matrix.004 file - promoters50/1032756
tcgataatta

SEQ ID NO: 67069 - DNA, 9 bp, Unknown
  misc_feature (1)..( 9): Matrix.004 file - promoters50/1032756
atctaatat

SEQ ID NO: 67070 - DNA, 10 bp, Unknown
  misc_feature (1)..( 10): Matrix.004 file - promoters50/1032756
tttgaaactt

SEQ ID NO: 67071 - DNA, 6 bp, Unknown
  misc_feature (1)..( 6): Matrix.004 file - promoters50/1032788
ttttat

SEQ ID NO: 67072 - DNA, 8 bp, Unknown
  misc_feature (1)..( 8): Matrix.004 file - promoters50/1032788
ttataaaa

SEQ ID NO: 67073 - DNA, 10 bp, Unknown
  misc_feature (1)..( 10): Matrix.004 file - promoters50/1032788
tacaaaaaaa

SEQ ID NO: 67074 - DNA, 9 bp, Unknown
  misc_feature (1)..( 9): Matrix.004 file - promoters50/1032788
gaaaaaata

SEQ ID NO: 67075 - DNA, 11 bp, Unknown
  misc_feature (1)..( 11): Matrix.004 file - promoters50/1032788
acttatttttt

SEQ ID NO: 67076 - DNA, 10 bp, Unknown
  misc_feature (1)..( 10): Matrix.004 file - promoters50/1032788
aaagaaaaat

SEQ ID NO: 67077 - DNA, 10 bp, Unknown
  misc_feature (1)..( 10): Matrix.004 file - promoters50/1032788
attttattta

SEQ ID NO: 67078 - DNA, 12 bp, Unknown
  misc_feature (1)..( 12): Matrix.004 file - promoters50/1032788
taacaattctat

SEQ ID NO: 67079 - DNA, 14 bp, Unknown
  misc_feature (1)..( 14): Matrix.004 file - promoters50/1032788
aacaaatttaatta

SEQ ID NO: 67080 - DNA, 10 bp, Unknown
  misc_feature (1)..( 10): Matrix.004 file - promoters50/1032788
tatatatata

SEQ ID NO: 67081 - DNA, 8 bp, Unknown
  misc_feature (1)..( 8): Matrix.004 file - promoters50/1032788
taataata

SEQ ID NO: 67082 - DNA, 9 bp, Unknown
  misc_feature (1)..( 9): Matrix.004 file - promoters50/1032815
aaaataaat

SEQ ID NO: 67083 - DNA, 10 bp, Unknown
  misc_feature (1)..( 10): Matrix.004 file - promoters50/1032844
gaagtttcta

SEQ ID NO: 67084 - DNA, 13 bp, Unknown
  misc_feature (1)..( 13): Matrix.004 file - promoters50/1032884
attataatttcat

SEQ ID NO: 67085 - DNA, 9 bp, Unknown
  misc_feature (1)..( 9): Matrix.004 file - promoters50/1032884
agatgagaa

SEQ ID NO: 67086 - DNA, 6 bp, Unknown
  misc_feature (1)..( 6): Matrix.004 file - promoters50/1032884
ataatt

SEQ ID NO: 67087 - DNA, 8 bp, Unknown
  misc_feature (1)..( 8): Matrix.004 file - promoters50/1032884
gtattatg

SEQ ID NO: 67088 - DNA, 8 bp, Unknown
  misc_feature (1)..( 8): Matrix.004 file - promoters50/1032884
tgaagaag

SEQ ID NO: 67089 - DNA, 9 bp, Unknown
  misc_feature (1)..( 9): Matrix.004 file - promoters50/1032884
gatctctct

SEQ ID NO: 67090 - DNA, 11 bp, Unknown
  misc_feature (1)..( 11): Matrix.004 file - promoters50/1032884
tacacttttta

SEQ ID NO: 67091 - DNA, 8 bp, Unknown
  misc_feature (1)..( 8): Matrix.004 file - promoters50/1032897
atgtaatt

SEQ ID NO: 67092 - DNA, 8 bp, Unknown
  misc_feature (1)..( 8): Matrix.004 file - promoters50/1032897
gaaaaaag

SEQ ID NO: 67093 - DNA, 10 bp, Unknown
  misc_feature (1)..( 10): Matrix.004 file - promoters50/1032929
ttatttctta

SEQ ID NO: 67094 - DNA, 8 bp, Unknown
  misc_feature (1)..( 8): Matrix.004 file - promoters50/1032940
ataattat

SEQ ID NO: 67095 - DNA, 12 bp, Unknown
  misc_feature (1)..( 12): Matrix.004 file - promoters50/1032940
tttaatgtttga

SEQ ID NO: 67096 - DNA, 8 bp, Unknown
  misc_feature (1)..( 8): Matrix.004 file - promoters50/1032940
caaaattt

SEQ ID NO: 67097 - DNA, 10 bp, Unknown
  misc_feature (1)..( 10): Matrix.004 file - promoters50/1032940
ttcaaaattt

SEQ ID NO: 67098 - DNA, 10 bp, Unknown
  misc_feature (1)..( 10): Matrix.004 file - promoters50/1032996
acacaataaa

SEQ ID NO: 67099 - DNA, 7 bp, Unknown
  misc_feature (1)..( 7): Matrix.004 file - promoters50/1032996
attttaa

SEQ ID NO: 67100 - DNA, 12 bp, Unknown
  misc_feature (1)..( 12): Matrix.004 file - promoters50/1032996
tatatcatattt

SEQ ID NO: 67101 - DNA, 8 bp, Unknown
  misc_feature (1)..( 8): Matrix.004 file - promoters50/1033013
tcatattt

SEQ ID NO: 67102 - DNA, 10 bp, Unknown
  misc_feature (1)..( 10): Matrix.004 file - promoters50/1033013
agaaaatcga

SEQ ID NO: 67103 - DNA, 11 bp, Unknown
  misc_feature (1)..( 11): Matrix.004 file - promoters50/1033176
tttgagaaaag

SEQ ID NO: 67104 - DNA, 6 bp, Unknown
  misc_feature (1)..( 6): Matrix.004 file - promoters50/1033176
aacaag

SEQ ID NO: 67105 - DNA, 6 bp, Unknown
  misc_feature (1)..( 6): Matrix.004 file - promoters50/1033176
ttaaaa

SEQ ID NO: 67106 - DNA, 8 bp, Unknown
  misc_feature (1)..( 8): Matrix.004 file - promoters50/1033176
taaattta

SEQ ID NO: 67107 - DNA, 17 bp, Unknown
  misc_feature (1)..( 17): Matrix.004 file - promoters50/1033176
aaatcatctcaatgcca

SEQ ID NO: 67108 - DNA, 7 bp, Unknown
  misc_feature (1)..( 7): Matrix.004 file - promoters50/1033176
tttctca

SEQ ID NO: 67109 - DNA, 7 bp, Unknown
  misc_feature (1)..( 7): Matrix.004 file - promoters50/1033176
cgtttga

SEQ ID NO: 67110 - DNA, 8 bp, Unknown
  misc_feature (1)..( 8): Matrix.004 file - promoters50/1033176
aattaagc

SEQ ID NO: 67111 - DNA, 10 bp, Unknown
  misc_feature (1)..( 10): Matrix.004 file - promoters50/1033184
gattgatgaa

SEQ ID NO: 67112 - DNA, 13 bp, Unknown
  misc_feature (1)..( 13): Matrix.004 file - promoters50/1033184
gaattattttctt

SEQ ID NO: 67113 - DNA, 12 bp, Unknown
  misc_feature (1)..( 12): Matrix.004 file - promoters50/1033184
caaaaaaaatta

SEQ ID NO: 67114 - DNA, 10 bp, Unknown
  misc_feature (1)..( 10): Matrix.004 file - promoters50/1033184
tttgttaaaa

SEQ ID NO: 67115 - DNA, 9 bp, Unknown
  misc_feature (1)..( 9): Matrix.004 file - promoters50/1033194
tttaaattt

SEQ ID NO: 67116 - DNA, 7 bp, Unknown
  misc_feature (1)..( 7): Matrix.004 file - promoters50/1033217
aaaatgt

SEQ ID NO: 67117 - DNA, 9 bp, Unknown
  misc_feature (1)..( 9): Matrix.004 file - promoters50/1033262
tgattattt

SEQ ID NO: 67118 - DNA, 5 bp, Unknown
  misc_feature (1)..( 5): Matrix.004 file - promoters50/1033340
tgatt

SEQ ID NO: 67119 - DNA, 9 bp, Unknown
  misc_feature (1)..( 9): Matrix.004 file - promoters50/1033340
tgatcaaca

SEQ ID NO: 67120 - DNA, 7 bp, Unknown
  misc_feature (1)..( 7): Matrix.004 file - promoters50/1033360
atctttt

SEQ ID NO: 67121 - DNA, 8 bp, Unknown
  misc_feature (1)..( 8): Matrix.004 file - promoters50/1033408
attgattt

SEQ ID NO: 67122 - DNA, 10 bp, Unknown
  misc_feature (1)..( 10): Matrix.004 file - promoters50/1033408
aattgaactt

SEQ ID NO: 67123 - DNA, 8 bp, Unknown
  misc_feature (1)..( 8): Matrix.004 file - promoters50/1033430
tatataaa

SEQ ID NO: 67124 - DNA, 9 bp, Unknown
  misc_feature (1)..( 9): Matrix.004 file - promoters50/1033540
attgaaatc

SEQ ID NO: 67125 - DNA, 7 bp, Unknown
  misc_feature (1)..( 7): Matrix.004 file - promoters50/1033540
ttatttt

SEQ ID NO: 67126 - DNA, 10 bp, Unknown
  misc_feature (1)..( 10): Matrix.004 file - promoters50/1033540
acaaaattat

SEQ ID NO: 67127 - DNA, 7 bp, Unknown
  misc_feature (1)..( 7): Matrix.004 file - promoters50/1033540
cttttcc

SEQ ID NO: 67128 - DNA, 12 bp, Unknown
  misc_feature (1)..( 12): Matrix.004 file - promoters50/1033596
cacaacacctga

SEQ ID NO: 67129 - DNA, 9 bp, Unknown
  misc_feature (1)..( 9): Matrix.004 file - promoters50/1033679
tgaatctgc

SEQ ID NO: 67130 - DNA, 11 bp, Unknown
  misc_feature (1)..( 11): Matrix.004 file - promoters50/1033679
tcttcttgtat

SEQ ID NO: 67131 - DNA, 12 bp, Unknown
  misc_feature (1)..( 12): Matrix.004 file - promoters50/1033716
acataaagtaaa

SEQ ID NO: 67132 - DNA, 10 bp, Unknown
  misc_feature (1)..( 10): Matrix.004 file - promoters50/1033723
aagattctag

SEQ ID NO: 67133 - DNA, 8 bp, Unknown
  misc_feature (1)..( 8): Matrix.004 file - promoters50/1033781
atgaagaa

SEQ ID NO: 67134 - DNA, 8 bp, Unknown
  misc_feature (1)..( 8): Matrix.004 file - promoters50/1033781
ttcttaat

SEQ ID NO: 67135 - DNA, 9 bp, Unknown
  misc_feature (1)..( 9): Matrix.004 file - promoters50/1033781
catgaattg

SEQ ID NO: 67136 - DNA, 7 bp, Unknown
  misc_feature (1)..( 7): Matrix.004 file - promoters50/1033781
aagaaac

SEQ ID NO: 67137 - DNA, 8 bp, Unknown
  misc_feature (1)..( 8): Matrix.004 file - promoters50/1033837
aataaaaa

SEQ ID NO: 67138 - DNA, 11 bp, Unknown
  misc_feature (1)..( 11): Matrix.004 file - promoters50/1033837
ttttattggtt

SEQ ID NO: 67139 - DNA, 9 bp, Unknown
  misc_feature (1)..( 9): Matrix.004 file - promoters50/1033837
aaaaaaaaa

SEQ ID NO: 67140 - DNA, 13 bp, Unknown
  misc_feature (1)..( 13): Matrix.004 file - promoters50/1033849
cataatgggacca

SEQ ID NO: 67141 - DNA, 7 bp, Unknown
  misc_feature (1)..( 7): Matrix.004 file - promoters50/1033865
caaaaag

SEQ ID NO: 67142 - DNA, 11 bp, Unknown
  misc_feature (1)..( 11): Matrix.004 file - promoters50/1033865
tttttacattt

SEQ ID NO: 67143 - DNA, 13 bp, Unknown
  misc_feature (1)..( 13): Matrix.004 file - promoters50/1033869
gatagataaaatt

SEQ ID NO: 67144 - DNA, 8 bp, Unknown
  misc_feature (1)..( 8): Matrix.004 file - promoters50/1034030
ttcttttt

SEQ ID NO: 67145 - DNA, 11 bp, Unknown
  misc_feature (1)..( 11): Matrix.004 file - promoters50/1034030
gaaaaaaacca

SEQ ID NO: 67146 - DNA, 10 bp, Unknown
  misc_feature (1)..( 10): Matrix.004 file - promoters50/1034066
tataaaaact

SEQ ID NO: 67147 - DNA, 8 bp, Unknown
  misc_feature (1)..( 8): Matrix.004 file - promoters50/1034066
gaacagag

SEQ ID NO: 67148 - DNA, 11 bp, Unknown
  misc_feature (1)..( 11): Matrix.004 file - promoters50/1034066
aatgtttgaat

SEQ ID NO: 67149 - DNA, 7 bp, Unknown
  misc_feature (1)..( 7): Matrix.004 file - promoters50/1034066
taaaaaa

SEQ ID NO: 67150 - DNA, 10 bp, Unknown
  misc_feature (1)..( 10): Matrix.004 file - promoters50/1034066
aagagttgcg

SEQ ID NO: 67151 - DNA, 15 bp, Unknown
  misc_feature (1)..( 15): Matrix.004 file - promoters50/1034066
aaccaaactccaaaa

SEQ ID NO: 67152 - DNA, 8 bp, Unknown
  misc_feature (1)..( 8): Matrix.004 file - promoters50/1034137
tttataaa

SEQ ID NO: 67153 - DNA, 16 bp, Unknown
  misc_feature (1)..( 16): Matrix.004 file - promoters50/1034145
agactttaagacttat

SEQ ID NO: 67154 - DNA, 9 bp, Unknown
  misc_feature (1)..( 9): Matrix.004 file - promoters50/1034188
gtaataagt

SEQ ID NO: 67155 - DNA, 9 bp, Unknown
  misc_feature (1)..( 9): Matrix.004 file - promoters50/1034188
gcccattta

SEQ ID NO: 67156 - DNA, 7 bp, Unknown
  misc_feature (1)..( 7): Matrix.004 file - promoters50/1034212
atttttt

SEQ ID NO: 67157 - DNA, 7 bp, Unknown
  misc_feature (1)..( 7): Matrix.004 file - promoters50/1034306
aatatag

SEQ ID NO: 67158 - DNA, 11 bp, Unknown
  misc_feature (1)..( 11): Matrix.004 file - promoters50/1034306
aaaaataaata

SEQ ID NO: 67159 - DNA, 8 bp, Unknown
  misc_feature (1)..( 8): Matrix.004 file - promoters50/1034306
aaagaaat

SEQ ID NO: 67160 - DNA, 10 bp, Unknown
  misc_feature (1)..( 10): Matrix.004 file - promoters50/1034306
cagaattaaa

SEQ ID NO: 67161 - DNA, 9 bp, Unknown
  misc_feature (1)..( 9): Matrix.004 file - promoters50/1034306
attttaaca

SEQ ID NO: 67162 - DNA, 11 bp, Unknown
  misc_feature (1)..( 11): Matrix.004 file - promoters50/1034322
tgttagaaaaa

SEQ ID NO: 67163 - DNA, 24 bp, Unknown
  misc_feature (1)..( 24): Matrix.004 file - promoters50/1034322
tatcattgttctctagactcaaaa

SEQ ID NO: 67164 - DNA, 10 bp, Unknown
  misc_feature (1)..( 10): Matrix.004 file - promoters50/1034322
tatataaaca

SEQ ID NO: 67165 - DNA, 9 bp, Unknown
  misc_feature (1)..( 9): Matrix.004 file - promoters50/1034322
aagtttaag

SEQ ID NO: 67166 - DNA, 8 bp, Unknown
  misc_feature (1)..( 8): Matrix.004 file - promoters50/1034349
aaaaatag

SEQ ID NO: 67167 - DNA, 12 bp, Unknown
  misc_feature (1)..( 12): Matrix.004 file - promoters50/1034349
acatatatatat

SEQ ID NO: 67168 - DNA, 9 bp, Unknown
  misc_feature (1)..( 9): Matrix.004 file - promoters50/1034349
aatataact

SEQ ID NO: 67169 - DNA, 8 bp, Unknown
  misc_feature (1)..( 8): Matrix.004 file - promoters50/1034349
atttaata

SEQ ID NO: 67170 - DNA, 7 bp, Unknown
  misc_feature (1)..( 7): Matrix.004 file - promoters50/1034353
taacaaa

SEQ ID NO: 67171 - DNA, 13 bp, Unknown
  misc_feature (1)..( 13): Matrix.004 file - promoters50/1034463
taaatattttgtt

SEQ ID NO: 67172 - DNA, 9 bp, Unknown
  misc_feature (1)..( 9): Matrix.004 file - promoters50/1034497
taatatttt

SEQ ID NO: 67173 - DNA, 8 bp, Unknown
  misc_feature (1)..( 8): Matrix.004 file - promoters50/1034497
ctttattt

SEQ ID NO: 67174 - DNA, 7 bp, Unknown
  misc_feature (1)..( 7): Matrix.004 file - promoters50/1034497
aaatatt

SEQ ID NO: 67175 - DNA, 8 bp, Unknown
  misc_feature (1)..( 8): Matrix.004 file - promoters50/1034497
attaaata

SEQ ID NO: 67176 - DNA, 12 bp, Unknown
  misc_feature (1)..( 12): Matrix.004 file - promoters50/1034497
atttaatcgatt

SEQ ID NO: 67177 - DNA, 9 bp, Unknown
  misc_feature (1)..( 9): Matrix.004 file - promoters50/1034652
agattttaa

SEQ ID NO: 67178 - DNA, 10 bp, Unknown
  misc_feature (1)..( 10): Matrix.004 file - promoters50/1034692
tcttcttctg

SEQ ID NO: 67179 - DNA, 9 bp, Unknown
  misc_feature (1)..( 9): Matrix.004 file - promoters50/1034692
aaaatcaac

SEQ ID NO: 67180 - DNA, 8 bp, Unknown
  misc_feature (1)..( 8): Matrix.004 file - promoters50/1034692
aaaaggaa

SEQ ID NO: 67181 - DNA, 6 bp, Unknown
  misc_feature (1)..( 6): Matrix.004 file - promoters50/1034834
ttactt

SEQ ID NO: 67182 - DNA, 10 bp, Unknown
  misc_feature (1)..( 10): Matrix.004 file - promoters50/1034834
ttttattata

SEQ ID NO: 67183 - DNA, 11 bp, Unknown
  misc_feature (1)..( 11): Matrix.004 file - promoters50/1034837
atatatataaa

SEQ ID NO: 67184 - DNA, 12 bp, Unknown
  misc_feature (1)..( 12): Matrix.004 file - promoters50/1034837
aaaaaatttaca

SEQ ID NO: 67185 - DNA, 11 bp, Unknown
  misc_feature (1)..( 11): Matrix.004 file - promoters50/1034837
caaaaatttac

SEQ ID NO: 67186 - DNA, 8 bp, Unknown
  misc_feature (1)..( 8): Matrix.004 file - promoters50/1034841
aaaaaaaa

SEQ ID NO: 67187 - DNA, 8 bp, Unknown
  misc_feature (1)..( 8): Matrix.004 file - promoters50/1034841
ttgaaatg

SEQ ID NO: 67188 - DNA, 9 bp, Unknown
  misc_feature (1)..( 9): Matrix.004 file - promoters50/1034841
ttgattatt

SEQ ID NO: 67189 - DNA, 7 bp, Unknown
  misc_feature (1)..( 7): Matrix.004 file - promoters50/1034841
aatgaaa

SEQ ID NO: 67190 - DNA, 8 bp, Unknown
  misc_feature (1)..( 8): Matrix.004 file - promoters50/1034841
taaattat

SEQ ID NO: 67191 - DNA, 11 bp, Unknown
  misc_feature (1)..( 11): Matrix.004 file - promoters50/1034870
caacttaaaag

SEQ ID NO: 67192 - DNA, 15 bp, Unknown
  misc_feature (1)..( 15): Matrix.004 file - promoters50/1034870
aatagagtaatgaaa

SEQ ID NO: 67193 - DNA, 11 bp, Unknown
  misc_feature (1)..( 11): Matrix.004 file - promoters50/1034870
ataataatttt

SEQ ID NO: 67194 - DNA, 24 bp, Unknown
  misc_feature (1)..( 24): Matrix.004 file - promoters50/1034870
gagattataattttgctaaaaatt

SEQ ID NO: 67195 - DNA, 13 bp, Unknown
  misc_feature (1)..( 13): Matrix.004 file - promoters50/1034870
cttaaatcaatat

SEQ ID NO: 67196 - DNA, 8 bp, Unknown
  misc_feature (1)..( 8): Matrix.004 file - promoters50/1034962
gttaaata

SEQ ID NO: 67197 - DNA, 8 bp, Unknown
  misc_feature (1)..( 8): Matrix.004 file - promoters50/1034962
attttttt

SEQ ID NO: 67198 - DNA, 9 bp, Unknown
  misc_feature (1)..( 9): Matrix.004 file - promoters50/1034970
caatcattt

SEQ ID NO: 67199 - DNA, 11 bp, Unknown
  misc_feature (1)..( 11): Matrix.004 file - promoters50/1034970
agagaaatggt

SEQ ID NO: 67200 - DNA, 7 bp, Unknown
  misc_feature (1)..( 7): Matrix.004 file - promoters50/1034970
tttcttt

SEQ ID NO: 67201 - DNA, 7 bp, Unknown
  misc_feature (1)..( 7): Matrix.004 file - promoters50/1034982
attgact

SEQ ID NO: 67202 - DNA, 8 bp, Unknown
  misc_feature (1)..( 8): Matrix.004 file - promoters50/1034982
ttcttagt

SEQ ID NO: 67203 - DNA, 7 bp, Unknown
  misc_feature (1)..( 7): Matrix.004 file - promoters50/1034982
gtagatt

SEQ ID NO: 67204 - DNA, 9 bp, Unknown
  misc_feature (1)..( 9): Matrix.004 file - promoters50/1034982
tttaatcag

SEQ ID NO: 67205 - DNA, 8 bp, Unknown
  misc_feature (1)..( 8): Matrix.004 file - promoters50/1035027
aaagaatt

SEQ ID NO: 67206 - DNA, 8 bp, Unknown
  misc_feature (1)..( 8): Matrix.004 file - promoters50/1035027
gtatataa

SEQ ID NO: 67207 - DNA, 13 bp, Unknown
  misc_feature (1)..( 13): Matrix.004 file - promoters50/1035083
aatttaataacat

SEQ ID NO: 67208 - DNA, 10 bp, Unknown
  misc_feature (1)..( 10): Matrix.004 file - promoters50/1035083
atatttataa

SEQ ID NO: 67209 - DNA, 9 bp, Unknown
  misc_feature (1)..( 9): Matrix.004 file - promoters50/1035083
ctataaaaa

SEQ ID NO: 67210 - DNA, 13 bp, Unknown
  misc_feature (1)..( 13): Matrix.004 file - promoters50/1035083
aattttaattaat

SEQ ID NO: 67211 - DNA, 10 bp, Unknown
  misc_feature (1)..( 10): Matrix.004 file - promoters50/1035083
tttttataag

SEQ ID NO: 67212 - DNA, 17 bp, Unknown
  misc_feature (1)..( 17): Matrix.004 file - promoters50/1035083
taaattttaaaataatt

SEQ ID NO: 67213 - DNA, 20 bp, Unknown
  misc_feature (1)..( 20): Matrix.004 file - promoters50/1035097
taaattctaaaaaaattatt

SEQ ID NO: 67214 - DNA, 9 bp, Unknown
  misc_feature (1)..( 9): Matrix.004 file - promoters50/1035117
gaaaaaatt

SEQ ID NO: 67215 - DNA, 10 bp, Unknown
  misc_feature (1)..( 10): Matrix.004 file - promoters50/1035117
tattttttat

SEQ ID NO: 67216 - DNA, 9 bp, Unknown
  misc_feature (1)..( 9): Matrix.004 file - promoters50/1035117
tcttttata

SEQ ID NO: 67217 - DNA, 11 bp, Unknown
  misc_feature (1)..( 11): Matrix.004 file - promoters50/1035117
atttgttatta

SEQ ID NO: 67218 - DNA, 11 bp, Unknown
  misc_feature (1)..( 11): Matrix.004 file - promoters50/1035117
caaaaaaacaa

SEQ ID NO: 67219 - DNA, 13 bp, Unknown
  misc_feature (1)..( 13): Matrix.004 file - promoters50/1035155
cttctttaaatta

SEQ ID NO: 67220 - DNA, 10 bp, Unknown
  misc_feature (1)..( 10): Matrix.004 file - promoters50/1035155
aaaaattatt

SEQ ID NO: 67221 - DNA, 9 bp, Unknown
  misc_feature (1)..( 9): Matrix.004 file - promoters50/1035155
ttttaattt

SEQ ID NO: 67222 - DNA, 7 bp, Unknown
  misc_feature (1)..( 7): Matrix.004 file - promoters50/1035155
tatgtag

SEQ ID NO: 67223 - DNA, 10 bp, Unknown
  misc_feature (1)..( 10): Matrix.004 file - promoters50/1035160
aaaacaaaat

SEQ ID NO: 67224 - DNA, 10 bp, Unknown
  misc_feature (1)..( 10): Matrix.004 file - promoters50/1035172
ttaatttaat

SEQ ID NO: 67225 - DNA, 8 bp, Unknown
  misc_feature (1)..( 8): Matrix.004 file - promoters50/1035172
aaaaataa

SEQ ID NO: 67226 - DNA, 13 bp, Unknown
  misc_feature (1)..( 13): Matrix.004 file - promoters50/1035194
tcttttctctata

SEQ ID NO: 67227 - DNA, 8 bp, Unknown
  misc_feature (1)..( 8): Matrix.004 file - promoters50/1035267
aaaataaa

SEQ ID NO: 67228 - DNA, 8 bp, Unknown
  misc_feature (1)..( 8): Matrix.004 file - promoters50/1035267
tcaaataa

SEQ ID NO: 67229 - DNA, 5 bp, Unknown
  misc_feature (1)..( 5): Matrix.004 file - promoters50/1035306
ccaca

SEQ ID NO: 67230 - DNA, 13 bp, Unknown
  misc_feature (1)..( 13): Matrix.004 file - promoters50/1035306
cgcatattaaaaa

SEQ ID NO: 67231 - DNA, 13 bp, Unknown
  misc_feature (1)..( 13): Matrix.004 file - promoters50/1035306
aatcattaaaaaa

SEQ ID NO: 67232 - DNA, 11 bp, Unknown
  misc_feature (1)..( 11): Matrix.004 file - promoters50/1035312
aaatttataaa

SEQ ID NO: 67233 - DNA, 10 bp, Unknown
  misc_feature (1)..( 10): Matrix.004 file - promoters50/1035312
taaatcaaaa

SEQ ID NO: 67234 - DNA, 12 bp, Unknown
  misc_feature (1)..( 12): Matrix.004 file - promoters50/1035312
attaggcccaaa

SEQ ID NO: 67235 - DNA, 8 bp, Unknown
  misc_feature (1)..( 8): Matrix.004 file - promoters50/1035315
atttgata

SEQ ID NO: 67236 - DNA, 8 bp, Unknown
  misc_feature (1)..( 8): Matrix.004 file - promoters50/1035507
aattgatt

SEQ ID NO: 67237 - DNA, 11 bp, Unknown
  misc_feature (1)..( 11): Matrix.004 file - promoters50/1035507
tttcatatttt

SEQ ID NO: 67238 - DNA, 11 bp, Unknown
  misc_feature (1)..( 11): Matrix.004 file - promoters50/1035507
gtgatgaatca

SEQ ID NO: 67239 - DNA, 8 bp, Unknown
  misc_feature (1)..( 8): Matrix.004 file - promoters50/1035507
cataaaaa

SEQ ID NO: 67240 - DNA, 8 bp, Unknown
  misc_feature (1)..( 8): Matrix.004 file - promoters50/1035632
acaaattg

SEQ ID NO: 67241 - DNA, 11 bp, Unknown
  misc_feature (1)..( 11): Matrix.004 file - promoters50/1035636
atataaagaaa

SEQ ID NO: 67242 - DNA, 12 bp, Unknown
  misc_feature (1)..( 12): Matrix.004 file - promoters50/1035636
atgataaaacag

SEQ ID NO: 67243 - DNA, 10 bp, Unknown
  misc_feature (1)..( 10): Matrix.004 file - promoters50/1035636
gagtttgaat

SEQ ID NO: 67244 - DNA, 9 bp, Unknown
  misc_feature (1)..( 9): Matrix.004 file - promoters50/1035636
aaaataaaa

SEQ ID NO: 67245 - DNA, 8 bp, Unknown
  misc_feature (1)..( 8): Matrix.004 file - promoters50/1035636
cttttttt

SEQ ID NO: 67246 - DNA, 9 bp, Unknown
  misc_feature (1)..( 9): Matrix.004 file - promoters50/1035636
aatttattt

SEQ ID NO: 67247 - DNA, 9 bp, Unknown
  misc_feature (1)..( 9): Matrix.004 file - promoters50/1035636
aaaaaatgt

SEQ ID NO: 67248 - DNA, 8 bp, Unknown
  misc_feature (1)..( 8): Matrix.004 file - promoters50/1035636
gatcaaaa

SEQ ID NO: 67249 - DNA, 7 bp, Unknown
  misc_feature (1)..( 7): Matrix.004 file - promoters50/1035636
ttacaac

SEQ ID NO: 67250 - DNA, 9 bp, Unknown
  misc_feature (1)..( 9): Matrix.004 file - promoters50/1035636
ataaaagaa

SEQ ID NO: 67251 - DNA, 8 bp, Unknown
  misc_feature (1)..( 8): Matrix.004 file - promoters50/1035651
agaataaa

SEQ ID NO: 67252 - DNA, 9 bp, Unknown
  misc_feature (1)..( 9): Matrix.004 file - promoters50/1035651
tttcttctc

SEQ ID NO: 67253 - DNA, 10 bp, Unknown
  misc_feature (1)..( 10): Matrix.004 file - promoters50/1035665
gatggttcac

SEQ ID NO: 67254 - DNA, 8 bp, Unknown
  misc_feature (1)..( 8): Matrix.004 file - promoters50/1035665
taatttat

SEQ ID NO: 67255 - DNA, 9 bp, Unknown
  misc_feature (1)..( 9): Matrix.004 file - promoters50/1035665
acatcttaa

SEQ ID NO: 67256 - DNA, 12 bp, Unknown
  misc_feature (1)..( 12): Matrix.004 file - promoters50/1375217
atgcatttaaaa

SEQ ID NO: 67257 - DNA, 10 bp, Unknown
  misc_feature (1)..( 10): Matrix.004 file - promoters50/1375217
atatttgttt

SEQ ID NO: 67258 - DNA, 6 bp, Unknown
  misc_feature (1)..( 6): Matrix.004 file - promoters50/1375217
ataatc

SEQ ID NO: 67259 - DNA, 9 bp, Unknown
  misc_feature (1)..( 9): Matrix.004 file - promoters50/1375217
aaagttaaa

SEQ ID NO: 67260 - DNA, 6 bp, Unknown
  misc_feature (1)..( 6): Matrix.004 file - promoters50/1375252
ataaaa

SEQ ID NO: 67261 - DNA, 15 bp, Unknown
  misc_feature (1)..( 15): Matrix.004 file - promoters50/1375255
ttcttgatttaaacc

SEQ ID NO: 67262 - DNA, 10 bp, Unknown
  misc_feature (1)..( 10): Matrix.004 file - promoters50/1375305
gtttaaaaag

SEQ ID NO: 67263 - DNA, 10 bp, Unknown
  misc_feature (1)..( 10): Matrix.004 file - promoters50/1375305
attggataat

SEQ ID NO: 67264 - DNA, 8 bp, Unknown
  misc_feature (1)..( 8): Matrix.004 file - promoters50/1375347
caaagaaa

SEQ ID NO: 67265 - DNA, 7 bp, Unknown
  misc_feature (1)..( 7): Matrix.004 file - promoters50/1375456
tcatata

SEQ ID NO: 67266 - DNA, 9 bp, Unknown
  misc_feature (1)..( 9): Matrix.004 file - promoters50/1375456
ttggaacaa

SEQ ID NO: 67267 - DNA, 9 bp, Unknown
  misc_feature (1)..( 9): Matrix.004 file - promoters50/1375456
agaaagaaa

SEQ ID NO: 67268 - DNA, 10 bp, Unknown
  misc_feature (1)..( 10): Matrix.004 file - promoters50/1375456
agaaaagaaa

SEQ ID NO: 67269 - DNA, 11 bp, Unknown
  misc_feature (1)..( 11): Matrix.004 file - promoters50/1375471
gaaatataata

SEQ ID NO: 67270 - DNA, 12 bp, Unknown
  misc_feature (1)..( 12): Matrix.004 file - promoters50/1375474
tacaaaataaaa

SEQ ID NO: 67271 - DNA, 10 bp, Unknown
  misc_feature (1)..( 10): Matrix.004 file - promoters50/1375474
cactttcttc

SEQ ID NO: 67272 - DNA, 10 bp, Unknown
  misc_feature (1)..( 10): Matrix.004 file - promoters50/1375547
aaacctaaat

SEQ ID NO: 67273 - DNA, 7 bp, Unknown
  misc_feature (1)..( 7): Matrix.004 file - promoters50/1375615
ctttatt

SEQ ID NO: 67274 - DNA, 8 bp, Unknown
  misc_feature (1)..( 8): Matrix.004 file - promoters50/1375615
atcatatt

SEQ ID NO: 67275 - DNA, 7 bp, Unknown
  misc_feature (1)..( 7): Matrix.004 file - promoters50/1375615
gatttgt

SEQ ID NO: 67276 - DNA, 12 bp, Unknown
  misc_feature (1)..( 12): Matrix.004 file - promoters50/1375615
agtttgttcaat

SEQ ID NO: 67277 - DNA, 7 bp, Unknown
  misc_feature (1)..( 7): Matrix.004 file - promoters50/1375615
tgtttgt

SEQ ID NO: 67278 - DNA, 7 bp, Unknown
  misc_feature (1)..( 7): Matrix.004 file - promoters50/1375615
gtttgtt

SEQ ID NO: 67279 - DNA, 9 bp, Unknown
  misc_feature (1)..( 9): Matrix.004 file - promoters50/1375634
tttgtagtg

SEQ ID NO: 67280 - DNA, 14 bp, Unknown
  misc_feature (1)..( 14): Matrix.004 file - promoters50/1375642
aaagtaagcatatt

SEQ ID NO: 67281 - DNA, 8 bp, Unknown
  misc_feature (1)..( 8): Matrix.004 file - promoters50/1375642
ttataaat

SEQ ID NO: 67282 - DNA, 11 bp, Unknown
  misc_feature (1)..( 11): Matrix.004 file - promoters50/1375642
ctctataaaat

SEQ ID NO: 67283 - DNA, 8 bp, Unknown
  misc_feature (1)..( 8): Matrix.004 file - promoters50/1375642
attaaaat

SEQ ID NO: 67284 - DNA, 8 bp, Unknown
  misc_feature (1)..( 8): Matrix.004 file - promoters50/1375642
aaagaatt

SEQ ID NO: 67285 - DNA, 7 bp, Unknown
  misc_feature (1)..( 7): Matrix.004 file - promoters50/1375675
aggaaaa

SEQ ID NO: 67286 - DNA, 8 bp, Unknown
  misc_feature (1)..( 8): Matrix.004 file - promoters50/1375793
aatcctaa

SEQ ID NO: 67287 - DNA, 9 bp, Unknown
  misc_feature (1)..( 9): Matrix.004 file - promoters50/1375801
tgtttgttt

SEQ ID NO: 67288 - DNA, 9 bp, Unknown
  misc_feature (1)..( 9): Matrix.004 file - promoters50/1375801
tttgtgatt

SEQ ID NO: 67289 - DNA, 9 bp, Unknown
  misc_feature (1)..( 9): Matrix.004 file - promoters50/1375801
aaaccaaat

SEQ ID NO: 67290 - DNA, 9 bp, Unknown
  misc_feature (1)..( 9): Matrix.004 file - promoters50/1375832
ttttatgtc

SEQ ID NO: 67291 - DNA, 9 bp, Unknown
  misc_feature (1)..( 9): Matrix.004 file - promoters50/1375832
ccaagaaaa

SEQ ID NO: 67292 - DNA, 8 bp, Unknown
  misc_feature (1)..( 8): Matrix.004 file - promoters50/1375832
agaaattt

SEQ ID NO: 67293 - DNA, 7 bp, Unknown
  misc_feature (1)..( 7): Matrix.004 file - promoters50/1375832
aaataaa

SEQ ID NO: 67294 - DNA, 8 bp, Unknown
  misc_feature (1)..( 8): Matrix.004 file - promoters50/1375832
caaataaa

SEQ ID NO: 67295 - DNA, 8 bp, Unknown
  misc_feature (1)..( 8): Matrix.004 file - promoters50/1375832
ataataat

SEQ ID NO: 67296 - DNA, 8 bp, Unknown
  misc_feature (1)..( 8): Matrix.004 file - promoters50/1375838
gaaagaat

SEQ ID NO: 67297 - DNA, 9 bp, Unknown
  misc_feature (1)..( 9): Matrix.004 file - promoters50/1375957
taaacataa

SEQ ID NO: 67298 - DNA, 8 bp, Unknown
  misc_feature (1)..( 8): Matrix.004 file - promoters50/1375957
attttttg

SEQ ID NO: 67299 - DNA, 11 bp, Unknown
  misc_feature (1)..( 11): Matrix.004 file - promoters50/1375957
aataaactata

SEQ ID NO: 67300 - DNA, 8 bp, Unknown
  misc_feature (1)..( 8): Matrix.004 file - promoters50/1375957
acaaaata

SEQ ID NO: 67301 - DNA, 10 bp, Unknown
  misc_feature (1)..( 10): Matrix.004 file - promoters50/1375957
tataaattta

SEQ ID NO: 67302 - DNA, 17 bp, Unknown
  misc_feature (1)..( 17): Matrix.004 file - promoters50/1375957
ttatgacatttaaaaaa

SEQ ID NO: 67303 - DNA, 12 bp, Unknown
  misc_feature (1)..( 12): Matrix.004 file - promoters50/1375988
attaaatgttta

SEQ ID NO: 67304 - DNA, 13 bp, Unknown
  misc_feature (1)..( 13): Matrix.004 file - promoters50/1375995
taaaaattttaac

SEQ ID NO: 67305 - DNA, 8 bp, Unknown
  misc_feature (1)..( 8): Matrix.004 file - promoters50/1375995
agtaatta

SEQ ID NO: 67306 - DNA, 8 bp, Unknown
  misc_feature (1)..( 8): Matrix.004 file - promoters50/1375995
ttaaaaaa

SEQ ID NO: 67307 - DNA, 6 bp, Unknown
  misc_feature (1)..( 6): Matrix.004 file - promoters50/1375995
taataa

SEQ ID NO: 67308 - DNA, 10 bp, Unknown
  misc_feature (1)..( 10): Matrix.004 file - promoters50/1376069
aataataata

SEQ ID NO: 67309 - DNA, 10 bp, Unknown
  misc_feature (1)..( 10): Matrix.004 file - promoters50/1376069
taatctaatt

SEQ ID NO: 67310 - DNA, 8 bp, Unknown
  misc_feature (1)..( 8): Matrix.004 file - promoters50/1376069
agaataaa

SEQ ID NO: 67311 - DNA, 9 bp, Unknown
  misc_feature (1)..( 9): Matrix.004 file - promoters50/1376069
aaagaataa

SEQ ID NO: 67312 - DNA, 7 bp, Unknown
  misc_feature (1)..( 7): Matrix.004 file - promoters50/1376069
aaacttt

SEQ ID NO: 67313 - DNA, 7 bp, Unknown
  misc_feature (1)..( 7): Matrix.004 file - promoters50/1376069
taatcta

SEQ ID NO: 67314 - DNA, 7 bp, Unknown
  misc_feature (1)..( 7): Matrix.004 file - promoters50/1376069
attcttt

SEQ ID NO: 67315 - DNA, 8 bp, Unknown
  misc_feature (1)..( 8): Matrix.004 file - promoters50/1376069
attgtgaa

SEQ ID NO: 67316 - DNA, 8 bp, Unknown
  misc_feature (1)..( 8): Matrix.004 file - promoters50/1376340
taataaaa

SEQ ID NO: 67317 - DNA, 6 bp, Unknown
  misc_feature (1)..( 6): Matrix.004 file - promoters50/1376361
aaaaat

SEQ ID NO: 67318 - DNA, 10 bp, Unknown
  misc_feature (1)..( 10): Matrix.004 file - promoters50/1376455
taatactatt

SEQ ID NO: 67319 - DNA, 11 bp, Unknown
  misc_feature (1)..( 11): Matrix.004 file - promoters50/1376455
aaaaataaacg

SEQ ID NO: 67320 - DNA, 10 bp, Unknown
  misc_feature (1)..( 10): Matrix.004 file - promoters50/1376455
ttgaacaaac

SEQ ID NO: 67321 - DNA, 7 bp, Unknown
  misc_feature (1)..( 7): Matrix.004 file - promoters50/1376455
tgaatta

SEQ ID NO: 67322 - DNA, 10 bp, Unknown
  misc_feature (1)..( 10): Matrix.004 file - promoters50/1376490
tagaaaatga

SEQ ID NO: 67323 - DNA, 11 bp, Unknown
  misc_feature (1)..( 11): Matrix.004 file - promoters50/1376490
aaataaattaa

SEQ ID NO: 67324 - DNA, 10 bp, Unknown
  misc_feature (1)..( 10): Matrix.004 file - promoters50/1376559
aatagattaa

SEQ ID NO: 67325 - DNA, 10 bp, Unknown
  misc_feature (1)..( 10): Matrix.004 file - promoters50/1376650
gcagaggaag

SEQ ID NO: 67326 - DNA, 12 bp, Unknown
  misc_feature (1)..( 12): Matrix.004 file - promoters50/1376726
aaataaaataaa

SEQ ID NO: 67327 - DNA, 8 bp, Unknown
  misc_feature (1)..( 8): Matrix.004 file - promoters50/1376726
tattttct

SEQ ID NO: 67328 - DNA, 8 bp, Unknown
  misc_feature (1)..( 8): Matrix.004 file - promoters50/1376726
taaaaatc

SEQ ID NO: 67329 - DNA, 9 bp, Unknown
  misc_feature (1)..( 9): Matrix.004 file - promoters50/1376733
attagaaaa

SEQ ID NO: 67330 - DNA, 10 bp, Unknown
  misc_feature (1)..( 10): Matrix.004 file - promoters50/1376733
actttttcta

SEQ ID NO: 67331 - DNA, 9 bp, Unknown
  misc_feature (1)..( 9): Matrix.004 file - promoters50/1376733
aaaattgtc

SEQ ID NO: 67332 - DNA, 7 bp, Unknown
  misc_feature (1)..( 7): Matrix.004 file - promoters50/1376737
tattttc

SEQ ID NO: 67333 - DNA, 8 bp, Unknown
  misc_feature (1)..( 8): Matrix.004 file - promoters50/1376737
ggtttatt

SEQ ID NO: 67334 - DNA, 8 bp, Unknown
  misc_feature (1)..( 8): Matrix.004 file - promoters50/1376737
ctacaaaa

SEQ ID NO: 67335 - DNA, 10 bp, Unknown
  misc_feature (1)..( 10): Matrix.004 file - promoters50/1376859
taaagcaaaa

SEQ ID NO: 67336 - DNA, 8 bp, Unknown
  misc_feature (1)..( 8): Matrix.004 file - promoters50/1376881
atcattta

SEQ ID NO: 67337 - DNA, 10 bp, Unknown
  misc_feature (1)..( 10): Matrix.004 file - promoters50/1376881
gaaacaaaaa

SEQ ID NO: 67338 - DNA, 6 bp, Unknown
  misc_feature (1)..( 6): Matrix.004 file - promoters50/1376958
agtaaa

SEQ ID NO: 67339 - DNA, 11 bp, Unknown
  misc_feature (1)..( 11): Matrix.004 file - promoters50/1376958
aatcatacaaa

SEQ ID NO: 67340 - DNA, 10 bp, Unknown
  misc_feature (1)..( 10): Matrix.004 file - promoters50/1376980
acacattaag

SEQ ID NO: 67341 - DNA, 7 bp, Unknown
  misc_feature (1)..( 7): Matrix.004 file - promoters50/1376980
aaaattt

SEQ ID NO: 67342 - DNA, 8 bp, Unknown
  misc_feature (1)..( 8): Matrix.004 file - promoters50/1376980
tatataaa

SEQ ID NO: 67343 - DNA, 7 bp, Unknown
  misc_feature (1)..( 7): Matrix.004 file - promoters50/1376992
attaaat

SEQ ID NO: 67344 - DNA, 12 bp, Unknown
  misc_feature (1)..( 12): Matrix.004 file - promoters50/1376992
atattaatcatt

SEQ ID NO: 67345 - DNA, 7 bp, Unknown
  misc_feature (1)..( 7): Matrix.004 file - promoters50/1376992
attaaat

SEQ ID NO: 67346 - DNA, 7 bp, Unknown
  misc_feature (1)..( 7): Matrix.004 file - promoters50/1376992
gttaaat

SEQ ID NO: 67347 - DNA, 7 bp, Unknown
  misc_feature (1)..( 7): Matrix.004 file - promoters50/1376992
aaataaa

SEQ ID NO: 67348 - DNA, 10 bp, Unknown
  misc_feature (1)..( 10): Matrix.004 file - promoters50/1377007
aaacataact

SEQ ID NO: 67349 - DNA, 8 bp, Unknown
  misc_feature (1)..( 8): Matrix.004 file - promoters50/1377007
ctaaatga

SEQ ID NO: 67350 - DNA, 12 bp, Unknown
  misc_feature (1)..( 12): Matrix.004 file - promoters50/1377007
ctcaatgtcttt

SEQ ID NO: 67351 - DNA, 7 bp, Unknown
  misc_feature (1)..( 7): Matrix.004 file - promoters50/1377007
gtttgaa

SEQ ID NO: 67352 - DNA, 8 bp, Unknown
  misc_feature (1)..( 8): Matrix.004 file - promoters50/1377007
tcaaaatt

SEQ ID NO: 67353 - DNA, 10 bp, Unknown
  misc_feature (1)..( 10): Matrix.004 file - promoters50/1377007
tttgaatcaa

SEQ ID NO: 67354 - DNA, 9 bp, Unknown
  misc_feature (1)..( 9): Matrix.004 file - promoters50/1377045
tttattact

SEQ ID NO: 67355 - DNA, 11 bp, Unknown
  misc_feature (1)..( 11): Matrix.004 file - promoters50/1377045
attcaaccaaa

SEQ ID NO: 67356 - DNA, 7 bp, Unknown
  misc_feature (1)..( 7): Matrix.004 file - promoters50/1377045
aaaaaaa

SEQ ID NO: 67357 - DNA, 6 bp, Unknown
  misc_feature (1)..( 6): Matrix.004 file - promoters50/1377139
aaaaaa

SEQ ID NO: 67358 - DNA, 10 bp, Unknown
  misc_feature (1)..( 10): Matrix.004 file - promoters50/1377192
tcaagttaaa

SEQ ID NO: 67359 - DNA, 15 bp, Unknown
  misc_feature (1)..( 15): Matrix.004 file - promoters50/1377192
tttattcaaccgatt

SEQ ID NO: 67360 - DNA, 12 bp, Unknown
  misc_feature (1)..( 12): Matrix.004 file - promoters50/1377192
tcattttcacat

SEQ ID NO: 67361 - DNA, 13 bp, Unknown
  misc_feature (1)..( 13): Matrix.004 file - promoters50/1377197
ttttcaaaagctt

SEQ ID NO: 67362 - DNA, 9 bp, Unknown
  misc_feature (1)..( 9): Matrix.004 file - promoters50/1377249
aaaaagaag

SEQ ID NO: 67363 - DNA, 8 bp, Unknown
  misc_feature (1)..( 8): Matrix.004 file - promoters50/1377268
taaataac

SEQ ID NO: 67364 - DNA, 10 bp, Unknown
  misc_feature (1)..( 10): Matrix.004 file - promoters50/1377268
aaactacaac

SEQ ID NO: 67365 - DNA, 10 bp, Unknown
  misc_feature (1)..( 10): Matrix.004 file - promoters50/1377268
aaacgtgaaa

SEQ ID NO: 67366 - DNA, 9 bp, Unknown
  misc_feature (1)..( 9): Matrix.004 file - promoters50/1377268
aactattta

SEQ ID NO: 67367 - DNA, 8 bp, Unknown
  misc_feature (1)..( 8): Matrix.004 file - promoters50/1377268
caacttat

SEQ ID NO: 67368 - DNA, 11 bp, Unknown
  misc_feature (1)..( 11): Matrix.004 file - promoters50/1377268
tatatataaag

SEQ ID NO: 67369 - DNA, 9 bp, Unknown
  misc_feature (1)..( 9): Matrix.004 file - promoters50/1377417
acttgtata

SEQ ID NO: 67370 - DNA, 8 bp, Unknown
  misc_feature (1)..( 8): Matrix.004 file - promoters50/1377472
caaaaaca

SEQ ID NO: 67371 - DNA, 12 bp, Unknown
  misc_feature (1)..( 12): Matrix.004 file - promoters50/1377472
cttgtttcaaga

SEQ ID NO: 67372 - DNA, 12 bp, Unknown
  misc_feature (1)..( 12): Matrix.004 file - promoters50/1377506
agattatttatt

SEQ ID NO: 67373 - DNA, 10 bp, Unknown
  misc_feature (1)..( 10): Matrix.004 file - promoters50/1377506
gaatatgtaa

SEQ ID NO: 67374 - DNA, 6 bp, Unknown
  misc_feature (1)..( 6): Matrix.004 file - promoters50/1377506
tcttcc

SEQ ID NO: 67375 - DNA, 8 bp, Unknown
  misc_feature (1)..( 8): Matrix.004 file - promoters50/1377506
tcttctcc

SEQ ID NO: 67376 - DNA, 8 bp, Unknown
  misc_feature (1)..( 8): Matrix.004 file - promoters50/1377522
tctggttt

SEQ ID NO: 67377 - DNA, 9 bp, Unknown
  misc_feature (1)..( 9): Matrix.004 file - promoters50/1377522
tgatatctc

SEQ ID NO: 67378 - DNA, 8 bp, Unknown
  misc_feature (1)..( 8): Matrix.004 file - promoters50/1377540
cgacatgt

SEQ ID NO: 67379 - DNA, 9 bp, Unknown
  misc_feature (1)..( 9): Matrix.004 file - promoters50/1377540
caaaattct

SEQ ID NO: 67380 - DNA, 10 bp, Unknown
  misc_feature (1)..( 10): Matrix.004 file - promoters50/1377540
atatttttgt

SEQ ID NO: 67381 - DNA, 10 bp, Unknown
  misc_feature (1)..( 10): Matrix.004 file - promoters50/1377564
gattaaataa

SEQ ID NO: 67382 - DNA, 7 bp, Unknown
  misc_feature (1)..( 7): Matrix.004 file - promoters50/1377564
attttac

SEQ ID NO: 67383 - DNA, 9 bp, Unknown
  misc_feature (1)..( 9): Matrix.004 file - promoters50/1377564
aagtaataa

SEQ ID NO: 67384 - DNA, 7 bp, Unknown
  misc_feature (1)..( 7): Matrix.004 file - promoters50/1377564
caaaatc

SEQ ID NO: 67385 - DNA, 8 bp, Unknown
  misc_feature (1)..( 8): Matrix.004 file - promoters50/1377564
ttatgtct

SEQ ID NO: 67386 - DNA, 7 bp, Unknown
  misc_feature (1)..( 7): Matrix.004 file - promoters50/1377613
gatcgat

SEQ ID NO: 67387 - DNA, 8 bp, Unknown
  misc_feature (1)..( 8): Matrix.004 file - promoters50/1377613
caaacata

SEQ ID NO: 67388 - DNA, 9 bp, Unknown
  misc_feature (1)..( 9): Matrix.004 file - promoters50/1377613
tacaaaaaa

SEQ ID NO: 67389 - DNA, 9 bp, Unknown
  misc_feature (1)..( 9): Matrix.004 file - promoters50/1377613
aaaaataaa

SEQ ID NO: 67390 - DNA, 9 bp, Unknown
  misc_feature (1)..( 9): Matrix.004 file - promoters50/1377613
tataaaacc

SEQ ID NO: 67391 - DNA, 9 bp, Unknown
  misc_feature (1)..( 9): Matrix.004 file - promoters50/1377642
tataaaacc

SEQ ID NO: 67392 - DNA, 8 bp, Unknown
  misc_feature (1)..( 8): Matrix.004 file - promoters50/1377642
atttattt

SEQ ID NO: 67393 - DNA, 11 bp, Unknown
  misc_feature (1)..( 11): Matrix.004 file - promoters50/1377642
tatcaaaacaa

SEQ ID NO: 67394 - DNA, 8 bp, Unknown
  misc_feature (1)..( 8): Matrix.004 file - promoters50/1377642
aaacttta

SEQ ID NO: 67395 - DNA, 13 bp, Unknown
  misc_feature (1)..( 13): Matrix.004 file - promoters50/1377642
aaatataataaca

SEQ ID NO: 67396 - DNA, 10 bp, Unknown
  misc_feature (1)..( 10): Matrix.004 file - promoters50/1377642
tgattttgtt

SEQ ID NO: 67397 - DNA, 11 bp, Unknown
  misc_feature (1)..( 11): Matrix.004 file - promoters50/1377642
ataagaatatg

SEQ ID NO: 67398 - DNA, 9 bp, Unknown
  misc_feature (1)..( 9): Matrix.004 file - promoters50/1377642
ataaaaaat

SEQ ID NO: 67399 - DNA, 10 bp, Unknown
  misc_feature (1)..( 10): Matrix.004 file - promoters50/1377664
ttttatcaaa

SEQ ID NO: 67400 - DNA, 9 bp, Unknown
  misc_feature (1)..( 9): Matrix.004 file - promoters50/1377664
gttcatagc

SEQ ID NO: 67401 - DNA, 8 bp, Unknown
  misc_feature (1)..( 8): Matrix.004 file - promoters50/1377664
aaaaaaag

SEQ ID NO: 67402 - DNA, 11 bp, Unknown
  misc_feature (1)..( 11): Matrix.004 file - promoters50/1377664
ctaaaaataat

SEQ ID NO: 67403 - DNA, 9 bp, Unknown
  misc_feature (1)..( 9): Matrix.004 file - promoters50/1377680
aaaaaaatg

SEQ ID NO: 67404 - DNA, 10 bp, Unknown
  misc_feature (1)..( 10): Matrix.004 file - promoters50/1377680
aaatcatatt

SEQ ID NO: 67405 - DNA, 11 bp, Unknown
  misc_feature (1)..( 11): Matrix.004 file - promoters50/1377687
gtaataaatac

SEQ ID NO: 67406 - DNA, 15 bp, Unknown
  misc_feature (1)..( 15): Matrix.004 file - promoters50/1377687
acaaaaataaatcac

SEQ ID NO: 67407 - DNA, 8 bp, Unknown
  misc_feature (1)..( 8): Matrix.004 file - promoters50/1377687
aaaacaat

SEQ ID NO: 67408 - DNA, 7 bp, Unknown
  misc_feature (1)..( 7): Matrix.004 file - promoters50/1377714
cttatct

SEQ ID NO: 67409 - DNA, 15 bp, Unknown
  misc_feature (1)..( 15): Matrix.004 file - promoters50/1377714
gttattaattttttg

SEQ ID NO: 67410 - DNA, 11 bp, Unknown
  misc_feature (1)..( 11): Matrix.004 file - promoters50/1377718
atcttgataat

SEQ ID NO: 67411 - DNA, 10 bp, Unknown
  misc_feature (1)..( 10): Matrix.004 file - promoters50/1377734
taaatttgct

SEQ ID NO: 67412 - DNA, 7 bp, Unknown
  misc_feature (1)..( 7): Matrix.004 file - promoters50/1377740
ttgactc

SEQ ID NO: 67413 - DNA, 7 bp, Unknown
  misc_feature (1)..( 7): Matrix.004 file - promoters50/1377740
taaaatg

SEQ ID NO: 67414 - DNA, 11 bp, Unknown
  misc_feature (1)..( 11): Matrix.004 file - promoters50/1377740
cacataattaa

SEQ ID NO: 67415 - DNA, 11 bp, Unknown
  misc_feature (1)..( 11): Matrix.004 file - promoters50/1377740
ctgtcataatc

SEQ ID NO: 67416 - DNA, 9 bp, Unknown
  misc_feature (1)..( 9): Matrix.004 file - promoters50/1377835
ttaaaaaat

SEQ ID NO: 67417 - DNA, 7 bp, Unknown
  misc_feature (1)..( 7): Matrix.004 file - promoters50/1377835
aaaagat

SEQ ID NO: 67418 - DNA, 10 bp, Unknown
  misc_feature (1)..( 10): Matrix.004 file - promoters50/1377835
tttttcttcc

SEQ ID NO: 67419 - DNA, 10 bp, Unknown
  misc_feature (1)..( 10): Matrix.004 file - promoters50/1377835
gtaaaaattt

SEQ ID NO: 67420 - DNA, 11 bp, Unknown
  misc_feature (1)..( 11): Matrix.004 file - promoters50/1377835
caaactaattt

SEQ ID NO: 67421 - DNA, 12 bp, Unknown
  misc_feature (1)..( 12): Matrix.004 file - promoters50/1377835
agaaaacaaaat

SEQ ID NO: 67422 - DNA, 8 bp, Unknown
  misc_feature (1)..( 8): Matrix.004 file - promoters50/1377835
acaaaaca

SEQ ID NO: 67423 - DNA, 19 bp, Unknown
  misc_feature (1)..( 19): Matrix.004 file - promoters50/1377835
tttaattggtcaaaagaaa

SEQ ID NO: 67424 - DNA, 7 bp, Unknown
  misc_feature (1)..( 7): Matrix.004 file - promoters50/1377835
ccactaa

SEQ ID NO: 67425 - DNA, 9 bp, Unknown
  misc_feature (1)..( 9): Matrix.004 file - promoters50/1377835
agataaaaa

SEQ ID NO: 67426 - DNA, 9 bp, Unknown
  misc_feature (1)..( 9): Matrix.004 file - promoters50/1377847
cttattttt

SEQ ID NO: 67427 - DNA, 6 bp, Unknown
  misc_feature (1)..( 6): Matrix.004 file - promoters50/1377847
aaaacc

SEQ ID NO: 67428 - DNA, 10 bp, Unknown
  misc_feature (1)..( 10): Matrix.004 file - promoters50/1377847
attctcttaa

SEQ ID NO: 67429 - DNA, 6 bp, Unknown
  misc_feature (1)..( 6): Matrix.004 file - promoters50/1377847
aaaatc

SEQ ID NO: 67430 - DNA, 12 bp, Unknown
  misc_feature (1)..( 12): Matrix.004 file - promoters50/1377847
taataaagaaga

SEQ ID NO: 67431 - DNA, 12 bp, Unknown
  misc_feature (1)..( 12): Matrix.004 file - promoters50/1377893
acctttataaat

SEQ ID NO: 67432 - DNA, 6 bp, Unknown
  misc_feature (1)..( 6): Matrix.004 file - promoters50/1377929
attaaa

SEQ ID NO: 67433 - DNA, 11 bp, Unknown
  misc_feature (1)..( 11): Matrix.004 file - promoters50/1378049
ttacttaataa

SEQ ID NO: 67434 - DNA, 12 bp, Unknown
  misc_feature (1)..( 12): Matrix.004 file - promoters50/1378049
aaacaaatcttt

SEQ ID NO: 67435 - DNA, 8 bp, Unknown
  misc_feature (1)..( 8): Matrix.004 file - promoters50/1378049
aaaattaa

SEQ ID NO: 67436 - DNA, 6 bp, Unknown
  misc_feature (1)..( 6): Matrix.004 file - promoters50/1378049
gtaata

SEQ ID NO: 67437 - DNA, 12 bp, Unknown
  misc_feature (1)..( 12): Matrix.004 file - promoters50/1378049
tcaactttgaga

SEQ ID NO: 67438 - DNA, 10 bp, Unknown
  misc_feature (1)..( 10): Matrix.004 file - promoters50/1378049
aaatgatata

SEQ ID NO: 67439 - DNA, 7 bp, Unknown
  misc_feature (1)..( 7): Matrix.004 file - promoters50/1378061
aataata

SEQ ID NO: 67440 - DNA, 9 bp, Unknown
  misc_feature (1)..( 9): Matrix.004 file - promoters50/1378061
tttattttc

SEQ ID NO: 67441 - DNA, 9 bp, Unknown
  misc_feature (1)..( 9): Matrix.004 file - promoters50/1378061
atgtatatt

SEQ ID NO: 67442 - DNA, 10 bp, Unknown
  misc_feature (1)..( 10): Matrix.004 file - promoters50/1378061
tattaaattt

SEQ ID NO: 67443 - DNA, 9 bp, Unknown
  misc_feature (1)..( 9): Matrix.004 file - promoters50/1378061
aaccatata

SEQ ID NO: 67444 - DNA, 9 bp, Unknown
  misc_feature (1)..( 9): Matrix.004 file - promoters50/1378061
aacatttat

SEQ ID NO: 67445 - DNA, 14 bp, Unknown
  misc_feature (1)..( 14): Matrix.004 file - promoters50/1378078
gtgaaattcatttg

SEQ ID NO: 67446 - DNA, 9 bp, Unknown
  misc_feature (1)..( 9): Matrix.004 file - promoters50/1378088
taatttttg

SEQ ID NO: 67447 - DNA, 9 bp, Unknown
  misc_feature (1)..( 9): Matrix.004 file - promoters50/1378088
aaaaattat

SEQ ID NO: 67448 - DNA, 12 bp, Unknown
  misc_feature (1)..( 12): Matrix.004 file - promoters50/1378088
gaaaaattcttt

SEQ ID NO: 67449 - DNA, 9 bp, Unknown
  misc_feature (1)..( 9): Matrix.004 file - promoters50/1378088
aaaaacatt

SEQ ID NO: 67450 - DNA, 11 bp, Unknown
  misc_feature (1)..( 11): Matrix.004 file - promoters50/1378088
tcaaaattaaa

SEQ ID NO: 67451 - DNA, 10 bp, Unknown
  misc_feature (1)..( 10): Matrix.004 file - promoters50/1378088
taaaatttta

SEQ ID NO: 67452 - DNA, 10 bp, Unknown
  misc_feature (1)..( 10): Matrix.004 file - promoters50/1378088
actttataat

SEQ ID NO: 67453 - DNA, 10 bp, Unknown
  misc_feature (1)..( 10): Matrix.004 file - promoters50/1378088
gttaaaaaat

SEQ ID NO: 67454 - DNA, 12 bp, Unknown
  misc_feature (1)..( 12): Matrix.004 file - promoters50/1378088
taaaaatacaaa

SEQ ID NO: 67455 - DNA, 9 bp, Unknown
  misc_feature (1)..( 9): Matrix.004 file - promoters50/1378088
aattaatag

SEQ ID NO: 67456 - DNA, 13 bp, Unknown
  misc_feature (1)..( 13): Matrix.004 file - promoters50/1378287
ttataaaaagata

SEQ ID NO: 67457 - DNA, 18 bp, Unknown
  misc_feature (1)..( 18): Matrix.004 file - promoters50/1378333
taaatttaaaaaaccata

SEQ ID NO: 67458 - DNA, 7 bp, Unknown
  misc_feature (1)..( 7): Matrix.004 file - promoters50/1378357
gctgaaa

SEQ ID NO: 67459 - DNA, 9 bp, Unknown
  misc_feature (1)..( 9): Matrix.004 file - promoters50/1378393
gaggaagaa

SEQ ID NO: 67460 - DNA, 12 bp, Unknown
  misc_feature (1)..( 12): Matrix.004 file - promoters50/1378393
aagaaaagaaaa

SEQ ID NO: 67461 - DNA, 8 bp, Unknown
  misc_feature (1)..( 8): Matrix.004 file - promoters50/1378400
aaaaataa

SEQ ID NO: 67462 - DNA, 8 bp, Unknown
  misc_feature (1)..( 8): Matrix.004 file - promoters50/1378400
gaaaagaa

SEQ ID NO: 67463 - DNA, 13 bp, Unknown
  misc_feature (1)..( 13): Matrix.004 file - promoters50/1378400
agagagagaagag

SEQ ID NO: 67464 - DNA, 8 bp, Unknown
  misc_feature (1)..( 8): Matrix.004 file - promoters50/1378458
gaagagaa

SEQ ID NO: 67465 - DNA, 8 bp, Unknown
  misc_feature (1)..( 8): Matrix.004 file - promoters50/1378528
aaagaaaa

SEQ ID NO: 67466 - DNA, 13 bp, Unknown
  misc_feature (1)..( 13): Matrix.004 file - promoters50/1378528
tcttttaaataaa

SEQ ID NO: 67467 - DNA, 13 bp, Unknown
  misc_feature (1)..( 13): Matrix.004 file - promoters50/1378528
taataatgaaaaa

SEQ ID NO: 67468 - DNA, 10 bp, Unknown
  misc_feature (1)..( 10): Matrix.004 file - promoters50/1378528
aaataatttt

SEQ ID NO: 67469 - DNA, 11 bp, Unknown
  misc_feature (1)..( 11): Matrix.004 file - promoters50/1378528
ataatttaatt

SEQ ID NO: 67470 - DNA, 9 bp, Unknown
  misc_feature (1)..( 9): Matrix.004 file - promoters50/1378558
aattttcta

SEQ ID NO: 67471 - DNA, 10 bp, Unknown
  misc_feature (1)..( 10): Matrix.004 file - promoters50/1378558
attttgtttt

SEQ ID NO: 67472 - DNA, 9 bp, Unknown
  misc_feature (1)..( 9): Matrix.004 file - promoters50/1378577
gtattttta

SEQ ID NO: 67473 - DNA, 10 bp, Unknown
  misc_feature (1)..( 10): Matrix.004 file - promoters50/1378592
ttagcttctt

SEQ ID NO: 67474 - DNA, 13 bp, Unknown
  misc_feature (1)..( 13): Matrix.004 file - promoters50/1378592
gaatattaaagat

SEQ ID NO: 67475 - DNA, 11 bp, Unknown
  misc_feature (1)..( 11): Matrix.004 file - promoters50/1378622
taactttacta

SEQ ID NO: 67476 - DNA, 10 bp, Unknown
  misc_feature (1)..( 10): Matrix.004 file - promoters50/1378622
gataaaattt

SEQ ID NO: 67477 - DNA, 10 bp, Unknown
  misc_feature (1)..( 10): Matrix.004 file - promoters50/1378622
gttataatta

SEQ ID NO: 67478 - DNA, 6 bp, Unknown
  misc_feature (1)..( 6): Matrix.004 file - promoters50/1378622
ataaaa

SEQ ID NO: 67479 - DNA, 9 bp, Unknown
  misc_feature (1)..( 9): Matrix.004 file - promoters50/1378622
tcaaataaa

SEQ ID NO: 67480 - DNA, 7 bp, Unknown
  misc_feature (1)..( 7): Matrix.004 file - promoters50/1378622
agataaa

SEQ ID NO: 67481 - DNA, 13 bp, Unknown
  misc_feature (1)..( 13): Matrix.004 file - promoters50/1378636
ttgcatcaatatt

SEQ ID NO: 67482 - DNA, 7 bp, Unknown
  misc_feature (1)..( 7): Matrix.004 file - promoters50/1378636
tttactt

SEQ ID NO: 67483 - DNA, 8 bp, Unknown
  misc_feature (1)..( 8): Matrix.004 file - promoters50/1378636
tcaaattt

SEQ ID NO: 67484 - DNA, 7 bp, Unknown
  misc_feature (1)..( 7): Matrix.004 file - promoters50/1378636
tgaaaaa

SEQ ID NO: 67485 - DNA, 8 bp, Unknown
  misc_feature (1)..( 8): Matrix.004 file - promoters50/1378692
aaaagaaa

SEQ ID NO: 67486 - DNA, 10 bp, Unknown
  misc_feature (1)..( 10): Matrix.004 file - promoters50/1378788
tgatttataa

SEQ ID NO: 67487 - DNA, 7 bp, Unknown
  misc_feature (1)..( 7): Matrix.004 file - promoters50/1378788
attgaac

SEQ ID NO: 67488 - DNA, 10 bp, Unknown
  misc_feature (1)..( 10): Matrix.004 file - promoters50/1378788
aatttactaa

SEQ ID NO: 67489 - DNA, 9 bp, Unknown
  misc_feature (1)..( 9): Matrix.004 file - promoters50/1378788
cgtgtgttt

SEQ ID NO: 67490 - DNA, 12 bp, Unknown
  misc_feature (1)..( 12): Matrix.004 file - promoters50/1378800
tttataatttat

SEQ ID NO: 67491 - DNA, 8 bp, Unknown
  misc_feature (1)..( 8): Matrix.004 file - promoters50/1378800
gtttcttt

SEQ ID NO: 67492 - DNA, 7 bp, Unknown
  misc_feature (1)..( 7): Matrix.004 file - promoters50/1378800
ctttctt

SEQ ID NO: 67493 - DNA, 8 bp, Unknown
  misc_feature (1)..( 8): Matrix.004 file - promoters50/1378800
cataaaaa

SEQ ID NO: 67494 - DNA, 6 bp, Unknown
  misc_feature (1)..( 6): Matrix.004 file - promoters50/1378800
gttttt

SEQ ID NO: 67495 - DNA, 10 bp, Unknown
  misc_feature (1)..( 10): Matrix.004 file - promoters50/1378823
atttttttta

SEQ ID NO: 67496 - DNA, 8 bp, Unknown
  misc_feature (1)..( 8): Matrix.004 file - promoters50/1378823
ttatatct

SEQ ID NO: 67497 - DNA, 9 bp, Unknown
  misc_feature (1)..( 9): Matrix.004 file - promoters50/1378876
tatcatttt

SEQ ID NO: 67498 - DNA, 9 bp, Unknown
  misc_feature (1)..( 9): Matrix.004 file - promoters50/1378876
tgtatggct

SEQ ID NO: 67499 - DNA, 8 bp, Unknown
  misc_feature (1)..( 8): Matrix.004 file - promoters50/1378888
aagaaagt

SEQ ID NO: 67500 - DNA, 11 bp, Unknown
  misc_feature (1)..( 11): Matrix.004 file - promoters50/1378888
caagtatctga

SEQ ID NO: 67501 - DNA, 8 bp, Unknown
  misc_feature (1)..( 8): Matrix.004 file - promoters50/1379005
atatttgt

SEQ ID NO: 67502 - DNA, 9 bp, Unknown
  misc_feature (1)..( 9): Matrix.004 file - promoters50/1379005
atacactta

SEQ ID NO: 67503 - DNA, 7 bp, Unknown
  misc_feature (1)..( 7): Matrix.004 file - promoters50/1379014
attttac

SEQ ID NO: 67504 - DNA, 7 bp, Unknown
  misc_feature (1)..( 7): Matrix.004 file - promoters50/1379014
catgcaa

SEQ ID NO: 67505 - DNA, 8 bp, Unknown
  misc_feature (1)..( 8): Matrix.004 file - promoters50/1379037
aatttaaa

SEQ ID NO: 67506 - DNA, 11 bp, Unknown
  misc_feature (1)..( 11): Matrix.004 file - promoters50/1379037
ttcaaataaaa

SEQ ID NO: 67507 - DNA, 10 bp, Unknown
  misc_feature (1)..( 10): Matrix.004 file - promoters50/1379037
ccaaaatagt

SEQ ID NO: 67508 - DNA, 9 bp, Unknown
  misc_feature (1)..( 9): Matrix.004 file - promoters50/1379037
aagaaaaaa

SEQ ID NO: 67509 - DNA, 11 bp, Unknown
  misc_feature (1)..( 11): Matrix.004 file - promoters50/1379037
aaaaaactcaa

SEQ ID NO: 67510 - DNA, 12 bp, Unknown
  misc_feature (1)..( 12): Matrix.004 file - promoters50/1379037
aaataaatggaa

SEQ ID NO: 67511 - DNA, 8 bp, Unknown
  misc_feature (1)..( 8): Matrix.004 file - promoters50/1379037
gacaaaaa

SEQ ID NO: 67512 - DNA, 9 bp, Unknown
  misc_feature (1)..( 9): Matrix.004 file - promoters50/1379037
aaagtaaag

SEQ ID NO: 67513 - DNA, 9 bp, Unknown
  misc_feature (1)..( 9): Matrix.004 file - promoters50/1379037
agaaagaaa

SEQ ID NO: 67514 - DNA, 11 bp, Unknown
  misc_feature (1)..( 11): Matrix.004 file - promoters50/1379037
agaaaagaaaa

SEQ ID NO: 67515 - DNA, 10 bp, Unknown
  misc_feature (1)..( 10): Matrix.004 file - promoters50/1379043
aaataaaata

SEQ ID NO: 67516 - DNA, 9 bp, Unknown
  misc_feature (1)..( 9): Matrix.004 file - promoters50/1379050
gtatatata

SEQ ID NO: 67517 - DNA, 11 bp, Unknown
  misc_feature (1)..( 11): Matrix.004 file - promoters50/1379050
tgaatgaaaaa

SEQ ID NO: 67518 - DNA, 9 bp, Unknown
  misc_feature (1)..( 9): Matrix.004 file - promoters50/1379075
aatgaaaat

SEQ ID NO: 67519 - DNA, 9 bp, Unknown
  misc_feature (1)..( 9): Matrix.004 file - promoters50/1379075
aaaattaaa

SEQ ID NO: 67520 - DNA, 11 bp, Unknown
  misc_feature (1)..( 11): Matrix.004 file - promoters50/1379075
atttaaaatta

SEQ ID NO: 67521 - DNA, 10 bp, Unknown
  misc_feature (1)..( 10): Matrix.004 file - promoters50/1379075
acaataaaca

SEQ ID NO: 67522 - DNA, 10 bp, Unknown
  misc_feature (1)..( 10): Matrix.004 file - promoters50/1379075
cttttaaata

SEQ ID NO: 67523 - DNA, 15 bp, Unknown
  misc_feature (1)..( 15): Matrix.004 file - promoters50/1379075
tttttaattgtcaaa

SEQ ID NO: 67524 - DNA, 11 bp, Unknown
  misc_feature (1)..( 11): Matrix.004 file - promoters50/1379075
ttctttttcta

SEQ ID NO: 67525 - DNA, 11 bp, Unknown
  misc_feature (1)..( 11): Matrix.004 file - promoters50/1379141
tgcatttatat

SEQ ID NO: 67526 - DNA, 7 bp, Unknown
  misc_feature (1)..( 7): Matrix.004 file - promoters50/1379141
ataaaat

SEQ ID NO: 67527 - DNA, 8 bp, Unknown
  misc_feature (1)..( 8): Matrix.004 file - promoters50/1379166
aagttgat

SEQ ID NO: 67528 - DNA, 9 bp, Unknown
  misc_feature (1)..( 9): Matrix.004 file - promoters50/1379166
tctaaataa

SEQ ID NO: 67529 - DNA, 7 bp, Unknown
  misc_feature (1)..( 7): Matrix.004 file - promoters50/1379166
agaagag

SEQ ID NO: 67530 - DNA, 8 bp, Unknown
  misc_feature (1)..( 8): Matrix.004 file - promoters50/1379166
atcgagaa

SEQ ID NO: 67531 - DNA, 8 bp, Unknown
  misc_feature (1)..( 8): Matrix.004 file - promoters50/1379166
taaaccaa

SEQ ID NO: 67532 - DNA, 11 bp, Unknown
  misc_feature (1)..( 11): Matrix.004 file - promoters50/1379166
gagagtaaaaa

SEQ ID NO: 67533 - DNA, 8 bp, Unknown
  misc_feature (1)..( 8): Matrix.004 file - promoters50/1379166
gaaagaag

SEQ ID NO: 67534 - DNA, 9 bp, Unknown
  misc_feature (1)..( 9): Matrix.004 file - promoters50/1379201
aacccaaaa

SEQ ID NO: 67535 - DNA, 9 bp, Unknown
  misc_feature (1)..( 9): Matrix.004 file - promoters50/1379201
caaatttgc

SEQ ID NO: 67536 - DNA, 10 bp, Unknown
  misc_feature (1)..( 10): Matrix.004 file - promoters50/1379201
caaatttgtt

SEQ ID NO: 67537 - DNA, 11 bp, Unknown
  misc_feature (1)..( 11): Matrix.004 file - promoters50/1379201
gaaaaacacac

SEQ ID NO: 67538 - DNA, 6 bp, Unknown
  misc_feature (1)..( 6): Matrix.004 file - promoters50/1379201
tatatt

SEQ ID NO: 67539 - DNA, 9 bp, Unknown
  misc_feature (1)..( 9): Matrix.004 file - promoters50/1379201
acataatta

SEQ ID NO: 67540 - DNA, 8 bp, Unknown
  misc_feature (1)..( 8): Matrix.004 file - promoters50/1379213
aacaaaaa

SEQ ID NO: 67541 - DNA, 6 bp, Unknown
  misc_feature (1)..( 6): Matrix.004 file - promoters50/1379229
atattt

SEQ ID NO: 67542 - DNA, 9 bp, Unknown
  misc_feature (1)..( 9): Matrix.004 file - promoters50/1379229
gaaaaaaaa

SEQ ID NO: 67543 - DNA, 8 bp, Unknown
  misc_feature (1)..( 8): Matrix.004 file - promoters50/1379229
taaaagaa

SEQ ID NO: 67544 - DNA, 7 bp, Unknown
  misc_feature (1)..( 7): Matrix.004 file - promoters50/1379239
aaaaaca

SEQ ID NO: 67545 - DNA, 8 bp, Unknown
  misc_feature (1)..( 8): Matrix.004 file - promoters50/1379239
aaaacaaa

SEQ ID NO: 67546 - DNA, 9 bp, Unknown
  misc_feature (1)..( 9): Matrix.004 file - promoters50/1379239
aaattaaac

SEQ ID NO: 67547 - DNA, 9 bp, Unknown
  misc_feature (1)..( 9): Matrix.004 file - promoters50/1379295
tataaaaac

SEQ ID NO: 67548 - DNA, 12 bp, Unknown
  misc_feature (1)..( 12): Matrix.004 file - promoters50/1379313
aaaaaagaaaaa

SEQ ID NO: 67549 - DNA, 7 bp, Unknown
  misc_feature (1)..( 7): Matrix.004 file - promoters50/1379362
atcaaac

SEQ ID NO: 67550 - DNA, 9 bp, Unknown
  misc_feature (1)..( 9): Matrix.004 file - promoters50/1379362
ataatttaa

SEQ ID NO: 67551 - DNA, 8 bp, Unknown
  misc_feature (1)..( 8): Matrix.004 file - promoters50/1379362
aaaaataa

SEQ ID NO: 67552 - DNA, 7 bp, Unknown
  misc_feature (1)..( 7): Matrix.004 file - promoters50/1379366
aatatat

SEQ ID NO: 67553 - DNA, 8 bp, Unknown
  misc_feature (1)..( 8): Matrix.004 file - promoters50/1379366
ttaaaaaa

SEQ ID NO: 67554 - DNA, 7 bp, Unknown
  misc_feature (1)..( 7): Matrix.004 file - promoters50/1379366
agagaaa

SEQ ID NO: 67555 - DNA, 8 bp, Unknown
  misc_feature (1)..( 8): Matrix.004 file - promoters50/1379366
acgatgaa

SEQ ID NO: 67556 - DNA, 7 bp, Unknown
  misc_feature (1)..( 7): Matrix.004 file - promoters50/1379366
agatgaa

SEQ ID NO: 67557 - DNA, 8 bp, Unknown
  misc_feature (1)..( 8): Matrix.004 file - promoters50/1379366
tctacaca

SEQ ID NO: 67558 - DNA, 9 bp, Unknown
  misc_feature (1)..( 9): Matrix.004 file - promoters50/1379450
tgtctcatt

SEQ ID NO: 67559 - DNA, 10 bp, Unknown
  misc_feature (1)..( 10): Matrix.004 file - promoters50/1379450
agaggaagaa

SEQ ID NO: 67560 - DNA, 11 bp, Unknown
  misc_feature (1)..( 11): Matrix.004 file - promoters50/1379496
gagaaagaaag

SEQ ID NO: 67561 - DNA, 9 bp, Unknown
  misc_feature (1)..( 9): Matrix.004 file - promoters50/1379496
actaaattt

SEQ ID NO: 67562 - DNA, 13 bp, Unknown
  misc_feature (1)..( 13): Matrix.004 file - promoters50/1379496
gatttttctaata

SEQ ID NO: 67563 - DNA, 9 bp, Unknown
  misc_feature (1)..( 9): Matrix.004 file - promoters50/1379496
taaaaatta

SEQ ID NO: 67564 - DNA, 11 bp, Unknown
  misc_feature (1)..( 11): Matrix.004 file - promoters50/1379496
aataaaaatgt

SEQ ID NO: 67565 - DNA, 10 bp, Unknown
  misc_feature (1)..( 10): Matrix.004 file - promoters50/1379496
aattttcata

SEQ ID NO: 67566 - DNA, 11 bp, Unknown
  misc_feature (1)..( 11): Matrix.004 file - promoters50/1379586
ttaaattattc

SEQ ID NO: 67567 - DNA, 10 bp, Unknown
  misc_feature (1)..( 10): Matrix.004 file - promoters50/1379607
aatatacaat

SEQ ID NO: 67568 - DNA, 18 bp, Unknown
  misc_feature (1)..( 18): Matrix.004 file - promoters50/1379691
tatattcaatattttata

SEQ ID NO: 67569 - DNA, 8 bp, Unknown
  misc_feature (1)..( 8): Matrix.004 file - promoters50/1379691
cttttaag

SEQ ID NO: 67570 - DNA, 6 bp, Unknown
  misc_feature (1)..( 6): Matrix.004 file - promoters50/1379691
aattaa

SEQ ID NO: 67571 - DNA, 9 bp, Unknown
  misc_feature (1)..( 9): Matrix.004 file - promoters50/1379719
tcataagaa

SEQ ID NO: 67572 - DNA, 10 bp, Unknown
  misc_feature (1)..( 10): Matrix.004 file - promoters50/1379777
gatttgtggt

SEQ ID NO: 67573 - DNA, 9 bp, Unknown
  misc_feature (1)..( 9): Matrix.004 file - promoters50/1379893
tgacacaac

SEQ ID NO: 67574 - DNA, 9 bp, Unknown
  misc_feature (1)..( 9): Matrix.004 file - promoters50/1379893
aatttcatc

SEQ ID NO: 67575 - DNA, 8 bp, Unknown
  misc_feature (1)..( 8): Matrix.004 file - promoters50/1379916
tttgtatt

SEQ ID NO: 67576 - DNA, 8 bp, Unknown
  misc_feature (1)..( 8): Matrix.004 file - promoters50/1379916
tttgttct

SEQ ID NO: 67577 - DNA, 10 bp, Unknown
  misc_feature (1)..( 10): Matrix.004 file - promoters50/1379916
tataataaaa

SEQ ID NO: 67578 - DNA, 8 bp, Unknown
  misc_feature (1)..( 8): Matrix.004 file - promoters50/1379916
gttttttg

SEQ ID NO: 67579 - DNA, 10 bp, Unknown
  misc_feature (1)..( 10): Matrix.004 file - promoters50/1379916
tctttttcga

SEQ ID NO: 67580 - DNA, 9 bp, Unknown
  misc_feature (1)..( 9): Matrix.004 file - promoters50/1379928
aattgtttt

SEQ ID NO: 67581 - DNA, 8 bp, Unknown
  misc_feature (1)..( 8): Matrix.004 file - promoters50/1379981
aaaacaaa

SEQ ID NO: 67582 - DNA, 8 bp, Unknown
  misc_feature (1)..( 8): Matrix.004 file - promoters50/1379981
ttttttaa

SEQ ID NO: 67583 - DNA, 9 bp, Unknown
  misc_feature (1)..( 9): Matrix.004 file - promoters50/1379981
taaattaaa

SEQ ID NO: 67584 - DNA, 8 bp, Unknown
  misc_feature (1)..( 8): Matrix.004 file - promoters50/1379981
ttaaaaag

SEQ ID NO: 67585 - DNA, 10 bp, Unknown
  misc_feature (1)..( 10): Matrix.004 file - promoters50/1380020
cttaaataat

SEQ ID NO: 67586 - DNA, 9 bp, Unknown
  misc_feature (1)..( 9): Matrix.004 file - promoters50/1380085
acaaattga

SEQ ID NO: 67587 - DNA, 12 bp, Unknown
  misc_feature (1)..( 12): Matrix.004 file - promoters50/1380135
aatttttgaatg

SEQ ID NO: 67588 - DNA, 8 bp, Unknown
  misc_feature (1)..( 8): Matrix.004 file - promoters50/1380135
aacaatat

SEQ ID NO: 67589 - DNA, 8 bp, Unknown
  misc_feature (1)..( 8): Matrix.004 file - promoters50/1380135
aattatat

SEQ ID NO: 67590 - DNA, 9 bp, Unknown
  misc_feature (1)..( 9): Matrix.004 file - promoters50/1380163
gaagaaaaa

SEQ ID NO: 67591 - DNA, 8 bp, Unknown
  misc_feature (1)..( 8): Matrix.004 file - promoters50/1380163
caataatt

SEQ ID NO: 67592 - DNA, 8 bp, Unknown
  misc_feature (1)..( 8): Matrix.004 file - promoters50/1380224
taaaacca

SEQ ID NO: 67593 - DNA, 7 bp, Unknown
  misc_feature (1)..( 7): Matrix.004 file - promoters50/1380309
atcattt

SEQ ID NO: 67594 - DNA, 11 bp, Unknown
  misc_feature (1)..( 11): Matrix.004 file - promoters50/1380309
tacttaaactt

SEQ ID NO: 67595 - DNA, 9 bp, Unknown
  misc_feature (1)..( 9): Matrix.004 file - promoters50/1380309
aacataaat

SEQ ID NO: 67596 - DNA, 12 bp, Unknown
  misc_feature (1)..( 12): Matrix.004 file - promoters50/1380389
aaaaataaaaaa

SEQ ID NO: 67597 - DNA, 8 bp, Unknown
  misc_feature (1)..( 8): Matrix.004 file - promoters50/1380389
taaatcaa

SEQ ID NO: 67598 - DNA, 11 bp, Unknown
  misc_feature (1)..( 11): Matrix.004 file - promoters50/1380389
atcttttcaat

SEQ ID NO: 67599 - DNA, 11 bp, Unknown
  misc_feature (1)..( 11): Matrix.004 file - promoters50/1380389
caaaaatatga

SEQ ID NO: 67600 - DNA, 10 bp, Unknown
  misc_feature (1)..( 10): Matrix.004 file - promoters50/1380418
caataaatca

SEQ ID NO: 67601 - DNA, 12 bp, Unknown
  misc_feature (1)..( 12): Matrix.004 file - promoters50/1380418
actttttcataa

SEQ ID NO: 67602 - DNA, 8 bp, Unknown
  misc_feature (1)..( 8): Matrix.004 file - promoters50/1380424
ttttctag

SEQ ID NO: 67603 - DNA, 7 bp, Unknown
  misc_feature (1)..( 7): Matrix.004 file - promoters50/1380424
attccaa

SEQ ID NO: 67604 - DNA, 7 bp, Unknown
  misc_feature (1)..( 7): Matrix.004 file - promoters50/1380437
tgaaatt

SEQ ID NO: 67605 - DNA, 7 bp, Unknown
  misc_feature (1)..( 7): Matrix.004 file - promoters50/1380437
aacaaaa

SEQ ID NO: 67606 - DNA, 9 bp, Unknown
  misc_feature (1)..( 9): Matrix.004 file - promoters50/1380519
aaagaaaag

SEQ ID NO: 67607 - DNA, 9 bp, Unknown
  misc_feature (1)..( 9): Matrix.004 file - promoters50/1380519
tctcaaact

SEQ ID NO: 67608 - DNA, 8 bp, Unknown
  misc_feature (1)..( 8): Matrix.004 file - promoters50/1380708
gagcaaaa

SEQ ID NO: 67609 - DNA, 7 bp, Unknown
  misc_feature (1)..( 7): Matrix.004 file - promoters50/1380708
aattttt

SEQ ID NO: 67610 - DNA, 11 bp, Unknown
  misc_feature (1)..( 11): Matrix.004 file - promoters50/1380708
taaaatttttt

SEQ ID NO: 67611 - DNA, 9 bp, Unknown
  misc_feature (1)..( 9): Matrix.004 file - promoters50/1380738
tttattcag

SEQ ID NO: 67612 - DNA, 13 bp, Unknown
  misc_feature (1)..( 13): Matrix.004 file - promoters50/1380738
ttaaattataaaa

SEQ ID NO: 67613 - DNA, 13 bp, Unknown
  misc_feature (1)..( 13): Matrix.004 file - promoters50/1380738
tgtaattaaaaac

SEQ ID NO: 67614 - DNA, 14 bp, Unknown
  misc_feature (1)..( 14): Matrix.004 file - promoters50/1380738
tattttttactaaa

SEQ ID NO: 67615 - DNA, 11 bp, Unknown
  misc_feature (1)..( 11): Matrix.004 file - promoters50/1380797
tttaaatgtat

SEQ ID NO: 67616 - DNA, 8 bp, Unknown
  misc_feature (1)..( 8): Matrix.004 file - promoters50/1380797
attatgga

SEQ ID NO: 67617 - DNA, 7 bp, Unknown
  misc_feature (1)..( 7): Matrix.004 file - promoters50/1380797
aatgaat

SEQ ID NO: 67618 - DNA, 7 bp, Unknown
  misc_feature (1)..( 7): Matrix.004 file - promoters50/1380849
aaaaagt

SEQ ID NO: 67619 - DNA, 12 bp, Unknown
  misc_feature (1)..( 12): Matrix.004 file - promoters50/1380849
cttatttttctt

SEQ ID NO: 67620 - DNA, 16 bp, Unknown
  misc_feature (1)..( 16): Matrix.004 file - promoters50/1380849
tgattaatctttgaga

SEQ ID NO: 67621 - DNA, 9 bp, Unknown
  misc_feature (1)..( 9): Matrix.004 file - promoters50/1380849
aaatctttt

SEQ ID NO: 67622 - DNA, 9 bp, Unknown
  misc_feature (1)..( 9): Matrix.004 file - promoters50/1380849
aattaatta

SEQ ID NO: 67623 - DNA, 10 bp, Unknown
  misc_feature (1)..( 10): Matrix.004 file - promoters50/1380947
tttttagatc

SEQ ID NO: 67624 - DNA, 7 bp, Unknown
  misc_feature (1)..( 7): Matrix.004 file - promoters50/1380963
gatcgaa

SEQ ID NO: 67625 - DNA, 10 bp, Unknown
  misc_feature (1)..( 10): Matrix.004 file - promoters50/1380963
tattatataa

SEQ ID NO: 67626 - DNA, 7 bp, Unknown
  misc_feature (1)..( 7): Matrix.004 file - promoters50/1380963
tatataa

SEQ ID NO: 67627 - DNA, 12 bp, Unknown
  misc_feature (1)..( 12): Matrix.004 file - promoters50/1380963
tataattaatgc

SEQ ID NO: 67628 - DNA, 11 bp, Unknown
  misc_feature (1)..( 11): Matrix.004 file - promoters50/1381002
ccaaccaattg

SEQ ID NO: 67629 - DNA, 14 bp, Unknown
  misc_feature (1)..( 14): Matrix.004 file - promoters50/1381002
tatgaaacttactt

SEQ ID NO: 67630 - DNA, 13 bp, Unknown
  misc_feature (1)..( 13): Matrix.004 file - promoters50/1381033
gaataaaataaag

SEQ ID NO: 67631 - DNA, 11 bp, Unknown
  misc_feature (1)..( 11): Matrix.004 file - promoters50/1381097
ttataaatatc

SEQ ID NO: 67632 - DNA, 12 bp, Unknown
  misc_feature (1)..( 12): Matrix.004 file - promoters50/1381097
taaggcaaattt

SEQ ID NO: 67633 - DNA, 9 bp, Unknown
  misc_feature (1)..( 9): Matrix.004 file - promoters50/1381097
tattgaaat

SEQ ID NO: 67634 - DNA, 10 bp, Unknown
  misc_feature (1)..( 10): Matrix.004 file - promoters50/1381097
tttatataat

SEQ ID NO: 67635 - DNA, 9 bp, Unknown
  misc_feature (1)..( 9): Matrix.004 file - promoters50/1381097
agaaaaaat

SEQ ID NO: 67636 - DNA, 9 bp, Unknown
  misc_feature (1)..( 9): Matrix.004 file - promoters50/1381097
gaaaaaata

SEQ ID NO: 67637 - DNA, 13 bp, Unknown
  misc_feature (1)..( 13): Matrix.004 file - promoters50/1381097
ttgatttttaaat

SEQ ID NO: 67638 - DNA, 15 bp, Unknown
  misc_feature (1)..( 15): Matrix.004 file - promoters50/1381097
tttggatatgtattt

SEQ ID NO: 67639 - DNA, 9 bp, Unknown
  misc_feature (1)..( 9): Matrix.004 file - promoters50/1381119
ccaaacttt

SEQ ID NO: 67640 - DNA, 13 bp, Unknown
  misc_feature (1)..( 13): Matrix.004 file - promoters50/1381119
ttaattttaaata

SEQ ID NO: 67641 - DNA, 10 bp, Unknown
  misc_feature (1)..( 10): Matrix.004 file - promoters50/1381119
tttactattt

SEQ ID NO: 67642 - DNA, 8 bp, Unknown
  misc_feature (1)..( 8): Matrix.004 file - promoters50/1381119
tattttta

SEQ ID NO: 67643 - DNA, 9 bp, Unknown
  misc_feature (1)..( 9): Matrix.004 file - promoters50/1381119
tttttaatt

SEQ ID NO: 67644 - DNA, 10 bp, Unknown
  misc_feature (1)..( 10): Matrix.004 file - promoters50/1381155
tttcatttat

SEQ ID NO: 67645 - DNA, 9 bp, Unknown
  misc_feature (1)..( 9): Matrix.004 file - promoters50/1381187
tttctactt

SEQ ID NO: 67646 - DNA, 13 bp, Unknown
  misc_feature (1)..( 13): Matrix.004 file - promoters50/1381187
aattatacattat

SEQ ID NO: 67647 - DNA, 7 bp, Unknown
  misc_feature (1)..( 7): Matrix.004 file - promoters50/1381187
tttctca

SEQ ID NO: 67648 - DNA, 8 bp, Unknown
  misc_feature (1)..( 8): Matrix.004 file - promoters50/1381187
aaagacat

SEQ ID NO: 67649 - DNA, 7 bp, Unknown
  misc_feature (1)..( 7): Matrix.004 file - promoters50/1381187
tgaataa

SEQ ID NO: 67650 - DNA, 9 bp, Unknown
  misc_feature (1)..( 9): Matrix.004 file - promoters50/1381187
ctcactttt

SEQ ID NO: 67651 - DNA, 8 bp, Unknown
  misc_feature (1)..( 8): Matrix.004 file - promoters50/1381187
taaattaa

SEQ ID NO: 67652 - DNA, 9 bp, Unknown
  misc_feature (1)..( 9): Matrix.004 file - promoters50/1381187
tttggtttc

SEQ ID NO: 67653 - DNA, 8 bp, Unknown
  misc_feature (1)..( 8): Matrix.004 file - promoters50/1381195
tttagttt

SEQ ID NO: 67654 - DNA, 7 bp, Unknown
  misc_feature (1)..( 7): Matrix.004 file - promoters50/1381321
taaatgg

SEQ ID NO: 67655 - DNA, 14 bp, Unknown
  misc_feature (1)..( 14): Matrix.004 file - promoters50/1381334
tcaaagagaaattc

SEQ ID NO: 67656 - DNA, 8 bp, Unknown
  misc_feature (1)..( 8): Matrix.004 file - promoters50/1381342
ttaaattg

SEQ ID NO: 67657 - DNA, 8 bp, Unknown
  misc_feature (1)..( 8): Matrix.004 file - promoters50/1381342
ttactttc

SEQ ID NO: 67658 - DNA, 9 bp, Unknown
  misc_feature (1)..( 9): Matrix.004 file - promoters50/1381387
tttttctca

SEQ ID NO: 67659 - DNA, 13 bp, Unknown
  misc_feature (1)..( 13): Matrix.004 file - promoters50/1381457
aatatgatttaac

SEQ ID NO: 67660 - DNA, 8 bp, Unknown
  misc_feature (1)..( 8): Matrix.004 file - promoters50/1381481
aggctatg

SEQ ID NO: 67661 - DNA, 11 bp, Unknown
  misc_feature (1)..( 11): Matrix.004 file - promoters50/1381481
aaaacataaat

SEQ ID NO: 67662 - DNA, 6 bp, Unknown
  misc_feature (1)..( 6): Matrix.004 file - promoters50/1381491
tttcga

SEQ ID NO: 67663 - DNA, 8 bp, Unknown
  misc_feature (1)..( 8): Matrix.004 file - promoters50/1381491
acatttaa

SEQ ID NO: 67664 - DNA, 8 bp, Unknown
  misc_feature (1)..( 8): Matrix.004 file - promoters50/1381491
aaacacaa

SEQ ID NO: 67665 - DNA, 11 bp, Unknown
  misc_feature (1)..( 11): Matrix.004 file - promoters50/1381491
gaagcaaaacc

SEQ ID NO: 67666 - DNA, 10 bp, Unknown
  misc_feature (1)..( 10): Matrix.004 file - promoters50/1381491
aaaaaaacac

SEQ ID NO: 67667 - DNA, 8 bp, Unknown
  misc_feature (1)..( 8): Matrix.004 file - promoters50/1381491
attgaatt

SEQ ID NO: 67668 - DNA, 14 bp, Unknown
  misc_feature (1)..( 14): Matrix.004 file - promoters50/1381491
tctctcttatataa

SEQ ID NO: 67669 - DNA, 8 bp, Unknown
  misc_feature (1)..( 8): Matrix.004 file - promoters50/1381491
acatttaa

SEQ ID NO: 67670 - DNA, 7 bp, Unknown
  misc_feature (1)..( 7): Matrix.004 file - promoters50/1381491
gttttat

SEQ ID NO: 67671 - DNA, 9 bp, Unknown
  misc_feature (1)..( 9): Matrix.004 file - promoters50/1381537
aaagaaaat

SEQ ID NO: 67672 - DNA, 9 bp, Unknown
  misc_feature (1)..( 9): Matrix.004 file - promoters50/1381537
taaaacaaa

SEQ ID NO: 67673 - DNA, 11 bp, Unknown
  misc_feature (1)..( 11): Matrix.004 file - promoters50/1381537
aaaatccttta

SEQ ID NO: 67674 - DNA, 8 bp, Unknown
  misc_feature (1)..( 8): Matrix.004 file - promoters50/1381563
ttttgttt

SEQ ID NO: 67675 - DNA, 13 bp, Unknown
  misc_feature (1)..( 13): Matrix.004 file - promoters50/1381563
tgaatctgataaa

SEQ ID NO: 67676 - DNA, 12 bp, Unknown
  misc_feature (1)..( 12): Matrix.004 file - promoters50/1381563
ctttagaaaaaa

SEQ ID NO: 67677 - DNA, 11 bp, Unknown
  misc_feature (1)..( 11): Matrix.004 file - promoters50/1381563
aatttaaaatg

SEQ ID NO: 67678 - DNA, 12 bp, Unknown
  misc_feature (1)..( 12): Matrix.004 file - promoters50/1381563
ttcttaaaaatc

SEQ ID NO: 67679 - DNA, 9 bp, Unknown
  misc_feature (1)..( 9): Matrix.004 file - promoters50/1381579
caaacatta

SEQ ID NO: 67680 - DNA, 13 bp, Unknown
  misc_feature (1)..( 13): Matrix.004 file - promoters50/1381579
aagccaattagaa

SEQ ID NO: 67681 - DNA, 8 bp, Unknown
  misc_feature (1)..( 8): Matrix.004 file - promoters50/1381647
ttttctat

SEQ ID NO: 67682 - DNA, 12 bp, Unknown
  misc_feature (1)..( 12): Matrix.004 file - promoters50/1381704
ataagtctgaat

SEQ ID NO: 67683 - DNA, 11 bp, Unknown
  misc_feature (1)..( 11): Matrix.004 file - promoters50/1381704
gtaataaaaaa

SEQ ID NO: 67684 - DNA, 8 bp, Unknown
  misc_feature (1)..( 8): Matrix.004 file - promoters50/1381818
aaaaacta

SEQ ID NO: 67685 - DNA, 12 bp, Unknown
  misc_feature (1)..( 12): Matrix.004 file - promoters50/1381818
aaaataaactta

SEQ ID NO: 67686 - DNA, 12 bp, Unknown
  misc_feature (1)..( 12): Matrix.004 file - promoters50/1381818
tataaaaaatga

SEQ ID NO: 67687 - DNA, 9 bp, Unknown
  misc_feature (1)..( 9): Matrix.004 file - promoters50/1381818
aaaaaaaac

SEQ ID NO: 67688 - DNA, 7 bp, Unknown
  misc_feature (1)..( 7): Matrix.004 file - promoters50/1381818
aaaaaaa

SEQ ID NO: 67689 - DNA, 11 bp, Unknown
  misc_feature (1)..( 11): Matrix.004 file - promoters50/1381896
catattattat

SEQ ID NO: 67690 - DNA, 12 bp, Unknown
  misc_feature (1)..( 12): Matrix.004 file - promoters50/1381903
gaagatatttac

SEQ ID NO: 67691 - DNA, 8 bp, Unknown
  misc_feature (1)..( 8): Matrix.004 file - promoters50/1381903
catagatt

SEQ ID NO: 67692 - DNA, 11 bp, Unknown
  misc_feature (1)..( 11): Matrix.004 file - promoters50/1381903
aactaaatagt

SEQ ID NO: 67693 - DNA, 7 bp, Unknown
  misc_feature (1)..( 7): Matrix.004 file - promoters50/1381903
ctaaatt

SEQ ID NO: 67694 - DNA, 8 bp, Unknown
  misc_feature (1)..( 8): Matrix.004 file - promoters50/1381903
tttgattt

SEQ ID NO: 67695 - DNA, 8 bp, Unknown
  misc_feature (1)..( 8): Matrix.004 file - promoters50/1381911
atgaaata

SEQ ID NO: 67696 - DNA, 8 bp, Unknown
  misc_feature (1)..( 8): Matrix.004 file - promoters50/1381911
taatattg

SEQ ID NO: 67697 - DNA, 8 bp, Unknown
  misc_feature (1)..( 8): Matrix.004 file - promoters50/1381911
aaatgaaa

SEQ ID NO: 67698 - DNA, 8 bp, Unknown
  misc_feature (1)..( 8): Matrix.004 file - promoters50/1381911
ttattact

SEQ ID NO: 67699 - DNA, 8 bp, Unknown
  misc_feature (1)..( 8): Matrix.004 file - promoters50/1381915
catattaa

SEQ ID NO: 67700 - DNA, 8 bp, Unknown
  misc_feature (1)..( 8): Matrix.004 file - promoters50/1381915
ccactaag

SEQ ID NO: 67701 - DNA, 8 bp, Unknown
  misc_feature (1)..( 8): Matrix.004 file - promoters50/1381926
tcctattt

SEQ ID NO: 67702 - DNA, 10 bp, Unknown
  misc_feature (1)..( 10): Matrix.004 file - promoters50/1382033
attattgatt

SEQ ID NO: 67703 - DNA, 9 bp, Unknown
  misc_feature (1)..( 9): Matrix.004 file - promoters50/1382033
tttgttttt

SEQ ID NO: 67704 - DNA, 9 bp, Unknown
  misc_feature (1)..( 9): Matrix.004 file - promoters50/1382084
caaattgga

SEQ ID NO: 67705 - DNA, 11 bp, Unknown
  misc_feature (1)..( 11): Matrix.004 file - promoters50/1382084
tttgcaattat

SEQ ID NO: 67706 - DNA, 8 bp, Unknown
  misc_feature (1)..( 8): Matrix.004 file - promoters50/1382119
atttaatg

SEQ ID NO: 67707 - DNA, 12 bp, Unknown
  misc_feature (1)..( 12): Matrix.004 file - promoters50/1382119
tataaattaaag

SEQ ID NO: 67708 - DNA, 11 bp, Unknown
  misc_feature (1)..( 11): Matrix.004 file - promoters50/1382119
aaatatataaa

SEQ ID NO: 67709 - DNA, 9 bp, Unknown
  misc_feature (1)..( 9): Matrix.004 file - promoters50/1382128
aaataaaaa

SEQ ID NO: 67710 - DNA, 7 bp, Unknown
  misc_feature (1)..( 7): Matrix.004 file - promoters50/1382134
aaaaaat

SEQ ID NO: 67711 - DNA, 15 bp, Unknown
  misc_feature (1)..( 15): Matrix.004 file - promoters50/1382134
aattatgatatttaa

SEQ ID NO: 67712 - DNA, 12 bp, Unknown
  misc_feature (1)..( 12): Matrix.004 file - promoters50/1382134
aataaaccataa

SEQ ID NO: 67713 - DNA, 8 bp, Unknown
  misc_feature (1)..( 8): Matrix.004 file - promoters50/1382134
taatattt

SEQ ID NO: 67714 - DNA, 12 bp, Unknown
  misc_feature (1)..( 12): Matrix.004 file - promoters50/1382134
taacacttttta

SEQ ID NO: 67715 - DNA, 8 bp, Unknown
  misc_feature (1)..( 8): Matrix.004 file - promoters50/1382134
aaatttaa

SEQ ID NO: 67716 - DNA, 12 bp, Unknown
  misc_feature (1)..( 12): Matrix.004 file - promoters50/1382202
gttttatatttt

SEQ ID NO: 67717 - DNA, 12 bp, Unknown
  misc_feature (1)..( 12): Matrix.004 file - promoters50/1382202
cagatcaaacaa

SEQ ID NO: 67718 - DNA, 8 bp, Unknown
  misc_feature (1)..( 8): Matrix.004 file - promoters50/1382202
tgaaagca

SEQ ID NO: 67719 - DNA, 9 bp, Unknown
  misc_feature (1)..( 9): Matrix.004 file - promoters50/1382202
caattactt

SEQ ID NO: 67720 - DNA, 9 bp, Unknown
  misc_feature (1)..( 9): Matrix.004 file - promoters50/1382215
gaagatatg

SEQ ID NO: 67721 - DNA, 10 bp, Unknown
  misc_feature (1)..( 10): Matrix.004 file - promoters50/1382215
acatgtttca

SEQ ID NO: 67722 - DNA, 8 bp, Unknown
  misc_feature (1)..( 8): Matrix.004 file - promoters50/1382281
aaataaaa

SEQ ID NO: 67723 - DNA, 9 bp, Unknown
  misc_feature (1)..( 9): Matrix.004 file - promoters50/1382281
taaatgaat

SEQ ID NO: 67724 - DNA, 12 bp, Unknown
  misc_feature (1)..( 12): Matrix.004 file - promoters50/1382281
tagtgtttaaaa

SEQ ID NO: 67725 - DNA, 9 bp, Unknown
  misc_feature (1)..( 9): Matrix.004 file - promoters50/1382281
aaaataaat

SEQ ID NO: 67726 - DNA, 6 bp, Unknown
  misc_feature (1)..( 6): Matrix.004 file - promoters50/1382281
taaatg

SEQ ID NO: 67727 - DNA, 11 bp, Unknown
  misc_feature (1)..( 11): Matrix.004 file - promoters50/1382302
ttttcgaaaaa

SEQ ID NO: 67728 - DNA, 9 bp, Unknown
  misc_feature (1)..( 9): Matrix.004 file - promoters50/1382302
taataaagt

SEQ ID NO: 67729 - DNA, 12 bp, Unknown
  misc_feature (1)..( 12): Matrix.004 file - promoters50/1382347
ttaaaaatacaa

SEQ ID NO: 67730 - DNA, 8 bp, Unknown
  misc_feature (1)..( 8): Matrix.004 file - promoters50/1382347
ttttgatt

SEQ ID NO: 67731 - DNA, 8 bp, Unknown
  misc_feature (1)..( 8): Matrix.004 file - promoters50/1382347
ctatcaaa

SEQ ID NO: 67732 - DNA, 9 bp, Unknown
  misc_feature (1)..( 9): Matrix.004 file - promoters50/1382347
cttgattgt

SEQ ID NO: 67733 - DNA, 9 bp, Unknown
  misc_feature (1)..( 9): Matrix.004 file - promoters50/1382347
tctatatat

SEQ ID NO: 67734 - DNA, 8 bp, Unknown
  misc_feature (1)..( 8): Matrix.004 file - promoters50/1382347
cttctctt

SEQ ID NO: 67735 - DNA, 7 bp, Unknown
  misc_feature (1)..( 7): Matrix.004 file - promoters50/1382347
taaattt

SEQ ID NO: 67736 - DNA, 7 bp, Unknown
  misc_feature (1)..( 7): Matrix.004 file - promoters50/1382347
tattttt

SEQ ID NO: 67737 - DNA, 8 bp, Unknown
  misc_feature (1)..( 8): Matrix.004 file - promoters50/1382347
tgttttgt

SEQ ID NO: 67738 - DNA, 10 bp, Unknown
  misc_feature (1)..( 10): Matrix.004 file - promoters50/1382347
aacaaaaacg

SEQ ID NO: 67739 - DNA, 7 bp, Unknown
  misc_feature (1)..( 7): Matrix.004 file - promoters50/1382347
aatataa

SEQ ID NO: 67740 - DNA, 8 bp, Unknown
  misc_feature (1)..( 8): Matrix.004 file - promoters50/1382347
taaccatt

SEQ ID NO: 67741 - DNA, 7 bp, Unknown
  misc_feature (1)..( 7): Matrix.004 file - promoters50/1382505
ttaacca

SEQ ID NO: 67742 - DNA, 8 bp, Unknown
  misc_feature (1)..( 8): Matrix.004 file - promoters50/1382505
atatatgt

SEQ ID NO: 67743 - DNA, 9 bp, Unknown
  misc_feature (1)..( 9): Matrix.004 file - promoters50/1382505
attttaaaa

SEQ ID NO: 67744 - DNA, 7 bp, Unknown
  misc_feature (1)..( 7): Matrix.004 file - promoters50/1382505
attattt

SEQ ID NO: 67745 - DNA, 8 bp, Unknown
  misc_feature (1)..( 8): Matrix.004 file - promoters50/1382505
caggaaat

SEQ ID NO: 67746 - DNA, 9 bp, Unknown
  misc_feature (1)..( 9): Matrix.004 file - promoters50/1382505
atgtttata

SEQ ID NO: 67747 - DNA, 8 bp, Unknown
  misc_feature (1)..( 8): Matrix.004 file - promoters50/1382505
ttaattta

SEQ ID NO: 67748 - DNA, 7 bp, Unknown
  misc_feature (1)..( 7): Matrix.004 file - promoters50/1382581
tttcatg

SEQ ID NO: 67749 - DNA, 8 bp, Unknown
  misc_feature (1)..( 8): Matrix.004 file - promoters50/1382581
aagtaaaa

SEQ ID NO: 67750 - DNA, 9 bp, Unknown
  misc_feature (1)..( 9): Matrix.004 file - promoters50/1382581
taacaaaag

SEQ ID NO: 67751 - DNA, 15 bp, Unknown
  misc_feature (1)..( 15): Matrix.004 file - promoters50/1382581
taagaaatatgtttt

SEQ ID NO: 67752 - DNA, 20 bp, Unknown
  misc_feature (1)..( 20): Matrix.004 file - promoters50/1382581
catataatctatataaaccc

SEQ ID NO: 67753 - DNA, 13 bp, Unknown
  misc_feature (1)..( 13): Matrix.004 file - promoters50/1382709
tctatataaaccc

SEQ ID NO: 67754 - DNA, 11 bp, Unknown
  misc_feature (1)..( 11): Matrix.004 file - promoters50/1382709
aatacaataca

SEQ ID NO: 67755 - DNA, 7 bp, Unknown
  misc_feature (1)..( 7): Matrix.004 file - promoters50/1382709
aataaaa

SEQ ID NO: 67756 - DNA, 10 bp, Unknown
  misc_feature (1)..( 10): Matrix.004 file - promoters50/1382713
aaaacaataa

SEQ ID NO: 67757 - DNA, 8 bp, Unknown
  misc_feature (1)..( 8): Matrix.004 file - promoters50/1382713
atgactta

SEQ ID NO: 67758 - DNA, 7 bp, Unknown
  misc_feature (1)..( 7): Matrix.004 file - promoters50/1382713
attgtgt

SEQ ID NO: 67759 - DNA, 8 bp, Unknown
  misc_feature (1)..( 8): Matrix.004 file - promoters50/1382713
tgaagaaa

SEQ ID NO: 67760 - DNA, 8 bp, Unknown
  misc_feature (1)..( 8): Matrix.004 file - promoters50/1382959
attattct

SEQ ID NO: 67761 - DNA, 10 bp, Unknown
  misc_feature (1)..( 10): Matrix.004 file - promoters50/1382959
acaaataaag

SEQ ID NO: 67762 - DNA, 10 bp, Unknown
  misc_feature (1)..( 10): Matrix.004 file - promoters50/1382959
ttaatattta

SEQ ID NO: 67763 - DNA, 9 bp, Unknown
  misc_feature (1)..( 9): Matrix.004 file - promoters50/1383066
caattattt

SEQ ID NO: 67764 - DNA, 8 bp, Unknown
  misc_feature (1)..( 8): Matrix.004 file - promoters50/1383066
attacaga

SEQ ID NO: 67765 - DNA, 7 bp, Unknown
  misc_feature (1)..( 7): Matrix.004 file - promoters50/1383066
aaaaagc

SEQ ID NO: 67766 - DNA, 7 bp, Unknown
  misc_feature (1)..( 7): Matrix.004 file - promoters50/1383074
gaaaaaa

SEQ ID NO: 67767 - DNA, 10 bp, Unknown
  misc_feature (1)..( 10): Matrix.004 file - promoters50/1383074
aaataaaaag

SEQ ID NO: 67768 - DNA, 11 bp, Unknown
  misc_feature (1)..( 11): Matrix.004 file - promoters50/1383074
atacatataat

SEQ ID NO: 67769 - DNA, 15 bp, Unknown
  misc_feature (1)..( 15): Matrix.004 file - promoters50/1383074
aaaaaaaaaaaaaaa

SEQ ID NO: 67770 - DNA, 11 bp, Unknown
  misc_feature (1)..( 11): Matrix.004 file - promoters50/1383102
ctttctaatat

SEQ ID NO: 67771 - DNA, 11 bp, Unknown
  misc_feature (1)..( 11): Matrix.004 file - promoters50/1383102
ataatcataaa

SEQ ID NO: 67772 - DNA, 7 bp, Unknown
  misc_feature (1)..( 7): Matrix.004 file - promoters50/1383144
aattatt

SEQ ID NO: 67773 - DNA, 7 bp, Unknown
  misc_feature (1)..( 7): Matrix.004 file - promoters50/1383144
aaatttt

SEQ ID NO: 67774 - DNA, 13 bp, Unknown
  misc_feature (1)..( 13): Matrix.004 file - promoters50/1383214
tttaataatattc

SEQ ID NO: 67775 - DNA, 9 bp, Unknown
  misc_feature (1)..( 9): Matrix.004 file - promoters50/1383214
tttaagttt

SEQ ID NO: 67776 - DNA, 8 bp, Unknown
  misc_feature (1)..( 8): Matrix.004 file - promoters50/1383214
atggtcat

SEQ ID NO: 67777 - DNA, 9 bp, Unknown
  misc_feature (1)..( 9): Matrix.004 file - promoters50/1383214
ctatatata

SEQ ID NO: 67778 - DNA, 8 bp, Unknown
  misc_feature (1)..( 8): Matrix.004 file - promoters50/1383214
cataatca

SEQ ID NO: 67779 - DNA, 7 bp, Unknown
  misc_feature (1)..( 7): Matrix.004 file - promoters50/1383214
atggttt

SEQ ID NO: 67780 - DNA, 7 bp, Unknown
  misc_feature (1)..( 7): Matrix.004 file - promoters50/1383312
ttaagtt

SEQ ID NO: 67781 - DNA, 10 bp, Unknown
  misc_feature (1)..( 10): Matrix.004 file - promoters50/1383312
tggaaacaat

SEQ ID NO: 67782 - DNA, 10 bp, Unknown
  misc_feature (1)..( 10): Matrix.004 file - promoters50/1383312
taatttcttt

SEQ ID NO: 67783 - DNA, 8 bp, Unknown
  misc_feature (1)..( 8): Matrix.004 file - promoters50/1383322
tcaacttt

SEQ ID NO: 67784 - DNA, 8 bp, Unknown
  misc_feature (1)..( 8): Matrix.004 file - promoters50/1383341
tttgatga

SEQ ID NO: 67785 - DNA, 10 bp, Unknown
  misc_feature (1)..( 10): Matrix.004 file - promoters50/1383356
attttattct

SEQ ID NO: 67786 - DNA, 10 bp, Unknown
  misc_feature (1)..( 10): Matrix.004 file - promoters50/1383386
aattacaaaa

SEQ ID NO: 67787 - DNA, 8 bp, Unknown
  misc_feature (1)..( 8): Matrix.004 file - promoters50/1383386
tttcctta

SEQ ID NO: 67788 - DNA, 8 bp, Unknown
  misc_feature (1)..( 8): Matrix.004 file - promoters50/1383386
aaatctct

SEQ ID NO: 67789 - DNA, 11 bp, Unknown
  misc_feature (1)..( 11): Matrix.004 file - promoters50/1383386
ttatttatatg

SEQ ID NO: 67790 - DNA, 10 bp, Unknown
  misc_feature (1)..( 10): Matrix.004 file - promoters50/1383430
atataatatt

SEQ ID NO: 67791 - DNA, 8 bp, Unknown
  misc_feature (1)..( 8): Matrix.004 file - promoters50/1383485
cttttcta

SEQ ID NO: 67792 - DNA, 5 bp, Unknown
  misc_feature (1)..( 5): Matrix.004 file - promoters50/1383485
ctcaa

SEQ ID NO: 67793 - DNA, 8 bp, Unknown
  misc_feature (1)..( 8): Matrix.004 file - promoters50/1383506
agattata

SEQ ID NO: 67794 - DNA, 7 bp, Unknown
  misc_feature (1)..( 7): Matrix.004 file - promoters50/1383506
atgccag

SEQ ID NO: 67795 - DNA, 13 bp, Unknown
  misc_feature (1)..( 13): Matrix.004 file - promoters50/1383506
tgccttcatccct

SEQ ID NO: 67796 - DNA, 10 bp, Unknown
  misc_feature (1)..( 10): Matrix.004 file - promoters50/1383514
gaagatggga

SEQ ID NO: 67797 - DNA, 9 bp, Unknown
  misc_feature (1)..( 9): Matrix.004 file - promoters50/1383514
cattttaaa

SEQ ID NO: 67798 - DNA, 7 bp, Unknown
  misc_feature (1)..( 7): Matrix.004 file - promoters50/1383514
taataaa

SEQ ID NO: 67799 - DNA, 11 bp, Unknown
  misc_feature (1)..( 11): Matrix.004 file - promoters50/1383514
caataaaatat

SEQ ID NO: 67800 - DNA, 9 bp, Unknown
  misc_feature (1)..( 9): Matrix.004 file - promoters50/1383514
atttgttat

SEQ ID NO: 67801 - DNA, 11 bp, Unknown
  misc_feature (1)..( 11): Matrix.004 file - promoters50/1383518
ctataaataga

SEQ ID NO: 67802 - DNA, 8 bp, Unknown
  misc_feature (1)..( 8): Matrix.004 file - promoters50/1383518
atactaaa

SEQ ID NO: 67803 - DNA, 12 bp, Unknown
  misc_feature (1)..( 12): Matrix.004 file - promoters50/1383518
accaaaaacaaa

SEQ ID NO: 67804 - DNA, 9 bp, Unknown
  misc_feature (1)..( 9): Matrix.004 file - promoters50/1383518
atataaata

SEQ ID NO: 67805 - DNA, 9 bp, Unknown
  misc_feature (1)..( 9): Matrix.004 file - promoters50/1383518
aaataataa

SEQ ID NO: 67806 - DNA, 8 bp, Unknown
  misc_feature (1)..( 8): Matrix.004 file - promoters50/1383518
aataataa

SEQ ID NO: 67807 - DNA, 10 bp, Unknown
  misc_feature (1)..( 10): Matrix.004 file - promoters50/1383552
ttaatgttaa

SEQ ID NO: 67808 - DNA, 11 bp, Unknown
  misc_feature (1)..( 11): Matrix.004 file - promoters50/1383552
aggcccataaa

SEQ ID NO: 67809 - DNA, 12 bp, Unknown
  misc_feature (1)..( 12): Matrix.004 file - promoters50/1383552
aaaagtaaaaac

SEQ ID NO: 67810 - DNA, 10 bp, Unknown
  misc_feature (1)..( 10): Matrix.004 file - promoters50/1383552
ataatttttt

SEQ ID NO: 67811 - DNA, 11 bp, Unknown
  misc_feature (1)..( 11): Matrix.004 file - promoters50/1383569
catatataaat

SEQ ID NO: 67812 - DNA, 8 bp, Unknown
  misc_feature (1)..( 8): Matrix.004 file - promoters50/1383569
attttaaa

SEQ ID NO: 67813 - DNA, 14 bp, Unknown
  misc_feature (1)..( 14): Matrix.004 file - promoters50/1383569
atattagctggtgc

SEQ ID NO: 67814 - DNA, 7 bp, Unknown
  misc_feature (1)..( 7): Matrix.004 file - promoters50/1383569
taagatg

SEQ ID NO: 67815 - DNA, 11 bp, Unknown
  misc_feature (1)..( 11): Matrix.004 file - promoters50/1383569
aatgaaatagt

SEQ ID NO: 67816 - DNA, 7 bp, Unknown
  misc_feature (1)..( 7): Matrix.004 file - promoters50/1383569
atttaaa

SEQ ID NO: 67817 - DNA, 10 bp, Unknown
  misc_feature (1)..( 10): Matrix.004 file - promoters50/1383569
aatttaaact

SEQ ID NO: 67818 - DNA, 13 bp, Unknown
  misc_feature (1)..( 13): Matrix.004 file - promoters50/1383569
aatattaaaataa

SEQ ID NO: 67819 - DNA, 7 bp, Unknown
  misc_feature (1)..( 7): Matrix.004 file - promoters50/1383572
gattgat

SEQ ID NO: 67820 - DNA, 12 bp, Unknown
  misc_feature (1)..( 12): Matrix.004 file - promoters50/1383572
caaagaaaaaat

SEQ ID NO: 67821 - DNA, 8 bp, Unknown
  misc_feature (1)..( 8): Matrix.004 file - promoters50/1383572
gatgtatt

SEQ ID NO: 67822 - DNA, 7 bp, Unknown
  misc_feature (1)..( 7): Matrix.004 file - promoters50/1383572
tttatta

SEQ ID NO: 67823 - DNA, 9 bp, Unknown
  misc_feature (1)..( 9): Matrix.004 file - promoters50/1383572
ttttaaata

SEQ ID NO: 67824 - DNA, 7 bp, Unknown
  misc_feature (1)..( 7): Matrix.004 file - promoters50/1383572
taaataa

SEQ ID NO: 67825 - DNA, 7 bp, Unknown
  misc_feature (1)..( 7): Matrix.004 file - promoters50/1383572
attaaat

SEQ ID NO: 67826 - DNA, 11 bp, Unknown
  misc_feature (1)..( 11): Matrix.004 file - promoters50/1383572
aaagaaaaaat

SEQ ID NO: 67827 - DNA, 8 bp, Unknown
  misc_feature (1)..( 8): Matrix.004 file - promoters50/1383572
acaaattt

SEQ ID NO: 67828 - DNA, 11 bp, Unknown
  misc_feature (1)..( 11): Matrix.004 file - promoters50/1383572
gtatattaata

SEQ ID NO: 67829 - DNA, 10 bp, Unknown
  misc_feature (1)..( 10): Matrix.004 file - promoters50/1383572
aaattcaaaa

SEQ ID NO: 67830 - DNA, 8 bp, Unknown
  misc_feature (1)..( 8): Matrix.004 file - promoters50/1383602
tgaaatca

SEQ ID NO: 67831 - DNA, 7 bp, Unknown
  misc_feature (1)..( 7): Matrix.004 file - promoters50/1383602
caaaaaa

SEQ ID NO: 67832 - DNA, 10 bp, Unknown
  misc_feature (1)..( 10): Matrix.004 file - promoters50/1383602
atattgaccc

SEQ ID NO: 67833 - DNA, 8 bp, Unknown
  misc_feature (1)..( 8): Matrix.004 file - promoters50/1383602
aatcttat

SEQ ID NO: 67834 - DNA, 10 bp, Unknown
  misc_feature (1)..( 10): Matrix.004 file - promoters50/1383602
attaaaagac

SEQ ID NO: 67835 - DNA, 8 bp, Unknown
  misc_feature (1)..( 8): Matrix.004 file - promoters50/1383602
atttacaa

SEQ ID NO: 67836 - DNA, 7 bp, Unknown
  misc_feature (1)..( 7): Matrix.004 file - promoters50/1383624
gcaaaag

SEQ ID NO: 67837 - DNA, 12 bp, Unknown
  misc_feature (1)..( 12): Matrix.004 file - promoters50/1383624
aatttattttta

SEQ ID NO: 67838 - DNA, 10 bp, Unknown
  misc_feature (1)..( 10): Matrix.004 file - promoters50/1383677
tgaaaaaatt

SEQ ID NO: 67839 - DNA, 8 bp, Unknown
  misc_feature (1)..( 8): Matrix.004 file - promoters50/1383677
tagatata

SEQ ID NO: 67840 - DNA, 7 bp, Unknown
  misc_feature (1)..( 7): Matrix.004 file - promoters50/1383677
aatattt

SEQ ID NO: 67841 - DNA, 8 bp, Unknown
  misc_feature (1)..( 8): Matrix.004 file - promoters50/1383919
ttaataac

SEQ ID NO: 67842 - DNA, 7 bp, Unknown
  misc_feature (1)..( 7): Matrix.004 file - promoters50/1383919
catagaa

SEQ ID NO: 67843 - DNA, 11 bp, Unknown
  misc_feature (1)..( 11): Matrix.004 file - promoters50/1383919
aatatacaaaa

SEQ ID NO: 67844 - DNA, 10 bp, Unknown
  misc_feature (1)..( 10): Matrix.004 file - promoters50/1384016
aaaacaaaat

SEQ ID NO: 67845 - DNA, 12 bp, Unknown
  misc_feature (1)..( 12): Matrix.004 file - promoters50/1384016
gttttatcttat

SEQ ID NO: 67846 - DNA, 13 bp, Unknown
  misc_feature (1)..( 13): Matrix.004 file - promoters50/1384016
tttaaaaataaaa

SEQ ID NO: 67847 - DNA, 10 bp, Unknown
  misc_feature (1)..( 10): Matrix.004 file - promoters50/1384016
tattaaatag

SEQ ID NO: 67848 - DNA, 12 bp, Unknown
  misc_feature (1)..( 12): Matrix.004 file - promoters50/1384016
aaaataatttta

SEQ ID NO: 67849 - DNA, 5 bp, Unknown
  misc_feature (1)..( 5): Matrix.004 file - promoters50/1384016
tgaaa

SEQ ID NO: 67850 - DNA, 13 bp, Unknown
  misc_feature (1)..( 13): Matrix.004 file - promoters50/1384016
atatcatgggcca

SEQ ID NO: 67851 - DNA, 7 bp, Unknown
  misc_feature (1)..( 7): Matrix.004 file - promoters50/1384016
ttttctt

SEQ ID NO: 67852 - DNA, 9 bp, Unknown
  misc_feature (1)..( 9): Matrix.004 file - promoters50/1384016
ttataaata

SEQ ID NO: 67853 - DNA, 10 bp, Unknown
  misc_feature (1)..( 10): Matrix.004 file - promoters50/1384016
tatcaaaaat

SEQ ID NO: 67854 - DNA, 14 bp, Unknown
  misc_feature (1)..( 14): Matrix.004 file - promoters50/1384016
aagaaaaaattaaa

SEQ ID NO: 67855 - DNA, 10 bp, Unknown
  misc_feature (1)..( 10): Matrix.004 file - promoters50/1384161
cgtttttggt

SEQ ID NO: 67856 - DNA, 9 bp, Unknown
  misc_feature (1)..( 9): Matrix.004 file - promoters50/1384261
ttttaacta

SEQ ID NO: 67857 - DNA, 7 bp, Unknown
  misc_feature (1)..( 7): Matrix.004 file - promoters50/1384261
caaaaaa

SEQ ID NO: 67858 - DNA, 10 bp, Unknown
  misc_feature (1)..( 10): Matrix.004 file - promoters50/1384261
actaacagat

SEQ ID NO: 67859 - DNA, 11 bp, Unknown
  misc_feature (1)..( 11): Matrix.004 file - promoters50/1384261
tccaaaaaaaa

SEQ ID NO: 67860 - DNA, 8 bp, Unknown
  misc_feature (1)..( 8): Matrix.004 file - promoters50/1384261
aaaaaagt

SEQ ID NO: 67861 - DNA, 10 bp, Unknown
  misc_feature (1)..( 10): Matrix.004 file - promoters50/1384261
aaatttaaaa

SEQ ID NO: 67862 - DNA, 11 bp, Unknown
  misc_feature (1)..( 11): Matrix.004 file - promoters50/1384329
atcaaaattaa

SEQ ID NO: 67863 - DNA, 22 bp, Unknown
  misc_feature (1)..( 22): Matrix.004 file - promoters50/1384329
attatttaaataaaaagaaaaa

SEQ ID NO: 67864 - DNA, 10 bp, Unknown
  misc_feature (1)..( 10): Matrix.004 file - promoters50/1384329
tgaatataat

SEQ ID NO: 67865 - DNA, 8 bp, Unknown
  misc_feature (1)..( 8): Matrix.004 file - promoters50/1384329
atatttaa

SEQ ID NO: 67866 - DNA, 10 bp, Unknown
  misc_feature (1)..( 10): Matrix.004 file - promoters50/1384329
tatataatat

SEQ ID NO: 67867 - DNA, 11 bp, Unknown
  misc_feature (1)..( 11): Matrix.004 file - promoters50/1384329
ctatatataca

SEQ ID NO: 67868 - DNA, 17 bp, Unknown
  misc_feature (1)..( 17): Matrix.004 file - promoters50/1384329
aacaaaattaattaaat

SEQ ID NO: 67869 - DNA, 10 bp, Unknown
  misc_feature (1)..( 10): Matrix.004 file - promoters50/1384329
ttttaatcta

SEQ ID NO: 67870 - DNA, 10 bp, Unknown
  misc_feature (1)..( 10): Matrix.004 file - promoters50/1384732
tttatattat

SEQ ID NO: 67871 - DNA, 10 bp, Unknown
  misc_feature (1)..( 10): Matrix.004 file - promoters50/1384921
ctccaaaata

SEQ ID NO: 67872 - DNA, 8 bp, Unknown
  misc_feature (1)..( 8): Matrix.004 file - promoters50/1385263
aatatata

SEQ ID NO: 67873 - DNA, 7 bp, Unknown
  misc_feature (1)..( 7): Matrix.004 file - promoters50/1385263
gttaaaa

SEQ ID NO: 67874 - DNA, 8 bp, Unknown
  misc_feature (1)..( 8): Matrix.004 file - promoters50/1385263
ttgtgatg

SEQ ID NO: 67875 - DNA, 16 bp, Unknown
  misc_feature (1)..( 16): Matrix.004 file - promoters50/1385263
catttttaactaaaaa

SEQ ID NO: 67876 - DNA, 8 bp, Unknown
  misc_feature (1)..( 8): Matrix.004 file - promoters50/1385263
aaaactaa

SEQ ID NO: 67877 - DNA, 12 bp, Unknown
  misc_feature (1)..( 12): Matrix.004 file - promoters50/1385263
gtccatccaaac

SEQ ID NO: 67878 - DNA, 7 bp, Unknown
  misc_feature (1)..( 7): Matrix.004 file - promoters50/1385263
agattta

SEQ ID NO: 67879 - DNA, 10 bp, Unknown
  misc_feature (1)..( 10): Matrix.004 file - promoters50/1385263
tgttttattt

SEQ ID NO: 67880 - DNA, 9 bp, Unknown
  misc_feature (1)..( 9): Matrix.004 file - promoters50/1385347
ttcacttgt

SEQ ID NO: 67881 - DNA, 10 bp, Unknown
  misc_feature (1)..( 10): Matrix.004 file - promoters50/1385347
ataattttca

SEQ ID NO: 67882 - DNA, 13 bp, Unknown
  misc_feature (1)..( 13): Matrix.004 file - promoters50/1385347
aaactaaattctt

SEQ ID NO: 67883 - DNA, 8 bp, Unknown
  misc_feature (1)..( 8): Matrix.004 file - promoters50/1385376
acaaaaaa

SEQ ID NO: 67884 - DNA, 9 bp, Unknown
  misc_feature (1)..( 9): Matrix.004 file - promoters50/1385376
taaaagatt

SEQ ID NO: 67885 - DNA, 7 bp, Unknown
  misc_feature (1)..( 7): Matrix.004 file - promoters50/1385376
ttggttt

SEQ ID NO: 67886 - DNA, 9 bp, Unknown
  misc_feature (1)..( 9): Matrix.004 file - promoters50/1385655
tttggtttt

SEQ ID NO: 67887 - DNA, 17 bp, Unknown
  misc_feature (1)..( 17): Matrix.004 file - promoters50/1386125
atttttttttctaggtt

SEQ ID NO: 67888 - DNA, 10 bp, Unknown
  misc_feature (1)..( 10): Matrix.004 file - promoters50/1386215
attttcagta

SEQ ID NO: 67889 - DNA, 10 bp, Unknown
  misc_feature (1)..( 10): Matrix.004 file - promoters50/1386215
aaaatgttga

SEQ ID NO: 67890 - DNA, 12 bp, Unknown
  misc_feature (1)..( 12): Matrix.004 file - promoters50/1386387
attcaaaatttg

SEQ ID NO: 67891 - DNA, 8 bp, Unknown
  misc_feature (1)..( 8): Matrix.004 file - promoters50/1386444
cttttccc

SEQ ID NO: 67892 - DNA, 10 bp, Unknown
  misc_feature (1)..( 10): Matrix.004 file - promoters50/1386444
aagttttttt

SEQ ID NO: 67893 - DNA, 7 bp, Unknown
  misc_feature (1)..( 7): Matrix.004 file - promoters50/1386444
aacagat

SEQ ID NO: 67894 - DNA, 8 bp, Unknown
  misc_feature (1)..( 8): Matrix.004 file - promoters50/1386444
taaatttt

SEQ ID NO: 67895 - DNA, 6 bp, Unknown
  misc_feature (1)..( 6): Matrix.004 file - promoters50/1386444
acattt

SEQ ID NO: 67896 - DNA, 8 bp, Unknown
  misc_feature (1)..( 8): Matrix.004 file - promoters50/1386609
aagaggca

SEQ ID NO: 67897 - DNA, 8 bp, Unknown
  misc_feature (1)..( 8): Matrix.004 file - promoters50/1386609
acaagata

SEQ ID NO: 67898 - DNA, 10 bp, Unknown
  misc_feature (1)..( 10): Matrix.004 file - promoters50/1386609
tttgatgatg

SEQ ID NO: 67899 - DNA, 8 bp, Unknown
  misc_feature (1)..( 8): Matrix.004 file - promoters50/1386628
tgttattg

SEQ ID NO: 67900 - DNA, 9 bp, Unknown
  misc_feature (1)..( 9): Matrix.004 file - promoters50/1386749
atttgttac

SEQ ID NO: 67901 - DNA, 9 bp, Unknown
  misc_feature (1)..( 9): Matrix.004 file - promoters50/1386749
atcaaaatt

SEQ ID NO: 67902 - DNA, 10 bp, Unknown
  misc_feature (1)..( 10): Matrix.004 file - promoters50/1386749
caaaacaaaa

SEQ ID NO: 67903 - DNA, 9 bp, Unknown
  misc_feature (1)..( 9): Matrix.004 file - promoters50/1386749
tattagcta

SEQ ID NO: 67904 - DNA, 7 bp, Unknown
  misc_feature (1)..( 7): Matrix.004 file - promoters50/1386778
taaattg

SEQ ID NO: 67905 - DNA, 9 bp, Unknown
  misc_feature (1)..( 9): Matrix.004 file - promoters50/1386778
aaacaaaaa

SEQ ID NO: 67906 - DNA, 10 bp, Unknown
  misc_feature (1)..( 10): Matrix.004 file - promoters50/1386778
agaaaagaaa

SEQ ID NO: 67907 - DNA, 14 bp, Unknown
  misc_feature (1)..( 14): Matrix.004 file - promoters50/1386786
gtatataaaaaaaa

SEQ ID NO: 67908 - DNA, 9 bp, Unknown
  misc_feature (1)..( 9): Matrix.004 file - promoters50/1386861
gttttaatt

SEQ ID NO: 67909 - DNA, 9 bp, Unknown
  misc_feature (1)..( 9): Matrix.004 file - promoters50/1387088
ttaattgat

SEQ ID NO: 67910 - DNA, 11 bp, Unknown
  misc_feature (1)..( 11): Matrix.004 file - promoters50/1387117
agattaagggt

SEQ ID NO: 67911 - DNA, 9 bp, Unknown
  misc_feature (1)..( 9): Matrix.004 file - promoters50/1387117
agaaaattt

SEQ ID NO: 67912 - DNA, 13 bp, Unknown
  misc_feature (1)..( 13): Matrix.004 file - promoters50/1387117
aatccaaaataga

SEQ ID NO: 67913 - DNA, 10 bp, Unknown
  misc_feature (1)..( 10): Matrix.004 file - promoters50/1387117
aaaaagaaaa

SEQ ID NO: 67914 - DNA, 10 bp, Unknown
  misc_feature (1)..( 10): Matrix.004 file - promoters50/1387123
tatataatat

SEQ ID NO: 67915 - DNA, 9 bp, Unknown
  misc_feature (1)..( 9): Matrix.004 file - promoters50/1387123
cataacaaa

SEQ ID NO: 67916 - DNA, 15 bp, Unknown
  misc_feature (1)..( 15): Matrix.004 file - promoters50/1387123
atctaatttcatttt

SEQ ID NO: 67917 - DNA, 9 bp, Unknown
  misc_feature (1)..( 9): Matrix.004 file - promoters50/1387123
acaatcata

SEQ ID NO: 67918 - DNA, 9 bp, Unknown
  misc_feature (1)..( 9): Matrix.004 file - promoters50/1387123
aaattaaaa

SEQ ID NO: 67919 - DNA, 10 bp, Unknown
  misc_feature (1)..( 10): Matrix.004 file - promoters50/1387123
acaaacataa

SEQ ID NO: 67920 - DNA, 11 bp, Unknown
  misc_feature (1)..( 11): Matrix.004 file - promoters50/1387140
tataatttaat

SEQ ID NO: 67921 - DNA, 8 bp, Unknown
  misc_feature (1)..( 8): Matrix.004 file - promoters50/1387140
gagtattt

SEQ ID NO: 67922 - DNA, 7 bp, Unknown
  misc_feature (1)..( 7): Matrix.004 file - promoters50/1387194
ttgaaaa

SEQ ID NO: 67923 - DNA, 9 bp, Unknown
  misc_feature (1)..( 9): Matrix.004 file - promoters50/1387211
attgtaaat

SEQ ID NO: 67924 - DNA, 13 bp, Unknown
  misc_feature (1)..( 13): Matrix.004 file - promoters50/1387211
tattttaaaaaaa

SEQ ID NO: 67925 - DNA, 8 bp, Unknown
  misc_feature (1)..( 8): Matrix.004 file - promoters50/1387265
tatttttg

SEQ ID NO: 67926 - DNA, 7 bp, Unknown
  misc_feature (1)..( 7): Matrix.004 file - promoters50/1387336
ctgatga

SEQ ID NO: 67927 - DNA, 8 bp, Unknown
  misc_feature (1)..( 8): Matrix.004 file - promoters50/1387349
attcaaat

SEQ ID NO: 67928 - DNA, 10 bp, Unknown
  misc_feature (1)..( 10): Matrix.004 file - promoters50/1387349
gacaaaatat

SEQ ID NO: 67929 - DNA, 13 bp, Unknown
  misc_feature (1)..( 13): Matrix.004 file - promoters50/1387352
gtgaaacaaaaac

SEQ ID NO: 67930 - DNA, 9 bp, Unknown
  misc_feature (1)..( 9): Matrix.004 file - promoters50/1387352
ttataaata

SEQ ID NO: 67931 - DNA, 8 bp, Unknown
  misc_feature (1)..( 8): Matrix.004 file - promoters50/1387352
gaaaattg

SEQ ID NO: 67932 - DNA, 13 bp, Unknown
  misc_feature (1)..( 13): Matrix.004 file - promoters50/1387352
ataagaataaagt

SEQ ID NO: 67933 - DNA, 10 bp, Unknown
  misc_feature (1)..( 10): Matrix.004 file - promoters50/1387352
taaaattagg

SEQ ID NO: 67934 - DNA, 7 bp, Unknown
  misc_feature (1)..( 7): Matrix.004 file - promoters50/1387352
cataaaa

SEQ ID NO: 67935 - DNA, 8 bp, Unknown
  misc_feature (1)..( 8): Matrix.004 file - promoters50/1387356
tttattaa

SEQ ID NO: 67936 - DNA, 9 bp, Unknown
  misc_feature (1)..( 9): Matrix.004 file - promoters50/1387356
taagaataa

SEQ ID NO: 67937 - DNA, 6 bp, Unknown
  misc_feature (1)..( 6): Matrix.004 file - promoters50/1387356
ttaaaa

SEQ ID NO: 67938 - DNA, 13 bp, Unknown
  misc_feature (1)..( 13): Matrix.004 file - promoters50/1387356
aaagaaagacaga

SEQ ID NO: 67939 - DNA, 10 bp, Unknown
  misc_feature (1)..( 10): Matrix.004 file - promoters50/1387356
aaaaaaagtt

SEQ ID NO: 67940 - DNA, 7 bp, Unknown
  misc_feature (1)..( 7): Matrix.004 file - promoters50/1387356
caaaaga

SEQ ID NO: 67941 - DNA, 7 bp, Unknown
  misc_feature (1)..( 7): Matrix.004 file - promoters50/1387356
tacacgt

SEQ ID NO: 67942 - DNA, 12 bp, Unknown
  misc_feature (1)..( 12): Matrix.004 file - promoters50/1387368
aaatacaaaata

SEQ ID NO: 67943 - DNA, 9 bp, Unknown
  misc_feature (1)..( 9): Matrix.004 file - promoters50/1387368
aacaaaaga

SEQ ID NO: 67944 - DNA, 10 bp, Unknown
  misc_feature (1)..( 10): Matrix.004 file - promoters50/1387417
agagaagaaa

SEQ ID NO: 67945 - DNA, 7 bp, Unknown
  misc_feature (1)..( 7): Matrix.004 file - promoters50/1387417
ttcttat

SEQ ID NO: 67946 - DNA, 9 bp, Unknown
  misc_feature (1)..( 9): Matrix.004 file - promoters50/1387417
aatgatttc

SEQ ID NO: 67947 - DNA, 8 bp, Unknown
  misc_feature (1)..( 8): Matrix.004 file - promoters50/1387417
tgtgatcg

SEQ ID NO: 67948 - DNA, 8 bp, Unknown
  misc_feature (1)..( 8): Matrix.004 file - promoters50/1387417
attttctg

SEQ ID NO: 67949 - DNA, 9 bp, Unknown
  misc_feature (1)..( 9): Matrix.004 file - promoters50/1387421
ttttgctaa

SEQ ID NO: 67950 - DNA, 12 bp, Unknown
  misc_feature (1)..( 12): Matrix.004 file - promoters50/1387421
aacaaaatgact

SEQ ID NO: 67951 - DNA, 10 bp, Unknown
  misc_feature (1)..( 10): Matrix.004 file - promoters50/1387421
gaaagataaa

SEQ ID NO: 67952 - DNA, 10 bp, Unknown
  misc_feature (1)..( 10): Matrix.004 file - promoters50/1387421
taaattattt

SEQ ID NO: 67953 - DNA, 11 bp, Unknown
  misc_feature (1)..( 11): Matrix.004 file - promoters50/1387429
tgtagttaatg

SEQ ID NO: 67954 - DNA, 5 bp, Unknown
  misc_feature (1)..( 5): Matrix.004 file - promoters50/1387429
aatga

SEQ ID NO: 67955 - DNA, 11 bp, Unknown
  misc_feature (1)..( 11): Matrix.004 file - promoters50/1387429
cgtaaatttct

SEQ ID NO: 67956 - DNA, 8 bp, Unknown
  misc_feature (1)..( 8): Matrix.004 file - promoters50/1387429
caaattat

SEQ ID NO: 67957 - DNA, 7 bp, Unknown
  misc_feature (1)..( 7): Matrix.004 file - promoters50/1387505
caaatta

SEQ ID NO: 67958 - DNA, 8 bp, Unknown
  misc_feature (1)..( 8): Matrix.004 file - promoters50/1387505
aatgcaaa

SEQ ID NO: 67959 - DNA, 9 bp, Unknown
  misc_feature (1)..( 9): Matrix.004 file - promoters50/1387524
aatgaaatc

SEQ ID NO: 67960 - DNA, 13 bp, Unknown
  misc_feature (1)..( 13): Matrix.004 file - promoters50/1387524
tgttatctattgt

SEQ ID NO: 67961 - DNA, 8 bp, Unknown
  misc_feature (1)..( 8): Matrix.004 file - promoters50/1387524
agaaaaaa

SEQ ID NO: 67962 - DNA, 9 bp, Unknown
  misc_feature (1)..( 9): Matrix.004 file - promoters50/1387524
gaaaacact

SEQ ID NO: 67963 - DNA, 10 bp, Unknown
  misc_feature (1)..( 10): Matrix.004 file - promoters50/1387524
aggaataaaa

SEQ ID NO: 67964 - DNA, 7 bp, Unknown
  misc_feature (1)..( 7): Matrix.004 file - promoters50/1387524
aaaaaga

SEQ ID NO: 67965 - DNA, 9 bp, Unknown
  misc_feature (1)..( 9): Matrix.004 file - promoters50/1387524
taattatca

SEQ ID NO: 67966 - DNA, 5 bp, Unknown
  misc_feature (1)..( 5): Matrix.004 file - promoters50/1387524
agtaa

SEQ ID NO: 67967 - DNA, 8 bp, Unknown
  misc_feature (1)..( 8): Matrix.004 file - promoters50/1387524
gaaagaaa

SEQ ID NO: 67968 - DNA, 10 bp, Unknown
  misc_feature (1)..( 10): Matrix.004 file - promoters50/1387524
ggaaaagaaa

SEQ ID NO: 67969 - DNA, 6 bp, Unknown
  misc_feature (1)..( 6): Matrix.004 file - promoters50/1387547
ttgtaa

SEQ ID NO: 67970 - DNA, 9 bp, Unknown
  misc_feature (1)..( 9): Matrix.004 file - promoters50/1387580
ttattgtct

SEQ ID NO: 67971 - DNA, 10 bp, Unknown
  misc_feature (1)..( 10): Matrix.004 file - promoters50/1387587
gtaaaaaaaa

SEQ ID NO: 67972 - DNA, 10 bp, Unknown
  misc_feature (1)..( 10): Matrix.004 file - promoters50/1387587
ttttgaagaa

SEQ ID NO: 67973 - DNA, 7 bp, Unknown
  misc_feature (1)..( 7): Matrix.004 file - promoters50/1387587
agtaaaa

SEQ ID NO: 67974 - DNA, 10 bp, Unknown
  misc_feature (1)..( 10): Matrix.004 file - promoters50/1387590
atggtaaaaa

SEQ ID NO: 67975 - DNA, 9 bp, Unknown
  misc_feature (1)..( 9): Matrix.004 file - promoters50/1387590
ctatttcaa

SEQ ID NO: 67976 - DNA, 11 bp, Unknown
  misc_feature (1)..( 11): Matrix.004 file - promoters50/1387590
tatgacaacac

SEQ ID NO: 67977 - DNA, 8 bp, Unknown
  misc_feature (1)..( 8): Matrix.004 file - promoters50/1387590
ttcaataa

SEQ ID NO: 67978 - DNA, 10 bp, Unknown
  misc_feature (1)..( 10): Matrix.004 file - promoters50/1387605
gattttgagt

SEQ ID NO: 67979 - DNA, 8 bp, Unknown
  misc_feature (1)..( 8): Matrix.004 file - promoters50/1387616
actttaaa

SEQ ID NO: 67980 - DNA, 10 bp, Unknown
  misc_feature (1)..( 10): Matrix.004 file - promoters50/1387616
atagataagc

SEQ ID NO: 67981 - DNA, 11 bp, Unknown
  misc_feature (1)..( 11): Matrix.004 file - promoters50/1387628
tcaaaaaaaga

SEQ ID NO: 67982 - DNA, 7 bp, Unknown
  misc_feature (1)..( 7): Matrix.004 file - promoters50/1387628
tataaag

SEQ ID NO: 67983 - DNA, 9 bp, Unknown
  misc_feature (1)..( 9): Matrix.004 file - promoters50/1387628
taatttgtt

SEQ ID NO: 67984 - DNA, 9 bp, Unknown
  misc_feature (1)..( 9): Matrix.004 file - promoters50/1387665
agataaaaa

SEQ ID NO: 67985 - DNA, 9 bp, Unknown
  misc_feature (1)..( 9): Matrix.004 file - promoters50/1387665
tttttttgt

SEQ ID NO: 67986 - DNA, 7 bp, Unknown
  misc_feature (1)..( 7): Matrix.004 file - promoters50/1387665
aaattaa

SEQ ID NO: 67987 - DNA, 7 bp, Unknown
  misc_feature (1)..( 7): Matrix.004 file - promoters50/1387671
atagtaa

SEQ ID NO: 67988 - DNA, 14 bp, Unknown
  misc_feature (1)..( 14): Matrix.004 file - promoters50/1387793
tactatataaagac

SEQ ID NO: 67989 - DNA, 10 bp, Unknown
  misc_feature (1)..( 10): Matrix.004 file - promoters50/1387793
ttaaaagata

SEQ ID NO: 67990 - DNA, 9 bp, Unknown
  misc_feature (1)..( 9): Matrix.004 file - promoters50/1387793
aaaaccatc

SEQ ID NO: 67991 - DNA, 8 bp, Unknown
  misc_feature (1)..( 8): Matrix.004 file - promoters50/1387818
caaaaaaa

SEQ ID NO: 67992 - DNA, 8 bp, Unknown
  misc_feature (1)..( 8): Matrix.004 file - promoters50/1387818
aaaaacat

SEQ ID NO: 67993 - DNA, 11 bp, Unknown
  misc_feature (1)..( 11): Matrix.004 file - promoters50/1387906
catttttcttt

SEQ ID NO: 67994 - DNA, 11 bp, Unknown
  misc_feature (1)..( 11): Matrix.004 file - promoters50/1387906
ttttaacaaca

SEQ ID NO: 67995 - DNA, 11 bp, Unknown
  misc_feature (1)..( 11): Matrix.004 file - promoters50/1387935
ttaaatttgtt

SEQ ID NO: 67996 - DNA, 4 bp, Unknown
  misc_feature (1)..( 4): Matrix.004 file - promoters50/1387935
tttg

SEQ ID NO: 67997 - DNA, 8 bp, Unknown
  misc_feature (1)..( 8): Matrix.004 file - promoters50/1387935
caaataaa

SEQ ID NO: 67998 - DNA, 9 bp, Unknown
  misc_feature (1)..( 9): Matrix.004 file - promoters50/1387947
aaaagaaga

SEQ ID NO: 67999 - DNA, 12 bp, Unknown
  misc_feature (1)..( 12): Matrix.004 file - promoters50/1387947
caaagaaagtaa

SEQ ID NO: 68000 - DNA, 9 bp, Unknown
  misc_feature (1)..( 9): Matrix.004 file - promoters50/1388009
attaaaaat

SEQ ID NO: 68001 - DNA, 11 bp, Unknown
  misc_feature (1)..( 11): Matrix.004 file - promoters50/1388009
tattaaaatat

SEQ ID NO: 68002 - DNA, 7 bp, Unknown
  misc_feature (1)..( 7): Matrix.004 file - promoters50/1388009
attttac

SEQ ID NO: 68003 - DNA, 10 bp, Unknown
  misc_feature (1)..( 10): Matrix.004 file - promoters50/1388009
cgaaatcata

SEQ ID NO: 68004 - DNA, 9 bp, Unknown
  misc_feature (1)..( 9): Matrix.004 file - promoters50/1388009
aaattataa

SEQ ID NO: 68005 - DNA, 8 bp, Unknown
  misc_feature (1)..( 8): Matrix.004 file - promoters50/1388009
atatttta

SEQ ID NO: 68006 - DNA, 9 bp, Unknown
  misc_feature (1)..( 9): Matrix.004 file - promoters50/1388069
tatatgtaa

SEQ ID NO: 68007 - DNA, 11 bp, Unknown
  misc_feature (1)..( 11): Matrix.004 file - promoters50/1388423
caactaaaaaa

SEQ ID NO: 68008 - DNA, 8 bp, Unknown
  misc_feature (1)..( 8): Matrix.004 file - promoters50/1388423
aaacacaa

SEQ ID NO: 68009 - DNA, 11 bp, Unknown
  misc_feature (1)..( 11): Matrix.004 file - promoters50/1388423
gaagcaaaacc

SEQ ID NO: 68010 - DNA, 8 bp, Unknown
  misc_feature (1)..( 8): Matrix.004 file - promoters50/1388423
attgaatt

SEQ ID NO: 68011 - DNA, 7 bp, Unknown
  misc_feature (1)..( 7): Matrix.004 file - promoters50/1388423
aaacttg

SEQ ID NO: 68012 - DNA, 7 bp, Unknown
  misc_feature (1)..( 7): Matrix.004 file - promoters50/1388438
acacaac

SEQ ID NO: 68013 - DNA, 7 bp, Unknown
  misc_feature (1)..( 7): Matrix.004 file - promoters50/1388444
ccattaa

SEQ ID NO: 68014 - DNA, 8 bp, Unknown
  misc_feature (1)..( 8): Matrix.004 file - promoters50/1388444
ttacatta

SEQ ID NO: 68015 - DNA, 7 bp, Unknown
  misc_feature (1)..( 7): Matrix.004 file - promoters50/1388444
tttataa

SEQ ID NO: 68016 - DNA, 7 bp, Unknown
  misc_feature (1)..( 7): Matrix.004 file - promoters50/1388468
catatat

SEQ ID NO: 68017 - DNA, 11 bp, Unknown
  misc_feature (1)..( 11): Matrix.004 file - promoters50/1388468
atgtttattag

SEQ ID NO: 68018 - DNA, 11 bp, Unknown
  misc_feature (1)..( 11): Matrix.004 file - promoters50/1388468
caaaagaaaaa

SEQ ID NO: 68019 - DNA, 8 bp, Unknown
  misc_feature (1)..( 8): Matrix.004 file - promoters50/1388484
aatttact

SEQ ID NO: 68020 - DNA, 8 bp, Unknown
  misc_feature (1)..( 8): Matrix.004 file - promoters50/1388484
gaatcaat

SEQ ID NO: 68021 - DNA, 7 bp, Unknown
  misc_feature (1)..( 7): Matrix.004 file - promoters50/1388484
tttcaat

SEQ ID NO: 68022 - DNA, 9 bp, Unknown
  misc_feature (1)..( 9): Matrix.004 file - promoters50/1388484
gaattcaga

SEQ ID NO: 68023 - DNA, 8 bp, Unknown
  misc_feature (1)..( 8): Matrix.004 file - promoters50/1388484
agttattt

SEQ ID NO: 68024 - DNA, 10 bp, Unknown
  misc_feature (1)..( 10): Matrix.004 file - promoters50/1388545
tgcttatgat

SEQ ID NO: 68025 - DNA, 10 bp, Unknown
  misc_feature (1)..( 10): Matrix.004 file - promoters50/1388593
atatgaagaa

SEQ ID NO: 68026 - DNA, 8 bp, Unknown
  misc_feature (1)..( 8): Matrix.004 file - promoters50/1388593
attatttt

SEQ ID NO: 68027 - DNA, 8 bp, Unknown
  misc_feature (1)..( 8): Matrix.004 file - promoters50/1388593
gaagtata

SEQ ID NO: 68028 - DNA, 11 bp, Unknown
  misc_feature (1)..( 11): Matrix.004 file - promoters50/1388661
aagaaaaaagt

SEQ ID NO: 68029 - DNA, 9 bp, Unknown
  misc_feature (1)..( 9): Matrix.004 file - promoters50/1388661
ttgttaatt

SEQ ID NO: 68030 - DNA, 7 bp, Unknown
  misc_feature (1)..( 7): Matrix.004 file - promoters50/1388661
taaaaaa

SEQ ID NO: 68031 - DNA, 9 bp, Unknown
  misc_feature (1)..( 9): Matrix.004 file - promoters50/1388661
aaaagtact

SEQ ID NO: 68032 - DNA, 10 bp, Unknown
  misc_feature (1)..( 10): Matrix.004 file - promoters50/1388688
atttattaat

SEQ ID NO: 68033 - DNA, 11 bp, Unknown
  misc_feature (1)..( 11): Matrix.004 file - promoters50/1388688
agatatctatt

SEQ ID NO: 68034 - DNA, 9 bp, Unknown
  misc_feature (1)..( 9): Matrix.004 file - promoters50/1388688
gtttaatag

SEQ ID NO: 68035 - DNA, 9 bp, Unknown
  misc_feature (1)..( 9): Matrix.004 file - promoters50/1388688
tatctattt

SEQ ID NO: 68036 - DNA, 8 bp, Unknown
  misc_feature (1)..( 8): Matrix.004 file - promoters50/1388688
aacaaagt

SEQ ID NO: 68037 - DNA, 7 bp, Unknown
  misc_feature (1)..( 7): Matrix.004 file - promoters50/1388688
taaaaaa

SEQ ID NO: 68038 - DNA, 13 bp, Unknown
  misc_feature (1)..( 13): Matrix.004 file - promoters50/1388688
ataatatttaaat

SEQ ID NO: 68039 - DNA, 7 bp, Unknown
  misc_feature (1)..( 7): Matrix.004 file - promoters50/1388688
aaaaata

SEQ ID NO: 68040 - DNA, 8 bp, Unknown
  misc_feature (1)..( 8): Matrix.004 file - promoters50/1388688
aaaaacaa

SEQ ID NO: 68041 - DNA, 8 bp, Unknown
  misc_feature (1)..( 8): Matrix.004 file - promoters50/1388692
tttaatta

SEQ ID NO: 68042 - DNA, 11 bp, Unknown
  misc_feature (1)..( 11): Matrix.004 file - promoters50/1388692
ttgtcttttaa

SEQ ID NO: 68043 - DNA, 5 bp, Unknown
  misc_feature (1)..( 5): Matrix.004 file - promoters50/1388741
attgt

SEQ ID NO: 68044 - DNA, 8 bp, Unknown
  misc_feature (1)..( 8): Matrix.004 file - promoters50/1388741
aaaatgat

SEQ ID NO: 68045 - DNA, 8 bp, Unknown
  misc_feature (1)..( 8): Matrix.004 file - promoters50/1388775
aaagaaaa

SEQ ID NO: 68046 - DNA, 8 bp, Unknown
  misc_feature (1)..( 8): Matrix.004 file - promoters50/1388775
aatatata

SEQ ID NO: 68047 - DNA, 8 bp, Unknown
  misc_feature (1)..( 8): Matrix.004 file - promoters50/1388793
ataaatgc

SEQ ID NO: 68048 - DNA, 18 bp, Unknown
  misc_feature (1)..( 18): Matrix.004 file - promoters50/1388793
acaaaacagaaaatgttt

SEQ ID NO: 68049 - DNA, 8 bp, Unknown
  misc_feature (1)..( 8): Matrix.004 file - promoters50/1388793
aatgtttt

SEQ ID NO: 68050 - DNA, 6 bp, Unknown
  misc_feature (1)..( 6): Matrix.004 file - promoters50/1388793
ttttac

SEQ ID NO: 68051 - DNA, 9 bp, Unknown
  misc_feature (1)..( 9): Matrix.004 file - promoters50/1388793
acattcaat

SEQ ID NO: 68052 - DNA, 6 bp, Unknown
  misc_feature (1)..( 6): Matrix.004 file - promoters50/1388793
cattat

SEQ ID NO: 68053 - DNA, 7 bp, Unknown
  misc_feature (1)..( 7): Matrix.004 file - promoters50/1388793
acgcaaa

SEQ ID NO: 68054 - DNA, 7 bp, Unknown
  misc_feature (1)..( 7): Matrix.004 file - promoters50/1388852
aattatc

SEQ ID NO: 68055 - DNA, 9 bp, Unknown
  misc_feature (1)..( 9): Matrix.004 file - promoters50/1388852
aaatatgaa

SEQ ID NO: 68056 - DNA, 6 bp, Unknown
  misc_feature (1)..( 6): Matrix.004 file - promoters50/1388852
tttttt

SEQ ID NO: 68057 - DNA, 12 bp, Unknown
  misc_feature (1)..( 12): Matrix.004 file - promoters50/1388864
ctttacaaacac

SEQ ID NO: 68058 - DNA, 7 bp, Unknown
  misc_feature (1)..( 7): Matrix.004 file - promoters50/1388872
ctcagaa

SEQ ID NO: 68059 - DNA, 8 bp, Unknown
  misc_feature (1)..( 8): Matrix.004 file - promoters50/1388872
aatttttt

SEQ ID NO: 68060 - DNA, 11 bp, Unknown
  misc_feature (1)..( 11): Matrix.004 file - promoters50/1388872
aatttggctcc

SEQ ID NO: 68061 - DNA, 11 bp, Unknown
  misc_feature (1)..( 11): Matrix.004 file - promoters50/1388910
ataacattttt

SEQ ID NO: 68062 - DNA, 11 bp, Unknown
  misc_feature (1)..( 11): Matrix.004 file - promoters50/1388910
tatgtttaact

SEQ ID NO: 68063 - DNA, 7 bp, Unknown
  misc_feature (1)..( 7): Matrix.004 file - promoters50/1388910
tttaaaa

SEQ ID NO: 68064 - DNA, 8 bp, Unknown
  misc_feature (1)..( 8): Matrix.004 file - promoters50/1388973
ggaaaaaa

SEQ ID NO: 68065 - DNA, 15 bp, Unknown
  misc_feature (1)..( 15): Matrix.004 file - promoters50/1389231
tgtctaattaaacca

SEQ ID NO: 68066 - DNA, 9 bp, Unknown
  misc_feature (1)..( 9): Matrix.004 file - promoters50/1389231
tttttcttt

SEQ ID NO: 68067 - DNA, 8 bp, Unknown
  misc_feature (1)..( 8): Matrix.004 file - promoters50/1389231
ctttcatt

SEQ ID NO: 68068 - DNA, 8 bp, Unknown
  misc_feature (1)..( 8): Matrix.004 file - promoters50/1389231
attaacaa

SEQ ID NO: 68069 - DNA, 8 bp, Unknown
  misc_feature (1)..( 8): Matrix.004 file - promoters50/1389231
ttttcttt

SEQ ID NO: 68070 - DNA, 9 bp, Unknown
  misc_feature (1)..( 9): Matrix.004 file - promoters50/1389243
aaataaaat

SEQ ID NO: 68071 - DNA, 13 bp, Unknown
  misc_feature (1)..( 13): Matrix.004 file - promoters50/1389243
attaatttaaatt

SEQ ID NO: 68072 - DNA, 10 bp, Unknown
  misc_feature (1)..( 10): Matrix.004 file - promoters50/1389250
atttaagaat

SEQ ID NO: 68073 - DNA, 7 bp, Unknown
  misc_feature (1)..( 7): Matrix.004 file - promoters50/1389250
catctat

SEQ ID NO: 68074 - DNA, 10 bp, Unknown
  misc_feature (1)..( 10): Matrix.004 file - promoters50/1389279
caacttgtca

SEQ ID NO: 68075 - DNA, 7 bp, Unknown
  misc_feature (1)..( 7): Matrix.004 file - promoters50/1389279
caatgtt

SEQ ID NO: 68076 - DNA, 8 bp, Unknown
  misc_feature (1)..( 8): Matrix.004 file - promoters50/1389279
agaaaaaa

SEQ ID NO: 68077 - DNA, 8 bp, Unknown
  misc_feature (1)..( 8): Matrix.004 file - promoters50/1389279
acaaaaat

SEQ ID NO: 68078 - DNA, 8 bp, Unknown
  misc_feature (1)..( 8): Matrix.004 file - promoters50/1389279
tatatata

SEQ ID NO: 68079 - DNA, 9 bp, Unknown
  misc_feature (1)..( 9): Matrix.004 file - promoters50/1389301
aaaacaagt

SEQ ID NO: 68080 - DNA, 11 bp, Unknown
  misc_feature (1)..( 11): Matrix.004 file - promoters50/1389301
taataaactga

SEQ ID NO: 68081 - DNA, 7 bp, Unknown
  misc_feature (1)..( 7): Matrix.004 file - promoters50/1389330
ctcttga

SEQ ID NO: 68082 - DNA, 6 bp, Unknown
  misc_feature (1)..( 6): Matrix.004 file - promoters50/1389330
tttaaa

SEQ ID NO: 68083 - DNA, 10 bp, Unknown
  misc_feature (1)..( 10): Matrix.004 file - promoters50/1389401
ttaacaataa

SEQ ID NO: 68084 - DNA, 11 bp, Unknown
  misc_feature (1)..( 11): Matrix.004 file - promoters50/1389401
catgaaaaatt

SEQ ID NO: 68085 - DNA, 9 bp, Unknown
  misc_feature (1)..( 9): Matrix.004 file - promoters50/1389401
attctgttt

SEQ ID NO: 68086 - DNA, 8 bp, Unknown
  misc_feature (1)..( 8): Matrix.004 file - promoters50/1389401
acagattc

SEQ ID NO: 68087 - DNA, 7 bp, Unknown
  misc_feature (1)..( 7): Matrix.004 file - promoters50/1389401
aacaaaa

SEQ ID NO: 68088 - DNA, 11 bp, Unknown
  misc_feature (1)..( 11): Matrix.004 file - promoters50/1390146
cataattgcat

SEQ ID NO: 68089 - DNA, 6 bp, Unknown
  misc_feature (1)..( 6): Matrix.004 file - promoters50/1390146
agtata

SEQ ID NO: 68090 - DNA, 8 bp, Unknown
  misc_feature (1)..( 8): Matrix.004 file - promoters50/1390240
caatttga

SEQ ID NO: 68091 - DNA, 9 bp, Unknown
  misc_feature (1)..( 9): Matrix.004 file - promoters50/1390240
caaaaagaa

SEQ ID NO: 68092 - DNA, 8 bp, Unknown
  misc_feature (1)..( 8): Matrix.004 file - promoters50/1390240
gaaaatta

SEQ ID NO: 68093 - DNA, 6 bp, Unknown
  misc_feature (1)..( 6): Matrix.004 file - promoters50/1390240
acttgc

SEQ ID NO: 68094 - DNA, 12 bp, Unknown
  misc_feature (1)..( 12): Matrix.004 file - promoters50/1390240
catctttatata

SEQ ID NO: 68095 - DNA, 12 bp, Unknown
  misc_feature (1)..( 12): Matrix.004 file - promoters50/1391338
aatgtttgtgta

SEQ ID NO: 68096 - DNA, 8 bp, Unknown
  misc_feature (1)..( 8): Matrix.004 file - promoters50/1391361
aaaggatt

SEQ ID NO: 68097 - DNA, 8 bp, Unknown
  misc_feature (1)..( 8): Matrix.004 file - promoters50/1391361
tttctttt

SEQ ID NO: 68098 - DNA, 11 bp, Unknown
  misc_feature (1)..( 11): Matrix.004 file - promoters50/1391420
gatattaaaat

SEQ ID NO: 68099 - DNA, 8 bp, Unknown
  misc_feature (1)..( 8): Matrix.004 file - promoters50/1391420
agaagatc

SEQ ID NO: 68100 - DNA, 12 bp, Unknown
  misc_feature (1)..( 12): Matrix.004 file - promoters50/1391420
attaatgggcct

SEQ ID NO: 68101 - DNA, 13 bp, Unknown
  misc_feature (1)..( 13): Matrix.004 file - promoters50/1391535
aaattgggcctaa

SEQ ID NO: 68102 - DNA, 8 bp, Unknown
  misc_feature (1)..( 8): Matrix.004 file - promoters50/1391535
agtaaaac

SEQ ID NO: 68103 - DNA, 9 bp, Unknown
  misc_feature (1)..( 9): Matrix.004 file - promoters50/1391535
aaagaaaac

SEQ ID NO: 68104 - DNA, 9 bp, Unknown
  misc_feature (1)..( 9): Matrix.004 file - promoters50/1391535
attcaaaaa

SEQ ID NO: 68105 - DNA, 8 bp, Unknown
  misc_feature (1)..( 8): Matrix.004 file - promoters50/1391535
aaattggg

SEQ ID NO: 68106 - DNA, 10 bp, Unknown
  misc_feature (1)..( 10): Matrix.004 file - promoters50/1391651
aaatatctta

SEQ ID NO: 68107 - DNA, 8 bp, Unknown
  misc_feature (1)..( 8): Matrix.004 file - promoters50/1391651
agaacaaa

SEQ ID NO: 68108 - DNA, 7 bp, Unknown
  misc_feature (1)..( 7): Matrix.004 file - promoters50/1391765
caaagaa

SEQ ID NO: 68109 - DNA, 8 bp, Unknown
  misc_feature (1)..( 8): Matrix.004 file - promoters50/1391765
tattttac

SEQ ID NO: 68110 - DNA, 8 bp, Unknown
  misc_feature (1)..( 8): Matrix.004 file - promoters50/1392370
tgatcatt

SEQ ID NO: 68111 - DNA, 8 bp, Unknown
  misc_feature (1)..( 8): Matrix.004 file - promoters50/1392370
aattgatt

SEQ ID NO: 68112 - DNA, 9 bp, Unknown
  misc_feature (1)..( 9): Matrix.004 file - promoters50/1392370
atatttttt

SEQ ID NO: 68113 - DNA, 10 bp, Unknown
  misc_feature (1)..( 10): Matrix.004 file - promoters50/1392427
ttctataaat

SEQ ID NO: 68114 - DNA, 8 bp, Unknown
  misc_feature (1)..( 8): Matrix.004 file - promoters50/1392427
aatacaaa

SEQ ID NO: 68115 - DNA, 9 bp, Unknown
  misc_feature (1)..( 9): Matrix.004 file - promoters50/1393104
atcacgcct

SEQ ID NO: 68116 - DNA, 7 bp, Unknown
  misc_feature (1)..( 7): Matrix.004 file - promoters50/1393139
atgtgga

SEQ ID NO: 68117 - DNA, 13 bp, Unknown
  misc_feature (1)..( 13): Matrix.004 file - promoters50/1393139
tcaacttttaagt

SEQ ID NO: 68118 - DNA, 9 bp, Unknown
  misc_feature (1)..( 9): Matrix.004 file - promoters50/1393173
taataaaag

SEQ ID NO: 68119 - DNA, 11 bp, Unknown
  misc_feature (1)..( 11): Matrix.004 file - promoters50/1393173
aaaatgagata

SEQ ID NO: 68120 - DNA, 8 bp, Unknown
  misc_feature (1)..( 8): Matrix.004 file - promoters50/1393173
taaaaaaa

SEQ ID NO: 68121 - DNA, 10 bp, Unknown
  misc_feature (1)..( 10): Matrix.004 file - promoters50/1393181
ttgtgaagta

SEQ ID NO: 68122 - DNA, 9 bp, Unknown
  misc_feature (1)..( 9): Matrix.004 file - promoters50/1393181
ttactaata

SEQ ID NO: 68123 - DNA, 18 bp, Unknown
  misc_feature (1)..( 18): Matrix.004 file - promoters50/1393181
caaaattaaaaaaaaaaa

SEQ ID NO: 68124 - DNA, 8 bp, Unknown
  misc_feature (1)..( 8): Matrix.004 file - promoters50/1393181
taatttta

SEQ ID NO: 68125 - DNA, 8 bp, Unknown
  misc_feature (1)..( 8): Matrix.004 file - promoters50/1393181
tttgtaaa

SEQ ID NO: 68126 - DNA, 11 bp, Unknown
  misc_feature (1)..( 11): Matrix.004 file - promoters50/1393181
atttttgtcgg

SEQ ID NO: 68127 - DNA, 12 bp, Unknown
  misc_feature (1)..( 12): Matrix.004 file - promoters50/1393181
aaattattaaat

SEQ ID NO: 68128 - DNA, 13 bp, Unknown
  misc_feature (1)..( 13): Matrix.004 file - promoters50/1393187
tcattttagtcgt

SEQ ID NO: 68129 - DNA, 8 bp, Unknown
  misc_feature (1)..( 8): Matrix.004 file - promoters50/1393187
aataaatc

SEQ ID NO: 68130 - DNA, 7 bp, Unknown
  misc_feature (1)..( 7): Matrix.004 file - promoters50/1393187
aactaaa

SEQ ID NO: 68131 - DNA, 7 bp, Unknown
  misc_feature (1)..( 7): Matrix.004 file - promoters50/1393187
ataaaag

SEQ ID NO: 68132 - DNA, 9 bp, Unknown
  misc_feature (1)..( 9): Matrix.004 file - promoters50/1393187
aaaaaaaga

SEQ ID NO: 68133 - DNA, 8 bp, Unknown
  misc_feature (1)..( 8): Matrix.004 file - promoters50/1393187
atttgaat

SEQ ID NO: 68134 - DNA, 6 bp, Unknown
  misc_feature (1)..( 6): Matrix.004 file - promoters50/1393187
aaattt

SEQ ID NO: 68135 - DNA, 7 bp, Unknown
  misc_feature (1)..( 7): Matrix.004 file - promoters50/1393226
gactaat

SEQ ID NO: 68136 - DNA, 10 bp, Unknown
  misc_feature (1)..( 10): Matrix.004 file - promoters50/1393226
ttcctattta

SEQ ID NO: 68137 - DNA, 13 bp, Unknown
  misc_feature (1)..( 13): Matrix.004 file - promoters50/1393226
ttctatttaaatt

SEQ ID NO: 68138 - DNA, 16 bp, Unknown
  misc_feature (1)..( 16): Matrix.004 file - promoters50/1393226
ttgacaattatatgtt

SEQ ID NO: 68139 - DNA, 8 bp, Unknown
  misc_feature (1)..( 8): Matrix.004 file - promoters50/1393284
tttgttaa

SEQ ID NO: 68140 - DNA, 12 bp, Unknown
  misc_feature (1)..( 12): Matrix.004 file - promoters50/1393288
aatttaattttt

SEQ ID NO: 68141 - DNA, 8 bp, Unknown
  misc_feature (1)..( 8): Matrix.004 file - promoters50/1393288
caaaatta

SEQ ID NO: 68142 - DNA, 10 bp, Unknown
  misc_feature (1)..( 10): Matrix.004 file - promoters50/1393288
tcttcaaatc

SEQ ID NO: 68143 - DNA, 8 bp, Unknown
  misc_feature (1)..( 8): Matrix.004 file - promoters50/1393288
ttgtttga

SEQ ID NO: 68144 - DNA, 14 bp, Unknown
  misc_feature (1)..( 14): Matrix.004 file - promoters50/1393326
tcaattttgctaaa

SEQ ID NO: 68145 - DNA, 13 bp, Unknown
  misc_feature (1)..( 13): Matrix.004 file - promoters50/1393326
taattttcgttat

SEQ ID NO: 68146 - DNA, 8 bp, Unknown
  misc_feature (1)..( 8): Matrix.004 file - promoters50/1393326
tttttaat

SEQ ID NO: 68147 - DNA, 8 bp, Unknown
  misc_feature (1)..( 8): Matrix.004 file - promoters50/1393342
agaaaaaa

SEQ ID NO: 68148 - DNA, 12 bp, Unknown
  misc_feature (1)..( 12): Matrix.004 file - promoters50/1393342
attatacatatg

SEQ ID NO: 68149 - DNA, 13 bp, Unknown
  misc_feature (1)..( 13): Matrix.004 file - promoters50/1393342
ttatattaaaata

SEQ ID NO: 68150 - DNA, 10 bp, Unknown
  misc_feature (1)..( 10): Matrix.004 file - promoters50/1393342
atatctttca

SEQ ID NO: 68151 - DNA, 7 bp, Unknown
  misc_feature (1)..( 7): Matrix.004 file - promoters50/1393342
ttttttc

SEQ ID NO: 68152 - DNA, 16 bp, Unknown
  misc_feature (1)..( 16): Matrix.004 file - promoters50/1393342
aaacgagataataatt

SEQ ID NO: 68153 - DNA, 7 bp, Unknown
  misc_feature (1)..( 7): Matrix.004 file - promoters50/1393342
aaacaaa

SEQ ID NO: 68154 - DNA, 7 bp, Unknown
  misc_feature (1)..( 7): Matrix.004 file - promoters50/1393367
tttttct

SEQ ID NO: 68155 - DNA, 8 bp, Unknown
  misc_feature (1)..( 8): Matrix.004 file - promoters50/1393367
aatataca

SEQ ID NO: 68156 - DNA, 7 bp, Unknown
  misc_feature (1)..( 7): Matrix.004 file - promoters50/1393367
ttcaaaa

SEQ ID NO: 68157 - DNA, 8 bp, Unknown
  misc_feature (1)..( 8): Matrix.004 file - promoters50/1393367
attgtttg

SEQ ID NO: 68158 - DNA, 7 bp, Unknown
  misc_feature (1)..( 7): Matrix.004 file - promoters50/1393367
tttcaaa

SEQ ID NO: 68159 - DNA, 7 bp, Unknown
  misc_feature (1)..( 7): Matrix.004 file - promoters50/1393371
aaagaag

SEQ ID NO: 68160 - DNA, 12 bp, Unknown
  misc_feature (1)..( 12): Matrix.004 file - promoters50/1393383
tcaatcacatca

SEQ ID NO: 68161 - DNA, 9 bp, Unknown
  misc_feature (1)..( 9): Matrix.004 file - promoters50/1393478
agaaaataa

SEQ ID NO: 68162 - DNA, 12 bp, Unknown
  misc_feature (1)..( 12): Matrix.004 file - promoters50/1393478
gcaattattaaa

SEQ ID NO: 68163 - DNA, 12 bp, Unknown
  misc_feature (1)..( 12): Matrix.004 file - promoters50/1393492
tcttgtaataac

SEQ ID NO: 68164 - DNA, 13 bp, Unknown
  misc_feature (1)..( 13): Matrix.004 file - promoters50/1393492
cttctataaataa

SEQ ID NO: 68165 - DNA, 9 bp, Unknown
  misc_feature (1)..( 9): Matrix.004 file - promoters50/1393498
catttgttt

SEQ ID NO: 68166 - DNA, 13 bp, Unknown
  misc_feature (1)..( 13): Matrix.004 file - promoters50/1393498
ccaatattaaaaa

SEQ ID NO: 68167 - DNA, 9 bp, Unknown
  misc_feature (1)..( 9): Matrix.004 file - promoters50/1393498
aaaaatatg

SEQ ID NO: 68168 - DNA, 10 bp, Unknown
  misc_feature (1)..( 10): Matrix.004 file - promoters50/1393576
atgttgttaa

SEQ ID NO: 68169 - DNA, 10 bp, Unknown
  misc_feature (1)..( 10): Matrix.004 file - promoters50/1393576
aatgatgttg

SEQ ID NO: 68170 - DNA, 11 bp, Unknown
  misc_feature (1)..( 11): Matrix.004 file - promoters50/1393576
ccaaataaatg

SEQ ID NO: 68171 - DNA, 10 bp, Unknown
  misc_feature (1)..( 10): Matrix.004 file - promoters50/1393576
aaacttaaat

SEQ ID NO: 68172 - DNA, 13 bp, Unknown
  misc_feature (1)..( 13): Matrix.004 file - promoters50/1393576
tacatcaataaaa

SEQ ID NO: 68173 - DNA, 8 bp, Unknown
  misc_feature (1)..( 8): Matrix.004 file - promoters50/1393576
acaaaaaa

SEQ ID NO: 68174 - DNA, 8 bp, Unknown
  misc_feature (1)..( 8): Matrix.004 file - promoters50/1393576
gatatgtc

SEQ ID NO: 68175 - DNA, 8 bp, Unknown
  misc_feature (1)..( 8): Matrix.004 file - promoters50/1393576
ttcaaaat

SEQ ID NO: 68176 - DNA, 8 bp, Unknown
  misc_feature (1)..( 8): Matrix.004 file - promoters50/1393576
aaaaaatg

SEQ ID NO: 68177 - DNA, 9 bp, Unknown
  misc_feature (1)..( 9): Matrix.004 file - promoters50/1393576
tttcattac

SEQ ID NO: 68178 - DNA, 10 bp, Unknown
  misc_feature (1)..( 10): Matrix.004 file - promoters50/1393596
aaataaatcc

SEQ ID NO: 68179 - DNA, 12 bp, Unknown
  misc_feature (1)..( 12): Matrix.004 file - promoters50/1393596
ttacaaaatatt

SEQ ID NO: 68180 - DNA, 14 bp, Unknown
  misc_feature (1)..( 14): Matrix.004 file - promoters50/1393599
agtttaaattaaga

SEQ ID NO: 68181 - DNA, 9 bp, Unknown
  misc_feature (1)..( 9): Matrix.004 file - promoters50/1393599
taccaatat

SEQ ID NO: 68182 - DNA, 8 bp, Unknown
  misc_feature (1)..( 8): Matrix.004 file - promoters50/1393599
actgcaca

SEQ ID NO: 68183 - DNA, 6 bp, Unknown
  misc_feature (1)..( 6): Matrix.004 file - promoters50/1393599
aaaaaa

SEQ ID NO: 68184 - DNA, 10 bp, Unknown
  misc_feature (1)..( 10): Matrix.004 file - promoters50/1393599
tggaatagat

SEQ ID NO: 68185 - DNA, 11 bp, Unknown
  misc_feature (1)..( 11): Matrix.004 file - promoters50/1393599
agaaaaacaaa

SEQ ID NO: 68186 - DNA, 13 bp, Unknown
  misc_feature (1)..( 13): Matrix.004 file - promoters50/1393620
caaccaaacccac

SEQ ID NO: 68187 - DNA, 7 bp, Unknown
  misc_feature (1)..( 7): Matrix.004 file - promoters50/1393620
caaatta

SEQ ID NO: 68188 - DNA, 11 bp, Unknown
  misc_feature (1)..( 11): Matrix.004 file - promoters50/1393642
gagttgcggtc

SEQ ID NO: 68189 - DNA, 11 bp, Unknown
  misc_feature (1)..( 11): Matrix.004 file - promoters50/1393651
atcttttgtaa

SEQ ID NO: 68190 - DNA, 8 bp, Unknown
  misc_feature (1)..( 8): Matrix.004 file - promoters50/1393665
aaatcaaa

SEQ ID NO: 68191 - DNA, 9 bp, Unknown
  misc_feature (1)..( 9): Matrix.004 file - promoters50/1393665
ttagaaatg

SEQ ID NO: 68192 - DNA, 10 bp, Unknown
  misc_feature (1)..( 10): Matrix.004 file - promoters50/1393665
accaaatgaa

SEQ ID NO: 68193 - DNA, 9 bp, Unknown
  misc_feature (1)..( 9): Matrix.004 file - promoters50/1393677
aattcgacg

SEQ ID NO: 68194 - DNA, 8 bp, Unknown
  misc_feature (1)..( 8): Matrix.004 file - promoters50/1393677
tttgttat

SEQ ID NO: 68195 - DNA, 12 bp, Unknown
  misc_feature (1)..( 12): Matrix.004 file - promoters50/1393677
gaaacagaaata

SEQ ID NO: 68196 - DNA, 7 bp, Unknown
  misc_feature (1)..( 7): Matrix.004 file - promoters50/1393677
aagaaaa

SEQ ID NO: 68197 - DNA, 9 bp, Unknown
  misc_feature (1)..( 9): Matrix.004 file - promoters50/1393684
aaataaaaa

SEQ ID NO: 68198 - DNA, 12 bp, Unknown
  misc_feature (1)..( 12): Matrix.004 file - promoters50/1393684
acaattttagtc

SEQ ID NO: 68199 - DNA, 9 bp, Unknown
  misc_feature (1)..( 9): Matrix.004 file - promoters50/1393684
atatataaa

SEQ ID NO: 68200 - DNA, 9 bp, Unknown
  misc_feature (1)..( 9): Matrix.004 file - promoters50/1393725
catatatat

SEQ ID NO: 68201 - DNA, 7 bp, Unknown
  misc_feature (1)..( 7): Matrix.004 file - promoters50/1393725
attgtat

SEQ ID NO: 68202 - DNA, 6 bp, Unknown
  misc_feature (1)..( 6): Matrix.004 file - promoters50/1393725
tctctc

SEQ ID NO: 68203 - DNA, 10 bp, Unknown
  misc_feature (1)..( 10): Matrix.004 file - promoters50/1393725
atacaacatt

SEQ ID NO: 68204 - DNA, 8 bp, Unknown
  misc_feature (1)..( 8): Matrix.004 file - promoters50/1393725
aaaacttc

SEQ ID NO: 68205 - DNA, 9 bp, Unknown
  misc_feature (1)..( 9): Matrix.004 file - promoters50/1393725
ttaattttt

SEQ ID NO: 68206 - DNA, 13 bp, Unknown
  misc_feature (1)..( 13): Matrix.004 file - promoters50/1393725
aaaacatttgtaa

SEQ ID NO: 68207 - DNA, 9 bp, Unknown
  misc_feature (1)..( 9): Matrix.004 file - promoters50/1393725
aaaacctct

SEQ ID NO: 68208 - DNA, 12 bp, Unknown
  misc_feature (1)..( 12): Matrix.004 file - promoters50/1393725
ctcttattatca

SEQ ID NO: 68209 - DNA, 9 bp, Unknown
  misc_feature (1)..( 9): Matrix.004 file - promoters50/1393725
ttattctca

SEQ ID NO: 68210 - DNA, 9 bp, Unknown
  misc_feature (1)..( 9): Matrix.004 file - promoters50/1393751
taccaattg

SEQ ID NO: 68211 - DNA, 12 bp, Unknown
  misc_feature (1)..( 12): Matrix.004 file - promoters50/1393761
tactaacataag

SEQ ID NO: 68212 - DNA, 6 bp, Unknown
  misc_feature (1)..( 6): Matrix.004 file - promoters50/1393761
tttttt

SEQ ID NO: 68213 - DNA, 9 bp, Unknown
  misc_feature (1)..( 9): Matrix.004 file - promoters50/1393761
aaatgaaat

SEQ ID NO: 68214 - DNA, 7 bp, Unknown
  misc_feature (1)..( 7): Matrix.004 file - promoters50/1393761
ctgtgtc

SEQ ID NO: 68215 - DNA, 10 bp, Unknown
  misc_feature (1)..( 10): Matrix.004 file - promoters50/1393761
ctatttaaac

SEQ ID NO: 68216 - DNA, 9 bp, Unknown
  misc_feature (1)..( 9): Matrix.004 file - promoters50/1393761
aagttaata

SEQ ID NO: 68217 - DNA, 8 bp, Unknown
  misc_feature (1)..( 8): Matrix.004 file - promoters50/1393777
tttgattg

SEQ ID NO: 68218 - DNA, 8 bp, Unknown
  misc_feature (1)..( 8): Matrix.004 file - promoters50/1393777
taaaaatt

SEQ ID NO: 68219 - DNA, 11 bp, Unknown
  misc_feature (1)..( 11): Matrix.004 file - promoters50/1393777
ctatttttatt

SEQ ID NO: 68220 - DNA, 10 bp, Unknown
  misc_feature (1)..( 10): Matrix.004 file - promoters50/1393777
tttcatttta

SEQ ID NO: 68221 - DNA, 14 bp, Unknown
  misc_feature (1)..( 14): Matrix.004 file - promoters50/1393777
tattttttttggat

SEQ ID NO: 68222 - DNA, 10 bp, Unknown
  misc_feature (1)..( 10): Matrix.004 file - promoters50/1393777
catataatta

SEQ ID NO: 68223 - DNA, 10 bp, Unknown
  misc_feature (1)..( 10): Matrix.004 file - promoters50/1393777
taaattatag

SEQ ID NO: 68224 - DNA, 8 bp, Unknown
  misc_feature (1)..( 8): Matrix.004 file - promoters50/1393777
attttatt

SEQ ID NO: 68225 - DNA, 8 bp, Unknown
  misc_feature (1)..( 8): Matrix.004 file - promoters50/1393777
ttttattt

SEQ ID NO: 68226 - DNA, 9 bp, Unknown
  misc_feature (1)..( 9): Matrix.004 file - promoters50/1393777
tatttattt

SEQ ID NO: 68227 - DNA, 14 bp, Unknown
  misc_feature (1)..( 14): Matrix.004 file - promoters50/1393787
tcatattaattaac

SEQ ID NO: 68228 - DNA, 14 bp, Unknown
  misc_feature (1)..( 14): Matrix.004 file - promoters50/1393787
tgatgaatttctat

SEQ ID NO: 68229 - DNA, 14 bp, Unknown
  misc_feature (1)..( 14): Matrix.004 file - promoters50/1393802
tcaaaaaatttaat

SEQ ID NO: 68230 - DNA, 11 bp, Unknown
  misc_feature (1)..( 11): Matrix.004 file - promoters50/1393802
taacctaaaaa

SEQ ID NO: 68231 - DNA, 9 bp, Unknown
  misc_feature (1)..( 9): Matrix.004 file - promoters50/1393802
agaaatctt

SEQ ID NO: 68232 - DNA, 12 bp, Unknown
  misc_feature (1)..( 12): Matrix.004 file - promoters50/1393802
aaacaaaaaagt

SEQ ID NO: 68233 - DNA, 12 bp, Unknown
  misc_feature (1)..( 12): Matrix.004 file - promoters50/1393802
taaagttcaaca

SEQ ID NO: 68234 - DNA, 8 bp, Unknown
  misc_feature (1)..( 8): Matrix.004 file - promoters50/1393802
attttttt

SEQ ID NO: 68235 - DNA, 10 bp, Unknown
  misc_feature (1)..( 10): Matrix.004 file - promoters50/1393802
agttattcat

SEQ ID NO: 68236 - DNA, 9 bp, Unknown
  misc_feature (1)..( 9): Matrix.004 file - promoters50/1393805
tttattaaa

SEQ ID NO: 68237 - DNA, 9 bp, Unknown
  misc_feature (1)..( 9): Matrix.004 file - promoters50/1393808
atctttttt

SEQ ID NO: 68238 - DNA, 6 bp, Unknown
  misc_feature (1)..( 6): Matrix.004 file - promoters50/1393812
atccat

SEQ ID NO: 68239 - DNA, 11 bp, Unknown
  misc_feature (1)..( 11): Matrix.004 file - promoters50/1393812
tcgttctcaaa

SEQ ID NO: 68240 - DNA, 11 bp, Unknown
  misc_feature (1)..( 11): Matrix.004 file - promoters50/1393812
ttgattataaa

SEQ ID NO: 68241 - DNA, 9 bp, Unknown
  misc_feature (1)..( 9): Matrix.004 file - promoters50/1393812
aaactgaat

SEQ ID NO: 68242 - DNA, 8 bp, Unknown
  misc_feature (1)..( 8): Matrix.004 file - promoters50/1393812
aaataacc

SEQ ID NO: 68243 - DNA, 7 bp, Unknown
  misc_feature (1)..( 7): Matrix.004 file - promoters50/1393812
aacttat

SEQ ID NO: 68244 - DNA, 9 bp, Unknown
  misc_feature (1)..( 9): Matrix.004 file - promoters50/1393812
ttcttttta

SEQ ID NO: 68245 - DNA, 8 bp, Unknown
  misc_feature (1)..( 8): Matrix.004 file - promoters50/1393812
ataaccaa

SEQ ID NO: 68246 - DNA, 12 bp, Unknown
  misc_feature (1)..( 12): Matrix.004 file - promoters50/1393812
tgggcccattaa

SEQ ID NO: 68247 - DNA, 8 bp, Unknown
  misc_feature (1)..( 8): Matrix.004 file - promoters50/1393827
tataacta

SEQ ID NO: 68248 - DNA, 8 bp, Unknown
  misc_feature (1)..( 8): Matrix.004 file - promoters50/1393827
agttatct

SEQ ID NO: 68249 - DNA, 7 bp, Unknown
  misc_feature (1)..( 7): Matrix.004 file - promoters50/1393827
ttgtcta

SEQ ID NO: 68250 - DNA, 11 bp, Unknown
  misc_feature (1)..( 11): Matrix.004 file - promoters50/1393827
tcttattagat

SEQ ID NO: 68251 - DNA, 8 bp, Unknown
  misc_feature (1)..( 8): Matrix.004 file - promoters50/1393827
aatcaaat

SEQ ID NO: 68252 - DNA, 10 bp, Unknown
  misc_feature (1)..( 10): Matrix.004 file - promoters50/1393827
aacctccaca

SEQ ID NO: 68253 - DNA, 9 bp, Unknown
  misc_feature (1)..( 9): Matrix.004 file - promoters50/1393845
taaaataaa

SEQ ID NO: 68254 - DNA, 19 bp, Unknown
  misc_feature (1)..( 19): Matrix.004 file - promoters50/1393845
ttgaaatttagtaataaat

SEQ ID NO: 68255 - DNA, 9 bp, Unknown
  misc_feature (1)..( 9): Matrix.004 file - promoters50/1393845
attcaaaat

SEQ ID NO: 68256 - DNA, 9 bp, Unknown
  misc_feature (1)..( 9): Matrix.004 file - promoters50/1393845
aaattaatt

SEQ ID NO: 68257 - DNA, 11 bp, Unknown
  misc_feature (1)..( 11): Matrix.004 file - promoters50/1393935
aattattaaaa

SEQ ID NO: 68258 - DNA, 9 bp, Unknown
  misc_feature (1)..( 9): Matrix.004 file - promoters50/1393954
aaaagcaaa

SEQ ID NO: 68259 - DNA, 8 bp, Unknown
  misc_feature (1)..( 8): Matrix.004 file - promoters50/1393954
tcaaggtt

SEQ ID NO: 68260 - DNA, 9 bp, Unknown
  misc_feature (1)..( 9): Matrix.004 file - promoters50/1393954
tatctttat

SEQ ID NO: 68261 - DNA, 11 bp, Unknown
  misc_feature (1)..( 11): Matrix.004 file - promoters50/1393954
gttgaattttt

SEQ ID NO: 68262 - DNA, 8 bp, Unknown
  misc_feature (1)..( 8): Matrix.004 file - promoters50/1394008
tgaacaaa

SEQ ID NO: 68263 - DNA, 8 bp, Unknown
  misc_feature (1)..( 8): Matrix.004 file - promoters50/1394034
aaagattt

SEQ ID NO: 68264 - DNA, 7 bp, Unknown
  misc_feature (1)..( 7): Matrix.004 file - promoters50/1394110
taacttt

SEQ ID NO: 68265 - DNA, 9 bp, Unknown
  misc_feature (1)..( 9): Matrix.004 file - promoters50/1394110
taaaaaaaa

SEQ ID NO: 68266 - DNA, 10 bp, Unknown
  misc_feature (1)..( 10): Matrix.004 file - promoters50/1394110
aaacaaaata

SEQ ID NO: 68267 - DNA, 10 bp, Unknown
  misc_feature (1)..( 10): Matrix.004 file - promoters50/1394110
tcttcaaaaa

SEQ ID NO: 68268 - DNA, 8 bp, Unknown
  misc_feature (1)..( 8): Matrix.004 file - promoters50/1394110
atatcaaa

SEQ ID NO: 68269 - DNA, 13 bp, Unknown
  misc_feature (1)..( 13): Matrix.004 file - promoters50/1394110
aaatttcaaaaaa

SEQ ID NO: 68270 - DNA, 9 bp, Unknown
  misc_feature (1)..( 9): Matrix.004 file - promoters50/1394178
aaaaattta

SEQ ID NO: 68271 - DNA, 9 bp, Unknown
  misc_feature (1)..( 9): Matrix.004 file - promoters50/1394178
tttttttct

SEQ ID NO: 68272 - DNA, 9 bp, Unknown
  misc_feature (1)..( 9): Matrix.004 file - promoters50/1394178
tttttctta

SEQ ID NO: 68273 - DNA, 6 bp, Unknown
  misc_feature (1)..( 6): Matrix.004 file - promoters50/1394178
gttttt

SEQ ID NO: 68274 - DNA, 9 bp, Unknown
  misc_feature (1)..( 9): Matrix.004 file - promoters50/1394178
ttttttaaa

SEQ ID NO: 68275 - DNA, 8 bp, Unknown
  misc_feature (1)..( 8): Matrix.004 file - promoters50/1394302
cataaaaa

SEQ ID NO: 68276 - DNA, 17 bp, Unknown
  misc_feature (1)..( 17): Matrix.004 file - promoters50/1394302
actgtttaaaaaaaaaa

SEQ ID NO: 68277 - DNA, 8 bp, Unknown
  misc_feature (1)..( 8): Matrix.004 file - promoters50/1394302
ttgttaat

SEQ ID NO: 68278 - DNA, 8 bp, Unknown
  misc_feature (1)..( 8): Matrix.004 file - promoters50/1394310
aaaacaaa

SEQ ID NO: 68279 - DNA, 12 bp, Unknown
  misc_feature (1)..( 12): Matrix.004 file - promoters50/1394310
ataacatataca

SEQ ID NO: 68280 - DNA, 10 bp, Unknown
  misc_feature (1)..( 10): Matrix.004 file - promoters50/1394310
cttgatatca

SEQ ID NO: 68281 - DNA, 16 bp, Unknown
  misc_feature (1)..( 16): Matrix.004 file - promoters50/1394310
atccttattttaccgt

SEQ ID NO: 68282 - DNA, 8 bp, Unknown
  misc_feature (1)..( 8): Matrix.004 file - promoters50/1394327
tctatata

SEQ ID NO: 68283 - DNA, 7 bp, Unknown
  misc_feature (1)..( 7): Matrix.004 file - promoters50/1394327
gcaaaaa

SEQ ID NO: 68284 - DNA, 10 bp, Unknown
  misc_feature (1)..( 10): Matrix.004 file - promoters50/1394327
atatggaaaa

SEQ ID NO: 68285 - DNA, 9 bp, Unknown
  misc_feature (1)..( 9): Matrix.004 file - promoters50/1394327
caaaacttt

SEQ ID NO: 68286 - DNA, 8 bp, Unknown
  misc_feature (1)..( 8): Matrix.004 file - promoters50/1394447
attgttta

SEQ ID NO: 68287 - DNA, 8 bp, Unknown
  misc_feature (1)..( 8): Matrix.004 file - promoters50/1394447
aggataaa

SEQ ID NO: 68288 - DNA, 10 bp, Unknown
  misc_feature (1)..( 10): Matrix.004 file - promoters50/1394447
tatttttctc

SEQ ID NO: 68289 - DNA, 7 bp, Unknown
  misc_feature (1)..( 7): Matrix.004 file - promoters50/1394447
atgaaaa

SEQ ID NO: 68290 - DNA, 10 bp, Unknown
  misc_feature (1)..( 10): Matrix.004 file - promoters50/1394451
atttaataaa

SEQ ID NO: 68291 - DNA, 8 bp, Unknown
  misc_feature (1)..( 8): Matrix.004 file - promoters50/1394451
taattata

SEQ ID NO: 68292 - DNA, 10 bp, Unknown
  misc_feature (1)..( 10): Matrix.004 file - promoters50/1394473
atcaaggaaa

SEQ ID NO: 68293 - DNA, 12 bp, Unknown
  misc_feature (1)..( 12): Matrix.004 file - promoters50/1394473
aacgacaaaaag

SEQ ID NO: 68294 - DNA, 9 bp, Unknown
  misc_feature (1)..( 9): Matrix.004 file - promoters50/1394473
ttaatatat

SEQ ID NO: 68295 - DNA, 9 bp, Unknown
  misc_feature (1)..( 9): Matrix.004 file - promoters50/1394473
tcaaatcaa

SEQ ID NO: 68296 - DNA, 8 bp, Unknown
  misc_feature (1)..( 8): Matrix.004 file - promoters50/1394473
aataaaga

SEQ ID NO: 68297 - DNA, 12 bp, Unknown
  misc_feature (1)..( 12): Matrix.004 file - promoters50/1394473
aaaaaaagataa

SEQ ID NO: 68298 - DNA, 9 bp, Unknown
  misc_feature (1)..( 9): Matrix.004 file - promoters50/1394480
catatatac

SEQ ID NO: 68299 - DNA, 9 bp, Unknown
  misc_feature (1)..( 9): Matrix.004 file - promoters50/1394480
aaaatttct

SEQ ID NO: 68300 - DNA, 8 bp, Unknown
  misc_feature (1)..( 8): Matrix.004 file - promoters50/1394480
tgtgaaac

SEQ ID NO: 68301 - DNA, 9 bp, Unknown
  misc_feature (1)..( 9): Matrix.004 file - promoters50/1394510
aaaatttct

SEQ ID NO: 68302 - DNA, 12 bp, Unknown
  misc_feature (1)..( 12): Matrix.004 file - promoters50/1394510
taaaatttttgt

SEQ ID NO: 68303 - DNA, 10 bp, Unknown
  misc_feature (1)..( 10): Matrix.004 file - promoters50/1394510
aacatataaa

SEQ ID NO: 68304 - DNA, 10 bp, Unknown
  misc_feature (1)..( 10): Matrix.004 file - promoters50/1394510
aaaattcaca

SEQ ID NO: 68305 - DNA, 13 bp, Unknown
  misc_feature (1)..( 13): Matrix.004 file - promoters50/1394514
tttaatatttctt

SEQ ID NO: 68306 - DNA, 9 bp, Unknown
  misc_feature (1)..( 9): Matrix.004 file - promoters50/1394514
aattttagt

SEQ ID NO: 68307 - DNA, 5 bp, Unknown
  misc_feature (1)..( 5): Matrix.004 file - promoters50/1394514
ttagt

SEQ ID NO: 68308 - DNA, 10 bp, Unknown
  misc_feature (1)..( 10): Matrix.004 file - promoters50/1394514
aaaatgttag

SEQ ID NO: 68309 - DNA, 9 bp, Unknown
  misc_feature (1)..( 9): Matrix.004 file - promoters50/1394545
cattattgt

SEQ ID NO: 68310 - DNA, 8 bp, Unknown
  misc_feature (1)..( 8): Matrix.004 file - promoters50/1394592
catctaac

SEQ ID NO: 68311 - DNA, 12 bp, Unknown
  misc_feature (1)..( 12): Matrix.004 file - promoters50/1394610
tttagaatcaaa

SEQ ID NO: 68312 - DNA, 8 bp, Unknown
  misc_feature (1)..( 8): Matrix.004 file - promoters50/1394610
taaactct

SEQ ID NO: 68313 - DNA, 6 bp, Unknown
  misc_feature (1)..( 6): Matrix.004 file - promoters50/1394610
ctcttt

SEQ ID NO: 68314 - DNA, 11 bp, Unknown
  misc_feature (1)..( 11): Matrix.004 file - promoters50/1394610
tataataactt

SEQ ID NO: 68315 - DNA, 11 bp, Unknown
  misc_feature (1)..( 11): Matrix.004 file - promoters50/1394610
taactttggtt

SEQ ID NO: 68316 - DNA, 8 bp, Unknown
  misc_feature (1)..( 8): Matrix.004 file - promoters50/1394625
ataatttt

SEQ ID NO: 68317 - DNA, 17 bp, Unknown
  misc_feature (1)..( 17): Matrix.004 file - promoters50/1394625
aaaattaaaaaaaaaag

SEQ ID NO: 68318 - DNA, 8 bp, Unknown
  misc_feature (1)..( 8): Matrix.004 file - promoters50/1394625
taatttta

SEQ ID NO: 68319 - DNA, 8 bp, Unknown
  misc_feature (1)..( 8): Matrix.004 file - promoters50/1394625
tttaattt

SEQ ID NO: 68320 - DNA, 7 bp, Unknown
  misc_feature (1)..( 7): Matrix.004 file - promoters50/1394625
aaaatat

SEQ ID NO: 68321 - DNA, 11 bp, Unknown
  misc_feature (1)..( 11): Matrix.004 file - promoters50/1394625
atataataaaa

SEQ ID NO: 68322 - DNA, 12 bp, Unknown
  misc_feature (1)..( 12): Matrix.004 file - promoters50/1394643
aaattattaaac

SEQ ID NO: 68323 - DNA, 10 bp, Unknown
  misc_feature (1)..( 10): Matrix.004 file - promoters50/1394643
gttataatat

SEQ ID NO: 68324 - DNA, 13 bp, Unknown
  misc_feature (1)..( 13): Matrix.004 file - promoters50/1394643
aattaataatttt

SEQ ID NO: 68325 - DNA, 12 bp, Unknown
  misc_feature (1)..( 12): Matrix.004 file - promoters50/1394643
gaatttgagtta

SEQ ID NO: 68326 - DNA, 12 bp, Unknown
  misc_feature (1)..( 12): Matrix.004 file - promoters50/1394643
aatagtacattt

SEQ ID NO: 68327 - DNA, 7 bp, Unknown
  misc_feature (1)..( 7): Matrix.004 file - promoters50/1394643
tttgatt

SEQ ID NO: 68328 - DNA, 11 bp, Unknown
  misc_feature (1)..( 11): Matrix.004 file - promoters50/1394676
cttcttatata

SEQ ID NO: 68329 - DNA, 9 bp, Unknown
  misc_feature (1)..( 9): Matrix.004 file - promoters50/1394697
tttgattga

SEQ ID NO: 68330 - DNA, 9 bp, Unknown
  misc_feature (1)..( 9): Matrix.004 file - promoters50/1394697
aatcatata

SEQ ID NO: 68331 - DNA, 17 bp, Unknown
  misc_feature (1)..( 17): Matrix.004 file - promoters50/1394697
tcttttaaaataaaact

SEQ ID NO: 68332 - DNA, 11 bp, Unknown
  misc_feature (1)..( 11): Matrix.004 file - promoters50/1394767
ttcaaaaatta

SEQ ID NO: 68333 - DNA, 7 bp, Unknown
  misc_feature (1)..( 7): Matrix.004 file - promoters50/1394795
caattaa

SEQ ID NO: 68334 - DNA, 12 bp, Unknown
  misc_feature (1)..( 12): Matrix.004 file - promoters50/1394819
tctatatataca

SEQ ID NO: 68335 - DNA, 19 bp, Unknown
  misc_feature (1)..( 19): Matrix.004 file - promoters50/1394842
acaaaatgtcttatcaact

SEQ ID NO: 68336 - DNA, 12 bp, Unknown
  misc_feature (1)..( 12): Matrix.004 file - promoters50/1394842
taaggattagtt

SEQ ID NO: 68337 - DNA, 8 bp, Unknown
  misc_feature (1)..( 8): Matrix.004 file - promoters50/1394842
attgtgtt

SEQ ID NO: 68338 - DNA, 8 bp, Unknown
  misc_feature (1)..( 8): Matrix.004 file - promoters50/1394842
taaaccgg

SEQ ID NO: 68339 - DNA, 8 bp, Unknown
  misc_feature (1)..( 8): Matrix.004 file - promoters50/1394842
ggttttgt

SEQ ID NO: 68340 - DNA, 8 bp, Unknown
  misc_feature (1)..( 8): Matrix.004 file - promoters50/1394861
gattttgt

SEQ ID NO: 68341 - DNA, 7 bp, Unknown
  misc_feature (1)..( 7): Matrix.004 file - promoters50/1394861
attgaaa

SEQ ID NO: 68342 - DNA, 10 bp, Unknown
  misc_feature (1)..( 10): Matrix.004 file - promoters50/1394861
ggccatttta

SEQ ID NO: 68343 - DNA, 8 bp, Unknown
  misc_feature (1)..( 8): Matrix.004 file - promoters50/1394861
aaacaaaa

SEQ ID NO: 68344 - DNA, 10 bp, Unknown
  misc_feature (1)..( 10): Matrix.004 file - promoters50/1394861
gttcttaaag

SEQ ID NO: 68345 - DNA, 8 bp, Unknown
  misc_feature (1)..( 8): Matrix.004 file - promoters50/1394884
attttatt

SEQ ID NO: 68346 - DNA, 9 bp, Unknown
  misc_feature (1)..( 9): Matrix.004 file - promoters50/1394884
aattttttt

SEQ ID NO: 68347 - DNA, 8 bp, Unknown
  misc_feature (1)..( 8): Matrix.004 file - promoters50/1394884
atttgttt

SEQ ID NO: 68348 - DNA, 9 bp, Unknown
  misc_feature (1)..( 9): Matrix.004 file - promoters50/1394884
atttgtata

SEQ ID NO: 68349 - DNA, 7 bp, Unknown
  misc_feature (1)..( 7): Matrix.004 file - promoters50/1394884
aatttaa

SEQ ID NO: 68350 - DNA, 10 bp, Unknown
  misc_feature (1)..( 10): Matrix.004 file - promoters50/1394884
gaattatatc

SEQ ID NO: 68351 - DNA, 11 bp, Unknown
  misc_feature (1)..( 11): Matrix.004 file - promoters50/1394884
ctgaattatat

SEQ ID NO: 68352 - DNA, 9 bp, Unknown
  misc_feature (1)..( 9): Matrix.004 file - promoters50/1394884
taatcttag

SEQ ID NO: 68353 - DNA, 6 bp, Unknown
  misc_feature (1)..( 6): Matrix.004 file - promoters50/1394884
tataat

SEQ ID NO: 68354 - DNA, 6 bp, Unknown
  misc_feature (1)..( 6): Matrix.004 file - promoters50/1394978
atttaa

SEQ ID NO: 68355 - DNA, 8 bp, Unknown
  misc_feature (1)..( 8): Matrix.004 file - promoters50/1394978
atcaacat

SEQ ID NO: 68356 - DNA, 10 bp, Unknown
  misc_feature (1)..( 10): Matrix.004 file - promoters50/1394978
ataaacatta

SEQ ID NO: 68357 - DNA, 12 bp, Unknown
  misc_feature (1)..( 12): Matrix.004 file - promoters50/1394978
caatttcattta

SEQ ID NO: 68358 - DNA, 8 bp, Unknown
  misc_feature (1)..( 8): Matrix.004 file - promoters50/1394978
cttatatc

SEQ ID NO: 68359 - DNA, 8 bp, Unknown
  misc_feature (1)..( 8): Matrix.004 file - promoters50/1394978
tagaaaaa

SEQ ID NO: 68360 - DNA, 14 bp, Unknown
  misc_feature (1)..( 14): Matrix.004 file - promoters50/1394978
aaaaaccattttaa

SEQ ID NO: 68361 - DNA, 9 bp, Unknown
  misc_feature (1)..( 9): Matrix.004 file - promoters50/1394978
aaaagagaa

SEQ ID NO: 68362 - DNA, 8 bp, Unknown
  misc_feature (1)..( 8): Matrix.004 file - promoters50/1394978
gtaaattc

SEQ ID NO: 68363 - DNA, 10 bp, Unknown
  misc_feature (1)..( 10): Matrix.004 file - promoters50/1394978
aaaattaaaa

SEQ ID NO: 68364 - DNA, 8 bp, Unknown
  misc_feature (1)..( 8): Matrix.004 file - promoters50/1395027
tgtataat

SEQ ID NO: 68365 - DNA, 9 bp, Unknown
  misc_feature (1)..( 9): Matrix.004 file - promoters50/1395027
taaactaat

SEQ ID NO: 68366 - DNA, 10 bp, Unknown
  misc_feature (1)..( 10): Matrix.004 file - promoters50/1395027
ataaataata

SEQ ID NO: 68367 - DNA, 8 bp, Unknown
  misc_feature (1)..( 8): Matrix.004 file - promoters50/1395027
aaaacaaa

SEQ ID NO: 68368 - DNA, 8 bp, Unknown
  misc_feature (1)..( 8): Matrix.004 file - promoters50/1395046
aaaatata

SEQ ID NO: 68369 - DNA, 8 bp, Unknown
  misc_feature (1)..( 8): Matrix.004 file - promoters50/1395066
tctataaa

SEQ ID NO: 68370 - DNA, 14 bp, Unknown
  misc_feature (1)..( 14): Matrix.004 file - promoters50/1395066
tttgaaaatgagta

SEQ ID NO: 68371 - DNA, 10 bp, Unknown
  misc_feature (1)..( 10): Matrix.004 file - promoters50/1395095
agtaactaaa

SEQ ID NO: 68372 - DNA, 8 bp, Unknown
  misc_feature (1)..( 8): Matrix.004 file - promoters50/1395128
atttattt

SEQ ID NO: 68373 - DNA, 7 bp, Unknown
  misc_feature (1)..( 7): Matrix.004 file - promoters50/1395128
atatgta

SEQ ID NO: 68374 - DNA, 10 bp, Unknown
  misc_feature (1)..( 10): Matrix.004 file - promoters50/1395128
ataattaaat

SEQ ID NO: 68375 - DNA, 12 bp, Unknown
  misc_feature (1)..( 12): Matrix.004 file - promoters50/1395128
ttaaaataaaaa

SEQ ID NO: 68376 - DNA, 9 bp, Unknown
  misc_feature (1)..( 9): Matrix.004 file - promoters50/1395128
acagatgaa

SEQ ID NO: 68377 - DNA, 9 bp, Unknown
  misc_feature (1)..( 9): Matrix.004 file - promoters50/1395128
tcaaacaaa

SEQ ID NO: 68378 - DNA, 7 bp, Unknown
  misc_feature (1)..( 7): Matrix.004 file - promoters50/1395128
ccaattt

SEQ ID NO: 68379 - DNA, 9 bp, Unknown
  misc_feature (1)..( 9): Matrix.004 file - promoters50/1395128
tttatcaaa

SEQ ID NO: 68380 - DNA, 10 bp, Unknown
  misc_feature (1)..( 10): Matrix.004 file - promoters50/1395128
taataaaaag

SEQ ID NO: 68381 - DNA, 9 bp, Unknown
  misc_feature (1)..( 9): Matrix.004 file - promoters50/1395128
ctttatcaa

SEQ ID NO: 68382 - DNA, 7 bp, Unknown
  misc_feature (1)..( 7): Matrix.004 file - promoters50/1395128
attttgt

SEQ ID NO: 68383 - DNA, 10 bp, Unknown
  misc_feature (1)..( 10): Matrix.004 file - promoters50/1395142
aaaacaaaaa

SEQ ID NO: 68384 - DNA, 7 bp, Unknown
  misc_feature (1)..( 7): Matrix.004 file - promoters50/1395142
gggttat

SEQ ID NO: 68385 - DNA, 9 bp, Unknown
  misc_feature (1)..( 9): Matrix.004 file - promoters50/1395185
atttacaat

SEQ ID NO: 68386 - DNA, 11 bp, Unknown
  misc_feature (1)..( 11): Matrix.004 file - promoters50/1395185
attatgtttta

SEQ ID NO: 68387 - DNA, 10 bp, Unknown
  misc_feature (1)..( 10): Matrix.004 file - promoters50/1395215
taaagcaaaa

SEQ ID NO: 68388 - DNA, 8 bp, Unknown
  misc_feature (1)..( 8): Matrix.004 file - promoters50/1395215
ttgttagt

SEQ ID NO: 68389 - DNA, 8 bp, Unknown
  misc_feature (1)..( 8): Matrix.004 file - promoters50/1395254
gaaacaaa

SEQ ID NO: 68390 - DNA, 9 bp, Unknown
  misc_feature (1)..( 9): Matrix.004 file - promoters50/1395254
ttttttatt

SEQ ID NO: 68391 - DNA, 8 bp, Unknown
  misc_feature (1)..( 8): Matrix.004 file - promoters50/1395254
attgtttg

SEQ ID NO: 68392 - DNA, 9 bp, Unknown
  misc_feature (1)..( 9): Matrix.004 file - promoters50/1395254
taaaaacag

SEQ ID NO: 68393 - DNA, 8 bp, Unknown
  misc_feature (1)..( 8): Matrix.004 file - promoters50/1395254
attaatga

SEQ ID NO: 68394 - DNA, 8 bp, Unknown
  misc_feature (1)..( 8): Matrix.004 file - promoters50/1395254
aaatctaa

SEQ ID NO: 68395 - DNA, 7 bp, Unknown
  misc_feature (1)..( 7): Matrix.004 file - promoters50/1395270
atttttt

SEQ ID NO: 68396 - DNA, 8 bp, Unknown
  misc_feature (1)..( 8): Matrix.004 file - promoters50/1395390
aattattt

SEQ ID NO: 68397 - DNA, 12 bp, Unknown
  misc_feature (1)..( 12): Matrix.004 file - promoters50/1395390
acaaatatatta

SEQ ID NO: 68398 - DNA, 8 bp, Unknown
  misc_feature (1)..( 8): Matrix.004 file - promoters50/1395390
agaatttt

SEQ ID NO: 68399 - DNA, 10 bp, Unknown
  misc_feature (1)..( 10): Matrix.004 file - promoters50/1395390
agtttttaaa

SEQ ID NO: 68400 - DNA, 9 bp, Unknown
  misc_feature (1)..( 9): Matrix.004 file - promoters50/1395390
attacaaaa

SEQ ID NO: 68401 - DNA, 8 bp, Unknown
  misc_feature (1)..( 8): Matrix.004 file - promoters50/1395390
atttattc

SEQ ID NO: 68402 - DNA, 12 bp, Unknown
  misc_feature (1)..( 12): Matrix.004 file - promoters50/1395390
aaaataaaattt

SEQ ID NO: 68403 - DNA, 10 bp, Unknown
  misc_feature (1)..( 10): Matrix.004 file - promoters50/1395390
aatattttta

SEQ ID NO: 68404 - DNA, 11 bp, Unknown
  misc_feature (1)..( 11): Matrix.004 file - promoters50/1395390
atttatcatta

SEQ ID NO: 68405 - DNA, 7 bp, Unknown
  misc_feature (1)..( 7): Matrix.004 file - promoters50/1395390
attttct

SEQ ID NO: 68406 - DNA, 8 bp, Unknown
  misc_feature (1)..( 8): Matrix.004 file - promoters50/1395390
aattaaat

SEQ ID NO: 68407 - DNA, 7 bp, Unknown
  misc_feature (1)..( 7): Matrix.004 file - promoters50/1395390
aaattaa

SEQ ID NO: 68408 - DNA, 8 bp, Unknown
  misc_feature (1)..( 8): Matrix.004 file - promoters50/1395421
taaaattt

SEQ ID NO: 68409 - DNA, 8 bp, Unknown
  misc_feature (1)..( 8): Matrix.004 file - promoters50/1395421
gaagaaga

SEQ ID NO: 68410 - DNA, 13 bp, Unknown
  misc_feature (1)..( 13): Matrix.004 file - promoters50/1395421
tcaatttttctca

SEQ ID NO: 68411 - DNA, 11 bp, Unknown
  misc_feature (1)..( 11): Matrix.004 file - promoters50/1395481
ttgaatttttg

SEQ ID NO: 68412 - DNA, 11 bp, Unknown
  misc_feature (1)..( 11): Matrix.004 file - promoters50/1395485
aatactaatag

SEQ ID NO: 68413 - DNA, 8 bp, Unknown
  misc_feature (1)..( 8): Matrix.004 file - promoters50/1395534
tctttttg

SEQ ID NO: 68414 - DNA, 13 bp, Unknown
  misc_feature (1)..( 13): Matrix.004 file - promoters50/1395534
actttataataaa

SEQ ID NO: 68415 - DNA, 9 bp, Unknown
  misc_feature (1)..( 9): Matrix.004 file - promoters50/1395534
gcaaagaaa

SEQ ID NO: 68416 - DNA, 6 bp, Unknown
  misc_feature (1)..( 6): Matrix.004 file - promoters50/1395534
ttttca

SEQ ID NO: 68417 - DNA, 8 bp, Unknown
  misc_feature (1)..( 8): Matrix.004 file - promoters50/1395568
actccatt

SEQ ID NO: 68418 - DNA, 10 bp, Unknown
  misc_feature (1)..( 10): Matrix.004 file - promoters50/1395605
aaatgttttt

SEQ ID NO: 68419 - DNA, 7 bp, Unknown
  misc_feature (1)..( 7): Matrix.004 file - promoters50/1395605
gatataa

SEQ ID NO: 68420 - DNA, 8 bp, Unknown
  misc_feature (1)..( 8): Matrix.004 file - promoters50/1395605
tgaaccac

SEQ ID NO: 68421 - DNA, 9 bp, Unknown
  misc_feature (1)..( 9): Matrix.004 file - promoters50/1395605
cataaaatt

SEQ ID NO: 68422 - DNA, 11 bp, Unknown
  misc_feature (1)..( 11): Matrix.004 file - promoters50/1395605
attctcttatt

SEQ ID NO: 68423 - DNA, 7 bp, Unknown
  misc_feature (1)..( 7): Matrix.004 file - promoters50/1395728
aatatat

SEQ ID NO: 68424 - DNA, 10 bp, Unknown
  misc_feature (1)..( 10): Matrix.004 file - promoters50/1395781
cctttgagaa

SEQ ID NO: 68425 - DNA, 12 bp, Unknown
  misc_feature (1)..( 12): Matrix.004 file - promoters50/1395781
taattacaagaa

SEQ ID NO: 68426 - DNA, 9 bp, Unknown
  misc_feature (1)..( 9): Matrix.004 file - promoters50/1395790
catttttgt

SEQ ID NO: 68427 - DNA, 8 bp, Unknown
  misc_feature (1)..( 8): Matrix.004 file - promoters50/1395790
aacaatga

SEQ ID NO: 68428 - DNA, 9 bp, Unknown
  misc_feature (1)..( 9): Matrix.004 file - promoters50/1395806
gtattgttg

SEQ ID NO: 68429 - DNA, 8 bp, Unknown
  misc_feature (1)..( 8): Matrix.004 file - promoters50/1395806
acaaaaga

SEQ ID NO: 68430 - DNA, 12 bp, Unknown
  misc_feature (1)..( 12): Matrix.004 file - promoters50/1395806
atagaaacaaaa

SEQ ID NO: 68431 - DNA, 9 bp, Unknown
  misc_feature (1)..( 9): Matrix.004 file - promoters50/1395806
aaaatgaat

SEQ ID NO: 68432 - DNA, 11 bp, Unknown
  misc_feature (1)..( 11): Matrix.004 file - promoters50/1395824
attttaaaagc

SEQ ID NO: 68433 - DNA, 10 bp, Unknown
  misc_feature (1)..( 10): Matrix.004 file - promoters50/1395824
tacaaacata

SEQ ID NO: 68434 - DNA, 12 bp, Unknown
  misc_feature (1)..( 12): Matrix.004 file - promoters50/1395824
agaataagcaaa

SEQ ID NO: 68435 - DNA, 13 bp, Unknown
  misc_feature (1)..( 13): Matrix.004 file - promoters50/1395824
aattttaaaaatc

SEQ ID NO: 68436 - DNA, 12 bp, Unknown
  misc_feature (1)..( 12): Matrix.004 file - promoters50/1395828
aagcaataaacg

SEQ ID NO: 68437 - DNA, 9 bp, Unknown
  misc_feature (1)..( 9): Matrix.004 file - promoters50/1395828
gaaccaaac

SEQ ID NO: 68438 - DNA, 10 bp, Unknown
  misc_feature (1)..( 10): Matrix.004 file - promoters50/1395836
aaccaacaat

SEQ ID NO: 68439 - DNA, 7 bp, Unknown
  misc_feature (1)..( 7): Matrix.004 file - promoters50/1395836
attacat

SEQ ID NO: 68440 - DNA, 7 bp, Unknown
  misc_feature (1)..( 7): Matrix.004 file - promoters50/1395836
attcgaa

SEQ ID NO: 68441 - DNA, 10 bp, Unknown
  misc_feature (1)..( 10): Matrix.004 file - promoters50/1395836
ttgaagatta

SEQ ID NO: 68442 - DNA, 7 bp, Unknown
  misc_feature (1)..( 7): Matrix.004 file - promoters50/1395836
aaagcgg

SEQ ID NO: 68443 - DNA, 10 bp, Unknown
  misc_feature (1)..( 10): Matrix.004 file - promoters50/1395839
gagaaaatgg

SEQ ID NO: 68444 - DNA, 8 bp, Unknown
  misc_feature (1)..( 8): Matrix.004 file - promoters50/1395972
agttgatt

SEQ ID NO: 68445 - DNA, 10 bp, Unknown
  misc_feature (1)..( 10): Matrix.004 file - promoters50/1395972
ctcaaaaaat

SEQ ID NO: 68446 - DNA, 9 bp, Unknown
  misc_feature (1)..( 9): Matrix.004 file - promoters50/1396022
aacagaaac

SEQ ID NO: 68447 - DNA, 9 bp, Unknown
  misc_feature (1)..( 9): Matrix.004 file - promoters50/1396022
ttgttgttg

SEQ ID NO: 68448 - DNA, 9 bp, Unknown
  misc_feature (1)..( 9): Matrix.004 file - promoters50/1396022
ttaaagtcg

SEQ ID NO: 68449 - DNA, 9 bp, Unknown
  misc_feature (1)..( 9): Matrix.004 file - promoters50/1396022
cttgtttaa

SEQ ID NO: 68450 - DNA, 9 bp, Unknown
  misc_feature (1)..( 9): Matrix.004 file - promoters50/1396057
gaaatcaaa

SEQ ID NO: 68451 - DNA, 9 bp, Unknown
  misc_feature (1)..( 9): Matrix.004 file - promoters50/1396057
tcgaataaa

SEQ ID NO: 68452 - DNA, 10 bp, Unknown
  misc_feature (1)..( 10): Matrix.004 file - promoters50/1396057
gatatttgta

SEQ ID NO: 68453 - DNA, 13 bp, Unknown
  misc_feature (1)..( 13): Matrix.004 file - promoters50/1396057
ataaaattataac

SEQ ID NO: 68454 - DNA, 12 bp, Unknown
  misc_feature (1)..( 12): Matrix.004 file - promoters50/1396085
aatttttttcta

SEQ ID NO: 68455 - DNA, 11 bp, Unknown
  misc_feature (1)..( 11): Matrix.004 file - promoters50/1396085
aaatttattct

SEQ ID NO: 68456 - DNA, 10 bp, Unknown
  misc_feature (1)..( 10): Matrix.004 file - promoters50/1396085
aaaataaact

SEQ ID NO: 68457 - DNA, 10 bp, Unknown
  misc_feature (1)..( 10): Matrix.004 file - promoters50/1396104
atttcttaat

SEQ ID NO: 68458 - DNA, 6 bp, Unknown
  misc_feature (1)..( 6): Matrix.004 file - promoters50/1396123
atcaaa

SEQ ID NO: 68459 - DNA, 7 bp, Unknown
  misc_feature (1)..( 7): Matrix.004 file - promoters50/1396123
ttattat

SEQ ID NO: 68460 - DNA, 7 bp, Unknown
  misc_feature (1)..( 7): Matrix.004 file - promoters50/1396123
tattaaa

SEQ ID NO: 68461 - DNA, 16 bp, Unknown
  misc_feature (1)..( 16): Matrix.004 file - promoters50/1396123
ttatcaaagttatatt

SEQ ID NO: 68462 - DNA, 8 bp, Unknown
  misc_feature (1)..( 8): Matrix.004 file - promoters50/1396123
aattatca

SEQ ID NO: 68463 - DNA, 12 bp, Unknown
  misc_feature (1)..( 12): Matrix.004 file - promoters50/1396123
aaaaatactttg

SEQ ID NO: 68464 - DNA, 9 bp, Unknown
  misc_feature (1)..( 9): Matrix.004 file - promoters50/1396127
attaaaatc

SEQ ID NO: 68465 - DNA, 11 bp, Unknown
  misc_feature (1)..( 11): Matrix.004 file - promoters50/1396127
ttaatattgaa

SEQ ID NO: 68466 - DNA, 7 bp, Unknown
  misc_feature (1)..( 7): Matrix.004 file - promoters50/1396147
agaaaat

SEQ ID NO: 68467 - DNA, 12 bp, Unknown
  misc_feature (1)..( 12): Matrix.004 file - promoters50/1396147
atcctaattaac

SEQ ID NO: 68468 - DNA, 9 bp, Unknown
  misc_feature (1)..( 9): Matrix.004 file - promoters50/1396147
tatattcca

SEQ ID NO: 68469 - DNA, 12 bp, Unknown
  misc_feature (1)..( 12): Matrix.004 file - promoters50/1396147
caaaaaaaaaat

SEQ ID NO: 68470 - DNA, 5 bp, Unknown
  misc_feature (1)..( 5): Matrix.004 file - promoters50/1396147
agtca

SEQ ID NO: 68471 - DNA, 14 bp, Unknown
  misc_feature (1)..( 14): Matrix.004 file - promoters50/1396147
aaactttttttaat

SEQ ID NO: 68472 - DNA, 10 bp, Unknown
  misc_feature (1)..( 10): Matrix.004 file - promoters50/1396147
aattttctag

SEQ ID NO: 68473 - DNA, 8 bp, Unknown
  misc_feature (1)..( 8): Matrix.004 file - promoters50/1396147
tttttcta

SEQ ID NO: 68474 - DNA, 9 bp, Unknown
  misc_feature (1)..( 9): Matrix.004 file - promoters50/1396151
atttttcta

SEQ ID NO: 68475 - DNA, 9 bp, Unknown
  misc_feature (1)..( 9): Matrix.004 file - promoters50/1396151
ttcaaaatt

SEQ ID NO: 68476 - DNA, 7 bp, Unknown
  misc_feature (1)..( 7): Matrix.004 file - promoters50/1396151
tatttct

SEQ ID NO: 68477 - DNA, 13 bp, Unknown
  misc_feature (1)..( 13): Matrix.004 file - promoters50/1396163
ttgaatcaaaatt

SEQ ID NO: 68478 - DNA, 7 bp, Unknown
  misc_feature (1)..( 7): Matrix.004 file - promoters50/1396182
aattaaa

SEQ ID NO: 68479 - DNA, 7 bp, Unknown
  misc_feature (1)..( 7): Matrix.004 file - promoters50/1396238
gatcgaa

SEQ ID NO: 68480 - DNA, 12 bp, Unknown
  misc_feature (1)..( 12): Matrix.004 file - promoters50/1396256
aagtcaaagaag

SEQ ID NO: 68481 - DNA, 10 bp, Unknown
  misc_feature (1)..( 10): Matrix.004 file - promoters50/1396285
aaaaatgtta

SEQ ID NO: 68482 - DNA, 10 bp, Unknown
  misc_feature (1)..( 10): Matrix.004 file - promoters50/1396285
tttttctcaa

SEQ ID NO: 68483 - DNA, 8 bp, Unknown
  misc_feature (1)..( 8): Matrix.004 file - promoters50/1396285
tatttttt

SEQ ID NO: 68484 - DNA, 7 bp, Unknown
  misc_feature (1)..( 7): Matrix.004 file - promoters50/1396285
attaaat

SEQ ID NO: 68485 - DNA, 10 bp, Unknown
  misc_feature (1)..( 10): Matrix.004 file - promoters50/1396296
tataaaatat

SEQ ID NO: 68486 - DNA, 7 bp, Unknown
  misc_feature (1)..( 7): Matrix.004 file - promoters50/1396296
gatgatt

SEQ ID NO: 68487 - DNA, 7 bp, Unknown
  misc_feature (1)..( 7): Matrix.004 file - promoters50/1396296
ttttttt

SEQ ID NO: 68488 - DNA, 7 bp, Unknown
  misc_feature (1)..( 7): Matrix.004 file - promoters50/1396308
tttgaag

SEQ ID NO: 68489 - DNA, 12 bp, Unknown
  misc_feature (1)..( 12): Matrix.004 file - promoters50/1396308
gaccaaaaatcg

SEQ ID NO: 68490 - DNA, 10 bp, Unknown
  misc_feature (1)..( 10): Matrix.004 file - promoters50/1396308
taattttgtt

SEQ ID NO: 68491 - DNA, 10 bp, Unknown
  misc_feature (1)..( 10): Matrix.004 file - promoters50/1396308
aaatttattt

SEQ ID NO: 68492 - DNA, 6 bp, Unknown
  misc_feature (1)..( 6): Matrix.004 file - promoters50/1396308
atataa

SEQ ID NO: 68493 - DNA, 10 bp, Unknown
  misc_feature (1)..( 10): Matrix.004 file - promoters50/1396308
tcaatcaaaa

SEQ ID NO: 68494 - DNA, 8 bp, Unknown
  misc_feature (1)..( 8): Matrix.004 file - promoters50/1396308
tgtgtaaa

SEQ ID NO: 68495 - DNA, 9 bp, Unknown
  misc_feature (1)..( 9): Matrix.004 file - promoters50/1396308
ataaaaaat

SEQ ID NO: 68496 - DNA, 11 bp, Unknown
  misc_feature (1)..( 11): Matrix.004 file - promoters50/1396312
tataatgaaat

SEQ ID NO: 68497 - DNA, 11 bp, Unknown
  misc_feature (1)..( 11): Matrix.004 file - promoters50/1396312
aaaattaaata

SEQ ID NO: 68498 - DNA, 12 bp, Unknown
  misc_feature (1)..( 12): Matrix.004 file - promoters50/1396312
attattaacatt

SEQ ID NO: 68499 - DNA, 10 bp, Unknown
  misc_feature (1)..( 10): Matrix.004 file - promoters50/1396312
aaacaaaaaa

SEQ ID NO: 68500 - DNA, 11 bp, Unknown
  misc_feature (1)..( 11): Matrix.004 file - promoters50/1396320
ttatgaaaaaa

SEQ ID NO: 68501 - DNA, 7 bp, Unknown
  misc_feature (1)..( 7): Matrix.004 file - promoters50/1396354
cttcagt

SEQ ID NO: 68502 - DNA, 9 bp, Unknown
  misc_feature (1)..( 9): Matrix.004 file - promoters50/1396364
aatatatac

SEQ ID NO: 68503 - DNA, 9 bp, Unknown
  misc_feature (1)..( 9): Matrix.004 file - promoters50/1396364
attttagtt

SEQ ID NO: 68504 - DNA, 8 bp, Unknown
  misc_feature (1)..( 8): Matrix.004 file - promoters50/1396364
tattaatg

SEQ ID NO: 68505 - DNA, 7 bp, Unknown
  misc_feature (1)..( 7): Matrix.004 file - promoters50/1396364
aatattt

SEQ ID NO: 68506 - DNA, 8 bp, Unknown
  misc_feature (1)..( 8): Matrix.004 file - promoters50/1396364
tttagttt

SEQ ID NO: 68507 - DNA, 11 bp, Unknown
  misc_feature (1)..( 11): Matrix.004 file - promoters50/1396383
tacgtaacaat

SEQ ID NO: 68508 - DNA, 9 bp, Unknown
  misc_feature (1)..( 9): Matrix.004 file - promoters50/1396399
gttaattta

SEQ ID NO: 68509 - DNA, 8 bp, Unknown
  misc_feature (1)..( 8): Matrix.004 file - promoters50/1396407
taatgaat

SEQ ID NO: 68510 - DNA, 11 bp, Unknown
  misc_feature (1)..( 11): Matrix.004 file - promoters50/1396425
gaaagaaacaa

SEQ ID NO: 68511 - DNA, 10 bp, Unknown
  misc_feature (1)..( 10): Matrix.004 file - promoters50/1396425
ttgaatttga

SEQ ID NO: 68512 - DNA, 7 bp, Unknown
  misc_feature (1)..( 7): Matrix.004 file - promoters50/1396425
agtgact

SEQ ID NO: 68513 - DNA, 7 bp, Unknown
  misc_feature (1)..( 7): Matrix.004 file - promoters50/1396425
ataaaat

SEQ ID NO: 68514 - DNA, 9 bp, Unknown
  misc_feature (1)..( 9): Matrix.004 file - promoters50/1396425
ttgaatttg

SEQ ID NO: 68515 - DNA, 7 bp, Unknown
  misc_feature (1)..( 7): Matrix.004 file - promoters50/1396425
caccatt

SEQ ID NO: 68516 - DNA, 8 bp, Unknown
  misc_feature (1)..( 8): Matrix.004 file - promoters50/1396462
taattctt

SEQ ID NO: 68517 - DNA, 10 bp, Unknown
  misc_feature (1)..( 10): Matrix.004 file - promoters50/1396462
taaaaagtaa

SEQ ID NO: 68518 - DNA, 10 bp, Unknown
  misc_feature (1)..( 10): Matrix.004 file - promoters50/1396462
aaacaaattt

SEQ ID NO: 68519 - DNA, 9 bp, Unknown
  misc_feature (1)..( 9): Matrix.004 file - promoters50/1396462
ttttgaaaa

SEQ ID NO: 68520 - DNA, 10 bp, Unknown
  misc_feature (1)..( 10): Matrix.004 file - promoters50/1396462
ggaaaagaaa

SEQ ID NO: 68521 - DNA, 11 bp, Unknown
  misc_feature (1)..( 11): Matrix.004 file - promoters50/1396462
aaaataaaata

SEQ ID NO: 68522 - DNA, 9 bp, Unknown
  misc_feature (1)..( 9): Matrix.004 file - promoters50/1396469
aaaaggaaa

SEQ ID NO: 68523 - DNA, 14 bp, Unknown
  misc_feature (1)..( 14): Matrix.004 file - promoters50/1396469
ttttatatagatta

SEQ ID NO: 68524 - DNA, 11 bp, Unknown
  misc_feature (1)..( 11): Matrix.004 file - promoters50/1396469
actcatatata

SEQ ID NO: 68525 - DNA, 11 bp, Unknown
  misc_feature (1)..( 11): Matrix.004 file - promoters50/1396469
tcatatatata

SEQ ID NO: 68526 - DNA, 15 bp, Unknown
  misc_feature (1)..( 15): Matrix.004 file - promoters50/1396469
acaaacttttattcc

SEQ ID NO: 68527 - DNA, 9 bp, Unknown
  misc_feature (1)..( 9): Matrix.004 file - promoters50/1396482
ccaactaaa

SEQ ID NO: 68528 - DNA, 9 bp, Unknown
  misc_feature (1)..( 9): Matrix.004 file - promoters50/1396519
aaaacaaaa

SEQ ID NO: 68529 - DNA, 7 bp, Unknown
  misc_feature (1)..( 7): Matrix.004 file - promoters50/1396519
atataaa

SEQ ID NO: 68530 - DNA, 7 bp, Unknown
  misc_feature (1)..( 7): Matrix.004 file - promoters50/1396519
aaaattt

SEQ ID NO: 68531 - DNA, 10 bp, Unknown
  misc_feature (1)..( 10): Matrix.004 file - promoters50/1396519
ctaaaatatc

SEQ ID NO: 68532 - DNA, 13 bp, Unknown
  misc_feature (1)..( 13): Matrix.004 file - promoters50/1396539
acatttttagata

SEQ ID NO: 68533 - DNA, 9 bp, Unknown
  misc_feature (1)..( 9): Matrix.004 file - promoters50/1396665
ttcttcagt

SEQ ID NO: 68534 - DNA, 9 bp, Unknown
  misc_feature (1)..( 9): Matrix.004 file - promoters50/1396665
aattatttt

SEQ ID NO: 68535 - DNA, 7 bp, Unknown
  misc_feature (1)..( 7): Matrix.004 file - promoters50/1396721
aaaaact

SEQ ID NO: 68536 - DNA, 10 bp, Unknown
  misc_feature (1)..( 10): Matrix.004 file - promoters50/1396721
tgagaattga

SEQ ID NO: 68537 - DNA, 11 bp, Unknown
  misc_feature (1)..( 11): Matrix.004 file - promoters50/1396767
catgactacat

SEQ ID NO: 68538 - DNA, 9 bp, Unknown
  misc_feature (1)..( 9): Matrix.004 file - promoters50/1396767
caaactaaa

SEQ ID NO: 68539 - DNA, 8 bp, Unknown
  misc_feature (1)..( 8): Matrix.004 file - promoters50/1396816
cttacaaa

SEQ ID NO: 68540 - DNA, 11 bp, Unknown
  misc_feature (1)..( 11): Matrix.004 file - promoters50/1396816
tatctcacaat

SEQ ID NO: 68541 - DNA, 4 bp, Unknown
  misc_feature (1)..( 4): Matrix.004 file - promoters50/1396816
gata

SEQ ID NO: 68542 - DNA, 11 bp, Unknown
  misc_feature (1)..( 11): Matrix.004 file - promoters50/1396877
aatgaaattta

SEQ ID NO: 68543 - DNA, 15 bp, Unknown
  misc_feature (1)..( 15): Matrix.004 file - promoters50/1396877
tctctctagttaggt

SEQ ID NO: 68544 - DNA, 7 bp, Unknown
  misc_feature (1)..( 7): Matrix.004 file - promoters50/1396877
caaatca

SEQ ID NO: 68545 - DNA, 11 bp, Unknown
  misc_feature (1)..( 11): Matrix.004 file - promoters50/1396877
tctgcagattt

SEQ ID NO: 68546 - DNA, 8 bp, Unknown
  misc_feature (1)..( 8): Matrix.004 file - promoters50/1396885
aatacaat

SEQ ID NO: 68547 - DNA, 9 bp, Unknown
  misc_feature (1)..( 9): Matrix.004 file - promoters50/1396989
atgattcct

SEQ ID NO: 68548 - DNA, 11 bp, Unknown
  misc_feature (1)..( 11): Matrix.004 file - promoters50/1397029
tgcaaaaccaa

SEQ ID NO: 68549 - DNA, 10 bp, Unknown
  misc_feature (1)..( 10): Matrix.004 file - promoters50/1397029
ttttgatttg

SEQ ID NO: 68550 - DNA, 12 bp, Unknown
  misc_feature (1)..( 12): Matrix.004 file - promoters50/1397029
aacttttaagta

SEQ ID NO: 68551 - DNA, 9 bp, Unknown
  misc_feature (1)..( 9): Matrix.004 file - promoters50/1397029
taatcgttt

SEQ ID NO: 68552 - DNA, 7 bp, Unknown
  misc_feature (1)..( 7): Matrix.004 file - promoters50/1397029
ttttagt

SEQ ID NO: 68553 - DNA, 12 bp, Unknown
  misc_feature (1)..( 12): Matrix.004 file - promoters50/1397033
aacctttatgta

SEQ ID NO: 68554 - DNA, 9 bp, Unknown
  misc_feature (1)..( 9): Matrix.004 file - promoters50/1397033
caatagaaa

SEQ ID NO: 68555 - DNA, 9 bp, Unknown
  misc_feature (1)..( 9): Matrix.004 file - promoters50/1397033
tacattttc

SEQ ID NO: 68556 - DNA, 7 bp, Unknown
  misc_feature (1)..( 7): Matrix.004 file - promoters50/1397080
atttttt

SEQ ID NO: 68557 - DNA, 11 bp, Unknown
  misc_feature (1)..( 11): Matrix.004 file - promoters50/1397125
gaaaaacgaat

SEQ ID NO: 68558 - DNA, 12 bp, Unknown
  misc_feature (1)..( 12): Matrix.004 file - promoters50/1397125
cagttaacttta

SEQ ID NO: 68559 - DNA, 9 bp, Unknown
  misc_feature (1)..( 9): Matrix.004 file - promoters50/1397125
gtaaacttt

SEQ ID NO: 68560 - DNA, 9 bp, Unknown
  misc_feature (1)..( 9): Matrix.004 file - promoters50/1397125
taatatttc

SEQ ID NO: 68561 - DNA, 8 bp, Unknown
  misc_feature (1)..( 8): Matrix.004 file - promoters50/1397178
taaaaaaa

SEQ ID NO: 68562 - DNA, 12 bp, Unknown
  misc_feature (1)..( 12): Matrix.004 file - promoters50/1397178
aatttttttcta

SEQ ID NO: 68563 - DNA, 7 bp, Unknown
  misc_feature (1)..( 7): Matrix.004 file - promoters50/1397178
atgtttt

SEQ ID NO: 68564 - DNA, 10 bp, Unknown
  misc_feature (1)..( 10): Matrix.004 file - promoters50/1397178
aaaaatttaa

SEQ ID NO: 68565 - DNA, 8 bp, Unknown
  misc_feature (1)..( 8): Matrix.004 file - promoters50/1397178
caatttaa

SEQ ID NO: 68566 - DNA, 9 bp, Unknown
  misc_feature (1)..( 9): Matrix.004 file - promoters50/1397178
ggtatttga

SEQ ID NO: 68567 - DNA, 10 bp, Unknown
  misc_feature (1)..( 10): Matrix.004 file - promoters50/1397178
ttataattat

SEQ ID NO: 68568 - DNA, 12 bp, Unknown
  misc_feature (1)..( 12): Matrix.004 file - promoters50/1397178
aataaaaatcat

SEQ ID NO: 68569 - DNA, 13 bp, Unknown
  misc_feature (1)..( 13): Matrix.004 file - promoters50/1397178
ataaaattataac

SEQ ID NO: 68570 - DNA, 9 bp, Unknown
  misc_feature (1)..( 9): Matrix.004 file - promoters50/1397178
tcatataaa

SEQ ID NO: 68571 - DNA, 8 bp, Unknown
  misc_feature (1)..( 8): Matrix.004 file - promoters50/1397178
attttttt

SEQ ID NO: 68572 - DNA, 10 bp, Unknown
  misc_feature (1)..( 10): Matrix.004 file - promoters50/1397178
cttaaatatt

SEQ ID NO: 68573 - DNA, 9 bp, Unknown
  misc_feature (1)..( 9): Matrix.004 file - promoters50/1397178
aataattat

SEQ ID NO: 68574 - DNA, 14 bp, Unknown
  misc_feature (1)..( 14): Matrix.004 file - promoters50/1397195
attgattcaatatt

SEQ ID NO: 68575 - DNA, 10 bp, Unknown
  misc_feature (1)..( 10): Matrix.004 file - promoters50/1397195
aattcgaagc

SEQ ID NO: 68576 - DNA, 8 bp, Unknown
  misc_feature (1)..( 8): Matrix.004 file - promoters50/1397203
ttttagta

SEQ ID NO: 68577 - DNA, 12 bp, Unknown
  misc_feature (1)..( 12): Matrix.004 file - promoters50/1397231
aaaaaaaaacta

SEQ ID NO: 68578 - DNA, 11 bp, Unknown
  misc_feature (1)..( 11): Matrix.004 file - promoters50/1397251
aaacaaaatat

SEQ ID NO: 68579 - DNA, 10 bp, Unknown
  misc_feature (1)..( 10): Matrix.004 file - promoters50/1397251
acataagata

SEQ ID NO: 68580 - DNA, 9 bp, Unknown
  misc_feature (1)..( 9): Matrix.004 file - promoters50/1397263
gccaataga

SEQ ID NO: 68581 - DNA, 10 bp, Unknown
  misc_feature (1)..( 10): Matrix.004 file - promoters50/1397263
acaaaccaaa

SEQ ID NO: 68582 - DNA, 8 bp, Unknown
  misc_feature (1)..( 8): Matrix.004 file - promoters50/1397332
ataataaa

SEQ ID NO: 68583 - DNA, 11 bp, Unknown
  misc_feature (1)..( 11): Matrix.004 file - promoters50/1397350
ccctctaaacc

SEQ ID NO: 68584 - DNA, 13 bp, Unknown
  misc_feature (1)..( 13): Matrix.004 file - promoters50/1397350
gtctcatggattc

SEQ ID NO: 68585 - DNA, 11 bp, Unknown
  misc_feature (1)..( 11): Matrix.004 file - promoters50/1397350
aaaattaaaaa

SEQ ID NO: 68586 - DNA, 9 bp, Unknown
  misc_feature (1)..( 9): Matrix.004 file - promoters50/1397425
aataaaata

SEQ ID NO: 68587 - DNA, 8 bp, Unknown
  misc_feature (1)..( 8): Matrix.004 file - promoters50/1397425
tcataatt

SEQ ID NO: 68588 - DNA, 8 bp, Unknown
  misc_feature (1)..( 8): Matrix.004 file - promoters50/1397445
atatgtaa

SEQ ID NO: 68589 - DNA, 7 bp, Unknown
  misc_feature (1)..( 7): Matrix.004 file - promoters50/1397445
tcaaaat

SEQ ID NO: 68590 - DNA, 7 bp, Unknown
  misc_feature (1)..( 7): Matrix.004 file - promoters50/1397461
acaaaac

SEQ ID NO: 68591 - DNA, 11 bp, Unknown
  misc_feature (1)..( 11): Matrix.004 file - promoters50/1397461
atcaaagaata

SEQ ID NO: 68592 - DNA, 11 bp, Unknown
  misc_feature (1)..( 11): Matrix.004 file - promoters50/1397461
cgcaaaacatc

SEQ ID NO: 68593 - DNA, 12 bp, Unknown
  misc_feature (1)..( 12): Matrix.004 file - promoters50/1397461
aaacaaaaaatg

SEQ ID NO: 68594 - DNA, 8 bp, Unknown
  misc_feature (1)..( 8): Matrix.004 file - promoters50/1397461
atattaaa

SEQ ID NO: 68595 - DNA, 18 bp, Unknown
  misc_feature (1)..( 18): Matrix.004 file - promoters50/1397500
aaacaacttattaatata

SEQ ID NO: 68596 - DNA, 13 bp, Unknown
  misc_feature (1)..( 13): Matrix.004 file - promoters50/1397500
agtgctaacctat

SEQ ID NO: 68597 - DNA, 10 bp, Unknown
  misc_feature (1)..( 10): Matrix.004 file - promoters50/1397500
aaccaatctt

SEQ ID NO: 68598 - DNA, 12 bp, Unknown
  misc_feature (1)..( 12): Matrix.004 file - promoters50/1397500
aatagaaaaata

SEQ ID NO: 68599 - DNA, 8 bp, Unknown
  misc_feature (1)..( 8): Matrix.004 file - promoters50/1397500
attattat

SEQ ID NO: 68600 - DNA, 10 bp, Unknown
  misc_feature (1)..( 10): Matrix.004 file - promoters50/1397546
aagatttaca

SEQ ID NO: 68601 - DNA, 8 bp, Unknown
  misc_feature (1)..( 8): Matrix.004 file - promoters50/1397568
agagttaa

SEQ ID NO: 68602 - DNA, 10 bp, Unknown
  misc_feature (1)..( 10): Matrix.004 file - promoters50/1397568
caatttaaga

SEQ ID NO: 68603 - DNA, 9 bp, Unknown
  misc_feature (1)..( 9): Matrix.004 file - promoters50/1397568
attttgacg

SEQ ID NO: 68604 - DNA, 9 bp, Unknown
  misc_feature (1)..( 9): Matrix.004 file - promoters50/1397582
ttttaaaat

SEQ ID NO: 68605 - DNA, 9 bp, Unknown
  misc_feature (1)..( 9): Matrix.004 file - promoters50/1397594
ctaaatttc

SEQ ID NO: 68606 - DNA, 10 bp, Unknown
  misc_feature (1)..( 10): Matrix.004 file - promoters50/1397594
gaataattta

SEQ ID NO: 68607 - DNA, 11 bp, Unknown
  misc_feature (1)..( 11): Matrix.004 file - promoters50/1397594
cctcggtgtag

SEQ ID NO: 68608 - DNA, 8 bp, Unknown
  misc_feature (1)..( 8): Matrix.004 file - promoters50/1397594
atttcttt

SEQ ID NO: 68609 - DNA, 9 bp, Unknown
  misc_feature (1)..( 9): Matrix.004 file - promoters50/1397700
atttttgtt

SEQ ID NO: 68610 - DNA, 9 bp, Unknown
  misc_feature (1)..( 9): Matrix.004 file - promoters50/1397700
atgataaaa

SEQ ID NO: 68611 - DNA, 11 bp, Unknown
  misc_feature (1)..( 11): Matrix.004 file - promoters50/1397700
aaaaacaaaag

SEQ ID NO: 68612 - DNA, 11 bp, Unknown
  misc_feature (1)..( 11): Matrix.004 file - promoters50/1397717
ttaccttatta

SEQ ID NO: 68613 - DNA, 10 bp, Unknown
  misc_feature (1)..( 10): Matrix.004 file - promoters50/1397717
caaaaataag

SEQ ID NO: 68614 - DNA, 8 bp, Unknown
  misc_feature (1)..( 8): Matrix.004 file - promoters50/1397717
aagaaaaa

SEQ ID NO: 68615 - DNA, 8 bp, Unknown
  misc_feature (1)..( 8): Matrix.004 file - promoters50/1397753
aaaaataa

SEQ ID NO: 68616 - DNA, 10 bp, Unknown
  misc_feature (1)..( 10): Matrix.004 file - promoters50/1397753
tctaaaataa

SEQ ID NO: 68617 - DNA, 15 bp, Unknown
  misc_feature (1)..( 15): Matrix.004 file - promoters50/1397753
tatgattttgtggtc

SEQ ID NO: 68618 - DNA, 12 bp, Unknown
  misc_feature (1)..( 12): Matrix.004 file - promoters50/1397821
agttaataaata

SEQ ID NO: 68619 - DNA, 10 bp, Unknown
  misc_feature (1)..( 10): Matrix.004 file - promoters50/1397821
gaattgattt

SEQ ID NO: 68620 - DNA, 11 bp, Unknown
  misc_feature (1)..( 11): Matrix.004 file - promoters50/1397821
tcaagtttgat

SEQ ID NO: 68621 - DNA, 9 bp, Unknown
  misc_feature (1)..( 9): Matrix.004 file - promoters50/1397852
aaaacattt

SEQ ID NO: 68622 - DNA, 13 bp, Unknown
  misc_feature (1)..( 13): Matrix.004 file - promoters50/1397852
aaaaaataaactg

SEQ ID NO: 68623 - DNA, 12 bp, Unknown
  misc_feature (1)..( 12): Matrix.004 file - promoters50/1397867
tacaaaaaaaac

SEQ ID NO: 68624 - DNA, 12 bp, Unknown
  misc_feature (1)..( 12): Matrix.004 file - promoters50/1397898
atgggattcttt

SEQ ID NO: 68625 - DNA, 8 bp, Unknown
  misc_feature (1)..( 8): Matrix.004 file - promoters50/1397898
gaatgata

SEQ ID NO: 68626 - DNA, 13 bp, Unknown
  misc_feature (1)..( 13): Matrix.004 file - promoters50/1397923
aatgattatatga

SEQ ID NO: 68627 - DNA, 10 bp, Unknown
  misc_feature (1)..( 10): Matrix.004 file - promoters50/1397923
tcattttata

SEQ ID NO: 68628 - DNA, 9 bp, Unknown
  misc_feature (1)..( 9): Matrix.004 file - promoters50/1397923
ttagatata

SEQ ID NO: 68629 - DNA, 10 bp, Unknown
  misc_feature (1)..( 10): Matrix.004 file - promoters50/1397923
ttttttgaag

SEQ ID NO: 68630 - DNA, 13 bp, Unknown
  misc_feature (1)..( 13): Matrix.004 file - promoters50/1397923
gaaataaaaaatg

SEQ ID NO: 68631 - DNA, 14 bp, Unknown
  misc_feature (1)..( 14): Matrix.004 file - promoters50/1397923
ataataattttatt

SEQ ID NO: 68632 - DNA, 11 bp, Unknown
  misc_feature (1)..( 11): Matrix.004 file - promoters50/1398069
atatttgtaaa

SEQ ID NO: 68633 - DNA, 8 bp, Unknown
  misc_feature (1)..( 8): Matrix.004 file - promoters50/1398069
caactttt

SEQ ID NO: 68634 - DNA, 8 bp, Unknown
  misc_feature (1)..( 8): Matrix.004 file - promoters50/1398069
atatcaga

SEQ ID NO: 68635 - DNA, 8 bp, Unknown
  misc_feature (1)..( 8): Matrix.004 file - promoters50/1398069
aataattg

SEQ ID NO: 68636 - DNA, 9 bp, Unknown
  misc_feature (1)..( 9): Matrix.004 file - promoters50/1398069
caaaatcca

SEQ ID NO: 68637 - DNA, 8 bp, Unknown
  misc_feature (1)..( 8): Matrix.004 file - promoters50/1398081
aacaaaat

SEQ ID NO: 68638 - DNA, 8 bp, Unknown
  misc_feature (1)..( 8): Matrix.004 file - promoters50/1398081
ttatatca

SEQ ID NO: 68639 - DNA, 8 bp, Unknown
  misc_feature (1)..( 8): Matrix.004 file - promoters50/1398081
agataagt

SEQ ID NO: 68640 - DNA, 6 bp, Unknown
  misc_feature (1)..( 6): Matrix.004 file - promoters50/1398081
agtaaa

SEQ ID NO: 68641 - DNA, 13 bp, Unknown
  misc_feature (1)..( 13): Matrix.004 file - promoters50/1398081
caataaaatttgg

SEQ ID NO: 68642 - DNA, 13 bp, Unknown
  misc_feature (1)..( 13): Matrix.004 file - promoters50/1398081
ataggatatcttt

SEQ ID NO: 68643 - DNA, 9 bp, Unknown
  misc_feature (1)..( 9): Matrix.004 file - promoters50/1398114
ttaaataaa

SEQ ID NO: 68644 - DNA, 9 bp, Unknown
  misc_feature (1)..( 9): Matrix.004 file - promoters50/1398114
aaagagatg

SEQ ID NO: 68645 - DNA, 13 bp, Unknown
  misc_feature (1)..( 13): Matrix.004 file - promoters50/1398124
ttacacaaatata

SEQ ID NO: 68646 - DNA, 7 bp, Unknown
  misc_feature (1)..( 7): Matrix.004 file - promoters50/1398226
atattat

SEQ ID NO: 68647 - DNA, 10 bp, Unknown
  misc_feature (1)..( 10): Matrix.004 file - promoters50/1398337
aaattcttgg

SEQ ID NO: 68648 - DNA, 11 bp, Unknown
  misc_feature (1)..( 11): Matrix.004 file - promoters50/1398337
gaaacaaaaac

SEQ ID NO: 68649 - DNA, 10 bp, Unknown
  misc_feature (1)..( 10): Matrix.004 file - promoters50/1398337
tgtaatcggg

SEQ ID NO: 68650 - DNA, 8 bp, Unknown
  misc_feature (1)..( 8): Matrix.004 file - promoters50/1398345
ggtgttgt

SEQ ID NO: 68651 - DNA, 8 bp, Unknown
  misc_feature (1)..( 8): Matrix.004 file - promoters50/1398345
aaaaatat

SEQ ID NO: 68652 - DNA, 9 bp, Unknown
  misc_feature (1)..( 9): Matrix.004 file - promoters50/1398345
ataaaagta

SEQ ID NO: 68653 - DNA, 9 bp, Unknown
  misc_feature (1)..( 9): Matrix.004 file - promoters50/1398345
agattacaa

SEQ ID NO: 68654 - DNA, 15 bp, Unknown
  misc_feature (1)..( 15): Matrix.004 file - promoters50/1398345
aataagaaaaataaa

SEQ ID NO: 68655 - DNA, 16 bp, Unknown
  misc_feature (1)..( 16): Matrix.004 file - promoters50/1398345
aaaatattataataaa

SEQ ID NO: 68656 - DNA, 13 bp, Unknown
  misc_feature (1)..( 13): Matrix.004 file - promoters50/1398401
attaaaaattaaa

SEQ ID NO: 68657 - DNA, 9 bp, Unknown
  misc_feature (1)..( 9): Matrix.004 file - promoters50/1398401
gaaattgct

SEQ ID NO: 68658 - DNA, 13 bp, Unknown
  misc_feature (1)..( 13): Matrix.004 file - promoters50/1398409
atattatcaaaag

SEQ ID NO: 68659 - DNA, 8 bp, Unknown
  misc_feature (1)..( 8): Matrix.004 file - promoters50/1398409
aaaataat

SEQ ID NO: 68660 - DNA, 9 bp, Unknown
  misc_feature (1)..( 9): Matrix.004 file - promoters50/1398409
aagcttaca

SEQ ID NO: 68661 - DNA, 8 bp, Unknown
  misc_feature (1)..( 8): Matrix.004 file - promoters50/1398409
ctaagaaa

SEQ ID NO: 68662 - DNA, 10 bp, Unknown
  misc_feature (1)..( 10): Matrix.004 file - promoters50/1398409
taaactaaag

SEQ ID NO: 68663 - DNA, 10 bp, Unknown
  misc_feature (1)..( 10): Matrix.004 file - promoters50/1398409
atcacatttt

SEQ ID NO: 68664 - DNA, 9 bp, Unknown
  misc_feature (1)..( 9): Matrix.004 file - promoters50/1398409
agtatatta

SEQ ID NO: 68665 - DNA, 11 bp, Unknown
  misc_feature (1)..( 11): Matrix.004 file - promoters50/1398413
atataaagaaa

SEQ ID NO: 68666 - DNA, 8 bp, Unknown
  misc_feature (1)..( 8): Matrix.004 file - promoters50/1398413
taaaatca

SEQ ID NO: 68667 - DNA, 8 bp, Unknown
  misc_feature (1)..( 8): Matrix.004 file - promoters50/1398431
tcaatatt

SEQ ID NO: 68668 - DNA, 8 bp, Unknown
  misc_feature (1)..( 8): Matrix.004 file - promoters50/1398431
aaattaaa

SEQ ID NO: 68669 - DNA, 7 bp, Unknown
  misc_feature (1)..( 7): Matrix.004 file - promoters50/1398444
aaaatta

SEQ ID NO: 68670 - DNA, 13 bp, Unknown
  misc_feature (1)..( 13): Matrix.004 file - promoters50/1398444
aaaaaaaataact

SEQ ID NO: 68671 - DNA, 9 bp, Unknown
  misc_feature (1)..( 9): Matrix.004 file - promoters50/1398444
attgaagct

SEQ ID NO: 68672 - DNA, 10 bp, Unknown
  misc_feature (1)..( 10): Matrix.004 file - promoters50/1398444
gattaaaatg

SEQ ID NO: 68673 - DNA, 8 bp, Unknown
  misc_feature (1)..( 8): Matrix.004 file - promoters50/1398444
tctaattt

SEQ ID NO: 68674 - DNA, 7 bp, Unknown
  misc_feature (1)..( 7): Matrix.004 file - promoters50/1398444
tatgatt

SEQ ID NO: 68675 - DNA, 9 bp, Unknown
  misc_feature (1)..( 9): Matrix.004 file - promoters50/1398444
gaaacaaag

SEQ ID NO: 68676 - DNA, 11 bp, Unknown
  misc_feature (1)..( 11): Matrix.004 file - promoters50/1398444
aaactataaat

SEQ ID NO: 68677 - DNA, 7 bp, Unknown
  misc_feature (1)..( 7): Matrix.004 file - promoters50/1398451
ggattga

SEQ ID NO: 68678 - DNA, 7 bp, Unknown
  misc_feature (1)..( 7): Matrix.004 file - promoters50/1398451
aactaat

SEQ ID NO: 68679 - DNA, 9 bp, Unknown
  misc_feature (1)..( 9): Matrix.004 file - promoters50/1398451
tcataattt

SEQ ID NO: 68680 - DNA, 8 bp, Unknown
  misc_feature (1)..( 8): Matrix.004 file - promoters50/1398451
taaatata

SEQ ID NO: 68681 - DNA, 9 bp, Unknown
  misc_feature (1)..( 9): Matrix.004 file - promoters50/1398504
tattatttc

SEQ ID NO: 68682 - DNA, 9 bp, Unknown
  misc_feature (1)..( 9): Matrix.004 file - promoters50/1398504
ggaaagaag

SEQ ID NO: 68683 - DNA, 8 bp, Unknown
  misc_feature (1)..( 8): Matrix.004 file - promoters50/1398545
tcgaagaa

SEQ ID NO: 68684 - DNA, 13 bp, Unknown
  misc_feature (1)..( 13): Matrix.004 file - promoters50/1398545
taaaaaagttcaa

SEQ ID NO: 68685 - DNA, 7 bp, Unknown
  misc_feature (1)..( 7): Matrix.004 file - promoters50/1398545
ttaataa

SEQ ID NO: 68686 - DNA, 12 bp, Unknown
  misc_feature (1)..( 12): Matrix.004 file - promoters50/1398545
aaaataaataca

SEQ ID NO: 68687 - DNA, 9 bp, Unknown
  misc_feature (1)..( 9): Matrix.004 file - promoters50/1398545
attttggtt

SEQ ID NO: 68688 - DNA, 14 bp, Unknown
  misc_feature (1)..( 14): Matrix.004 file - promoters50/1398558
ctaaaggcccaata

SEQ ID NO: 68689 - DNA, 11 bp, Unknown
  misc_feature (1)..( 11): Matrix.004 file - promoters50/1398558
tcaaaaagtaa

SEQ ID NO: 68690 - DNA, 9 bp, Unknown
  misc_feature (1)..( 9): Matrix.004 file - promoters50/1398565
aacaatcaa

SEQ ID NO: 68691 - DNA, 11 bp, Unknown
  misc_feature (1)..( 11): Matrix.004 file - promoters50/1398565
atataaaaaat

SEQ ID NO: 68692 - DNA, 11 bp, Unknown
  misc_feature (1)..( 11): Matrix.004 file - promoters50/1398573
tatatataaaa

SEQ ID NO: 68693 - DNA, 16 bp, Unknown
  misc_feature (1)..( 16): Matrix.004 file - promoters50/1398573
gaaaaaaaatcttaaa

SEQ ID NO: 68694 - DNA, 13 bp, Unknown
  misc_feature (1)..( 13): Matrix.004 file - promoters50/1398638
aaatattcttaat

SEQ ID NO: 68695 - DNA, 7 bp, Unknown
  misc_feature (1)..( 7): Matrix.004 file - promoters50/1398638
atgattt

SEQ ID NO: 68696 - DNA, 9 bp, Unknown
  misc_feature (1)..( 9): Matrix.004 file - promoters50/1398638
taaattttc

SEQ ID NO: 68697 - DNA, 7 bp, Unknown
  misc_feature (1)..( 7): Matrix.004 file - promoters50/1398704
catttat

SEQ ID NO: 68698 - DNA, 9 bp, Unknown
  misc_feature (1)..( 9): Matrix.004 file - promoters50/1398704
accgttcat

SEQ ID NO: 68699 - DNA, 9 bp, Unknown
  misc_feature (1)..( 9): Matrix.004 file - promoters50/1398704
aaatatata

SEQ ID NO: 68700 - DNA, 9 bp, Unknown
  misc_feature (1)..( 9): Matrix.004 file - promoters50/1398704
tttttttgt

SEQ ID NO: 68701 - DNA, 14 bp, Unknown
  misc_feature (1)..( 14): Matrix.004 file - promoters50/1398704
attgttttttttgt

SEQ ID NO: 68702 - DNA, 12 bp, Unknown
  misc_feature (1)..( 12): Matrix.004 file - promoters50/1398704
tcaaaaacaaaa

SEQ ID NO: 68703 - DNA, 9 bp, Unknown
  misc_feature (1)..( 9): Matrix.004 file - promoters50/1398704
aatgaactt

SEQ ID NO: 68704 - DNA, 9 bp, Unknown
  misc_feature (1)..( 9): Matrix.004 file - promoters50/1398737
aaattattt

SEQ ID NO: 68705 - DNA, 10 bp, Unknown
  misc_feature (1)..( 10): Matrix.004 file - promoters50/1398737
aattagtttg

SEQ ID NO: 68706 - DNA, 10 bp, Unknown
  misc_feature (1)..( 10): Matrix.004 file - promoters50/1398737
aaagaaatta

SEQ ID NO: 68707 - DNA, 9 bp, Unknown
  misc_feature (1)..( 9): Matrix.004 file - promoters50/1398784
aggataata

SEQ ID NO: 68708 - DNA, 7 bp, Unknown
  misc_feature (1)..( 7): Matrix.004 file - promoters50/1398784
ataaaat

SEQ ID NO: 68709 - DNA, 11 bp, Unknown
  misc_feature (1)..( 11): Matrix.004 file - promoters50/1398784
gaaaacttaaa

SEQ ID NO: 68710 - DNA, 10 bp, Unknown
  misc_feature (1)..( 10): Matrix.004 file - promoters50/1398846
aaagaaaaat

SEQ ID NO: 68711 - DNA, 7 bp, Unknown
  misc_feature (1)..( 7): Matrix.004 file - promoters50/1398846
tttgtta

SEQ ID NO: 68712 - DNA, 9 bp, Unknown
  misc_feature (1)..( 9): Matrix.004 file - promoters50/1398853
ttaattaaa

SEQ ID NO: 68713 - DNA, 13 bp, Unknown
  misc_feature (1)..( 13): Matrix.004 file - promoters50/1398853
caaaaaaaatggt

SEQ ID NO: 68714 - DNA, 7 bp, Unknown
  misc_feature (1)..( 7): Matrix.004 file - promoters50/1398892
ttttatt

SEQ ID NO: 68715 - DNA, 8 bp, Unknown
  misc_feature (1)..( 8): Matrix.004 file - promoters50/1398936
atttaaat

SEQ ID NO: 68716 - DNA, 9 bp, Unknown
  misc_feature (1)..( 9): Matrix.004 file - promoters50/1399037
ttttcttct

SEQ ID NO: 68717 - DNA, 10 bp, Unknown
  misc_feature (1)..( 10): Matrix.004 file - promoters50/1399037
gagaaaaaaa

SEQ ID NO: 68718 - DNA, 6 bp, Unknown
  misc_feature (1)..( 6): Matrix.004 file - promoters50/1399074
tcaaat

SEQ ID NO: 68719 - DNA, 8 bp, Unknown
  misc_feature (1)..( 8): Matrix.004 file - promoters50/1399074
agtaaaga

SEQ ID NO: 68720 - DNA, 10 bp, Unknown
  misc_feature (1)..( 10): Matrix.004 file - promoters50/1399074
gaaagaaagc

SEQ ID NO: 68721 - DNA, 10 bp, Unknown
  misc_feature (1)..( 10): Matrix.004 file - promoters50/1399140
ggaaaagaaa

SEQ ID NO: 68722 - DNA, 9 bp, Unknown
  misc_feature (1)..( 9): Matrix.004 file - promoters50/1399210
gaaaaattt

SEQ ID NO: 68723 - DNA, 11 bp, Unknown
  misc_feature (1)..( 11): Matrix.004 file - promoters50/1399210
aatttaaacaa

SEQ ID NO: 68724 - DNA, 7 bp, Unknown
  misc_feature (1)..( 7): Matrix.004 file - promoters50/1399210
cttttgg

SEQ ID NO: 68725 - DNA, 12 bp, Unknown
  misc_feature (1)..( 12): Matrix.004 file - promoters50/1399210
ttactataaatt

SEQ ID NO: 68726 - DNA, 8 bp, Unknown
  misc_feature (1)..( 8): Matrix.004 file - promoters50/1399265
gttttagt

SEQ ID NO: 68727 - DNA, 13 bp, Unknown
  misc_feature (1)..( 13): Matrix.004 file - promoters50/1399265
gtatttaaaatat

SEQ ID NO: 68728 - DNA, 12 bp, Unknown
  misc_feature (1)..( 12): Matrix.004 file - promoters50/1399265
aaacaattttat

SEQ ID NO: 68729 - DNA, 14 bp, Unknown
  misc_feature (1)..( 14): Matrix.004 file - promoters50/1399265
tttattttataaaa

SEQ ID NO: 68730 - DNA, 9 bp, Unknown
  misc_feature (1)..( 9): Matrix.004 file - promoters50/1399265
tcattttat

SEQ ID NO: 68731 - DNA, 9 bp, Unknown
  misc_feature (1)..( 9): Matrix.004 file - promoters50/1399265
taataaaaa

SEQ ID NO: 68732 - DNA, 10 bp, Unknown
  misc_feature (1)..( 10): Matrix.004 file - promoters50/1399277
gatatttttt

SEQ ID NO: 68733 - DNA, 17 bp, Unknown
  misc_feature (1)..( 17): Matrix.004 file - promoters50/1399277
ttaaacacaaaaatttt

SEQ ID NO: 68734 - DNA, 7 bp, Unknown
  misc_feature (1)..( 7): Matrix.004 file - promoters50/1399277
aagattt

SEQ ID NO: 68735 - DNA, 8 bp, Unknown
  misc_feature (1)..( 8): Matrix.004 file - promoters50/1399277
attttttt

SEQ ID NO: 68736 - DNA, 5 bp, Unknown
  misc_feature (1)..( 5): Matrix.004 file - promoters50/1399277
ataac

SEQ ID NO: 68737 - DNA, 9 bp, Unknown
  misc_feature (1)..( 9): Matrix.004 file - promoters50/1399277
aaaacaatt

SEQ ID NO: 68738 - DNA, 9 bp, Unknown
  misc_feature (1)..( 9): Matrix.004 file - promoters50/1399277
aaaaattta

SEQ ID NO: 68739 - DNA, 8 bp, Unknown
  misc_feature (1)..( 8): Matrix.004 file - promoters50/1399277
ttacaaaa

SEQ ID NO: 68740 - DNA, 7 bp, Unknown
  misc_feature (1)..( 7): Matrix.004 file - promoters50/1399277
gataaag

SEQ ID NO: 68741 - DNA, 8 bp, Unknown
  misc_feature (1)..( 8): Matrix.004 file - promoters50/1399277
aaaccaat

SEQ ID NO: 68742 - DNA, 7 bp, Unknown
  misc_feature (1)..( 7): Matrix.004 file - promoters50/1399277
tatttat

SEQ ID NO: 68743 - DNA, 9 bp, Unknown
  misc_feature (1)..( 9): Matrix.004 file - promoters50/1399325
tttattaaa

SEQ ID NO: 68744 - DNA, 5 bp, Unknown
  misc_feature (1)..( 5): Matrix.004 file - promoters50/1399325
aaaat

SEQ ID NO: 68745 - DNA, 10 bp, Unknown
  misc_feature (1)..( 10): Matrix.004 file - promoters50/1399345
atctgaaatt

SEQ ID NO: 68746 - DNA, 10 bp, Unknown
  misc_feature (1)..( 10): Matrix.004 file - promoters50/1399345
agttttggta

SEQ ID NO: 68747 - DNA, 9 bp, Unknown
  misc_feature (1)..( 9): Matrix.004 file - promoters50/1399345
aaatacaaa

SEQ ID NO: 68748 - DNA, 16 bp, Unknown
  misc_feature (1)..( 16): Matrix.004 file - promoters50/1399345
aacttaattctttttt

SEQ ID NO: 68749 - DNA, 11 bp, Unknown
  misc_feature (1)..( 11): Matrix.004 file - promoters50/1399409
cttttgtataa

SEQ ID NO: 68750 - DNA, 10 bp, Unknown
  misc_feature (1)..( 10): Matrix.004 file - promoters50/1399413
acataattat

SEQ ID NO: 68751 - DNA, 6 bp, Unknown
  misc_feature (1)..( 6): Matrix.004 file - promoters50/1399413
tctttg

SEQ ID NO: 68752 - DNA, 9 bp, Unknown
  misc_feature (1)..( 9): Matrix.004 file - promoters50/1399413
aaaattaaa

SEQ ID NO: 68753 - DNA, 9 bp, Unknown
  misc_feature (1)..( 9): Matrix.004 file - promoters50/1399413
tctatataa

SEQ ID NO: 68754 - DNA, 8 bp, Unknown
  misc_feature (1)..( 8): Matrix.004 file - promoters50/1399413
attaaaaa

SEQ ID NO: 68755 - DNA, 7 bp, Unknown
  misc_feature (1)..( 7): Matrix.004 file - promoters50/1399413
aaaatct

SEQ ID NO: 68756 - DNA, 10 bp, Unknown
  misc_feature (1)..( 10): Matrix.004 file - promoters50/1399417
atcaattaaa

SEQ ID NO: 68757 - DNA, 12 bp, Unknown
  misc_feature (1)..( 12): Matrix.004 file - promoters50/1399469
taaaggcccaat

SEQ ID NO: 68758 - DNA, 10 bp, Unknown
  misc_feature (1)..( 10): Matrix.004 file - promoters50/1399469
tcttgcaagg

SEQ ID NO: 68759 - DNA, 7 bp, Unknown
  misc_feature (1)..( 7): Matrix.004 file - promoters50/1399541
aaaattt

SEQ ID NO: 68760 - DNA, 10 bp, Unknown
  misc_feature (1)..( 10): Matrix.004 file - promoters50/1399541
tactttaaaa

SEQ ID NO: 68761 - DNA, 13 bp, Unknown
  misc_feature (1)..( 13): Matrix.004 file - promoters50/1399541
aaaagattacatt

SEQ ID NO: 68762 - DNA, 8 bp, Unknown
  misc_feature (1)..( 8): Matrix.004 file - promoters50/1399541
tttaaaat

SEQ ID NO: 68763 - DNA, 11 bp, Unknown
  misc_feature (1)..( 11): Matrix.004 file - promoters50/1399541
taagattctat

SEQ ID NO: 68764 - DNA, 13 bp, Unknown
  misc_feature (1)..( 13): Matrix.004 file - promoters50/1399638
taatttaaacata

SEQ ID NO: 68765 - DNA, 11 bp, Unknown
  misc_feature (1)..( 11): Matrix.004 file - promoters50/1399638
tccaaacttaa

SEQ ID NO: 68766 - DNA, 10 bp, Unknown
  misc_feature (1)..( 10): Matrix.004 file - promoters50/1399658
taaacaccat

SEQ ID NO: 68767 - DNA, 11 bp, Unknown
  misc_feature (1)..( 11): Matrix.004 file - promoters50/1399658
aaaaaaatttt

SEQ ID NO: 68768 - DNA, 9 bp, Unknown
  misc_feature (1)..( 9): Matrix.004 file - promoters50/1399658
attcaaatt

SEQ ID NO: 68769 - DNA, 9 bp, Unknown
  misc_feature (1)..( 9): Matrix.004 file - promoters50/1399726
aaaaaaaat

SEQ ID NO: 68770 - DNA, 10 bp, Unknown
  misc_feature (1)..( 10): Matrix.004 file - promoters50/1399726
ccaattaatt

SEQ ID NO: 68771 - DNA, 20 bp, Unknown
  misc_feature (1)..( 20): Matrix.004 file - promoters50/1399726
atgagatattaaaattaaat

SEQ ID NO: 68772 - DNA, 9 bp, Unknown
  misc_feature (1)..( 9): Matrix.004 file - promoters50/1399726
aaaataaaa

SEQ ID NO: 68773 - DNA, 9 bp, Unknown
  misc_feature (1)..( 9): Matrix.004 file - promoters50/1399726
ataaattac

SEQ ID NO: 68774 - DNA, 14 bp, Unknown
  misc_feature (1)..( 14): Matrix.004 file - promoters50/1399726
atgaaaaaagaaaa

SEQ ID NO: 68775 - DNA, 11 bp, Unknown
  misc_feature (1)..( 11): Matrix.004 file - promoters50/1399726
ataaatatata

SEQ ID NO: 68776 - DNA, 12 bp, Unknown
  misc_feature (1)..( 12): Matrix.004 file - promoters50/1399726
tacagtttaaat

SEQ ID NO: 68777 - DNA, 11 bp, Unknown
  misc_feature (1)..( 11): Matrix.004 file - promoters50/1399726
aataactttga

SEQ ID NO: 68778 - DNA, 11 bp, Unknown
  misc_feature (1)..( 11): Matrix.004 file - promoters50/1399760
taatattaaat

SEQ ID NO: 68779 - DNA, 8 bp, Unknown
  misc_feature (1)..( 8): Matrix.004 file - promoters50/1403185
attttact

SEQ ID NO: 68780 - DNA, 9 bp, Unknown
  misc_feature (1)..( 9): Matrix.004 file - promoters50/1403210
catctttta

SEQ ID NO: 68781 - DNA, 7 bp, Unknown
  misc_feature (1)..( 7): Matrix.004 file - promoters50/1411578
ttgaaaa

SEQ ID NO: 68782 - DNA, 9 bp, Unknown
  misc_feature (1)..( 9): Matrix.004 file - promoters50/1411578
gtcaaactt

SEQ ID NO: 68783 - DNA, 9 bp, Unknown
  misc_feature (1)..( 9): Matrix.004 file - promoters50/1411598
ggtagatca

SEQ ID NO: 68784 - DNA, 7 bp, Unknown
  misc_feature (1)..( 7): Matrix.004 file - promoters50/1411616
acataaa

SEQ ID NO: 68785 - DNA, 11 bp, Unknown
  misc_feature (1)..( 11): Matrix.004 file - promoters50/1411628
tattatttttc

SEQ ID NO: 68786 - DNA, 8 bp, Unknown
  misc_feature (1)..( 8): Matrix.004 file - promoters50/1411628
ccttcctt

SEQ ID NO: 68787 - DNA, 10 bp, Unknown
  misc_feature (1)..( 10): Matrix.004 file - promoters50/1411628
ttaaaaattg

SEQ ID NO: 68788 - DNA, 9 bp, Unknown
  misc_feature (1)..( 9): Matrix.004 file - promoters50/1411628
caataaacg

SEQ ID NO: 68789 - DNA, 7 bp, Unknown
  misc_feature (1)..( 7): Matrix.004 file - promoters50/1411703
agtattt

SEQ ID NO: 68790 - DNA, 9 bp, Unknown
  misc_feature (1)..( 9): Matrix.004 file - promoters50/1411722
tataaaaat

SEQ ID NO: 68791 - DNA, 8 bp, Unknown
  misc_feature (1)..( 8): Matrix.004 file - promoters50/1411730
aaaaatat

SEQ ID NO: 68792 - DNA, 7 bp, Unknown
  misc_feature (1)..( 7): Matrix.004 file - promoters50/1411730
caaatct

SEQ ID NO: 68793 - DNA, 7 bp, Unknown
  misc_feature (1)..( 7): Matrix.004 file - promoters50/1411730
ttaattc

SEQ ID NO: 68794 - DNA, 8 bp, Unknown
  misc_feature (1)..( 8): Matrix.004 file - promoters50/1411730
aaaacaaa

SEQ ID NO: 68795 - DNA, 8 bp, Unknown
  misc_feature (1)..( 8): Matrix.004 file - promoters50/1411730
actgaaat

SEQ ID NO: 68796 - DNA, 9 bp, Unknown
  misc_feature (1)..( 9): Matrix.004 file - promoters50/1411730
agtctaaaa

SEQ ID NO: 68797 - DNA, 8 bp, Unknown
  misc_feature (1)..( 8): Matrix.004 file - promoters50/1411730
cccattcc

SEQ ID NO: 68798 - DNA, 9 bp, Unknown
  misc_feature (1)..( 9): Matrix.004 file - promoters50/1411730
taacttgaa

SEQ ID NO: 68799 - DNA, 11 bp, Unknown
  misc_feature (1)..( 11): Matrix.004 file - promoters50/1411762
ctaaaaataaa

SEQ ID NO: 68800 - DNA, 12 bp, Unknown
  misc_feature (1)..( 12): Matrix.004 file - promoters50/1411762
atcttatatata

SEQ ID NO: 68801 - DNA, 9 bp, Unknown
  misc_feature (1)..( 9): Matrix.004 file - promoters50/1411762
acataccaa

SEQ ID NO: 68802 - DNA, 6 bp, Unknown
  misc_feature (1)..( 6): Matrix.004 file - promoters50/1411786
aaaaac

SEQ ID NO: 68803 - DNA, 8 bp, Unknown
  misc_feature (1)..( 8): Matrix.004 file - promoters50/1411786
attatttt

SEQ ID NO: 68804 - DNA, 7 bp, Unknown
  misc_feature (1)..( 7): Matrix.004 file - promoters50/1411786
gatatat

SEQ ID NO: 68805 - DNA, 7 bp, Unknown
  misc_feature (1)..( 7): Matrix.004 file - promoters50/1413159
atatatt

SEQ ID NO: 68806 - DNA, 7 bp, Unknown
  misc_feature (1)..( 7): Matrix.004 file - promoters50/1413191
ttgtgat

SEQ ID NO: 68807 - DNA, 9 bp, Unknown
  misc_feature (1)..( 9): Matrix.004 file - promoters50/1413191
tttaatttt

SEQ ID NO: 68808 - DNA, 8 bp, Unknown
  misc_feature (1)..( 8): Matrix.004 file - promoters50/1413191
atataaat

SEQ ID NO: 68809 - DNA, 11 bp, Unknown
  misc_feature (1)..( 11): Matrix.004 file - promoters50/1413191
atttgttttta

SEQ ID NO: 68810 - DNA, 7 bp, Unknown
  misc_feature (1)..( 7): Matrix.004 file - promoters50/1413191
ttgctct

SEQ ID NO: 68811 - DNA, 12 bp, Unknown
  misc_feature (1)..( 12): Matrix.004 file - promoters50/1413191
agatttaatata

SEQ ID NO: 68812 - DNA, 13 bp, Unknown
  misc_feature (1)..( 13): Matrix.004 file - promoters50/1413191
tttccaaaataat

SEQ ID NO: 68813 - DNA, 10 bp, Unknown
  misc_feature (1)..( 10): Matrix.004 file - promoters50/1413211
aaattatata

SEQ ID NO: 68814 - DNA, 9 bp, Unknown
  misc_feature (1)..( 9): Matrix.004 file - promoters50/1413211
atagtcaac

SEQ ID NO: 68815 - DNA, 9 bp, Unknown
  misc_feature (1)..( 9): Matrix.004 file - promoters50/1413211
aaaatagaa

SEQ ID NO: 68816 - DNA, 13 bp, Unknown
  misc_feature (1)..( 13): Matrix.004 file - promoters50/1413211
tgatgaaaatgat

SEQ ID NO: 68817 - DNA, 7 bp, Unknown
  misc_feature (1)..( 7): Matrix.004 file - promoters50/1413211
agatagt

SEQ ID NO: 68818 - DNA, 9 bp, Unknown
  misc_feature (1)..( 9): Matrix.004 file - promoters50/1413211
atttaatta

SEQ ID NO: 68819 - DNA, 9 bp, Unknown
  misc_feature (1)..( 9): Matrix.004 file - promoters50/1420845
tttgattat

SEQ ID NO: 68820 - DNA, 10 bp, Unknown
  misc_feature (1)..( 10): Matrix.004 file - promoters50/1420853
aaagagtttc

SEQ ID NO: 68821 - DNA, 9 bp, Unknown
  misc_feature (1)..( 9): Matrix.004 file - promoters50/1420853
ttcgacatt

SEQ ID NO: 68822 - DNA, 11 bp, Unknown
  misc_feature (1)..( 11): Matrix.004 file - promoters50/1420853
tattatggttt

SEQ ID NO: 68823 - DNA, 14 bp, Unknown
  misc_feature (1)..( 14): Matrix.004 file - promoters50/1420853
cgtatttaaacccc

SEQ ID NO: 68824 - DNA, 9 bp, Unknown
  misc_feature (1)..( 9): Matrix.004 file - promoters50/1420853
aaggcttta

SEQ ID NO: 68825 - DNA, 7 bp, Unknown
  misc_feature (1)..( 7): Matrix.004 file - promoters50/1420853
atgtctg

SEQ ID NO: 68826 - DNA, 7 bp, Unknown
  misc_feature (1)..( 7): Matrix.004 file - promoters50/1440857
taaatgc

SEQ ID NO: 68827 - DNA, 11 bp, Unknown
  misc_feature (1)..( 11): Matrix.004 file - promoters50/1440857
ttgacataatt

SEQ ID NO: 68828 - DNA, 8 bp, Unknown
  misc_feature (1)..( 8): Matrix.004 file - promoters50/1440865
tttagtca

SEQ ID NO: 68829 - DNA, 10 bp, Unknown
  misc_feature (1)..( 10): Matrix.004 file - promoters50/1440865
acctaaaaat

SEQ ID NO: 68830 - DNA, 7 bp, Unknown
  misc_feature (1)..( 7): Matrix.004 file - promoters50/1440865
agcaagt

SEQ ID NO: 68831 - DNA, 10 bp, Unknown
  misc_feature (1)..( 10): Matrix.004 file - promoters50/1440865
taacattttc

SEQ ID NO: 68832 - DNA, 8 bp, Unknown
  misc_feature (1)..( 8): Matrix.004 file - promoters50/1440865
tcaaaagc

SEQ ID NO: 68833 - DNA, 7 bp, Unknown
  misc_feature (1)..( 7): Matrix.004 file - promoters50/1440865
gacattt

SEQ ID NO: 68834 - DNA, 12 bp, Unknown
  misc_feature (1)..( 12): Matrix.004 file - promoters50/1440865
tttcaataatta

SEQ ID NO: 68835 - DNA, 8 bp, Unknown
  misc_feature (1)..( 8): Matrix.004 file - promoters50/1440865
acctaaat

SEQ ID NO: 68836 - DNA, 10 bp, Unknown
  misc_feature (1)..( 10): Matrix.004 file - promoters50/1440865
tttttaaatt

SEQ ID NO: 68837 - DNA, 8 bp, Unknown
  misc_feature (1)..( 8): Matrix.004 file - promoters50/1440865
tcttgagt

SEQ ID NO: 68838 - DNA, 8 bp, Unknown
  misc_feature (1)..( 8): Matrix.004 file - promoters50/1440865
agcaagta

SEQ ID NO: 68839 - DNA, 8 bp, Unknown
  misc_feature (1)..( 8): Matrix.004 file - promoters50/1440865
ctttttct

SEQ ID NO: 68840 - DNA, 9 bp, Unknown
  misc_feature (1)..( 9): Matrix.004 file - promoters50/1440865
tttcaaaaa

SEQ ID NO: 68841 - DNA, 7 bp, Unknown
  misc_feature (1)..( 7): Matrix.004 file - promoters50/1440865
atttttt

SEQ ID NO: 68842 - DNA, 7 bp, Unknown
  misc_feature (1)..( 7): Matrix.004 file - promoters50/1440873
cctttat

SEQ ID NO: 68843 - DNA, 7 bp, Unknown
  misc_feature (1)..( 7): Matrix.004 file - promoters50/1440967
ataaaaa

SEQ ID NO: 68844 - DNA, 11 bp, Unknown
  misc_feature (1)..( 11): Matrix.004 file - promoters50/1440967
taatttgtttc

SEQ ID NO: 68845 - DNA, 13 bp, Unknown
  misc_feature (1)..( 13): Matrix.004 file - promoters50/1440967
ataacaaaaaaga

SEQ ID NO: 68846 - DNA, 9 bp, Unknown
  misc_feature (1)..( 9): Matrix.004 file - promoters50/1440967
ttatcaaaa

SEQ ID NO: 68847 - DNA, 13 bp, Unknown
  misc_feature (1)..( 13): Matrix.004 file - promoters50/1441020
ctataaaatttta

SEQ ID NO: 68848 - DNA, 10 bp, Unknown
  misc_feature (1)..( 10): Matrix.004 file - promoters50/1441020
attttcaata

SEQ ID NO: 68849 - DNA, 11 bp, Unknown
  misc_feature (1)..( 11): Matrix.004 file - promoters50/1441020
aacattttgaa

SEQ ID NO: 68850 - DNA, 9 bp, Unknown
  misc_feature (1)..( 9): Matrix.004 file - promoters50/1441044
attttgaaa

SEQ ID NO: 68851 - DNA, 9 bp, Unknown
  misc_feature (1)..( 9): Matrix.004 file - promoters50/1441044
aactaaaca

SEQ ID NO: 68852 - DNA, 13 bp, Unknown
  misc_feature (1)..( 13): Matrix.004 file - promoters50/1441044
acaaacttttagt

SEQ ID NO: 68853 - DNA, 12 bp, Unknown
  misc_feature (1)..( 12): Matrix.004 file - promoters50/1441069
actcatatataa

SEQ ID NO: 68854 - DNA, 12 bp, Unknown
  misc_feature (1)..( 12): Matrix.004 file - promoters50/1441069
aaatataattat

SEQ ID NO: 68855 - DNA, 10 bp, Unknown
  misc_feature (1)..( 10): Matrix.004 file - promoters50/1441134
aaagaatcaa

SEQ ID NO: 68856 - DNA, 8 bp, Unknown
  misc_feature (1)..( 8): Matrix.004 file - promoters50/1441145
attaacaa

SEQ ID NO: 68857 - DNA, 10 bp, Unknown
  misc_feature (1)..( 10): Matrix.004 file - promoters50/1441145
aataaataat

SEQ ID NO: 68858 - DNA, 7 bp, Unknown
  misc_feature (1)..( 7): Matrix.004 file - promoters50/1441145
aacaaaa

SEQ ID NO: 68859 - DNA, 9 bp, Unknown
  misc_feature (1)..( 9): Matrix.004 file - promoters50/1441145
gaatttcaa

SEQ ID NO: 68860 - DNA, 7 bp, Unknown
  misc_feature (1)..( 7): Matrix.004 file - promoters50/1441145
attaata

SEQ ID NO: 68861 - DNA, 10 bp, Unknown
  misc_feature (1)..( 10): Matrix.004 file - promoters50/1441145
atatacaaat

SEQ ID NO: 68862 - DNA, 7 bp, Unknown
  misc_feature (1)..( 7): Matrix.004 file - promoters50/1441145
attttaa

SEQ ID NO: 68863 - DNA, 10 bp, Unknown
  misc_feature (1)..( 10): Matrix.004 file - promoters50/1441145
aaattcatat

SEQ ID NO: 68864 - DNA, 9 bp, Unknown
  misc_feature (1)..( 9): Matrix.004 file - promoters50/1441170
ttaataaac

SEQ ID NO: 68865 - DNA, 11 bp, Unknown
  misc_feature (1)..( 11): Matrix.004 file - promoters50/1441170
aaaatcaaaaa

SEQ ID NO: 68866 - DNA, 11 bp, Unknown
  misc_feature (1)..( 11): Matrix.004 file - promoters50/1441174
aaaaccaaaaa

SEQ ID NO: 68867 - DNA, 9 bp, Unknown
  misc_feature (1)..( 9): Matrix.004 file - promoters50/1441174
agttttttt

SEQ ID NO: 68868 - DNA, 9 bp, Unknown
  misc_feature (1)..( 9): Matrix.004 file - promoters50/1441184
agataaaga

SEQ ID NO: 68869 - DNA, 8 bp, Unknown
  misc_feature (1)..( 8): Matrix.004 file - promoters50/1441184
tactataa

SEQ ID NO: 68870 - DNA, 9 bp, Unknown
  misc_feature (1)..( 9): Matrix.004 file - promoters50/1441237
acattttgt

SEQ ID NO: 68871 - DNA, 9 bp, Unknown
  misc_feature (1)..( 9): Matrix.004 file - promoters50/1441237
aagaaattc

SEQ ID NO: 68872 - DNA, 13 bp, Unknown
  misc_feature (1)..( 13): Matrix.004 file - promoters50/1441237
attattttaaatc

SEQ ID NO: 68873 - DNA, 8 bp, Unknown
  misc_feature (1)..( 8): Matrix.004 file - promoters50/1441237
tataaaaa

SEQ ID NO: 68874 - DNA, 8 bp, Unknown
  misc_feature (1)..( 8): Matrix.004 file - promoters50/1441237
atctttat

SEQ ID NO: 68875 - DNA, 10 bp, Unknown
  misc_feature (1)..( 10): Matrix.004 file - promoters50/1441237
tataaataca

SEQ ID NO: 68876 - DNA, 12 bp, Unknown
  misc_feature (1)..( 12): Matrix.004 file - promoters50/1441249
atatttataact

SEQ ID NO: 68877 - DNA, 10 bp, Unknown
  misc_feature (1)..( 10): Matrix.004 file - promoters50/1441249
aatgtttcaa

SEQ ID NO: 68878 - DNA, 13 bp, Unknown
  misc_feature (1)..( 13): Matrix.004 file - promoters50/1441249
aattactaaatat

SEQ ID NO: 68879 - DNA, 3 bp, Unknown
  misc_feature (1)..( 3): Matrix.004 file - promoters50/1441249
att

SEQ ID NO: 68880 - DNA, 10 bp, Unknown
  misc_feature (1)..( 10): Matrix.004 file - promoters50/1441249
attatacata

SEQ ID NO: 68881 - DNA, 7 bp, Unknown
  misc_feature (1)..( 7): Matrix.004 file - promoters50/1441326
ttataat

SEQ ID NO: 68882 - DNA, 9 bp, Unknown
  misc_feature (1)..( 9): Matrix.004 file - promoters50/1441326
aaagtcttg

SEQ ID NO: 68883 - DNA, 9 bp, Unknown
  misc_feature (1)..( 9): Matrix.004 file - promoters50/1441326
aaaaaatta

SEQ ID NO: 68884 - DNA, 7 bp, Unknown
  misc_feature (1)..( 7): Matrix.004 file - promoters50/1441395
caaaaaa

SEQ ID NO: 68885 - DNA, 13 bp, Unknown
  misc_feature (1)..( 13): Matrix.004 file - promoters50/1441460
aaagaatcaaaac

SEQ ID NO: 68886 - DNA, 10 bp, Unknown
  misc_feature (1)..( 10): Matrix.004 file - promoters50/1441465
taatgttttg

SEQ ID NO: 68887 - DNA, 12 bp, Unknown
  misc_feature (1)..( 12): Matrix.004 file - promoters50/1441533
taataattatta

SEQ ID NO: 68888 - DNA, 8 bp, Unknown
  misc_feature (1)..( 8): Matrix.004 file - promoters50/1441539
tcaatttt

SEQ ID NO: 68889 - DNA, 7 bp, Unknown
  misc_feature (1)..( 7): Matrix.004 file - promoters50/1441539
tgaattg

SEQ ID NO: 68890 - DNA, 10 bp, Unknown
  misc_feature (1)..( 10): Matrix.004 file - promoters50/1441548
ggttttgttt

SEQ ID NO: 68891 - DNA, 10 bp, Unknown
  misc_feature (1)..( 10): Matrix.004 file - promoters50/1441548
aaaacaaatt

SEQ ID NO: 68892 - DNA, 10 bp, Unknown
  misc_feature (1)..( 10): Matrix.004 file - promoters50/1441548
acatataaaa

SEQ ID NO: 68893 - DNA, 9 bp, Unknown
  misc_feature (1)..( 9): Matrix.004 file - promoters50/1441548
aaaaattaa

SEQ ID NO: 68894 - DNA, 16 bp, Unknown
  misc_feature (1)..( 16): Matrix.004 file - promoters50/1441569
aaaaataaataaaaga

SEQ ID NO: 68895 - DNA, 8 bp, Unknown
  misc_feature (1)..( 8): Matrix.004 file - promoters50/1441569
aattttgt

SEQ ID NO: 68896 - DNA, 12 bp, Unknown
  misc_feature (1)..( 12): Matrix.004 file - promoters50/1441569
gcattttttttt

SEQ ID NO: 68897 - DNA, 8 bp, Unknown
  misc_feature (1)..( 8): Matrix.004 file - promoters50/1441569
tataaata

SEQ ID NO: 68898 - DNA, 8 bp, Unknown
  misc_feature (1)..( 8): Matrix.004 file - promoters50/1441569
aatatatt

SEQ ID NO: 68899 - DNA, 9 bp, Unknown
  misc_feature (1)..( 9): Matrix.004 file - promoters50/1441569
aaataattt

SEQ ID NO: 68900 - DNA, 12 bp, Unknown
  misc_feature (1)..( 12): Matrix.004 file - promoters50/1441569
aataacaaaaac

SEQ ID NO: 68901 - DNA, 7 bp, Unknown
  misc_feature (1)..( 7): Matrix.004 file - promoters50/1441569
tttctta

SEQ ID NO: 68902 - DNA, 9 bp, Unknown
  misc_feature (1)..( 9): Matrix.004 file - promoters50/1441614
cttgtacaa

SEQ ID NO: 68903 - DNA, 9 bp, Unknown
  misc_feature (1)..( 9): Matrix.004 file - promoters50/1441614
ccattttac

SEQ ID NO: 68904 - DNA, 7 bp, Unknown
  misc_feature (1)..( 7): Matrix.004 file - promoters50/1441614
tgtgttt

SEQ ID NO: 68905 - DNA, 8 bp, Unknown
  misc_feature (1)..( 8): Matrix.004 file - promoters50/1441614
tgtttttt

SEQ ID NO: 68906 - DNA, 13 bp, Unknown
  misc_feature (1)..( 13): Matrix.004 file - promoters50/1441614
ctatatccatttt

SEQ ID NO: 68907 - DNA, 7 bp, Unknown
  misc_feature (1)..( 7): Matrix.004 file - promoters50/1441651
tttttat

SEQ ID NO: 68908 - DNA, 13 bp, Unknown
  misc_feature (1)..( 13): Matrix.004 file - promoters50/1441651
tcttataaatttc

SEQ ID NO: 68909 - DNA, 10 bp, Unknown
  misc_feature (1)..( 10): Matrix.004 file - promoters50/1441651
tgtttaattt

SEQ ID NO: 68910 - DNA, 7 bp, Unknown
  misc_feature (1)..( 7): Matrix.004 file - promoters50/1441657
tgaaaaa

SEQ ID NO: 68911 - DNA, 8 bp, Unknown
  misc_feature (1)..( 8): Matrix.004 file - promoters50/1441722
tttaattt

SEQ ID NO: 68912 - DNA, 9 bp, Unknown
  misc_feature (1)..( 9): Matrix.004 file - promoters50/1441722
tgcgtcagt

SEQ ID NO: 68913 - DNA, 7 bp, Unknown
  misc_feature (1)..( 7): Matrix.004 file - promoters50/1441762
caattta

SEQ ID NO: 68914 - DNA, 9 bp, Unknown
  misc_feature (1)..( 9): Matrix.004 file - promoters50/1441762
aatctcttt

SEQ ID NO: 68915 - DNA, 7 bp, Unknown
  misc_feature (1)..( 7): Matrix.004 file - promoters50/1441814
taattta

SEQ ID NO: 68916 - DNA, 10 bp, Unknown
  misc_feature (1)..( 10): Matrix.004 file - promoters50/1441814
actaaatatt

SEQ ID NO: 68917 - DNA, 11 bp, Unknown
  misc_feature (1)..( 11): Matrix.004 file - promoters50/1441814
ttttacttttt

SEQ ID NO: 68918 - DNA, 10 bp, Unknown
  misc_feature (1)..( 10): Matrix.004 file - promoters50/1441835
caaaaaatgt

SEQ ID NO: 68919 - DNA, 9 bp, Unknown
  misc_feature (1)..( 9): Matrix.004 file - promoters50/1441835
atataaaaa

SEQ ID NO: 68920 - DNA, 14 bp, Unknown
  misc_feature (1)..( 14): Matrix.004 file - promoters50/1441841
attaaaaaatccaa

SEQ ID NO: 68921 - DNA, 12 bp, Unknown
  misc_feature (1)..( 12): Matrix.004 file - promoters50/1441841
atcaattttgca

SEQ ID NO: 68922 - DNA, 13 bp, Unknown
  misc_feature (1)..( 13): Matrix.004 file - promoters50/1441859
tcattttttaaat

SEQ ID NO: 68923 - DNA, 10 bp, Unknown
  misc_feature (1)..( 10): Matrix.004 file - promoters50/1441912
atttatttta

SEQ ID NO: 68924 - DNA, 15 bp, Unknown
  misc_feature (1)..( 15): Matrix.004 file - promoters50/1441937
tattgatttgggaac

SEQ ID NO: 68925 - DNA, 8 bp, Unknown
  misc_feature (1)..( 8): Matrix.004 file - promoters50/1441937
caatttat

SEQ ID NO: 68926 - DNA, 7 bp, Unknown
  misc_feature (1)..( 7): Matrix.004 file - promoters50/1441937
aaaatca

SEQ ID NO: 68927 - DNA, 8 bp, Unknown
  misc_feature (1)..( 8): Matrix.004 file - promoters50/1441937
taaaaatc

SEQ ID NO: 68928 - DNA, 8 bp, Unknown
  misc_feature (1)..( 8): Matrix.004 file - promoters50/1441937
ctgtgttg

SEQ ID NO: 68929 - DNA, 8 bp, Unknown
  misc_feature (1)..( 8): Matrix.004 file - promoters50/1441959
tcttgttt

SEQ ID NO: 68930 - DNA, 8 bp, Unknown
  misc_feature (1)..( 8): Matrix.004 file - promoters50/1441959
tctataca

SEQ ID NO: 68931 - DNA, 7 bp, Unknown
  misc_feature (1)..( 7): Matrix.004 file - promoters50/1441959
aattttt

SEQ ID NO: 68932 - DNA, 7 bp, Unknown
  misc_feature (1)..( 7): Matrix.004 file - promoters50/1441963
ataattt

SEQ ID NO: 68933 - DNA, 7 bp, Unknown
  misc_feature (1)..( 7): Matrix.004 file - promoters50/1441963
aaaaatt

SEQ ID NO: 68934 - DNA, 5 bp, Unknown
  misc_feature (1)..( 5): Matrix.004 file - promoters50/1441963
ataaa

SEQ ID NO: 68935 - DNA, 9 bp, Unknown
  misc_feature (1)..( 9): Matrix.004 file - promoters50/1441963
aaatattat

SEQ ID NO: 68936 - DNA, 10 bp, Unknown
  misc_feature (1)..( 10): Matrix.004 file - promoters50/1441963
aaatataaga

SEQ ID NO: 68937 - DNA, 8 bp, Unknown
  misc_feature (1)..( 8): Matrix.004 file - promoters50/1441970
tataaaag

SEQ ID NO: 68938 - DNA, 8 bp, Unknown
  misc_feature (1)..( 8): Matrix.004 file - promoters50/1441970
ctcttgtt

SEQ ID NO: 68939 - DNA, 7 bp, Unknown
  misc_feature (1)..( 7): Matrix.004 file - promoters50/1441970
gtttttc

SEQ ID NO: 68940 - DNA, 9 bp, Unknown
  misc_feature (1)..( 9): Matrix.004 file - promoters50/1441970
atgttcttg

SEQ ID NO: 68941 - DNA, 9 bp, Unknown
  misc_feature (1)..( 9): Matrix.004 file - promoters50/1441970
acattcatt

SEQ ID NO: 68942 - DNA, 8 bp, Unknown
  misc_feature (1)..( 8): Matrix.004 file - promoters50/1441970
attttttt

SEQ ID NO: 68943 - DNA, 8 bp, Unknown
  misc_feature (1)..( 8): Matrix.004 file - promoters50/1441985
atttttta

SEQ ID NO: 68944 - DNA, 9 bp, Unknown
  misc_feature (1)..( 9): Matrix.004 file - promoters50/1441985
acaattttg

SEQ ID NO: 68945 - DNA, 12 bp, Unknown
  misc_feature (1)..( 12): Matrix.004 file - promoters50/1441985
gcattttttttt

SEQ ID NO: 68946 - DNA, 8 bp, Unknown
  misc_feature (1)..( 8): Matrix.004 file - promoters50/1441985
ttttgtcg

SEQ ID NO: 68947 - DNA, 7 bp, Unknown
  misc_feature (1)..( 7): Matrix.004 file - promoters50/1441985
aaaaaat

SEQ ID NO: 68948 - DNA, 9 bp, Unknown
  misc_feature (1)..( 9): Matrix.004 file - promoters50/1441988
aaacacaaa

SEQ ID NO: 68949 - DNA, 8 bp, Unknown
  misc_feature (1)..( 8): Matrix.004 file - promoters50/1441990
acaaaaaa

SEQ ID NO: 68950 - DNA, 9 bp, Unknown
  misc_feature (1)..( 9): Matrix.004 file - promoters50/1441990
aaatagaaa

SEQ ID NO: 68951 - DNA, 9 bp, Unknown
  misc_feature (1)..( 9): Matrix.004 file - promoters50/1441990
atatataaa

SEQ ID NO: 68952 - DNA, 11 bp, Unknown
  misc_feature (1)..( 11): Matrix.004 file - promoters50/1442015
agttataaaac

SEQ ID NO: 68953 - DNA, 10 bp, Unknown
  misc_feature (1)..( 10): Matrix.004 file - promoters50/1442015
aaagaagaaa

SEQ ID NO: 68954 - DNA, 6 bp, Unknown
  misc_feature (1)..( 6): Matrix.004 file - promoters50/1442015
tttttt

SEQ ID NO: 68955 - DNA, 11 bp, Unknown
  misc_feature (1)..( 11): Matrix.004 file - promoters50/1442015
agaaatgaatt

SEQ ID NO: 68956 - DNA, 10 bp, Unknown
  misc_feature (1)..( 10): Matrix.004 file - promoters50/1442104
attctgttat

SEQ ID NO: 68957 - DNA, 10 bp, Unknown
  misc_feature (1)..( 10): Matrix.004 file - promoters50/1442104
ttttcttatt

SEQ ID NO: 68958 - DNA, 10 bp, Unknown
  misc_feature (1)..( 10): Matrix.004 file - promoters50/1442156
ttggatttta

SEQ ID NO: 68959 - DNA, 10 bp, Unknown
  misc_feature (1)..( 10): Matrix.004 file - promoters50/1442156
aaatagttaa

SEQ ID NO: 68960 - DNA, 10 bp, Unknown
  misc_feature (1)..( 10): Matrix.004 file - promoters50/1442179
taaaaaaaaa

SEQ ID NO: 68961 - DNA, 9 bp, Unknown
  misc_feature (1)..( 9): Matrix.004 file - promoters50/1442189
actaaacaa

SEQ ID NO: 68962 - DNA, 10 bp, Unknown
  misc_feature (1)..( 10): Matrix.004 file - promoters50/1442189
aaaaactaga

SEQ ID NO: 68963 - DNA, 7 bp, Unknown
  misc_feature (1)..( 7): Matrix.004 file - promoters50/1442189
caataaa

SEQ ID NO: 68964 - DNA, 10 bp, Unknown
  misc_feature (1)..( 10): Matrix.004 file - promoters50/1442189
aaatatatca

SEQ ID NO: 68965 - DNA, 9 bp, Unknown
  misc_feature (1)..( 9): Matrix.004 file - promoters50/1442189
caataatat

SEQ ID NO: 68966 - DNA, 6 bp, Unknown
  misc_feature (1)..( 6): Matrix.004 file - promoters50/1442218
aagata

SEQ ID NO: 68967 - DNA, 10 bp, Unknown
  misc_feature (1)..( 10): Matrix.004 file - promoters50/1442218
ataaagaaag

SEQ ID NO: 68968 - DNA, 11 bp, Unknown
  misc_feature (1)..( 11): Matrix.004 file - promoters50/1442218
aaagaaagaag

SEQ ID NO: 68969 - DNA, 10 bp, Unknown
  misc_feature (1)..( 10): Matrix.004 file - promoters50/1442218
gaaaaagtgg

SEQ ID NO: 68970 - DNA, 7 bp, Unknown
  misc_feature (1)..( 7): Matrix.004 file - promoters50/1442218
agaagag

SEQ ID NO: 68971 - DNA, 10 bp, Unknown
  misc_feature (1)..( 10): Matrix.004 file - promoters50/1442218
aagtagagaa

SEQ ID NO: 68972 - DNA, 7 bp, Unknown
  misc_feature (1)..( 7): Matrix.004 file - promoters50/1442233
aagaaga

SEQ ID NO: 68973 - DNA, 10 bp, Unknown
  misc_feature (1)..( 10): Matrix.004 file - promoters50/1442233
attcttatca

SEQ ID NO: 68974 - DNA, 9 bp, Unknown
  misc_feature (1)..( 9): Matrix.004 file - promoters50/1442233
tttggatca

SEQ ID NO: 68975 - DNA, 8 bp, Unknown
  misc_feature (1)..( 8): Matrix.004 file - promoters50/1442240
atttattt

SEQ ID NO: 68976 - DNA, 15 bp, Unknown
  misc_feature (1)..( 15): Matrix.004 file - promoters50/1442240
cttttgatatataaa

SEQ ID NO: 68977 - DNA, 17 bp, Unknown
  misc_feature (1)..( 17): Matrix.004 file - promoters50/1442244
aacattttggctattag

SEQ ID NO: 68978 - DNA, 12 bp, Unknown
  misc_feature (1)..( 12): Matrix.004 file - promoters50/1442244
gcagttacaaaa

SEQ ID NO: 68979 - DNA, 9 bp, Unknown
  misc_feature (1)..( 9): Matrix.004 file - promoters50/1442244
acatcttta

SEQ ID NO: 68980 - DNA, 12 bp, Unknown
  misc_feature (1)..( 12): Matrix.004 file - promoters50/1442244
atgtaatagaac

SEQ ID NO: 68981 - DNA, 7 bp, Unknown
  misc_feature (1)..( 7): Matrix.004 file - promoters50/1442244
taaaaaa

SEQ ID NO: 68982 - DNA, 8 bp, Unknown
  misc_feature (1)..( 8): Matrix.004 file - promoters50/1442316
attaaaaa

SEQ ID NO: 68983 - DNA, 6 bp, Unknown
  misc_feature (1)..( 6): Matrix.004 file - promoters50/1442316
aaagaa

SEQ ID NO: 68984 - DNA, 10 bp, Unknown
  misc_feature (1)..( 10): Matrix.004 file - promoters50/1442316
aaacaaatat

SEQ ID NO: 68985 - DNA, 14 bp, Unknown
  misc_feature (1)..( 14): Matrix.004 file - promoters50/1442316
aattaataaaaaaa

SEQ ID NO: 68986 - DNA, 5 bp, Unknown
  misc_feature (1)..( 5): Matrix.004 file - promoters50/1442326
attat

SEQ ID NO: 68987 - DNA, 8 bp, Unknown
  misc_feature (1)..( 8): Matrix.004 file - promoters50/1442408
ccatggtt

SEQ ID NO: 68988 - DNA, 17 bp, Unknown
  misc_feature (1)..( 17): Matrix.004 file - promoters50/1442408
gatatgaaaaaatcaaa

SEQ ID NO: 68989 - DNA, 12 bp, Unknown
  misc_feature (1)..( 12): Matrix.004 file - promoters50/1442423
gactctttttct

SEQ ID NO: 68990 - DNA, 8 bp, Unknown
  misc_feature (1)..( 8): Matrix.004 file - promoters50/1442423
attctttt

SEQ ID NO: 68991 - DNA, 8 bp, Unknown
  misc_feature (1)..( 8): Matrix.004 file - promoters50/1442423
ataaaatc

SEQ ID NO: 68992 - DNA, 6 bp, Unknown
  misc_feature (1)..( 6): Matrix.004 file - promoters50/1442423
tataaa

SEQ ID NO: 68993 - DNA, 10 bp, Unknown
  misc_feature (1)..( 10): Matrix.004 file - promoters50/1442423
ataaaattta

SEQ ID NO: 68994 - DNA, 8 bp, Unknown
  misc_feature (1)..( 8): Matrix.004 file - promoters50/1442427
tctttaat

SEQ ID NO: 68995 - DNA, 10 bp, Unknown
  misc_feature (1)..( 10): Matrix.004 file - promoters50/1442452
taaatttgct

SEQ ID NO: 68996 - DNA, 17 bp, Unknown
  misc_feature (1)..( 17): Matrix.004 file - promoters50/1442452
tttatattttagaaaaa

SEQ ID NO: 68997 - DNA, 9 bp, Unknown
  misc_feature (1)..( 9): Matrix.004 file - promoters50/1442452
aattttgaa

SEQ ID NO: 68998 - DNA, 10 bp, Unknown
  misc_feature (1)..( 10): Matrix.004 file - promoters50/1442452
aaaatgttag

SEQ ID NO: 68999 - DNA, 6 bp, Unknown
  misc_feature (1)..( 6): Matrix.004 file - promoters50/1442452
tatata

SEQ ID NO: 69000 - DNA, 11 bp, Unknown
  misc_feature (1)..( 11): Matrix.004 file - promoters50/1442468
atccaacggca

SEQ ID NO: 69001 - DNA, 9 bp, Unknown
  misc_feature (1)..( 9): Matrix.004 file - promoters50/1442468
atttttttt

SEQ ID NO: 69002 - DNA, 9 bp, Unknown
  misc_feature (1)..( 9): Matrix.004 file - promoters50/1442468
cctaaacat

SEQ ID NO: 69003 - DNA, 15 bp, Unknown
  misc_feature (1)..( 15): Matrix.004 file - promoters50/1442468
agaatttcgtttttg

SEQ ID NO: 69004 - DNA, 10 bp, Unknown
  misc_feature (1)..( 10): Matrix.004 file - promoters50/1442468
aaattataaa

SEQ ID NO: 69005 - DNA, 9 bp, Unknown
  misc_feature (1)..( 9): Matrix.004 file - promoters50/1442476
aaaacaaaa

SEQ ID NO: 69006 - DNA, 12 bp, Unknown
  misc_feature (1)..( 12): Matrix.004 file - promoters50/1442476
agaatcattaaa

SEQ ID NO: 69007 - DNA, 13 bp, Unknown
  misc_feature (1)..( 13): Matrix.004 file - promoters50/1442476
ctcgtatgattct

SEQ ID NO: 69008 - DNA, 13 bp, Unknown
  misc_feature (1)..( 13): Matrix.004 file - promoters50/1442504
aagaaacaaagaa

SEQ ID NO: 69009 - DNA, 10 bp, Unknown
  misc_feature (1)..( 10): Matrix.004 file - promoters50/1442544
gtgaggatca

SEQ ID NO: 69010 - DNA, 8 bp, Unknown
  misc_feature (1)..( 8): Matrix.004 file - promoters50/1442544
aaagttga

SEQ ID NO: 69011 - DNA, 8 bp, Unknown
  misc_feature (1)..( 8): Matrix.004 file - promoters50/1442548
agaaaact

SEQ ID NO: 69012 - DNA, 12 bp, Unknown
  misc_feature (1)..( 12): Matrix.004 file - promoters50/1442548
taccatatttaa

SEQ ID NO: 69013 - DNA, 9 bp, Unknown
  misc_feature (1)..( 9): Matrix.004 file - promoters50/1442548
aataacaat

SEQ ID NO: 69014 - DNA, 12 bp, Unknown
  misc_feature (1)..( 12): Matrix.004 file - promoters50/1442552
atcttttgtaac

SEQ ID NO: 69015 - DNA, 7 bp, Unknown
  misc_feature (1)..( 7): Matrix.004 file - promoters50/1442592
aaaattc

SEQ ID NO: 69016 - DNA, 17 bp, Unknown
  misc_feature (1)..( 17): Matrix.004 file - promoters50/1442592
tccacgtcattcaatcc

SEQ ID NO: 69017 - DNA, 7 bp, Unknown
  misc_feature (1)..( 7): Matrix.004 file - promoters50/1442592
atatata

SEQ ID NO: 69018 - DNA, 9 bp, Unknown
  misc_feature (1)..( 9): Matrix.004 file - promoters50/1442592
aaaagaaat

SEQ ID NO: 69019 - DNA, 10 bp, Unknown
  misc_feature (1)..( 10): Matrix.004 file - promoters50/1442592
atattttaat

SEQ ID NO: 69020 - DNA, 7 bp, Unknown
  misc_feature (1)..( 7): Matrix.004 file - promoters50/1442592
taaatgt

SEQ ID NO: 69021 - DNA, 11 bp, Unknown
  misc_feature (1)..( 11): Matrix.004 file - promoters50/1442592
ttttgatgaat

SEQ ID NO: 69022 - DNA, 9 bp, Unknown
  misc_feature (1)..( 9): Matrix.004 file - promoters50/1442649
attttgaat

SEQ ID NO: 69023 - DNA, 6 bp, Unknown
  misc_feature (1)..( 6): Matrix.004 file - promoters50/1442649
ttaatt

SEQ ID NO: 69024 - DNA, 10 bp, Unknown
  misc_feature (1)..( 10): Matrix.004 file - promoters50/1442649
aaaatccttt

SEQ ID NO: 69025 - DNA, 9 bp, Unknown
  misc_feature (1)..( 9): Matrix.004 file - promoters50/1442777
aaaaccaat

SEQ ID NO: 69026 - DNA, 13 bp, Unknown
  misc_feature (1)..( 13): Matrix.004 file - promoters50/1442777
atgtataacttca

SEQ ID NO: 69027 - DNA, 11 bp, Unknown
  misc_feature (1)..( 11): Matrix.004 file - promoters50/1442777
tgtatataaaa

SEQ ID NO: 69028 - DNA, 8 bp, Unknown
  misc_feature (1)..( 8): Matrix.004 file - promoters50/1442777
taatgtga

SEQ ID NO: 69029 - DNA, 13 bp, Unknown
  misc_feature (1)..( 13): Matrix.004 file - promoters50/1442777
aaataaatttttt

SEQ ID NO: 69030 - DNA, 17 bp, Unknown
  misc_feature (1)..( 17): Matrix.004 file - promoters50/1442848
aggctaaaatatcgtta

SEQ ID NO: 69031 - DNA, 11 bp, Unknown
  misc_feature (1)..( 11): Matrix.004 file - promoters50/1442887
attaccaaatt

SEQ ID NO: 69032 - DNA, 11 bp, Unknown
  misc_feature (1)..( 11): Matrix.004 file - promoters50/1442887
ttacatgatta

SEQ ID NO: 69033 - DNA, 6 bp, Unknown
  misc_feature (1)..( 6): Matrix.004 file - promoters50/1442887
ttgggt

SEQ ID NO: 69034 - DNA, 7 bp, Unknown
  misc_feature (1)..( 7): Matrix.004 file - promoters50/1442887
aatatca

SEQ ID NO: 69035 - DNA, 8 bp, Unknown
  misc_feature (1)..( 8): Matrix.004 file - promoters50/1442887
tgtttggt

SEQ ID NO: 69036 - DNA, 9 bp, Unknown
  misc_feature (1)..( 9): Matrix.004 file - promoters50/1442887
gaaaaaaag

SEQ ID NO: 69037 - DNA, 9 bp, Unknown
  misc_feature (1)..( 9): Matrix.004 file - promoters50/1442945
aaagtaaag

SEQ ID NO: 69038 - DNA, 8 bp, Unknown
  misc_feature (1)..( 8): Matrix.004 file - promoters50/1442945
attataat

SEQ ID NO: 69039 - DNA, 10 bp, Unknown
  misc_feature (1)..( 10): Matrix.004 file - promoters50/1442967
ttataattaa

SEQ ID NO: 69040 - DNA, 10 bp, Unknown
  misc_feature (1)..( 10): Matrix.004 file - promoters50/1442967
gataaaggtc

SEQ ID NO: 69041 - DNA, 9 bp, Unknown
  misc_feature (1)..( 9): Matrix.004 file - promoters50/1442967
aaagaaaat

SEQ ID NO: 69042 - DNA, 10 bp, Unknown
  misc_feature (1)..( 10): Matrix.004 file - promoters50/1442975
tcagtagtta

SEQ ID NO: 69043 - DNA, 9 bp, Unknown
  misc_feature (1)..( 9): Matrix.004 file - promoters50/1443011
tgaaaacta

SEQ ID NO: 69044 - DNA, 11 bp, Unknown
  misc_feature (1)..( 11): Matrix.004 file - promoters50/1443019
aattataatat

SEQ ID NO: 69045 - DNA, 11 bp, Unknown
  misc_feature (1)..( 11): Matrix.004 file - promoters50/1443021
tcggtttcttg

SEQ ID NO: 69046 - DNA, 12 bp, Unknown
  misc_feature (1)..( 12): Matrix.004 file - promoters50/1443021
tcaaaatttatc

SEQ ID NO: 69047 - DNA, 10 bp, Unknown
  misc_feature (1)..( 10): Matrix.004 file - promoters50/1443021
caataaatat

SEQ ID NO: 69048 - DNA, 8 bp, Unknown
  misc_feature (1)..( 8): Matrix.004 file - promoters50/1443021
atgaaaac

SEQ ID NO: 69049 - DNA, 8 bp, Unknown
  misc_feature (1)..( 8): Matrix.004 file - promoters50/1443029
aaagcttg

SEQ ID NO: 69050 - DNA, 8 bp, Unknown
  misc_feature (1)..( 8): Matrix.004 file - promoters50/1443029
gtttactt

SEQ ID NO: 69051 - DNA, 8 bp, Unknown
  misc_feature (1)..( 8): Matrix.004 file - promoters50/1443029
tcaaaaat

SEQ ID NO: 69052 - DNA, 9 bp, Unknown
  misc_feature (1)..( 9): Matrix.004 file - promoters50/1443067
agatttata

SEQ ID NO: 69053 - DNA, 10 bp, Unknown
  misc_feature (1)..( 10): Matrix.004 file - promoters50/1443067
gataacctta

SEQ ID NO: 69054 - DNA, 9 bp, Unknown
  misc_feature (1)..( 9): Matrix.004 file - promoters50/1443067
aacattttg

SEQ ID NO: 69055 - DNA, 10 bp, Unknown
  misc_feature (1)..( 10): Matrix.004 file - promoters50/1443075
tttaaagctt

SEQ ID NO: 69056 - DNA, 13 bp, Unknown
  misc_feature (1)..( 13): Matrix.004 file - promoters50/1443083
aaatcattttcaa

SEQ ID NO: 69057 - DNA, 9 bp, Unknown
  misc_feature (1)..( 9): Matrix.004 file - promoters50/1443083
tatataaat

SEQ ID NO: 69058 - DNA, 7 bp, Unknown
  misc_feature (1)..( 7): Matrix.004 file - promoters50/1443083
aaacaaa

SEQ ID NO: 69059 - DNA, 18 bp, Unknown
  misc_feature (1)..( 18): Matrix.004 file - promoters50/1443083
aatcaaaaacaaataaga

SEQ ID NO: 69060 - DNA, 8 bp, Unknown
  misc_feature (1)..( 8): Matrix.004 file - promoters50/1443083
aaaataaa

SEQ ID NO: 69061 - DNA, 7 bp, Unknown
  misc_feature (1)..( 7): Matrix.004 file - promoters50/1443083
tatttta

SEQ ID NO: 69062 - DNA, 9 bp, Unknown
  misc_feature (1)..( 9): Matrix.004 file - promoters50/1443114
aatgttctt

SEQ ID NO: 69063 - DNA, 9 bp, Unknown
  misc_feature (1)..( 9): Matrix.004 file - promoters50/1443114
tcaaagaat

SEQ ID NO: 69064 - DNA, 9 bp, Unknown
  misc_feature (1)..( 9): Matrix.004 file - promoters50/1443114
aactaaaaa

SEQ ID NO: 69065 - DNA, 11 bp, Unknown
  misc_feature (1)..( 11): Matrix.004 file - promoters50/1443114
gcaattaaaat

SEQ ID NO: 69066 - DNA, 13 bp, Unknown
  misc_feature (1)..( 13): Matrix.004 file - promoters50/1443178
gagaaaaaagaaa

SEQ ID NO: 69067 - DNA, 11 bp, Unknown
  misc_feature (1)..( 11): Matrix.004 file - promoters50/1443178
aaaaaacaaaa

SEQ ID NO: 69068 - DNA, 8 bp, Unknown
  misc_feature (1)..( 8): Matrix.004 file - promoters50/1443184
aaaaaccg

SEQ ID NO: 69069 - DNA, 11 bp, Unknown
  misc_feature (1)..( 11): Matrix.004 file - promoters50/1443184
ataatttgagt

SEQ ID NO: 69070 - DNA, 10 bp, Unknown
  misc_feature (1)..( 10): Matrix.004 file - promoters50/1443184
aatttattca

SEQ ID NO: 69071 - DNA, 10 bp, Unknown
  misc_feature (1)..( 10): Matrix.004 file - promoters50/1443184
agaaaaaaga

SEQ ID NO: 69072 - DNA, 9 bp, Unknown
  misc_feature (1)..( 9): Matrix.004 file - promoters50/1443184
acttataaa

SEQ ID NO: 69073 - DNA, 8 bp, Unknown
  misc_feature (1)..( 8): Matrix.004 file - promoters50/1443184
aggaggaa

SEQ ID NO: 69074 - DNA, 8 bp, Unknown
  misc_feature (1)..( 8): Matrix.004 file - promoters50/1443192
gttacaac

SEQ ID NO: 69075 - DNA, 15 bp, Unknown
  misc_feature (1)..( 15): Matrix.004 file - promoters50/1443192
aaaaattaattaaag

SEQ ID NO: 69076 - DNA, 11 bp, Unknown
  misc_feature (1)..( 11): Matrix.004 file - promoters50/1443192
atttaactaat

SEQ ID NO: 69077 - DNA, 11 bp, Unknown
  misc_feature (1)..( 11): Matrix.004 file - promoters50/1443192
ataatttttaa

SEQ ID NO: 69078 - DNA, 10 bp, Unknown
  misc_feature (1)..( 10): Matrix.004 file - promoters50/1443256
ctatatatat

SEQ ID NO: 69079 - DNA, 6 bp, Unknown
  misc_feature (1)..( 6): Matrix.004 file - promoters50/1443271
actctt

SEQ ID NO: 69080 - DNA, 8 bp, Unknown
  misc_feature (1)..( 8): Matrix.004 file - promoters50/1443271
cataaaaa

SEQ ID NO: 69081 - DNA, 8 bp, Unknown
  misc_feature (1)..( 8): Matrix.004 file - promoters50/1443271
tgtttttc

SEQ ID NO: 69082 - DNA, 9 bp, Unknown
  misc_feature (1)..( 9): Matrix.004 file - promoters50/1443271
gtttaattt

SEQ ID NO: 69083 - DNA, 8 bp, Unknown
  misc_feature (1)..( 8): Matrix.004 file - promoters50/1443276
aaaaatta

SEQ ID NO: 69084 - DNA, 9 bp, Unknown
  misc_feature (1)..( 9): Matrix.004 file - promoters50/1443276
aatttaata

SEQ ID NO: 69085 - DNA, 8 bp, Unknown
  misc_feature (1)..( 8): Matrix.004 file - promoters50/1443276
aaaaggaa

SEQ ID NO: 69086 - DNA, 10 bp, Unknown
  misc_feature (1)..( 10): Matrix.004 file - promoters50/1443276
aaatattatt

SEQ ID NO: 69087 - DNA, 9 bp, Unknown
  misc_feature (1)..( 9): Matrix.004 file - promoters50/1443276
gactaaaag

SEQ ID NO: 69088 - DNA, 8 bp, Unknown
  misc_feature (1)..( 8): Matrix.004 file - promoters50/1443276
aaagtcta

SEQ ID NO: 69089 - DNA, 8 bp, Unknown
  misc_feature (1)..( 8): Matrix.004 file - promoters50/1443276
tcaataaa

SEQ ID NO: 69090 - DNA, 9 bp, Unknown
  misc_feature (1)..( 9): Matrix.004 file - promoters50/1443276
taacaaaaa

SEQ ID NO: 69091 - DNA, 8 bp, Unknown
  misc_feature (1)..( 8): Matrix.004 file - promoters50/1443276
agaaaaat

SEQ ID NO: 69092 - DNA, 9 bp, Unknown
  misc_feature (1)..( 9): Matrix.004 file - promoters50/1443276
tatataaat

SEQ ID NO: 69093 - DNA, 9 bp, Unknown
  misc_feature (1)..( 9): Matrix.004 file - promoters50/1443283
aaacaaaaa

SEQ ID NO: 69094 - DNA, 8 bp, Unknown
  misc_feature (1)..( 8): Matrix.004 file - promoters50/1443306
taaaaatg

SEQ ID NO: 69095 - DNA, 12 bp, Unknown
  misc_feature (1)..( 12): Matrix.004 file - promoters50/1443306
taaaaaataatt

SEQ ID NO: 69096 - DNA, 13 bp, Unknown
  misc_feature (1)..( 13): Matrix.004 file - promoters50/1443306
tacattttcttac

SEQ ID NO: 69097 - DNA, 12 bp, Unknown
  misc_feature (1)..( 12): Matrix.004 file - promoters50/1443306
taaatataaata

SEQ ID NO: 69098 - DNA, 10 bp, Unknown
  misc_feature (1)..( 10): Matrix.004 file - promoters50/1443306
attattttta

SEQ ID NO: 69099 - DNA, 10 bp, Unknown
  misc_feature (1)..( 10): Matrix.004 file - promoters50/1443306
attttgttaa

SEQ ID NO: 69100 - DNA, 7 bp, Unknown
  misc_feature (1)..( 7): Matrix.004 file - promoters50/1443306
taaaaaa

SEQ ID NO: 69101 - DNA, 10 bp, Unknown
  misc_feature (1)..( 10): Matrix.004 file - promoters50/1443338
ttttgcaaat

SEQ ID NO: 69102 - DNA, 9 bp, Unknown
  misc_feature (1)..( 9): Matrix.004 file - promoters50/1443342
tcttataat

SEQ ID NO: 69103 - DNA, 10 bp, Unknown
  misc_feature (1)..( 10): Matrix.004 file - promoters50/1443342
ataattaacc

SEQ ID NO: 69104 - DNA, 15 bp, Unknown
  misc_feature (1)..( 15): Matrix.004 file - promoters50/1443342
ttcatatatgttaag

SEQ ID NO: 69105 - DNA, 14 bp, Unknown
  misc_feature (1)..( 14): Matrix.004 file - promoters50/1443349
caatttctatttct

SEQ ID NO: 69106 - DNA, 11 bp, Unknown
  misc_feature (1)..( 11): Matrix.004 file - promoters50/1443349
ttttgatgaat

SEQ ID NO: 69107 - DNA, 14 bp, Unknown
  misc_feature (1)..( 14): Matrix.004 file - promoters50/1443349
taaaaaaagagatt

SEQ ID NO: 69108 - DNA, 9 bp, Unknown
  misc_feature (1)..( 9): Matrix.004 file - promoters50/1443349
atatataaa

SEQ ID NO: 69109 - DNA, 13 bp, Unknown
  misc_feature (1)..( 13): Matrix.004 file - promoters50/1443349
aaatctttataac

SEQ ID NO: 69110 - DNA, 15 bp, Unknown
  misc_feature (1)..( 15): Matrix.004 file - promoters50/1443349
ataactttataaaat

SEQ ID NO: 69111 - DNA, 12 bp, Unknown
  misc_feature (1)..( 12): Matrix.004 file - promoters50/1443349
aaaaatatgtac

SEQ ID NO: 69112 - DNA, 15 bp, Unknown
  misc_feature (1)..( 15): Matrix.004 file - promoters50/1443356
aaattttaaaatata

SEQ ID NO: 69113 - DNA, 9 bp, Unknown
  misc_feature (1)..( 9): Matrix.004 file - promoters50/1443356
aaccgattt

SEQ ID NO: 69114 - DNA, 7 bp, Unknown
  misc_feature (1)..( 7): Matrix.004 file - promoters50/1443387
aaacaat

SEQ ID NO: 69115 - DNA, 9 bp, Unknown
  misc_feature (1)..( 9): Matrix.004 file - promoters50/1443387
atcaaccat

SEQ ID NO: 69116 - DNA, 8 bp, Unknown
  misc_feature (1)..( 8): Matrix.004 file - promoters50/1443387
aaaattga

SEQ ID NO: 69117 - DNA, 13 bp, Unknown
  misc_feature (1)..( 13): Matrix.004 file - promoters50/1443418
ttgctcatttact

SEQ ID NO: 69118 - DNA, 8 bp, Unknown
  misc_feature (1)..( 8): Matrix.004 file - promoters50/1443418
atttatta

SEQ ID NO: 69119 - DNA, 10 bp, Unknown
  misc_feature (1)..( 10): Matrix.004 file - promoters50/1443418
atttatttaa

SEQ ID NO: 69120 - DNA, 13 bp, Unknown
  misc_feature (1)..( 13): Matrix.004 file - promoters50/1443418
tgatcaaaataaa

SEQ ID NO: 69121 - DNA, 9 bp, Unknown
  misc_feature (1)..( 9): Matrix.004 file - promoters50/1443418
tatatataa

SEQ ID NO: 69122 - DNA, 11 bp, Unknown
  misc_feature (1)..( 11): Matrix.004 file - promoters50/1443418
ttataatgtta

SEQ ID NO: 69123 - DNA, 13 bp, Unknown
  misc_feature (1)..( 13): Matrix.004 file - promoters50/1443418
ttaaaaagttaga

SEQ ID NO: 69124 - DNA, 10 bp, Unknown
  misc_feature (1)..( 10): Matrix.004 file - promoters50/1443472
aaatttaatt

SEQ ID NO: 69125 - DNA, 7 bp, Unknown
  misc_feature (1)..( 7): Matrix.004 file - promoters50/1443472
atgtatt

SEQ ID NO: 69126 - DNA, 8 bp, Unknown
  misc_feature (1)..( 8): Matrix.004 file - promoters50/1443475
ctgtgttt

SEQ ID NO: 69127 - DNA, 7 bp, Unknown
  misc_feature (1)..( 7): Matrix.004 file - promoters50/1443475
ttttttc

SEQ ID NO: 69128 - DNA, 8 bp, Unknown
  misc_feature (1)..( 8): Matrix.004 file - promoters50/1443479
caagtttt

SEQ ID NO: 69129 - DNA, 9 bp, Unknown
  misc_feature (1)..( 9): Matrix.004 file - promoters50/1443479
caaaaaaag

SEQ ID NO: 69130 - DNA, 11 bp, Unknown
  misc_feature (1)..( 11): Matrix.004 file - promoters50/1443509
tttcaaaaaac

SEQ ID NO: 69131 - DNA, 12 bp, Unknown
  misc_feature (1)..( 12): Matrix.004 file - promoters50/1443509
taatattttttt

SEQ ID NO: 69132 - DNA, 13 bp, Unknown
  misc_feature (1)..( 13): Matrix.004 file - promoters50/1443527
ttatctaatatat

SEQ ID NO: 69133 - DNA, 7 bp, Unknown
  misc_feature (1)..( 7): Matrix.004 file - promoters50/1443683
gtgatat

SEQ ID NO: 69134 - DNA, 9 bp, Unknown
  misc_feature (1)..( 9): Matrix.004 file - promoters50/1443687
atatataaa

SEQ ID NO: 69135 - DNA, 14 bp, Unknown
  misc_feature (1)..( 14): Matrix.004 file - promoters50/1443687
aaatttatcttaaa

SEQ ID NO: 69136 - DNA, 12 bp, Unknown
  misc_feature (1)..( 12): Matrix.004 file - promoters50/1443687
tttcaaagacaa

SEQ ID NO: 69137 - DNA, 7 bp, Unknown
  misc_feature (1)..( 7): Matrix.004 file - promoters50/1443687
aataaca

SEQ ID NO: 69138 - DNA, 9 bp, Unknown
  misc_feature (1)..( 9): Matrix.004 file - promoters50/1443687
tattttgaa

SEQ ID NO: 69139 - DNA, 7 bp, Unknown
  misc_feature (1)..( 7): Matrix.004 file - promoters50/1443687
aaaaaca

SEQ ID NO: 69140 - DNA, 10 bp, Unknown
  misc_feature (1)..( 10): Matrix.004 file - promoters50/1443711
taaaatttta

SEQ ID NO: 69141 - DNA, 7 bp, Unknown
  misc_feature (1)..( 7): Matrix.004 file - promoters50/1443711
aatatag

SEQ ID NO: 69142 - DNA, 10 bp, Unknown
  misc_feature (1)..( 10): Matrix.004 file - promoters50/1444131
attataaaat

SEQ ID NO: 69143 - DNA, 9 bp, Unknown
  misc_feature (1)..( 9): Matrix.004 file - promoters50/1444131
atagttaaa

SEQ ID NO: 69144 - DNA, 7 bp, Unknown
  misc_feature (1)..( 7): Matrix.004 file - promoters50/1444156
ttatttc

SEQ ID NO: 69145 - DNA, 9 bp, Unknown
  misc_feature (1)..( 9): Matrix.004 file - promoters50/1444156
aaaataaaa

SEQ ID NO: 69146 - DNA, 10 bp, Unknown
  misc_feature (1)..( 10): Matrix.004 file - promoters50/1444156
ggaaaagaaa

SEQ ID NO: 69147 - DNA, 7 bp, Unknown
  misc_feature (1)..( 7): Matrix.004 file - promoters50/1444156
tttaata

SEQ ID NO: 69148 - DNA, 11 bp, Unknown
  misc_feature (1)..( 11): Matrix.004 file - promoters50/1444156
cttgaaacaaa

SEQ ID NO: 69149 - DNA, 9 bp, Unknown
  misc_feature (1)..( 9): Matrix.004 file - promoters50/1444180
aaatgaaga

SEQ ID NO: 69150 - DNA, 9 bp, Unknown
  misc_feature (1)..( 9): Matrix.004 file - promoters50/1444180
gaaacaaaa

SEQ ID NO: 69151 - DNA, 7 bp, Unknown
  misc_feature (1)..( 7): Matrix.004 file - promoters50/1444180
tcatatc

SEQ ID NO: 69152 - DNA, 9 bp, Unknown
  misc_feature (1)..( 9): Matrix.004 file - promoters50/1444180
atatctttg

SEQ ID NO: 69153 - DNA, 8 bp, Unknown
  misc_feature (1)..( 8): Matrix.004 file - promoters50/1444196
gtatataa

SEQ ID NO: 69154 - DNA, 11 bp, Unknown
  misc_feature (1)..( 11): Matrix.004 file - promoters50/1444196
tttttgaaatt

SEQ ID NO: 69155 - DNA, 10 bp, Unknown
  misc_feature (1)..( 10): Matrix.004 file - promoters50/1444400
tcttctgttt

SEQ ID NO: 69156 - DNA, 12 bp, Unknown
  misc_feature (1)..( 12): Matrix.004 file - promoters50/1444430
tgtgttcgtctg

SEQ ID NO: 69157 - DNA, 7 bp, Unknown
  misc_feature (1)..( 7): Matrix.004 file - promoters50/1444441
attcttt

SEQ ID NO: 69158 - DNA, 13 bp, Unknown
  misc_feature (1)..( 13): Matrix.004 file - promoters50/1444441
aattatttttaat

SEQ ID NO: 69159 - DNA, 7 bp, Unknown
  misc_feature (1)..( 7): Matrix.004 file - promoters50/1444441
attttta

SEQ ID NO: 69160 - DNA, 12 bp, Unknown
  misc_feature (1)..( 12): Matrix.004 file - promoters50/1444441
tttattaataat

SEQ ID NO: 69161 - DNA, 13 bp, Unknown
  misc_feature (1)..( 13): Matrix.004 file - promoters50/1444441
actattttgatta

SEQ ID NO: 69162 - DNA, 13 bp, Unknown
  misc_feature (1)..( 13): Matrix.004 file - promoters50/1444441
acgttttttgttt

SEQ ID NO: 69163 - DNA, 13 bp, Unknown
  misc_feature (1)..( 13): Matrix.004 file - promoters50/1444441
attatttaatcta

SEQ ID NO: 69164 - DNA, 10 bp, Unknown
  misc_feature (1)..( 10): Matrix.004 file - promoters50/1444441
taatattttt

SEQ ID NO: 69165 - DNA, 10 bp, Unknown
  misc_feature (1)..( 10): Matrix.004 file - promoters50/1444443
aaatcttttc

SEQ ID NO: 69166 - DNA, 16 bp, Unknown
  misc_feature (1)..( 16): Matrix.004 file - promoters50/1444443
aactaaaaagtataaa

SEQ ID NO: 69167 - DNA, 7 bp, Unknown
  misc_feature (1)..( 7): Matrix.004 file - promoters50/1444443
tttattt

SEQ ID NO: 69168 - DNA, 8 bp, Unknown
  misc_feature (1)..( 8): Matrix.004 file - promoters50/1444448
atgttttt

SEQ ID NO: 69169 - DNA, 7 bp, Unknown
  misc_feature (1)..( 7): Matrix.004 file - promoters50/1444448
tgtttta

SEQ ID NO: 69170 - DNA, 8 bp, Unknown
  misc_feature (1)..( 8): Matrix.004 file - promoters50/1444448
ataaataa

SEQ ID NO: 69171 - DNA, 8 bp, Unknown
  misc_feature (1)..( 8): Matrix.004 file - promoters50/1444448
ttaaattc

SEQ ID NO: 69172 - DNA, 7 bp, Unknown
  misc_feature (1)..( 7): Matrix.004 file - promoters50/1444473
tttttga

SEQ ID NO: 69173 - DNA, 11 bp, Unknown
  misc_feature (1)..( 11): Matrix.004 file - promoters50/1444479
taatgttttta

SEQ ID NO: 69174 - DNA, 11 bp, Unknown
  misc_feature (1)..( 11): Matrix.004 file - promoters50/1444479
attattaaaat

SEQ ID NO: 69175 - DNA, 10 bp, Unknown
  misc_feature (1)..( 10): Matrix.004 file - promoters50/1444479
tttactaatc

SEQ ID NO: 69176 - DNA, 11 bp, Unknown
  misc_feature (1)..( 11): Matrix.004 file - promoters50/1444479
ataatttttaa

SEQ ID NO: 69177 - DNA, 10 bp, Unknown
  misc_feature (1)..( 10): Matrix.004 file - promoters50/1444479
atatttttac

SEQ ID NO: 69178 - DNA, 13 bp, Unknown
  misc_feature (1)..( 13): Matrix.004 file - promoters50/1444502
ctatatataaata

SEQ ID NO: 69179 - DNA, 8 bp, Unknown
  misc_feature (1)..( 8): Matrix.004 file - promoters50/1444502
ttgaatat

SEQ ID NO: 69180 - DNA, 10 bp, Unknown
  misc_feature (1)..( 10): Matrix.004 file - promoters50/1444502
cattttttgt

SEQ ID NO: 69181 - DNA, 7 bp, Unknown
  misc_feature (1)..( 7): Matrix.004 file - promoters50/1444502
caaaaaa

SEQ ID NO: 69182 - DNA, 11 bp, Unknown
  misc_feature (1)..( 11): Matrix.004 file - promoters50/1444506
atttgtttgtt

SEQ ID NO: 69183 - DNA, 16 bp, Unknown
  misc_feature (1)..( 16): Matrix.004 file - promoters50/1444506
aaaatatgaatctaaa

SEQ ID NO: 69184 - DNA, 10 bp, Unknown
  misc_feature (1)..( 10): Matrix.004 file - promoters50/1444506
attttaccca

SEQ ID NO: 69185 - DNA, 11 bp, Unknown
  misc_feature (1)..( 11): Matrix.004 file - promoters50/1444506
actatatataa

SEQ ID NO: 69186 - DNA, 10 bp, Unknown
  misc_feature (1)..( 10): Matrix.004 file - promoters50/1444514
atatttgtta

SEQ ID NO: 69187 - DNA, 10 bp, Unknown
  misc_feature (1)..( 10): Matrix.004 file - promoters50/1444514
aaaattaata

SEQ ID NO: 69188 - DNA, 9 bp, Unknown
  misc_feature (1)..( 9): Matrix.004 file - promoters50/1444514
attatacta

SEQ ID NO: 69189 - DNA, 10 bp, Unknown
  misc_feature (1)..( 10): Matrix.004 file - promoters50/1444514
atttatatat

SEQ ID NO: 69190 - DNA, 11 bp, Unknown
  misc_feature (1)..( 11): Matrix.004 file - promoters50/1444514
tcctaaatcat

SEQ ID NO: 69191 - DNA, 9 bp, Unknown
  misc_feature (1)..( 9): Matrix.004 file - promoters50/1444514
taattgtta

SEQ ID NO: 69192 - DNA, 10 bp, Unknown
  misc_feature (1)..( 10): Matrix.004 file - promoters50/1444567
atatttgtta

SEQ ID NO: 69193 - DNA, 7 bp, Unknown
  misc_feature (1)..( 7): Matrix.004 file - promoters50/1444567
atagaat

SEQ ID NO: 69194 - DNA, 10 bp, Unknown
  misc_feature (1)..( 10): Matrix.004 file - promoters50/1444567
aaaaatcaat

SEQ ID NO: 69195 - DNA, 7 bp, Unknown
  misc_feature (1)..( 7): Matrix.004 file - promoters50/1444567
ttaaaat

SEQ ID NO: 69196 - DNA, 7 bp, Unknown
  misc_feature (1)..( 7): Matrix.004 file - promoters50/1444567
aataatc

SEQ ID NO: 69197 - DNA, 11 bp, Unknown
  misc_feature (1)..( 11): Matrix.004 file - promoters50/1444607
aaattcaatca

SEQ ID NO: 69198 - DNA, 7 bp, Unknown
  misc_feature (1)..( 7): Matrix.004 file - promoters50/1444629
aagagaa

SEQ ID NO: 69199 - DNA, 15 bp, Unknown
  misc_feature (1)..( 15): Matrix.004 file - promoters50/1446208
aacatttttacattt

SEQ ID NO: 69200 - DNA, 9 bp, Unknown
  misc_feature (1)..( 9): Matrix.004 file - promoters50/1446208
taaagataa

SEQ ID NO: 69201 - DNA, 6 bp, Unknown
  misc_feature (1)..( 6): Matrix.004 file - promoters50/1446208
tacaaa

SEQ ID NO: 69202 - DNA, 9 bp, Unknown
  misc_feature (1)..( 9): Matrix.004 file - promoters50/1446368
attttaatg

SEQ ID NO: 69203 - DNA, 9 bp, Unknown
  misc_feature (1)..( 9): Matrix.004 file - promoters50/1446368
aaaaaatta

SEQ ID NO: 69204 - DNA, 9 bp, Unknown
  misc_feature (1)..( 9): Matrix.004 file - promoters50/1446456
ataaattaa

SEQ ID NO: 69205 - DNA, 10 bp, Unknown
  misc_feature (1)..( 10): Matrix.004 file - promoters50/1446456
atacattttt

SEQ ID NO: 69206 - DNA, 8 bp, Unknown
  misc_feature (1)..( 8): Matrix.004 file - promoters50/1446584
aaataaat

SEQ ID NO: 69207 - DNA, 10 bp, Unknown
  misc_feature (1)..( 10): Matrix.004 file - promoters50/1446636
ataaatttgt

SEQ ID NO: 69208 - DNA, 9 bp, Unknown
  misc_feature (1)..( 9): Matrix.004 file - promoters50/1446636
aaaaggata

SEQ ID NO: 69209 - DNA, 10 bp, Unknown
  misc_feature (1)..( 10): Matrix.004 file - promoters50/1446636
aattttgata

SEQ ID NO: 69210 - DNA, 8 bp, Unknown
  misc_feature (1)..( 8): Matrix.004 file - promoters50/1446636
aaattttg

SEQ ID NO: 69211 - DNA, 9 bp, Unknown
  misc_feature (1)..( 9): Matrix.004 file - promoters50/1446854
agatttttc

SEQ ID NO: 69212 - DNA, 10 bp, Unknown
  misc_feature (1)..( 10): Matrix.004 file - promoters50/1447035
tataaccaaa

SEQ ID NO: 69213 - DNA, 8 bp, Unknown
  misc_feature (1)..( 8): Matrix.004 file - promoters50/1447035
gttgagag

SEQ ID NO: 69214 - DNA, 6 bp, Unknown
  misc_feature (1)..( 6): Matrix.004 file - promoters50/1447035
gaaaaa

SEQ ID NO: 69215 - DNA, 9 bp, Unknown
  misc_feature (1)..( 9): Matrix.004 file - promoters50/1447035
tatgtataa

SEQ ID NO: 69216 - DNA, 8 bp, Unknown
  misc_feature (1)..( 8): Matrix.004 file - promoters50/1447217
aaaattcg

SEQ ID NO: 69217 - DNA, 11 bp, Unknown
  misc_feature (1)..( 11): Matrix.004 file - promoters50/1447217
aaaaaaaaaaa

SEQ ID NO: 69218 - DNA, 9 bp, Unknown
  misc_feature (1)..( 9): Matrix.004 file - promoters50/1447217
aaaaacaaa

SEQ ID NO: 69219 - DNA, 13 bp, Unknown
  misc_feature (1)..( 13): Matrix.004 file - promoters50/1447217
gaaataatttaaa

SEQ ID NO: 69220 - DNA, 8 bp, Unknown
  misc_feature (1)..( 8): Matrix.004 file - promoters50/1447217
tataatta

SEQ ID NO: 69221 - DNA, 8 bp, Unknown
  misc_feature (1)..( 8): Matrix.004 file - promoters50/1447228
aaaaacaa

SEQ ID NO: 69222 - DNA, 9 bp, Unknown
  misc_feature (1)..( 9): Matrix.004 file - promoters50/1447321
ttggaagaa

SEQ ID NO: 69223 - DNA, 8 bp, Unknown
  misc_feature (1)..( 8): Matrix.004 file - promoters50/1447321
ttttgaat

SEQ ID NO: 69224 - DNA, 11 bp, Unknown
  misc_feature (1)..( 11): Matrix.004 file - promoters50/1447321
aaaaatgtgaa

SEQ ID NO: 69225 - DNA, 14 bp, Unknown
  misc_feature (1)..( 14): Matrix.004 file - promoters50/1447321
aaccaaattctaag

SEQ ID NO: 69226 - DNA, 10 bp, Unknown
  misc_feature (1)..( 10): Matrix.004 file - promoters50/1447321
tgtaataatt

SEQ ID NO: 69227 - DNA, 8 bp, Unknown
  misc_feature (1)..( 8): Matrix.004 file - promoters50/1447352
taattttt

SEQ ID NO: 69228 - DNA, 10 bp, Unknown
  misc_feature (1)..( 10): Matrix.004 file - promoters50/1447379
cttgaattca

SEQ ID NO: 69229 - DNA, 11 bp, Unknown
  misc_feature (1)..( 11): Matrix.004 file - promoters50/1447379
aatgaaataaa

SEQ ID NO: 69230 - DNA, 7 bp, Unknown
  misc_feature (1)..( 7): Matrix.004 file - promoters50/1447425
tttcctc

SEQ ID NO: 69231 - DNA, 10 bp, Unknown
  misc_feature (1)..( 10): Matrix.004 file - promoters50/1447543
ttaaacaatc

SEQ ID NO: 69232 - DNA, 9 bp, Unknown
  misc_feature (1)..( 9): Matrix.004 file - promoters50/1447543
tacaaaaaa

SEQ ID NO: 69233 - DNA, 10 bp, Unknown
  misc_feature (1)..( 10): Matrix.004 file - promoters50/1447543
ataaaaatca

SEQ ID NO: 69234 - DNA, 4 bp, Unknown
  misc_feature (1)..( 4): Matrix.004 file - promoters50/1447543
taat

SEQ ID NO: 69235 - DNA, 11 bp, Unknown
  misc_feature (1)..( 11): Matrix.004 file - promoters50/1447543
atgtaaattaa

SEQ ID NO: 69236 - DNA, 9 bp, Unknown
  misc_feature (1)..( 9): Matrix.004 file - promoters50/1447543
ttaagttag

SEQ ID NO: 69237 - DNA, 9 bp, Unknown
  misc_feature (1)..( 9): Matrix.004 file - promoters50/1447543
ttaattaag

SEQ ID NO: 69238 - DNA, 8 bp, Unknown
  misc_feature (1)..( 8): Matrix.004 file - promoters50/1447543
aaaaataa

SEQ ID NO: 69239 - DNA, 14 bp, Unknown
  misc_feature (1)..( 14): Matrix.004 file - promoters50/1447543
aatatctttttatt

SEQ ID NO: 69240 - DNA, 9 bp, Unknown
  misc_feature (1)..( 9): Matrix.004 file - promoters50/1447543
atttttatc

SEQ ID NO: 69241 - DNA, 8 bp, Unknown
  misc_feature (1)..( 8): Matrix.004 file - promoters50/1447543
gtaaaatt

SEQ ID NO: 69242 - DNA, 7 bp, Unknown
  misc_feature (1)..( 7): Matrix.004 file - promoters50/1447577
tcataat

SEQ ID NO: 69243 - DNA, 8 bp, Unknown
  misc_feature (1)..( 8): Matrix.004 file - promoters50/1447577
tcaaatat

SEQ ID NO: 69244 - DNA, 6 bp, Unknown
  misc_feature (1)..( 6): Matrix.004 file - promoters50/1447577
aataat

SEQ ID NO: 69245 - DNA, 8 bp, Unknown
  misc_feature (1)..( 8): Matrix.004 file - promoters50/1447577
aataataa

SEQ ID NO: 69246 - DNA, 7 bp, Unknown
  misc_feature (1)..( 7): Matrix.004 file - promoters50/1447577
aataata

SEQ ID NO: 69247 - DNA, 8 bp, Unknown
  misc_feature (1)..( 8): Matrix.004 file - promoters50/1447591
aatagtgg

SEQ ID NO: 69248 - DNA, 7 bp, Unknown
  misc_feature (1)..( 7): Matrix.004 file - promoters50/1447591
acaaaaa

SEQ ID NO: 69249 - DNA, 11 bp, Unknown
  misc_feature (1)..( 11): Matrix.004 file - promoters50/1447591
acagacaaaac

SEQ ID NO: 69250 - DNA, 7 bp, Unknown
  misc_feature (1)..( 7): Matrix.004 file - promoters50/1447646
ttttgat

SEQ ID NO: 69251 - DNA, 6 bp, Unknown
  misc_feature (1)..( 6): Matrix.004 file - promoters50/1447646
aagata

SEQ ID NO: 69252 - DNA, 10 bp, Unknown
  misc_feature (1)..( 10): Matrix.004 file - promoters50/1447646
tgaagaagaa

SEQ ID NO: 69253 - DNA, 10 bp, Unknown
  misc_feature (1)..( 10): Matrix.004 file - promoters50/1447646
tgaatttaaa

SEQ ID NO: 69254 - DNA, 10 bp, Unknown
  misc_feature (1)..( 10): Matrix.004 file - promoters50/1447646
gaaagaagat

SEQ ID NO: 69255 - DNA, 9 bp, Unknown
  misc_feature (1)..( 9): Matrix.004 file - promoters50/1447646
attgatttt

SEQ ID NO: 69256 - DNA, 9 bp, Unknown
  misc_feature (1)..( 9): Matrix.004 file - promoters50/1447649
tttttcttt

SEQ ID NO: 69257 - DNA, 7 bp, Unknown
  misc_feature (1)..( 7): Matrix.004 file - promoters50/1447686
tgagtac

SEQ ID NO: 69258 - DNA, 9 bp, Unknown
  misc_feature (1)..( 9): Matrix.004 file - promoters50/1447686
aatatatat

SEQ ID NO: 69259 - DNA, 10 bp, Unknown
  misc_feature (1)..( 10): Matrix.004 file - promoters50/1447686
gaaattaaga

SEQ ID NO: 69260 - DNA, 12 bp, Unknown
  misc_feature (1)..( 12): Matrix.004 file - promoters50/1447943
tattaaactcaa

SEQ ID NO: 69261 - DNA, 8 bp, Unknown
  misc_feature (1)..( 8): Matrix.004 file - promoters50/1447953
ttttaatc

SEQ ID NO: 69262 - DNA, 13 bp, Unknown
  misc_feature (1)..( 13): Matrix.004 file - promoters50/1447953
ctaattttgatta

SEQ ID NO: 69263 - DNA, 13 bp, Unknown
  misc_feature (1)..( 13): Matrix.004 file - promoters50/1447953
aaatctttataag

SEQ ID NO: 69264 - DNA, 6 bp, Unknown
  misc_feature (1)..( 6): Matrix.004 file - promoters50/1447972
tattat

SEQ ID NO: 69265 - DNA, 11 bp, Unknown
  misc_feature (1)..( 11): Matrix.004 file - promoters50/1447972
ttttgctaaaa

SEQ ID NO: 69266 - DNA, 9 bp, Unknown
  misc_feature (1)..( 9): Matrix.004 file - promoters50/1447972
atttctctt

SEQ ID NO: 69267 - DNA, 7 bp, Unknown
  misc_feature (1)..( 7): Matrix.004 file - promoters50/1447972
tttaaca

SEQ ID NO: 69268 - DNA, 10 bp, Unknown
  misc_feature (1)..( 10): Matrix.004 file - promoters50/1448009
ccggttcggt

SEQ ID NO: 69269 - DNA, 9 bp, Unknown
  misc_feature (1)..( 9): Matrix.004 file - promoters50/1448009
caaaattga

SEQ ID NO: 69270 - DNA, 9 bp, Unknown
  misc_feature (1)..( 9): Matrix.004 file - promoters50/1448012
aattaaaaa

SEQ ID NO: 69271 - DNA, 12 bp, Unknown
  misc_feature (1)..( 12): Matrix.004 file - promoters50/1448012
tatttctttgtt

SEQ ID NO: 69272 - DNA, 10 bp, Unknown
  misc_feature (1)..( 10): Matrix.004 file - promoters50/1448022
tttttgtttt

SEQ ID NO: 69273 - DNA, 16 bp, Unknown
  misc_feature (1)..( 16): Matrix.004 file - promoters50/1448022
attaagaaaaaaaaaa

SEQ ID NO: 69274 - DNA, 11 bp, Unknown
  misc_feature (1)..( 11): Matrix.004 file - promoters50/1448022
tactattttgt

SEQ ID NO: 69275 - DNA, 9 bp, Unknown
  misc_feature (1)..( 9): Matrix.004 file - promoters50/1448022
aattttata

SEQ ID NO: 69276 - DNA, 9 bp, Unknown
  misc_feature (1)..( 9): Matrix.004 file - promoters50/1448022
aatatgtaa

SEQ ID NO: 69277 - DNA, 12 bp, Unknown
  misc_feature (1)..( 12): Matrix.004 file - promoters50/1448022
atgtatataaaa

SEQ ID NO: 69278 - DNA, 19 bp, Unknown
  misc_feature (1)..( 19): Matrix.004 file - promoters50/1448022
ataaaaaaaaaaaaaaatc

SEQ ID NO: 69279 - DNA, 10 bp, Unknown
  misc_feature (1)..( 10): Matrix.004 file - promoters50/1448022
attaagaaaa

SEQ ID NO: 69280 - DNA, 12 bp, Unknown
  misc_feature (1)..( 12): Matrix.004 file - promoters50/1448022
aaaagaaattaa

SEQ ID NO: 69281 - DNA, 11 bp, Unknown
  misc_feature (1)..( 11): Matrix.004 file - promoters50/1448022
tatattgtaat

SEQ ID NO: 69282 - DNA, 11 bp, Unknown
  misc_feature (1)..( 11): Matrix.004 file - promoters50/1448022
aatataaaaaa

SEQ ID NO: 69283 - DNA, 13 bp, Unknown
  misc_feature (1)..( 13): Matrix.004 file - promoters50/1448054
cttttgtttttta

SEQ ID NO: 69284 - DNA, 9 bp, Unknown
  misc_feature (1)..( 9): Matrix.004 file - promoters50/1448054
ttttttctt

SEQ ID NO: 69285 - DNA, 10 bp, Unknown
  misc_feature (1)..( 10): Matrix.004 file - promoters50/1448054
tttatttctt

SEQ ID NO: 69286 - DNA, 12 bp, Unknown
  misc_feature (1)..( 12): Matrix.004 file - promoters50/1448078
attgaaaaaaat

SEQ ID NO: 69287 - DNA, 13 bp, Unknown
  misc_feature (1)..( 13): Matrix.004 file - promoters50/1448078
caaactttataaa

SEQ ID NO: 69288 - DNA, 12 bp, Unknown
  misc_feature (1)..( 12): Matrix.004 file - promoters50/1448078
ataaactttaat

SEQ ID NO: 69289 - DNA, 12 bp, Unknown
  misc_feature (1)..( 12): Matrix.004 file - promoters50/1448078
tataaaataatt

SEQ ID NO: 69290 - DNA, 7 bp, Unknown
  misc_feature (1)..( 7): Matrix.004 file - promoters50/1448101
aaaaaat

SEQ ID NO: 69291 - DNA, 9 bp, Unknown
  misc_feature (1)..( 9): Matrix.004 file - promoters50/1448101
ttttctaat

SEQ ID NO: 69292 - DNA, 7 bp, Unknown
  misc_feature (1)..( 7): Matrix.004 file - promoters50/1448101
tttattc

SEQ ID NO: 69293 - DNA, 8 bp, Unknown
  misc_feature (1)..( 8): Matrix.004 file - promoters50/1448105
aatatata

SEQ ID NO: 69294 - DNA, 10 bp, Unknown
  misc_feature (1)..( 10): Matrix.004 file - promoters50/1448105
ctaaaataag

SEQ ID NO: 69295 - DNA, 11 bp, Unknown
  misc_feature (1)..( 11): Matrix.004 file - promoters50/1448105
gataaatactt

SEQ ID NO: 69296 - DNA, 8 bp, Unknown
  misc_feature (1)..( 8): Matrix.004 file - promoters50/1448135
ttttatta

SEQ ID NO: 69297 - DNA, 9 bp, Unknown
  misc_feature (1)..( 9): Matrix.004 file - promoters50/1448135
agatacaga

SEQ ID NO: 69298 - DNA, 11 bp, Unknown
  misc_feature (1)..( 11): Matrix.004 file - promoters50/1448135
aaagaaaattg

SEQ ID NO: 69299 - DNA, 10 bp, Unknown
  misc_feature (1)..( 10): Matrix.004 file - promoters50/1448197
aagaaaaata

SEQ ID NO: 69300 - DNA, 9 bp, Unknown
  misc_feature (1)..( 9): Matrix.004 file - promoters50/1448197
atgaagaat

SEQ ID NO: 69301 - DNA, 8 bp, Unknown
  misc_feature (1)..( 8): Matrix.004 file - promoters50/1448197
tttttttt

SEQ ID NO: 69302 - DNA, 15 bp, Unknown
  misc_feature (1)..( 15): Matrix.004 file - promoters50/1448251
tctttattttattaa

SEQ ID NO: 69303 - DNA, 11 bp, Unknown
  misc_feature (1)..( 11): Matrix.004 file - promoters50/1448251
acataaaaaaa

SEQ ID NO: 69304 - DNA, 9 bp, Unknown
  misc_feature (1)..( 9): Matrix.004 file - promoters50/1448251
gaaaaaaaa

SEQ ID NO: 69305 - DNA, 11 bp, Unknown
  misc_feature (1)..( 11): Matrix.004 file - promoters50/1448251
aaatgaaagaa

SEQ ID NO: 69306 - DNA, 10 bp, Unknown
  misc_feature (1)..( 10): Matrix.004 file - promoters50/1448256
ataattgaat

SEQ ID NO: 69307 - DNA, 10 bp, Unknown
  misc_feature (1)..( 10): Matrix.004 file - promoters50/1450092
aaagatttga

SEQ ID NO: 69308 - DNA, 9 bp, Unknown
  misc_feature (1)..( 9): Matrix.004 file - promoters50/1450099
atatgtaaa

SEQ ID NO: 69309 - DNA, 16 bp, Unknown
  misc_feature (1)..( 16): Matrix.004 file - promoters50/1450099
aaagaatttatattat

SEQ ID NO: 69310 - DNA, 9 bp, Unknown
  misc_feature (1)..( 9): Matrix.004 file - promoters50/1450099
gaattaaaa

SEQ ID NO: 69311 - DNA, 15 bp, Unknown
  misc_feature (1)..( 15): Matrix.004 file - promoters50/1450099
acaaaaatgaaccaa

SEQ ID NO: 69312 - DNA, 13 bp, Unknown
  misc_feature (1)..( 13): Matrix.004 file - promoters50/1450137
aaaaatattttaa

SEQ ID NO: 69313 - DNA, 10 bp, Unknown
  misc_feature (1)..( 10): Matrix.004 file - promoters50/1450137
ctaacttttg

SEQ ID NO: 69314 - DNA, 10 bp, Unknown
  misc_feature (1)..( 10): Matrix.004 file - promoters50/1450224
caatttttaa

SEQ ID NO: 69315 - DNA, 7 bp, Unknown
  misc_feature (1)..( 7): Matrix.004 file - promoters50/1450224
ttttcta

SEQ ID NO: 69316 - DNA, 9 bp, Unknown
  misc_feature (1)..( 9): Matrix.004 file - promoters50/1450224
ttaaatgaa

SEQ ID NO: 69317 - DNA, 8 bp, Unknown
  misc_feature (1)..( 8): Matrix.004 file - promoters50/1450224
tattttat

SEQ ID NO: 69318 - DNA, 8 bp, Unknown
  misc_feature (1)..( 8): Matrix.004 file - promoters50/1450224
tataaaaa

SEQ ID NO: 69319 - DNA, 9 bp, Unknown
  misc_feature (1)..( 9): Matrix.004 file - promoters50/1450224
gaaaacaaa

SEQ ID NO: 69320 - DNA, 12 bp, Unknown
  misc_feature (1)..( 12): Matrix.004 file - promoters50/1450224
aataaattgtat

SEQ ID NO: 69321 - DNA, 7 bp, Unknown
  misc_feature (1)..( 7): Matrix.004 file - promoters50/1450224
aaattat

SEQ ID NO: 69322 - DNA, 9 bp, Unknown
  misc_feature (1)..( 9): Matrix.004 file - promoters50/1450224
aaaataatc

SEQ ID NO: 69323 - DNA, 9 bp, Unknown
  misc_feature (1)..( 9): Matrix.004 file - promoters50/1450224
tcaaaaata

SEQ ID NO: 69324 - DNA, 12 bp, Unknown
  misc_feature (1)..( 12): Matrix.004 file - promoters50/1450290
gaataaaatgta

SEQ ID NO: 69325 - DNA, 9 bp, Unknown
  misc_feature (1)..( 9): Matrix.004 file - promoters50/1450301
aattttaat

SEQ ID NO: 69326 - DNA, 12 bp, Unknown
  misc_feature (1)..( 12): Matrix.004 file - promoters50/1450301
aaataaaaaaaa

SEQ ID NO: 69327 - DNA, 10 bp, Unknown
  misc_feature (1)..( 10): Matrix.004 file - promoters50/1450309
atttgttatc

SEQ ID NO: 69328 - DNA, 10 bp, Unknown
  misc_feature (1)..( 10): Matrix.004 file - promoters50/1450309
aatatatgaa

SEQ ID NO: 69329 - DNA, 9 bp, Unknown
  misc_feature (1)..( 9): Matrix.004 file - promoters50/1450357
aaaaaaaaa

SEQ ID NO: 69330 - DNA, 12 bp, Unknown
  misc_feature (1)..( 12): Matrix.004 file - promoters50/1450357
taaggcaaattt

SEQ ID NO: 69331 - DNA, 9 bp, Unknown
  misc_feature (1)..( 9): Matrix.004 file - promoters50/1450357
gcaatttag

SEQ ID NO: 69332 - DNA, 8 bp, Unknown
  misc_feature (1)..( 8): Matrix.004 file - promoters50/1450365
atatataa

SEQ ID NO: 69333 - DNA, 11 bp, Unknown
  misc_feature (1)..( 11): Matrix.004 file - promoters50/1450369
acaaacatata

SEQ ID NO: 69334 - DNA, 9 bp, Unknown
  misc_feature (1)..( 9): Matrix.004 file - promoters50/1450384
ttactgttg

SEQ ID NO: 69335 - DNA, 8 bp, Unknown
  misc_feature (1)..( 8): Matrix.004 file - promoters50/1450384
tatataga

SEQ ID NO: 69336 - DNA, 8 bp, Unknown
  misc_feature (1)..( 8): Matrix.004 file - promoters50/1450384
atatagat

SEQ ID NO: 69337 - DNA, 12 bp, Unknown
  misc_feature (1)..( 12): Matrix.004 file - promoters50/1450384
tatttgttaata

SEQ ID NO: 69338 - DNA, 10 bp, Unknown
  misc_feature (1)..( 10): Matrix.004 file - promoters50/1450455
attggtttct

SEQ ID NO: 69339 - DNA, 9 bp, Unknown
  misc_feature (1)..( 9): Matrix.004 file - promoters50/1450455
tcatacaaa

SEQ ID NO: 69340 - DNA, 8 bp, Unknown
  misc_feature (1)..( 8): Matrix.004 file - promoters50/1450455
caaataaa

SEQ ID NO: 69341 - DNA, 8 bp, Unknown
  misc_feature (1)..( 8): Matrix.004 file - promoters50/1450459
ttatatat

SEQ ID NO: 69342 - DNA, 19 bp, Unknown
  misc_feature (1)..( 19): Matrix.004 file - promoters50/1450473
gaagtcgtattatgtatta

SEQ ID NO: 69343 - DNA, 9 bp, Unknown
  misc_feature (1)..( 9): Matrix.004 file - promoters50/1450473
taaaaaaaa

SEQ ID NO: 69344 - DNA, 8 bp, Unknown
  misc_feature (1)..( 8): Matrix.004 file - promoters50/1450473
gaataaca

SEQ ID NO: 69345 - DNA, 7 bp, Unknown
  misc_feature (1)..( 7): Matrix.004 file - promoters50/1450473
agaagaa

SEQ ID NO: 69346 - DNA, 8 bp, Unknown
  misc_feature (1)..( 8): Matrix.004 file - promoters50/1450473
agaatttg

SEQ ID NO: 69347 - DNA, 8 bp, Unknown
  misc_feature (1)..( 8): Matrix.004 file - promoters50/1450477
ggagaagg

SEQ ID NO: 69348 - DNA, 9 bp, Unknown
  misc_feature (1)..( 9): Matrix.004 file - promoters50/1450477
taattgaag

SEQ ID NO: 69349 - DNA, 9 bp, Unknown
  misc_feature (1)..( 9): Matrix.004 file - promoters50/1450477
aagcactta

SEQ ID NO: 69350 - DNA, 9 bp, Unknown
  misc_feature (1)..( 9): Matrix.004 file - promoters50/1450526
atctctatt

SEQ ID NO: 69351 - DNA, 8 bp, Unknown
  misc_feature (1)..( 8): Matrix.004 file - promoters50/1450537
ctaaaaat

SEQ ID NO: 69352 - DNA, 7 bp, Unknown
  misc_feature (1)..( 7): Matrix.004 file - promoters50/1450537
catttga

SEQ ID NO: 69353 - DNA, 7 bp, Unknown
  misc_feature (1)..( 7): Matrix.004 file - promoters50/1450537
atttttt

SEQ ID NO: 69354 - DNA, 9 bp, Unknown
  misc_feature (1)..( 9): Matrix.004 file - promoters50/1450537
aaaaaatat

SEQ ID NO: 69355 - DNA, 8 bp, Unknown
  misc_feature (1)..( 8): Matrix.004 file - promoters50/1450537
aaaaaaca

SEQ ID NO: 69356 - DNA, 7 bp, Unknown
  misc_feature (1)..( 7): Matrix.004 file - promoters50/1450549
ggaaaaa

SEQ ID NO: 69357 - DNA, 9 bp, Unknown
  misc_feature (1)..( 9): Matrix.004 file - promoters50/1450549
aacataatt

SEQ ID NO: 69358 - DNA, 8 bp, Unknown
  misc_feature (1)..( 8): Matrix.004 file - promoters50/1450549
aaaactaa

SEQ ID NO: 69359 - DNA, 8 bp, Unknown
  misc_feature (1)..( 8): Matrix.004 file - promoters50/1450549
aacaaaat

SEQ ID NO: 69360 - DNA, 7 bp, Unknown
  misc_feature (1)..( 7): Matrix.004 file - promoters50/1450549
taaataa

SEQ ID NO: 69361 - DNA, 7 bp, Unknown
  misc_feature (1)..( 7): Matrix.004 file - promoters50/1450549
taaagag

SEQ ID NO: 69362 - DNA, 8 bp, Unknown
  misc_feature (1)..( 8): Matrix.004 file - promoters50/1450593
aaaattat

SEQ ID NO: 69363 - DNA, 10 bp, Unknown
  misc_feature (1)..( 10): Matrix.004 file - promoters50/1450593
tcataatatt

SEQ ID NO: 69364 - DNA, 11 bp, Unknown
  misc_feature (1)..( 11): Matrix.004 file - promoters50/1450593
aatactattca

SEQ ID NO: 69365 - DNA, 17 bp, Unknown
  misc_feature (1)..( 17): Matrix.004 file - promoters50/1450593
tcctcacttttcaattc

SEQ ID NO: 69366 - DNA, 6 bp, Unknown
  misc_feature (1)..( 6): Matrix.004 file - promoters50/1450610
taatat

SEQ ID NO: 69367 - DNA, 12 bp, Unknown
  misc_feature (1)..( 12): Matrix.004 file - promoters50/1450637
aagaatctgata

SEQ ID NO: 69368 - DNA, 6 bp, Unknown
  misc_feature (1)..( 6): Matrix.004 file - promoters50/1450662
taattc

SEQ ID NO: 69369 - DNA, 8 bp, Unknown
  misc_feature (1)..( 8): Matrix.004 file - promoters50/1450662
attgtttt

SEQ ID NO: 69370 - DNA, 7 bp, Unknown
  misc_feature (1)..( 7): Matrix.004 file - promoters50/1450662
ggttttg

SEQ ID NO: 69371 - DNA, 8 bp, Unknown
  misc_feature (1)..( 8): Matrix.004 file - promoters50/1450662
gaatattt

SEQ ID NO: 69372 - DNA, 7 bp, Unknown
  misc_feature (1)..( 7): Matrix.004 file - promoters50/1450662
ttaaaat

SEQ ID NO: 69373 - DNA, 7 bp, Unknown
  misc_feature (1)..( 7): Matrix.004 file - promoters50/1450662
gtgtttc

SEQ ID NO: 69374 - DNA, 11 bp, Unknown
  misc_feature (1)..( 11): Matrix.004 file - promoters50/1450678
acaattaagcc

SEQ ID NO: 69375 - DNA, 10 bp, Unknown
  misc_feature (1)..( 10): Matrix.004 file - promoters50/1450678
actttaataa

SEQ ID NO: 69376 - DNA, 11 bp, Unknown
  misc_feature (1)..( 11): Matrix.004 file - promoters50/1450678
aaatatttcaa

SEQ ID NO: 69377 - DNA, 10 bp, Unknown
  misc_feature (1)..( 10): Matrix.004 file - promoters50/1450682
tacaaaaaca

SEQ ID NO: 69378 - DNA, 8 bp, Unknown
  misc_feature (1)..( 8): Matrix.004 file - promoters50/1450770
atatatac

SEQ ID NO: 69379 - DNA, 11 bp, Unknown
  misc_feature (1)..( 11): Matrix.004 file - promoters50/1450770
ttttaaaatta

SEQ ID NO: 69380 - DNA, 9 bp, Unknown
  misc_feature (1)..( 9): Matrix.004 file - promoters50/1450785
tataaaagc

SEQ ID NO: 69381 - DNA, 7 bp, Unknown
  misc_feature (1)..( 7): Matrix.004 file - promoters50/1450785
aaaccaa

SEQ ID NO: 69382 - DNA, 8 bp, Unknown
  misc_feature (1)..( 8): Matrix.004 file - promoters50/1450785
cttcacca

SEQ ID NO: 69383 - DNA, 9 bp, Unknown
  misc_feature (1)..( 9): Matrix.004 file - promoters50/1450785
gattaagct

SEQ ID NO: 69384 - DNA, 8 bp, Unknown
  misc_feature (1)..( 8): Matrix.004 file - promoters50/1450785
tttctttt

SEQ ID NO: 69385 - DNA, 10 bp, Unknown
  misc_feature (1)..( 10): Matrix.004 file - promoters50/1450785
tctaaaaata

SEQ ID NO: 69386 - DNA, 8 bp, Unknown
  misc_feature (1)..( 8): Matrix.004 file - promoters50/1450785
atgtaaaa

SEQ ID NO: 69387 - DNA, 9 bp, Unknown
  misc_feature (1)..( 9): Matrix.004 file - promoters50/1450785
ttaatcaat

SEQ ID NO: 69388 - DNA, 16 bp, Unknown
  misc_feature (1)..( 16): Matrix.004 file - promoters50/1450792
caaaaactcaagattt

SEQ ID NO: 69389 - DNA, 11 bp, Unknown
  misc_feature (1)..( 11): Matrix.004 file - promoters50/1450834
aaatcaaaaaa

SEQ ID NO: 69390 - DNA, 8 bp, Unknown
  misc_feature (1)..( 8): Matrix.004 file - promoters50/1450834
taagtaaa

SEQ ID NO: 69391 - DNA, 8 bp, Unknown
  misc_feature (1)..( 8): Matrix.004 file - promoters50/1450834
ttttatta

SEQ ID NO: 69392 - DNA, 10 bp, Unknown
  misc_feature (1)..( 10): Matrix.004 file - promoters50/1450834
agaactttct

SEQ ID NO: 69393 - DNA, 7 bp, Unknown
  misc_feature (1)..( 7): Matrix.004 file - promoters50/1455879
tttgttt

SEQ ID NO: 69394 - DNA, 8 bp, Unknown
  misc_feature (1)..( 8): Matrix.004 file - promoters50/1455908
gcatatat

SEQ ID NO: 69395 - DNA, 10 bp, Unknown
  misc_feature (1)..( 10): Matrix.004 file - promoters50/1455908
tttaataatg

SEQ ID NO: 69396 - DNA, 11 bp, Unknown
  misc_feature (1)..( 11): Matrix.004 file - promoters50/1455908
tgtatttgtac

SEQ ID NO: 69397 - DNA, 10 bp, Unknown
  misc_feature (1)..( 10): Matrix.004 file - promoters50/1455912
tagatttaaa

SEQ ID NO: 69398 - DNA, 7 bp, Unknown
  misc_feature (1)..( 7): Matrix.004 file - promoters50/1455912
aaacaat

SEQ ID NO: 69399 - DNA, 7 bp, Unknown
  misc_feature (1)..( 7): Matrix.004 file - promoters50/1455916
ttggtta

SEQ ID NO: 69400 - DNA, 8 bp, Unknown
  misc_feature (1)..( 8): Matrix.004 file - promoters50/1455916
catgtttt

SEQ ID NO: 69401 - DNA, 11 bp, Unknown
  misc_feature (1)..( 11): Matrix.004 file - promoters50/1455916
tttatttataa

SEQ ID NO: 69402 - DNA, 8 bp, Unknown
  misc_feature (1)..( 8): Matrix.004 file - promoters50/1455928
ctcttaaa

SEQ ID NO: 69403 - DNA, 8 bp, Unknown
  misc_feature (1)..( 8): Matrix.004 file - promoters50/1455928
atgtattt

SEQ ID NO: 69404 - DNA, 13 bp, Unknown
  misc_feature (1)..( 13): Matrix.004 file - promoters50/1455932
aattaacaaaaaa

SEQ ID NO: 69405 - DNA, 9 bp, Unknown
  misc_feature (1)..( 9): Matrix.004 file - promoters50/1455932
taataaagt

SEQ ID NO: 69406 - DNA, 8 bp, Unknown
  misc_feature (1)..( 8): Matrix.004 file - promoters50/1455932
atttgtat

SEQ ID NO: 69407 - DNA, 9 bp, Unknown
  misc_feature (1)..( 9): Matrix.004 file - promoters50/1455932
atgtttttg

SEQ ID NO: 69408 - DNA, 8 bp, Unknown
  misc_feature (1)..( 8): Matrix.004 file - promoters50/1455932
aaaaacaa

SEQ ID NO: 69409 - DNA, 11 bp, Unknown
  misc_feature (1)..( 11): Matrix.004 file - promoters50/1455932
ccttttgtttt

SEQ ID NO: 69410 - DNA, 11 bp, Unknown
  misc_feature (1)..( 11): Matrix.004 file - promoters50/1455936
aagcctttctt

SEQ ID NO: 69411 - DNA, 7 bp, Unknown
  misc_feature (1)..( 7): Matrix.004 file - promoters50/1455936
ttagtta

SEQ ID NO: 69412 - DNA, 9 bp, Unknown
  misc_feature (1)..( 9): Matrix.004 file - promoters50/1455936
aaaagctaa

SEQ ID NO: 69413 - DNA, 7 bp, Unknown
  misc_feature (1)..( 7): Matrix.004 file - promoters50/1455936
aatttag

SEQ ID NO: 69414 - DNA, 8 bp, Unknown
  misc_feature (1)..( 8): Matrix.004 file - promoters50/1455936
aaaaataa

SEQ ID NO: 69415 - DNA, 8 bp, Unknown
  misc_feature (1)..( 8): Matrix.004 file - promoters50/1455936
aatataaa

SEQ ID NO: 69416 - DNA, 8 bp, Unknown
  misc_feature (1)..( 8): Matrix.004 file - promoters50/1455944
atgaaaag

SEQ ID NO: 69417 - DNA, 11 bp, Unknown
  misc_feature (1)..( 11): Matrix.004 file - promoters50/1455944
aaataaaatgt

SEQ ID NO: 69418 - DNA, 12 bp, Unknown
  misc_feature (1)..( 12): Matrix.004 file - promoters50/1455944
aaaataaagcaa

SEQ ID NO: 69419 - DNA, 11 bp, Unknown
  misc_feature (1)..( 11): Matrix.004 file - promoters50/1455948
ctatataaaca

SEQ ID NO: 69420 - DNA, 9 bp, Unknown
  misc_feature (1)..( 9): Matrix.004 file - promoters50/1455948
tttcttgaa

SEQ ID NO: 69421 - DNA, 9 bp, Unknown
  misc_feature (1)..( 9): Matrix.004 file - promoters50/1455948
caaaaacaa

SEQ ID NO: 69422 - DNA, 7 bp, Unknown
  misc_feature (1)..( 7): Matrix.004 file - promoters50/1455956
tcaaaaa

SEQ ID NO: 69423 - DNA, 10 bp, Unknown
  misc_feature (1)..( 10): Matrix.004 file - promoters50/1455972
taaatttttt

SEQ ID NO: 69424 - DNA, 10 bp, Unknown
  misc_feature (1)..( 10): Matrix.004 file - promoters50/1455972
tacaaacata

SEQ ID NO: 69425 - DNA, 16 bp, Unknown
  misc_feature (1)..( 16): Matrix.004 file - promoters50/1456000
aagaatagcaaaatca

SEQ ID NO: 69426 - DNA, 12 bp, Unknown
  misc_feature (1)..( 12): Matrix.004 file - promoters50/1456000
aacaaaaacaaa

SEQ ID NO: 69427 - DNA, 10 bp, Unknown
  misc_feature (1)..( 10): Matrix.004 file - promoters50/1456000
aaaaaaaaaa

SEQ ID NO: 69428 - DNA, 10 bp, Unknown
  misc_feature (1)..( 10): Matrix.004 file - promoters50/1456000
gagcaacaga

SEQ ID NO: 69429 - DNA, 11 bp, Unknown
  misc_feature (1)..( 11): Matrix.004 file - promoters50/1456000
agaaaaaaatc

SEQ ID NO: 69430 - DNA, 13 bp, Unknown
  misc_feature (1)..( 13): Matrix.004 file - promoters50/1456000
caaaaaaaacaaa

SEQ ID NO: 69431 - DNA, 8 bp, Unknown
  misc_feature (1)..( 8): Matrix.004 file - promoters50/1456000
taaaaaaa

SEQ ID NO: 69432 - DNA, 8 bp, Unknown
  misc_feature (1)..( 8): Matrix.004 file - promoters50/1456000
caacagaa

SEQ ID NO: 69433 - DNA, 7 bp, Unknown
  misc_feature (1)..( 7): Matrix.004 file - promoters50/1456000
aaaacat

SEQ ID NO: 69434 - DNA, 9 bp, Unknown
  misc_feature (1)..( 9): Matrix.004 file - promoters50/1456064
ccaaaatta

SEQ ID NO: 69435 - DNA, 9 bp, Unknown
  misc_feature (1)..( 9): Matrix.004 file - promoters50/1456064
ttcttaaaa

SEQ ID NO: 69436 - DNA, 8 bp, Unknown
  misc_feature (1)..( 8): Matrix.004 file - promoters50/1456083
gaaccttt

SEQ ID NO: 69437 - DNA, 8 bp, Unknown
  misc_feature (1)..( 8): Matrix.004 file - promoters50/1456128
tatatata

SEQ ID NO: 69438 - DNA, 10 bp, Unknown
  misc_feature (1)..( 10): Matrix.004 file - promoters50/1456128
atttttttct

SEQ ID NO: 69439 - DNA, 9 bp, Unknown
  misc_feature (1)..( 9): Matrix.004 file - promoters50/1456128
tttattaaa

SEQ ID NO: 69440 - DNA, 7 bp, Unknown
  misc_feature (1)..( 7): Matrix.004 file - promoters50/1456128
agaaaaa

SEQ ID NO: 69441 - DNA, 8 bp, Unknown
  misc_feature (1)..( 8): Matrix.004 file - promoters50/1456131
gaaaaaaa

SEQ ID NO: 69442 - DNA, 11 bp, Unknown
  misc_feature (1)..( 11): Matrix.004 file - promoters50/1456131
tttcatcaata

SEQ ID NO: 69443 - DNA, 14 bp, Unknown
  misc_feature (1)..( 14): Matrix.004 file - promoters50/1456228
caaaaacaatgatc

SEQ ID NO: 69444 - DNA, 10 bp, Unknown
  misc_feature (1)..( 10): Matrix.004 file - promoters50/1456228
aaagaaaacc

SEQ ID NO: 69445 - DNA, 8 bp, Unknown
  misc_feature (1)..( 8): Matrix.004 file - promoters50/1456228
tatttaaa

SEQ ID NO: 69446 - DNA, 10 bp, Unknown
  misc_feature (1)..( 10): Matrix.004 file - promoters50/1456239
aaatataata

SEQ ID NO: 69447 - DNA, 8 bp, Unknown
  misc_feature (1)..( 8): Matrix.004 file - promoters50/1456622
tacacaaa

SEQ ID NO: 69448 - DNA, 8 bp, Unknown
  misc_feature (1)..( 8): Matrix.004 file - promoters50/1456622
aaatattt

SEQ ID NO: 69449 - DNA, 10 bp, Unknown
  misc_feature (1)..( 10): Matrix.004 file - promoters50/1458991
tataattatt

SEQ ID NO: 69450 - DNA, 9 bp, Unknown
  misc_feature (1)..( 9): Matrix.004 file - promoters50/1459039
gaagttttt

SEQ ID NO: 69451 - DNA, 8 bp, Unknown
  misc_feature (1)..( 8): Matrix.004 file - promoters50/1459199
aatataaa

SEQ ID NO: 69452 - DNA, 13 bp, Unknown
  misc_feature (1)..( 13): Matrix.004 file - promoters50/1459199
taatttatttgtg

SEQ ID NO: 69453 - DNA, 11 bp, Unknown
  misc_feature (1)..( 11): Matrix.004 file - promoters50/1459223
attagattttc

SEQ ID NO: 69454 - DNA, 11 bp, Unknown
  misc_feature (1)..( 11): Matrix.004 file - promoters50/1459223
tttttaaattt

SEQ ID NO: 69455 - DNA, 16 bp, Unknown
  misc_feature (1)..( 16): Matrix.004 file - promoters50/1460386
tatattcaaataaaaa

SEQ ID NO: 69456 - DNA, 9 bp, Unknown
  misc_feature (1)..( 9): Matrix.004 file - promoters50/1461720
gaaaaaatt

SEQ ID NO: 69457 - DNA, 7 bp, Unknown
  misc_feature (1)..( 7): Matrix.004 file - promoters50/1461720
aaatata

SEQ ID NO: 69458 - DNA, 10 bp, Unknown
  misc_feature (1)..( 10): Matrix.004 file - promoters50/1461720
atttatttga

SEQ ID NO: 69459 - DNA, 10 bp, Unknown
  misc_feature (1)..( 10): Matrix.004 file - promoters50/1461756
attagtaatt

SEQ ID NO: 69460 - DNA, 7 bp, Unknown
  misc_feature (1)..( 7): Matrix.004 file - promoters50/1461768
agaagaa

SEQ ID NO: 69461 - DNA, 11 bp, Unknown
  misc_feature (1)..( 11): Matrix.004 file - promoters50/1461768
ttttcaagaag

SEQ ID NO: 69462 - DNA, 8 bp, Unknown
  misc_feature (1)..( 8): Matrix.004 file - promoters50/1461768
tctattat

SEQ ID NO: 69463 - DNA, 12 bp, Unknown
  misc_feature (1)..( 12): Matrix.004 file - promoters50/1461768
atttgagtgtaa

SEQ ID NO: 69464 - DNA, 14 bp, Unknown
  misc_feature (1)..( 14): Matrix.004 file - promoters50/1461768
acatgaaactttat

SEQ ID NO: 69465 - DNA, 11 bp, Unknown
  misc_feature (1)..( 11): Matrix.004 file - promoters50/1461776
attattttaat

SEQ ID NO: 69466 - DNA, 12 bp, Unknown
  misc_feature (1)..( 12): Matrix.004 file - promoters50/1461776
accttggttttt

SEQ ID NO: 69467 - DNA, 11 bp, Unknown
  misc_feature (1)..( 11): Matrix.004 file - promoters50/1461776
aatattttgtt

SEQ ID NO: 69468 - DNA, 9 bp, Unknown
  misc_feature (1)..( 9): Matrix.004 file - promoters50/1461780
aaataattt

SEQ ID NO: 69469 - DNA, 11 bp, Unknown
  misc_feature (1)..( 11): Matrix.004 file - promoters50/1461784
tttactcaatt

SEQ ID NO: 69470 - DNA, 8 bp, Unknown
  misc_feature (1)..( 8): Matrix.004 file - promoters50/1461784
tattaaat

SEQ ID NO: 69471 - DNA, 12 bp, Unknown
  misc_feature (1)..( 12): Matrix.004 file - promoters50/1461784
tttaaaataata

SEQ ID NO: 69472 - DNA, 11 bp, Unknown
  misc_feature (1)..( 11): Matrix.004 file - promoters50/1461784
ttttaatatat

SEQ ID NO: 69473 - DNA, 12 bp, Unknown
  misc_feature (1)..( 12): Matrix.004 file - promoters50/1461784
ttataaaatatt

SEQ ID NO: 69474 - DNA, 11 bp, Unknown
  misc_feature (1)..( 11): Matrix.004 file - promoters50/1461784
ttttaaaatat

SEQ ID NO: 69475 - DNA, 7 bp, Unknown
  misc_feature (1)..( 7): Matrix.004 file - promoters50/1461784
aaaattt

SEQ ID NO: 69476 - DNA, 9 bp, Unknown
  misc_feature (1)..( 9): Matrix.004 file - promoters50/1461784
attttttaa

SEQ ID NO: 69477 - DNA, 17 bp, Unknown
  misc_feature (1)..( 17): Matrix.004 file - promoters50/1461791
gcacaaataataaaaca

SEQ ID NO: 69478 - DNA, 13 bp, Unknown
  misc_feature (1)..( 13): Matrix.004 file - promoters50/1461791
atctttgaaacaa

SEQ ID NO: 69479 - DNA, 9 bp, Unknown
  misc_feature (1)..( 9): Matrix.004 file - promoters50/1461791
tctatatat

SEQ ID NO: 69480 - DNA, 9 bp, Unknown
  misc_feature (1)..( 9): Matrix.004 file - promoters50/1461791
aatataaat

SEQ ID NO: 69481 - DNA, 12 bp, Unknown
  misc_feature (1)..( 12): Matrix.004 file - promoters50/1461791
tttgttttatca

SEQ ID NO: 69482 - DNA, 8 bp, Unknown
  misc_feature (1)..( 8): Matrix.004 file - promoters50/1461803
acaaaaac

SEQ ID NO: 69483 - DNA, 10 bp, Unknown
  misc_feature (1)..( 10): Matrix.004 file - promoters50/1461803
aataatttta

SEQ ID NO: 69484 - DNA, 11 bp, Unknown
  misc_feature (1)..( 11): Matrix.004 file - promoters50/1461837
cctaattttaa

SEQ ID NO: 69485 - DNA, 8 bp, Unknown
  misc_feature (1)..( 8): Matrix.004 file - promoters50/1461837
tggattca

SEQ ID NO: 69486 - DNA, 9 bp, Unknown
  misc_feature (1)..( 9): Matrix.004 file - promoters50/1461839
ttttgttat

SEQ ID NO: 69487 - DNA, 10 bp, Unknown
  misc_feature (1)..( 10): Matrix.004 file - promoters50/1461839
gaaaaagaaa

SEQ ID NO: 69488 - DNA, 12 bp, Unknown
  misc_feature (1)..( 12): Matrix.004 file - promoters50/1461839
aaaagaaaaaaa

SEQ ID NO: 69489 - DNA, 15 bp, Unknown
  misc_feature (1)..( 15): Matrix.004 file - promoters50/1461839
aaagaaaagaaagaa

SEQ ID NO: 69490 - DNA, 12 bp, Unknown
  misc_feature (1)..( 12): Matrix.004 file - promoters50/1461839
aaaagaaaagta

SEQ ID NO: 69491 - DNA, 19 bp, Unknown
  misc_feature (1)..( 19): Matrix.004 file - promoters50/1461848
aaaaaactaattttaaatt

SEQ ID NO: 69492 - DNA, 8 bp, Unknown
  misc_feature (1)..( 8): Matrix.004 file - promoters50/1461857
ctgaaagt

SEQ ID NO: 69493 - DNA, 11 bp, Unknown
  misc_feature (1)..( 11): Matrix.004 file - promoters50/1461857
atttacttaat

SEQ ID NO: 69494 - DNA, 10 bp, Unknown
  misc_feature (1)..( 10): Matrix.004 file - promoters50/1465855
ttttatccaa

SEQ ID NO: 69495 - DNA, 14 bp, Unknown
  misc_feature (1)..( 14): Matrix.004 file - promoters50/1465855
aaggttaacatctt

SEQ ID NO: 69496 - DNA, 8 bp, Unknown
  misc_feature (1)..( 8): Matrix.004 file - promoters50/1465863
aatattta

SEQ ID NO: 69497 - DNA, 7 bp, Unknown
  misc_feature (1)..( 7): Matrix.004 file - promoters50/1465863
tcgcttt

SEQ ID NO: 69498 - DNA, 9 bp, Unknown
  misc_feature (1)..( 9): Matrix.004 file - promoters50/1465863
ttcttagct

SEQ ID NO: 69499 - DNA, 9 bp, Unknown
  misc_feature (1)..( 9): Matrix.004 file - promoters50/1465863
agaaagcaa

SEQ ID NO: 69500 - DNA, 8 bp, Unknown
  misc_feature (1)..( 8): Matrix.004 file - promoters50/1465863
gaaagatt

SEQ ID NO: 69501 - DNA, 8 bp, Unknown
  misc_feature (1)..( 8): Matrix.004 file - promoters50/1465863
tccaaagg

SEQ ID NO: 69502 - DNA, 9 bp, Unknown
  misc_feature (1)..( 9): Matrix.004 file - promoters50/1465863
ctagggttt

SEQ ID NO: 69503 - DNA, 8 bp, Unknown
  misc_feature (1)..( 8): Matrix.004 file - promoters50/1465863
agtttaat

SEQ ID NO: 69504 - DNA, 8 bp, Unknown
  misc_feature (1)..( 8): Matrix.004 file - promoters50/1470567
atattttt

SEQ ID NO: 69505 - DNA, 8 bp, Unknown
  misc_feature (1)..( 8): Matrix.004 file - promoters50/1470567
ctctctta

SEQ ID NO: 69506 - DNA, 17 bp, Unknown
  misc_feature (1)..( 17): Matrix.004 file - promoters50/1470567
tgtaaattttcatttgg

SEQ ID NO: 69507 - DNA, 12 bp, Unknown
  misc_feature (1)..( 12): Matrix.004 file - promoters50/1470582
tttaatcttgta

SEQ ID NO: 69508 - DNA, 13 bp, Unknown
  misc_feature (1)..( 13): Matrix.004 file - promoters50/1470582
ttacacttcttaa

SEQ ID NO: 69509 - DNA, 11 bp, Unknown
  misc_feature (1)..( 11): Matrix.004 file - promoters50/1470903
attcttaatct

SEQ ID NO: 69510 - DNA, 8 bp, Unknown
  misc_feature (1)..( 8): Matrix.004 file - promoters50/1470903
gaaaagaa

SEQ ID NO: 69511 - DNA, 14 bp, Unknown
  misc_feature (1)..( 14): Matrix.004 file - promoters50/1470993
agagagagagagag

SEQ ID NO: 69512 - DNA, 9 bp, Unknown
  misc_feature (1)..( 9): Matrix.004 file - promoters50/1470993
tttgaattt

SEQ ID NO: 69513 - DNA, 9 bp, Unknown
  misc_feature (1)..( 9): Matrix.004 file - promoters50/1471001
tgatgaatg

SEQ ID NO: 69514 - DNA, 8 bp, Unknown
  misc_feature (1)..( 8): Matrix.004 file - promoters50/1471001
atataatt

SEQ ID NO: 69515 - DNA, 7 bp, Unknown
  misc_feature (1)..( 7): Matrix.004 file - promoters50/1471001
ttataaa

SEQ ID NO: 69516 - DNA, 13 bp, Unknown
  misc_feature (1)..( 13): Matrix.004 file - promoters50/1471009
attatcaaattat

SEQ ID NO: 69517 - DNA, 9 bp, Unknown
  misc_feature (1)..( 9): Matrix.004 file - promoters50/1471009
atttaataa

SEQ ID NO: 69518 - DNA, 6 bp, Unknown
  misc_feature (1)..( 6): Matrix.004 file - promoters50/1471009
ataaat

SEQ ID NO: 69519 - DNA, 10 bp, Unknown
  misc_feature (1)..( 10): Matrix.004 file - promoters50/1471009
agaaaatatt

SEQ ID NO: 69520 - DNA, 11 bp, Unknown
  misc_feature (1)..( 11): Matrix.004 file - promoters50/1471009
tcctataaata

SEQ ID NO: 69521 - DNA, 9 bp, Unknown
  misc_feature (1)..( 9): Matrix.004 file - promoters50/1471009
aaaagaatt

SEQ ID NO: 69522 - DNA, 7 bp, Unknown
  misc_feature (1)..( 7): Matrix.004 file - promoters50/1471041
ataaata

SEQ ID NO: 69523 - DNA, 12 bp, Unknown
  misc_feature (1)..( 12): Matrix.004 file - promoters50/1471041
agaattaaatta

SEQ ID NO: 69524 - DNA, 10 bp, Unknown
  misc_feature (1)..( 10): Matrix.004 file - promoters50/1471073
tatttgattt

SEQ ID NO: 69525 - DNA, 8 bp, Unknown
  misc_feature (1)..( 8): Matrix.004 file - promoters50/1471073
aaaaaata

SEQ ID NO: 69526 - DNA, 7 bp, Unknown
  misc_feature (1)..( 7): Matrix.004 file - promoters50/1471073
aataaaa

SEQ ID NO: 69527 - DNA, 8 bp, Unknown
  misc_feature (1)..( 8): Matrix.004 file - promoters50/1471073
ataaaata

SEQ ID NO: 69528 - DNA, 10 bp, Unknown
  misc_feature (1)..( 10): Matrix.004 file - promoters50/1471073
ataaaatcat

SEQ ID NO: 69529 - DNA, 10 bp, Unknown
  misc_feature (1)..( 10): Matrix.004 file - promoters50/1471073
aattatttgc

SEQ ID NO: 69530 - DNA, 9 bp, Unknown
  misc_feature (1)..( 9): Matrix.004 file - promoters50/1471106
attaaaaat

SEQ ID NO: 69531 - DNA, 8 bp, Unknown
  misc_feature (1)..( 8): Matrix.004 file - promoters50/1471114
attattat

SEQ ID NO: 69532 - DNA, 13 bp, Unknown
  misc_feature (1)..( 13): Matrix.004 file - promoters50/1471114
gtcataagtattg

SEQ ID NO: 69533 - DNA, 11 bp, Unknown
  misc_feature (1)..( 11): Matrix.004 file - promoters50/1471114
ggttaaatagt

SEQ ID NO: 69534 - DNA, 10 bp, Unknown
  misc_feature (1)..( 10): Matrix.004 file - promoters50/1471140
aaatcaaaca

SEQ ID NO: 69535 - DNA, 10 bp, Unknown
  misc_feature (1)..( 10): Matrix.004 file - promoters50/1471140
ctaaatctaa

SEQ ID NO: 69536 - DNA, 8 bp, Unknown
  misc_feature (1)..( 8): Matrix.004 file - promoters50/1471140
aaaacaaa

SEQ ID NO: 69537 - DNA, 10 bp, Unknown
  misc_feature (1)..( 10): Matrix.004 file - promoters50/1471140
aatttattaa

SEQ ID NO: 69538 - DNA, 10 bp, Unknown
  misc_feature (1)..( 10): Matrix.004 file - promoters50/1471140
attttatttg

SEQ ID NO: 69539 - DNA, 12 bp, Unknown
  misc_feature (1)..( 12): Matrix.004 file - promoters50/1472766
gatctatatttc

SEQ ID NO: 69540 - DNA, 9 bp, Unknown
  misc_feature (1)..( 9): Matrix.004 file - promoters50/1472766
ttgaagaat

SEQ ID NO: 69541 - DNA, 8 bp, Unknown
  misc_feature (1)..( 8): Matrix.004 file - promoters50/1472778
aaaagaag

SEQ ID NO: 69542 - DNA, 11 bp, Unknown
  misc_feature (1)..( 11): Matrix.004 file - promoters50/1472778
ttttattaatt

SEQ ID NO: 69543 - DNA, 9 bp, Unknown
  misc_feature (1)..( 9): Matrix.004 file - promoters50/1472778
tactttaat

SEQ ID NO: 69544 - DNA, 13 bp, Unknown
  misc_feature (1)..( 13): Matrix.004 file - promoters50/1472778
taattttcattta

SEQ ID NO: 69545 - DNA, 12 bp, Unknown
  misc_feature (1)..( 12): Matrix.004 file - promoters50/1472778
gtataaaacgaa

SEQ ID NO: 69546 - DNA, 11 bp, Unknown
  misc_feature (1)..( 11): Matrix.004 file - promoters50/1472778
ttttatgaatt

SEQ ID NO: 69547 - DNA, 9 bp, Unknown
  misc_feature (1)..( 9): Matrix.004 file - promoters50/1472778
atacagtta

SEQ ID NO: 69548 - DNA, 6 bp, Unknown
  misc_feature (1)..( 6): Matrix.004 file - promoters50/1472778
ataaaa

SEQ ID NO: 69549 - DNA, 9 bp, Unknown
  misc_feature (1)..( 9): Matrix.004 file - promoters50/1472778
gatacagtt

SEQ ID NO: 69550 - DNA, 10 bp, Unknown
  misc_feature (1)..( 10): Matrix.004 file - promoters50/1472778
aaaaaaagaa

SEQ ID NO: 69551 - DNA, 16 bp, Unknown
  misc_feature (1)..( 16): Matrix.004 file - promoters50/1472799
ctaacaattatattaa

SEQ ID NO: 69552 - DNA, 8 bp, Unknown
  misc_feature (1)..( 8): Matrix.004 file - promoters50/1472799
atcatatt

SEQ ID NO: 69553 - DNA, 8 bp, Unknown
  misc_feature (1)..( 8): Matrix.004 file - promoters50/1472799
gatttgtt

SEQ ID NO: 69554 - DNA, 12 bp, Unknown
  misc_feature (1)..( 12): Matrix.004 file - promoters50/1472799
agtttgttcaat

SEQ ID NO: 69555 - DNA, 7 bp, Unknown
  misc_feature (1)..( 7): Matrix.004 file - promoters50/1472799
tgtttgt

SEQ ID NO: 69556 - DNA, 6 bp, Unknown
  misc_feature (1)..( 6): Matrix.004 file - promoters50/1472799
tttgtt

SEQ ID NO: 69557 - DNA, 9 bp, Unknown
  misc_feature (1)..( 9): Matrix.004 file - promoters50/1472799
tttgtagtg

SEQ ID NO: 69558 - DNA, 8 bp, Unknown
  misc_feature (1)..( 8): Matrix.004 file - promoters50/1472908
tgatttgt

SEQ ID NO: 69559 - DNA, 8 bp, Unknown
  misc_feature (1)..( 8): Matrix.004 file - promoters50/1472908
aaaaattt

SEQ ID NO: 69560 - DNA, 8 bp, Unknown
  misc_feature (1)..( 8): Matrix.004 file - promoters50/1472908
gaagaaaa

SEQ ID NO: 69561 - DNA, 9 bp, Unknown
  misc_feature (1)..( 9): Matrix.004 file - promoters50/1472908
tttataaac

SEQ ID NO: 69562 - DNA, 11 bp, Unknown
  misc_feature (1)..( 11): Matrix.004 file - promoters50/1472908
aattaattttt

SEQ ID NO: 69563 - DNA, 9 bp, Unknown
  misc_feature (1)..( 9): Matrix.004 file - promoters50/1472908
attttatgt

SEQ ID NO: 69564 - DNA, 8 bp, Unknown
  misc_feature (1)..( 8): Matrix.004 file - promoters50/1472908
cttgtaga

SEQ ID NO: 69565 - DNA, 8 bp, Unknown
  misc_feature (1)..( 8): Matrix.004 file - promoters50/1472908
aatttaat

SEQ ID NO: 69566 - DNA, 10 bp, Unknown
  misc_feature (1)..( 10): Matrix.004 file - promoters50/1472908
ttttatgttt

SEQ ID NO: 69567 - DNA, 10 bp, Unknown
  misc_feature (1)..( 10): Matrix.004 file - promoters50/1472908
tttatgtttt

SEQ ID NO: 69568 - DNA, 8 bp, Unknown
  misc_feature (1)..( 8): Matrix.004 file - promoters50/1473010
taaaaaaa

SEQ ID NO: 69569 - DNA, 13 bp, Unknown
  misc_feature (1)..( 13): Matrix.004 file - promoters50/1473010
acaaaaatttaat

SEQ ID NO: 69570 - DNA, 8 bp, Unknown
  misc_feature (1)..( 8): Matrix.004 file - promoters50/1473010
aataaaaa

SEQ ID NO: 69571 - DNA, 8 bp, Unknown
  misc_feature (1)..( 8): Matrix.004 file - promoters50/1473010
ttattaaa

SEQ ID NO: 69572 - DNA, 8 bp, Unknown
  misc_feature (1)..( 8): Matrix.004 file - promoters50/1473014
attaaatt

SEQ ID NO: 69573 - DNA, 7 bp, Unknown
  misc_feature (1)..( 7): Matrix.004 file - promoters50/1473014
aagtcat

SEQ ID NO: 69574 - DNA, 13 bp, Unknown
  misc_feature (1)..( 13): Matrix.004 file - promoters50/1473014
gcttattcactct

SEQ ID NO: 69575 - DNA, 13 bp, Unknown
  misc_feature (1)..( 13): Matrix.004 file - promoters50/1473014
acccattttctgc

SEQ ID NO: 69576 - DNA, 9 bp, Unknown
  misc_feature (1)..( 9): Matrix.004 file - promoters50/1473014
cataacaaa

SEQ ID NO: 69577 - DNA, 10 bp, Unknown
  misc_feature (1)..( 10): Matrix.004 file - promoters50/1473014
ttaaaaccct

SEQ ID NO: 69578 - DNA, 7 bp, Unknown
  misc_feature (1)..( 7): Matrix.004 file - promoters50/1473050
cattttt

SEQ ID NO: 69579 - DNA, 7 bp, Unknown
  misc_feature (1)..( 7): Matrix.004 file - promoters50/1473050
atttttt

SEQ ID NO: 69580 - DNA, 7 bp, Unknown
  misc_feature (1)..( 7): Matrix.004 file - promoters50/1473050
gatgaaa

SEQ ID NO: 69581 - DNA, 9 bp, Unknown
  misc_feature (1)..( 9): Matrix.004 file - promoters50/1473050
ttaaattat

SEQ ID NO: 69582 - DNA, 8 bp, Unknown
  misc_feature (1)..( 8): Matrix.004 file - promoters50/1473050
aaaaccaa

SEQ ID NO: 69583 - DNA, 8 bp, Unknown
  misc_feature (1)..( 8): Matrix.004 file - promoters50/1481416
aaatcata

SEQ ID NO: 69584 - DNA, 7 bp, Unknown
  misc_feature (1)..( 7): Matrix.004 file - promoters50/1481416
accaaac

SEQ ID NO: 69585 - DNA, 7 bp, Unknown
  misc_feature (1)..( 7): Matrix.004 file - promoters50/1481416
ttaaaat

SEQ ID NO: 69586 - DNA, 12 bp, Unknown
  misc_feature (1)..( 12): Matrix.004 file - promoters50/1481416
aaggaatcaaac

SEQ ID NO: 69587 - DNA, 9 bp, Unknown
  misc_feature (1)..( 9): Matrix.004 file - promoters50/1481416
ctatataaa

SEQ ID NO: 69588 - DNA, 7 bp, Unknown
  misc_feature (1)..( 7): Matrix.004 file - promoters50/1481416
taaaata

SEQ ID NO: 69589 - DNA, 7 bp, Unknown
  misc_feature (1)..( 7): Matrix.004 file - promoters50/1481516
aaaaaat

SEQ ID NO: 69590 - DNA, 9 bp, Unknown
  misc_feature (1)..( 9): Matrix.004 file - promoters50/1481516
gaggaagaa

SEQ ID NO: 69591 - DNA, 7 bp, Unknown
  misc_feature (1)..( 7): Matrix.004 file - promoters50/1481544
tgttgcc

SEQ ID NO: 69592 - DNA, 9 bp, Unknown
  misc_feature (1)..( 9): Matrix.004 file - promoters50/1481568
aaagtgatt

SEQ ID NO: 69593 - DNA, 9 bp, Unknown
  misc_feature (1)..( 9): Matrix.004 file - promoters50/1481568
aagagtaaa

SEQ ID NO: 69594 - DNA, 10 bp, Unknown
  misc_feature (1)..( 10): Matrix.004 file - promoters50/1481572
ggaaatgaaa

SEQ ID NO: 69595 - DNA, 9 bp, Unknown
  misc_feature (1)..( 9): Matrix.004 file - promoters50/1481572
agaatatgt

SEQ ID NO: 69596 - DNA, 8 bp, Unknown
  misc_feature (1)..( 8): Matrix.004 file - promoters50/1481572
tggatatt

SEQ ID NO: 69597 - DNA, 11 bp, Unknown
  misc_feature (1)..( 11): Matrix.004 file - promoters50/1481576
aaacttcatct

SEQ ID NO: 69598 - DNA, 8 bp, Unknown
  misc_feature (1)..( 8): Matrix.004 file - promoters50/1481576
ttttgttt

SEQ ID NO: 69599 - DNA, 9 bp, Unknown
  misc_feature (1)..( 9): Matrix.004 file - promoters50/1481606
atattagta

SEQ ID NO: 69600 - DNA, 12 bp, Unknown
  misc_feature (1)..( 12): Matrix.004 file - promoters50/1481606
aaacataaataa

SEQ ID NO: 69601 - DNA, 9 bp, Unknown
  misc_feature (1)..( 9): Matrix.004 file - promoters50/1481606
taacaactt

SEQ ID NO: 69602 - DNA, 7 bp, Unknown
  misc_feature (1)..( 7): Matrix.004 file - promoters50/1481606
atgttga

SEQ ID NO: 69603 - DNA, 8 bp, Unknown
  misc_feature (1)..( 8): Matrix.004 file - promoters50/1481606
taatattt

SEQ ID NO: 69604 - DNA, 7 bp, Unknown
  misc_feature (1)..( 7): Matrix.004 file - promoters50/1481606
atgttgc

SEQ ID NO: 69605 - DNA, 8 bp, Unknown
  misc_feature (1)..( 8): Matrix.004 file - promoters50/1481658
ttcttttc

SEQ ID NO: 69606 - DNA, 10 bp, Unknown
  misc_feature (1)..( 10): Matrix.004 file - promoters50/1481658
caaaatcaac

SEQ ID NO: 69607 - DNA, 10 bp, Unknown
  misc_feature (1)..( 10): Matrix.004 file - promoters50/1481696
aaaatcatcc

SEQ ID NO: 69608 - DNA, 12 bp, Unknown
  misc_feature (1)..( 12): Matrix.004 file - promoters50/1481696
acatttaaaaac

SEQ ID NO: 69609 - DNA, 9 bp, Unknown
  misc_feature (1)..( 9): Matrix.004 file - promoters50/1481851
aaaaattta

SEQ ID NO: 69610 - DNA, 10 bp, Unknown
  misc_feature (1)..( 10): Matrix.004 file - promoters50/1481930
gtcctttctg

SEQ ID NO: 69611 - DNA, 9 bp, Unknown
  misc_feature (1)..( 9): Matrix.004 file - promoters50/1481930
atacacata

SEQ ID NO: 69612 - DNA, 7 bp, Unknown
  misc_feature (1)..( 7): Matrix.004 file - promoters50/1481930
aagtgtg

SEQ ID NO: 69613 - DNA, 7 bp, Unknown
  misc_feature (1)..( 7): Matrix.004 file - promoters50/1481961
aatatat

SEQ ID NO: 69614 - DNA, 7 bp, Unknown
  misc_feature (1)..( 7): Matrix.004 file - promoters50/1481961
tcttttt

SEQ ID NO: 69615 - DNA, 8 bp, Unknown
  misc_feature (1)..( 8): Matrix.004 file - promoters50/1481961
atttttta

SEQ ID NO: 69616 - DNA, 9 bp, Unknown
  misc_feature (1)..( 9): Matrix.004 file - promoters50/1482017
attcgtttc

SEQ ID NO: 69617 - DNA, 9 bp, Unknown
  misc_feature (1)..( 9): Matrix.004 file - promoters50/1482017
tttttgttt

SEQ ID NO: 69618 - DNA, 12 bp, Unknown
  misc_feature (1)..( 12): Matrix.004 file - promoters50/1482017
tatttaaataaa

SEQ ID NO: 69619 - DNA, 9 bp, Unknown
  misc_feature (1)..( 9): Matrix.004 file - promoters50/1482017
atttttgta

SEQ ID NO: 69620 - DNA, 11 bp, Unknown
  misc_feature (1)..( 11): Matrix.004 file - promoters50/1482017
caaaataatat

SEQ ID NO: 69621 - DNA, 10 bp, Unknown
  misc_feature (1)..( 10): Matrix.004 file - promoters50/1482017
atttatcaat

SEQ ID NO: 69622 - DNA, 11 bp, Unknown
  misc_feature (1)..( 11): Matrix.004 file - promoters50/1482017
aaatattttta

SEQ ID NO: 69623 - DNA, 9 bp, Unknown
  misc_feature (1)..( 9): Matrix.004 file - promoters50/1482017
aaacagtaa

SEQ ID NO: 69624 - DNA, 7 bp, Unknown
  misc_feature (1)..( 7): Matrix.004 file - promoters50/1482025
gaataaa

SEQ ID NO: 69625 - DNA, 10 bp, Unknown
  misc_feature (1)..( 10): Matrix.004 file - promoters50/1482025
ggtaagaaaa

SEQ ID NO: 69626 - DNA, 8 bp, Unknown
  misc_feature (1)..( 8): Matrix.004 file - promoters50/1482201
aataacta

SEQ ID NO: 69627 - DNA, 9 bp, Unknown
  misc_feature (1)..( 9): Matrix.004 file - promoters50/1482201
agagacagt

SEQ ID NO: 69628 - DNA, 5 bp, Unknown
  misc_feature (1)..( 5): Matrix.004 file - promoters50/1482448
tcaat

SEQ ID NO: 69629 - DNA, 9 bp, Unknown
  misc_feature (1)..( 9): Matrix.004 file - promoters50/1482448
aaatcaaat

SEQ ID NO: 69630 - DNA, 9 bp, Unknown
  misc_feature (1)..( 9): Matrix.004 file - promoters50/1482457
actatataa

SEQ ID NO: 69631 - DNA, 10 bp, Unknown
  misc_feature (1)..( 10): Matrix.004 file - promoters50/1532660
taaaaagttt

SEQ ID NO: 69632 - DNA, 10 bp, Unknown
  misc_feature (1)..( 10): Matrix.004 file - promoters50/1532821
ttaaatttgt

SEQ ID NO: 69633 - DNA, 12 bp, Unknown
  misc_feature (1)..( 12): Matrix.004 file - promoters50/1532821
tactaacatatg

SEQ ID NO: 69634 - DNA, 9 bp, Unknown
  misc_feature (1)..( 9): Matrix.004 file - promoters50/1532821
aaaatattg

SEQ ID NO: 69635 - DNA, 12 bp, Unknown
  misc_feature (1)..( 12): Matrix.004 file - promoters50/1532823
ccaccacttttt

SEQ ID NO: 69636 - DNA, 7 bp, Unknown
  misc_feature (1)..( 7): Matrix.004 file - promoters50/1532925
ttattat

SEQ ID NO: 69637 - DNA, 7 bp, Unknown
  misc_feature (1)..( 7): Matrix.004 file - promoters50/1532937
cgtctga

SEQ ID NO: 69638 - DNA, 11 bp, Unknown
  misc_feature (1)..( 11): Matrix.004 file - promoters50/1532937
tcttttgaatt

SEQ ID NO: 69639 - DNA, 14 bp, Unknown
  misc_feature (1)..( 14): Matrix.004 file - promoters50/1532937
ctttaaaatctaat

SEQ ID NO: 69640 - DNA, 10 bp, Unknown
  misc_feature (1)..( 10): Matrix.004 file - promoters50/1532948
taataaatat

SEQ ID NO: 69641 - DNA, 8 bp, Unknown
  misc_feature (1)..( 8): Matrix.004 file - promoters50/1532948
attccatt

SEQ ID NO: 69642 - DNA, 8 bp, Unknown
  misc_feature (1)..( 8): Matrix.004 file - promoters50/1532948
ttttgtaa

SEQ ID NO: 69643 - DNA, 8 bp, Unknown
  misc_feature (1)..( 8): Matrix.004 file - promoters50/1532948
cccactaa

SEQ ID NO: 69644 - DNA, 7 bp, Unknown
  misc_feature (1)..( 7): Matrix.004 file - promoters50/1532948
ggagaaa

SEQ ID NO: 69645 - DNA, 12 bp, Unknown
  misc_feature (1)..( 12): Matrix.004 file - promoters50/1532948
aaaagaaattaa

SEQ ID NO: 69646 - DNA, 12 bp, Unknown
  misc_feature (1)..( 12): Matrix.004 file - promoters50/1532948
ttgagacaaaaa

SEQ ID NO: 69647 - DNA, 6 bp, Unknown
  misc_feature (1)..( 6): Matrix.004 file - promoters50/1532948
agtaaa

SEQ ID NO: 69648 - DNA, 12 bp, Unknown
  misc_feature (1)..( 12): Matrix.004 file - promoters50/1532948
ttgaaacaaaaa

SEQ ID NO: 69649 - DNA, 11 bp, Unknown
  misc_feature (1)..( 11): Matrix.004 file - promoters50/1532975
ggaaaagaaat

SEQ ID NO: 69650 - DNA, 8 bp, Unknown
  misc_feature (1)..( 8): Matrix.004 file - promoters50/1532975
taacttaa

SEQ ID NO: 69651 - DNA, 10 bp, Unknown
  misc_feature (1)..( 10): Matrix.004 file - promoters50/1532975
tgtaatcggg

SEQ ID NO: 69652 - DNA, 9 bp, Unknown
  misc_feature (1)..( 9): Matrix.004 file - promoters50/1533080
tcggtgttg

SEQ ID NO: 69653 - DNA, 8 bp, Unknown
  misc_feature (1)..( 8): Matrix.004 file - promoters50/1533080
atattata

SEQ ID NO: 69654 - DNA, 9 bp, Unknown
  misc_feature (1)..( 9): Matrix.004 file - promoters50/1533080
gttatcaaa

SEQ ID NO: 69655 - DNA, 8 bp, Unknown
  misc_feature (1)..( 8): Matrix.004 file - promoters50/1533080
ttacatat

SEQ ID NO: 69656 - DNA, 8 bp, Unknown
  misc_feature (1)..( 8): Matrix.004 file - promoters50/1533080
tattaaaa

SEQ ID NO: 69657 - DNA, 9 bp, Unknown
  misc_feature (1)..( 9): Matrix.004 file - promoters50/1533159
tttatgaaa

SEQ ID NO: 69658 - DNA, 8 bp, Unknown
  misc_feature (1)..( 8): Matrix.004 file - promoters50/1533159
atatttaa

SEQ ID NO: 69659 - DNA, 12 bp, Unknown
  misc_feature (1)..( 12): Matrix.004 file - promoters50/1533159
taattttaaata

SEQ ID NO: 69660 - DNA, 10 bp, Unknown
  misc_feature (1)..( 10): Matrix.004 file - promoters50/1533159
agaataatat

SEQ ID NO: 69661 - DNA, 10 bp, Unknown
  misc_feature (1)..( 10): Matrix.004 file - promoters50/1533159
tctaatttct

SEQ ID NO: 69662 - DNA, 10 bp, Unknown
  misc_feature (1)..( 10): Matrix.004 file - promoters50/1533159
attgtaaaaa

SEQ ID NO: 69663 - DNA, 11 bp, Unknown
  misc_feature (1)..( 11): Matrix.004 file - promoters50/1533159
acgaaaatgaa

SEQ ID NO: 69664 - DNA, 9 bp, Unknown
  misc_feature (1)..( 9): Matrix.004 file - promoters50/1533159
atttttaat

SEQ ID NO: 69665 - DNA, 11 bp, Unknown
  misc_feature (1)..( 11): Matrix.004 file - promoters50/1533159
attttataata

SEQ ID NO: 69666 - DNA, 11 bp, Unknown
  misc_feature (1)..( 11): Matrix.004 file - promoters50/1533159
aataataaaga

SEQ ID NO: 69667 - DNA, 11 bp, Unknown
  misc_feature (1)..( 11): Matrix.004 file - promoters50/1533159
aaaaaaaaaat

SEQ ID NO: 69668 - DNA, 12 bp, Unknown
  misc_feature (1)..( 12): Matrix.004 file - promoters50/1533159
attttattaata

SEQ ID NO: 69669 - DNA, 11 bp, Unknown
  misc_feature (1)..( 11): Matrix.004 file - promoters50/1533159
aaaaaaattta

SEQ ID NO: 69670 - DNA, 13 bp, Unknown
  misc_feature (1)..( 13): Matrix.004 file - promoters50/1533201
tttattttttcaa

SEQ ID NO: 69671 - DNA, 8 bp, Unknown
  misc_feature (1)..( 8): Matrix.004 file - promoters50/1533294
cagagaaa

SEQ ID NO: 69672 - DNA, 9 bp, Unknown
  misc_feature (1)..( 9): Matrix.004 file - promoters50/1533294
aaatgaaaa

SEQ ID NO: 69673 - DNA, 9 bp, Unknown
  misc_feature (1)..( 9): Matrix.004 file - promoters50/1533294
tttgatttg

SEQ ID NO: 69674 - DNA, 10 bp, Unknown
  misc_feature (1)..( 10): Matrix.004 file - promoters50/1533294
gcccaaaact

SEQ ID NO: 69675 - DNA, 12 bp, Unknown
  misc_feature (1)..( 12): Matrix.004 file - promoters50/1533294
catttatcttct

SEQ ID NO: 69676 - DNA, 6 bp, Unknown
  misc_feature (1)..( 6): Matrix.004 file - promoters50/1533294
gatttg

SEQ ID NO: 69677 - DNA, 8 bp, Unknown
  misc_feature (1)..( 8): Matrix.004 file - promoters50/1533330
aaatttgt

SEQ ID NO: 69678 - DNA, 12 bp, Unknown
  misc_feature (1)..( 12): Matrix.004 file - promoters50/1533352
tattgaaaacaa

SEQ ID NO: 69679 - DNA, 10 bp, Unknown
  misc_feature (1)..( 10): Matrix.004 file - promoters50/1533352
taaaaaacca

SEQ ID NO: 69680 - DNA, 10 bp, Unknown
  misc_feature (1)..( 10): Matrix.004 file - promoters50/1533352
atttttatat

SEQ ID NO: 69681 - DNA, 9 bp, Unknown
  misc_feature (1)..( 9): Matrix.004 file - promoters50/1533352
aaagaaaaa

SEQ ID NO: 69682 - DNA, 8 bp, Unknown
  misc_feature (1)..( 8): Matrix.004 file - promoters50/1533384
gagaaaga

SEQ ID NO: 69683 - DNA, 7 bp, Unknown
  misc_feature (1)..( 7): Matrix.004 file - promoters50/1533533
catcaaa

SEQ ID NO: 69684 - DNA, 10 bp, Unknown
  misc_feature (1)..( 10): Matrix.004 file - promoters50/1533533
attttagtaa

SEQ ID NO: 69685 - DNA, 10 bp, Unknown
  misc_feature (1)..( 10): Matrix.004 file - promoters50/1533533
taatttttat

SEQ ID NO: 69686 - DNA, 11 bp, Unknown
  misc_feature (1)..( 11): Matrix.004 file - promoters50/1533533
tttatttacaa

SEQ ID NO: 69687 - DNA, 9 bp, Unknown
  misc_feature (1)..( 9): Matrix.004 file - promoters50/1533533
ttattaaaa

SEQ ID NO: 69688 - DNA, 5 bp, Unknown
  misc_feature (1)..( 5): Matrix.004 file - promoters50/1533533
aaaac

SEQ ID NO: 69689 - DNA, 10 bp, Unknown
  misc_feature (1)..( 10): Matrix.004 file - promoters50/1533533
ataaaacaat

SEQ ID NO: 69690 - DNA, 11 bp, Unknown
  misc_feature (1)..( 11): Matrix.004 file - promoters50/1533684
ataataaaaaa

SEQ ID NO: 69691 - DNA, 7 bp, Unknown
  misc_feature (1)..( 7): Matrix.004 file - promoters50/1533684
aaaaaat

SEQ ID NO: 69692 - DNA, 7 bp, Unknown
  misc_feature (1)..( 7): Matrix.004 file - promoters50/1533684
cttatta

SEQ ID NO: 69693 - DNA, 8 bp, Unknown
  misc_feature (1)..( 8): Matrix.004 file - promoters50/1533684
ttttcggt

SEQ ID NO: 69694 - DNA, 11 bp, Unknown
  misc_feature (1)..( 11): Matrix.004 file - promoters50/1533750
ttctttactaa

SEQ ID NO: 69695 - DNA, 13 bp, Unknown
  misc_feature (1)..( 13): Matrix.004 file - promoters50/1533750
cagaagaaaaatt

SEQ ID NO: 69696 - DNA, 12 bp, Unknown
  misc_feature (1)..( 12): Matrix.004 file - promoters50/1533750
caaaacaaaaat

SEQ ID NO: 69697 - DNA, 14 bp, Unknown
  misc_feature (1)..( 14): Matrix.004 file - promoters50/1533750
aagaaataacgaac

SEQ ID NO: 69698 - DNA, 8 bp, Unknown
  misc_feature (1)..( 8): Matrix.004 file - promoters50/1533762
ccaaaaaa

SEQ ID NO: 69699 - DNA, 7 bp, Unknown
  misc_feature (1)..( 7): Matrix.004 file - promoters50/1533762
ggaaaaa

SEQ ID NO: 69700 - DNA, 6 bp, Unknown
  misc_feature (1)..( 6): Matrix.004 file - promoters50/1533878
gaatct

SEQ ID NO: 69701 - DNA, 11 bp, Unknown
  misc_feature (1)..( 11): Matrix.004 file - promoters50/1533878
ttctccttata

SEQ ID NO: 69702 - DNA, 9 bp, Unknown
  misc_feature (1)..( 9): Matrix.004 file - promoters50/1533878
ataatttat

SEQ ID NO: 69703 - DNA, 11 bp, Unknown
  misc_feature (1)..( 11): Matrix.004 file - promoters50/1533882
atacataccca

SEQ ID NO: 69704 - DNA, 8 bp, Unknown
  misc_feature (1)..( 8): Matrix.004 file - promoters50/1533882
gttcaact

SEQ ID NO: 69705 - DNA, 12 bp, Unknown
  misc_feature (1)..( 12): Matrix.004 file - promoters50/1533912
ttaaatccacaa

SEQ ID NO: 69706 - DNA, 11 bp, Unknown
  misc_feature (1)..( 11): Matrix.004 file - promoters50/1533912
ctatataaaca

SEQ ID NO: 69707 - DNA, 8 bp, Unknown
  misc_feature (1)..( 8): Matrix.004 file - promoters50/1533912
tatataaa

SEQ ID NO: 69708 - DNA, 13 bp, Unknown
  misc_feature (1)..( 13): Matrix.004 file - promoters50/1534128
ttttaacagttgt

SEQ ID NO: 69709 - DNA, 13 bp, Unknown
  misc_feature (1)..( 13): Matrix.004 file - promoters50/1534228
attttaaaccttc

SEQ ID NO: 69710 - DNA, 9 bp, Unknown
  misc_feature (1)..( 9): Matrix.004 file - promoters50/1534228
aaaactatt

SEQ ID NO: 69711 - DNA, 7 bp, Unknown
  misc_feature (1)..( 7): Matrix.004 file - promoters50/1534228
taattta

SEQ ID NO: 69712 - DNA, 17 bp, Unknown
  misc_feature (1)..( 17): Matrix.004 file - promoters50/1534228
ctcagtgtatataaatt

SEQ ID NO: 69713 - DNA, 18 bp, Unknown
  misc_feature (1)..( 18): Matrix.004 file - promoters50/1534228
ctctagtctatataaaca

SEQ ID NO: 69714 - DNA, 7 bp, Unknown
  misc_feature (1)..( 7): Matrix.004 file - promoters50/1534269
taatttg

SEQ ID NO: 69715 - DNA, 8 bp, Unknown
  misc_feature (1)..( 8): Matrix.004 file - promoters50/1534269
tatcttct

SEQ ID NO: 69716 - DNA, 10 bp, Unknown
  misc_feature (1)..( 10): Matrix.004 file - promoters50/1534269
agattcttga

SEQ ID NO: 69717 - DNA, 8 bp, Unknown
  misc_feature (1)..( 8): Matrix.004 file - promoters50/1534269
tttcaaat

SEQ ID NO: 69718 - DNA, 11 bp, Unknown
  misc_feature (1)..( 11): Matrix.004 file - promoters50/1534269
ccaaatttttc

SEQ ID NO: 69719 - DNA, 9 bp, Unknown
  misc_feature (1)..( 9): Matrix.004 file - promoters50/1534269
tgaaagaat

SEQ ID NO: 69720 - DNA, 8 bp, Unknown
  misc_feature (1)..( 8): Matrix.004 file - promoters50/1534276
gatgtatt

SEQ ID NO: 69721 - DNA, 10 bp, Unknown
  misc_feature (1)..( 10): Matrix.004 file - promoters50/1534276
atcaaattct

SEQ ID NO: 69722 - DNA, 7 bp, Unknown
  misc_feature (1)..( 7): Matrix.004 file - promoters50/1534276
aagcaac

SEQ ID NO: 69723 - DNA, 8 bp, Unknown
  misc_feature (1)..( 8): Matrix.004 file - promoters50/1534341
aaaataaa

SEQ ID NO: 69724 - DNA, 14 bp, Unknown
  misc_feature (1)..( 14): Matrix.004 file - promoters50/1534341
caaattaaacaaag

SEQ ID NO: 69725 - DNA, 8 bp, Unknown
  misc_feature (1)..( 8): Matrix.004 file - promoters50/1534378
tatataaa

SEQ ID NO: 69726 - DNA, 7 bp, Unknown
  misc_feature (1)..( 7): Matrix.004 file - promoters50/1534390
tgttttc

SEQ ID NO: 69727 - DNA, 9 bp, Unknown
  misc_feature (1)..( 9): Matrix.004 file - promoters50/1534455
cacggaact

SEQ ID NO: 69728 - DNA, 9 bp, Unknown
  misc_feature (1)..( 9): Matrix.004 file - promoters50/1534455
gattttgag

SEQ ID NO: 69729 - DNA, 12 bp, Unknown
  misc_feature (1)..( 12): Matrix.004 file - promoters50/1534455
aatcaaacattt

SEQ ID NO: 69730 - DNA, 8 bp, Unknown
  misc_feature (1)..( 8): Matrix.004 file - promoters50/1534455
tatattat

SEQ ID NO: 69731 - DNA, 8 bp, Unknown
  misc_feature (1)..( 8): Matrix.004 file - promoters50/1534455
ttttttat

SEQ ID NO: 69732 - DNA, 11 bp, Unknown
  misc_feature (1)..( 11): Matrix.004 file - promoters50/1534455
tctttttatga

SEQ ID NO: 69733 - DNA, 9 bp, Unknown
  misc_feature (1)..( 9): Matrix.004 file - promoters50/1534501
tgattattt

SEQ ID NO: 69734 - DNA, 6 bp, Unknown
  misc_feature (1)..( 6): Matrix.004 file - promoters50/1534501
aaaaaa

SEQ ID NO: 69735 - DNA, 11 bp, Unknown
  misc_feature (1)..( 11): Matrix.004 file - promoters50/1534501
aaaattaattg

SEQ ID NO: 69736 - DNA, 9 bp, Unknown
  misc_feature (1)..( 9): Matrix.004 file - promoters50/1534501
aatttattt

SEQ ID NO: 69737 - DNA, 7 bp, Unknown
  misc_feature (1)..( 7): Matrix.004 file - promoters50/1534524
agatcaa

SEQ ID NO: 69738 - DNA, 13 bp, Unknown
  misc_feature (1)..( 13): Matrix.004 file - promoters50/1534524
acttatatatact

SEQ ID NO: 69739 - DNA, 14 bp, Unknown
  misc_feature (1)..( 14): Matrix.004 file - promoters50/1534524
gaatatacagtatg

SEQ ID NO: 69740 - DNA, 9 bp, Unknown
  misc_feature (1)..( 9): Matrix.004 file - promoters50/1534570
caaaaacat

SEQ ID NO: 69741 - DNA, 8 bp, Unknown
  misc_feature (1)..( 8): Matrix.004 file - promoters50/1534570
tcaatttt

SEQ ID NO: 69742 - DNA, 7 bp, Unknown
  misc_feature (1)..( 7): Matrix.004 file - promoters50/1534570
atttaac

SEQ ID NO: 69743 - DNA, 9 bp, Unknown
  misc_feature (1)..( 9): Matrix.004 file - promoters50/1534570
aatttattt

SEQ ID NO: 69744 - DNA, 9 bp, Unknown
  misc_feature (1)..( 9): Matrix.004 file - promoters50/1534570
aattcttac

SEQ ID NO: 69745 - DNA, 8 bp, Unknown
  misc_feature (1)..( 8): Matrix.004 file - promoters50/1534570
attttgtt

SEQ ID NO: 69746 - DNA, 11 bp, Unknown
  misc_feature (1)..( 11): Matrix.004 file - promoters50/1534570
attaaaaaaat

SEQ ID NO: 69747 - DNA, 7 bp, Unknown
  misc_feature (1)..( 7): Matrix.004 file - promoters50/1534591
acagaga

SEQ ID NO: 69748 - DNA, 8 bp, Unknown
  misc_feature (1)..( 8): Matrix.004 file - promoters50/1534591
tatataat

SEQ ID NO: 69749 - DNA, 11 bp, Unknown
  misc_feature (1)..( 11): Matrix.004 file - promoters50/1534591
attattaaaca

SEQ ID NO: 69750 - DNA, 8 bp, Unknown
  misc_feature (1)..( 8): Matrix.004 file - promoters50/1534615
aatagaaa

SEQ ID NO: 69751 - DNA, 9 bp, Unknown
  misc_feature (1)..( 9): Matrix.004 file - promoters50/1534629
tcaaagaaa

SEQ ID NO: 69752 - DNA, 10 bp, Unknown
  misc_feature (1)..( 10): Matrix.004 file - promoters50/1534667
ttttatcaac

SEQ ID NO: 69753 - DNA, 6 bp, Unknown
  misc_feature (1)..( 6): Matrix.004 file - promoters50/1534667
aaaaaa

SEQ ID NO: 69754 - DNA, 11 bp, Unknown
  misc_feature (1)..( 11): Matrix.004 file - promoters50/1534671
caataaataat

SEQ ID NO: 69755 - DNA, 12 bp, Unknown
  misc_feature (1)..( 12): Matrix.004 file - promoters50/1534671
tctttagaattt

SEQ ID NO: 69756 - DNA, 10 bp, Unknown
  misc_feature (1)..( 10): Matrix.004 file - promoters50/1534671
caaaatgaga

SEQ ID NO: 69757 - DNA, 14 bp, Unknown
  misc_feature (1)..( 14): Matrix.004 file - promoters50/1535124
ttttctaaattaat

SEQ ID NO: 69758 - DNA, 7 bp, Unknown
  misc_feature (1)..( 7): Matrix.004 file - promoters50/1535124
tcaaaca

SEQ ID NO: 69759 - DNA, 9 bp, Unknown
  misc_feature (1)..( 9): Matrix.004 file - promoters50/1535124
ttttacaat

SEQ ID NO: 69760 - DNA, 6 bp, Unknown
  misc_feature (1)..( 6): Matrix.004 file - promoters50/1535124
tttatt

SEQ ID NO: 69761 - DNA, 9 bp, Unknown
  misc_feature (1)..( 9): Matrix.004 file - promoters50/1535124
tcaaacaaa

SEQ ID NO: 69762 - DNA, 9 bp, Unknown
  misc_feature (1)..( 9): Matrix.004 file - promoters50/1535124
ttttgcatg

SEQ ID NO: 69763 - DNA, 8 bp, Unknown
  misc_feature (1)..( 8): Matrix.004 file - promoters50/1535124
tttatttt

SEQ ID NO: 69764 - DNA, 8 bp, Unknown
  misc_feature (1)..( 8): Matrix.004 file - promoters50/1535124
tattttgg

SEQ ID NO: 69765 - DNA, 9 bp, Unknown
  misc_feature (1)..( 9): Matrix.004 file - promoters50/1535145
tttcattaa

SEQ ID NO: 69766 - DNA, 8 bp, Unknown
  misc_feature (1)..( 8): Matrix.004 file - promoters50/1537300
tagattca

SEQ ID NO: 69767 - DNA, 9 bp, Unknown
  misc_feature (1)..( 9): Matrix.004 file - promoters50/1537314
agaggcttg

SEQ ID NO: 69768 - DNA, 10 bp, Unknown
  misc_feature (1)..( 10): Matrix.004 file - promoters50/1537314
tgaagaaaaa

SEQ ID NO: 69769 - DNA, 14 bp, Unknown
  misc_feature (1)..( 14): Matrix.004 file - promoters50/1537314
aatataaatttttt

SEQ ID NO: 69770 - DNA, 10 bp, Unknown
  misc_feature (1)..( 10): Matrix.004 file - promoters50/1537314
aaaaaaatgt

SEQ ID NO: 69771 - DNA, 7 bp, Unknown
  misc_feature (1)..( 7): Matrix.004 file - promoters50/1537314
ttttaaa

SEQ ID NO: 69772 - DNA, 11 bp, Unknown
  misc_feature (1)..( 11): Matrix.004 file - promoters50/1537336
gaaaaacatgg

SEQ ID NO: 69773 - DNA, 10 bp, Unknown
  misc_feature (1)..( 10): Matrix.004 file - promoters50/1537336
aaatagatct

SEQ ID NO: 69774 - DNA, 9 bp, Unknown
  misc_feature (1)..( 9): Matrix.004 file - promoters50/1537456
taagaattt

SEQ ID NO: 69775 - DNA, 8 bp, Unknown
  misc_feature (1)..( 8): Matrix.004 file - promoters50/1537605
ctttcttt

SEQ ID NO: 69776 - DNA, 7 bp, Unknown
  misc_feature (1)..( 7): Matrix.004 file - promoters50/1537605
attaaaa

SEQ ID NO: 69777 - DNA, 9 bp, Unknown
  misc_feature (1)..( 9): Matrix.004 file - promoters50/1537605
aaattatta

SEQ ID NO: 69778 - DNA, 7 bp, Unknown
  misc_feature (1)..( 7): Matrix.004 file - promoters50/1537605
cttttgt

SEQ ID NO: 69779 - DNA, 12 bp, Unknown
  misc_feature (1)..( 12): Matrix.004 file - promoters50/1537617
cctagtgatcaa

SEQ ID NO: 69780 - DNA, 9 bp, Unknown
  misc_feature (1)..( 9): Matrix.004 file - promoters50/1537617
tgtatgcat

SEQ ID NO: 69781 - DNA, 10 bp, Unknown
  misc_feature (1)..( 10): Matrix.004 file - promoters50/1537617
tcaattttat

SEQ ID NO: 69782 - DNA, 7 bp, Unknown
  misc_feature (1)..( 7): Matrix.004 file - promoters50/1537617
taaaatt

SEQ ID NO: 69783 - DNA, 8 bp, Unknown
  misc_feature (1)..( 8): Matrix.004 file - promoters50/1537617
ttattaat

SEQ ID NO: 69784 - DNA, 7 bp, Unknown
  misc_feature (1)..( 7): Matrix.004 file - promoters50/1537617
attattt

SEQ ID NO: 69785 - DNA, 8 bp, Unknown
  misc_feature (1)..( 8): Matrix.004 file - promoters50/1537617
tatcttaa

SEQ ID NO: 69786 - DNA, 9 bp, Unknown
  misc_feature (1)..( 9): Matrix.004 file - promoters50/1538641
aataaatag

SEQ ID NO: 69787 - DNA, 7 bp, Unknown
  misc_feature (1)..( 7): Matrix.004 file - promoters50/1538641
ataaaat

SEQ ID NO: 69788 - DNA, 9 bp, Unknown
  misc_feature (1)..( 9): Matrix.004 file - promoters50/1538782
atctatttt

SEQ ID NO: 69789 - DNA, 10 bp, Unknown
  misc_feature (1)..( 10): Matrix.004 file - promoters50/1538804
aatataaaat

SEQ ID NO: 69790 - DNA, 7 bp, Unknown
  misc_feature (1)..( 7): Matrix.004 file - promoters50/1538843
gttagag

SEQ ID NO: 69791 - DNA, 8 bp, Unknown
  misc_feature (1)..( 8): Matrix.004 file - promoters50/1538947
caaaacaa

SEQ ID NO: 69792 - DNA, 11 bp, Unknown
  misc_feature (1)..( 11): Matrix.004 file - promoters50/1538947
aatttaaatag

SEQ ID NO: 69793 - DNA, 8 bp, Unknown
  misc_feature (1)..( 8): Matrix.004 file - promoters50/1538947
gaaaaaga

SEQ ID NO: 69794 - DNA, 12 bp, Unknown
  misc_feature (1)..( 12): Matrix.004 file - promoters50/1557475
caaaatttcttg

SEQ ID NO: 69795 - DNA, 8 bp, Unknown
  misc_feature (1)..( 8): Matrix.004 file - promoters50/1557475
caaatttt

SEQ ID NO: 69796 - DNA, 10 bp, Unknown
  misc_feature (1)..( 10): Matrix.004 file - promoters50/1557475
ttaaaaaata

SEQ ID NO: 69797 - DNA, 8 bp, Unknown
  misc_feature (1)..( 8): Matrix.004 file - promoters50/1557486
cgacaaaa

SEQ ID NO: 69798 - DNA, 9 bp, Unknown
  misc_feature (1)..( 9): Matrix.004 file - promoters50/1557486
aaaaatttc

SEQ ID NO: 69799 - DNA, 9 bp, Unknown
  misc_feature (1)..( 9): Matrix.004 file - promoters50/1557486
atttatatg

SEQ ID NO: 69800 - DNA, 9 bp, Unknown
  misc_feature (1)..( 9): Matrix.004 file - promoters50/1557486
tctaagaaa

SEQ ID NO: 69801 - DNA, 7 bp, Unknown
  misc_feature (1)..( 7): Matrix.004 file - promoters50/1557486
taagaaa

SEQ ID NO: 69802 - DNA, 13 bp, Unknown
  misc_feature (1)..( 13): Matrix.004 file - promoters50/1557486
ttataattttcct

SEQ ID NO: 69803 - DNA, 10 bp, Unknown
  misc_feature (1)..( 10): Matrix.004 file - promoters50/1557486
ttttctgttt

SEQ ID NO: 69804 - DNA, 10 bp, Unknown
  misc_feature (1)..( 10): Matrix.004 file - promoters50/1557486
ttttctgttt

SEQ ID NO: 69805 - DNA, 8 bp, Unknown
  misc_feature (1)..( 8): Matrix.004 file - promoters50/1557486
taacaaaa

SEQ ID NO: 69806 - DNA, 10 bp, Unknown
  misc_feature (1)..( 10): Matrix.004 file - promoters50/1557486
tctcatttat

SEQ ID NO: 69807 - DNA, 8 bp, Unknown
  misc_feature (1)..( 8): Matrix.004 file - promoters50/1557486
tttctgac

SEQ ID NO: 69808 - DNA, 7 bp, Unknown
  misc_feature (1)..( 7): Matrix.004 file - promoters50/1557501
gatttcg

SEQ ID NO: 69809 - DNA, 7 bp, Unknown
  misc_feature (1)..( 7): Matrix.004 file - promoters50/1557501
atctatt

SEQ ID NO: 69810 - DNA, 8 bp, Unknown
  misc_feature (1)..( 8): Matrix.004 file - promoters50/1557501
gaaataaa

SEQ ID NO: 69811 - DNA, 14 bp, Unknown
  misc_feature (1)..( 14): Matrix.004 file - promoters50/1557501
tttatcaaagattt

SEQ ID NO: 69812 - DNA, 11 bp, Unknown
  misc_feature (1)..( 11): Matrix.004 file - promoters50/1557561
gcttttctatc

SEQ ID NO: 69813 - DNA, 9 bp, Unknown
  misc_feature (1)..( 9): Matrix.004 file - promoters50/1557561
ttttaattt

SEQ ID NO: 69814 - DNA, 8 bp, Unknown
  misc_feature (1)..( 8): Matrix.004 file - promoters50/1557561
attgtaaa

SEQ ID NO: 69815 - DNA, 10 bp, Unknown
  misc_feature (1)..( 10): Matrix.004 file - promoters50/1557565
ttttcggtac

SEQ ID NO: 69816 - DNA, 12 bp, Unknown
  misc_feature (1)..( 12): Matrix.004 file - promoters50/1557573
aaattaattata

SEQ ID NO: 69817 - DNA, 7 bp, Unknown
  misc_feature (1)..( 7): Matrix.004 file - promoters50/1557573
ttaaaaa

SEQ ID NO: 69818 - DNA, 9 bp, Unknown
  misc_feature (1)..( 9): Matrix.004 file - promoters50/1557573
attgtagtc

SEQ ID NO: 69819 - DNA, 8 bp, Unknown
  misc_feature (1)..( 8): Matrix.004 file - promoters50/1557573
gtagattt

SEQ ID NO: 69820 - DNA, 8 bp, Unknown
  misc_feature (1)..( 8): Matrix.004 file - promoters50/1557573
atattttc

SEQ ID NO: 69821 - DNA, 7 bp, Unknown
  misc_feature (1)..( 7): Matrix.004 file - promoters50/1557584
taatttt

SEQ ID NO: 69822 - DNA, 14 bp, Unknown
  misc_feature (1)..( 14): Matrix.004 file - promoters50/1557584
ttaaaaatataaat

SEQ ID NO: 69823 - DNA, 7 bp, Unknown
  misc_feature (1)..( 7): Matrix.004 file - promoters50/1557584
aaaataa

SEQ ID NO: 69824 - DNA, 14 bp, Unknown
  misc_feature (1)..( 14): Matrix.004 file - promoters50/1557595
tttaaaatataaat

SEQ ID NO: 69825 - DNA, 11 bp, Unknown
  misc_feature (1)..( 11): Matrix.004 file - promoters50/1557595
aaatattagga

SEQ ID NO: 69826 - DNA, 9 bp, Unknown
  misc_feature (1)..( 9): Matrix.004 file - promoters50/1557606
aagaaaata

SEQ ID NO: 69827 - DNA, 10 bp, Unknown
  misc_feature (1)..( 10): Matrix.004 file - promoters50/1557618
tattgcaaat

SEQ ID NO: 69828 - DNA, 8 bp, Unknown
  misc_feature (1)..( 8): Matrix.004 file - promoters50/1557618
ataagatc

SEQ ID NO: 69829 - DNA, 9 bp, Unknown
  misc_feature (1)..( 9): Matrix.004 file - promoters50/1557618
atttatttt

SEQ ID NO: 69830 - DNA, 6 bp, Unknown
  misc_feature (1)..( 6): Matrix.004 file - promoters50/1557618
tttctt

SEQ ID NO: 69831 - DNA, 9 bp, Unknown
  misc_feature (1)..( 9): Matrix.004 file - promoters50/1557618
aaaatcaat

SEQ ID NO: 69832 - DNA, 8 bp, Unknown
  misc_feature (1)..( 8): Matrix.004 file - promoters50/1557618
gtgtttaa

SEQ ID NO: 69833 - DNA, 7 bp, Unknown
  misc_feature (1)..( 7): Matrix.004 file - promoters50/1557618
tttcttc

SEQ ID NO: 69834 - DNA, 9 bp, Unknown
  misc_feature (1)..( 9): Matrix.004 file - promoters50/1557648
aagattaat

SEQ ID NO: 69835 - DNA, 10 bp, Unknown
  misc_feature (1)..( 10): Matrix.004 file - promoters50/1557648
aaattggtag

SEQ ID NO: 69836 - DNA, 8 bp, Unknown
  misc_feature (1)..( 8): Matrix.004 file - promoters50/1557648
gtacaata

SEQ ID NO: 69837 - DNA, 10 bp, Unknown
  misc_feature (1)..( 10): Matrix.004 file - promoters50/1557648
aatttagaat

SEQ ID NO: 69838 - DNA, 15 bp, Unknown
  misc_feature (1)..( 15): Matrix.004 file - promoters50/1557648
caaagaaagaaaaca

SEQ ID NO: 69839 - DNA, 9 bp, Unknown
  misc_feature (1)..( 9): Matrix.004 file - promoters50/1557648
caatatcac

SEQ ID NO: 69840 - DNA, 8 bp, Unknown
  misc_feature (1)..( 8): Matrix.004 file - promoters50/1557648
aaagaaaa

SEQ ID NO: 69841 - DNA, 7 bp, Unknown
  misc_feature (1)..( 7): Matrix.004 file - promoters50/1557648
aaaatga

SEQ ID NO: 69842 - DNA, 8 bp, Unknown
  misc_feature (1)..( 8): Matrix.004 file - promoters50/1557648
aaatttga

SEQ ID NO: 69843 - DNA, 6 bp, Unknown
  misc_feature (1)..( 6): Matrix.004 file - promoters50/1557648
agaaaa

SEQ ID NO: 69844 - DNA, 10 bp, Unknown
  misc_feature (1)..( 10): Matrix.004 file - promoters50/1557648
caaaaagaaa

SEQ ID NO: 69845 - DNA, 9 bp, Unknown
  misc_feature (1)..( 9): Matrix.004 file - promoters50/1557660
ctttaaata

SEQ ID NO: 69846 - DNA, 10 bp, Unknown
  misc_feature (1)..( 10): Matrix.004 file - promoters50/1557672
ttatttaaca

SEQ ID NO: 69847 - DNA, 9 bp, Unknown
  misc_feature (1)..( 9): Matrix.004 file - promoters50/1557672
aatttcttt

SEQ ID NO: 69848 - DNA, 9 bp, Unknown
  misc_feature (1)..( 9): Matrix.004 file - promoters50/1557672
agattcgtt

SEQ ID NO: 69849 - DNA, 8 bp, Unknown
  misc_feature (1)..( 8): Matrix.004 file - promoters50/1557672
ttgaatta

SEQ ID NO: 69850 - DNA, 11 bp, Unknown
  misc_feature (1)..( 11): Matrix.004 file - promoters50/1557672
ttccaaaaaaa

SEQ ID NO: 69851 - DNA, 8 bp, Unknown
  misc_feature (1)..( 8): Matrix.004 file - promoters50/1557672
gaaaactg

SEQ ID NO: 69852 - DNA, 7 bp, Unknown
  misc_feature (1)..( 7): Matrix.004 file - promoters50/1557672
tcgttat

SEQ ID NO: 69853 - DNA, 8 bp, Unknown
  misc_feature (1)..( 8): Matrix.004 file - promoters50/1557672
tatttcaa

SEQ ID NO: 69854 - DNA, 8 bp, Unknown
  misc_feature (1)..( 8): Matrix.004 file - promoters50/1557712
agagagaa

SEQ ID NO: 69855 - DNA, 11 bp, Unknown
  misc_feature (1)..( 11): Matrix.004 file - promoters50/1557712
atattttaaaa

SEQ ID NO: 69856 - DNA, 9 bp, Unknown
  misc_feature (1)..( 9): Matrix.004 file - promoters50/1557751
tgtttaaac

SEQ ID NO: 69857 - DNA, 8 bp, Unknown
  misc_feature (1)..( 8): Matrix.004 file - promoters50/1557765
aaaacata

SEQ ID NO: 69858 - DNA, 11 bp, Unknown
  misc_feature (1)..( 11): Matrix.004 file - promoters50/1557765
aaattttgaaa

SEQ ID NO: 69859 - DNA, 10 bp, Unknown
  misc_feature (1)..( 10): Matrix.004 file - promoters50/1557765
ttacaaaatt

SEQ ID NO: 69860 - DNA, 11 bp, Unknown
  misc_feature (1)..( 11): Matrix.004 file - promoters50/1557765
tttcttatttt

SEQ ID NO: 69861 - DNA, 9 bp, Unknown
  misc_feature (1)..( 9): Matrix.004 file - promoters50/1557765
aaacaaaat

SEQ ID NO: 69862 - DNA, 8 bp, Unknown
  misc_feature (1)..( 8): Matrix.004 file - promoters50/1557765
tttcaaat

SEQ ID NO: 69863 - DNA, 8 bp, Unknown
  misc_feature (1)..( 8): Matrix.004 file - promoters50/1557765
ttaattat

SEQ ID NO: 69864 - DNA, 11 bp, Unknown
  misc_feature (1)..( 11): Matrix.004 file - promoters50/1557765
aaattttaaaa

SEQ ID NO: 69865 - DNA, 8 bp, Unknown
  misc_feature (1)..( 8): Matrix.004 file - promoters50/1557765
tttgaaaa

SEQ ID NO: 69866 - DNA, 8 bp, Unknown
  misc_feature (1)..( 8): Matrix.004 file - promoters50/1557765
ttttgaaa

SEQ ID NO: 69867 - DNA, 9 bp, Unknown
  misc_feature (1)..( 9): Matrix.004 file - promoters50/1557769
aattttaaa

SEQ ID NO: 69868 - DNA, 11 bp, Unknown
  misc_feature (1)..( 11): Matrix.004 file - promoters50/1557769
acattttcatt

SEQ ID NO: 69869 - DNA, 9 bp, Unknown
  misc_feature (1)..( 9): Matrix.004 file - promoters50/1557769
aattttttt

SEQ ID NO: 69870 - DNA, 10 bp, Unknown
  misc_feature (1)..( 10): Matrix.004 file - promoters50/1557769
tacgatatta

SEQ ID NO: 69871 - DNA, 9 bp, Unknown
  misc_feature (1)..( 9): Matrix.004 file - promoters50/1557769
caaaaaaga

SEQ ID NO: 69872 - DNA, 12 bp, Unknown
  misc_feature (1)..( 12): Matrix.004 file - promoters50/1557783
caataaaaaatg

SEQ ID NO: 69873 - DNA, 9 bp, Unknown
  misc_feature (1)..( 9): Matrix.004 file - promoters50/1557783
tattgtaaa

SEQ ID NO: 69874 - DNA, 7 bp, Unknown
  misc_feature (1)..( 7): Matrix.004 file - promoters50/1557806
tatatga

SEQ ID NO: 69875 - DNA, 10 bp, Unknown
  misc_feature (1)..( 10): Matrix.004 file - promoters50/1565820
gataatttgt

SEQ ID NO: 69876 - DNA, 11 bp, Unknown
  misc_feature (1)..( 11): Matrix.004 file - promoters50/1566423
tagaaaaacaa

SEQ ID NO: 69877 - DNA, 10 bp, Unknown
  misc_feature (1)..( 10): Matrix.004 file - promoters50/1566423
tatattatta

SEQ ID NO: 69878 - DNA, 9 bp, Unknown
  misc_feature (1)..( 9): Matrix.004 file - promoters50/1566423
ttccaaaaa

SEQ ID NO: 69879 - DNA, 9 bp, Unknown
  misc_feature (1)..( 9): Matrix.004 file - promoters50/1566948
atttcttag

SEQ ID NO: 69880 - DNA, 10 bp, Unknown
  misc_feature (1)..( 10): Matrix.004 file - promoters50/1567007
ctaaaaacta

SEQ ID NO: 69881 - DNA, 11 bp, Unknown
  misc_feature (1)..( 11): Matrix.004 file - promoters50/1567092
ctaaaaaaaca

SEQ ID NO: 69882 - DNA, 12 bp, Unknown
  misc_feature (1)..( 12): Matrix.004 file - promoters50/1567092
taaaaaatttac

SEQ ID NO: 69883 - DNA, 7 bp, Unknown
  misc_feature (1)..( 7): Matrix.004 file - promoters50/1567092
ctcatat

SEQ ID NO: 69884 - DNA, 10 bp, Unknown
  misc_feature (1)..( 10): Matrix.004 file - promoters50/1567547
aaacttttta

SEQ ID NO: 69885 - DNA, 13 bp, Unknown
  misc_feature (1)..( 13): Matrix.004 file - promoters50/1567547
ttcttataattca

SEQ ID NO: 69886 - DNA, 13 bp, Unknown
  misc_feature (1)..( 13): Matrix.004 file - promoters50/1567949
aaaatttgttttt

SEQ ID NO: 69887 - DNA, 12 bp, Unknown
  misc_feature (1)..( 12): Matrix.004 file - promoters50/1567957
taacaaaaaaaa

SEQ ID NO: 69888 - DNA, 8 bp, Unknown
  misc_feature (1)..( 8): Matrix.004 file - promoters50/1567957
tttaaaaa

SEQ ID NO: 69889 - DNA, 13 bp, Unknown
  misc_feature (1)..( 13): Matrix.004 file - promoters50/1567957
attttttcaaaaa

SEQ ID NO: 69890 - DNA, 13 bp, Unknown
  misc_feature (1)..( 13): Matrix.004 file - promoters50/1568230
ccaaataaaacat

SEQ ID NO: 69891 - DNA, 10 bp, Unknown
  misc_feature (1)..( 10): Matrix.004 file - promoters50/1568386
ttaatataaa

SEQ ID NO: 69892 - DNA, 10 bp, Unknown
  misc_feature (1)..( 10): Matrix.004 file - promoters50/1568386
aaaataaatt

SEQ ID NO: 69893 - DNA, 10 bp, Unknown
  misc_feature (1)..( 10): Matrix.004 file - promoters50/1568386
ttttaattgt

SEQ ID NO: 69894 - DNA, 8 bp, Unknown
  misc_feature (1)..( 8): Matrix.004 file - promoters50/1568386
gttttatt

SEQ ID NO: 69895 - DNA, 12 bp, Unknown
  misc_feature (1)..( 12): Matrix.004 file - promoters50/1568386
ttatttgaacta

SEQ ID NO: 69896 - DNA, 13 bp, Unknown
  misc_feature (1)..( 13): Matrix.004 file - promoters50/1568386
gattaaatatata

SEQ ID NO: 69897 - DNA, 8 bp, Unknown
  misc_feature (1)..( 8): Matrix.004 file - promoters50/1568405
gaaaattt

SEQ ID NO: 69898 - DNA, 8 bp, Unknown
  misc_feature (1)..( 8): Matrix.004 file - promoters50/1568405
tttaataa

SEQ ID NO: 69899 - DNA, 7 bp, Unknown
  misc_feature (1)..( 7): Matrix.004 file - promoters50/1568405
ataaaaa

SEQ ID NO: 69900 - DNA, 11 bp, Unknown
  misc_feature (1)..( 11): Matrix.004 file - promoters50/1568409
tttatcattgt

SEQ ID NO: 69901 - DNA, 11 bp, Unknown
  misc_feature (1)..( 11): Matrix.004 file - promoters50/1568409
tgtgaatcttg

SEQ ID NO: 69902 - DNA, 9 bp, Unknown
  misc_feature (1)..( 9): Matrix.004 file - promoters50/1568409
caatctttc

SEQ ID NO: 69903 - DNA, 8 bp, Unknown
  misc_feature (1)..( 8): Matrix.004 file - promoters50/1568409
aaagtctt

SEQ ID NO: 69904 - DNA, 9 bp, Unknown
  misc_feature (1)..( 9): Matrix.004 file - promoters50/1568409
ctttatttt

SEQ ID NO: 69905 - DNA, 16 bp, Unknown
  misc_feature (1)..( 16): Matrix.004 file - promoters50/1568409
aattattatcttccta

SEQ ID NO: 69906 - DNA, 9 bp, Unknown
  misc_feature (1)..( 9): Matrix.004 file - promoters50/1568409
ttattttat

SEQ ID NO: 69907 - DNA, 8 bp, Unknown
  misc_feature (1)..( 8): Matrix.004 file - promoters50/1568409
tataaaac

SEQ ID NO: 69908 - DNA, 8 bp, Unknown
  misc_feature (1)..( 8): Matrix.004 file - promoters50/1568508
gaaaagtc

SEQ ID NO: 69909 - DNA, 8 bp, Unknown
  misc_feature (1)..( 8): Matrix.004 file - promoters50/1568924
tcttataa

SEQ ID NO: 69910 - DNA, 9 bp, Unknown
  misc_feature (1)..( 9): Matrix.004 file - promoters50/1568924
aaaaagaaa

SEQ ID NO: 69911 - DNA, 4 bp, Unknown
  misc_feature (1)..( 4): Matrix.004 file - promoters50/1568924
aaaa

SEQ ID NO: 69912 - DNA, 7 bp, Unknown
  misc_feature (1)..( 7): Matrix.004 file - promoters50/1569568
tatataa

SEQ ID NO: 69913 - DNA, 11 bp, Unknown
  misc_feature (1)..( 11): Matrix.004 file - promoters50/1569568
attataaactt

SEQ ID NO: 69914 - DNA, 11 bp, Unknown
  misc_feature (1)..( 11): Matrix.004 file - promoters50/1569568
cctataaatat

SEQ ID NO: 69915 - DNA, 11 bp, Unknown
  misc_feature (1)..( 11): Matrix.004 file - promoters50/1569568
gatttatataa

SEQ ID NO: 69916 - DNA, 11 bp, Unknown
  misc_feature (1)..( 11): Matrix.004 file - promoters50/1569568
ttttatttact

SEQ ID NO: 69917 - DNA, 15 bp, Unknown
  misc_feature (1)..( 15): Matrix.004 file - promoters50/1569568
gtctcctataaataa

SEQ ID NO: 69918 - DNA, 10 bp, Unknown
  misc_feature (1)..( 10): Matrix.004 file - promoters50/1569721
ttttatttat

SEQ ID NO: 69919 - DNA, 23 bp, Unknown
  misc_feature (1)..( 23): Matrix.004 file - promoters50/1569721
tttcatatttcttagtctcttaa

SEQ ID NO: 69920 - DNA, 11 bp, Unknown
  misc_feature (1)..( 11): Matrix.004 file - promoters50/1570085
tattctagatt

SEQ ID NO: 69921 - DNA, 8 bp, Unknown
  misc_feature (1)..( 8): Matrix.004 file - promoters50/1570085
atatatac

SEQ ID NO: 69922 - DNA, 7 bp, Unknown
  misc_feature (1)..( 7): Matrix.004 file - promoters50/1570107
tttattt

SEQ ID NO: 69923 - DNA, 14 bp, Unknown
  misc_feature (1)..( 14): Matrix.004 file - promoters50/1570107
caataaccataata

SEQ ID NO: 69924 - DNA, 8 bp, Unknown
  misc_feature (1)..( 8): Matrix.004 file - promoters50/1570107
aattgttc

SEQ ID NO: 69925 - DNA, 8 bp, Unknown
  misc_feature (1)..( 8): Matrix.004 file - promoters50/1570107
ttttaaaa

SEQ ID NO: 69926 - DNA, 7 bp, Unknown
  misc_feature (1)..( 7): Matrix.004 file - promoters50/1570107
caaaaaa

SEQ ID NO: 69927 - DNA, 8 bp, Unknown
  misc_feature (1)..( 8): Matrix.004 file - promoters50/1570107
cttttttt

SEQ ID NO: 69928 - DNA, 11 bp, Unknown
  misc_feature (1)..( 11): Matrix.004 file - promoters50/1570107
agagattcgta

SEQ ID NO: 69929 - DNA, 8 bp, Unknown
  misc_feature (1)..( 8): Matrix.004 file - promoters50/1570107
tcaataac

SEQ ID NO: 69930 - DNA, 7 bp, Unknown
  misc_feature (1)..( 7): Matrix.004 file - promoters50/1570107
aattaag

SEQ ID NO: 69931 - DNA, 6 bp, Unknown
  misc_feature (1)..( 6): Matrix.004 file - promoters50/1570107
gaaatg

SEQ ID NO: 69932 - DNA, 8 bp, Unknown
  misc_feature (1)..( 8): Matrix.004 file - promoters50/1570116
cataataa

SEQ ID NO: 69933 - DNA, 9 bp, Unknown
  misc_feature (1)..( 9): Matrix.004 file - promoters50/1570116
aaaataatt

SEQ ID NO: 69934 - DNA, 12 bp, Unknown
  misc_feature (1)..( 12): Matrix.004 file - promoters50/1570116
aaaaaaaaatta

SEQ ID NO: 69935 - DNA, 9 bp, Unknown
  misc_feature (1)..( 9): Matrix.004 file - promoters50/1570179
tttaaaaat

SEQ ID NO: 69936 - DNA, 9 bp, Unknown
  misc_feature (1)..( 9): Matrix.004 file - promoters50/1570179
acactacaa

SEQ ID NO: 69937 - DNA, 7 bp, Unknown
  misc_feature (1)..( 7): Matrix.004 file - promoters50/1570293
acaagaa

SEQ ID NO: 69938 - DNA, 14 bp, Unknown
  misc_feature (1)..( 14): Matrix.004 file - promoters50/1570293
aagagaaaagtgtg

SEQ ID NO: 69939 - DNA, 8 bp, Unknown
  misc_feature (1)..( 8): Matrix.004 file - promoters50/1570622
aagatttt

SEQ ID NO: 69940 - DNA, 9 bp, Unknown
  misc_feature (1)..( 9): Matrix.004 file - promoters50/1570622
aaaaataaa

SEQ ID NO: 69941 - DNA, 19 bp, Unknown
  misc_feature (1)..( 19): Matrix.004 file - promoters50/1570622
gtaaaacaaatcaggctaa

SEQ ID NO: 69942 - DNA, 9 bp, Unknown
  misc_feature (1)..( 9): Matrix.004 file - promoters50/1570735
aaatataaa

SEQ ID NO: 69943 - DNA, 9 bp, Unknown
  misc_feature (1)..( 9): Matrix.004 file - promoters50/1570735
tttaaatct

SEQ ID NO: 69944 - DNA, 10 bp, Unknown
  misc_feature (1)..( 10): Matrix.004 file - promoters50/1570735
tctttctttt

SEQ ID NO: 69945 - DNA, 8 bp, Unknown
  misc_feature (1)..( 8): Matrix.004 file - promoters50/1570860
tttgtttt

SEQ ID NO: 69946 - DNA, 6 bp, Unknown
  misc_feature (1)..( 6): Matrix.004 file - promoters50/1570860
caagaa

SEQ ID NO: 69947 - DNA, 13 bp, Unknown
  misc_feature (1)..( 13): Matrix.004 file - promoters50/1570860
aaactaaagatga

SEQ ID NO: 69948 - DNA, 8 bp, Unknown
  misc_feature (1)..( 8): Matrix.004 file - promoters50/1570869
attcgaaa

SEQ ID NO: 69949 - DNA, 14 bp, Unknown
  misc_feature (1)..( 14): Matrix.004 file - promoters50/1570869
aaaactttataatt

SEQ ID NO: 69950 - DNA, 10 bp, Unknown
  misc_feature (1)..( 10): Matrix.004 file - promoters50/1570869
taaatttttt

SEQ ID NO: 69951 - DNA, 11 bp, Unknown
  misc_feature (1)..( 11): Matrix.004 file - promoters50/1570869
ttttaaaaaaa

SEQ ID NO: 69952 - DNA, 12 bp, Unknown
  misc_feature (1)..( 12): Matrix.004 file - promoters50/1570869
tatataaaaaca

SEQ ID NO: 69953 - DNA, 15 bp, Unknown
  misc_feature (1)..( 15): Matrix.004 file - promoters50/1570869
taaatagtaaaaata

SEQ ID NO: 69954 - DNA, 16 bp, Unknown
  misc_feature (1)..( 16): Matrix.004 file - promoters50/1570869
tgataaatatgaaaaa

SEQ ID NO: 69955 - DNA, 8 bp, Unknown
  misc_feature (1)..( 8): Matrix.004 file - promoters50/1570966
ttttgaaa

SEQ ID NO: 69956 - DNA, 9 bp, Unknown
  misc_feature (1)..( 9): Matrix.004 file - promoters50/1570966
aaagtttga

SEQ ID NO: 69957 - DNA, 10 bp, Unknown
  misc_feature (1)..( 10): Matrix.004 file - promoters50/1570966
aattaacttt

SEQ ID NO: 69958 - DNA, 10 bp, Unknown
  misc_feature (1)..( 10): Matrix.004 file - promoters50/1570966
ttaatttttt

SEQ ID NO: 69959 - DNA, 9 bp, Unknown
  misc_feature (1)..( 9): Matrix.004 file - promoters50/1571014
tatataaaa

SEQ ID NO: 69960 - DNA, 11 bp, Unknown
  misc_feature (1)..( 11): Matrix.004 file - promoters50/1571014
gttttaaacaa

SEQ ID NO: 69961 - DNA, 12 bp, Unknown
  misc_feature (1)..( 12): Matrix.004 file - promoters50/1571014
agatgctttata

SEQ ID NO: 69962 - DNA, 10 bp, Unknown
  misc_feature (1)..( 10): Matrix.004 file - promoters50/1571079
agataattaa

SEQ ID NO: 69963 - DNA, 8 bp, Unknown
  misc_feature (1)..( 8): Matrix.004 file - promoters50/1571079
tttttcaa

SEQ ID NO: 69964 - DNA, 9 bp, Unknown
  misc_feature (1)..( 9): Matrix.004 file - promoters50/1571079
agttttaaa

SEQ ID NO: 69965 - DNA, 8 bp, Unknown
  misc_feature (1)..( 8): Matrix.004 file - promoters50/1571079
gcattaaa

SEQ ID NO: 69966 - DNA, 9 bp, Unknown
  misc_feature (1)..( 9): Matrix.004 file - promoters50/1571422
taaacatta

SEQ ID NO: 69967 - DNA, 12 bp, Unknown
  misc_feature (1)..( 12): Matrix.004 file - promoters50/1571422
tatatatgattg

SEQ ID NO: 69968 - DNA, 12 bp, Unknown
  misc_feature (1)..( 12): Matrix.004 file - promoters50/1571422
tttatttgagaa

SEQ ID NO: 69969 - DNA, 9 bp, Unknown
  misc_feature (1)..( 9): Matrix.004 file - promoters50/1571916
attatttta

SEQ ID NO: 69970 - DNA, 7 bp, Unknown
  misc_feature (1)..( 7): Matrix.004 file - promoters50/1571916
aaataaa

SEQ ID NO: 69971 - DNA, 8 bp, Unknown
  misc_feature (1)..( 8): Matrix.004 file - promoters50/1571916
caaagaat

SEQ ID NO: 69972 - DNA, 12 bp, Unknown
  misc_feature (1)..( 12): Matrix.004 file - promoters50/1572143
atatataaaccg

SEQ ID NO: 69973 - DNA, 10 bp, Unknown
  misc_feature (1)..( 10): Matrix.004 file - promoters50/1572151
agatcgaaga

SEQ ID NO: 69974 - DNA, 13 bp, Unknown
  misc_feature (1)..( 13): Matrix.004 file - promoters50/1572151
ttattaattttta

SEQ ID NO: 69975 - DNA, 12 bp, Unknown
  misc_feature (1)..( 12): Matrix.004 file - promoters50/1572151
catgtatatata

SEQ ID NO: 69976 - DNA, 11 bp, Unknown
  misc_feature (1)..( 11): Matrix.004 file - promoters50/1572151
ttaattttgat

SEQ ID NO: 69977 - DNA, 6 bp, Unknown
  misc_feature (1)..( 6): Matrix.004 file - promoters50/1572151
ttgaat

SEQ ID NO: 69978 - DNA, 14 bp, Unknown
  misc_feature (1)..( 14): Matrix.004 file - promoters50/1572151
gtaaacaatttaca

SEQ ID NO: 69979 - DNA, 9 bp, Unknown
  misc_feature (1)..( 9): Matrix.004 file - promoters50/1572151
agtatataa

SEQ ID NO: 69980 - DNA, 10 bp, Unknown
  misc_feature (1)..( 10): Matrix.004 file - promoters50/1572236
ataattttaa

SEQ ID NO: 69981 - DNA, 7 bp, Unknown
  misc_feature (1)..( 7): Matrix.004 file - promoters50/1572796
taaaatt

SEQ ID NO: 69982 - DNA, 7 bp, Unknown
  misc_feature (1)..( 7): Matrix.004 file - promoters50/1572796
aatttca

SEQ ID NO: 69983 - DNA, 8 bp, Unknown
  misc_feature (1)..( 8): Matrix.004 file - promoters50/1573594
tactgtat

SEQ ID NO: 69984 - DNA, 9 bp, Unknown
  misc_feature (1)..( 9): Matrix.004 file - promoters50/1573651
ttaaaacaa

SEQ ID NO: 69985 - DNA, 7 bp, Unknown
  misc_feature (1)..( 7): Matrix.004 file - promoters50/1573651
ctacaaa

SEQ ID NO: 69986 - DNA, 8 bp, Unknown
  misc_feature (1)..( 8): Matrix.004 file - promoters50/1573651
caaactca

SEQ ID NO: 69987 - DNA, 9 bp, Unknown
  misc_feature (1)..( 9): Matrix.004 file - promoters50/1573713
aatcataaa

SEQ ID NO: 69988 - DNA, 8 bp, Unknown
  misc_feature (1)..( 8): Matrix.004 file - promoters50/1573713
taaatata

SEQ ID NO: 69989 - DNA, 10 bp, Unknown
  misc_feature (1)..( 10): Matrix.004 file - promoters50/1573713
ataaacgaca

SEQ ID NO: 69990 - DNA, 9 bp, Unknown
  misc_feature (1)..( 9): Matrix.004 file - promoters50/1573713
tttatatga

SEQ ID NO: 69991 - DNA, 7 bp, Unknown
  misc_feature (1)..( 7): Matrix.004 file - promoters50/1573713
taatctc

SEQ ID NO: 69992 - DNA, 6 bp, Unknown
  misc_feature (1)..( 6): Matrix.004 file - promoters50/1573980
attatt

SEQ ID NO: 69993 - DNA, 14 bp, Unknown
  misc_feature (1)..( 14): Matrix.004 file - promoters50/1573980
tgtaaaattaaaaa

SEQ ID NO: 69994 - DNA, 10 bp, Unknown
  misc_feature (1)..( 10): Matrix.004 file - promoters50/1573980
aaatttattc

SEQ ID NO: 69995 - DNA, 10 bp, Unknown
  misc_feature (1)..( 10): Matrix.004 file - promoters50/1573982
ggaaatgact

SEQ ID NO: 69996 - DNA, 9 bp, Unknown
  misc_feature (1)..( 9): Matrix.004 file - promoters50/1573982
atatttttt

SEQ ID NO: 69997 - DNA, 8 bp, Unknown
  misc_feature (1)..( 8): Matrix.004 file - promoters50/1574021
aattgatt

SEQ ID NO: 69998 - DNA, 9 bp, Unknown
  misc_feature (1)..( 9): Matrix.004 file - promoters50/1574021
gttaaataa

SEQ ID NO: 69999 - DNA, 13 bp, Unknown
  misc_feature (1)..( 13): Matrix.004 file - promoters50/1574029
tgttatcaatttt

SEQ ID NO: 70000 - DNA, 7 bp, Unknown
  misc_feature (1)..( 7): Matrix.004 file - promoters50/1574044
atgtgga

SEQ ID NO: 70001 - DNA, 7 bp, Unknown
  misc_feature (1)..( 7): Matrix.004 file - promoters50/1574044
taaaaca

SEQ ID NO: 70002 - DNA, 10 bp, Unknown
  misc_feature (1)..( 10): Matrix.004 file - promoters50/1574044
ataaataaaa

SEQ ID NO: 70003 - DNA, 12 bp, Unknown
  misc_feature (1)..( 12): Matrix.004 file - promoters50/1574044
tgtctaaaacaa

SEQ ID NO: 70004 - DNA, 11 bp, Unknown
  misc_feature (1)..( 11): Matrix.004 file - promoters50/1574059
atagtaaataa

SEQ ID NO: 70005 - DNA, 7 bp, Unknown
  misc_feature (1)..( 7): Matrix.004 file - promoters50/1580171
gtaaaac

SEQ ID NO: 70006 - DNA, 7 bp, Unknown
  misc_feature (1)..( 7): Matrix.004 file - promoters50/1580171
attaaat

SEQ ID NO: 70007 - DNA, 9 bp, Unknown
  misc_feature (1)..( 9): Matrix.004 file - promoters50/1580171
aattttata

SEQ ID NO: 70008 - DNA, 12 bp, Unknown
  misc_feature (1)..( 12): Matrix.004 file - promoters50/1580263
ttctgttaaaaa

SEQ ID NO: 70009 - DNA, 10 bp, Unknown
  misc_feature (1)..( 10): Matrix.004 file - promoters50/1580298
ctaattaaat

SEQ ID NO: 70010 - DNA, 15 bp, Unknown
  misc_feature (1)..( 15): Matrix.004 file - promoters50/1580481
atgaaatcattacat

SEQ ID NO: 70011 - DNA, 8 bp, Unknown
  misc_feature (1)..( 8): Matrix.004 file - promoters50/1580481
tttataaa

SEQ ID NO: 70012 - DNA, 8 bp, Unknown
  misc_feature (1)..( 8): Matrix.004 file - promoters50/1580481
tttcttta

SEQ ID NO: 70013 - DNA, 9 bp, Unknown
  misc_feature (1)..( 9): Matrix.004 file - promoters50/1580500
ttcatttgt

SEQ ID NO: 70014 - DNA, 17 bp, Unknown
  misc_feature (1)..( 17): Matrix.004 file - promoters50/1580500
ttaaaatcatatacaaa

SEQ ID NO: 70015 - DNA, 11 bp, Unknown
  misc_feature (1)..( 11): Matrix.004 file - promoters50/1580511
atcatcataaa

SEQ ID NO: 70016 - DNA, 11 bp, Unknown
  misc_feature (1)..( 11): Matrix.004 file - promoters50/1580511
tttcattgaaa

SEQ ID NO: 70017 - DNA, 13 bp, Unknown
  misc_feature (1)..( 13): Matrix.004 file - promoters50/1580787
tcaatttgttttt

SEQ ID NO: 70018 - DNA, 9 bp, Unknown
  misc_feature (1)..( 9): Matrix.004 file - promoters50/1580870
catccatct

SEQ ID NO: 70019 - DNA, 9 bp, Unknown
  misc_feature (1)..( 9): Matrix.004 file - promoters50/1580870
tttccaaaa

SEQ ID NO: 70020 - DNA, 7 bp, Unknown
  misc_feature (1)..( 7): Matrix.004 file - promoters50/1580932
aatatat

SEQ ID NO: 70021 - DNA, 11 bp, Unknown
  misc_feature (1)..( 11): Matrix.004 file - promoters50/1580932
aatgaaattaa

SEQ ID NO: 70022 - DNA, 9 bp, Unknown
  misc_feature (1)..( 9): Matrix.004 file - promoters50/1580983
aaactaata

SEQ ID NO: 70023 - DNA, 9 bp, Unknown
  misc_feature (1)..( 9): Matrix.004 file - promoters50/1580983
aattttttt

SEQ ID NO: 70024 - DNA, 12 bp, Unknown
  misc_feature (1)..( 12): Matrix.004 file - promoters50/1581038
ttttcaacattt

SEQ ID NO: 70025 - DNA, 14 bp, Unknown
  misc_feature (1)..( 14): Matrix.004 file - promoters50/1581038
tttaaaatattaca

SEQ ID NO: 70026 - DNA, 5 bp, Unknown
  misc_feature (1)..( 5): Matrix.004 file - promoters50/1581038
taatt

SEQ ID NO: 70027 - DNA, 10 bp, Unknown
  misc_feature (1)..( 10): Matrix.004 file - promoters50/1581038
tatatataaa

SEQ ID NO: 70028 - DNA, 12 bp, Unknown
  misc_feature (1)..( 12): Matrix.004 file - promoters50/1581165
gtgatatttttc

SEQ ID NO: 70029 - DNA, 9 bp, Unknown
  misc_feature (1)..( 9): Matrix.004 file - promoters50/1581165
aaaaataag

SEQ ID NO: 70030 - DNA, 6 bp, Unknown
  misc_feature (1)..( 6): Matrix.004 file - promoters50/1581165
aaataa

SEQ ID NO: 70031 - DNA, 10 bp, Unknown
  misc_feature (1)..( 10): Matrix.004 file - promoters50/1581165
ttatttctct

SEQ ID NO: 70032 - DNA, 9 bp, Unknown
  misc_feature (1)..( 9): Matrix.004 file - promoters50/1581223
aaataaatg

SEQ ID NO: 70033 - DNA, 8 bp, Unknown
  misc_feature (1)..( 8): Matrix.004 file - promoters50/1581223
ttcgaaat

SEQ ID NO: 70034 - DNA, 6 bp, Unknown
  misc_feature (1)..( 6): Matrix.004 file - promoters50/1581454
atctaa

SEQ ID NO: 70035 - DNA, 9 bp, Unknown
  misc_feature (1)..( 9): Matrix.004 file - promoters50/1581987
agttaaaaa

SEQ ID NO: 70036 - DNA, 12 bp, Unknown
  misc_feature (1)..( 12): Matrix.004 file - promoters50/1582293
atgtgtttctca

SEQ ID NO: 70037 - DNA, 10 bp, Unknown
  misc_feature (1)..( 10): Matrix.004 file - promoters50/1582293
atataaatta

SEQ ID NO: 70038 - DNA, 11 bp, Unknown
  misc_feature (1)..( 11): Matrix.004 file - promoters50/1582293
atattacaata

SEQ ID NO: 70039 - DNA, 9 bp, Unknown
  misc_feature (1)..( 9): Matrix.004 file - promoters50/1582322
aataatgat

SEQ ID NO: 70040 - DNA, 10 bp, Unknown
  misc_feature (1)..( 10): Matrix.004 file - promoters50/1582322
aatttttttc

SEQ ID NO: 70041 - DNA, 10 bp, Unknown
  misc_feature (1)..( 10): Matrix.004 file - promoters50/1582322
aatatttata

SEQ ID NO: 70042 - DNA, 8 bp, Unknown
  misc_feature (1)..( 8): Matrix.004 file - promoters50/1582322
attttttt

SEQ ID NO: 70043 - DNA, 10 bp, Unknown
  misc_feature (1)..( 10): Matrix.004 file - promoters50/1582322
ggtatttgtt

SEQ ID NO: 70044 - DNA, 10 bp, Unknown
  misc_feature (1)..( 10): Matrix.004 file - promoters50/1582322
ttataattat

SEQ ID NO: 70045 - DNA, 12 bp, Unknown
  misc_feature (1)..( 12): Matrix.004 file - promoters50/1582322
ataaaattataa

SEQ ID NO: 70046 - DNA, 10 bp, Unknown
  misc_feature (1)..( 10): Matrix.004 file - promoters50/1582322
cttaaataaa

SEQ ID NO: 70047 - DNA, 10 bp, Unknown
  misc_feature (1)..( 10): Matrix.004 file - promoters50/1582339
taaatatttt

SEQ ID NO: 70048 - DNA, 12 bp, Unknown
  misc_feature (1)..( 12): Matrix.004 file - promoters50/1582339
agaaatattatt

SEQ ID NO: 70049 - DNA, 12 bp, Unknown
  misc_feature (1)..( 12): Matrix.004 file - promoters50/1582339
catctaatataa

SEQ ID NO: 70050 - DNA, 12 bp, Unknown
  misc_feature (1)..( 12): Matrix.004 file - promoters50/1582349
ttaaaaaaaact

SEQ ID NO: 70051 - DNA, 9 bp, Unknown
  misc_feature (1)..( 9): Matrix.004 file - promoters50/1582349
atgttttta

SEQ ID NO: 70052 - DNA, 10 bp, Unknown
  misc_feature (1)..( 10): Matrix.004 file - promoters50/1582551
tcaatttttt

SEQ ID NO: 70053 - DNA, 11 bp, Unknown
  misc_feature (1)..( 11): Matrix.004 file - promoters50/1582551
aaaaagaaaag

SEQ ID NO: 70054 - DNA, 9 bp, Unknown
  misc_feature (1)..( 9): Matrix.004 file - promoters50/1582576
cccactaaa

SEQ ID NO: 70055 - DNA, 9 bp, Unknown
  misc_feature (1)..( 9): Matrix.004 file - promoters50/1582576
agagtgaaa

SEQ ID NO: 70056 - DNA, 7 bp, Unknown
  misc_feature (1)..( 7): Matrix.004 file - promoters50/1582576
aaattaa

SEQ ID NO: 70057 - DNA, 8 bp, Unknown
  misc_feature (1)..( 8): Matrix.004 file - promoters50/1582576
aataaaaa

SEQ ID NO: 70058 - DNA, 8 bp, Unknown
  misc_feature (1)..( 8): Matrix.004 file - promoters50/1582576
aaaagaca

SEQ ID NO: 70059 - DNA, 8 bp, Unknown
  misc_feature (1)..( 8): Matrix.004 file - promoters50/1582576
aaaataaa

SEQ ID NO: 70060 - DNA, 7 bp, Unknown
  misc_feature (1)..( 7): Matrix.004 file - promoters50/1582576
tatttag

SEQ ID NO: 70061 - DNA, 11 bp, Unknown
  misc_feature (1)..( 11): Matrix.004 file - promoters50/1582576
ctaaaattata

SEQ ID NO: 70062 - DNA, 8 bp, Unknown
  misc_feature (1)..( 8): Matrix.004 file - promoters50/1582576
taattaat

SEQ ID NO: 70063 - DNA, 7 bp, Unknown
  misc_feature (1)..( 7): Matrix.004 file - promoters50/1582576
ctaaaat

SEQ ID NO: 70064 - DNA, 7 bp, Unknown
  misc_feature (1)..( 7): Matrix.004 file - promoters50/1582654
aaataat

SEQ ID NO: 70065 - DNA, 4 bp, Unknown
  misc_feature (1)..( 4): Matrix.004 file - promoters50/1582654
aaag

SEQ ID NO: 70066 - DNA, 8 bp, Unknown
  misc_feature (1)..( 8): Matrix.004 file - promoters50/1582654
aaaacaaa

SEQ ID NO: 70067 - DNA, 8 bp, Unknown
  misc_feature (1)..( 8): Matrix.004 file - promoters50/1582654
aaaaaaga

SEQ ID NO: 70068 - DNA, 9 bp, Unknown
  misc_feature (1)..( 9): Matrix.004 file - promoters50/1582658
tgtttttgg

SEQ ID NO: 70069 - DNA, 11 bp, Unknown
  misc_feature (1)..( 11): Matrix.004 file - promoters50/1582786
aatacaaatca

SEQ ID NO: 70070 - DNA, 7 bp, Unknown
  misc_feature (1)..( 7): Matrix.004 file - promoters50/1583044
ttctttt

SEQ ID NO: 70071 - DNA, 8 bp, Unknown
  misc_feature (1)..( 8): Matrix.004 file - promoters50/1583350
aagtatat

SEQ ID NO: 70072 - DNA, 9 bp, Unknown
  misc_feature (1)..( 9): Matrix.004 file - promoters50/1595585
tatattttt

SEQ ID NO: 70073 - DNA, 13 bp, Unknown
  misc_feature (1)..( 13): Matrix.004 file - promoters50/1595585
aaaaaaaaatcat

SEQ ID NO: 70074 - DNA, 10 bp, Unknown
  misc_feature (1)..( 10): Matrix.004 file - promoters50/1595635
aaagaaaaat

SEQ ID NO: 70075 - DNA, 9 bp, Unknown
  misc_feature (1)..( 9): Matrix.004 file - promoters50/1595635
acctgaatc

SEQ ID NO: 70076 - DNA, 8 bp, Unknown
  misc_feature (1)..( 8): Matrix.004 file - promoters50/1595635
caaaactg

SEQ ID NO: 70077 - DNA, 8 bp, Unknown
  misc_feature (1)..( 8): Matrix.004 file - promoters50/1595663
aaacatat

SEQ ID NO: 70078 - DNA, 7 bp, Unknown
  misc_feature (1)..( 7): Matrix.004 file - promoters50/1595663
ttctaac

SEQ ID NO: 70079 - DNA, 7 bp, Unknown
  misc_feature (1)..( 7): Matrix.004 file - promoters50/1595663
cttcagt

SEQ ID NO: 70080 - DNA, 7 bp, Unknown
  misc_feature (1)..( 7): Matrix.004 file - promoters50/1595663
caatatt

SEQ ID NO: 70081 - DNA, 9 bp, Unknown
  misc_feature (1)..( 9): Matrix.004 file - promoters50/1595663
caaaattat

SEQ ID NO: 70082 - DNA, 7 bp, Unknown
  misc_feature (1)..( 7): Matrix.004 file - promoters50/1595674
tttaatt

SEQ ID NO: 70083 - DNA, 8 bp, Unknown
  misc_feature (1)..( 8): Matrix.004 file - promoters50/1595678
taaagata

SEQ ID NO: 70084 - DNA, 9 bp, Unknown
  misc_feature (1)..( 9): Matrix.004 file - promoters50/1595678
aatgatttt

SEQ ID NO: 70085 - DNA, 8 bp, Unknown
  misc_feature (1)..( 8): Matrix.004 file - promoters50/1595678
acacaaaa

SEQ ID NO: 70086 - DNA, 8 bp, Unknown
  misc_feature (1)..( 8): Matrix.004 file - promoters50/1595687
ttacaaaa

SEQ ID NO: 70087 - DNA, 9 bp, Unknown
  misc_feature (1)..( 9): Matrix.004 file - promoters50/1595687
tttggaaat

SEQ ID NO: 70088 - DNA, 9 bp, Unknown
  misc_feature (1)..( 9): Matrix.004 file - promoters50/1595703
aaagaaaag

SEQ ID NO: 70089 - DNA, 10 bp, Unknown
  misc_feature (1)..( 10): Matrix.004 file - promoters50/1595707
cttaattcaa

SEQ ID NO: 70090 - DNA, 11 bp, Unknown
  misc_feature (1)..( 11): Matrix.004 file - promoters50/1595707
aatactaatct

SEQ ID NO: 70091 - DNA, 9 bp, Unknown
  misc_feature (1)..( 9): Matrix.004 file - promoters50/1595741
attttaatt

SEQ ID NO: 70092 - DNA, 10 bp, Unknown
  misc_feature (1)..( 10): Matrix.004 file - promoters50/1595741
aatttcaata

SEQ ID NO: 70093 - DNA, 11 bp, Unknown
  misc_feature (1)..( 11): Matrix.004 file - promoters50/1595752
ctatttttagt

SEQ ID NO: 70094 - DNA, 7 bp, Unknown
  misc_feature (1)..( 7): Matrix.004 file - promoters50/1595752
atatttt

SEQ ID NO: 70095 - DNA, 8 bp, Unknown
  misc_feature (1)..( 8): Matrix.004 file - promoters50/1595752
aaatctaa

SEQ ID NO: 70096 - DNA, 9 bp, Unknown
  misc_feature (1)..( 9): Matrix.004 file - promoters50/1595752
acaaccacc

SEQ ID NO: 70097 - DNA, 9 bp, Unknown
  misc_feature (1)..( 9): Matrix.004 file - promoters50/1595752
atatatata

SEQ ID NO: 70098 - DNA, 10 bp, Unknown
  misc_feature (1)..( 10): Matrix.004 file - promoters50/1595772
gaaatttctt

SEQ ID NO: 70099 - DNA, 6 bp, Unknown
  misc_feature (1)..( 6): Matrix.004 file - promoters50/1595772
ataatt

SEQ ID NO: 70100 - DNA, 11 bp, Unknown
  misc_feature (1)..( 11): Matrix.004 file - promoters50/1595772
tatataaataa

SEQ ID NO: 70101 - DNA, 11 bp, Unknown
  misc_feature (1)..( 11): Matrix.004 file - promoters50/1595772
ttataaataaa

SEQ ID NO: 70102 - DNA, 9 bp, Unknown
  misc_feature (1)..( 9): Matrix.004 file - promoters50/1595772
atataaaaa

SEQ ID NO: 70103 - DNA, 12 bp, Unknown
  misc_feature (1)..( 12): Matrix.004 file - promoters50/1595772
gtgtaaaaatta

SEQ ID NO: 70104 - DNA, 9 bp, Unknown
  misc_feature (1)..( 9): Matrix.004 file - promoters50/1595772
ataatatta

SEQ ID NO: 70105 - DNA, 12 bp, Unknown
  misc_feature (1)..( 12): Matrix.004 file - promoters50/1595772
atctttaattat

SEQ ID NO: 70106 - DNA, 10 bp, Unknown
  misc_feature (1)..( 10): Matrix.004 file - promoters50/1595772
taatttttat

SEQ ID NO: 70107 - DNA, 9 bp, Unknown
  misc_feature (1)..( 9): Matrix.004 file - promoters50/1595794
attttttat

SEQ ID NO: 70108 - DNA, 10 bp, Unknown
  misc_feature (1)..( 10): Matrix.004 file - promoters50/1595794
aattaattct

SEQ ID NO: 70109 - DNA, 9 bp, Unknown
  misc_feature (1)..( 9): Matrix.004 file - promoters50/1595794
ttagtcttt

SEQ ID NO: 70110 - DNA, 8 bp, Unknown
  misc_feature (1)..( 8): Matrix.004 file - promoters50/1595794
gtaaaaat

SEQ ID NO: 70111 - DNA, 11 bp, Unknown
  misc_feature (1)..( 11): Matrix.004 file - promoters50/1595794
attttaaaata

SEQ ID NO: 70112 - DNA, 8 bp, Unknown
  misc_feature (1)..( 8): Matrix.004 file - promoters50/1595829
taactaaa

SEQ ID NO: 70113 - DNA, 13 bp, Unknown
  misc_feature (1)..( 13): Matrix.004 file - promoters50/1595829
aaaattttaaaat

SEQ ID NO: 70114 - DNA, 9 bp, Unknown
  misc_feature (1)..( 9): Matrix.004 file - promoters50/1595829
acaataaat

SEQ ID NO: 70115 - DNA, 16 bp, Unknown
  misc_feature (1)..( 16): Matrix.004 file - promoters50/1595829
gttttcttagaaaata

SEQ ID NO: 70116 - DNA, 10 bp, Unknown
  misc_feature (1)..( 10): Matrix.004 file - promoters50/1595829
atataatttt

SEQ ID NO: 70117 - DNA, 17 bp, Unknown
  misc_feature (1)..( 17): Matrix.004 file - promoters50/1662819
aaacgaaaatattgttg

SEQ ID NO: 70118 - DNA, 7 bp, Unknown
  misc_feature (1)..( 7): Matrix.004 file - promoters50/1662819
acttatt

SEQ ID NO: 70119 - DNA, 9 bp, Unknown
  misc_feature (1)..( 9): Matrix.004 file - promoters50/1662827
ttatctaaa

SEQ ID NO: 70120 - DNA, 11 bp, Unknown
  misc_feature (1)..( 11): Matrix.004 file - promoters50/1662827
aaactattcaa

SEQ ID NO: 70121 - DNA, 10 bp, Unknown
  misc_feature (1)..( 10): Matrix.004 file - promoters50/1662827
tttaatttaa

SEQ ID NO: 70122 - DNA, 9 bp, Unknown
  misc_feature (1)..( 9): Matrix.004 file - promoters50/1662827
attttaaca

SEQ ID NO: 70123 - DNA, 7 bp, Unknown
  misc_feature (1)..( 7): Matrix.004 file - promoters50/1662827
tttattt

SEQ ID NO: 70124 - DNA, 12 bp, Unknown
  misc_feature (1)..( 12): Matrix.004 file - promoters50/1662843
gtataccaaaat

SEQ ID NO: 70125 - DNA, 10 bp, Unknown
  misc_feature (1)..( 10): Matrix.004 file - promoters50/1662843
ttcacattat

SEQ ID NO: 70126 - DNA, 9 bp, Unknown
  misc_feature (1)..( 9): Matrix.004 file - promoters50/1662843
taaatagta

SEQ ID NO: 70127 - DNA, 10 bp, Unknown
  misc_feature (1)..( 10): Matrix.004 file - promoters50/1662872
aattcaactc

SEQ ID NO: 70128 - DNA, 7 bp, Unknown
  misc_feature (1)..( 7): Matrix.004 file - promoters50/1662872
tttcctt

SEQ ID NO: 70129 - DNA, 9 bp, Unknown
  misc_feature (1)..( 9): Matrix.004 file - promoters50/1662895
ctagatctt

SEQ ID NO: 70130 - DNA, 9 bp, Unknown
  misc_feature (1)..( 9): Matrix.004 file - promoters50/1662895
tttcataag

SEQ ID NO: 70131 - DNA, 9 bp, Unknown
  misc_feature (1)..( 9): Matrix.004 file - promoters50/1662899
attgagaaa

SEQ ID NO: 70132 - DNA, 9 bp, Unknown
  misc_feature (1)..( 9): Matrix.004 file - promoters50/1662899
aaaattttt

SEQ ID NO: 70133 - DNA, 9 bp, Unknown
  misc_feature (1)..( 9): Matrix.004 file - promoters50/1662917
tatatgtag

SEQ ID NO: 70134 - DNA, 10 bp, Unknown
  misc_feature (1)..( 10): Matrix.004 file - promoters50/1662917
aaatcctcat

SEQ ID NO: 70135 - DNA, 11 bp, Unknown
  misc_feature (1)..( 11): Matrix.004 file - promoters50/1662917
tttataagtat

SEQ ID NO: 70136 - DNA, 10 bp, Unknown
  misc_feature (1)..( 10): Matrix.004 file - promoters50/1662917
taaattttga

SEQ ID NO: 70137 - DNA, 13 bp, Unknown
  misc_feature (1)..( 13): Matrix.004 file - promoters50/1662917
atttgatgaatgt

SEQ ID NO: 70138 - DNA, 17 bp, Unknown
  misc_feature (1)..( 17): Matrix.004 file - promoters50/1662917
taaattttaaaaatatt

SEQ ID NO: 70139 - DNA, 20 bp, Unknown
  misc_feature (1)..( 20): Matrix.004 file - promoters50/1662981
taaattttaaaattattcaa

SEQ ID NO: 70140 - DNA, 8 bp, Unknown
  misc_feature (1)..( 8): Matrix.004 file - promoters50/1662981
aatcttag

SEQ ID NO: 70141 - DNA, 10 bp, Unknown
  misc_feature (1)..( 10): Matrix.004 file - promoters50/1663082
aaaaacagaa

SEQ ID NO: 70142 - DNA, 11 bp, Unknown
  misc_feature (1)..( 11): Matrix.004 file - promoters50/1663127
aaatatttata

SEQ ID NO: 70143 - DNA, 11 bp, Unknown
  misc_feature (1)..( 11): Matrix.004 file - promoters50/1663135
ccaagaataat

SEQ ID NO: 70144 - DNA, 7 bp, Unknown
  misc_feature (1)..( 7): Matrix.004 file - promoters50/1663135
aacatag

SEQ ID NO: 70145 - DNA, 8 bp, Unknown
  misc_feature (1)..( 8): Matrix.004 file - promoters50/1663135
acactttc

SEQ ID NO: 70146 - DNA, 7 bp, Unknown
  misc_feature (1)..( 7): Matrix.004 file - promoters50/1663135
tttttaa

SEQ ID NO: 70147 - DNA, 9 bp, Unknown
  misc_feature (1)..( 9): Matrix.004 file - promoters50/1663135
aataaaatt

SEQ ID NO: 70148 - DNA, 10 bp, Unknown
  misc_feature (1)..( 10): Matrix.004 file - promoters50/1663147
caaaacaaaa

SEQ ID NO: 70149 - DNA, 9 bp, Unknown
  misc_feature (1)..( 9): Matrix.004 file - promoters50/1663147
ccatacact

SEQ ID NO: 70150 - DNA, 12 bp, Unknown
  misc_feature (1)..( 12): Matrix.004 file - promoters50/1663217
taaatccataca

SEQ ID NO: 70151 - DNA, 10 bp, Unknown
  misc_feature (1)..( 10): Matrix.004 file - promoters50/1663217
acatgatata

SEQ ID NO: 70152 - DNA, 9 bp, Unknown
  misc_feature (1)..( 9): Matrix.004 file - promoters50/1663217
accaaacca

SEQ ID NO: 70153 - DNA, 7 bp, Unknown
  misc_feature (1)..( 7): Matrix.004 file - promoters50/1663217
tcataaa

SEQ ID NO: 70154 - DNA, 9 bp, Unknown
  misc_feature (1)..( 9): Matrix.004 file - promoters50/1663221
attaagtaa

SEQ ID NO: 70155 - DNA, 12 bp, Unknown
  misc_feature (1)..( 12): Matrix.004 file - promoters50/1663261
atttttatttac

SEQ ID NO: 70156 - DNA, 8 bp, Unknown
  misc_feature (1)..( 8): Matrix.004 file - promoters50/1663261
attatcta

SEQ ID NO: 70157 - DNA, 8 bp, Unknown
  misc_feature (1)..( 8): Matrix.004 file - promoters50/1663261
aatataaa

SEQ ID NO: 70158 - DNA, 8 bp, Unknown
  misc_feature (1)..( 8): Matrix.004 file - promoters50/1663261
agaaaatt

SEQ ID NO: 70159 - DNA, 11 bp, Unknown
  misc_feature (1)..( 11): Matrix.004 file - promoters50/1663261
taacaaacaaa

SEQ ID NO: 70160 - DNA, 8 bp, Unknown
  misc_feature (1)..( 8): Matrix.004 file - promoters50/1663261
aataaatt

SEQ ID NO: 70161 - DNA, 9 bp, Unknown
  misc_feature (1)..( 9): Matrix.004 file - promoters50/1663261
taaattttc

SEQ ID NO: 70162 - DNA, 8 bp, Unknown
  misc_feature (1)..( 8): Matrix.004 file - promoters50/1663278
aaatatat

SEQ ID NO: 70163 - DNA, 11 bp, Unknown
  misc_feature (1)..( 11): Matrix.004 file - promoters50/1663278
tattgaaaaag

SEQ ID NO: 70164 - DNA, 13 bp, Unknown
  misc_feature (1)..( 13): Matrix.004 file - promoters50/1663332
cgttgagttcaat

SEQ ID NO: 70165 - DNA, 7 bp, Unknown
  misc_feature (1)..( 7): Matrix.004 file - promoters50/1663332
actttta

SEQ ID NO: 70166 - DNA, 10 bp, Unknown
  misc_feature (1)..( 10): Matrix.004 file - promoters50/1663353
ttttgacaaa

SEQ ID NO: 70167 - DNA, 12 bp, Unknown
  misc_feature (1)..( 12): Matrix.004 file - promoters50/1664727
taaactttaatt

SEQ ID NO: 70168 - DNA, 8 bp, Unknown
  misc_feature (1)..( 8): Matrix.004 file - promoters50/1664731
aaagaaaa

SEQ ID NO: 70169 - DNA, 10 bp, Unknown
  misc_feature (1)..( 10): Matrix.004 file - promoters50/1664755
ggcttagatt

SEQ ID NO: 70170 - DNA, 6 bp, Unknown
  misc_feature (1)..( 6): Matrix.004 file - promoters50/1664755
tttatt

SEQ ID NO: 70171 - DNA, 8 bp, Unknown
  misc_feature (1)..( 8): Matrix.004 file - promoters50/1664797
caaaattc

SEQ ID NO: 70172 - DNA, 11 bp, Unknown
  misc_feature (1)..( 11): Matrix.004 file - promoters50/1664797
aatcaaataga

SEQ ID NO: 70173 - DNA, 11 bp, Unknown
  misc_feature (1)..( 11): Matrix.004 file - promoters50/1664797
atttttttttt

SEQ ID NO: 70174 - DNA, 7 bp, Unknown
  misc_feature (1)..( 7): Matrix.004 file - promoters50/1664870
tttctaa

SEQ ID NO: 70175 - DNA, 10 bp, Unknown
  misc_feature (1)..( 10): Matrix.004 file - promoters50/1664870
tattctgtgg

SEQ ID NO: 70176 - DNA, 12 bp, Unknown
  misc_feature (1)..( 12): Matrix.004 file - promoters50/1664870
attctaaaaaaa

SEQ ID NO: 70177 - DNA, 12 bp, Unknown
  misc_feature (1)..( 12): Matrix.004 file - promoters50/1664931
aacaaatatatt

SEQ ID NO: 70178 - DNA, 11 bp, Unknown
  misc_feature (1)..( 11): Matrix.004 file - promoters50/1664931
ataaaaatttt

SEQ ID NO: 70179 - DNA, 15 bp, Unknown
  misc_feature (1)..( 15): Matrix.004 file - promoters50/1664931
ataaaaaatattgtt

SEQ ID NO: 70180 - DNA, 13 bp, Unknown
  misc_feature (1)..( 13): Matrix.004 file - promoters50/1664931
aataacatttgaa

SEQ ID NO: 70181 - DNA, 11 bp, Unknown
  misc_feature (1)..( 11): Matrix.004 file - promoters50/1664931
aaataagttac

SEQ ID NO: 70182 - DNA, 11 bp, Unknown
  misc_feature (1)..( 11): Matrix.004 file - promoters50/1664981
taacactcatc

SEQ ID NO: 70183 - DNA, 15 bp, Unknown
  misc_feature (1)..( 15): Matrix.004 file - promoters50/1664981
ttacaaattgaacca

SEQ ID NO: 70184 - DNA, 15 bp, Unknown
  misc_feature (1)..( 15): Matrix.004 file - promoters50/1664981
aaagtaaattgatag

SEQ ID NO: 70185 - DNA, 12 bp, Unknown
  misc_feature (1)..( 12): Matrix.004 file - promoters50/1664981
gaagtttatgat

SEQ ID NO: 70186 - DNA, 14 bp, Unknown
  misc_feature (1)..( 14): Matrix.004 file - promoters50/1665056
tactataaatataa

SEQ ID NO: 70187 - DNA, 12 bp, Unknown
  misc_feature (1)..( 12): Matrix.004 file - promoters50/1665056
gaaagaaaataa

SEQ ID NO: 70188 - DNA, 10 bp, Unknown
  misc_feature (1)..( 10): Matrix.004 file - promoters50/1665056
taacgaaaaa

SEQ ID NO: 70189 - DNA, 16 bp, Unknown
  misc_feature (1)..( 16): Matrix.004 file - promoters50/1665056
acaaagtttattaaaa

SEQ ID NO: 70190 - DNA, 11 bp, Unknown
  misc_feature (1)..( 11): Matrix.004 file - promoters50/1665080
tatatttttat

SEQ ID NO: 70191 - DNA, 7 bp, Unknown
  misc_feature (1)..( 7): Matrix.004 file - promoters50/1665080
tttgtta

SEQ ID NO: 70192 - DNA, 9 bp, Unknown
  misc_feature (1)..( 9): Matrix.004 file - promoters50/1665080
tcccttttt

SEQ ID NO: 70193 - DNA, 9 bp, Unknown
  misc_feature (1)..( 9): Matrix.004 file - promoters50/1665080
attaaacta

SEQ ID NO: 70194 - DNA, 11 bp, Unknown
  misc_feature (1)..( 11): Matrix.004 file - promoters50/1665080
tttcttccaag

SEQ ID NO: 70195 - DNA, 13 bp, Unknown
  misc_feature (1)..( 13): Matrix.004 file - promoters50/1665080
taaaaatatatat

SEQ ID NO: 70196 - DNA, 8 bp, Unknown
  misc_feature (1)..( 8): Matrix.004 file - promoters50/1665080
atttcttc

SEQ ID NO: 70197 - DNA, 9 bp, Unknown
  misc_feature (1)..( 9): Matrix.004 file - promoters50/1665243
tgtgattta

SEQ ID NO: 70198 - DNA, 6 bp, Unknown
  misc_feature (1)..( 6): Matrix.004 file - promoters50/1665243
atttta

SEQ ID NO: 70199 - DNA, 9 bp, Unknown
  misc_feature (1)..( 9): Matrix.004 file - promoters50/1665272
ataaaaagt

SEQ ID NO: 70200 - DNA, 11 bp, Unknown
  misc_feature (1)..( 11): Matrix.004 file - promoters50/1673798
aatttgattta

SEQ ID NO: 70201 - DNA, 11 bp, Unknown
  misc_feature (1)..( 11): Matrix.004 file - promoters50/1673806
taaaaaataaa

SEQ ID NO: 70202 - DNA, 11 bp, Unknown
  misc_feature (1)..( 11): Matrix.004 file - promoters50/1673826
taaaaaaataa

SEQ ID NO: 70203 - DNA, 10 bp, Unknown
  misc_feature (1)..( 10): Matrix.004 file - promoters50/1673826
ataggttaga

SEQ ID NO: 70204 - DNA, 8 bp, Unknown
  misc_feature (1)..( 8): Matrix.004 file - promoters50/1673830
atctttag

SEQ ID NO: 70205 - DNA, 8 bp, Unknown
  misc_feature (1)..( 8): Matrix.004 file - promoters50/1673830
aacaaaaa

SEQ ID NO: 70206 - DNA, 10 bp, Unknown
  misc_feature (1)..( 10): Matrix.004 file - promoters50/1673830
attaaaggaa

SEQ ID NO: 70207 - DNA, 7 bp, Unknown
  misc_feature (1)..( 7): Matrix.004 file - promoters50/1673830
ttcttct

SEQ ID NO: 70208 - DNA, 10 bp, Unknown
  misc_feature (1)..( 10): Matrix.004 file - promoters50/1673847
aaaacaaaaa

SEQ ID NO: 70209 - DNA, 8 bp, Unknown
  misc_feature (1)..( 8): Matrix.004 file - promoters50/1673847
taatataa

SEQ ID NO: 70210 - DNA, 11 bp, Unknown
  misc_feature (1)..( 11): Matrix.004 file - promoters50/1673847
ataaatcttat

SEQ ID NO: 70211 - DNA, 11 bp, Unknown
  misc_feature (1)..( 11): Matrix.004 file - promoters50/1673849
tttgtatgatt

SEQ ID NO: 70212 - DNA, 14 bp, Unknown
  misc_feature (1)..( 14): Matrix.004 file - promoters50/1673849
aatcaaataataaa

SEQ ID NO: 70213 - DNA, 9 bp, Unknown
  misc_feature (1)..( 9): Matrix.004 file - promoters50/1673853
aaatttatt

SEQ ID NO: 70214 - DNA, 8 bp, Unknown
  misc_feature (1)..( 8): Matrix.004 file - promoters50/1673853
agaatatt

SEQ ID NO: 70215 - DNA, 7 bp, Unknown
  misc_feature (1)..( 7): Matrix.004 file - promoters50/1710026
atttgaa

SEQ ID NO: 70216 - DNA, 9 bp, Unknown
  misc_feature (1)..( 9): Matrix.004 file - promoters50/1710026
atttcaatc

SEQ ID NO: 70217 - DNA, 7 bp, Unknown
  misc_feature (1)..( 7): Matrix.004 file - promoters50/1710051
tttcaat

SEQ ID NO: 70218 - DNA, 7 bp, Unknown
  misc_feature (1)..( 7): Matrix.004 file - promoters50/1710051
tttttca

SEQ ID NO: 70219 - DNA, 8 bp, Unknown
  misc_feature (1)..( 8): Matrix.004 file - promoters50/1710051
cttaaata

SEQ ID NO: 70220 - DNA, 10 bp, Unknown
  misc_feature (1)..( 10): Matrix.004 file - promoters50/1710645
caatttataa

SEQ ID NO: 70221 - DNA, 8 bp, Unknown
  misc_feature (1)..( 8): Matrix.004 file - promoters50/1710645
aatttcgt

SEQ ID NO: 70222 - DNA, 9 bp, Unknown
  misc_feature (1)..( 9): Matrix.004 file - promoters50/1710759
tttgatgaa

SEQ ID NO: 70223 - DNA, 9 bp, Unknown
  misc_feature (1)..( 9): Matrix.004 file - promoters50/1710759
atcctttta

SEQ ID NO: 70224 - DNA, 9 bp, Unknown
  misc_feature (1)..( 9): Matrix.004 file - promoters50/1710759
ttttaacaa

SEQ ID NO: 70225 - DNA, 8 bp, Unknown
  misc_feature (1)..( 8): Matrix.004 file - promoters50/1711228
caatttta

SEQ ID NO: 70226 - DNA, 9 bp, Unknown
  misc_feature (1)..( 9): Matrix.004 file - promoters50/1711228
ttcttaaga

SEQ ID NO: 70227 - DNA, 13 bp, Unknown
  misc_feature (1)..( 13): Matrix.004 file - promoters50/1711318
aaatgggcctaat

SEQ ID NO: 70228 - DNA, 7 bp, Unknown
  misc_feature (1)..( 7): Matrix.004 file - promoters50/1711318
aatatat

SEQ ID NO: 70229 - DNA, 10 bp, Unknown
  misc_feature (1)..( 10): Matrix.004 file - promoters50/1711318
gatttttgtt

SEQ ID NO: 70230 - DNA, 5 bp, Unknown
  misc_feature (1)..( 5): Matrix.004 file - promoters50/1711318
tatta

SEQ ID NO: 70231 - DNA, 9 bp, Unknown
  misc_feature (1)..( 9): Matrix.004 file - promoters50/1711318
aaattgaac

SEQ ID NO: 70232 - DNA, 15 bp, Unknown
  misc_feature (1)..( 15): Matrix.004 file - promoters50/1711318
taaaatgttaagtaa

SEQ ID NO: 70233 - DNA, 10 bp, Unknown
  misc_feature (1)..( 10): Matrix.004 file - promoters50/1711318
tgaattttat

SEQ ID NO: 70234 - DNA, 9 bp, Unknown
  misc_feature (1)..( 9): Matrix.004 file - promoters50/1711318
gattaattt

SEQ ID NO: 70235 - DNA, 8 bp, Unknown
  misc_feature (1)..( 8): Matrix.004 file - promoters50/1711318
ccatcaat

SEQ ID NO: 70236 - DNA, 11 bp, Unknown
  misc_feature (1)..( 11): Matrix.004 file - promoters50/1711318
atctaatttat

SEQ ID NO: 70237 - DNA, 8 bp, Unknown
  misc_feature (1)..( 8): Matrix.004 file - promoters50/1711586
gttattta

SEQ ID NO: 70238 - DNA, 15 bp, Unknown
  misc_feature (1)..( 15): Matrix.004 file - promoters50/1711586
ttatccaaaatataa

SEQ ID NO: 70239 - DNA, 11 bp, Unknown
  misc_feature (1)..( 11): Matrix.004 file - promoters50/1711626
aatatagcaaa

SEQ ID NO: 70240 - DNA, 10 bp, Unknown
  misc_feature (1)..( 10): Matrix.004 file - promoters50/1711626
aattaatctc

SEQ ID NO: 70241 - DNA, 6 bp, Unknown
  misc_feature (1)..( 6): Matrix.004 file - promoters50/1711626
attcga

SEQ ID NO: 70242 - DNA, 8 bp, Unknown
  misc_feature (1)..( 8): Matrix.004 file - promoters50/1711626
aatacaat

SEQ ID NO: 70243 - DNA, 7 bp, Unknown
  misc_feature (1)..( 7): Matrix.004 file - promoters50/1711638
attcgat

SEQ ID NO: 70244 - DNA, 10 bp, Unknown
  misc_feature (1)..( 10): Matrix.004 file - promoters50/1711638
aaatctaatt

SEQ ID NO: 70245 - DNA, 8 bp, Unknown
  misc_feature (1)..( 8): Matrix.004 file - promoters50/1711638
agaaaaag

SEQ ID NO: 70246 - DNA, 10 bp, Unknown
  misc_feature (1)..( 10): Matrix.004 file - promoters50/1711638
tttggattta

SEQ ID NO: 70247 - DNA, 13 bp, Unknown
  misc_feature (1)..( 13): Matrix.004 file - promoters50/1711650
attagatcttttt

SEQ ID NO: 70248 - DNA, 9 bp, Unknown
  misc_feature (1)..( 9): Matrix.004 file - promoters50/1711650
taaactttt

SEQ ID NO: 70249 - DNA, 10 bp, Unknown
  misc_feature (1)..( 10): Matrix.004 file - promoters50/1711650
tgtaataaat

SEQ ID NO: 70250 - DNA, 10 bp, Unknown
  misc_feature (1)..( 10): Matrix.004 file - promoters50/1711650
tgtttatttt

SEQ ID NO: 70251 - DNA, 7 bp, Unknown
  misc_feature (1)..( 7): Matrix.004 file - promoters50/1711662
caatttc

SEQ ID NO: 70252 - DNA, 15 bp, Unknown
  misc_feature (1)..( 15): Matrix.004 file - promoters50/1711666
tcggttaatttgcat

SEQ ID NO: 70253 - DNA, 7 bp, Unknown
  misc_feature (1)..( 7): Matrix.004 file - promoters50/1711666
aattaaa

SEQ ID NO: 70254 - DNA, 7 bp, Unknown
  misc_feature (1)..( 7): Matrix.004 file - promoters50/1711666
attattt

SEQ ID NO: 70255 - DNA, 9 bp, Unknown
  misc_feature (1)..( 9): Matrix.004 file - promoters50/1711666
ttaataaaa

SEQ ID NO: 70256 - DNA, 9 bp, Unknown
  misc_feature (1)..( 9): Matrix.004 file - promoters50/1711691
ttatttttt

SEQ ID NO: 70257 - DNA, 11 bp, Unknown
  misc_feature (1)..( 11): Matrix.004 file - promoters50/1711691
tattgaaccaa

SEQ ID NO: 70258 - DNA, 8 bp, Unknown
  misc_feature (1)..( 8): Matrix.004 file - promoters50/1711691
gtaaattt

SEQ ID NO: 70259 - DNA, 10 bp, Unknown
  misc_feature (1)..( 10): Matrix.004 file - promoters50/1711691
aaaccaaaat

SEQ ID NO: 70260 - DNA, 8 bp, Unknown
  misc_feature (1)..( 8): Matrix.004 file - promoters50/1711691
ttttttta

SEQ ID NO: 70261 - DNA, 8 bp, Unknown
  misc_feature (1)..( 8): Matrix.004 file - promoters50/1711691
tttttttt

SEQ ID NO: 70262 - DNA, 24 bp, Unknown
  misc_feature (1)..( 24): Matrix.004 file - promoters50/1712122
ccgtgcacgtagacacacaccact

SEQ ID NO: 70263 - DNA, 9 bp, Unknown
  misc_feature (1)..( 9): Matrix.004 file - promoters50/1712122
agttataat

SEQ ID NO: 70264 - DNA, 8 bp, Unknown
  misc_feature (1)..( 8): Matrix.004 file - promoters50/1712134
atataaaa

SEQ ID NO: 70265 - DNA, 8 bp, Unknown
  misc_feature (1)..( 8): Matrix.004 file - promoters50/1712134
atttttca

SEQ ID NO: 70266 - DNA, 7 bp, Unknown
  misc_feature (1)..( 7): Matrix.004 file - promoters50/1712134
tttttga

SEQ ID NO: 70267 - DNA, 12 bp, Unknown
  misc_feature (1)..( 12): Matrix.004 file - promoters50/1712134
aagttttttatg

SEQ ID NO: 70268 - DNA, 10 bp, Unknown
  misc_feature (1)..( 10): Matrix.004 file - promoters50/1712150
taatttttga

SEQ ID NO: 70269 - DNA, 11 bp, Unknown
  misc_feature (1)..( 11): Matrix.004 file - promoters50/1712150
cccatataaat

SEQ ID NO: 70270 - DNA, 12 bp, Unknown
  misc_feature (1)..( 12): Matrix.004 file - promoters50/1712174
cccaaatataaa

SEQ ID NO: 70271 - DNA, 7 bp, Unknown
  misc_feature (1)..( 7): Matrix.004 file - promoters50/1712174
ttttatc

SEQ ID NO: 70272 - DNA, 7 bp, Unknown
  misc_feature (1)..( 7): Matrix.004 file - promoters50/1712174
gaatcta

SEQ ID NO: 70273 - DNA, 8 bp, Unknown
  misc_feature (1)..( 8): Matrix.004 file - promoters50/1712174
attatttg

SEQ ID NO: 70274 - DNA, 9 bp, Unknown
  misc_feature (1)..( 9): Matrix.004 file - promoters50/1713776
gtcaaaaaa

SEQ ID NO: 70275 - DNA, 10 bp, Unknown
  misc_feature (1)..( 10): Matrix.004 file - promoters50/1713780
ttttatcttt

SEQ ID NO: 70276 - DNA, 12 bp, Unknown
  misc_feature (1)..( 12): Matrix.004 file - promoters50/1713780
tatccaaaacat

SEQ ID NO: 70277 - DNA, 11 bp, Unknown
  misc_feature (1)..( 11): Matrix.004 file - promoters50/1713780
aataaaatatc

SEQ ID NO: 70278 - DNA, 10 bp, Unknown
  misc_feature (1)..( 10): Matrix.004 file - promoters50/1713780
acgtaaaaaa

SEQ ID NO: 70279 - DNA, 10 bp, Unknown
  misc_feature (1)..( 10): Matrix.004 file - promoters50/1713804
aaaaacaata

SEQ ID NO: 70280 - DNA, 5 bp, Unknown
  misc_feature (1)..( 5): Matrix.004 file - promoters50/1713804
atata

SEQ ID NO: 70281 - DNA, 11 bp, Unknown
  misc_feature (1)..( 11): Matrix.004 file - promoters50/1713804
taaaagaatca

SEQ ID NO: 70282 - DNA, 5 bp, Unknown
  misc_feature (1)..( 5): Matrix.004 file - promoters50/1713804
ttata

SEQ ID NO: 70283 - DNA, 10 bp, Unknown
  misc_feature (1)..( 10): Matrix.004 file - promoters50/1713804
tatcaatttt

SEQ ID NO: 70284 - DNA, 7 bp, Unknown
  misc_feature (1)..( 7): Matrix.004 file - promoters50/1713839
ttatatc

SEQ ID NO: 70285 - DNA, 13 bp, Unknown
  misc_feature (1)..( 13): Matrix.004 file - promoters50/1713839
tattcaaaacata

SEQ ID NO: 70286 - DNA, 7 bp, Unknown
  misc_feature (1)..( 7): Matrix.004 file - promoters50/1713839
aaaataa

SEQ ID NO: 70287 - DNA, 9 bp, Unknown
  misc_feature (1)..( 9): Matrix.004 file - promoters50/1713839
acaaaataa

SEQ ID NO: 70288 - DNA, 11 bp, Unknown
  misc_feature (1)..( 11): Matrix.004 file - promoters50/1713839
aacgaaagatc

SEQ ID NO: 70289 - DNA, 9 bp, Unknown
  misc_feature (1)..( 9): Matrix.004 file - promoters50/1713842
agaaaagaa

SEQ ID NO: 70290 - DNA, 9 bp, Unknown
  misc_feature (1)..( 9): Matrix.004 file - promoters50/1713895
agatacagt

SEQ ID NO: 70291 - DNA, 11 bp, Unknown
  misc_feature (1)..( 11): Matrix.004 file - promoters50/1713895
attttatgcct

SEQ ID NO: 70292 - DNA, 13 bp, Unknown
  misc_feature (1)..( 13): Matrix.004 file - promoters50/1713895
tcatttattcgtg

SEQ ID NO: 70293 - DNA, 9 bp, Unknown
  misc_feature (1)..( 9): Matrix.004 file - promoters50/1713895
tattatttt

SEQ ID NO: 70294 - DNA, 11 bp, Unknown
  misc_feature (1)..( 11): Matrix.004 file - promoters50/1713895
ataagaaataa

SEQ ID NO: 70295 - DNA, 14 bp, Unknown
  misc_feature (1)..( 14): Matrix.004 file - promoters50/1714500
ataaaaaagttaaa

SEQ ID NO: 70296 - DNA, 8 bp, Unknown
  misc_feature (1)..( 8): Matrix.004 file - promoters50/1714500
tatttttt

SEQ ID NO: 70297 - DNA, 10 bp, Unknown
  misc_feature (1)..( 10): Matrix.004 file - promoters50/1714541
ttcaaaaaaa

SEQ ID NO: 70298 - DNA, 10 bp, Unknown
  misc_feature (1)..( 10): Matrix.004 file - promoters50/1714541
tctcattcat

SEQ ID NO: 70299 - DNA, 9 bp, Unknown
  misc_feature (1)..( 9): Matrix.004 file - promoters50/1714639
aatgttaaa

SEQ ID NO: 70300 - DNA, 8 bp, Unknown
  misc_feature (1)..( 8): Matrix.004 file - promoters50/1714682
ataaaacc

SEQ ID NO: 70301 - DNA, 8 bp, Unknown
  misc_feature (1)..( 8): Matrix.004 file - promoters50/1714682
atcagatt

SEQ ID NO: 70302 - DNA, 10 bp, Unknown
  misc_feature (1)..( 10): Matrix.004 file - promoters50/1714682
ccttataacc

SEQ ID NO: 70303 - DNA, 8 bp, Unknown
  misc_feature (1)..( 8): Matrix.004 file - promoters50/1714682
attttctt

SEQ ID NO: 70304 - DNA, 8 bp, Unknown
  misc_feature (1)..( 8): Matrix.004 file - promoters50/1714682
gaaacaat

SEQ ID NO: 70305 - DNA, 10 bp, Unknown
  misc_feature (1)..( 10): Matrix.004 file - promoters50/1714682
tctatatata

SEQ ID NO: 70306 - DNA, 7 bp, Unknown
  misc_feature (1)..( 7): Matrix.004 file - promoters50/1714682
atcaaaa

SEQ ID NO: 70307 - DNA, 8 bp, Unknown
  misc_feature (1)..( 8): Matrix.004 file - promoters50/1714682
aaaacaat

SEQ ID NO: 70308 - DNA, 8 bp, Unknown
  misc_feature (1)..( 8): Matrix.004 file - promoters50/1714682
tatataaa

SEQ ID NO: 70309 - DNA, 9 bp, Unknown
  misc_feature (1)..( 9): Matrix.004 file - promoters50/1714682
tctttaagt

SEQ ID NO: 70310 - DNA, 7 bp, Unknown
  misc_feature (1)..( 7): Matrix.004 file - promoters50/1714694
atataaa

SEQ ID NO: 70311 - DNA, 7 bp, Unknown
  misc_feature (1)..( 7): Matrix.004 file - promoters50/1714694
tttgctt

SEQ ID NO: 70312 - DNA, 8 bp, Unknown
  misc_feature (1)..( 8): Matrix.004 file - promoters50/1714694
ttgtatat

SEQ ID NO: 70313 - DNA, 11 bp, Unknown
  misc_feature (1)..( 11): Matrix.004 file - promoters50/1714772
tatcatttttt

SEQ ID NO: 70314 - DNA, 7 bp, Unknown
  misc_feature (1)..( 7): Matrix.004 file - promoters50/1714772
aaacaaa

SEQ ID NO: 70315 - DNA, 9 bp, Unknown
  misc_feature (1)..( 9): Matrix.004 file - promoters50/1714772
aaagtaaag

SEQ ID NO: 70316 - DNA, 8 bp, Unknown
  misc_feature (1)..( 8): Matrix.004 file - promoters50/1714772
ttttttaa

SEQ ID NO: 70317 - DNA, 8 bp, Unknown
  misc_feature (1)..( 8): Matrix.004 file - promoters50/1714772
aaaaagaa

SEQ ID NO: 70318 - DNA, 9 bp, Unknown
  misc_feature (1)..( 9): Matrix.004 file - promoters50/1714806
aaaataaaa

SEQ ID NO: 70319 - DNA, 6 bp, Unknown
  misc_feature (1)..( 6): Matrix.004 file - promoters50/1714806
atggga

SEQ ID NO: 70320 - DNA, 12 bp, Unknown
  misc_feature (1)..( 12): Matrix.004 file - promoters50/1714831
aaagatgaaaaa

SEQ ID NO: 70321 - DNA, 8 bp, Unknown
  misc_feature (1)..( 8): Matrix.004 file - promoters50/1714837
ataaaaat

SEQ ID NO: 70322 - DNA, 8 bp, Unknown
  misc_feature (1)..( 8): Matrix.004 file - promoters50/1714837
aaaacaaa

SEQ ID NO: 70323 - DNA, 8 bp, Unknown
  misc_feature (1)..( 8): Matrix.004 file - promoters50/1714837
aatttaaa

SEQ ID NO: 70324 - DNA, 9 bp, Unknown
  misc_feature (1)..( 9): Matrix.004 file - promoters50/1714837
caaattagt

SEQ ID NO: 70325 - DNA, 8 bp, Unknown
  misc_feature (1)..( 8): Matrix.004 file - promoters50/1714857
tataatta

SEQ ID NO: 70326 - DNA, 8 bp, Unknown
  misc_feature (1)..( 8): Matrix.004 file - promoters50/1714857
acatgaag

SEQ ID NO: 70327 - DNA, 8 bp, Unknown
  misc_feature (1)..( 8): Matrix.004 file - promoters50/1714865
cttataat

SEQ ID NO: 70328 - DNA, 14 bp, Unknown
  misc_feature (1)..( 14): Matrix.004 file - promoters50/1714865
caaaaaacaaaaca

SEQ ID NO: 70329 - DNA, 11 bp, Unknown
  misc_feature (1)..( 11): Matrix.004 file - promoters50/1714865
ctataaaataa

SEQ ID NO: 70330 - DNA, 11 bp, Unknown
  misc_feature (1)..( 11): Matrix.004 file - promoters50/1714865
ataaaatacaa

SEQ ID NO: 70331 - DNA, 9 bp, Unknown
  misc_feature (1)..( 9): Matrix.004 file - promoters50/1714865
atttataaa

SEQ ID NO: 70332 - DNA, 11 bp, Unknown
  misc_feature (1)..( 11): Matrix.004 file - promoters50/1714865
aaaaataaaaa

SEQ ID NO: 70333 - DNA, 9 bp, Unknown
  misc_feature (1)..( 9): Matrix.004 file - promoters50/1714865
aaaaattta

SEQ ID NO: 70334 - DNA, 12 bp, Unknown
  misc_feature (1)..( 12): Matrix.004 file - promoters50/1714865
gaaaaaaaaaaa

SEQ ID NO: 70335 - DNA, 10 bp, Unknown
  misc_feature (1)..( 10): Matrix.004 file - promoters50/1714865
aaaataaaat

SEQ ID NO: 70336 - DNA, 9 bp, Unknown
  misc_feature (1)..( 9): Matrix.004 file - promoters50/1714877
aaatgatta

SEQ ID NO: 70337 - DNA, 7 bp, Unknown
  misc_feature (1)..( 7): Matrix.004 file - promoters50/1714912
ttaattt

SEQ ID NO: 70338 - DNA, 11 bp, Unknown
  misc_feature (1)..( 11): Matrix.004 file - promoters50/1714942
aaaaagaaaaa

SEQ ID NO: 70339 - DNA, 10 bp, Unknown
  misc_feature (1)..( 10): Matrix.004 file - promoters50/1714974
cattgcttag

SEQ ID NO: 70340 - DNA, 10 bp, Unknown
  misc_feature (1)..( 10): Matrix.004 file - promoters50/1714974
ttgaatttat

SEQ ID NO: 70341 - DNA, 5 bp, Unknown
  misc_feature (1)..( 5): Matrix.004 file - promoters50/1714974
aaacg

SEQ ID NO: 70342 - DNA, 10 bp, Unknown
  misc_feature (1)..( 10): Matrix.004 file - promoters50/1714974
aataaaacga

SEQ ID NO: 70343 - DNA, 11 bp, Unknown
  misc_feature (1)..( 11): Matrix.004 file - promoters50/1714974
aaaaatttatt

SEQ ID NO: 70344 - DNA, 9 bp, Unknown
  misc_feature (1)..( 9): Matrix.004 file - promoters50/1714989
aaaccttat

SEQ ID NO: 70345 - DNA, 12 bp, Unknown
  misc_feature (1)..( 12): Matrix.004 file - promoters50/1714989
aacaaacatatt

SEQ ID NO: 70346 - DNA, 8 bp, Unknown
  misc_feature (1)..( 8): Matrix.004 file - promoters50/1714989
aaaatatt

SEQ ID NO: 70347 - DNA, 10 bp, Unknown
  misc_feature (1)..( 10): Matrix.004 file - promoters50/1714989
taaaaaaatt

SEQ ID NO: 70348 - DNA, 12 bp, Unknown
  misc_feature (1)..( 12): Matrix.004 file - promoters50/1714989
tacaaacaaaaa

SEQ ID NO: 70349 - DNA, 9 bp, Unknown
  misc_feature (1)..( 9): Matrix.004 file - promoters50/1714989
ttaaaaacg

SEQ ID NO: 70350 - DNA, 10 bp, Unknown
  misc_feature (1)..( 10): Matrix.004 file - promoters50/1714989
attacacaaa

SEQ ID NO: 70351 - DNA, 11 bp, Unknown
  misc_feature (1)..( 11): Matrix.004 file - promoters50/1714989
aattatttatc

SEQ ID NO: 70352 - DNA, 12 bp, Unknown
  misc_feature (1)..( 12): Matrix.004 file - promoters50/1714989
tccatataaaat

SEQ ID NO: 70353 - DNA, 13 bp, Unknown
  misc_feature (1)..( 13): Matrix.004 file - promoters50/1714989
acaaaaaaacaat

SEQ ID NO: 70354 - DNA, 10 bp, Unknown
  misc_feature (1)..( 10): Matrix.004 file - promoters50/1715054
ttgattttaa

SEQ ID NO: 70355 - DNA, 10 bp, Unknown
  misc_feature (1)..( 10): Matrix.004 file - promoters50/1715054
aaattgattt

SEQ ID NO: 70356 - DNA, 13 bp, Unknown
  misc_feature (1)..( 13): Matrix.004 file - promoters50/1715054
taattatgttaat

SEQ ID NO: 70357 - DNA, 7 bp, Unknown
  misc_feature (1)..( 7): Matrix.004 file - promoters50/1715054
agcattt

SEQ ID NO: 70358 - DNA, 7 bp, Unknown
  misc_feature (1)..( 7): Matrix.004 file - promoters50/1715054
aaagaac

SEQ ID NO: 70359 - DNA, 8 bp, Unknown
  misc_feature (1)..( 8): Matrix.004 file - promoters50/1715054
tttaatta

SEQ ID NO: 70360 - DNA, 7 bp, Unknown
  misc_feature (1)..( 7): Matrix.004 file - promoters50/1715146
aatgttc

SEQ ID NO: 70361 - DNA, 7 bp, Unknown
  misc_feature (1)..( 7): Matrix.004 file - promoters50/1715146
ttccata

SEQ ID NO: 70362 - DNA, 9 bp, Unknown
  misc_feature (1)..( 9): Matrix.004 file - promoters50/1715146
tataaattc

SEQ ID NO: 70363 - DNA, 7 bp, Unknown
  misc_feature (1)..( 7): Matrix.004 file - promoters50/1715146
atccaat

SEQ ID NO: 70364 - DNA, 8 bp, Unknown
  misc_feature (1)..( 8): Matrix.004 file - promoters50/1715146
gaatttaa

SEQ ID NO: 70365 - DNA, 9 bp, Unknown
  misc_feature (1)..( 9): Matrix.004 file - promoters50/1715146
agataataa

SEQ ID NO: 70366 - DNA, 10 bp, Unknown
  misc_feature (1)..( 10): Matrix.004 file - promoters50/1715146
aaattattaa

SEQ ID NO: 70367 - DNA, 8 bp, Unknown
  misc_feature (1)..( 8): Matrix.004 file - promoters50/1715146
aagaaaaa

SEQ ID NO: 70368 - DNA, 8 bp, Unknown
  misc_feature (1)..( 8): Matrix.004 file - promoters50/1715204
aatttaag

SEQ ID NO: 70369 - DNA, 7 bp, Unknown
  misc_feature (1)..( 7): Matrix.004 file - promoters50/1715204
aaaagtc

SEQ ID NO: 70370 - DNA, 10 bp, Unknown
  misc_feature (1)..( 10): Matrix.004 file - promoters50/1715204
aagtgcttaa

SEQ ID NO: 70371 - DNA, 10 bp, Unknown
  misc_feature (1)..( 10): Matrix.004 file - promoters50/1715220
attcaagatt

SEQ ID NO: 70372 - DNA, 5 bp, Unknown
  misc_feature (1)..( 5): Matrix.004 file - promoters50/1715220
ctgtc

SEQ ID NO: 70373 - DNA, 11 bp, Unknown
  misc_feature (1)..( 11): Matrix.004 file - promoters50/1715220
ccaaaaatgaa

SEQ ID NO: 70374 - DNA, 11 bp, Unknown
  misc_feature (1)..( 11): Matrix.004 file - promoters50/1715224
atcaactttag

SEQ ID NO: 70375 - DNA, 8 bp, Unknown
  misc_feature (1)..( 8): Matrix.004 file - promoters50/1715224
ttataaaa

SEQ ID NO: 70376 - DNA, 10 bp, Unknown
  misc_feature (1)..( 10): Matrix.004 file - promoters50/1715224
aattactaaa

SEQ ID NO: 70377 - DNA, 8 bp, Unknown
  misc_feature (1)..( 8): Matrix.004 file - promoters50/1715329
tatgaaaa

SEQ ID NO: 70378 - DNA, 8 bp, Unknown
  misc_feature (1)..( 8): Matrix.004 file - promoters50/1715329
ttctaaaa

SEQ ID NO: 70379 - DNA, 9 bp, Unknown
  misc_feature (1)..( 9): Matrix.004 file - promoters50/1715329
ccttcttct

SEQ ID NO: 70380 - DNA, 9 bp, Unknown
  misc_feature (1)..( 9): Matrix.004 file - promoters50/1715329
agattttat

SEQ ID NO: 70381 - DNA, 7 bp, Unknown
  misc_feature (1)..( 7): Matrix.004 file - promoters50/1715329
ttttatt

SEQ ID NO: 70382 - DNA, 10 bp, Unknown
  misc_feature (1)..( 10): Matrix.004 file - promoters50/1715347
ttagatcatt

SEQ ID NO: 70383 - DNA, 10 bp, Unknown
  misc_feature (1)..( 10): Matrix.004 file - promoters50/1715347
ttttaaataa

SEQ ID NO: 70384 - DNA, 16 bp, Unknown
  misc_feature (1)..( 16): Matrix.004 file - promoters50/1715400
tagaatcaaaattctt

SEQ ID NO: 70385 - DNA, 11 bp, Unknown
  misc_feature (1)..( 11): Matrix.004 file - promoters50/1715478
aggttctcaga

SEQ ID NO: 70386 - DNA, 8 bp, Unknown
  misc_feature (1)..( 8): Matrix.004 file - promoters50/1715490
ttaaaatc

SEQ ID NO: 70387 - DNA, 7 bp, Unknown
  misc_feature (1)..( 7): Matrix.004 file - promoters50/1715516
agaaact

SEQ ID NO: 70388 - DNA, 9 bp, Unknown
  misc_feature (1)..( 9): Matrix.004 file - promoters50/1715516
ttatatcca

SEQ ID NO: 70389 - DNA, 13 bp, Unknown
  misc_feature (1)..( 13): Matrix.004 file - promoters50/1715516
ctcctataaattg

SEQ ID NO: 70390 - DNA, 10 bp, Unknown
  misc_feature (1)..( 10): Matrix.004 file - promoters50/1715516
taaatttaca

SEQ ID NO: 70391 - DNA, 12 bp, Unknown
  misc_feature (1)..( 12): Matrix.004 file - promoters50/1715516
aaaaatttaaaa

SEQ ID NO: 70392 - DNA, 8 bp, Unknown
  misc_feature (1)..( 8): Matrix.004 file - promoters50/1715516
aactattt

SEQ ID NO: 70393 - DNA, 12 bp, Unknown
  misc_feature (1)..( 12): Matrix.004 file - promoters50/1715535
caaaattttaac

SEQ ID NO: 70394 - DNA, 9 bp, Unknown
  misc_feature (1)..( 9): Matrix.004 file - promoters50/1715535
caaattttc

SEQ ID NO: 70395 - DNA, 9 bp, Unknown
  misc_feature (1)..( 9): Matrix.004 file - promoters50/1715535
caaaatttc

SEQ ID NO: 70396 - DNA, 12 bp, Unknown
  misc_feature (1)..( 12): Matrix.004 file - promoters50/1715595
atatgatttagt

SEQ ID NO: 70397 - DNA, 12 bp, Unknown
  misc_feature (1)..( 12): Matrix.004 file - promoters50/1715615
aaattaaacata

SEQ ID NO: 70398 - DNA, 8 bp, Unknown
  misc_feature (1)..( 8): Matrix.004 file - promoters50/1715810
taaaaaca

SEQ ID NO: 70399 - DNA, 12 bp, Unknown
  misc_feature (1)..( 12): Matrix.004 file - promoters50/1715994
ggaaattaaatt

SEQ ID NO: 70400 - DNA, 8 bp, Unknown
  misc_feature (1)..( 8): Matrix.004 file - promoters50/1716037
aataaaca

SEQ ID NO: 70401 - DNA, 7 bp, Unknown
  misc_feature (1)..( 7): Matrix.004 file - promoters50/1716037
atatatt

SEQ ID NO: 70402 - DNA, 13 bp, Unknown
  misc_feature (1)..( 13): Matrix.004 file - promoters50/1716037
tagattgtttctt

SEQ ID NO: 70403 - DNA, 7 bp, Unknown
  misc_feature (1)..( 7): Matrix.004 file - promoters50/1716037
gaaattt

SEQ ID NO: 70404 - DNA, 9 bp, Unknown
  misc_feature (1)..( 9): Matrix.004 file - promoters50/1716037
tttttgaat

SEQ ID NO: 70405 - DNA, 12 bp, Unknown
  misc_feature (1)..( 12): Matrix.004 file - promoters50/1716037
aaaaattttatt

SEQ ID NO: 70406 - DNA, 12 bp, Unknown
  misc_feature (1)..( 12): Matrix.004 file - promoters50/1716037
ataaaataatta

SEQ ID NO: 70407 - DNA, 9 bp, Unknown
  misc_feature (1)..( 9): Matrix.004 file - promoters50/1716040
aaaaatttt

SEQ ID NO: 70408 - DNA, 11 bp, Unknown
  misc_feature (1)..( 11): Matrix.004 file - promoters50/1806991
attaaatgtta

SEQ ID NO: 70409 - DNA, 11 bp, Unknown
  misc_feature (1)..( 11): Matrix.004 file - promoters50/1806991
ttaacaaaaaa

SEQ ID NO: 70410 - DNA, 9 bp, Unknown
  misc_feature (1)..( 9): Matrix.004 file - promoters50/1806998
catttgtat

SEQ ID NO: 70411 - DNA, 12 bp, Unknown
  misc_feature (1)..( 12): Matrix.004 file - promoters50/1807014
aaaacaaaattt

SEQ ID NO: 70412 - DNA, 10 bp, Unknown
  misc_feature (1)..( 10): Matrix.004 file - promoters50/1807014
aattttttcc

SEQ ID NO: 70413 - DNA, 10 bp, Unknown
  misc_feature (1)..( 10): Matrix.004 file - promoters50/1807067
ttaaaagaaa

SEQ ID NO: 70414 - DNA, 13 bp, Unknown
  misc_feature (1)..( 13): Matrix.004 file - promoters50/1807067
tttaaaacaagga

SEQ ID NO: 70415 - DNA, 14 bp, Unknown
  misc_feature (1)..( 14): Matrix.004 file - promoters50/1807067
atgtattattgtat

SEQ ID NO: 70416 - DNA, 15 bp, Unknown
  misc_feature (1)..( 15): Matrix.004 file - promoters50/1807067
acaactaattatata

SEQ ID NO: 70417 - DNA, 11 bp, Unknown
  misc_feature (1)..( 11): Matrix.004 file - promoters50/1807067
tcgattttaag

SEQ ID NO: 70418 - DNA, 10 bp, Unknown
  misc_feature (1)..( 10): Matrix.004 file - promoters50/1807244
cgtatcattt

SEQ ID NO: 70419 - DNA, 9 bp, Unknown
  misc_feature (1)..( 9): Matrix.004 file - promoters50/1807415
tgtcctaat

SEQ ID NO: 70420 - DNA, 8 bp, Unknown
  misc_feature (1)..( 8): Matrix.004 file - promoters50/1807415
ctttgtct

SEQ ID NO: 70421 - DNA, 7 bp, Unknown
  misc_feature (1)..( 7): Matrix.004 file - promoters50/1807415
atttttt

SEQ ID NO: 70422 - DNA, 8 bp, Unknown
  misc_feature (1)..( 8): Matrix.004 file - promoters50/1807415
tttctctc

SEQ ID NO: 70423 - DNA, 7 bp, Unknown
  misc_feature (1)..( 7): Matrix.004 file - promoters50/1807415
caaataa

SEQ ID NO: 70424 - DNA, 7 bp, Unknown
  misc_feature (1)..( 7): Matrix.004 file - promoters50/1807554
atcttta

SEQ ID NO: 70425 - DNA, 11 bp, Unknown
  misc_feature (1)..( 11): Matrix.004 file - promoters50/1807554
aatatgttttt

SEQ ID NO: 70426 - DNA, 7 bp, Unknown
  misc_feature (1)..( 7): Matrix.004 file - promoters50/1807554
tttcacc

SEQ ID NO: 70427 - DNA, 6 bp, Unknown
  misc_feature (1)..( 6): Matrix.004 file - promoters50/1807554
taaaac

SEQ ID NO: 70428 - DNA, 10 bp, Unknown
  misc_feature (1)..( 10): Matrix.004 file - promoters50/1807736
tccatcccta

SEQ ID NO: 70429 - DNA, 10 bp, Unknown
  misc_feature (1)..( 10): Matrix.004 file - promoters50/1807740
atatgaatac

SEQ ID NO: 70430 - DNA, 8 bp, Unknown
  misc_feature (1)..( 8): Matrix.004 file - promoters50/1807771
aaacttaa

SEQ ID NO: 70431 - DNA, 8 bp, Unknown
  misc_feature (1)..( 8): Matrix.004 file - promoters50/1807771
aaaaacac

SEQ ID NO: 70432 - DNA, 10 bp, Unknown
  misc_feature (1)..( 10): Matrix.004 file - promoters50/1807774
acaaaatata

SEQ ID NO: 70433 - DNA, 10 bp, Unknown
  misc_feature (1)..( 10): Matrix.004 file - promoters50/1807774
taaaaatttt

SEQ ID NO: 70434 - DNA, 10 bp, Unknown
  misc_feature (1)..( 10): Matrix.004 file - promoters50/1807774
ttttggaaat

SEQ ID NO: 70435 - DNA, 7 bp, Unknown
  misc_feature (1)..( 7): Matrix.004 file - promoters50/1807774
aaatttt

SEQ ID NO: 70436 - DNA, 8 bp, Unknown
  misc_feature (1)..( 8): Matrix.004 file - promoters50/1807774
ataccaac

SEQ ID NO: 70437 - DNA, 8 bp, Unknown
  misc_feature (1)..( 8): Matrix.004 file - promoters50/1807774
cactgttt

SEQ ID NO: 70438 - DNA, 8 bp, Unknown
  misc_feature (1)..( 8): Matrix.004 file - promoters50/1807774
tataaata

SEQ ID NO: 70439 - DNA, 8 bp, Unknown
  misc_feature (1)..( 8): Matrix.004 file - promoters50/1808030
atttattt

SEQ ID NO: 70440 - DNA, 7 bp, Unknown
  misc_feature (1)..( 7): Matrix.004 file - promoters50/1808030
ggtccat

SEQ ID NO: 70441 - DNA, 8 bp, Unknown
  misc_feature (1)..( 8): Matrix.004 file - promoters50/1808030
atacaaat

SEQ ID NO: 70442 - DNA, 7 bp, Unknown
  misc_feature (1)..( 7): Matrix.004 file - promoters50/1808072
caaaaac

SEQ ID NO: 70443 - DNA, 12 bp, Unknown
  misc_feature (1)..( 12): Matrix.004 file - promoters50/1808072
taaataattaat

SEQ ID NO: 70444 - DNA, 8 bp, Unknown
  misc_feature (1)..( 8): Matrix.004 file - promoters50/1808072
taatataa

SEQ ID NO: 70445 - DNA, 13 bp, Unknown
  misc_feature (1)..( 13): Matrix.004 file - promoters50/1808072
atacaaaattaaa

SEQ ID NO: 70446 - DNA, 8 bp, Unknown
  misc_feature (1)..( 8): Matrix.004 file - promoters50/1808072
aaaattta

SEQ ID NO: 70447 - DNA, 8 bp, Unknown
  misc_feature (1)..( 8): Matrix.004 file - promoters50/1808072
aaaattat

SEQ ID NO: 70448 - DNA, 14 bp, Unknown
  misc_feature (1)..( 14): Matrix.004 file - promoters50/1808072
tcaaaaattatata

SEQ ID NO: 70449 - DNA, 11 bp, Unknown
  misc_feature (1)..( 11): Matrix.004 file - promoters50/1808072
gataaattaaa

SEQ ID NO: 70450 - DNA, 11 bp, Unknown
  misc_feature (1)..( 11): Matrix.004 file - promoters50/1808072
attattaataa

SEQ ID NO: 70451 - DNA, 12 bp, Unknown
  misc_feature (1)..( 12): Matrix.004 file - promoters50/1808088
atttaaaaacaa

SEQ ID NO: 70452 - DNA, 7 bp, Unknown
  misc_feature (1)..( 7): Matrix.004 file - promoters50/1808088
ttttacc

SEQ ID NO: 70453 - DNA, 8 bp, Unknown
  misc_feature (1)..( 8): Matrix.004 file - promoters50/1808088
acaaaaaa

SEQ ID NO: 70454 - DNA, 11 bp, Unknown
  misc_feature (1)..( 11): Matrix.004 file - promoters50/1808088
aaagaggattg

SEQ ID NO: 70455 - DNA, 7 bp, Unknown
  misc_feature (1)..( 7): Matrix.004 file - promoters50/1808111
taaaaaa

SEQ ID NO: 70456 - DNA, 5 bp, Unknown
  misc_feature (1)..( 5): Matrix.004 file - promoters50/1808111
taaaa

SEQ ID NO: 70457 - DNA, 8 bp, Unknown
  misc_feature (1)..( 8): Matrix.004 file - promoters50/1808111
aaaaatga

SEQ ID NO: 70458 - DNA, 8 bp, Unknown
  misc_feature (1)..( 8): Matrix.004 file - promoters50/1808111
tatataaa

SEQ ID NO: 70459 - DNA, 6 bp, Unknown
  misc_feature (1)..( 6): Matrix.004 file - promoters50/1808145
acaaaa

SEQ ID NO: 70460 - DNA, 8 bp, Unknown
  misc_feature (1)..( 8): Matrix.004 file - promoters50/1808145
agagttta

SEQ ID NO: 70461 - DNA, 8 bp, Unknown
  misc_feature (1)..( 8): Matrix.004 file - promoters50/1808145
atagaaag

SEQ ID NO: 70462 - DNA, 8 bp, Unknown
  misc_feature (1)..( 8): Matrix.004 file - promoters50/1808145
acatggtt

SEQ ID NO: 70463 - DNA, 12 bp, Unknown
  misc_feature (1)..( 12): Matrix.004 file - promoters50/1808156
agcccatttgaa

SEQ ID NO: 70464 - DNA, 9 bp, Unknown
  misc_feature (1)..( 9): Matrix.004 file - promoters50/1808168
aaatttgaa

SEQ ID NO: 70465 - DNA, 10 bp, Unknown
  misc_feature (1)..( 10): Matrix.004 file - promoters50/1808168
taaaataaaa

SEQ ID NO: 70466 - DNA, 8 bp, Unknown
  misc_feature (1)..( 8): Matrix.004 file - promoters50/1808172
tataaaca

SEQ ID NO: 70467 - DNA, 9 bp, Unknown
  misc_feature (1)..( 9): Matrix.004 file - promoters50/1808172
caaatttta

SEQ ID NO: 70468 - DNA, 10 bp, Unknown
  misc_feature (1)..( 10): Matrix.004 file - promoters50/1808172
aattaacttt

SEQ ID NO: 70469 - DNA, 9 bp, Unknown
  misc_feature (1)..( 9): Matrix.004 file - promoters50/1808172
caaattatc

SEQ ID NO: 70470 - DNA, 9 bp, Unknown
  misc_feature (1)..( 9): Matrix.004 file - promoters50/1808172
tatataaaa

SEQ ID NO: 70471 - DNA, 13 bp, Unknown
  misc_feature (1)..( 13): Matrix.004 file - promoters50/1808172
aaataattaaact

SEQ ID NO: 70472 - DNA, 6 bp, Unknown
  misc_feature (1)..( 6): Matrix.004 file - promoters50/1808172
taaaac

SEQ ID NO: 70473 - DNA, 10 bp, Unknown
  misc_feature (1)..( 10): Matrix.004 file - promoters50/1808172
tatataattc

SEQ ID NO: 70474 - DNA, 8 bp, Unknown
  misc_feature (1)..( 8): Matrix.004 file - promoters50/1808172
aaataaag

SEQ ID NO: 70475 - DNA, 11 bp, Unknown
  misc_feature (1)..( 11): Matrix.004 file - promoters50/1808172
ccaaaaaaaaa

SEQ ID NO: 70476 - DNA, 10 bp, Unknown
  misc_feature (1)..( 10): Matrix.004 file - promoters50/1808172
tatataaaaa

SEQ ID NO: 70477 - DNA, 10 bp, Unknown
  misc_feature (1)..( 10): Matrix.004 file - promoters50/1808172
tttatttttg

SEQ ID NO: 70478 - DNA, 12 bp, Unknown
  misc_feature (1)..( 12): Matrix.004 file - promoters50/1808172
gtataaaacaaa

SEQ ID NO: 70479 - DNA, 9 bp, Unknown
  misc_feature (1)..( 9): Matrix.004 file - promoters50/1808184
taaaacaaa

SEQ ID NO: 70480 - DNA, 9 bp, Unknown
  misc_feature (1)..( 9): Matrix.004 file - promoters50/1808490
aatttttca

SEQ ID NO: 70481 - DNA, 11 bp, Unknown
  misc_feature (1)..( 11): Matrix.004 file - promoters50/1808490
agttaaatttg

SEQ ID NO: 70482 - DNA, 10 bp, Unknown
  misc_feature (1)..( 10): Matrix.004 file - promoters50/1808549
aaaaacttag

SEQ ID NO: 70483 - DNA, 7 bp, Unknown
  misc_feature (1)..( 7): Matrix.004 file - promoters50/1808549
atcaaat

SEQ ID NO: 70484 - DNA, 10 bp, Unknown
  misc_feature (1)..( 10): Matrix.004 file - promoters50/1808549
ctaaaatgac

SEQ ID NO: 70485 - DNA, 8 bp, Unknown
  misc_feature (1)..( 8): Matrix.004 file - promoters50/1808549
atttaaaa

SEQ ID NO: 70486 - DNA, 7 bp, Unknown
  misc_feature (1)..( 7): Matrix.004 file - promoters50/1808549
actttta

SEQ ID NO: 70487 - DNA, 10 bp, Unknown
  misc_feature (1)..( 10): Matrix.004 file - promoters50/1808572
aataactaaa

SEQ ID NO: 70488 - DNA, 11 bp, Unknown
  misc_feature (1)..( 11): Matrix.004 file - promoters50/1808572
actaattagta

SEQ ID NO: 70489 - DNA, 8 bp, Unknown
  misc_feature (1)..( 8): Matrix.004 file - promoters50/1808572
gtaaatta

SEQ ID NO: 70490 - DNA, 7 bp, Unknown
  misc_feature (1)..( 7): Matrix.004 file - promoters50/1808572
aaaaaaa

SEQ ID NO: 70491 - DNA, 9 bp, Unknown
  misc_feature (1)..( 9): Matrix.004 file - promoters50/1808572
ttattttat

SEQ ID NO: 70492 - DNA, 8 bp, Unknown
  misc_feature (1)..( 8): Matrix.004 file - promoters50/1808635
atataaag

SEQ ID NO: 70493 - DNA, 8 bp, Unknown
  misc_feature (1)..( 8): Matrix.004 file - promoters50/1808696
tgtcaatt

SEQ ID NO: 70494 - DNA, 9 bp, Unknown
  misc_feature (1)..( 9): Matrix.004 file - promoters50/1808696
aactattat

SEQ ID NO: 70495 - DNA, 11 bp, Unknown
  misc_feature (1)..( 11): Matrix.004 file - promoters50/1808696
ataataaatat

SEQ ID NO: 70496 - DNA, 8 bp, Unknown
  misc_feature (1)..( 8): Matrix.004 file - promoters50/1808753
tataaagt

SEQ ID NO: 70497 - DNA, 9 bp, Unknown
  misc_feature (1)..( 9): Matrix.004 file - promoters50/1808753
tataaacaa

SEQ ID NO: 70498 - DNA, 6 bp, Unknown
  misc_feature (1)..( 6): Matrix.004 file - promoters50/1809003
acatac

SEQ ID NO: 70499 - DNA, 8 bp, Unknown
  misc_feature (1)..( 8): Matrix.004 file - promoters50/1809088
catttttt

SEQ ID NO: 70500 - DNA, 13 bp, Unknown
  misc_feature (1)..( 13): Matrix.004 file - promoters50/1809088
aacaaaattttaa

SEQ ID NO: 70501 - DNA, 14 bp, Unknown
  misc_feature (1)..( 14): Matrix.004 file - promoters50/1809088
tgattttcacatat

SEQ ID NO: 70502 - DNA, 12 bp, Unknown
  misc_feature (1)..( 12): Matrix.004 file - promoters50/1809088
tcatccatacat

SEQ ID NO: 70503 - DNA, 16 bp, Unknown
  misc_feature (1)..( 16): Matrix.004 file - promoters50/1809157
aaagcttttatataaa

SEQ ID NO: 70504 - DNA, 15 bp, Unknown
  misc_feature (1)..( 15): Matrix.004 file - promoters50/1809157
atttctacaaaaaaa

SEQ ID NO: 70505 - DNA, 9 bp, Unknown
  misc_feature (1)..( 9): Matrix.004 file - promoters50/1809233
aagaaaaca

SEQ ID NO: 70506 - DNA, 10 bp, Unknown
  misc_feature (1)..( 10): Matrix.004 file - promoters50/1809233
taaaattaag

SEQ ID NO: 70507 - DNA, 12 bp, Unknown
  misc_feature (1)..( 12): Matrix.004 file - promoters50/1809235
ttacttcttata

SEQ ID NO: 70508 - DNA, 10 bp, Unknown
  misc_feature (1)..( 10): Matrix.004 file - promoters50/1809235
aatgaattta

SEQ ID NO: 70509 - DNA, 11 bp, Unknown
  misc_feature (1)..( 11): Matrix.004 file - promoters50/1809243
ttgaaaaattg

SEQ ID NO: 70510 - DNA, 10 bp, Unknown
  misc_feature (1)..( 10): Matrix.004 file - promoters50/1809243
aaattaattt

SEQ ID NO: 70511 - DNA, 8 bp, Unknown
  misc_feature (1)..( 8): Matrix.004 file - promoters50/1809253
acaaattt

SEQ ID NO: 70512 - DNA, 9 bp, Unknown
  misc_feature (1)..( 9): Matrix.004 file - promoters50/1809253
atttacaat

SEQ ID NO: 70513 - DNA, 12 bp, Unknown
  misc_feature (1)..( 12): Matrix.004 file - promoters50/1809253
aaataaaatcaa

SEQ ID NO: 70514 - DNA, 7 bp, Unknown
  misc_feature (1)..( 7): Matrix.004 file - promoters50/1809253
atatata

SEQ ID NO: 70515 - DNA, 9 bp, Unknown
  misc_feature (1)..( 9): Matrix.004 file - promoters50/1809253
attcgtttc

SEQ ID NO: 70516 - DNA, 9 bp, Unknown
  misc_feature (1)..( 9): Matrix.004 file - promoters50/1820893
attagttta

SEQ ID NO: 70517 - DNA, 8 bp, Unknown
  misc_feature (1)..( 8): Matrix.004 file - promoters50/1820893
ttttgttt

SEQ ID NO: 70518 - DNA, 9 bp, Unknown
  misc_feature (1)..( 9): Matrix.004 file - promoters50/1830195
cttttattc

SEQ ID NO: 70519 - DNA, 7 bp, Unknown
  misc_feature (1)..( 7): Matrix.004 file - promoters50/1830195
aaagaaa

SEQ ID NO: 70520 - DNA, 8 bp, Unknown
  misc_feature (1)..( 8): Matrix.004 file - promoters50/1837627
tctctata

SEQ ID NO: 70521 - DNA, 7 bp, Unknown
  misc_feature (1)..( 7): Matrix.004 file - promoters50/1837627
gattttt

SEQ ID NO: 70522 - DNA, 9 bp, Unknown
  misc_feature (1)..( 9): Matrix.004 file - promoters50/1837627
gattttttt

SEQ ID NO: 70523 - DNA, 10 bp, Unknown
  misc_feature (1)..( 10): Matrix.004 file - promoters50/1837627
aaaataataa

SEQ ID NO: 70524 - DNA, 9 bp, Unknown
  misc_feature (1)..( 9): Matrix.004 file - promoters50/1837627
aaacaaaaa

SEQ ID NO: 70525 - DNA, 8 bp, Unknown
  misc_feature (1)..( 8): Matrix.004 file - promoters50/1920394
ataaaatt

SEQ ID NO: 70526 - DNA, 7 bp, Unknown
  misc_feature (1)..( 7): Matrix.004 file - promoters50/1920394
aatgtta

SEQ ID NO: 70527 - DNA, 10 bp, Unknown
  misc_feature (1)..( 10): Matrix.004 file - promoters50/1920394
ttttaatgtg

SEQ ID NO: 70528 - DNA, 10 bp, Unknown
  misc_feature (1)..( 10): Matrix.004 file - promoters50/1920394
gttttaatgt

SEQ ID NO: 70529 - DNA, 12 bp, Unknown
  misc_feature (1)..( 12): Matrix.004 file - promoters50/1920394
ccaagttttatt

SEQ ID NO: 70530 - DNA, 10 bp, Unknown
  misc_feature (1)..( 10): Matrix.004 file - promoters50/1920394
aattttagaa

SEQ ID NO: 70531 - DNA, 8 bp, Unknown
  misc_feature (1)..( 8): Matrix.004 file - promoters50/1920394
ataattaa

SEQ ID NO: 70532 - DNA, 8 bp, Unknown
  misc_feature (1)..( 8): Matrix.004 file - promoters50/1920394
ttaaaaag

SEQ ID NO: 70533 - DNA, 8 bp, Unknown
  misc_feature (1)..( 8): Matrix.004 file - promoters50/1921363
aaactatt

SEQ ID NO: 70534 - DNA, 9 bp, Unknown
  misc_feature (1)..( 9): Matrix.004 file - promoters50/1921363
caaattttc

SEQ ID NO: 70535 - DNA, 9 bp, Unknown
  misc_feature (1)..( 9): Matrix.004 file - promoters50/1921363
atttaaata

SEQ ID NO: 70536 - DNA, 9 bp, Unknown
  misc_feature (1)..( 9): Matrix.004 file - promoters50/1921363
cagaaaata

SEQ ID NO: 70537 - DNA, 13 bp, Unknown
  misc_feature (1)..( 13): Matrix.004 file - promoters50/1923743
tatatattgaaat

SEQ ID NO: 70538 - DNA, 9 bp, Unknown
  misc_feature (1)..( 9): Matrix.004 file - promoters50/1957018
tttcaaaat

SEQ ID NO: 70539 - DNA, 14 bp, Unknown
  misc_feature (1)..( 14): Matrix.004 file - promoters50/1957094
tacaaagattctta

SEQ ID NO: 70540 - DNA, 8 bp, Unknown
  misc_feature (1)..( 8): Matrix.004 file - promoters50/1957212
cggcaaat

SEQ ID NO: 70541 - DNA, 7 bp, Unknown
  misc_feature (1)..( 7): Matrix.004 file - promoters50/1957212
tagagaa

SEQ ID NO: 70542 - DNA, 10 bp, Unknown
  misc_feature (1)..( 10): Matrix.004 file - promoters50/1957241
gcaaacagac

SEQ ID NO: 70543 - DNA, 9 bp, Unknown
  misc_feature (1)..( 9): Matrix.004 file - promoters50/1957241
caaactaaa

SEQ ID NO: 70544 - DNA, 8 bp, Unknown
  misc_feature (1)..( 8): Matrix.004 file - promoters50/1957245
cttacaaa

SEQ ID NO: 70545 - DNA, 17 bp, Unknown
  misc_feature (1)..( 17): Matrix.004 file - promoters50/1957245
aaaaagtagttatttca

SEQ ID NO: 70546 - DNA, 9 bp, Unknown
  misc_feature (1)..( 9): Matrix.004 file - promoters50/1957245
aaataaaat

SEQ ID NO: 70547 - DNA, 11 bp, Unknown
  misc_feature (1)..( 11): Matrix.004 file - promoters50/1957245
acaaaaacaga

SEQ ID NO: 70548 - DNA, 11 bp, Unknown
  misc_feature (1)..( 11): Matrix.004 file - promoters50/1957245
acaaaaataga

SEQ ID NO: 70549 - DNA, 12 bp, Unknown
  misc_feature (1)..( 12): Matrix.004 file - promoters50/1957296
acgcagatagat

SEQ ID NO: 70550 - DNA, 7 bp, Unknown
  misc_feature (1)..( 7): Matrix.004 file - promoters50/1957303
aaagaaa

SEQ ID NO: 70551 - DNA, 8 bp, Unknown
  misc_feature (1)..( 8): Matrix.004 file - promoters50/1957303
aaacgaaa

SEQ ID NO: 70552 - DNA, 8 bp, Unknown
  misc_feature (1)..( 8): Matrix.004 file - promoters50/1957303
gaagaaag

SEQ ID NO: 70553 - DNA, 14 bp, Unknown
  misc_feature (1)..( 14): Matrix.004 file - promoters50/1957303
agaagaaaatcgaa

SEQ ID NO: 70554 - DNA, 8 bp, Unknown
  misc_feature (1)..( 8): Matrix.004 file - promoters50/1957303
atttaaag

SEQ ID NO: 70555 - DNA, 8 bp, Unknown
  misc_feature (1)..( 8): Matrix.004 file - promoters50/1957303
agcaaatc

SEQ ID NO: 70556 - DNA, 10 bp, Unknown
  misc_feature (1)..( 10): Matrix.004 file - promoters50/1959878
gaaaaaaaaa

SEQ ID NO: 70557 - DNA, 11 bp, Unknown
  misc_feature (1)..( 11): Matrix.004 file - promoters50/1959920
tctaattggac

SEQ ID NO: 70558 - DNA, 9 bp, Unknown
  misc_feature (1)..( 9): Matrix.004 file - promoters50/1959920
gcatctctt

SEQ ID NO: 70559 - DNA, 10 bp, Unknown
  misc_feature (1)..( 10): Matrix.004 file - promoters50/1959927
gatttgggat

SEQ ID NO: 70560 - DNA, 8 bp, Unknown
  misc_feature (1)..( 8): Matrix.004 file - promoters50/1959965
aaatattt

SEQ ID NO: 70561 - DNA, 12 bp, Unknown
  misc_feature (1)..( 12): Matrix.004 file - promoters50/1959965
aaaagttcatct

SEQ ID NO: 70562 - DNA, 9 bp, Unknown
  misc_feature (1)..( 9): Matrix.004 file - promoters50/1959965
tttcatata

SEQ ID NO: 70563 - DNA, 7 bp, Unknown
  misc_feature (1)..( 7): Matrix.004 file - promoters50/1959965
ccatttt

SEQ ID NO: 70564 - DNA, 9 bp, Unknown
  misc_feature (1)..( 9): Matrix.004 file - promoters50/1959965
ttaaatatt

SEQ ID NO: 70565 - DNA, 8 bp, Unknown
  misc_feature (1)..( 8): Matrix.004 file - promoters50/1959965
attttttt

SEQ ID NO: 70566 - DNA, 10 bp, Unknown
  misc_feature (1)..( 10): Matrix.004 file - promoters50/1959965
agttattcat

SEQ ID NO: 70567 - DNA, 9 bp, Unknown
  misc_feature (1)..( 9): Matrix.004 file - promoters50/1974123
tttattaaa

SEQ ID NO: 70568 - DNA, 13 bp, Unknown
  misc_feature (1)..( 13): Matrix.004 file - promoters50/1974123
ttatcaaacaaat

SEQ ID NO: 70569 - DNA, 11 bp, Unknown
  misc_feature (1)..( 11): Matrix.004 file - promoters50/1974123
aattattttgt

SEQ ID NO: 70570 - DNA, 9 bp, Unknown
  misc_feature (1)..( 9): Matrix.004 file - promoters50/1974123
taaaacacc

SEQ ID NO: 70571 - DNA, 12 bp, Unknown
  misc_feature (1)..( 12): Matrix.004 file - promoters50/1974123
aaagaaaataga

SEQ ID NO: 70572 - DNA, 8 bp, Unknown
  misc_feature (1)..( 8): Matrix.004 file - promoters50/1974123
tttataaa

SEQ ID NO: 70573 - DNA, 9 bp, Unknown
  misc_feature (1)..( 9): Matrix.004 file - promoters50/1974282
gaaattaga

SEQ ID NO: 70574 - DNA, 10 bp, Unknown
  misc_feature (1)..( 10): Matrix.004 file - promoters50/1974282
atacttagaa

SEQ ID NO: 70575 - DNA, 14 bp, Unknown
  misc_feature (1)..( 14): Matrix.004 file - promoters50/1974282
cctttttgtaacat

SEQ ID NO: 70576 - DNA, 14 bp, Unknown
  misc_feature (1)..( 14): Matrix.004 file - promoters50/1974501
ctaaaaacttataa

SEQ ID NO: 70577 - DNA, 11 bp, Unknown
  misc_feature (1)..( 11): Matrix.004 file - promoters50/1974501
ttaaatgattt

SEQ ID NO: 70578 - DNA, 16 bp, Unknown
  misc_feature (1)..( 16): Matrix.004 file - promoters50/1974501
aaaaataaaataattt

SEQ ID NO: 70579 - DNA, 11 bp, Unknown
  misc_feature (1)..( 11): Matrix.004 file - promoters50/1974501
taataaaataa

SEQ ID NO: 70580 - DNA, 13 bp, Unknown
  misc_feature (1)..( 13): Matrix.004 file - promoters50/1974737
aataaaaatttat

SEQ ID NO: 70581 - DNA, 8 bp, Unknown
  misc_feature (1)..( 8): Matrix.004 file - promoters50/1974737
tataaaaa

SEQ ID NO: 70582 - DNA, 12 bp, Unknown
  misc_feature (1)..( 12): Matrix.004 file - promoters50/1974761
aaagagaagaaa

SEQ ID NO: 70583 - DNA, 9 bp, Unknown
  misc_feature (1)..( 9): Matrix.004 file - promoters50/1974761
aaatttaac

SEQ ID NO: 70584 - DNA, 6 bp, Unknown
  misc_feature (1)..( 6): Matrix.004 file - promoters50/1974761
atttaa

SEQ ID NO: 70585 - DNA, 8 bp, Unknown
  misc_feature (1)..( 8): Matrix.004 file - promoters50/1974761
aataaatt

SEQ ID NO: 70586 - DNA, 7 bp, Unknown
  misc_feature (1)..( 7): Matrix.004 file - promoters50/1974761
taaattt

SEQ ID NO: 70587 - DNA, 14 bp, Unknown
  misc_feature (1)..( 14): Matrix.004 file - promoters50/1974761
ggagattgtccaca

SEQ ID NO: 70588 - DNA, 8 bp, Unknown
  misc_feature (1)..( 8): Matrix.004 file - promoters50/1974761
aaaaacat

SEQ ID NO: 70589 - DNA, 8 bp, Unknown
  misc_feature (1)..( 8): Matrix.004 file - promoters50/1975887
aacaaaat

SEQ ID NO: 70590 - DNA, 8 bp, Unknown
  misc_feature (1)..( 8): Matrix.004 file - promoters50/1975887
taattgta

SEQ ID NO: 70591 - DNA, 16 bp, Unknown
  misc_feature (1)..( 16): Matrix.004 file - promoters50/1975895
tttgtaaattgtaatc

SEQ ID NO: 70592 - DNA, 8 bp, Unknown
  misc_feature (1)..( 8): Matrix.004 file - promoters50/1975940
aaaaacaa

SEQ ID NO: 70593 - DNA, 12 bp, Unknown
  misc_feature (1)..( 12): Matrix.004 file - promoters50/1975940
catttaaatgaa

SEQ ID NO: 70594 - DNA, 9 bp, Unknown
  misc_feature (1)..( 9): Matrix.004 file - promoters50/1975940
acaaataaa

SEQ ID NO: 70595 - DNA, 11 bp, Unknown
  misc_feature (1)..( 11): Matrix.004 file - promoters50/1975940
tttgatttcta

SEQ ID NO: 70596 - DNA, 12 bp, Unknown
  misc_feature (1)..( 12): Matrix.004 file - promoters50/1975940
taaaattgaaag

SEQ ID NO: 70597 - DNA, 10 bp, Unknown
  misc_feature (1)..( 10): Matrix.004 file - promoters50/1975940
attaaaattt

SEQ ID NO: 70598 - DNA, 9 bp, Unknown
  misc_feature (1)..( 9): Matrix.004 file - promoters50/1975940
gtataattt

SEQ ID NO: 70599 - DNA, 12 bp, Unknown
  misc_feature (1)..( 12): Matrix.004 file - promoters50/1975940
aattttgaattc

SEQ ID NO: 70600 - DNA, 14 bp, Unknown
  misc_feature (1)..( 14): Matrix.004 file - promoters50/1975956
tataaaaattaaga

SEQ ID NO: 70601 - DNA, 7 bp, Unknown
  misc_feature (1)..( 7): Matrix.004 file - promoters50/1975956
taataat

SEQ ID NO: 70602 - DNA, 6 bp, Unknown
  misc_feature (1)..( 6): Matrix.004 file - promoters50/1975956
aatttt

SEQ ID NO: 70603 - DNA, 14 bp, Unknown
  misc_feature (1)..( 14): Matrix.004 file - promoters50/1975956
ttgaatcaatattt

SEQ ID NO: 70604 - DNA, 7 bp, Unknown
  misc_feature (1)..( 7): Matrix.004 file - promoters50/1975956
tgaaaaa

SEQ ID NO: 70605 - DNA, 9 bp, Unknown
  misc_feature (1)..( 9): Matrix.004 file - promoters50/1975956
taaatttct

SEQ ID NO: 70606 - DNA, 8 bp, Unknown
  misc_feature (1)..( 8): Matrix.004 file - promoters50/1975989
aattatat

SEQ ID NO: 70607 - DNA, 9 bp, Unknown
  misc_feature (1)..( 9): Matrix.004 file - promoters50/1975989
tcataattt

SEQ ID NO: 70608 - DNA, 8 bp, Unknown
  misc_feature (1)..( 8): Matrix.004 file - promoters50/1975989
tttaattt

SEQ ID NO: 70609 - DNA, 7 bp, Unknown
  misc_feature (1)..( 7): Matrix.004 file - promoters50/1975989
taaatct

SEQ ID NO: 70610 - DNA, 10 bp, Unknown
  misc_feature (1)..( 10): Matrix.004 file - promoters50/1975989
taaaactgat

SEQ ID NO: 70611 - DNA, 8 bp, Unknown
  misc_feature (1)..( 8): Matrix.004 file - promoters50/1975989
attttttt

SEQ ID NO: 70612 - DNA, 8 bp, Unknown
  misc_feature (1)..( 8): Matrix.004 file - promoters50/1975989
tcattttt

SEQ ID NO: 70613 - DNA, 7 bp, Unknown
  misc_feature (1)..( 7): Matrix.004 file - promoters50/1976000
tataaac

SEQ ID NO: 70614 - DNA, 9 bp, Unknown
  misc_feature (1)..( 9): Matrix.004 file - promoters50/1976004
aaaacaatt

SEQ ID NO: 70615 - DNA, 11 bp, Unknown
  misc_feature (1)..( 11): Matrix.004 file - promoters50/1976004
ttatcccattg

SEQ ID NO: 70616 - DNA, 10 bp, Unknown
  misc_feature (1)..( 10): Matrix.004 file - promoters50/1976004
tattaaatta

SEQ ID NO: 70617 - DNA, 13 bp, Unknown
  misc_feature (1)..( 13): Matrix.004 file - promoters50/1976004
attaaaaaaaatt

SEQ ID NO: 70618 - DNA, 10 bp, Unknown
  misc_feature (1)..( 10): Matrix.004 file - promoters50/1976004
aagaaataaa

SEQ ID NO: 70619 - DNA, 9 bp, Unknown
  misc_feature (1)..( 9): Matrix.004 file - promoters50/1976004
acaaaattt

SEQ ID NO: 70620 - DNA, 14 bp, Unknown
  misc_feature (1)..( 14): Matrix.004 file - promoters50/1976004
tttataaaaaaata

SEQ ID NO: 70621 - DNA, 11 bp, Unknown
  misc_feature (1)..( 11): Matrix.004 file - promoters50/1976004
taacaaaaaaa

SEQ ID NO: 70622 - DNA, 9 bp, Unknown
  misc_feature (1)..( 9): Matrix.004 file - promoters50/1976004
aggcccatt

SEQ ID NO: 70623 - DNA, 10 bp, Unknown
  misc_feature (1)..( 10): Matrix.004 file - promoters50/1976004
tgtaatttgt

SEQ ID NO: 70624 - DNA, 10 bp, Unknown
  misc_feature (1)..( 10): Matrix.004 file - promoters50/1976004
gtaaaaaaat

SEQ ID NO: 70625 - DNA, 10 bp, Unknown
  misc_feature (1)..( 10): Matrix.004 file - promoters50/1976004
atcaaaaaat

SEQ ID NO: 70626 - DNA, 11 bp, Unknown
  misc_feature (1)..( 11): Matrix.004 file - promoters50/1976004
aattaaataaa

SEQ ID NO: 70627 - DNA, 10 bp, Unknown
  misc_feature (1)..( 10): Matrix.004 file - promoters50/1976004
atgttattta

SEQ ID NO: 70628 - DNA, 8 bp, Unknown
  misc_feature (1)..( 8): Matrix.004 file - promoters50/1976011
aataaaat

SEQ ID NO: 70629 - DNA, 8 bp, Unknown
  misc_feature (1)..( 8): Matrix.004 file - promoters50/1976019
cataatta

SEQ ID NO: 70630 - DNA, 10 bp, Unknown
  misc_feature (1)..( 10): Matrix.004 file - promoters50/1976047
aaaaattcta

SEQ ID NO: 70631 - DNA, 12 bp, Unknown
  misc_feature (1)..( 12): Matrix.004 file - promoters50/1976047
atttaaaagatc

SEQ ID NO: 70632 - DNA, 7 bp, Unknown
  misc_feature (1)..( 7): Matrix.004 file - promoters50/1976047
tttctcg

SEQ ID NO: 70633 - DNA, 9 bp, Unknown
  misc_feature (1)..( 9): Matrix.004 file - promoters50/1976047
gatttcaaa

SEQ ID NO: 70634 - DNA, 11 bp, Unknown
  misc_feature (1)..( 11): Matrix.004 file - promoters50/1976047
tcataaaactt

SEQ ID NO: 70635 - DNA, 10 bp, Unknown
  misc_feature (1)..( 10): Matrix.004 file - promoters50/1976047
attacaaaaa

SEQ ID NO: 70636 - DNA, 7 bp, Unknown
  misc_feature (1)..( 7): Matrix.004 file - promoters50/1976063
ttaattt

SEQ ID NO: 70637 - DNA, 9 bp, Unknown
  misc_feature (1)..( 9): Matrix.004 file - promoters50/1976063
aatgaagct

SEQ ID NO: 70638 - DNA, 7 bp, Unknown
  misc_feature (1)..( 7): Matrix.004 file - promoters50/1976078
atttttc

SEQ ID NO: 70639 - DNA, 11 bp, Unknown
  misc_feature (1)..( 11): Matrix.004 file - promoters50/1976078
taaatgaatca

SEQ ID NO: 70640 - DNA, 11 bp, Unknown
  misc_feature (1)..( 11): Matrix.004 file - promoters50/1976102
gaataaaaata

SEQ ID NO: 70641 - DNA, 7 bp, Unknown
  misc_feature (1)..( 7): Matrix.004 file - promoters50/1976102
tttcaaa

SEQ ID NO: 70642 - DNA, 10 bp, Unknown
  misc_feature (1)..( 10): Matrix.004 file - promoters50/1976107
tttttgttcc

SEQ ID NO: 70643 - DNA, 8 bp, Unknown
  misc_feature (1)..( 8): Matrix.004 file - promoters50/1976107
tataattt

SEQ ID NO: 70644 - DNA, 10 bp, Unknown
  misc_feature (1)..( 10): Matrix.004 file - promoters50/1976158
tttaatttcc

SEQ ID NO: 70645 - DNA, 11 bp, Unknown
  misc_feature (1)..( 11): Matrix.004 file - promoters50/1976158
cataactaatt

SEQ ID NO: 70646 - DNA, 9 bp, Unknown
  misc_feature (1)..( 9): Matrix.004 file - promoters50/1976158
catttctac

SEQ ID NO: 70647 - DNA, 12 bp, Unknown
  misc_feature (1)..( 12): Matrix.004 file - promoters50/1976158
atcaattttata

SEQ ID NO: 70648 - DNA, 13 bp, Unknown
  misc_feature (1)..( 13): Matrix.004 file - promoters50/1976158
ttaatcaaaccaa

SEQ ID NO: 70649 - DNA, 9 bp, Unknown
  misc_feature (1)..( 9): Matrix.004 file - promoters50/1976158
aaaaaatta

SEQ ID NO: 70650 - DNA, 9 bp, Unknown
  misc_feature (1)..( 9): Matrix.004 file - promoters50/1976174
attgtaatt

SEQ ID NO: 70651 - DNA, 11 bp, Unknown
  misc_feature (1)..( 11): Matrix.004 file - promoters50/1976174
atacttatatt

SEQ ID NO: 70652 - DNA, 5 bp, Unknown
  misc_feature (1)..( 5): Matrix.004 file - promoters50/1976174
tgatt

SEQ ID NO: 70653 - DNA, 7 bp, Unknown
  misc_feature (1)..( 7): Matrix.004 file - promoters50/1976174
aactatt

SEQ ID NO: 70654 - DNA, 7 bp, Unknown
  misc_feature (1)..( 7): Matrix.004 file - promoters50/1976174
gaaaaaa

SEQ ID NO: 70655 - DNA, 8 bp, Unknown
  misc_feature (1)..( 8): Matrix.004 file - promoters50/1976174
tgcttttg

SEQ ID NO: 70656 - DNA, 10 bp, Unknown
  misc_feature (1)..( 10): Matrix.004 file - promoters50/1976174
atattttaat

SEQ ID NO: 70657 - DNA, 9 bp, Unknown
  misc_feature (1)..( 9): Matrix.004 file - promoters50/1976223
ttatataaa

SEQ ID NO: 70658 - DNA, 8 bp, Unknown
  misc_feature (1)..( 8): Matrix.004 file - promoters50/1976226
ctttcatt

SEQ ID NO: 70659 - DNA, 9 bp, Unknown
  misc_feature (1)..( 9): Matrix.004 file - promoters50/1976236
tgatacaga

SEQ ID NO: 70660 - DNA, 14 bp, Unknown
  misc_feature (1)..( 14): Matrix.004 file - promoters50/1976236
ctatcttaaaaata

SEQ ID NO: 70661 - DNA, 8 bp, Unknown
  misc_feature (1)..( 8): Matrix.004 file - promoters50/1976270
tattagta

SEQ ID NO: 70662 - DNA, 9 bp, Unknown
  misc_feature (1)..( 9): Matrix.004 file - promoters50/1976270
aaatttttt

SEQ ID NO: 70663 - DNA, 7 bp, Unknown
  misc_feature (1)..( 7): Matrix.004 file - promoters50/1976270
aaaataa

SEQ ID NO: 70664 - DNA, 9 bp, Unknown
  misc_feature (1)..( 9): Matrix.004 file - promoters50/1976270
ctaaaaaaa

SEQ ID NO: 70665 - DNA, 7 bp, Unknown
  misc_feature (1)..( 7): Matrix.004 file - promoters50/1976270
aataata

SEQ ID NO: 70666 - DNA, 8 bp, Unknown
  misc_feature (1)..( 8): Matrix.004 file - promoters50/1976270
atttattt

SEQ ID NO: 70667 - DNA, 9 bp, Unknown
  misc_feature (1)..( 9): Matrix.004 file - promoters50/1976270
gataaaaaa

SEQ ID NO: 70668 - DNA, 9 bp, Unknown
  misc_feature (1)..( 9): Matrix.004 file - promoters50/1976286
tcaaaaaaa

SEQ ID NO: 70669 - DNA, 12 bp, Unknown
  misc_feature (1)..( 12): Matrix.004 file - promoters50/1976286
aaattttaacaa

SEQ ID NO: 70670 - DNA, 11 bp, Unknown
  misc_feature (1)..( 11): Matrix.004 file - promoters50/1976286
aattttaacaa

SEQ ID NO: 70671 - DNA, 9 bp, Unknown
  misc_feature (1)..( 9): Matrix.004 file - promoters50/1976286
catttttgt

SEQ ID NO: 70672 - DNA, 6 bp, Unknown
  misc_feature (1)..( 6): Matrix.004 file - promoters50/1976286
aaaaca

SEQ ID NO: 70673 - DNA, 8 bp, Unknown
  misc_feature (1)..( 8): Matrix.004 file - promoters50/1976286
aaataatt

SEQ ID NO: 70674 - DNA, 9 bp, Unknown
  misc_feature (1)..( 9): Matrix.004 file - promoters50/1976286
tcctttttt

SEQ ID NO: 70675 - DNA, 8 bp, Unknown
  misc_feature (1)..( 8): Matrix.004 file - promoters50/1976298
ccgctttt

SEQ ID NO: 70676 - DNA, 11 bp, Unknown
  misc_feature (1)..( 11): Matrix.004 file - promoters50/1976298
caacaaagaaa

SEQ ID NO: 70677 - DNA, 7 bp, Unknown
  misc_feature (1)..( 7): Matrix.004 file - promoters50/1976298
attaaaa

SEQ ID NO: 70678 - DNA, 9 bp, Unknown
  misc_feature (1)..( 9): Matrix.004 file - promoters50/1976298
taattaaat

SEQ ID NO: 70679 - DNA, 7 bp, Unknown
  misc_feature (1)..( 7): Matrix.004 file - promoters50/1976298
tctagac

SEQ ID NO: 70680 - DNA, 7 bp, Unknown
  misc_feature (1)..( 7): Matrix.004 file - promoters50/1976336
atatttt

SEQ ID NO: 70681 - DNA, 9 bp, Unknown
  misc_feature (1)..( 9): Matrix.004 file - promoters50/1976336
aaacaaatc

SEQ ID NO: 70682 - DNA, 9 bp, Unknown
  misc_feature (1)..( 9): Matrix.004 file - promoters50/1976354
agaattttt

SEQ ID NO: 70683 - DNA, 12 bp, Unknown
  misc_feature (1)..( 12): Matrix.004 file - promoters50/1976373
acagtgatcaaa

SEQ ID NO: 70684 - DNA, 11 bp, Unknown
  misc_feature (1)..( 11): Matrix.004 file - promoters50/1976373
tgttaatcaat

SEQ ID NO: 70685 - DNA, 9 bp, Unknown
  misc_feature (1)..( 9): Matrix.004 file - promoters50/1976373
actccacgt

SEQ ID NO: 70686 - DNA, 9 bp, Unknown
  misc_feature (1)..( 9): Matrix.004 file - promoters50/1976381
aatatatac

SEQ ID NO: 70687 - DNA, 13 bp, Unknown
  misc_feature (1)..( 13): Matrix.004 file - promoters50/1976381
actacaagaaaaa

SEQ ID NO: 70688 - DNA, 8 bp, Unknown
  misc_feature (1)..( 8): Matrix.004 file - promoters50/1976387
gtttatga

SEQ ID NO: 70689 - DNA, 13 bp, Unknown
  misc_feature (1)..( 13): Matrix.004 file - promoters50/1976387
gtaaaggcccaat

SEQ ID NO: 70690 - DNA, 15 bp, Unknown
  misc_feature (1)..( 15): Matrix.004 file - promoters50/1976412
aaataagaaaaaaac

SEQ ID NO: 70691 - DNA, 8 bp, Unknown
  misc_feature (1)..( 8): Matrix.004 file - promoters50/1976412
ctaataat

SEQ ID NO: 70692 - DNA, 8 bp, Unknown
  misc_feature (1)..( 8): Matrix.004 file - promoters50/1976412
caaaatta

SEQ ID NO: 70693 - DNA, 8 bp, Unknown
  misc_feature (1)..( 8): Matrix.004 file - promoters50/1976412
ataataac

SEQ ID NO: 70694 - DNA, 8 bp, Unknown
  misc_feature (1)..( 8): Matrix.004 file - promoters50/1976412
ctaattat

SEQ ID NO: 70695 - DNA, 7 bp, Unknown
  misc_feature (1)..( 7): Matrix.004 file - promoters50/1976437
taatttt

SEQ ID NO: 70696 - DNA, 10 bp, Unknown
  misc_feature (1)..( 10): Matrix.004 file - promoters50/1976437
ttcttaattt

SEQ ID NO: 70697 - DNA, 9 bp, Unknown
  misc_feature (1)..( 9): Matrix.004 file - promoters50/1976457
gaacatgac

SEQ ID NO: 70698 - DNA, 14 bp, Unknown
  misc_feature (1)..( 14): Matrix.004 file - promoters50/1976457
tttttaataaatat

SEQ ID NO: 70699 - DNA, 7 bp, Unknown
  misc_feature (1)..( 7): Matrix.004 file - promoters50/1976504
ataataa

SEQ ID NO: 70700 - DNA, 6 bp, Unknown
  misc_feature (1)..( 6): Matrix.004 file - promoters50/1976504
attttg

SEQ ID NO: 70701 - DNA, 10 bp, Unknown
  misc_feature (1)..( 10): Matrix.004 file - promoters50/1976504
gaaaataaaa

SEQ ID NO: 70702 - DNA, 12 bp, Unknown
  misc_feature (1)..( 12): Matrix.004 file - promoters50/1976504
tattaaaaaaaa

SEQ ID NO: 70703 - DNA, 11 bp, Unknown
  misc_feature (1)..( 11): Matrix.004 file - promoters50/1976511
atttaaaaaaa

SEQ ID NO: 70704 - DNA, 10 bp, Unknown
  misc_feature (1)..( 10): Matrix.004 file - promoters50/1976511
cagaaaacta

SEQ ID NO: 70705 - DNA, 6 bp, Unknown
  misc_feature (1)..( 6): Matrix.004 file - promoters50/1976511
agtaat

SEQ ID NO: 70706 - DNA, 9 bp, Unknown
  misc_feature (1)..( 9): Matrix.004 file - promoters50/1976550
gttttttct

SEQ ID NO: 70707 - DNA, 10 bp, Unknown
  misc_feature (1)..( 10): Matrix.004 file - promoters50/1977519
taatctgatc

SEQ ID NO: 70708 - DNA, 12 bp, Unknown
  misc_feature (1)..( 12): Matrix.004 file - promoters50/1977519
ttgaatcaatat

SEQ ID NO: 70709 - DNA, 9 bp, Unknown
  misc_feature (1)..( 9): Matrix.004 file - promoters50/1977529
gatttggtt

SEQ ID NO: 70710 - DNA, 7 bp, Unknown
  misc_feature (1)..( 7): Matrix.004 file - promoters50/1977529
cttcaaa

SEQ ID NO: 70711 - DNA, 7 bp, Unknown
  misc_feature (1)..( 7): Matrix.004 file - promoters50/1977533
ttcaaac

SEQ ID NO: 70712 - DNA, 9 bp, Unknown
  misc_feature (1)..( 9): Matrix.004 file - promoters50/1977533
aaaagtttg

SEQ ID NO: 70713 - DNA, 9 bp, Unknown
  misc_feature (1)..( 9): Matrix.004 file - promoters50/1977533
taaacccta

SEQ ID NO: 70714 - DNA, 11 bp, Unknown
  misc_feature (1)..( 11): Matrix.004 file - promoters50/1977537
ttattaaactt

SEQ ID NO: 70715 - DNA, 10 bp, Unknown
  misc_feature (1)..( 10): Matrix.004 file - promoters50/1977537
tgattttttt

SEQ ID NO: 70716 - DNA, 11 bp, Unknown
  misc_feature (1)..( 11): Matrix.004 file - promoters50/1985373
aaatataagta

SEQ ID NO: 70717 - DNA, 7 bp, Unknown
  misc_feature (1)..( 7): Matrix.004 file - promoters50/1985373
ttttttt

SEQ ID NO: 70718 - DNA, 15 bp, Unknown
  misc_feature (1)..( 15): Matrix.004 file - promoters50/1985373
tatgtttaatttaca

SEQ ID NO: 70719 - DNA, 9 bp, Unknown
  misc_feature (1)..( 9): Matrix.004 file - promoters50/1985373
ataaagtat

SEQ ID NO: 70720 - DNA, 9 bp, Unknown
  misc_feature (1)..( 9): Matrix.004 file - promoters50/1985415
gaaataaaa

SEQ ID NO: 70721 - DNA, 10 bp, Unknown
  misc_feature (1)..( 10): Matrix.004 file - promoters50/1985415
tataaacaat

SEQ ID NO: 70722 - DNA, 7 bp, Unknown
  misc_feature (1)..( 7): Matrix.004 file - promoters50/1985415
aacattt

SEQ ID NO: 70723 - DNA, 8 bp, Unknown
  misc_feature (1)..( 8): Matrix.004 file - promoters50/1985477
cttttaaa

SEQ ID NO: 70724 - DNA, 9 bp, Unknown
  misc_feature (1)..( 9): Matrix.004 file - promoters50/1985588
tattataaa

SEQ ID NO: 70725 - DNA, 8 bp, Unknown
  misc_feature (1)..( 8): Matrix.004 file - promoters50/1985590
aatttata

SEQ ID NO: 70726 - DNA, 9 bp, Unknown
  misc_feature (1)..( 9): Matrix.004 file - promoters50/1985621
caaaactaa

SEQ ID NO: 70727 - DNA, 7 bp, Unknown
  misc_feature (1)..( 7): Matrix.004 file - promoters50/1985854
aaaataa

SEQ ID NO: 70728 - DNA, 6 bp, Unknown
  misc_feature (1)..( 6): Matrix.004 file - promoters50/1985854
ttttct

SEQ ID NO: 70729 - DNA, 13 bp, Unknown
  misc_feature (1)..( 13): Matrix.004 file - promoters50/1985854
aaataaaacaaaa

SEQ ID NO: 70730 - DNA, 8 bp, Unknown
  misc_feature (1)..( 8): Matrix.004 file - promoters50/1985854
caaccaac

SEQ ID NO: 70731 - DNA, 8 bp, Unknown
  misc_feature (1)..( 8): Matrix.004 file - promoters50/2024838
aattttta

SEQ ID NO: 70732 - DNA, 9 bp, Unknown
  misc_feature (1)..( 9): Matrix.004 file - promoters50/2024873
tttgttttg

SEQ ID NO: 70733 - DNA, 5 bp, Unknown
  misc_feature (1)..( 5): Matrix.004 file - promoters50/2024930
aaata

SEQ ID NO: 70734 - DNA, 8 bp, Unknown
  misc_feature (1)..( 8): Matrix.004 file - promoters50/2024930
tattatag

SEQ ID NO: 70735 - DNA, 9 bp, Unknown
  misc_feature (1)..( 9): Matrix.004 file - promoters50/2024930
ataattttt

SEQ ID NO: 70736 - DNA, 8 bp, Unknown
  misc_feature (1)..( 8): Matrix.004 file - promoters50/2024930
ttgagtct

SEQ ID NO: 70737 - DNA, 9 bp, Unknown
  misc_feature (1)..( 9): Matrix.004 file - promoters50/2024930
gaatctagt

SEQ ID NO: 70738 - DNA, 9 bp, Unknown
  misc_feature (1)..( 9): Matrix.004 file - promoters50/2024930
tcaaaaaaa

SEQ ID NO: 70739 - DNA, 9 bp, Unknown
  misc_feature (1)..( 9): Matrix.004 file - promoters50/2025006
gtcaaaaaa

SEQ ID NO: 70740 - DNA, 12 bp, Unknown
  misc_feature (1)..( 12): Matrix.004 file - promoters50/2025006
caataaataaaa

SEQ ID NO: 70741 - DNA, 12 bp, Unknown
  misc_feature (1)..( 12): Matrix.004 file - promoters50/2025006
ataaaagaaaaa

SEQ ID NO: 70742 - DNA, 10 bp, Unknown
  misc_feature (1)..( 10): Matrix.004 file - promoters50/2025006
taataaattt

SEQ ID NO: 70743 - DNA, 10 bp, Unknown
  misc_feature (1)..( 10): Matrix.004 file - promoters50/2025006
caattttttt

SEQ ID NO: 70744 - DNA, 9 bp, Unknown
  misc_feature (1)..( 9): Matrix.004 file - promoters50/2025006
ataaacaat

SEQ ID NO: 70745 - DNA, 9 bp, Unknown
  misc_feature (1)..( 9): Matrix.004 file - promoters50/2025306
aaatttgaa

SEQ ID NO: 70746 - DNA, 3 bp, Unknown
  misc_feature (1)..( 3): Matrix.004 file - promoters50/2025306
aaa

SEQ ID NO: 70747 - DNA, 12 bp, Unknown
  misc_feature (1)..( 12): Matrix.004 file - promoters50/2025306
aagtaataaaac

SEQ ID NO: 70748 - DNA, 7 bp, Unknown
  misc_feature (1)..( 7): Matrix.004 file - promoters50/2025592
aaataag

SEQ ID NO: 70749 - DNA, 12 bp, Unknown
  misc_feature (1)..( 12): Matrix.004 file - promoters50/2025592
caattaatattc

SEQ ID NO: 70750 - DNA, 6 bp, Unknown
  misc_feature (1)..( 6): Matrix.004 file - promoters50/2025592
ttttgt

SEQ ID NO: 70751 - DNA, 9 bp, Unknown
  misc_feature (1)..( 9): Matrix.004 file - promoters50/2025592
acaaacaaa

SEQ ID NO: 70752 - DNA, 7 bp, Unknown
  misc_feature (1)..( 7): Matrix.004 file - promoters50/2025592
ccatttc

SEQ ID NO: 70753 - DNA, 9 bp, Unknown
  misc_feature (1)..( 9): Matrix.004 file - promoters50/2025627
tactatcat

SEQ ID NO: 70754 - DNA, 9 bp, Unknown
  misc_feature (1)..( 9): Matrix.004 file - promoters50/2025627
attttttta

SEQ ID NO: 70755 - DNA, 9 bp, Unknown
  misc_feature (1)..( 9): Matrix.004 file - promoters50/2025627
attaaaaaa

SEQ ID NO: 70756 - DNA, 10 bp, Unknown
  misc_feature (1)..( 10): Matrix.004 file - promoters50/2025627
taatattttt

SEQ ID NO: 70757 - DNA, 8 bp, Unknown
  misc_feature (1)..( 8): Matrix.004 file - promoters50/2026177
ttaaaact

SEQ ID NO: 70758 - DNA, 7 bp, Unknown
  misc_feature (1)..( 7): Matrix.004 file - promoters50/2026177
ttttata

SEQ ID NO: 70759 - DNA, 7 bp, Unknown
  misc_feature (1)..( 7): Matrix.004 file - promoters50/2026177
caaataa

SEQ ID NO: 70760 - DNA, 8 bp, Unknown
  misc_feature (1)..( 8): Matrix.004 file - promoters50/2026177
ttgttttg

SEQ ID NO: 70761 - DNA, 8 bp, Unknown
  misc_feature (1)..( 8): Matrix.004 file - promoters50/2026177
aaaatttc

SEQ ID NO: 70762 - DNA, 8 bp, Unknown
  misc_feature (1)..( 8): Matrix.004 file - promoters50/2026177
aaaatcaa

SEQ ID NO: 70763 - DNA, 7 bp, Unknown
  misc_feature (1)..( 7): Matrix.004 file - promoters50/2026721
ttcatct

SEQ ID NO: 70764 - DNA, 11 bp, Unknown
  misc_feature (1)..( 11): Matrix.004 file - promoters50/2026721
ctgcttttaga

SEQ ID NO: 70765 - DNA, 8 bp, Unknown
  misc_feature (1)..( 8): Matrix.004 file - promoters50/2026757
tttttaac

SEQ ID NO: 70766 - DNA, 10 bp, Unknown
  misc_feature (1)..( 10): Matrix.004 file - promoters50/2026757
aagaggattg

SEQ ID NO: 70767 - DNA, 8 bp, Unknown
  misc_feature (1)..( 8): Matrix.004 file - promoters50/2026771
aaaaagag

SEQ ID NO: 70768 - DNA, 12 bp, Unknown
  misc_feature (1)..( 12): Matrix.004 file - promoters50/2026771
taacattttata

SEQ ID NO: 70769 - DNA, 10 bp, Unknown
  misc_feature (1)..( 10): Matrix.004 file - promoters50/2027233
cgtttataaa

SEQ ID NO: 70770 - DNA, 9 bp, Unknown
  misc_feature (1)..( 9): Matrix.004 file - promoters50/2027242
agtttaagg

SEQ ID NO: 70771 - DNA, 7 bp, Unknown
  misc_feature (1)..( 7): Matrix.004 file - promoters50/2027242
gaatctt

SEQ ID NO: 70772 - DNA, 14 bp, Unknown
  misc_feature (1)..( 14): Matrix.004 file - promoters50/2027253
gaaatggtaaaaag

SEQ ID NO: 70773 - DNA, 8 bp, Unknown
  misc_feature (1)..( 8): Matrix.004 file - promoters50/2027253
tatttaaa

SEQ ID NO: 70774 - DNA, 16 bp, Unknown
  misc_feature (1)..( 16): Matrix.004 file - promoters50/2027268
aaaaataaaaacatta

SEQ ID NO: 70775 - DNA, 11 bp, Unknown
  misc_feature (1)..( 11): Matrix.004 file - promoters50/2028939
ttttgctaaaa

SEQ ID NO: 70776 - DNA, 9 bp, Unknown
  misc_feature (1)..( 9): Matrix.004 file - promoters50/2028939
catctcact

SEQ ID NO: 70777 - DNA, 7 bp, Unknown
  misc_feature (1)..( 7): Matrix.004 file - promoters50/2028939
cttttga

SEQ ID NO: 70778 - DNA, 8 bp, Unknown
  misc_feature (1)..( 8): Matrix.004 file - promoters50/2028939
tgttctat

SEQ ID NO: 70779 - DNA, 8 bp, Unknown
  misc_feature (1)..( 8): Matrix.004 file - promoters50/2028939
acactttt

SEQ ID NO: 70780 - DNA, 8 bp, Unknown
  misc_feature (1)..( 8): Matrix.004 file - promoters50/2028939
atctgtat

SEQ ID NO: 70781 - DNA, 6 bp, Unknown
  misc_feature (1)..( 6): Matrix.004 file - promoters50/2028939
agtttt

SEQ ID NO: 70782 - DNA, 8 bp, Unknown
  misc_feature (1)..( 8): Matrix.004 file - promoters50/2028939
tgtttcaa

SEQ ID NO: 70783 - DNA, 8 bp, Unknown
  misc_feature (1)..( 8): Matrix.004 file - promoters50/2028945
atgtgcta

SEQ ID NO: 70784 - DNA, 7 bp, Unknown
  misc_feature (1)..( 7): Matrix.004 file - promoters50/2028945
ttgaaat

SEQ ID NO: 70785 - DNA, 13 bp, Unknown
  misc_feature (1)..( 13): Matrix.004 file - promoters50/2028945
taaaaatttaaat

SEQ ID NO: 70786 - DNA, 9 bp, Unknown
  misc_feature (1)..( 9): Matrix.004 file - promoters50/2028945
cataaacta

SEQ ID NO: 70787 - DNA, 8 bp, Unknown
  misc_feature (1)..( 8): Matrix.004 file - promoters50/2028945
tttaattt

SEQ ID NO: 70788 - DNA, 7 bp, Unknown
  misc_feature (1)..( 7): Matrix.004 file - promoters50/2028945
ttttaaa

SEQ ID NO: 70789 - DNA, 8 bp, Unknown
  misc_feature (1)..( 8): Matrix.004 file - promoters50/2028945
atcttaat

SEQ ID NO: 70790 - DNA, 9 bp, Unknown
  misc_feature (1)..( 9): Matrix.004 file - promoters50/2028945
tttaattta

SEQ ID NO: 70791 - DNA, 8 bp, Unknown
  misc_feature (1)..( 8): Matrix.004 file - promoters50/2028948
aaacatta

SEQ ID NO: 70792 - DNA, 9 bp, Unknown
  misc_feature (1)..( 9): Matrix.004 file - promoters50/2028948
agtaaaaca

SEQ ID NO: 70793 - DNA, 6 bp, Unknown
  misc_feature (1)..( 6): Matrix.004 file - promoters50/2028948
cataat

SEQ ID NO: 70794 - DNA, 10 bp, Unknown
  misc_feature (1)..( 10): Matrix.004 file - promoters50/2028979
tttatacaaa

SEQ ID NO: 70795 - DNA, 9 bp, Unknown
  misc_feature (1)..( 9): Matrix.004 file - promoters50/2028979
attatataa

SEQ ID NO: 70796 - DNA, 8 bp, Unknown
  misc_feature (1)..( 8): Matrix.004 file - promoters50/2028979
ttaaaaaa

SEQ ID NO: 70797 - DNA, 8 bp, Unknown
  misc_feature (1)..( 8): Matrix.004 file - promoters50/2028993
aactaata

SEQ ID NO: 70798 - DNA, 9 bp, Unknown
  misc_feature (1)..( 9): Matrix.004 file - promoters50/2028993
cataaacca

SEQ ID NO: 70799 - DNA, 9 bp, Unknown
  misc_feature (1)..( 9): Matrix.004 file - promoters50/2028993
attaaccaa

SEQ ID NO: 70800 - DNA, 12 bp, Unknown
  misc_feature (1)..( 12): Matrix.004 file - promoters50/2028997
ttactaaaatta

SEQ ID NO: 70801 - DNA, 9 bp, Unknown
  misc_feature (1)..( 9): Matrix.004 file - promoters50/2028997
cttctatgt

SEQ ID NO: 70802 - DNA, 10 bp, Unknown
  misc_feature (1)..( 10): Matrix.004 file - promoters50/2028997
aactttaatt

SEQ ID NO: 70803 - DNA, 12 bp, Unknown
  misc_feature (1)..( 12): Matrix.004 file - promoters50/2029009
gcttaagttctt

SEQ ID NO: 70804 - DNA, 8 bp, Unknown
  misc_feature (1)..( 8): Matrix.004 file - promoters50/2029016
acttaaaa

SEQ ID NO: 70805 - DNA, 9 bp, Unknown
  misc_feature (1)..( 9): Matrix.004 file - promoters50/2029027
attaaatca

SEQ ID NO: 70806 - DNA, 8 bp, Unknown
  misc_feature (1)..( 8): Matrix.004 file - promoters50/2029027
ccccaatt

SEQ ID NO: 70807 - DNA, 10 bp, Unknown
  misc_feature (1)..( 10): Matrix.004 file - promoters50/2029033
aacatttttt

SEQ ID NO: 70808 - DNA, 13 bp, Unknown
  misc_feature (1)..( 13): Matrix.004 file - promoters50/2029033
atgatttatttcc

SEQ ID NO: 70809 - DNA, 10 bp, Unknown
  misc_feature (1)..( 10): Matrix.004 file - promoters50/2029033
ctttctataa

SEQ ID NO: 70810 - DNA, 8 bp, Unknown
  misc_feature (1)..( 8): Matrix.004 file - promoters50/2029033
aataaata

SEQ ID NO: 70811 - DNA, 9 bp, Unknown
  misc_feature (1)..( 9): Matrix.004 file - promoters50/2029041
catatataa

SEQ ID NO: 70812 - DNA, 10 bp, Unknown
  misc_feature (1)..( 10): Matrix.004 file - promoters50/2029041
gaaattacta

SEQ ID NO: 70813 - DNA, 10 bp, Unknown
  misc_feature (1)..( 10): Matrix.004 file - promoters50/2029041
aaataaccaa

SEQ ID NO: 70814 - DNA, 7 bp, Unknown
  misc_feature (1)..( 7): Matrix.004 file - promoters50/2029054
agttttg

SEQ ID NO: 70815 - DNA, 7 bp, Unknown
  misc_feature (1)..( 7): Matrix.004 file - promoters50/2029075
ataccaa

SEQ ID NO: 70816 - DNA, 6 bp, Unknown
  misc_feature (1)..( 6): Matrix.004 file - promoters50/2029083
aaataa

SEQ ID NO: 70817 - DNA, 10 bp, Unknown
  misc_feature (1)..( 10): Matrix.004 file - promoters50/2029087
ataattgtaa

SEQ ID NO: 70818 - DNA, 10 bp, Unknown
  misc_feature (1)..( 10): Matrix.004 file - promoters50/2029087
gaaaaagttt

SEQ ID NO: 70819 - DNA, 15 bp, Unknown
  misc_feature (1)..( 15): Matrix.004 file - promoters50/2029087
atcactgatccaaca

SEQ ID NO: 70820 - DNA, 7 bp, Unknown
  misc_feature (1)..( 7): Matrix.004 file - promoters50/2033137
aattatc

SEQ ID NO: 70821 - DNA, 10 bp, Unknown
  misc_feature (1)..( 10): Matrix.004 file - promoters50/2033137
aataagttaa

SEQ ID NO: 70822 - DNA, 10 bp, Unknown
  misc_feature (1)..( 10): Matrix.004 file - promoters50/2052918
agatatatta

SEQ ID NO: 70823 - DNA, 6 bp, Unknown
  misc_feature (1)..( 6): Matrix.004 file - promoters50/2056926
aacttt

SEQ ID NO: 70824 - DNA, 10 bp, Unknown
  misc_feature (1)..( 10): Matrix.004 file - promoters50/2104855
agtaaataaa

SEQ ID NO: 70825 - DNA, 8 bp, Unknown
  misc_feature (1)..( 8): Matrix.004 file - promoters50/2104855
aatataat

SEQ ID NO: 70826 - DNA, 7 bp, Unknown
  misc_feature (1)..( 7): Matrix.004 file - promoters50/2104855
aatataa

SEQ ID NO: 70827 - DNA, 7 bp, Unknown
  misc_feature (1)..( 7): Matrix.004 file - promoters50/2104855
ctaaaag

SEQ ID NO: 70828 - DNA, 9 bp, Unknown
  misc_feature (1)..( 9): Matrix.004 file - promoters50/2104855
attcttttc

SEQ ID NO: 70829 - DNA, 9 bp, Unknown
  misc_feature (1)..( 9): Matrix.004 file - promoters50/2104855
ttctacaat

SEQ ID NO: 70830 - DNA, 8 bp, Unknown
  misc_feature (1)..( 8): Matrix.004 file - promoters50/2104855
ataattat

SEQ ID NO: 70831 - DNA, 9 bp, Unknown
  misc_feature (1)..( 9): Matrix.004 file - promoters50/2104855
cgccatgaa

SEQ ID NO: 70832 - DNA, 9 bp, Unknown
  misc_feature (1)..( 9): Matrix.004 file - promoters50/2104874
aggcccaat

SEQ ID NO: 70833 - DNA, 9 bp, Unknown
  misc_feature (1)..( 9): Matrix.004 file - promoters50/2104874
caaaaatta

SEQ ID NO: 70834 - DNA, 13 bp, Unknown
  misc_feature (1)..( 13): Matrix.004 file - promoters50/2105109
tttattggatcta

SEQ ID NO: 70835 - DNA, 10 bp, Unknown
  misc_feature (1)..( 10): Matrix.004 file - promoters50/2105109
ctataaaaac

SEQ ID NO: 70836 - DNA, 9 bp, Unknown
  misc_feature (1)..( 9): Matrix.004 file - promoters50/2105141
cctaaggcc

SEQ ID NO: 70837 - DNA, 8 bp, Unknown
  misc_feature (1)..( 8): Matrix.004 file - promoters50/2105141
gtgctaaa

SEQ ID NO: 70838 - DNA, 10 bp, Unknown
  misc_feature (1)..( 10): Matrix.004 file - promoters50/2105141
aaatcaaatt

SEQ ID NO: 70839 - DNA, 7 bp, Unknown
  misc_feature (1)..( 7): Matrix.004 file - promoters50/2105141
tttttat

SEQ ID NO: 70840 - DNA, 9 bp, Unknown
  misc_feature (1)..( 9): Matrix.004 file - promoters50/2105141
catatttta

SEQ ID NO: 70841 - DNA, 7 bp, Unknown
  misc_feature (1)..( 7): Matrix.004 file - promoters50/2105141
taaataa

SEQ ID NO: 70842 - DNA, 8 bp, Unknown
  misc_feature (1)..( 8): Matrix.004 file - promoters50/2105141
ttttcaat

SEQ ID NO: 70843 - DNA, 11 bp, Unknown
  misc_feature (1)..( 11): Matrix.004 file - promoters50/2105141
cacaaatcatt

SEQ ID NO: 70844 - DNA, 10 bp, Unknown
  misc_feature (1)..( 10): Matrix.004 file - promoters50/2105141
aaaaaaaccc

SEQ ID NO: 70845 - DNA, 14 bp, Unknown
  misc_feature (1)..( 14): Matrix.004 file - promoters50/2105141
atatttataaagta

SEQ ID NO: 70846 - DNA, 10 bp, Unknown
  misc_feature (1)..( 10): Matrix.004 file - promoters50/2105141
ataatatata

SEQ ID NO: 70847 - DNA, 9 bp, Unknown
  misc_feature (1)..( 9): Matrix.004 file - promoters50/2105141
acaatttat

SEQ ID NO: 70848 - DNA, 7 bp, Unknown
  misc_feature (1)..( 7): Matrix.004 file - promoters50/2105141
ttattta

SEQ ID NO: 70849 - DNA, 7 bp, Unknown
  misc_feature (1)..( 7): Matrix.004 file - promoters50/2105250
tttttta

SEQ ID NO: 70850 - DNA, 7 bp, Unknown
  misc_feature (1)..( 7): Matrix.004 file - promoters50/2105394
agtttat

SEQ ID NO: 70851 - DNA, 9 bp, Unknown
  misc_feature (1)..( 9): Matrix.004 file - promoters50/2105398
attattcaa

SEQ ID NO: 70852 - DNA, 9 bp, Unknown
  misc_feature (1)..( 9): Matrix.004 file - promoters50/2105398
taaaaaata

SEQ ID NO: 70853 - DNA, 10 bp, Unknown
  misc_feature (1)..( 10): Matrix.004 file - promoters50/2105398
aaaatgaaac

SEQ ID NO: 70854 - DNA, 10 bp, Unknown
  misc_feature (1)..( 10): Matrix.004 file - promoters50/2105398
aaaacaaact

SEQ ID NO: 70855 - DNA, 13 bp, Unknown
  misc_feature (1)..( 13): Matrix.004 file - promoters50/2105398
agaaaaaaaaatt

SEQ ID NO: 70856 - DNA, 10 bp, Unknown
  misc_feature (1)..( 10): Matrix.004 file - promoters50/2105507
caaaaataaa

SEQ ID NO: 70857 - DNA, 11 bp, Unknown
  misc_feature (1)..( 11): Matrix.004 file - promoters50/2105533
aagagaatttg

SEQ ID NO: 70858 - DNA, 8 bp, Unknown
  misc_feature (1)..( 8): Matrix.004 file - promoters50/2105533
tttggaaa

SEQ ID NO: 70859 - DNA, 9 bp, Unknown
  misc_feature (1)..( 9): Matrix.004 file - promoters50/2105533
aagaagtta

SEQ ID NO: 70860 - DNA, 7 bp, Unknown
  misc_feature (1)..( 7): Matrix.004 file - promoters50/2105535
gattaaa

SEQ ID NO: 70861 - DNA, 11 bp, Unknown
  misc_feature (1)..( 11): Matrix.004 file - promoters50/2105578
gattcaaaatt

SEQ ID NO: 70862 - DNA, 10 bp, Unknown
  misc_feature (1)..( 10): Matrix.004 file - promoters50/2105578
agttagtata

SEQ ID NO: 70863 - DNA, 9 bp, Unknown
  misc_feature (1)..( 9): Matrix.004 file - promoters50/2105578
ttattttct

SEQ ID NO: 70864 - DNA, 7 bp, Unknown
  misc_feature (1)..( 7): Matrix.004 file - promoters50/2105578
attgtat

SEQ ID NO: 70865 - DNA, 10 bp, Unknown
  misc_feature (1)..( 10): Matrix.004 file - promoters50/2105819
ttctcaatcc

SEQ ID NO: 70866 - DNA, 7 bp, Unknown
  misc_feature (1)..( 7): Matrix.004 file - promoters50/2105819
aacatat

SEQ ID NO: 70867 - DNA, 8 bp, Unknown
  misc_feature (1)..( 8): Matrix.004 file - promoters50/2105819
ttaatgat

SEQ ID NO: 70868 - DNA, 10 bp, Unknown
  misc_feature (1)..( 10): Matrix.004 file - promoters50/2105912
aaatgtcaaa

SEQ ID NO: 70869 - DNA, 8 bp, Unknown
  misc_feature (1)..( 8): Matrix.004 file - promoters50/2105912
atttgtta

SEQ ID NO: 70870 - DNA, 11 bp, Unknown
  misc_feature (1)..( 11): Matrix.004 file - promoters50/2106017
aagttaaaagt

SEQ ID NO: 70871 - DNA, 9 bp, Unknown
  misc_feature (1)..( 9): Matrix.004 file - promoters50/2106017
gttcaaatc

SEQ ID NO: 70872 - DNA, 11 bp, Unknown
  misc_feature (1)..( 11): Matrix.004 file - promoters50/2106017
taataaattaa

SEQ ID NO: 70873 - DNA, 11 bp, Unknown
  misc_feature (1)..( 11): Matrix.004 file - promoters50/2106109
gtttgaaatct

SEQ ID NO: 70874 - DNA, 8 bp, Unknown
  misc_feature (1)..( 8): Matrix.004 file - promoters50/2106109
aaatggtt

SEQ ID NO: 70875 - DNA, 8 bp, Unknown
  misc_feature (1)..( 8): Matrix.004 file - promoters50/2106505
attttttt

SEQ ID NO: 70876 - DNA, 9 bp, Unknown
  misc_feature (1)..( 9): Matrix.004 file - promoters50/2106682
aattaattt

SEQ ID NO: 70877 - DNA, 7 bp, Unknown
  misc_feature (1)..( 7): Matrix.004 file - promoters50/2106682
tgtttcg

SEQ ID NO: 70878 - DNA, 7 bp, Unknown
  misc_feature (1)..( 7): Matrix.004 file - promoters50/2106758
attttga

SEQ ID NO: 70879 - DNA, 9 bp, Unknown
  misc_feature (1)..( 9): Matrix.004 file - promoters50/2106789
caaatgaaa

SEQ ID NO: 70880 - DNA, 10 bp, Unknown
  misc_feature (1)..( 10): Matrix.004 file - promoters50/2106908
atttataaag

SEQ ID NO: 70881 - DNA, 10 bp, Unknown
  misc_feature (1)..( 10): Matrix.004 file - promoters50/2106908
agatttttcc

SEQ ID NO: 70882 - DNA, 14 bp, Unknown
  misc_feature (1)..( 14): Matrix.004 file - promoters50/2106908
ataagcctaaacaa

SEQ ID NO: 70883 - DNA, 7 bp, Unknown
  misc_feature (1)..( 7): Matrix.004 file - promoters50/2106908
aaataaa

SEQ ID NO: 70884 - DNA, 10 bp, Unknown
  misc_feature (1)..( 10): Matrix.004 file - promoters50/2106908
aaagaaattg

SEQ ID NO: 70885 - DNA, 9 bp, Unknown
  misc_feature (1)..( 9): Matrix.004 file - promoters50/2106908
atcaaaacc

SEQ ID NO: 70886 - DNA, 7 bp, Unknown
  misc_feature (1)..( 7): Matrix.004 file - promoters50/2106908
aaacaaa

SEQ ID NO: 70887 - DNA, 9 bp, Unknown
  misc_feature (1)..( 9): Matrix.004 file - promoters50/2106908
tatctaaat

SEQ ID NO: 70888 - DNA, 8 bp, Unknown
  misc_feature (1)..( 8): Matrix.004 file - promoters50/2107016
aaaaaaaa

SEQ ID NO: 70889 - DNA, 9 bp, Unknown
  misc_feature (1)..( 9): Matrix.004 file - promoters50/2107016
ctttttatt

SEQ ID NO: 70890 - DNA, 9 bp, Unknown
  misc_feature (1)..( 9): Matrix.004 file - promoters50/2107065
gtcaaaaaa

SEQ ID NO: 70891 - DNA, 13 bp, Unknown
  misc_feature (1)..( 13): Matrix.004 file - promoters50/2107065
tattcaaataaaa

SEQ ID NO: 70892 - DNA, 10 bp, Unknown
  misc_feature (1)..( 10): Matrix.004 file - promoters50/2107069
aaataattta

SEQ ID NO: 70893 - DNA, 8 bp, Unknown
  misc_feature (1)..( 8): Matrix.004 file - promoters50/2107069
gttggaga

SEQ ID NO: 70894 - DNA, 7 bp, Unknown
  misc_feature (1)..( 7): Matrix.004 file - promoters50/2107069
atgttgg

SEQ ID NO: 70895 - DNA, 12 bp, Unknown
  misc_feature (1)..( 12): Matrix.004 file - promoters50/2108834
gtgatttagttt

SEQ ID NO: 70896 - DNA, 9 bp, Unknown
  misc_feature (1)..( 9): Matrix.004 file - promoters50/2108834
aatgaaaaa

SEQ ID NO: 70897 - DNA, 8 bp, Unknown
  misc_feature (1)..( 8): Matrix.004 file - promoters50/2109486
tttcgtgg

SEQ ID NO: 70898 - DNA, 8 bp, Unknown
  misc_feature (1)..( 8): Matrix.004 file - promoters50/2109486
tgaaagat

SEQ ID NO: 70899 - DNA, 8 bp, Unknown
  misc_feature (1)..( 8): Matrix.004 file - promoters50/2109486
gattattt

SEQ ID NO: 70900 - DNA, 7 bp, Unknown
  misc_feature (1)..( 7): Matrix.004 file - promoters50/2113269
catatta

SEQ ID NO: 70901 - DNA, 9 bp, Unknown
  misc_feature (1)..( 9): Matrix.004 file - promoters50/2113269
agtttgata

SEQ ID NO: 70902 - DNA, 7 bp, Unknown
  misc_feature (1)..( 7): Matrix.004 file - promoters50/2113269
ttctata

SEQ ID NO: 70903 - DNA, 12 bp, Unknown
  misc_feature (1)..( 12): Matrix.004 file - promoters50/2113269
ataattttttaa

SEQ ID NO: 70904 - DNA, 18 bp, Unknown
  misc_feature (1)..( 18): Matrix.004 file - promoters50/2113269
atagtaaaaaaaaattag

SEQ ID NO: 70905 - DNA, 12 bp, Unknown
  misc_feature (1)..( 12): Matrix.004 file - promoters50/2113269
aaactttttttt

SEQ ID NO: 70906 - DNA, 13 bp, Unknown
  misc_feature (1)..( 13): Matrix.004 file - promoters50/2113269
ttattataaaaaa

SEQ ID NO: 70907 - DNA, 13 bp, Unknown
  misc_feature (1)..( 13): Matrix.004 file - promoters50/2113269
aaactttttttaa

SEQ ID NO: 70908 - DNA, 10 bp, Unknown
  misc_feature (1)..( 10): Matrix.004 file - promoters50/2113269
actttttaaa

SEQ ID NO: 70909 - DNA, 10 bp, Unknown
  misc_feature (1)..( 10): Matrix.004 file - promoters50/2113269
tataaaaaaa

SEQ ID NO: 70910 - DNA, 9 bp, Unknown
  misc_feature (1)..( 9): Matrix.004 file - promoters50/2113299
tttttaaaa

SEQ ID NO: 70911 - DNA, 7 bp, Unknown
  misc_feature (1)..( 7): Matrix.004 file - promoters50/2113299
catattt

SEQ ID NO: 70912 - DNA, 12 bp, Unknown
  misc_feature (1)..( 12): Matrix.004 file - promoters50/2113299
gtctttataaat

SEQ ID NO: 70913 - DNA, 12 bp, Unknown
  misc_feature (1)..( 12): Matrix.004 file - promoters50/2113315
aacaaaaataat

SEQ ID NO: 70914 - DNA, 9 bp, Unknown
  misc_feature (1)..( 9): Matrix.004 file - promoters50/2113323
taaaataat

SEQ ID NO: 70915 - DNA, 9 bp, Unknown
  misc_feature (1)..( 9): Matrix.004 file - promoters50/2113323
caaatattt

SEQ ID NO: 70916 - DNA, 10 bp, Unknown
  misc_feature (1)..( 10): Matrix.004 file - promoters50/2113323
gattgtttaa

SEQ ID NO: 70917 - DNA, 9 bp, Unknown
  misc_feature (1)..( 9): Matrix.004 file - promoters50/2113323
caaatattt

SEQ ID NO: 70918 - DNA, 7 bp, Unknown
  misc_feature (1)..( 7): Matrix.004 file - promoters50/2113323
atatata

SEQ ID NO: 70919 - DNA, 14 bp, Unknown
  misc_feature (1)..( 14): Matrix.004 file - promoters50/2113323
ctcatataaataca

SEQ ID NO: 70920 - DNA, 9 bp, Unknown
  misc_feature (1)..( 9): Matrix.004 file - promoters50/2113338
gtaaatact

SEQ ID NO: 70921 - DNA, 9 bp, Unknown
  misc_feature (1)..( 9): Matrix.004 file - promoters50/2113338
caaacactt

SEQ ID NO: 70922 - DNA, 7 bp, Unknown
  misc_feature (1)..( 7): Matrix.004 file - promoters50/2113418
gaatcaa

SEQ ID NO: 70923 - DNA, 12 bp, Unknown
  misc_feature (1)..( 12): Matrix.004 file - promoters50/2113418
aacatgtactga

SEQ ID NO: 70924 - DNA, 7 bp, Unknown
  misc_feature (1)..( 7): Matrix.004 file - promoters50/2113434
ggaaaaa

SEQ ID NO: 70925 - DNA, 13 bp, Unknown
  misc_feature (1)..( 13): Matrix.004 file - promoters50/2113434
agagcttgaggaa

SEQ ID NO: 70926 - DNA, 9 bp, Unknown
  misc_feature (1)..( 9): Matrix.004 file - promoters50/2113434
gagcttgag

SEQ ID NO: 70927 - DNA, 8 bp, Unknown
  misc_feature (1)..( 8): Matrix.004 file - promoters50/2113445
tctaaaaa

SEQ ID NO: 70928 - DNA, 10 bp, Unknown
  misc_feature (1)..( 10): Matrix.004 file - promoters50/2113445
ctattgaata

SEQ ID NO: 70929 - DNA, 8 bp, Unknown
  misc_feature (1)..( 8): Matrix.004 file - promoters50/2113445
aagattta

SEQ ID NO: 70930 - DNA, 7 bp, Unknown
  misc_feature (1)..( 7): Matrix.004 file - promoters50/2113445
tactttg

SEQ ID NO: 70931 - DNA, 8 bp, Unknown
  misc_feature (1)..( 8): Matrix.004 file - promoters50/2113445
aacataaa

SEQ ID NO: 70932 - DNA, 10 bp, Unknown
  misc_feature (1)..( 10): Matrix.004 file - promoters50/2113462
ttattattat

SEQ ID NO: 70933 - DNA, 7 bp, Unknown
  misc_feature (1)..( 7): Matrix.004 file - promoters50/2113462
aaaatta

SEQ ID NO: 70934 - DNA, 12 bp, Unknown
  misc_feature (1)..( 12): Matrix.004 file - promoters50/2113462
aaacttaattta

SEQ ID NO: 70935 - DNA, 14 bp, Unknown
  misc_feature (1)..( 14): Matrix.004 file - promoters50/2113462
ttttaaaaaaagat

SEQ ID NO: 70936 - DNA, 9 bp, Unknown
  misc_feature (1)..( 9): Matrix.004 file - promoters50/2113462
aattaaatt

SEQ ID NO: 70937 - DNA, 9 bp, Unknown
  misc_feature (1)..( 9): Matrix.004 file - promoters50/2113462
aacaaatta

SEQ ID NO: 70938 - DNA, 13 bp, Unknown
  misc_feature (1)..( 13): Matrix.004 file - promoters50/2113466
attctcataaaca

SEQ ID NO: 70939 - DNA, 9 bp, Unknown
  misc_feature (1)..( 9): Matrix.004 file - promoters50/2113466
ataatatat

SEQ ID NO: 70940 - DNA, 10 bp, Unknown
  misc_feature (1)..( 10): Matrix.004 file - promoters50/2113466
gattcatgat

SEQ ID NO: 70941 - DNA, 13 bp, Unknown
  misc_feature (1)..( 13): Matrix.004 file - promoters50/2113466
ccttgtaacaaca

SEQ ID NO: 70942 - DNA, 10 bp, Unknown
  misc_feature (1)..( 10): Matrix.004 file - promoters50/2113470
aaataacaat

SEQ ID NO: 70943 - DNA, 8 bp, Unknown
  misc_feature (1)..( 8): Matrix.004 file - promoters50/2113470
tattttaa

SEQ ID NO: 70944 - DNA, 11 bp, Unknown
  misc_feature (1)..( 11): Matrix.004 file - promoters50/2113470
ttatatattta

SEQ ID NO: 70945 - DNA, 7 bp, Unknown
  misc_feature (1)..( 7): Matrix.004 file - promoters50/2113470
tttatct

SEQ ID NO: 70946 - DNA, 11 bp, Unknown
  misc_feature (1)..( 11): Matrix.004 file - promoters50/2113470
atcaaaagaat

SEQ ID NO: 70947 - DNA, 9 bp, Unknown
  misc_feature (1)..( 9): Matrix.004 file - promoters50/2113470
tcactaaac

SEQ ID NO: 70948 - DNA, 8 bp, Unknown
  misc_feature (1)..( 8): Matrix.004 file - promoters50/2113477
aaaattat

SEQ ID NO: 70949 - DNA, 10 bp, Unknown
  misc_feature (1)..( 10): Matrix.004 file - promoters50/2113477
aaagttaaaa

SEQ ID NO: 70950 - DNA, 8 bp, Unknown
  misc_feature (1)..( 8): Matrix.004 file - promoters50/2113477
tatttaaa

SEQ ID NO: 70951 - DNA, 6 bp, Unknown
  misc_feature (1)..( 6): Matrix.004 file - promoters50/2113477
aataat

SEQ ID NO: 70952 - DNA, 10 bp, Unknown
  misc_feature (1)..( 10): Matrix.004 file - promoters50/2113477
ataaatataa

SEQ ID NO: 70953 - DNA, 7 bp, Unknown
  misc_feature (1)..( 7): Matrix.004 file - promoters50/2113481
gataaac

SEQ ID NO: 70954 - DNA, 16 bp, Unknown
  misc_feature (1)..( 16): Matrix.004 file - promoters50/2113481
tacaaaaataaacttg

SEQ ID NO: 70955 - DNA, 12 bp, Unknown
  misc_feature (1)..( 12): Matrix.004 file - promoters50/2113481
ttaaataacata

SEQ ID NO: 70956 - DNA, 11 bp, Unknown
  misc_feature (1)..( 11): Matrix.004 file - promoters50/2113481
taaattttatt

SEQ ID NO: 70957 - DNA, 11 bp, Unknown
  misc_feature (1)..( 11): Matrix.004 file - promoters50/2113481
tataaatagat

SEQ ID NO: 70958 - DNA, 12 bp, Unknown
  misc_feature (1)..( 12): Matrix.004 file - promoters50/2113481
attagttaatat

SEQ ID NO: 70959 - DNA, 5 bp, Unknown
  misc_feature (1)..( 5): Matrix.004 file - promoters50/2113489
ataag

SEQ ID NO: 70960 - DNA, 9 bp, Unknown
  misc_feature (1)..( 9): Matrix.004 file - promoters50/2113489
tacaatttt

SEQ ID NO: 70961 - DNA, 10 bp, Unknown
  misc_feature (1)..( 10): Matrix.004 file - promoters50/2113489
tttaatttta

SEQ ID NO: 70962 - DNA, 9 bp, Unknown
  misc_feature (1)..( 9): Matrix.004 file - promoters50/2113489
tggcagaaa

SEQ ID NO: 70963 - DNA, 8 bp, Unknown
  misc_feature (1)..( 8): Matrix.004 file - promoters50/2113502
aattacta

SEQ ID NO: 70964 - DNA, 11 bp, Unknown
  misc_feature (1)..( 11): Matrix.004 file - promoters50/2113502
atgtcaaaaat

SEQ ID NO: 70965 - DNA, 11 bp, Unknown
  misc_feature (1)..( 11): Matrix.004 file - promoters50/2113502
caacaaaataa

SEQ ID NO: 70966 - DNA, 10 bp, Unknown
  misc_feature (1)..( 10): Matrix.004 file - promoters50/2113592
actataaatc

SEQ ID NO: 70967 - DNA, 11 bp, Unknown
  misc_feature (1)..( 11): Matrix.004 file - promoters50/2113592
tatatagatta

SEQ ID NO: 70968 - DNA, 11 bp, Unknown
  misc_feature (1)..( 11): Matrix.004 file - promoters50/2113592
tataaataata

SEQ ID NO: 70969 - DNA, 10 bp, Unknown
  misc_feature (1)..( 10): Matrix.004 file - promoters50/2113596
tataaataac

SEQ ID NO: 70970 - DNA, 17 bp, Unknown
  misc_feature (1)..( 17): Matrix.004 file - promoters50/2113596
caactactctatcaatt

SEQ ID NO: 70971 - DNA, 36 bp, Unknown
  misc_feature (1)..( 36): Matrix.004 file - promoters50/2113596
tttactctataaattatttccgcaaactcaaattat

SEQ ID NO: 70972 - DNA, 7 bp, Unknown
  misc_feature (1)..( 7): Matrix.004 file - promoters50/2113596
tcaaaat

SEQ ID NO: 70973 - DNA, 8 bp, Unknown
  misc_feature (1)..( 8): Matrix.004 file - promoters50/2113620
aacaacaa

SEQ ID NO: 70974 - DNA, 8 bp, Unknown
  misc_feature (1)..( 8): Matrix.004 file - promoters50/2113624
gaaggaag

SEQ ID NO: 70975 - DNA, 9 bp, Unknown
  misc_feature (1)..( 9): Matrix.004 file - promoters50/2113640
ttcattttt

SEQ ID NO: 70976 - DNA, 9 bp, Unknown
  misc_feature (1)..( 9): Matrix.004 file - promoters50/2113640
taaaaaaat

SEQ ID NO: 70977 - DNA, 10 bp, Unknown
  misc_feature (1)..( 10): Matrix.004 file - promoters50/2113640
atataaacaa

SEQ ID NO: 70978 - DNA, 7 bp, Unknown
  misc_feature (1)..( 7): Matrix.004 file - promoters50/2113675
caaaatt

SEQ ID NO: 70979 - DNA, 8 bp, Unknown
  misc_feature (1)..( 8): Matrix.004 file - promoters50/2113675
gaagaaat

SEQ ID NO: 70980 - DNA, 8 bp, Unknown
  misc_feature (1)..( 8): Matrix.004 file - promoters50/2113675
gtggagaa

SEQ ID NO: 70981 - DNA, 9 bp, Unknown
  misc_feature (1)..( 9): Matrix.004 file - promoters50/2113675
gtagagaac

SEQ ID NO: 70982 - DNA, 8 bp, Unknown
  misc_feature (1)..( 8): Matrix.004 file - promoters50/2113695
ttaaaatc

SEQ ID NO: 70983 - DNA, 8 bp, Unknown
  misc_feature (1)..( 8): Matrix.004 file - promoters50/2113695
gaaaaaaa

SEQ ID NO: 70984 - DNA, 8 bp, Unknown
  misc_feature (1)..( 8): Matrix.004 file - promoters50/2113695
gttaaaaa

SEQ ID NO: 70985 - DNA, 9 bp, Unknown
  misc_feature (1)..( 9): Matrix.004 file - promoters50/2113695
ttttcattt

SEQ ID NO: 70986 - DNA, 9 bp, Unknown
  misc_feature (1)..( 9): Matrix.004 file - promoters50/2113695
atttaattc

SEQ ID NO: 70987 - DNA, 12 bp, Unknown
  misc_feature (1)..( 12): Matrix.004 file - promoters50/2113695
aacatgttttta

SEQ ID NO: 70988 - DNA, 9 bp, Unknown
  misc_feature (1)..( 9): Matrix.004 file - promoters50/2113695
tgttttaaa

SEQ ID NO: 70989 - DNA, 7 bp, Unknown
  misc_feature (1)..( 7): Matrix.004 file - promoters50/2113695
cgaaaaa

SEQ ID NO: 70990 - DNA, 7 bp, Unknown
  misc_feature (1)..( 7): Matrix.004 file - promoters50/2113695
acataag

SEQ ID NO: 70991 - DNA, 10 bp, Unknown
  misc_feature (1)..( 10): Matrix.004 file - promoters50/2113734
tttttcttaa

SEQ ID NO: 70992 - DNA, 9 bp, Unknown
  misc_feature (1)..( 9): Matrix.004 file - promoters50/2113734
aaagtttaa

SEQ ID NO: 70993 - DNA, 9 bp, Unknown
  misc_feature (1)..( 9): Matrix.004 file - promoters50/2113748
aattaaaga

SEQ ID NO: 70994 - DNA, 8 bp, Unknown
  misc_feature (1)..( 8): Matrix.004 file - promoters50/2113748
tatttttt

SEQ ID NO: 70995 - DNA, 10 bp, Unknown
  misc_feature (1)..( 10): Matrix.004 file - promoters50/2113748
tattttactg

SEQ ID NO: 70996 - DNA, 8 bp, Unknown
  misc_feature (1)..( 8): Matrix.004 file - promoters50/2113748
caaatttc

SEQ ID NO: 70997 - DNA, 9 bp, Unknown
  misc_feature (1)..( 9): Matrix.004 file - promoters50/2113772
actcaaaaa

SEQ ID NO: 70998 - DNA, 9 bp, Unknown
  misc_feature (1)..( 9): Matrix.004 file - promoters50/2113817
ttcaaaact

SEQ ID NO: 70999 - DNA, 9 bp, Unknown
  misc_feature (1)..( 9): Matrix.004 file - promoters50/2113817
gaaataaat

SEQ ID NO: 71000 - DNA, 7 bp, Unknown
  misc_feature (1)..( 7): Matrix.004 file - promoters50/2113817
acgttat

SEQ ID NO: 71001 - DNA, 7 bp, Unknown
  misc_feature (1)..( 7): Matrix.004 file - promoters50/2113817
aaaataa

SEQ ID NO: 71002 - DNA, 7 bp, Unknown
  misc_feature (1)..( 7): Matrix.004 file - promoters50/2113839
aaattga

SEQ ID NO: 71003 - DNA, 9 bp, Unknown
  misc_feature (1)..( 9): Matrix.004 file - promoters50/2113839
attaataaa

SEQ ID NO: 71004 - DNA, 10 bp, Unknown
  misc_feature (1)..( 10): Matrix.004 file - promoters50/2113839
aaataacaaa

SEQ ID NO: 71005 - DNA, 9 bp, Unknown
  misc_feature (1)..( 9): Matrix.004 file - promoters50/2113839
aaatatatt

SEQ ID NO: 71006 - DNA, 11 bp, Unknown
  misc_feature (1)..( 11): Matrix.004 file - promoters50/2113842
ataaaaaaata

SEQ ID NO: 71007 - DNA, 7 bp, Unknown
  misc_feature (1)..( 7): Matrix.004 file - promoters50/2113842
ttgtcaa

SEQ ID NO: 71008 - DNA, 7 bp, Unknown
  misc_feature (1)..( 7): Matrix.004 file - promoters50/2113842
aaaataa

SEQ ID NO: 71009 - DNA, 8 bp, Unknown
  misc_feature (1)..( 8): Matrix.004 file - promoters50/2113846
atatatat

SEQ ID NO: 71010 - DNA, 11 bp, Unknown
  misc_feature (1)..( 11): Matrix.004 file - promoters50/2113846
attataattta

SEQ ID NO: 71011 - DNA, 9 bp, Unknown
  misc_feature (1)..( 9): Matrix.004 file - promoters50/2113846
aatttaacg

SEQ ID NO: 71012 - DNA, 11 bp, Unknown
  misc_feature (1)..( 11): Matrix.004 file - promoters50/2113846
taaaattattt

SEQ ID NO: 71013 - DNA, 8 bp, Unknown
  misc_feature (1)..( 8): Matrix.004 file - promoters50/2113889
attagatc

SEQ ID NO: 71014 - DNA, 11 bp, Unknown
  misc_feature (1)..( 11): Matrix.004 file - promoters50/2113889
aatataatctg

SEQ ID NO: 71015 - DNA, 12 bp, Unknown
  misc_feature (1)..( 12): Matrix.004 file - promoters50/2113889
attaactttgat

SEQ ID NO: 71016 - DNA, 13 bp, Unknown
  misc_feature (1)..( 13): Matrix.004 file - promoters50/2113889
gataaattacaaa

SEQ ID NO: 71017 - DNA, 10 bp, Unknown
  misc_feature (1)..( 10): Matrix.004 file - promoters50/2113889
tttaactaaa

SEQ ID NO: 71018 - DNA, 13 bp, Unknown
  misc_feature (1)..( 13): Matrix.004 file - promoters50/2113889
aaagaatataaat

SEQ ID NO: 71019 - DNA, 9 bp, Unknown
  misc_feature (1)..( 9): Matrix.004 file - promoters50/2113889
aaaacaaaa

SEQ ID NO: 71020 - DNA, 10 bp, Unknown
  misc_feature (1)..( 10): Matrix.004 file - promoters50/2113889
ataaaaattg

SEQ ID NO: 71021 - DNA, 8 bp, Unknown
  misc_feature (1)..( 8): Matrix.004 file - promoters50/2113889
tataaatt

SEQ ID NO: 71022 - DNA, 10 bp, Unknown
  misc_feature (1)..( 10): Matrix.004 file - promoters50/2113914
aaataataaa

SEQ ID NO: 71023 - DNA, 9 bp, Unknown
  misc_feature (1)..( 9): Matrix.004 file - promoters50/2113914
taatttaat

SEQ ID NO: 71024 - DNA, 8 bp, Unknown
  misc_feature (1)..( 8): Matrix.004 file - promoters50/2113928
aaacaaaa

SEQ ID NO: 71025 - DNA, 16 bp, Unknown
  misc_feature (1)..( 16): Matrix.004 file - promoters50/2113928
aaaaattattaaatta

SEQ ID NO: 71026 - DNA, 9 bp, Unknown
  misc_feature (1)..( 9): Matrix.004 file - promoters50/2113928
aaaacaaaa

SEQ ID NO: 71027 - DNA, 10 bp, Unknown
  misc_feature (1)..( 10): Matrix.004 file - promoters50/2113928
ctataaatat

SEQ ID NO: 71028 - DNA, 14 bp, Unknown
  misc_feature (1)..( 14): Matrix.004 file - promoters50/2113928
ttattaaagtataa

SEQ ID NO: 71029 - DNA, 11 bp, Unknown
  misc_feature (1)..( 11): Matrix.004 file - promoters50/2113928
ccacttaactt

SEQ ID NO: 71030 - DNA, 8 bp, Unknown
  misc_feature (1)..( 8): Matrix.004 file - promoters50/2113928
taagttta

SEQ ID NO: 71031 - DNA, 10 bp, Unknown
  misc_feature (1)..( 10): Matrix.004 file - promoters50/2113967
aaaataaaaa

SEQ ID NO: 71032 - DNA, 10 bp, Unknown
  misc_feature (1)..( 10): Matrix.004 file - promoters50/2113967
ttattttata

SEQ ID NO: 71033 - DNA, 13 bp, Unknown
  misc_feature (1)..( 13): Matrix.004 file - promoters50/2114005
aaacctattttaa

SEQ ID NO: 71034 - DNA, 11 bp, Unknown
  misc_feature (1)..( 11): Matrix.004 file - promoters50/2114005
aaaattttata

SEQ ID NO: 71035 - DNA, 10 bp, Unknown
  misc_feature (1)..( 10): Matrix.004 file - promoters50/2114005
aatttatata

SEQ ID NO: 71036 - DNA, 11 bp, Unknown
  misc_feature (1)..( 11): Matrix.004 file - promoters50/2114005
aattttcttag

SEQ ID NO: 71037 - DNA, 10 bp, Unknown
  misc_feature (1)..( 10): Matrix.004 file - promoters50/2114026
ataaattttt

SEQ ID NO: 71038 - DNA, 8 bp, Unknown
  misc_feature (1)..( 8): Matrix.004 file - promoters50/2114026
gaagtttt

SEQ ID NO: 71039 - DNA, 15 bp, Unknown
  misc_feature (1)..( 15): Matrix.004 file - promoters50/2114026
tattagtttttcatt

SEQ ID NO: 71040 - DNA, 11 bp, Unknown
  misc_feature (1)..( 11): Matrix.004 file - promoters50/2114026
ttataagtaaa

SEQ ID NO: 71041 - DNA, 10 bp, Unknown
  misc_feature (1)..( 10): Matrix.004 file - promoters50/2114030
ctatataaac

SEQ ID NO: 71042 - DNA, 15 bp, Unknown
  misc_feature (1)..( 15): Matrix.004 file - promoters50/2114030
tcttaccatatatat

SEQ ID NO: 71043 - DNA, 12 bp, Unknown
  misc_feature (1)..( 12): Matrix.004 file - promoters50/2114030
cattcaaaaaaa

SEQ ID NO: 71044 - DNA, 8 bp, Unknown
  misc_feature (1)..( 8): Matrix.004 file - promoters50/2114095
aataaaaa

SEQ ID NO: 71045 - DNA, 11 bp, Unknown
  misc_feature (1)..( 11): Matrix.004 file - promoters50/2114111
ctaaaaaactt

SEQ ID NO: 71046 - DNA, 12 bp, Unknown
  misc_feature (1)..( 12): Matrix.004 file - promoters50/2114111
ataaatgatttg

SEQ ID NO: 71047 - DNA, 9 bp, Unknown
  misc_feature (1)..( 9): Matrix.004 file - promoters50/2114111
aattttcga

SEQ ID NO: 71048 - DNA, 7 bp, Unknown
  misc_feature (1)..( 7): Matrix.004 file - promoters50/2114111
taatatt

SEQ ID NO: 71049 - DNA, 8 bp, Unknown
  misc_feature (1)..( 8): Matrix.004 file - promoters50/2114111
aaaagcct

SEQ ID NO: 71050 - DNA, 8 bp, Unknown
  misc_feature (1)..( 8): Matrix.004 file - promoters50/2114111
aaaaacct

SEQ ID NO: 71051 - DNA, 10 bp, Unknown
  misc_feature (1)..( 10): Matrix.004 file - promoters50/2114111
caacttagaa

SEQ ID NO: 71052 - DNA, 8 bp, Unknown
  misc_feature (1)..( 8): Matrix.004 file - promoters50/2114111
caaattat

SEQ ID NO: 71053 - DNA, 12 bp, Unknown
  misc_feature (1)..( 12): Matrix.004 file - promoters50/2114115
tgaaatagttaa

SEQ ID NO: 71054 - DNA, 9 bp, Unknown
  misc_feature (1)..( 9): Matrix.004 file - promoters50/2114115
agatcattc

SEQ ID NO: 71055 - DNA, 12 bp, Unknown
  misc_feature (1)..( 12): Matrix.004 file - promoters50/2114119
ttaggatttatt

SEQ ID NO: 71056 - DNA, 7 bp, Unknown
  misc_feature (1)..( 7): Matrix.004 file - promoters50/2114138
ttttctt

SEQ ID NO: 71057 - DNA, 12 bp, Unknown
  misc_feature (1)..( 12): Matrix.004 file - promoters50/2114138
aaatagatctac

SEQ ID NO: 71058 - DNA, 9 bp, Unknown
  misc_feature (1)..( 9): Matrix.004 file - promoters50/2114138
aattttgaa

SEQ ID NO: 71059 - DNA, 9 bp, Unknown
  misc_feature (1)..( 9): Matrix.004 file - promoters50/2114141
tttttggta

SEQ ID NO: 71060 - DNA, 7 bp, Unknown
  misc_feature (1)..( 7): Matrix.004 file - promoters50/2114141
ttttata

SEQ ID NO: 71061 - DNA, 9 bp, Unknown
  misc_feature (1)..( 9): Matrix.004 file - promoters50/2114141
aactttaat

SEQ ID NO: 71062 - DNA, 9 bp, Unknown
  misc_feature (1)..( 9): Matrix.004 file - promoters50/2114141
aaatagttt

SEQ ID NO: 71063 - DNA, 8 bp, Unknown
  misc_feature (1)..( 8): Matrix.004 file - promoters50/2114145
ttaatttt

SEQ ID NO: 71064 - DNA, 8 bp, Unknown
  misc_feature (1)..( 8): Matrix.004 file - promoters50/2114145
tatacaaa

SEQ ID NO: 71065 - DNA, 8 bp, Unknown
  misc_feature (1)..( 8): Matrix.004 file - promoters50/2114145
atgattct

SEQ ID NO: 71066 - DNA, 8 bp, Unknown
  misc_feature (1)..( 8): Matrix.004 file - promoters50/2114175
aaaataaa

SEQ ID NO: 71067 - DNA, 11 bp, Unknown
  misc_feature (1)..( 11): Matrix.004 file - promoters50/2114175
ttttattggtt

SEQ ID NO: 71068 - DNA, 9 bp, Unknown
  misc_feature (1)..( 9): Matrix.004 file - promoters50/2114175
aaaaaaaaa

SEQ ID NO: 71069 - DNA, 13 bp, Unknown
  misc_feature (1)..( 13): Matrix.004 file - promoters50/2114178
cataatgggacca

SEQ ID NO: 71070 - DNA, 10 bp, Unknown
  misc_feature (1)..( 10): Matrix.004 file - promoters50/2114178
taaaatatga

SEQ ID NO: 71071 - DNA, 9 bp, Unknown
  misc_feature (1)..( 9): Matrix.004 file - promoters50/2114178
gtttcaaaa

SEQ ID NO: 71072 - DNA, 9 bp, Unknown
  misc_feature (1)..( 9): Matrix.004 file - promoters50/2114178
tgattcaaa

SEQ ID NO: 71073 - DNA, 6 bp, Unknown
  misc_feature (1)..( 6): Matrix.004 file - promoters50/2114178
tgtatt

SEQ ID NO: 71074 - DNA, 14 bp, Unknown
  misc_feature (1)..( 14): Matrix.004 file - promoters50/2114178
tagagaaaaacacc

SEQ ID NO: 71075 - DNA, 8 bp, Unknown
  misc_feature (1)..( 8): Matrix.004 file - promoters50/2114178
aaaataat

SEQ ID NO: 71076 - DNA, 10 bp, Unknown
  misc_feature (1)..( 10): Matrix.004 file - promoters50/2114200
agcaaaggaa

SEQ ID NO: 71077 - DNA, 8 bp, Unknown
  misc_feature (1)..( 8): Matrix.004 file - promoters50/2169576
caatcttc

SEQ ID NO: 71078 - DNA, 14 bp, Unknown
  misc_feature (1)..( 14): Matrix.004 file - promoters50/2169576
actgatataaatga

SEQ ID NO: 71079 - DNA, 12 bp, Unknown
  misc_feature (1)..( 12): Matrix.004 file - promoters50/2169576
aaacttttcttt

SEQ ID NO: 71080 - DNA, 11 bp, Unknown
  misc_feature (1)..( 11): Matrix.004 file - promoters50/2184050
tcatatataaa

SEQ ID NO: 71081 - DNA, 10 bp, Unknown
  misc_feature (1)..( 10): Matrix.004 file - promoters50/2184050
aaattactaa

SEQ ID NO: 71082 - DNA, 9 bp, Unknown
  misc_feature (1)..( 9): Matrix.004 file - promoters50/2185389
aatataaat

SEQ ID NO: 71083 - DNA, 13 bp, Unknown
  misc_feature (1)..( 13): Matrix.004 file - promoters50/2185389
ctgaagaaaaaat

SEQ ID NO: 71084 - DNA, 9 bp, Unknown
  misc_feature (1)..( 9): Matrix.004 file - promoters50/2187156
acaaaagaa

SEQ ID NO: 71085 - DNA, 11 bp, Unknown
  misc_feature (1)..( 11): Matrix.004 file - promoters50/2187156
tcataattaag

SEQ ID NO: 71086 - DNA, 10 bp, Unknown
  misc_feature (1)..( 10): Matrix.004 file - promoters50/2187156
atgtaaaatt

SEQ ID NO: 71087 - DNA, 9 bp, Unknown
  misc_feature (1)..( 9): Matrix.004 file - promoters50/2217752
tcagaattg

SEQ ID NO: 71088 - DNA, 8 bp, Unknown
  misc_feature (1)..( 8): Matrix.004 file - promoters50/2217794
agatggaa

SEQ ID NO: 71089 - DNA, 11 bp, Unknown
  misc_feature (1)..( 11): Matrix.004 file - promoters50/2217996
aaaaaaagaaa

SEQ ID NO: 71090 - DNA, 11 bp, Unknown
  misc_feature (1)..( 11): Matrix.004 file - promoters50/2218016
tcagttttgcg

SEQ ID NO: 71091 - DNA, 8 bp, Unknown
  misc_feature (1)..( 8): Matrix.004 file - promoters50/2218184
taagaaac

SEQ ID NO: 71092 - DNA, 8 bp, Unknown
  misc_feature (1)..( 8): Matrix.004 file - promoters50/2218184
ttaaaatc

SEQ ID NO: 71093 - DNA, 10 bp, Unknown
  misc_feature (1)..( 10): Matrix.004 file - promoters50/2218259
actttataat

SEQ ID NO: 71094 - DNA, 9 bp, Unknown
  misc_feature (1)..( 9): Matrix.004 file - promoters50/2218260
agatatttt

SEQ ID NO: 71095 - DNA, 10 bp, Unknown
  misc_feature (1)..( 10): Matrix.004 file - promoters50/2218271
ctataaatac

SEQ ID NO: 71096 - DNA, 11 bp, Unknown
  misc_feature (1)..( 11): Matrix.004 file - promoters50/2685671
tcaaaactaaa

SEQ ID NO: 71097 - DNA, 11 bp, Unknown
  misc_feature (1)..( 11): Matrix.004 file - promoters50/2685671
gtatatattca

SEQ ID NO: 71098 - DNA, 12 bp, Unknown
  misc_feature (1)..( 12): Matrix.004 file - promoters50/2685671
aaagcccattaa

SEQ ID NO: 71099 - DNA, 9 bp, Unknown
  misc_feature (1)..( 9): Matrix.004 file - promoters50/2685671
agaaaaata

SEQ ID NO: 71100 - DNA, 8 bp, Unknown
  misc_feature (1)..( 8): Matrix.004 file - promoters50/2685712
tttaaaaa

SEQ ID NO: 71101 - DNA, 10 bp, Unknown
  misc_feature (1)..( 10): Matrix.004 file - promoters50/2685712
ggtttaggtg

SEQ ID NO: 71102 - DNA, 8 bp, Unknown
  misc_feature (1)..( 8): Matrix.004 file - promoters50/2685725
tcttataa

SEQ ID NO: 71103 - DNA, 8 bp, Unknown
  misc_feature (1)..( 8): Matrix.004 file - promoters50/2685725
ttataatg

SEQ ID NO: 71104 - DNA, 9 bp, Unknown
  misc_feature (1)..( 9): Matrix.004 file - promoters50/2685725
agaaggttc

SEQ ID NO: 71105 - DNA, 10 bp, Unknown
  misc_feature (1)..( 10): Matrix.004 file - promoters50/2685873
gaaaagttaa

SEQ ID NO: 71106 - DNA, 16 bp, Unknown
  misc_feature (1)..( 16): Matrix.004 file - promoters50/2685873
aaaaaacaatttataa

SEQ ID NO: 71107 - DNA, 10 bp, Unknown
  misc_feature (1)..( 10): Matrix.004 file - promoters50/2685873
aagaactttt

SEQ ID NO: 71108 - DNA, 10 bp, Unknown
  misc_feature (1)..( 10): Matrix.004 file - promoters50/2685877
atataaaaaa

SEQ ID NO: 71109 - DNA, 9 bp, Unknown
  misc_feature (1)..( 9): Matrix.004 file - promoters50/2685877
ctttgatta

SEQ ID NO: 71110 - DNA, 8 bp, Unknown
  misc_feature (1)..( 8): Matrix.004 file - promoters50/2685877
ccatatta

SEQ ID NO: 71111 - DNA, 11 bp, Unknown
  misc_feature (1)..( 11): Matrix.004 file - promoters50/2685931
ttgcactataa

SEQ ID NO: 71112 - DNA, 15 bp, Unknown
  misc_feature (1)..( 15): Matrix.004 file - promoters50/2685931
attaattatttgaac

SEQ ID NO: 71113 - DNA, 9 bp, Unknown
  misc_feature (1)..( 9): Matrix.004 file - promoters50/2685931
aacattaaa

SEQ ID NO: 71114 - DNA, 8 bp, Unknown
  misc_feature (1)..( 8): Matrix.004 file - promoters50/2685951
atttattt

SEQ ID NO: 71115 - DNA, 6 bp, Unknown
  misc_feature (1)..( 6): Matrix.004 file - promoters50/2685951
atctaa

SEQ ID NO: 71116 - DNA, 13 bp, Unknown
  misc_feature (1)..( 13): Matrix.004 file - promoters50/2685968
aaagatcaaaaaa

SEQ ID NO: 71117 - DNA, 8 bp, Unknown
  misc_feature (1)..( 8): Matrix.004 file - promoters50/2685968
tgaaaata

SEQ ID NO: 71118 - DNA, 8 bp, Unknown
  misc_feature (1)..( 8): Matrix.004 file - promoters50/2685968
aaacaaaa

SEQ ID NO: 71119 - DNA, 10 bp, Unknown
  misc_feature (1)..( 10): Matrix.004 file - promoters50/2685968
tattatttta

SEQ ID NO: 71120 - DNA, 11 bp, Unknown
  misc_feature (1)..( 11): Matrix.004 file - promoters50/2685968
tgttaaaaaat

SEQ ID NO: 71121 - DNA, 13 bp, Unknown
  misc_feature (1)..( 13): Matrix.004 file - promoters50/2685968
aaaaacttgtata

SEQ ID NO: 71122 - DNA, 11 bp, Unknown
  misc_feature (1)..( 11): Matrix.004 file - promoters50/2685968
tttgattttaa

SEQ ID NO: 71123 - DNA, 8 bp, Unknown
  misc_feature (1)..( 8): Matrix.004 file - promoters50/2685968
attttaaa

SEQ ID NO: 71124 - DNA, 10 bp, Unknown
  misc_feature (1)..( 10): Matrix.004 file - promoters50/2686138
caaaactata

SEQ ID NO: 71125 - DNA, 10 bp, Unknown
  misc_feature (1)..( 10): Matrix.004 file - promoters50/2686138
aaacaattat

SEQ ID NO: 71126 - DNA, 7 bp, Unknown
  misc_feature (1)..( 7): Matrix.004 file - promoters50/2686138
attttgt

SEQ ID NO: 71127 - DNA, 9 bp, Unknown
  misc_feature (1)..( 9): Matrix.004 file - promoters50/2686138
tataattaa

SEQ ID NO: 71128 - DNA, 7 bp, Unknown
  misc_feature (1)..( 7): Matrix.004 file - promoters50/2686438
aaataat

SEQ ID NO: 71129 - DNA, 9 bp, Unknown
  misc_feature (1)..( 9): Matrix.004 file - promoters50/2686438
tgcatttta

SEQ ID NO: 71130 - DNA, 9 bp, Unknown
  misc_feature (1)..( 9): Matrix.004 file - promoters50/2686438
aaatagtct

SEQ ID NO: 71131 - DNA, 9 bp, Unknown
  misc_feature (1)..( 9): Matrix.004 file - promoters50/2686438
ataaagatt

SEQ ID NO: 71132 - DNA, 10 bp, Unknown
  misc_feature (1)..( 10): Matrix.004 file - promoters50/2686438
taacaaaata

SEQ ID NO: 71133 - DNA, 7 bp, Unknown
  misc_feature (1)..( 7): Matrix.004 file - promoters50/2704717
acacaag

SEQ ID NO: 71134 - DNA, 10 bp, Unknown
  misc_feature (1)..( 10): Matrix.004 file - promoters50/2704717
aaacattcaa

SEQ ID NO: 71135 - DNA, 15 bp, Unknown
  misc_feature (1)..( 15): Matrix.004 file - promoters50/2724399
caccaagaaataaaa

SEQ ID NO: 71136 - DNA, 8 bp, Unknown
  misc_feature (1)..( 8): Matrix.004 file - promoters50/2724473
tcagatat

SEQ ID NO: 71137 - DNA, 12 bp, Unknown
  misc_feature (1)..( 12): Matrix.004 file - promoters50/2724473
tatcattaatgt

SEQ ID NO: 71138 - DNA, 16 bp, Unknown
  misc_feature (1)..( 16): Matrix.004 file - promoters50/2724473
taattctgtctcatca

SEQ ID NO: 71139 - DNA, 8 bp, Unknown
  misc_feature (1)..( 8): Matrix.004 file - promoters50/2724473
gatagtaa

SEQ ID NO: 71140 - DNA, 8 bp, Unknown
  misc_feature (1)..( 8): Matrix.004 file - promoters50/2724699
aatttatt

SEQ ID NO: 71141 - DNA, 18 bp, Unknown
  misc_feature (1)..( 18): Matrix.004 file - promoters50/2724699
aaaagtttagggaaaaag

SEQ ID NO: 71142 - DNA, 7 bp, Unknown
  misc_feature (1)..( 7): Matrix.004 file - promoters50/2724699
aattatc

SEQ ID NO: 71143 - DNA, 7 bp, Unknown
  misc_feature (1)..( 7): Matrix.004 file - promoters50/2724699
gaaaatg

SEQ ID NO: 71144 - DNA, 8 bp, Unknown
  misc_feature (1)..( 8): Matrix.004 file - promoters50/2724699
aatgtttt

SEQ ID NO: 71145 - DNA, 6 bp, Unknown
  misc_feature (1)..( 6): Matrix.004 file - promoters50/2724699
ttttac

SEQ ID NO: 71146 - DNA, 9 bp, Unknown
  misc_feature (1)..( 9): Matrix.004 file - promoters50/2724699
acattcaat

SEQ ID NO: 71147 - DNA, 6 bp, Unknown
  misc_feature (1)..( 6): Matrix.004 file - promoters50/2724699
cattat

SEQ ID NO: 71148 - DNA, 7 bp, Unknown
  misc_feature (1)..( 7): Matrix.004 file - promoters50/2724703
acgcaaa

SEQ ID NO: 71149 - DNA, 8 bp, Unknown
  misc_feature (1)..( 8): Matrix.004 file - promoters50/2724703
tctcagag

SEQ ID NO: 71150 - DNA, 12 bp, Unknown
  misc_feature (1)..( 12): Matrix.004 file - promoters50/2724703
aaaaacaaaaca

SEQ ID NO: 71151 - DNA, 9 bp, Unknown
  misc_feature (1)..( 9): Matrix.004 file - promoters50/2724703
tatttaaaa

SEQ ID NO: 71152 - DNA, 8 bp, Unknown
  misc_feature (1)..( 8): Matrix.004 file - promoters50/2724703
aaaaactg

SEQ ID NO: 71153 - DNA, 7 bp, Unknown
  misc_feature (1)..( 7): Matrix.004 file - promoters50/2724703
ttttggt

SEQ ID NO: 71154 - DNA, 8 bp, Unknown
  misc_feature (1)..( 8): Matrix.004 file - promoters50/2724703
ttaaccca

SEQ ID NO: 71155 - DNA, 7 bp, Unknown
  misc_feature (1)..( 7): Matrix.004 file - promoters50/2724724
agagata

SEQ ID NO: 71156 - DNA, 10 bp, Unknown
  misc_feature (1)..( 10): Matrix.004 file - promoters50/2724724
tataacttga

SEQ ID NO: 71157 - DNA, 8 bp, Unknown
  misc_feature (1)..( 8): Matrix.004 file - promoters50/2724724
aaataaaa

SEQ ID NO: 71158 - DNA, 10 bp, Unknown
  misc_feature (1)..( 10): Matrix.004 file - promoters50/2724724
aaaaaaaata

SEQ ID NO: 71159 - DNA, 8 bp, Unknown
  misc_feature (1)..( 8): Matrix.004 file - promoters50/2724736
cccactaa

SEQ ID NO: 71160 - DNA, 9 bp, Unknown
  misc_feature (1)..( 9): Matrix.004 file - promoters50/2724736
aaatacaaa

SEQ ID NO: 71161 - DNA, 12 bp, Unknown
  misc_feature (1)..( 12): Matrix.004 file - promoters50/2724756
ttccatttaaaa

SEQ ID NO: 71162 - DNA, 7 bp, Unknown
  misc_feature (1)..( 7): Matrix.004 file - promoters50/2724771
tataaag

SEQ ID NO: 71163 - DNA, 14 bp, Unknown
  misc_feature (1)..( 14): Matrix.004 file - promoters50/2724771
aataaaaaccaaaa

SEQ ID NO: 71164 - DNA, 8 bp, Unknown
  misc_feature (1)..( 8): Matrix.004 file - promoters50/2781302
agaaaatt

SEQ ID NO: 71165 - DNA, 8 bp, Unknown
  misc_feature (1)..( 8): Matrix.004 file - promoters50/2781320
tttaagaa

SEQ ID NO: 71166 - DNA, 7 bp, Unknown
  misc_feature (1)..( 7): Matrix.004 file - promoters50/2781320
atattaa

SEQ ID NO: 71167 - DNA, 11 bp, Unknown
  misc_feature (1)..( 11): Matrix.004 file - promoters50/2781320
tagcaatagtg

SEQ ID NO: 71168 - DNA, 7 bp, Unknown
  misc_feature (1)..( 7): Matrix.004 file - promoters50/2781320
aatataa

SEQ ID NO: 71169 - DNA, 10 bp, Unknown
  misc_feature (1)..( 10): Matrix.004 file - promoters50/2781320
attgaataaa

SEQ ID NO: 71170 - DNA, 7 bp, Unknown
  misc_feature (1)..( 7): Matrix.004 file - promoters50/2781320
catttca

SEQ ID NO: 71171 - DNA, 12 bp, Unknown
  misc_feature (1)..( 12): Matrix.004 file - promoters50/2781320
taataaattttg

SEQ ID NO: 71172 - DNA, 7 bp, Unknown
  misc_feature (1)..( 7): Matrix.004 file - promoters50/2781320
tttacca

SEQ ID NO: 71173 - DNA, 8 bp, Unknown
  misc_feature (1)..( 8): Matrix.004 file - promoters50/2781320
ggtttgaa

SEQ ID NO: 71174 - DNA, 8 bp, Unknown
  misc_feature (1)..( 8): Matrix.004 file - promoters50/2781341
ggttagaa

SEQ ID NO: 71175 - DNA, 11 bp, Unknown
  misc_feature (1)..( 11): Matrix.004 file - promoters50/2781341
aaagtttttgt

SEQ ID NO: 71176 - DNA, 9 bp, Unknown
  misc_feature (1)..( 9): Matrix.004 file - promoters50/2781341
aaaaatttt

SEQ ID NO: 71177 - DNA, 11 bp, Unknown
  misc_feature (1)..( 11): Matrix.004 file - promoters50/2781341
attttatgatt

SEQ ID NO: 71178 - DNA, 14 bp, Unknown
  misc_feature (1)..( 14): Matrix.004 file - promoters50/2781341
aacttaattttttc

SEQ ID NO: 71179 - DNA, 11 bp, Unknown
  misc_feature (1)..( 11): Matrix.004 file - promoters50/2781341
acttttaaaaa

SEQ ID NO: 71180 - DNA, 10 bp, Unknown
  misc_feature (1)..( 10): Matrix.004 file - promoters50/2781341
acaaattttt

SEQ ID NO: 71181 - DNA, 13 bp, Unknown
  misc_feature (1)..( 13): Matrix.004 file - promoters50/2781786
taaaattaattct

SEQ ID NO: 71182 - DNA, 13 bp, Unknown
  misc_feature (1)..( 13): Matrix.004 file - promoters50/2781800
aactgaaaattca

SEQ ID NO: 71183 - DNA, 10 bp, Unknown
  misc_feature (1)..( 10): Matrix.004 file - promoters50/2781800
taaattaata

SEQ ID NO: 71184 - DNA, 10 bp, Unknown
  misc_feature (1)..( 10): Matrix.004 file - promoters50/2781800
ttaatttata

SEQ ID NO: 71185 - DNA, 8 bp, Unknown
  misc_feature (1)..( 8): Matrix.004 file - promoters50/2781800
aatttata

SEQ ID NO: 71186 - DNA, 8 bp, Unknown
  misc_feature (1)..( 8): Matrix.004 file - promoters50/2781800
ttttcatg

SEQ ID NO: 71187 - DNA, 6 bp, Unknown
  misc_feature (1)..( 6): Matrix.004 file - promoters50/2781800
tatata

SEQ ID NO: 71188 - DNA, 26 bp, Unknown
  misc_feature (1)..( 26): Matrix.004 file - promoters50/2781800
tttacaaaataataatataaaatata

SEQ ID NO: 71189 - DNA, 35 bp, Unknown
  misc_feature (1)..( 35): Matrix.004 file - promoters50/2781800
aaaaataaagaaaatacatttctatgacccaataa

SEQ ID NO: 71190 - DNA, 8 bp, Unknown
  misc_feature (1)..( 8): Matrix.004 file - promoters50/2781818
ttatcaat

SEQ ID NO: 71191 - DNA, 10 bp, Unknown
  misc_feature (1)..( 10): Matrix.004 file - promoters50/2781818
aagaggattg

SEQ ID NO: 71192 - DNA, 8 bp, Unknown
  misc_feature (1)..( 8): Matrix.004 file - promoters50/2781998
aaaaagag

SEQ ID NO: 71193 - DNA, 15 bp, Unknown
  misc_feature (1)..( 15): Matrix.004 file - promoters50/2785775
agtaggaaaagaaat

SEQ ID NO: 71194 - DNA, 12 bp, Unknown
  misc_feature (1)..( 12): Matrix.004 file - promoters50/2785798
tgggaaacttgt

SEQ ID NO: 71195 - DNA, 11 bp, Unknown
  misc_feature (1)..( 11): Matrix.004 file - promoters50/2785798
aatgacaatta

SEQ ID NO: 71196 - DNA, 7 bp, Unknown
  misc_feature (1)..( 7): Matrix.004 file - promoters50/2785798
aatattt

SEQ ID NO: 71197 - DNA, 10 bp, Unknown
  misc_feature (1)..( 10): Matrix.004 file - promoters50/2918398
tatattttaa

SEQ ID NO: 71198 - DNA, 7 bp, Unknown
  misc_feature (1)..( 7): Matrix.004 file - promoters50/2918607
tataaaa

SEQ ID NO: 71199 - DNA, 7 bp, Unknown
  misc_feature (1)..( 7): Matrix.004 file - promoters50/2918607
tttattt

SEQ ID NO: 71200 - DNA, 8 bp, Unknown
  misc_feature (1)..( 8): Matrix.004 file - promoters50/2918607
tttttgtt

SEQ ID NO: 71201 - DNA, 7 bp, Unknown
  misc_feature (1)..( 7): Matrix.004 file - promoters50/2918607
caaaaaa

SEQ ID NO: 71202 - DNA, 8 bp, Unknown
  misc_feature (1)..( 8): Matrix.004 file - promoters50/2918611
caataact

SEQ ID NO: 71203 - DNA, 8 bp, Unknown
  misc_feature (1)..( 8): Matrix.004 file - promoters50/2918611
aataataa

SEQ ID NO: 71204 - DNA, 7 bp, Unknown
  misc_feature (1)..( 7): Matrix.004 file - promoters50/2918611
aataata

SEQ ID NO: 71205 - DNA, 8 bp, Unknown
  misc_feature (1)..( 8): Matrix.004 file - promoters50/2918619
aatagtgg

SEQ ID NO: 71206 - DNA, 10 bp, Unknown
  misc_feature (1)..( 10): Matrix.004 file - promoters50/2918626
cgttaaataa

SEQ ID NO: 71207 - DNA, 7 bp, Unknown
  misc_feature (1)..( 7): Matrix.004 file - promoters50/2918636
gtttaga

SEQ ID NO: 71208 - DNA, 8 bp, Unknown
  misc_feature (1)..( 8): Matrix.004 file - promoters50/2918636
taattttg

SEQ ID NO: 71209 - DNA, 8 bp, Unknown
  misc_feature (1)..( 8): Matrix.004 file - promoters50/2918640
gattattc

SEQ ID NO: 71210 - DNA, 8 bp, Unknown
  misc_feature (1)..( 8): Matrix.004 file - promoters50/2918658
ctaaaaaa

SEQ ID NO: 71211 - DNA, 11 bp, Unknown
  misc_feature (1)..( 11): Matrix.004 file - promoters50/2918666
actttataaaa

SEQ ID NO: 71212 - DNA, 7 bp, Unknown
  misc_feature (1)..( 7): Matrix.004 file - promoters50/2918666
gtaagaa

SEQ ID NO: 71213 - DNA, 13 bp, Unknown
  misc_feature (1)..( 13): Matrix.004 file - promoters50/2918666
agacataataaaa

SEQ ID NO: 71214 - DNA, 8 bp, Unknown
  misc_feature (1)..( 8): Matrix.004 file - promoters50/2918666
catataac

SEQ ID NO: 71215 - DNA, 13 bp, Unknown
  misc_feature (1)..( 13): Matrix.004 file - promoters50/2918666
gtataaaattaat

SEQ ID NO: 71216 - DNA, 8 bp, Unknown
  misc_feature (1)..( 8): Matrix.004 file - promoters50/2918666
aagagacg

SEQ ID NO: 71217 - DNA, 8 bp, Unknown
  misc_feature (1)..( 8): Matrix.004 file - promoters50/2918666
gctaatga

SEQ ID NO: 71218 - DNA, 8 bp, Unknown
  misc_feature (1)..( 8): Matrix.004 file - promoters50/2918666
tggtaaga

SEQ ID NO: 71219 - DNA, 8 bp, Unknown
  misc_feature (1)..( 8): Matrix.004 file - promoters50/2918666
tattaatt

SEQ ID NO: 71220 - DNA, 7 bp, Unknown
  misc_feature (1)..( 7): Matrix.004 file - promoters50/2918666
tataaat

SEQ ID NO: 71221 - DNA, 9 bp, Unknown
  misc_feature (1)..( 9): Matrix.004 file - promoters50/2918666
tctttttcc

SEQ ID NO: 71222 - DNA, 8 bp, Unknown
  misc_feature (1)..( 8): Matrix.004 file - promoters50/2918666
agtgaaaa

SEQ ID NO: 71223 - DNA, 8 bp, Unknown
  misc_feature (1)..( 8): Matrix.004 file - promoters50/2918666
aaatcttg

SEQ ID NO: 71224 - DNA, 9 bp, Unknown
  misc_feature (1)..( 9): Matrix.004 file - promoters50/2918674
tatcacaat

SEQ ID NO: 71225 - DNA, 11 bp, Unknown
  misc_feature (1)..( 11): Matrix.004 file - promoters50/2918674
gcttcatttca

SEQ ID NO: 71226 - DNA, 9 bp, Unknown
  misc_feature (1)..( 9): Matrix.004 file - promoters50/2918676
atttttgta

SEQ ID NO: 71227 - DNA, 9 bp, Unknown
  misc_feature (1)..( 9): Matrix.004 file - promoters50/2918676
gaaaaaaga

SEQ ID NO: 71228 - DNA, 11 bp, Unknown
  misc_feature (1)..( 11): Matrix.004 file - promoters50/2918676
taaaagtctgt

SEQ ID NO: 71229 - DNA, 7 bp, Unknown
  misc_feature (1)..( 7): Matrix.004 file - promoters50/2918688
gaaagaa

SEQ ID NO: 71230 - DNA, 8 bp, Unknown
  misc_feature (1)..( 8): Matrix.004 file - promoters50/2918688
attggaat

SEQ ID NO: 71231 - DNA, 10 bp, Unknown
  misc_feature (1)..( 10): Matrix.004 file - promoters50/2989987
caaacaacta

SEQ ID NO: 71232 - DNA, 8 bp, Unknown
  misc_feature (1)..( 8): Matrix.004 file - promoters50/2989991
tatcattt

SEQ ID NO: 71233 - DNA, 17 bp, Unknown
  misc_feature (1)..( 17): Matrix.004 file - promoters50/2989991
aaatcatctcaatgcca

SEQ ID NO: 71234 - DNA, 6 bp, Unknown
  misc_feature (1)..( 6): Matrix.004 file - promoters50/2989991
gatgaa

SEQ ID NO: 71235 - DNA, 9 bp, Unknown
  misc_feature (1)..( 9): Matrix.004 file - promoters50/2989991
aagctcgat

SEQ ID NO: 71236 - DNA, 6 bp, Unknown
  misc_feature (1)..( 6): Matrix.004 file - promoters50/2989991
aaaaaa

SEQ ID NO: 71237 - DNA, 6 bp, Unknown
  misc_feature (1)..( 6): Matrix.004 file - promoters50/2989991
aacaag

SEQ ID NO: 71238 - DNA, 6 bp, Unknown
  misc_feature (1)..( 6): Matrix.004 file - promoters50/2989991
ttaaaa

SEQ ID NO: 71239 - DNA, 8 bp, Unknown
  misc_feature (1)..( 8): Matrix.004 file - promoters50/2989991
taatttat

SEQ ID NO: 71240 - DNA, 8 bp, Unknown
  misc_feature (1)..( 8): Matrix.004 file - promoters50/2989991
ttcgaatt

SEQ ID NO: 71241 - DNA, 8 bp, Unknown
  misc_feature (1)..( 8): Matrix.004 file - promoters50/2990064
aagaaaaa

SEQ ID NO: 71242 - DNA, 8 bp, Unknown
  misc_feature (1)..( 8): Matrix.004 file - promoters50/2990064
aatttatt

SEQ ID NO: 71243 - DNA, 10 bp, Unknown
  misc_feature (1)..( 10): Matrix.004 file - promoters50/2990064
agcatcaaca

SEQ ID NO: 71244 - DNA, 11 bp, Unknown
  misc_feature (1)..( 11): Matrix.004 file - promoters50/2990064
taatgtctcag

SEQ ID NO: 71245 - DNA, 9 bp, Unknown
  misc_feature (1)..( 9): Matrix.004 file - promoters50/2990064
ttctatata

SEQ ID NO: 71246 - DNA, 8 bp, Unknown
  misc_feature (1)..( 8): Matrix.004 file - promoters50/2990064
ttcaccag

SEQ ID NO: 71247 - DNA, 10 bp, Unknown
  misc_feature (1)..( 10): Matrix.004 file - promoters50/2990064
cttgtcagat

SEQ ID NO: 71248 - DNA, 27 bp, Unknown
  misc_feature (1)..( 27): Matrix.004 file - promoters50/2990064
tcttgtcatataaacgtccatatagga

SEQ ID NO: 71249 - DNA, 39 bp, Unknown
  misc_feature (1)..( 39): Matrix.004 file - promoters50/2990064
gattcatacccacatgatcatgtcttctcaccacaagtt

SEQ ID NO: 71250 - DNA, 19 bp, Unknown
  misc_feature (1)..( 19): Matrix.004 file - promoters50/2990064
tatagtccacaagttgatt

SEQ ID NO: 71251 - DNA, 14 bp, Unknown
  misc_feature (1)..( 14): Matrix.004 file - promoters50/2990064
tgacataattgatt

SEQ ID NO: 71252 - DNA, 15 bp, Unknown
  misc_feature (1)..( 15): Matrix.004 file - promoters50/2990087
aacttgggaccctta

SEQ ID NO: 71253 - DNA, 10 bp, Unknown
  misc_feature (1)..( 10): Matrix.004 file - promoters50/2990087
aaaactattt

SEQ ID NO: 71254 - DNA, 7 bp, Unknown
  misc_feature (1)..( 7): Matrix.004 file - promoters50/2990087
ttttctt

SEQ ID NO: 71255 - DNA, 9 bp, Unknown
  misc_feature (1)..( 9): Matrix.004 file - promoters50/2990091
actatatat

SEQ ID NO: 71256 - DNA, 10 bp, Unknown
  misc_feature (1)..( 10): Matrix.004 file - promoters50/2990091
cttgttttaa

SEQ ID NO: 71257 - DNA, 13 bp, Unknown
  misc_feature (1)..( 13): Matrix.004 file - promoters50/2990184
aagattctgttgt

SEQ ID NO: 71258 - DNA, 11 bp, Unknown
  misc_feature (1)..( 11): Matrix.004 file - promoters50/2990184
caattatatat

SEQ ID NO: 71259 - DNA, 9 bp, Unknown
  misc_feature (1)..( 9): Matrix.004 file - promoters50/2990184
tagaataaa

SEQ ID NO: 71260 - DNA, 7 bp, Unknown
  misc_feature (1)..( 7): Matrix.004 file - promoters50/2990233
tttccaa

SEQ ID NO: 71261 - DNA, 11 bp, Unknown
  misc_feature (1)..( 11): Matrix.004 file - promoters50/2990233
cgttttggtta

SEQ ID NO: 71262 - DNA, 11 bp, Unknown
  misc_feature (1)..( 11): Matrix.004 file - promoters50/2990233
tattgtatttt

SEQ ID NO: 71263 - DNA, 6 bp, Unknown
  misc_feature (1)..( 6): Matrix.004 file - promoters50/2990233
agagac

SEQ ID NO: 71264 - DNA, 8 bp, Unknown
  misc_feature (1)..( 8): Matrix.004 file - promoters50/2990249
aaacataa

SEQ ID NO: 71265 - DNA, 7 bp, Unknown
  misc_feature (1)..( 7): Matrix.004 file - promoters50/2990249
tcactta

SEQ ID NO: 71266 - DNA, 10 bp, Unknown
  misc_feature (1)..( 10): Matrix.004 file - promoters50/2990249
aaaacaaaac

SEQ ID NO: 71267 - DNA, 7 bp, Unknown
  misc_feature (1)..( 7): Matrix.004 file - promoters50/2990249
aagaaaa

SEQ ID NO: 71268 - DNA, 11 bp, Unknown
  misc_feature (1)..( 11): Matrix.004 file - promoters50/2990253
tgatatacact

SEQ ID NO: 71269 - DNA, 9 bp, Unknown
  misc_feature (1)..( 9): Matrix.004 file - promoters50/2990263
agcatgcgt

SEQ ID NO: 71270 - DNA, 10 bp, Unknown
  misc_feature (1)..( 10): Matrix.004 file - promoters50/2990263
atttgagaaa

SEQ ID NO: 71271 - DNA, 13 bp, Unknown
  misc_feature (1)..( 13): Matrix.004 file - promoters50/2990355
caaattgaaaaaa

SEQ ID NO: 71272 - DNA, 7 bp, Unknown
  misc_feature (1)..( 7): Matrix.004 file - promoters50/2990457
taaatct

SEQ ID NO: 71273 - DNA, 10 bp, Unknown
  misc_feature (1)..( 10): Matrix.004 file - promoters50/2990457
tccaaacttt

SEQ ID NO: 71274 - DNA, 10 bp, Unknown
  misc_feature (1)..( 10): Matrix.004 file - promoters50/2990457
atgtttatta

SEQ ID NO: 71275 - DNA, 8 bp, Unknown
  misc_feature (1)..( 8): Matrix.004 file - promoters50/2990457
ttatataa

SEQ ID NO: 71276 - DNA, 7 bp, Unknown
  misc_feature (1)..( 7): Matrix.004 file - promoters50/2990457
caaattt

SEQ ID NO: 71277 - DNA, 7 bp, Unknown
  misc_feature (1)..( 7): Matrix.004 file - promoters50/2990457
tttattt

SEQ ID NO: 71278 - DNA, 11 bp, Unknown
  misc_feature (1)..( 11): Matrix.004 file - promoters50/2990528
gatttttaaat

SEQ ID NO: 71279 - DNA, 12 bp, Unknown
  misc_feature (1)..( 12): Matrix.004 file - promoters50/2990548
gaaatataaatt

SEQ ID NO: 71280 - DNA, 10 bp, Unknown
  misc_feature (1)..( 10): Matrix.004 file - promoters50/2990611
tctttgtttg

SEQ ID NO: 71281 - DNA, 9 bp, Unknown
  misc_feature (1)..( 9): Matrix.004 file - promoters50/2990611
atttattta

SEQ ID NO: 71282 - DNA, 15 bp, Unknown
  misc_feature (1)..( 15): Matrix.004 file - promoters50/2990611
tcctataaatagaaa

SEQ ID NO: 71283 - DNA, 11 bp, Unknown
  misc_feature (1)..( 11): Matrix.004 file - promoters50/2990611
ataaaaaaaac

SEQ ID NO: 71284 - DNA, 10 bp, Unknown
  misc_feature (1)..( 10): Matrix.004 file - promoters50/2990611
caaacaaaga

SEQ ID NO: 71285 - DNA, 11 bp, Unknown
  misc_feature (1)..( 11): Matrix.004 file - promoters50/2990611
ttaaattaata

SEQ ID NO: 71286 - DNA, 14 bp, Unknown
  misc_feature (1)..( 14): Matrix.004 file - promoters50/2990611
ccttaaaagaaata

SEQ ID NO: 71287 - DNA, 15 bp, Unknown
  misc_feature (1)..( 15): Matrix.004 file - promoters50/2990659
cgaaaaataatttaa

SEQ ID NO: 71288 - DNA, 8 bp, Unknown
  misc_feature (1)..( 8): Matrix.004 file - promoters50/2990659
ttaaaaaa

SEQ ID NO: 71289 - DNA, 8 bp, Unknown
  misc_feature (1)..( 8): Matrix.004 file - promoters50/2990712
aaaatgaa

SEQ ID NO: 71290 - DNA, 7 bp, Unknown
  misc_feature (1)..( 7): Matrix.004 file - promoters50/2990712
tctttag

SEQ ID NO: 71291 - DNA, 9 bp, Unknown
  misc_feature (1)..( 9): Matrix.004 file - promoters50/2990777
ataaataca

SEQ ID NO: 71292 - DNA, 8 bp, Unknown
  misc_feature (1)..( 8): Matrix.004 file - promoters50/2990777
attcaaaa

SEQ ID NO: 71293 - DNA, 9 bp, Unknown
  misc_feature (1)..( 9): Matrix.004 file - promoters50/2990839
aaagtaaag

SEQ ID NO: 71294 - DNA, 9 bp, Unknown
  misc_feature (1)..( 9): Matrix.004 file - promoters50/2990839
taacaaaga

SEQ ID NO: 71295 - DNA, 8 bp, Unknown
  misc_feature (1)..( 8): Matrix.004 file - promoters50/2990839
aaaaaagt

SEQ ID NO: 71296 - DNA, 22 bp, Unknown
  misc_feature (1)..( 22): Matrix.004 file - promoters50/2990839
cccatacacgttaaggcccaat

SEQ ID NO: 71297 - DNA, 27 bp, Unknown
  misc_feature (1)..( 27): Matrix.004 file - promoters50/2990839
ttaaagcccaagaagtaacaataaaga

SEQ ID NO: 71298 - DNA, 10 bp, Unknown
  misc_feature (1)..( 10): Matrix.004 file - promoters50/2990928
tttattaaaa

SEQ ID NO: 71299 - DNA, 8 bp, Unknown
  misc_feature (1)..( 8): Matrix.004 file - promoters50/2991101
caaaatta

SEQ ID NO: 71300 - DNA, 7 bp, Unknown
  misc_feature (1)..( 7): Matrix.004 file - promoters50/2991101
tttattt

SEQ ID NO: 71301 - DNA, 9 bp, Unknown
  misc_feature (1)..( 9): Matrix.004 file - promoters50/2991141
tctttttcc

SEQ ID NO: 71302 - DNA, 10 bp, Unknown
  misc_feature (1)..( 10): Matrix.004 file - promoters50/2991141
aattatttta

SEQ ID NO: 71303 - DNA, 9 bp, Unknown
  misc_feature (1)..( 9): Matrix.004 file - promoters50/2991141
tcaaacaac

SEQ ID NO: 71304 - DNA, 8 bp, Unknown
  misc_feature (1)..( 8): Matrix.004 file - promoters50/2991141
tttatttt

SEQ ID NO: 71305 - DNA, 7 bp, Unknown
  misc_feature (1)..( 7): Matrix.004 file - promoters50/2991141
tttaatg

SEQ ID NO: 71306 - DNA, 8 bp, Unknown
  misc_feature (1)..( 8): Matrix.004 file - promoters50/2991227
gtttttaa

SEQ ID NO: 71307 - DNA, 16 bp, Unknown
  misc_feature (1)..( 16): Matrix.004 file - promoters50/2991227
atttagaacaattgat

SEQ ID NO: 71308 - DNA, 10 bp, Unknown
  misc_feature (1)..( 10): Matrix.004 file - promoters50/2991235
ttgactgctc

SEQ ID NO: 71309 - DNA, 9 bp, Unknown
  misc_feature (1)..( 9): Matrix.004 file - promoters50/2991235
catagagaa

SEQ ID NO: 71310 - DNA, 8 bp, Unknown
  misc_feature (1)..( 8): Matrix.004 file - promoters50/2991235
ggataaca

SEQ ID NO: 71311 - DNA, 9 bp, Unknown
  misc_feature (1)..( 9): Matrix.004 file - promoters50/2991235
tatcaacaa

SEQ ID NO: 71312 - DNA, 8 bp, Unknown
  misc_feature (1)..( 8): Matrix.004 file - promoters50/2991235
aaacacaa

SEQ ID NO: 71313 - DNA, 8 bp, Unknown
  misc_feature (1)..( 8): Matrix.004 file - promoters50/2991235
gaagaaac

SEQ ID NO: 71314 - DNA, 8 bp, Unknown
  misc_feature (1)..( 8): Matrix.004 file - promoters50/2991235
aagaagat

SEQ ID NO: 71315 - DNA, 10 bp, Unknown
  misc_feature (1)..( 10): Matrix.004 file - promoters50/2991235
gaagcattta

SEQ ID NO: 71316 - DNA, 8 bp, Unknown
  misc_feature (1)..( 8): Matrix.004 file - promoters50/2991235
gtagagaa

SEQ ID NO: 71317 - DNA, 8 bp, Unknown
  misc_feature (1)..( 8): Matrix.004 file - promoters50/2991239
tgttttgg

SEQ ID NO: 71318 - DNA, 13 bp, Unknown
  misc_feature (1)..( 13): Matrix.004 file - promoters50/2991239
aatataaaaaaaa

SEQ ID NO: 71319 - DNA, 9 bp, Unknown
  misc_feature (1)..( 9): Matrix.004 file - promoters50/2991239
taaatacaa

SEQ ID NO: 71320 - DNA, 23 bp, Unknown
  misc_feature (1)..( 23): Matrix.004 file - promoters50/2991239
atcatttaaaagatctcacgata

SEQ ID NO: 71321 - DNA, 27 bp, Unknown
  misc_feature (1)..( 27): Matrix.004 file - promoters50/2991239
gagcctaaatataaaggcaataatcat

SEQ ID NO: 71322 - DNA, 13 bp, Unknown
  misc_feature (1)..( 13): Matrix.004 file - promoters50/2991239
tcaataaaaaaaa

SEQ ID NO: 71323 - DNA, 13 bp, Unknown
  misc_feature (1)..( 13): Matrix.004 file - promoters50/2991239
agtaaaataaatg

SEQ ID NO: 71324 - DNA, 10 bp, Unknown
  misc_feature (1)..( 10): Matrix.004 file - promoters50/2991239
ataaaaaaaa

SEQ ID NO: 71325 - DNA, 8 bp, Unknown
  misc_feature (1)..( 8): Matrix.004 file - promoters50/2991239
caaaaaaa

SEQ ID NO: 71326 - DNA, 5 bp, Unknown
  misc_feature (1)..( 5): Matrix.004 file - promoters50/2991333
caaaa

SEQ ID NO: 71327 - DNA, 8 bp, Unknown
  misc_feature (1)..( 8): Matrix.004 file - promoters50/2991333
aaaataaa

SEQ ID NO: 71328 - DNA, 7 bp, Unknown
  misc_feature (1)..( 7): Matrix.004 file - promoters50/2991371
aataaag

SEQ ID NO: 71329 - DNA, 8 bp, Unknown
  misc_feature (1)..( 8): Matrix.004 file - promoters50/2991417
aacatctt

SEQ ID NO: 71330 - DNA, 11 bp, Unknown
  misc_feature (1)..( 11): Matrix.004 file - promoters50/2991417
aaccaaaaagt

SEQ ID NO: 71331 - DNA, 9 bp, Unknown
  misc_feature (1)..( 9): Matrix.004 file - promoters50/2991431
ttatcttac

SEQ ID NO: 71332 - DNA, 9 bp, Unknown
  misc_feature (1)..( 9): Matrix.004 file - promoters50/2991431
caaaattat

SEQ ID NO: 71333 - DNA, 7 bp, Unknown
  misc_feature (1)..( 7): Matrix.004 file - promoters50/2991431
aattaga

SEQ ID NO: 71334 - DNA, 11 bp, Unknown
  misc_feature (1)..( 11): Matrix.004 file - promoters50/2991431
gttttaaactc

SEQ ID NO: 71335 - DNA, 7 bp, Unknown
  misc_feature (1)..( 7): Matrix.004 file - promoters50/2991431
acaactt

SEQ ID NO: 71336 - DNA, 9 bp, Unknown
  misc_feature (1)..( 9): Matrix.004 file - promoters50/2991431
ttatttaaa

SEQ ID NO: 71337 - DNA, 8 bp, Unknown
  misc_feature (1)..( 8): Matrix.004 file - promoters50/2991431
atttagaa

SEQ ID NO: 71338 - DNA, 9 bp, Unknown
  misc_feature (1)..( 9): Matrix.004 file - promoters50/2991431
tgtttaatg

SEQ ID NO: 71339 - DNA, 9 bp, Unknown
  misc_feature (1)..( 9): Matrix.004 file - promoters50/2991431
ttataaaaa

SEQ ID NO: 71340 - DNA, 6 bp, Unknown
  misc_feature (1)..( 6): Matrix.004 file - promoters50/2991466
aaaaaa

SEQ ID NO: 71341 - DNA, 9 bp, Unknown
  misc_feature (1)..( 9): Matrix.004 file - promoters50/2991466
tcattttta

SEQ ID NO: 71342 - DNA, 8 bp, Unknown
  misc_feature (1)..( 8): Matrix.004 file - promoters50/2991466
taactaat

SEQ ID NO: 71343 - DNA, 10 bp, Unknown
  misc_feature (1)..( 10): Matrix.004 file - promoters50/2991466
atttttcaaa

SEQ ID NO: 71344 - DNA, 6 bp, Unknown
  misc_feature (1)..( 6): Matrix.004 file - promoters50/2991489
aaaaat

SEQ ID NO: 71345 - DNA, 7 bp, Unknown
  misc_feature (1)..( 7): Matrix.004 file - promoters50/2991489
ttatatt

SEQ ID NO: 71346 - DNA, 14 bp, Unknown
  misc_feature (1)..( 14): Matrix.004 file - promoters50/2991489
ttactttttatttt

SEQ ID NO: 71347 - DNA, 10 bp, Unknown
  misc_feature (1)..( 10): Matrix.004 file - promoters50/2991507
ctttttactt

SEQ ID NO: 71348 - DNA, 7 bp, Unknown
  misc_feature (1)..( 7): Matrix.004 file - promoters50/2991507
gatcgat

SEQ ID NO: 71349 - DNA, 7 bp, Unknown
  misc_feature (1)..( 7): Matrix.004 file - promoters50/2991507
tttcaca

SEQ ID NO: 71350 - DNA, 9 bp, Unknown
  misc_feature (1)..( 9): Matrix.004 file - promoters50/2991507
tgtttttta

SEQ ID NO: 71351 - DNA, 14 bp, Unknown
  misc_feature (1)..( 14): Matrix.004 file - promoters50/2991507
ttttactaactttc

SEQ ID NO: 71352 - DNA, 7 bp, Unknown
  misc_feature (1)..( 7): Matrix.004 file - promoters50/2991515
taaaatc

SEQ ID NO: 71353 - DNA, 9 bp, Unknown
  misc_feature (1)..( 9): Matrix.004 file - promoters50/2991515
tcatgttct

SEQ ID NO: 71354 - DNA, 8 bp, Unknown
  misc_feature (1)..( 8): Matrix.004 file - promoters50/2991515
tatggttt

SEQ ID NO: 71355 - DNA, 11 bp, Unknown
  misc_feature (1)..( 11): Matrix.004 file - promoters50/2991515
aaattgttttt

SEQ ID NO: 71356 - DNA, 9 bp, Unknown
  misc_feature (1)..( 9): Matrix.004 file - promoters50/2991515
agaaacagt

SEQ ID NO: 71357 - DNA, 11 bp, Unknown
  misc_feature (1)..( 11): Matrix.004 file - promoters50/2991515
aattaaaaact

SEQ ID NO: 71358 - DNA, 7 bp, Unknown
  misc_feature (1)..( 7): Matrix.004 file - promoters50/2991515
tttaata

SEQ ID NO: 71359 - DNA, 11 bp, Unknown
  misc_feature (1)..( 11): Matrix.004 file - promoters50/2991515
tataaattcat

SEQ ID NO: 71360 - DNA, 8 bp, Unknown
  misc_feature (1)..( 8): Matrix.004 file - promoters50/2991515
tgttctat

SEQ ID NO: 71361 - DNA, 11 bp, Unknown
  misc_feature (1)..( 11): Matrix.004 file - promoters50/2991515
ctttttttttg

SEQ ID NO: 71362 - DNA, 8 bp, Unknown
  misc_feature (1)..( 8): Matrix.004 file - promoters50/2991944
gaaacatt

SEQ ID NO: 71363 - DNA, 8 bp, Unknown
  misc_feature (1)..( 8): Matrix.004 file - promoters50/2991944
aataaatt

SEQ ID NO: 71364 - DNA, 11 bp, Unknown
  misc_feature (1)..( 11): Matrix.004 file - promoters50/2991944
acatgataagc

SEQ ID NO: 71365 - DNA, 10 bp, Unknown
  misc_feature (1)..( 10): Matrix.004 file - promoters50/2991944
aaaagtctaa

SEQ ID NO: 71366 - DNA, 8 bp, Unknown
  misc_feature (1)..( 8): Matrix.004 file - promoters50/2991944
ggcccatt

SEQ ID NO: 71367 - DNA, 8 bp, Unknown
  misc_feature (1)..( 8): Matrix.004 file - promoters50/2991944
ttcattac

SEQ ID NO: 71368 - DNA, 9 bp, Unknown
  misc_feature (1)..( 9): Matrix.004 file - promoters50/2991944
tttaatatt

SEQ ID NO: 71369 - DNA, 7 bp, Unknown
  misc_feature (1)..( 7): Matrix.004 file - promoters50/2991944
aaaaatt

SEQ ID NO: 71370 - DNA, 9 bp, Unknown
  misc_feature (1)..( 9): Matrix.004 file - promoters50/2991944
ataattaca

SEQ ID NO: 71371 - DNA, 10 bp, Unknown
  misc_feature (1)..( 10): Matrix.004 file - promoters50/2991955
aataactgat

SEQ ID NO: 71372 - DNA, 7 bp, Unknown
  misc_feature (1)..( 7): Matrix.004 file - promoters50/2991974
attaatt

SEQ ID NO: 71373 - DNA, 11 bp, Unknown
  misc_feature (1)..( 11): Matrix.004 file - promoters50/2992000
agttgtttttt

SEQ ID NO: 71374 - DNA, 11 bp, Unknown
  misc_feature (1)..( 11): Matrix.004 file - promoters50/2992181
attggaaagac

SEQ ID NO: 71375 - DNA, 7 bp, Unknown
  misc_feature (1)..( 7): Matrix.004 file - promoters50/2992181
ttaaaat

SEQ ID NO: 71376 - DNA, 7 bp, Unknown
  misc_feature (1)..( 7): Matrix.004 file - promoters50/2992181
gttatct

SEQ ID NO: 71377 - DNA, 7 bp, Unknown
  misc_feature (1)..( 7): Matrix.004 file - promoters50/2992181
tttacgt

SEQ ID NO: 71378 - DNA, 9 bp, Unknown
  misc_feature (1)..( 9): Matrix.004 file - promoters50/2992181
cataataat

SEQ ID NO: 71379 - DNA, 7 bp, Unknown
  misc_feature (1)..( 7): Matrix.004 file - promoters50/2992181
aacaaat

SEQ ID NO: 71380 - DNA, 8 bp, Unknown
  misc_feature (1)..( 8): Matrix.004 file - promoters50/2992316
aaagacaa

SEQ ID NO: 71381 - DNA, 9 bp, Unknown
  misc_feature (1)..( 9): Matrix.004 file - promoters50/2992316
catatcatc

SEQ ID NO: 71382 - DNA, 11 bp, Unknown
  misc_feature (1)..( 11): Matrix.004 file - promoters50/2992349
tccaaccattc

SEQ ID NO: 71383 - DNA, 11 bp, Unknown
  misc_feature (1)..( 11): Matrix.004 file - promoters50/2992349
atttatttcat

SEQ ID NO: 71384 - DNA, 11 bp, Unknown
  misc_feature (1)..( 11): Matrix.004 file - promoters50/2992349
aaaacaaaaaa

SEQ ID NO: 71385 - DNA, 9 bp, Unknown
  misc_feature (1)..( 9): Matrix.004 file - promoters50/2992349
taacaaata

SEQ ID NO: 71386 - DNA, 10 bp, Unknown
  misc_feature (1)..( 10): Matrix.004 file - promoters50/2992349
aaaaacaaaa

SEQ ID NO: 71387 - DNA, 10 bp, Unknown
  misc_feature (1)..( 10): Matrix.004 file - promoters50/2992349
agaaaataca

SEQ ID NO: 71388 - DNA, 7 bp, Unknown
  misc_feature (1)..( 7): Matrix.004 file - promoters50/2992349
attatat

SEQ ID NO: 71389 - DNA, 14 bp, Unknown
  misc_feature (1)..( 14): Matrix.004 file - promoters50/2992349
ctaaaaactaaatt

SEQ ID NO: 71390 - DNA, 10 bp, Unknown
  misc_feature (1)..( 10): Matrix.004 file - promoters50/2992349
aaaatacaga

SEQ ID NO: 71391 - DNA, 14 bp, Unknown
  misc_feature (1)..( 14): Matrix.004 file - promoters50/2992396
taaaaacaaaaatt

SEQ ID NO: 71392 - DNA, 11 bp, Unknown
  misc_feature (1)..( 11): Matrix.004 file - promoters50/2992722
agccacaagcg

SEQ ID NO: 71393 - DNA, 8 bp, Unknown
  misc_feature (1)..( 8): Matrix.004 file - promoters50/2993154
attgtata

SEQ ID NO: 71394 - DNA, 12 bp, Unknown
  misc_feature (1)..( 12): Matrix.004 file - promoters50/2993154
cattctaaagaa

SEQ ID NO: 71395 - DNA, 11 bp, Unknown
  misc_feature (1)..( 11): Matrix.004 file - promoters50/2993154
ctaaagaactt

SEQ ID NO: 71396 - DNA, 9 bp, Unknown
  misc_feature (1)..( 9): Matrix.004 file - promoters50/2993154
gtttaattt

SEQ ID NO: 71397 - DNA, 9 bp, Unknown
  misc_feature (1)..( 9): Matrix.004 file - promoters50/2993154
ttttcaagt

SEQ ID NO: 71398 - DNA, 9 bp, Unknown
  misc_feature (1)..( 9): Matrix.004 file - promoters50/2993154
aaattagat

SEQ ID NO: 71399 - DNA, 7 bp, Unknown
  misc_feature (1)..( 7): Matrix.004 file - promoters50/2993154
attattt

SEQ ID NO: 71400 - DNA, 13 bp, Unknown
  misc_feature (1)..( 13): Matrix.004 file - promoters50/2993240
aattaaaaataaa

SEQ ID NO: 71401 - DNA, 9 bp, Unknown
  misc_feature (1)..( 9): Matrix.004 file - promoters50/2993240
aatttaaac

SEQ ID NO: 71402 - DNA, 6 bp, Unknown
  misc_feature (1)..( 6): Matrix.004 file - promoters50/2993642
aaccgt

SEQ ID NO: 71403 - DNA, 9 bp, Unknown
  misc_feature (1)..( 9): Matrix.004 file - promoters50/2993642
gattctttt

SEQ ID NO: 71404 - DNA, 14 bp, Unknown
  misc_feature (1)..( 14): Matrix.004 file - promoters50/2994131
aaaaaaatatttaa

SEQ ID NO: 71405 - DNA, 8 bp, Unknown
  misc_feature (1)..( 8): Matrix.004 file - promoters50/2994131
acataaga

SEQ ID NO: 71406 - DNA, 7 bp, Unknown
  misc_feature (1)..( 7): Matrix.004 file - promoters50/2994131
ggcccat

SEQ ID NO: 71407 - DNA, 9 bp, Unknown
  misc_feature (1)..( 9): Matrix.004 file - promoters50/2994131
attttaaaa

SEQ ID NO: 71408 - DNA, 9 bp, Unknown
  misc_feature (1)..( 9): Matrix.004 file - promoters50/2994131
tacaacaac

SEQ ID NO: 71409 - DNA, 9 bp, Unknown
  misc_feature (1)..( 9): Matrix.004 file - promoters50/2994202
taaaactac

SEQ ID NO: 71410 - DNA, 12 bp, Unknown
  misc_feature (1)..( 12): Matrix.004 file - promoters50/2994225
taaacatttgga

SEQ ID NO: 71411 - DNA, 7 bp, Unknown
  misc_feature (1)..( 7): Matrix.004 file - promoters50/2994869
tttttat

SEQ ID NO: 71412 - DNA, 8 bp, Unknown
  misc_feature (1)..( 8): Matrix.004 file - promoters50/2994916
aaagattc

SEQ ID NO: 71413 - DNA, 10 bp, Unknown
  misc_feature (1)..( 10): Matrix.004 file - promoters50/2994916
taaaacaaac

SEQ ID NO: 71414 - DNA, 13 bp, Unknown
  misc_feature (1)..( 13): Matrix.004 file - promoters50/2994916
aaatactaaaaca

SEQ ID NO: 71415 - DNA, 12 bp, Unknown
  misc_feature (1)..( 12): Matrix.004 file - promoters50/2994916
acaccaatctta

SEQ ID NO: 71416 - DNA, 11 bp, Unknown
  misc_feature (1)..( 11): Matrix.004 file - promoters50/2994916
attaaaaaaat

SEQ ID NO: 71417 - DNA, 7 bp, Unknown
  misc_feature (1)..( 7): Matrix.004 file - promoters50/2994916
aaaacaa

SEQ ID NO: 71418 - DNA, 10 bp, Unknown
  misc_feature (1)..( 10): Matrix.004 file - promoters50/2994916
ataaaatttt

SEQ ID NO: 71419 - DNA, 7 bp, Unknown
  misc_feature (1)..( 7): Matrix.004 file - promoters50/2994916
ataattt

SEQ ID NO: 71420 - DNA, 12 bp, Unknown
  misc_feature (1)..( 12): Matrix.004 file - promoters50/2994916
gaatttctcaat

SEQ ID NO: 71421 - DNA, 12 bp, Unknown
  misc_feature (1)..( 12): Matrix.004 file - promoters50/2995201
tttatatataaa

SEQ ID NO: 71422 - DNA, 9 bp, Unknown
  misc_feature (1)..( 9): Matrix.004 file - promoters50/2995201
aatttataa

SEQ ID NO: 71423 - DNA, 7 bp, Unknown
  misc_feature (1)..( 7): Matrix.004 file - promoters50/2995201
aaaatta

SEQ ID NO: 71424 - DNA, 10 bp, Unknown
  misc_feature (1)..( 10): Matrix.004 file - promoters50/2995201
taaattttgg

SEQ ID NO: 71425 - DNA, 8 bp, Unknown
  misc_feature (1)..( 8): Matrix.004 file - promoters50/2995898
aacataag

SEQ ID NO: 71426 - DNA, 7 bp, Unknown
  misc_feature (1)..( 7): Matrix.004 file - promoters50/2995898
agagaaa

SEQ ID NO: 71427 - DNA, 10 bp, Unknown
  misc_feature (1)..( 10): Matrix.004 file - promoters50/2995898
tgacgatgaa

SEQ ID NO: 71428 - DNA, 8 bp, Unknown
  misc_feature (1)..( 8): Matrix.004 file - promoters50/2995898
gataattt

SEQ ID NO: 71429 - DNA, 6 bp, Unknown
  misc_feature (1)..( 6): Matrix.004 file - promoters50/2995898
ataata

SEQ ID NO: 71430 - DNA, 12 bp, Unknown
  misc_feature (1)..( 12): Matrix.004 file - promoters50/2996021
tttaagttttta

SEQ ID NO: 71431 - DNA, 11 bp, Unknown
  misc_feature (1)..( 11): Matrix.004 file - promoters50/2996054
tccgatcacaa

SEQ ID NO: 71432 - DNA, 6 bp, Unknown
  misc_feature (1)..( 6): Matrix.004 file - promoters50/2996054
caaaaa

SEQ ID NO: 71433 - DNA, 10 bp, Unknown
  misc_feature (1)..( 10): Matrix.004 file - promoters50/2996054
tgttttcact

SEQ ID NO: 71434 - DNA, 10 bp, Unknown
  misc_feature (1)..( 10): Matrix.004 file - promoters50/2996054
aactttttat

SEQ ID NO: 71435 - DNA, 9 bp, Unknown
  misc_feature (1)..( 9): Matrix.004 file - promoters50/2996080
ctgtcaaag

SEQ ID NO: 71436 - DNA, 9 bp, Unknown
  misc_feature (1)..( 9): Matrix.004 file - promoters50/2996092
ataaagata

SEQ ID NO: 71437 - DNA, 10 bp, Unknown
  misc_feature (1)..( 10): Matrix.004 file - promoters50/2996109
aagattaata

SEQ ID NO: 71438 - DNA, 8 bp, Unknown
  misc_feature (1)..( 8): Matrix.004 file - promoters50/2996109
attatttt

SEQ ID NO: 71439 - DNA, 13 bp, Unknown
  misc_feature (1)..( 13): Matrix.004 file - promoters50/2996109
taattaaatataa

SEQ ID NO: 71440 - DNA, 13 bp, Unknown
  misc_feature (1)..( 13): Matrix.004 file - promoters50/2996109
taataaaacataa

SEQ ID NO: 71441 - DNA, 7 bp, Unknown
  misc_feature (1)..( 7): Matrix.004 file - promoters50/2996109
aaacatc

SEQ ID NO: 71442 - DNA, 8 bp, Unknown
  misc_feature (1)..( 8): Matrix.004 file - promoters50/2996109
aatatata

SEQ ID NO: 71443 - DNA, 7 bp, Unknown
  misc_feature (1)..( 7): Matrix.004 file - promoters50/2996109
tattata

SEQ ID NO: 71444 - DNA, 13 bp, Unknown
  misc_feature (1)..( 13): Matrix.004 file - promoters50/2996109
aacaagtcaaaaa

SEQ ID NO: 71445 - DNA, 7 bp, Unknown
  misc_feature (1)..( 7): Matrix.004 file - promoters50/2996109
aaaaaag

SEQ ID NO: 71446 - DNA, 8 bp, Unknown
  misc_feature (1)..( 8): Matrix.004 file - promoters50/2996115
ttttgtat

SEQ ID NO: 71447 - DNA, 8 bp, Unknown
  misc_feature (1)..( 8): Matrix.004 file - promoters50/2996115
tttttact

SEQ ID NO: 71448 - DNA, 11 bp, Unknown
  misc_feature (1)..( 11): Matrix.004 file - promoters50/2996115
tttaaaatata

SEQ ID NO: 71449 - DNA, 9 bp, Unknown
  misc_feature (1)..( 9): Matrix.004 file - promoters50/2996115
aattcccac

SEQ ID NO: 71450 - DNA, 10 bp, Unknown
  misc_feature (1)..( 10): Matrix.004 file - promoters50/2996119
caaagttgtt

SEQ ID NO: 71451 - DNA, 9 bp, Unknown
  misc_feature (1)..( 9): Matrix.004 file - promoters50/2996222
aaaaaacga

SEQ ID NO: 71452 - DNA, 16 bp, Unknown
  misc_feature (1)..( 16): Matrix.004 file - promoters50/2996222
aaaatttgaatgtaaa

SEQ ID NO: 71453 - DNA, 10 bp, Unknown
  misc_feature (1)..( 10): Matrix.004 file - promoters50/2996222
tttactaaaa

SEQ ID NO: 71454 - DNA, 11 bp, Unknown
  misc_feature (1)..( 11): Matrix.004 file - promoters50/2996222
ataatttttag

SEQ ID NO: 71455 - DNA, 11 bp, Unknown
  misc_feature (1)..( 11): Matrix.004 file - promoters50/2996222
ataattttact

SEQ ID NO: 71456 - DNA, 11 bp, Unknown
  misc_feature (1)..( 11): Matrix.004 file - promoters50/2996222
actatatataa

SEQ ID NO: 71457 - DNA, 9 bp, Unknown
  misc_feature (1)..( 9): Matrix.004 file - promoters50/2996222
taattatat

SEQ ID NO: 71458 - DNA, 10 bp, Unknown
  misc_feature (1)..( 10): Matrix.004 file - promoters50/2996281
atatttgtta

SEQ ID NO: 71459 - DNA, 8 bp, Unknown
  misc_feature (1)..( 8): Matrix.004 file - promoters50/2996281
atcaaaaa

SEQ ID NO: 71460 - DNA, 8 bp, Unknown
  misc_feature (1)..( 8): Matrix.004 file - promoters50/2996290
taagtttt

SEQ ID NO: 71461 - DNA, 17 bp, Unknown
  misc_feature (1)..( 17): Matrix.004 file - promoters50/2997951
cacaaggacaactttca

SEQ ID NO: 71462 - DNA, 14 bp, Unknown
  misc_feature (1)..( 14): Matrix.004 file - promoters50/2997951
cacttttctcaatc

SEQ ID NO: 71463 - DNA, 10 bp, Unknown
  misc_feature (1)..( 10): Matrix.004 file - promoters50/2997951
ttaaaatatt

SEQ ID NO: 71464 - DNA, 8 bp, Unknown
  misc_feature (1)..( 8): Matrix.004 file - promoters50/2997951
taatcaca

SEQ ID NO: 71465 - DNA, 11 bp, Unknown
  misc_feature (1)..( 11): Matrix.004 file - promoters50/3003006
tacaatactat

SEQ ID NO: 71466 - DNA, 8 bp, Unknown
  misc_feature (1)..( 8): Matrix.004 file - promoters50/3003006
gaaacttc

SEQ ID NO: 71467 - DNA, 10 bp, Unknown
  misc_feature (1)..( 10): Matrix.004 file - promoters50/3003006
gaaattagat

SEQ ID NO: 71468 - DNA, 10 bp, Unknown
  misc_feature (1)..( 10): Matrix.004 file - promoters50/3003010
tagatcgaaa

SEQ ID NO: 71469 - DNA, 9 bp, Unknown
  misc_feature (1)..( 9): Matrix.004 file - promoters50/3003010
atcaatttt

SEQ ID NO: 71470 - DNA, 7 bp, Unknown
  misc_feature (1)..( 7): Matrix.004 file - promoters50/3003010
taataat

SEQ ID NO: 71471 - DNA, 7 bp, Unknown
  misc_feature (1)..( 7): Matrix.004 file - promoters50/3003010
caatatt

SEQ ID NO: 71472 - DNA, 8 bp, Unknown
  misc_feature (1)..( 8): Matrix.004 file - promoters50/3011901
acataaaa

SEQ ID NO: 71473 - DNA, 6 bp, Unknown
  misc_feature (1)..( 6): Matrix.004 file - promoters50/3011901
agaaaa

SEQ ID NO: 71474 - DNA, 8 bp, Unknown
  misc_feature (1)..( 8): Matrix.004 file - promoters50/3011901
gagtgaaa

SEQ ID NO: 71475 - DNA, 9 bp, Unknown
  misc_feature (1)..( 9): Matrix.004 file - promoters50/3011901
taacataaa

SEQ ID NO: 71476 - DNA, 8 bp, Unknown
  misc_feature (1)..( 8): Matrix.004 file - promoters50/3011901
agtgcaac

SEQ ID NO: 71477 - DNA, 10 bp, Unknown
  misc_feature (1)..( 10): Matrix.004 file - promoters50/3011901
tttaaaaaat

SEQ ID NO: 71478 - DNA, 12 bp, Unknown
  misc_feature (1)..( 12): Matrix.004 file - promoters50/3020615
gatgatatatta

SEQ ID NO: 71479 - DNA, 8 bp, Unknown
  misc_feature (1)..( 8): Matrix.004 file - promoters50/3036674
ctttttgc

SEQ ID NO: 71480 - DNA, 9 bp, Unknown
  misc_feature (1)..( 9): Matrix.004 file - promoters50/3043322
caaaacaaa

SEQ ID NO: 71481 - DNA, 11 bp, Unknown
  misc_feature (1)..( 11): Matrix.004 file - promoters50/3043322
aaaaaaaatca

SEQ ID NO: 71482 - DNA, 15 bp, Unknown
  misc_feature (1)..( 15): Matrix.004 file - promoters50/3043322
aattactaaattttt

SEQ ID NO: 71483 - DNA, 9 bp, Unknown
  misc_feature (1)..( 9): Matrix.004 file - promoters50/3043962
aaaacaaat

SEQ ID NO: 71484 - DNA, 10 bp, Unknown
  misc_feature (1)..( 10): Matrix.004 file - promoters50/3043962
aaactattta

SEQ ID NO: 71485 - DNA, 12 bp, Unknown
  misc_feature (1)..( 12): Matrix.004 file - promoters50/3043962
aatacttaataa

SEQ ID NO: 71486 - DNA, 7 bp, Unknown
  misc_feature (1)..( 7): Matrix.004 file - promoters50/3046192
aaactat

SEQ ID NO: 71487 - DNA, 9 bp, Unknown
  misc_feature (1)..( 9): Matrix.004 file - promoters50/3046192
agaaatctg

SEQ ID NO: 71488 - DNA, 10 bp, Unknown
  misc_feature (1)..( 10): Matrix.004 file - promoters50/3062012
agaaatatgt

SEQ ID NO: 71489 - DNA, 11 bp, Unknown
  misc_feature (1)..( 11): Matrix.004 file - promoters50/3062012
atatttataat

SEQ ID NO: 71490 - DNA, 14 bp, Unknown
  misc_feature (1)..( 14): Matrix.004 file - promoters50/3062012
tttcaaaaatatta

SEQ ID NO: 71491 - DNA, 10 bp, Unknown
  misc_feature (1)..( 10): Matrix.004 file - promoters50/3062012
taaataaatt

SEQ ID NO: 71492 - DNA, 12 bp, Unknown
  misc_feature (1)..( 12): Matrix.004 file - promoters50/3062012
ttaaaaaattta

SEQ ID NO: 71493 - DNA, 8 bp, Unknown
  misc_feature (1)..( 8): Matrix.004 file - promoters50/3062012
ttaaaatc

SEQ ID NO: 71494 - DNA, 7 bp, Unknown
  misc_feature (1)..( 7): Matrix.004 file - promoters50/3062012
tgaaata

SEQ ID NO: 71495 - DNA, 9 bp, Unknown
  misc_feature (1)..( 9): Matrix.004 file - promoters50/3062012
attaaaaaa

SEQ ID NO: 71496 - DNA, 12 bp, Unknown
  misc_feature (1)..( 12): Matrix.004 file - promoters50/3062012
tcccaaattttt

SEQ ID NO: 71497 - DNA, 10 bp, Unknown
  misc_feature (1)..( 10): Matrix.004 file - promoters50/3062012
tttatttaaa

SEQ ID NO: 71498 - DNA, 11 bp, Unknown
  misc_feature (1)..( 11): Matrix.004 file - promoters50/3062012
tatttaaaata

SEQ ID NO: 71499 - DNA, 8 bp, Unknown
  misc_feature (1)..( 8): Matrix.004 file - promoters50/3062012
aatcaaaa

SEQ ID NO: 71500 - DNA, 9 bp, Unknown
  misc_feature (1)..( 9): Matrix.004 file - promoters50/3062012
aaaatttat

SEQ ID NO: 71501 - DNA, 14 bp, Unknown
  misc_feature (1)..( 14): Matrix.004 file - promoters50/3062012
ttttaaaaaatata

SEQ ID NO: 71502 - DNA, 14 bp, Unknown
  misc_feature (1)..( 14): Matrix.004 file - promoters50/3238306
ttttaaaaaatatt

SEQ ID NO: 71503 - DNA, 11 bp, Unknown
  misc_feature (1)..( 11): Matrix.004 file - promoters50/3238306
gtttgggcgag

SEQ ID NO: 71504 - DNA, 8 bp, Unknown
  misc_feature (1)..( 8): Matrix.004 file - promoters50/3238306
aaaaatat

SEQ ID NO: 71505 - DNA, 7 bp, Unknown
  misc_feature (1)..( 7): Matrix.004 file - promoters50/3238306
gattaat

SEQ ID NO: 71506 - DNA, 8 bp, Unknown
  misc_feature (1)..( 8): Matrix.004 file - promoters50/3239163
gttggaga

SEQ ID NO: 71507 - DNA, 10 bp, Unknown
  misc_feature (1)..( 10): Matrix.004 file - promoters50/3239163
aagtgtgtga

SEQ ID NO: 71508 - DNA, 7 bp, Unknown
  misc_feature (1)..( 7): Matrix.004 file - promoters50/3239163
aatatat

SEQ ID NO: 71509 - DNA, 9 bp, Unknown
  misc_feature (1)..( 9): Matrix.004 file - promoters50/3239175
atacacata

SEQ ID NO: 71510 - DNA, 8 bp, Unknown
  misc_feature (1)..( 8): Matrix.004 file - promoters50/3239175
gaaagaca

SEQ ID NO: 71511 - DNA, 9 bp, Unknown
  misc_feature (1)..( 9): Matrix.004 file - promoters50/3239175
aaaggaaaa

SEQ ID NO: 71512 - DNA, 9 bp, Unknown
  misc_feature (1)..( 9): Matrix.004 file - promoters50/3245308
gagtatata

SEQ ID NO: 71513 - DNA, 10 bp, Unknown
  misc_feature (1)..( 10): Matrix.004 file - promoters50/3245308
ttcaatttca

SEQ ID NO: 71514 - DNA, 7 bp, Unknown
  misc_feature (1)..( 7): Matrix.004 file - promoters50/3245308
aaattag

SEQ ID NO: 71515 - DNA, 7 bp, Unknown
  misc_feature (1)..( 7): Matrix.004 file - promoters50/3245308
tagtgtt

SEQ ID NO: 71516 - DNA, 7 bp, Unknown
  misc_feature (1)..( 7): Matrix.004 file - promoters50/3245330
ttcaatt

SEQ ID NO: 71517 - DNA, 9 bp, Unknown
  misc_feature (1)..( 9): Matrix.004 file - promoters50/3245330
tggttgatt

SEQ ID NO: 71518 - DNA, 8 bp, Unknown
  misc_feature (1)..( 8): Matrix.004 file - promoters50/3408983
attctttt

SEQ ID NO: 71519 - DNA, 13 bp, Unknown
  misc_feature (1)..( 13): Matrix.004 file - promoters50/3409019
aatgtgaatttac

SEQ ID NO: 71520 - DNA, 11 bp, Unknown
  misc_feature (1)..( 11): Matrix.004 file - promoters50/3409052
tttgaaacata

SEQ ID NO: 71521 - DNA, 8 bp, Unknown
  misc_feature (1)..( 8): Matrix.004 file - promoters50/3409052
tataaaaa

SEQ ID NO: 71522 - DNA, 8 bp, Unknown
  misc_feature (1)..( 8): Matrix.004 file - promoters50/3409075
taaaaagt

SEQ ID NO: 71523 - DNA, 12 bp, Unknown
  misc_feature (1)..( 12): Matrix.004 file - promoters50/3409075
agatttatatgc

SEQ ID NO: 71524 - DNA, 9 bp, Unknown
  misc_feature (1)..( 9): Matrix.004 file - promoters50/3409075
tattttatg

SEQ ID NO: 71525 - DNA, 9 bp, Unknown
  misc_feature (1)..( 9): Matrix.004 file - promoters50/3409075
gaatcgaaa

SEQ ID NO: 71526 - DNA, 13 bp, Unknown
  misc_feature (1)..( 13): Matrix.004 file - promoters50/3409141
aatttaatatttt

SEQ ID NO: 71527 - DNA, 10 bp, Unknown
  misc_feature (1)..( 10): Matrix.004 file - promoters50/3409141
aagcaaaaaa

SEQ ID NO: 71528 - DNA, 9 bp, Unknown
  misc_feature (1)..( 9): Matrix.004 file - promoters50/3409141
ctttataga

SEQ ID NO: 71529 - DNA, 7 bp, Unknown
  misc_feature (1)..( 7): Matrix.004 file - promoters50/3409141
taaatct

SEQ ID NO: 71530 - DNA, 8 bp, Unknown
  misc_feature (1)..( 8): Matrix.004 file - promoters50/3409141
ttttcaaa

SEQ ID NO: 71531 - DNA, 7 bp, Unknown
  misc_feature (1)..( 7): Matrix.004 file - promoters50/3409141
taaaatc

SEQ ID NO: 71532 - DNA, 6 bp, Unknown
  misc_feature (1)..( 6): Matrix.004 file - promoters50/3409141
aaaaaa

SEQ ID NO: 71533 - DNA, 7 bp, Unknown
  misc_feature (1)..( 7): Matrix.004 file - promoters50/3409141
tttttta

SEQ ID NO: 71534 - DNA, 10 bp, Unknown
  misc_feature (1)..( 10): Matrix.004 file - promoters50/3409161
ttttaataac

SEQ ID NO: 71535 - DNA, 10 bp, Unknown
  misc_feature (1)..( 10): Matrix.004 file - promoters50/3409165
ataaattttg

SEQ ID NO: 71536 - DNA, 10 bp, Unknown
  misc_feature (1)..( 10): Matrix.004 file - promoters50/3409165
caaaacaact

SEQ ID NO: 71537 - DNA, 12 bp, Unknown
  misc_feature (1)..( 12): Matrix.004 file - promoters50/3409191
agatttatttca

SEQ ID NO: 71538 - DNA, 12 bp, Unknown
  misc_feature (1)..( 12): Matrix.004 file - promoters50/3409214
gtttgtatgcag

SEQ ID NO: 71539 - DNA, 14 bp, Unknown
  misc_feature (1)..( 14): Matrix.004 file - promoters50/3409390
ctttctacaattaa

SEQ ID NO: 71540 - DNA, 9 bp, Unknown
  misc_feature (1)..( 9): Matrix.004 file - promoters50/3409390
agtatttaa

SEQ ID NO: 71541 - DNA, 9 bp, Unknown
  misc_feature (1)..( 9): Matrix.004 file - promoters50/3409390
gtttttata

SEQ ID NO: 71542 - DNA, 13 bp, Unknown
  misc_feature (1)..( 13): Matrix.004 file - promoters50/3409390
taattatatataa

SEQ ID NO: 71543 - DNA, 11 bp, Unknown
  misc_feature (1)..( 11): Matrix.004 file - promoters50/3409390
tctttatttta

SEQ ID NO: 71544 - DNA, 8 bp, Unknown
  misc_feature (1)..( 8): Matrix.004 file - promoters50/3409390
attttata

SEQ ID NO: 71545 - DNA, 14 bp, Unknown
  misc_feature (1)..( 14): Matrix.004 file - promoters50/3409390
aatattataaacat

SEQ ID NO: 71546 - DNA, 10 bp, Unknown
  misc_feature (1)..( 10): Matrix.004 file - promoters50/3409489
attataaagt

SEQ ID NO: 71547 - DNA, 9 bp, Unknown
  misc_feature (1)..( 9): Matrix.004 file - promoters50/3409631
aaatgatta

SEQ ID NO: 71548 - DNA, 11 bp, Unknown
  misc_feature (1)..( 11): Matrix.004 file - promoters50/3409637
ttttcttataa

SEQ ID NO: 71549 - DNA, 11 bp, Unknown
  misc_feature (1)..( 11): Matrix.004 file - promoters50/3409637
tatggatttaa

SEQ ID NO: 71550 - DNA, 12 bp, Unknown
  misc_feature (1)..( 12): Matrix.004 file - promoters50/3409637
aatgttaatttt

SEQ ID NO: 71551 - DNA, 6 bp, Unknown
  misc_feature (1)..( 6): Matrix.004 file - promoters50/3409637
ataatt

SEQ ID NO: 71552 - DNA, 9 bp, Unknown
  misc_feature (1)..( 9): Matrix.004 file - promoters50/3409637
tttggtttg

SEQ ID NO: 71553 - DNA, 11 bp, Unknown
  misc_feature (1)..( 11): Matrix.004 file - promoters50/3409712
gactaaaaatt

SEQ ID NO: 71554 - DNA, 6 bp, Unknown
  misc_feature (1)..( 6): Matrix.004 file - promoters50/3433703
caaaaa

SEQ ID NO: 71555 - DNA, 13 bp, Unknown
  misc_feature (1)..( 13): Matrix.004 file - promoters50/3433703
ataattttaaaaa

SEQ ID NO: 71556 - DNA, 13 bp, Unknown
  misc_feature (1)..( 13): Matrix.004 file - promoters50/3433703
aaaataaaacaat

SEQ ID NO: 71557 - DNA, 10 bp, Unknown
  misc_feature (1)..( 10): Matrix.004 file - promoters50/3433703
tatataaata

SEQ ID NO: 71558 - DNA, 10 bp, Unknown
  misc_feature (1)..( 10): Matrix.004 file - promoters50/3433703
atttactaaa

SEQ ID NO: 71559 - DNA, 10 bp, Unknown
  misc_feature (1)..( 10): Matrix.004 file - promoters50/3433703
aaatgatttc

SEQ ID NO: 71560 - DNA, 8 bp, Unknown
  misc_feature (1)..( 8): Matrix.004 file - promoters50/3433703
aaattttt

SEQ ID NO: 71561 - DNA, 13 bp, Unknown
  misc_feature (1)..( 13): Matrix.004 file - promoters50/3433743
caaataattctta

SEQ ID NO: 71562 - DNA, 10 bp, Unknown
  misc_feature (1)..( 10): Matrix.004 file - promoters50/3433743
ttgagatttt

SEQ ID NO: 71563 - DNA, 8 bp, Unknown
  misc_feature (1)..( 8): Matrix.004 file - promoters50/3433799
aaatttcg

SEQ ID NO: 71564 - DNA, 12 bp, Unknown
  misc_feature (1)..( 12): Matrix.004 file - promoters50/3433799
gattgataacag

SEQ ID NO: 71565 - DNA, 7 bp, Unknown
  misc_feature (1)..( 7): Matrix.004 file - promoters50/3433799
tggaaaa

SEQ ID NO: 71566 - DNA, 9 bp, Unknown
  misc_feature (1)..( 9): Matrix.004 file - promoters50/3433799
aaaccattt

SEQ ID NO: 71567 - DNA, 10 bp, Unknown
  misc_feature (1)..( 10): Matrix.004 file - promoters50/3433854
actttataat

SEQ ID NO: 71568 - DNA, 7 bp, Unknown
  misc_feature (1)..( 7): Matrix.004 file - promoters50/3433854
gataaac

SEQ ID NO: 71569 - DNA, 8 bp, Unknown
  misc_feature (1)..( 8): Matrix.004 file - promoters50/3433854
tgacaaaa

SEQ ID NO: 71570 - DNA, 7 bp, Unknown
  misc_feature (1)..( 7): Matrix.004 file - promoters50/3433904
attttat

SEQ ID NO: 71571 - DNA, 10 bp, Unknown
  misc_feature (1)..( 10): Matrix.004 file - promoters50/3433926
agtataaatc

SEQ ID NO: 71572 - DNA, 9 bp, Unknown
  misc_feature (1)..( 9): Matrix.004 file - promoters50/3433933
gaacaaaaa

SEQ ID NO: 71573 - DNA, 10 bp, Unknown
  misc_feature (1)..( 10): Matrix.004 file - promoters50/3433944
atgtttcttg

SEQ ID NO: 71574 - DNA, 9 bp, Unknown
  misc_feature (1)..( 9): Matrix.004 file - promoters50/3433944
aaaatatga

SEQ ID NO: 71575 - DNA, 9 bp, Unknown
  misc_feature (1)..( 9): Matrix.004 file - promoters50/3433944
taacaaatt

SEQ ID NO: 71576 - DNA, 9 bp, Unknown
  misc_feature (1)..( 9): Matrix.004 file - promoters50/3433944
gaaaaaaaa

SEQ ID NO: 71577 - DNA, 12 bp, Unknown
  misc_feature (1)..( 12): Matrix.004 file - promoters50/3433958
ataaaaatactt

SEQ ID NO: 71578 - DNA, 7 bp, Unknown
  misc_feature (1)..( 7): Matrix.004 file - promoters50/3433978
agaaaca

SEQ ID NO: 71579 - DNA, 9 bp, Unknown
  misc_feature (1)..( 9): Matrix.004 file - promoters50/3433978
tgaacttaa

SEQ ID NO: 71580 - DNA, 15 bp, Unknown
  misc_feature (1)..( 15): Matrix.004 file - promoters50/3433978
gacataaactttcat

SEQ ID NO: 71581 - DNA, 9 bp, Unknown
  misc_feature (1)..( 9): Matrix.004 file - promoters50/3433978
aaatttatt

SEQ ID NO: 71582 - DNA, 9 bp, Unknown
  misc_feature (1)..( 9): Matrix.004 file - promoters50/3433989
aaaataaaa

SEQ ID NO: 71583 - DNA, 8 bp, Unknown
  misc_feature (1)..( 8): Matrix.004 file - promoters50/3433989
gagatgag

SEQ ID NO: 71584 - DNA, 9 bp, Unknown
  misc_feature (1)..( 9): Matrix.004 file - promoters50/3433989
gtgaagatg

SEQ ID NO: 71585 - DNA, 9 bp, Unknown
  misc_feature (1)..( 9): Matrix.004 file - promoters50/3433998
acgagtttg

SEQ ID NO: 71586 - DNA, 7 bp, Unknown
  misc_feature (1)..( 7): Matrix.004 file - promoters50/3433998
tacatat

SEQ ID NO: 71587 - DNA, 8 bp, Unknown
  misc_feature (1)..( 8): Matrix.004 file - promoters50/3433998
ataaaaag

SEQ ID NO: 71588 - DNA, 12 bp, Unknown
  misc_feature (1)..( 12): Matrix.004 file - promoters50/3433998
gattaaaaaaaa

SEQ ID NO: 71589 - DNA, 14 bp, Unknown
  misc_feature (1)..( 14): Matrix.004 file - promoters50/3433998
taataaaaaaatat

SEQ ID NO: 71590 - DNA, 10 bp, Unknown
  misc_feature (1)..( 10): Matrix.004 file - promoters50/3433998
gattttaaaa

SEQ ID NO: 71591 - DNA, 11 bp, Unknown
  misc_feature (1)..( 11): Matrix.004 file - promoters50/3433998
atcttatctaa

SEQ ID NO: 71592 - DNA, 11 bp, Unknown
  misc_feature (1)..( 11): Matrix.004 file - promoters50/3434028
gattctaataa

SEQ ID NO: 71593 - DNA, 10 bp, Unknown
  misc_feature (1)..( 10): Matrix.004 file - promoters50/3434028
ttaaatcaaa

SEQ ID NO: 71594 - DNA, 11 bp, Unknown
  misc_feature (1)..( 11): Matrix.004 file - promoters50/3434028
aattttgtttt

SEQ ID NO: 71595 - DNA, 9 bp, Unknown
  misc_feature (1)..( 9): Matrix.004 file - promoters50/3434028
tgtaaatca

SEQ ID NO: 71596 - DNA, 9 bp, Unknown
  misc_feature (1)..( 9): Matrix.004 file - promoters50/3434044
atttcaaaa

SEQ ID NO: 71597 - DNA, 15 bp, Unknown
  misc_feature (1)..( 15): Matrix.004 file - promoters50/3434044
gaaaaaaaaaatttg

SEQ ID NO: 71598 - DNA, 11 bp, Unknown
  misc_feature (1)..( 11): Matrix.004 file - promoters50/3434105
taaagcccaat

SEQ ID NO: 71599 - DNA, 11 bp, Unknown
  misc_feature (1)..( 11): Matrix.004 file - promoters50/3434105
gttttgaaaat

SEQ ID NO: 71600 - DNA, 12 bp, Unknown
  misc_feature (1)..( 12): Matrix.004 file - promoters50/3434105
tcagttttcatt

SEQ ID NO: 71601 - DNA, 9 bp, Unknown
  misc_feature (1)..( 9): Matrix.004 file - promoters50/3434105
tgttatatt

SEQ ID NO: 71602 - DNA, 9 bp, Unknown
  misc_feature (1)..( 9): Matrix.004 file - promoters50/3434105
ctatatata

SEQ ID NO: 71603 - DNA, 10 bp, Unknown
  misc_feature (1)..( 10): Matrix.004 file - promoters50/3434108
gttttcttaa

SEQ ID NO: 71604 - DNA, 11 bp, Unknown
  misc_feature (1)..( 11): Matrix.004 file - promoters50/3434108
ttaattttgaa

SEQ ID NO: 71605 - DNA, 11 bp, Unknown
  misc_feature (1)..( 11): Matrix.004 file - promoters50/3434108
ttggtttaatt

SEQ ID NO: 71606 - DNA, 14 bp, Unknown
  misc_feature (1)..( 14): Matrix.004 file - promoters50/3434108
aattaaatgtaatg

SEQ ID NO: 71607 - DNA, 10 bp, Unknown
  misc_feature (1)..( 10): Matrix.004 file - promoters50/3434108
tcaaaaaatt

SEQ ID NO: 71608 - DNA, 8 bp, Unknown
  misc_feature (1)..( 8): Matrix.004 file - promoters50/3434108
tttcaaaa

SEQ ID NO: 71609 - DNA, 9 bp, Unknown
  misc_feature (1)..( 9): Matrix.004 file - promoters50/3434108
acaatttag

SEQ ID NO: 71610 - DNA, 10 bp, Unknown
  misc_feature (1)..( 10): Matrix.004 file - promoters50/3434120
aatttacttt

SEQ ID NO: 71611 - DNA, 10 bp, Unknown
  misc_feature (1)..( 10): Matrix.004 file - promoters50/3434145
caaaatctct

SEQ ID NO: 71612 - DNA, 10 bp, Unknown
  misc_feature (1)..( 10): Matrix.004 file - promoters50/3434145
aaatctaatt

SEQ ID NO: 71613 - DNA, 8 bp, Unknown
  misc_feature (1)..( 8): Matrix.004 file - promoters50/3434147
aatttatt

SEQ ID NO: 71614 - DNA, 7 bp, Unknown
  misc_feature (1)..( 7): Matrix.004 file - promoters50/3434147
attatgt

SEQ ID NO: 71615 - DNA, 11 bp, Unknown
  misc_feature (1)..( 11): Matrix.004 file - promoters50/3434147
acattaaaatt

SEQ ID NO: 71616 - DNA, 9 bp, Unknown
  misc_feature (1)..( 9): Matrix.004 file - promoters50/3434147
ttccataaa

SEQ ID NO: 71617 - DNA, 8 bp, Unknown
  misc_feature (1)..( 8): Matrix.004 file - promoters50/3434147
atttcaca

SEQ ID NO: 71618 - DNA, 9 bp, Unknown
  misc_feature (1)..( 9): Matrix.004 file - promoters50/3434231
cccaatgtc

SEQ ID NO: 71619 - DNA, 7 bp, Unknown
  misc_feature (1)..( 7): Matrix.004 file - promoters50/3434233
tgtatgt

SEQ ID NO: 71620 - DNA, 5 bp, Unknown
  misc_feature (1)..( 5): Matrix.004 file - promoters50/3434233
aaagc

SEQ ID NO: 71621 - DNA, 15 bp, Unknown
  misc_feature (1)..( 15): Matrix.004 file - promoters50/3434233
tagtgaaaaagaaga

SEQ ID NO: 71622 - DNA, 10 bp, Unknown
  misc_feature (1)..( 10): Matrix.004 file - promoters50/3434233
ctcaaagcca

SEQ ID NO: 71623 - DNA, 11 bp, Unknown
  misc_feature (1)..( 11): Matrix.004 file - promoters50/3434256
aaaaagatatt

SEQ ID NO: 71624 - DNA, 14 bp, Unknown
  misc_feature (1)..( 14): Matrix.004 file - promoters50/3434256
ttaatttatttcta

SEQ ID NO: 71625 - DNA, 12 bp, Unknown
  misc_feature (1)..( 12): Matrix.004 file - promoters50/3434256
attaaaaaaaca

SEQ ID NO: 71626 - DNA, 13 bp, Unknown
  misc_feature (1)..( 13): Matrix.004 file - promoters50/3434256
atttcatttctta

SEQ ID NO: 71627 - DNA, 9 bp, Unknown
  misc_feature (1)..( 9): Matrix.004 file - promoters50/3434256
gaaataagt

SEQ ID NO: 71628 - DNA, 11 bp, Unknown
  misc_feature (1)..( 11): Matrix.004 file - promoters50/3434279
aatttaattac

SEQ ID NO: 71629 - DNA, 13 bp, Unknown
  misc_feature (1)..( 13): Matrix.004 file - promoters50/3434279
aataacatatgtt

SEQ ID NO: 71630 - DNA, 10 bp, Unknown
  misc_feature (1)..( 10): Matrix.004 file - promoters50/3434303
acaaacaaaa

SEQ ID NO: 71631 - DNA, 15 bp, Unknown
  misc_feature (1)..( 15): Matrix.004 file - promoters50/3434303
attgaatgtgttttt

SEQ ID NO: 71632 - DNA, 11 bp, Unknown
  misc_feature (1)..( 11): Matrix.004 file - promoters50/3434303
ggaagataacg

SEQ ID NO: 71633 - DNA, 14 bp, Unknown
  misc_feature (1)..( 14): Matrix.004 file - promoters50/3434303
tgaacgaatataat

SEQ ID NO: 71634 - DNA, 9 bp, Unknown
  misc_feature (1)..( 9): Matrix.004 file - promoters50/3434328
aaaaataaa

SEQ ID NO: 71635 - DNA, 8 bp, Unknown
  misc_feature (1)..( 8): Matrix.004 file - promoters50/3434350
tgtttttt

SEQ ID NO: 71636 - DNA, 9 bp, Unknown
  misc_feature (1)..( 9): Matrix.004 file - promoters50/3434350
tatgacaat

SEQ ID NO: 71637 - DNA, 9 bp, Unknown
  misc_feature (1)..( 9): Matrix.004 file - promoters50/3434350
ttatatata

SEQ ID NO: 71638 - DNA, 8 bp, Unknown
  misc_feature (1)..( 8): Matrix.004 file - promoters50/3434355
tatataag

SEQ ID NO: 71639 - DNA, 8 bp, Unknown
  misc_feature (1)..( 8): Matrix.004 file - promoters50/3434355
aatttttg

SEQ ID NO: 71640 - DNA, 11 bp, Unknown
  misc_feature (1)..( 11): Matrix.004 file - promoters50/3434355
atttttaaatg

SEQ ID NO: 71641 - DNA, 8 bp, Unknown
  misc_feature (1)..( 8): Matrix.004 file - promoters50/3434355
taaatttg

SEQ ID NO: 71642 - DNA, 11 bp, Unknown
  misc_feature (1)..( 11): Matrix.004 file - promoters50/3434355
cttttatttat

SEQ ID NO: 71643 - DNA, 10 bp, Unknown
  misc_feature (1)..( 10): Matrix.004 file - promoters50/3434355
gagaaaaaaa

SEQ ID NO: 71644 - DNA, 9 bp, Unknown
  misc_feature (1)..( 9): Matrix.004 file - promoters50/3434381
agagttttg

SEQ ID NO: 71645 - DNA, 11 bp, Unknown
  misc_feature (1)..( 11): Matrix.004 file - promoters50/3434381
ttgaaatgaaa

SEQ ID NO: 71646 - DNA, 7 bp, Unknown
  misc_feature (1)..( 7): Matrix.004 file - promoters50/3434392
aatattg

SEQ ID NO: 71647 - DNA, 7 bp, Unknown
  misc_feature (1)..( 7): Matrix.004 file - promoters50/3434400
ttatatt

SEQ ID NO: 71648 - DNA, 9 bp, Unknown
  misc_feature (1)..( 9): Matrix.004 file - promoters50/3434400
ttgaaaaaa

SEQ ID NO: 71649 - DNA, 9 bp, Unknown
  misc_feature (1)..( 9): Matrix.004 file - promoters50/3434400
aaagaaaat

SEQ ID NO: 71650 - DNA, 11 bp, Unknown
  misc_feature (1)..( 11): Matrix.004 file - promoters50/3434408
attttataatg

SEQ ID NO: 71651 - DNA, 8 bp, Unknown
  misc_feature (1)..( 8): Matrix.004 file - promoters50/3434408
gaagtaag

SEQ ID NO: 71652 - DNA, 7 bp, Unknown
  misc_feature (1)..( 7): Matrix.004 file - promoters50/3434424
tcatttt

SEQ ID NO: 71653 - DNA, 8 bp, Unknown
  misc_feature (1)..( 8): Matrix.004 file - promoters50/3434488
caaaagaa

SEQ ID NO: 71654 - DNA, 9 bp, Unknown
  misc_feature (1)..( 9): Matrix.004 file - promoters50/3434488
aagcaaaaa

SEQ ID NO: 71655 - DNA, 7 bp, Unknown
  misc_feature (1)..( 7): Matrix.004 file - promoters50/3434488
ctttata

SEQ ID NO: 71656 - DNA, 11 bp, Unknown
  misc_feature (1)..( 11): Matrix.004 file - promoters50/3434488
ttattgtaaac

SEQ ID NO: 71657 - DNA, 7 bp, Unknown
  misc_feature (1)..( 7): Matrix.004 file - promoters50/3434488
atttttt

SEQ ID NO: 71658 - DNA, 8 bp, Unknown
  misc_feature (1)..( 8): Matrix.004 file - promoters50/3434488
ctttattt

SEQ ID NO: 71659 - DNA, 10 bp, Unknown
  misc_feature (1)..( 10): Matrix.004 file - promoters50/3434488
taaaaaataa

SEQ ID NO: 71660 - DNA, 10 bp, Unknown
  misc_feature (1)..( 10): Matrix.004 file - promoters50/3434563
atatttagtt

SEQ ID NO: 71661 - DNA, 6 bp, Unknown
  misc_feature (1)..( 6): Matrix.004 file - promoters50/3434563
acaatt

SEQ ID NO: 71662 - DNA, 11 bp, Unknown
  misc_feature (1)..( 11): Matrix.004 file - promoters50/3434648
caaaattttat

SEQ ID NO: 71663 - DNA, 9 bp, Unknown
  misc_feature (1)..( 9): Matrix.004 file - promoters50/3434648
cttgtcata

SEQ ID NO: 71664 - DNA, 8 bp, Unknown
  misc_feature (1)..( 8): Matrix.004 file - promoters50/3434648
tgtatcag

SEQ ID NO: 71665 - DNA, 10 bp, Unknown
  misc_feature (1)..( 10): Matrix.004 file - promoters50/3434652
atatatgttt

SEQ ID NO: 71666 - DNA, 8 bp, Unknown
  misc_feature (1)..( 8): Matrix.004 file - promoters50/3434652
gatcaaaa

SEQ ID NO: 71667 - DNA, 10 bp, Unknown
  misc_feature (1)..( 10): Matrix.004 file - promoters50/3434652
attttttcag

SEQ ID NO: 71668 - DNA, 9 bp, Unknown
  misc_feature (1)..( 9): Matrix.004 file - promoters50/3434652
taaagttgt

SEQ ID NO: 71669 - DNA, 11 bp, Unknown
  misc_feature (1)..( 11): Matrix.004 file - promoters50/3434652
ttgtatctaaa

SEQ ID NO: 71670 - DNA, 8 bp, Unknown
  misc_feature (1)..( 8): Matrix.004 file - promoters50/3434652
tgttttat

SEQ ID NO: 71671 - DNA, 10 bp, Unknown
  misc_feature (1)..( 10): Matrix.004 file - promoters50/3434652
tttaactata

SEQ ID NO: 71672 - DNA, 9 bp, Unknown
  misc_feature (1)..( 9): Matrix.004 file - promoters50/3434652
catagtcaa

SEQ ID NO: 71673 - DNA, 6 bp, Unknown
  misc_feature (1)..( 6): Matrix.004 file - promoters50/3434652
attaaa

SEQ ID NO: 71674 - DNA, 7 bp, Unknown
  misc_feature (1)..( 7): Matrix.004 file - promoters50/3434652
actattc

SEQ ID NO: 71675 - DNA, 8 bp, Unknown
  misc_feature (1)..( 8): Matrix.004 file - promoters50/3434652
ctaaaatt

SEQ ID NO: 71676 - DNA, 9 bp, Unknown
  misc_feature (1)..( 9): Matrix.004 file - promoters50/3434652
ttactatag

SEQ ID NO: 71677 - DNA, 9 bp, Unknown
  misc_feature (1)..( 9): Matrix.004 file - promoters50/3434652
aattttgta

SEQ ID NO: 71678 - DNA, 10 bp, Unknown
  misc_feature (1)..( 10): Matrix.004 file - promoters50/3434652
caggtttcaa

SEQ ID NO: 71679 - DNA, 8 bp, Unknown
  misc_feature (1)..( 8): Matrix.004 file - promoters50/3434765
gaaaaaca

SEQ ID NO: 71680 - DNA, 6 bp, Unknown
  misc_feature (1)..( 6): Matrix.004 file - promoters50/3434796
taatat

SEQ ID NO: 71681 - DNA, 11 bp, Unknown
  misc_feature (1)..( 11): Matrix.004 file - promoters50/3434876
aagactaaaaa

SEQ ID NO: 71682 - DNA, 9 bp, Unknown
  misc_feature (1)..( 9): Matrix.004 file - promoters50/3434880
ttaacaaac

SEQ ID NO: 71683 - DNA, 9 bp, Unknown
  misc_feature (1)..( 9): Matrix.004 file - promoters50/3434880
aagaaacaa

SEQ ID NO: 71684 - DNA, 15 bp, Unknown
  misc_feature (1)..( 15): Matrix.004 file - promoters50/3434912
aagccatattgtcaa

SEQ ID NO: 71685 - DNA, 9 bp, Unknown
  misc_feature (1)..( 9): Matrix.004 file - promoters50/3434936
ggtttcttg

SEQ ID NO: 71686 - DNA, 9 bp, Unknown
  misc_feature (1)..( 9): Matrix.004 file - promoters50/3434952
tataaagaa

SEQ ID NO: 71687 - DNA, 9 bp, Unknown
  misc_feature (1)..( 9): Matrix.004 file - promoters50/3434952
ttttgttga

SEQ ID NO: 71688 - DNA, 9 bp, Unknown
  misc_feature (1)..( 9): Matrix.004 file - promoters50/3435031
aatgttgaa

SEQ ID NO: 71689 - DNA, 8 bp, Unknown
  misc_feature (1)..( 8): Matrix.004 file - promoters50/3435057
aatagttt

SEQ ID NO: 71690 - DNA, 10 bp, Unknown
  misc_feature (1)..( 10): Matrix.004 file - promoters50/3435057
gaaatcataa

SEQ ID NO: 71691 - DNA, 7 bp, Unknown
  misc_feature (1)..( 7): Matrix.004 file - promoters50/3435057
ccataaa

SEQ ID NO: 71692 - DNA, 10 bp, Unknown
  misc_feature (1)..( 10): Matrix.004 file - promoters50/3435091
tttttattga

SEQ ID NO: 71693 - DNA, 9 bp, Unknown
  misc_feature (1)..( 9): Matrix.004 file - promoters50/3435091
ttacaaaaa

SEQ ID NO: 71694 - DNA, 7 bp, Unknown
  misc_feature (1)..( 7): Matrix.004 file - promoters50/3435091
tattttt

SEQ ID NO: 71695 - DNA, 9 bp, Unknown
  misc_feature (1)..( 9): Matrix.004 file - promoters50/3435125
cattataaa

SEQ ID NO: 71696 - DNA, 10 bp, Unknown
  misc_feature (1)..( 10): Matrix.004 file - promoters50/3435133
aaaaatcaaa

SEQ ID NO: 71697 - DNA, 12 bp, Unknown
  misc_feature (1)..( 12): Matrix.004 file - promoters50/3435133
gaaatagattaa

SEQ ID NO: 71698 - DNA, 12 bp, Unknown
  misc_feature (1)..( 12): Matrix.004 file - promoters50/3435133
taaaatattgta

SEQ ID NO: 71699 - DNA, 9 bp, Unknown
  misc_feature (1)..( 9): Matrix.004 file - promoters50/3435151
ttactaaaa

SEQ ID NO: 71700 - DNA, 7 bp, Unknown
  misc_feature (1)..( 7): Matrix.004 file - promoters50/3435151
ataattt

SEQ ID NO: 71701 - DNA, 9 bp, Unknown
  misc_feature (1)..( 9): Matrix.004 file - promoters50/3435151
ctaaaaaaa

SEQ ID NO: 71702 - DNA, 9 bp, Unknown
  misc_feature (1)..( 9): Matrix.004 file - promoters50/3435169
taaaatgtt

SEQ ID NO: 71703 - DNA, 9 bp, Unknown
  misc_feature (1)..( 9): Matrix.004 file - promoters50/3435169
aaaaatttc

SEQ ID NO: 71704 - DNA, 9 bp, Unknown
  misc_feature (1)..( 9): Matrix.004 file - promoters50/3435185
aacatctca

SEQ ID NO: 71705 - DNA, 10 bp, Unknown
  misc_feature (1)..( 10): Matrix.004 file - promoters50/3435185
gagtaaaaaa

SEQ ID NO: 71706 - DNA, 9 bp, Unknown
  misc_feature (1)..( 9): Matrix.004 file - promoters50/3435227
aaaaacaaa

SEQ ID NO: 71707 - DNA, 13 bp, Unknown
  misc_feature (1)..( 13): Matrix.004 file - promoters50/3435239
cttctataaaaca

SEQ ID NO: 71708 - DNA, 8 bp, Unknown
  misc_feature (1)..( 8): Matrix.004 file - promoters50/3435239
tcttgttt

SEQ ID NO: 71709 - DNA, 12 bp, Unknown
  misc_feature (1)..( 12): Matrix.004 file - promoters50/3435239
ttttattgatag

SEQ ID NO: 71710 - DNA, 9 bp, Unknown
  misc_feature (1)..( 9): Matrix.004 file - promoters50/3435239
aaaagtaga

SEQ ID NO: 71711 - DNA, 11 bp, Unknown
  misc_feature (1)..( 11): Matrix.004 file - promoters50/3435239
gacgattttgt

SEQ ID NO: 71712 - DNA, 9 bp, Unknown
  misc_feature (1)..( 9): Matrix.004 file - promoters50/3435239
ttttgtttt

SEQ ID NO: 71713 - DNA, 12 bp, Unknown
  misc_feature (1)..( 12): Matrix.004 file - promoters50/3435239
gctttttactgg

SEQ ID NO: 71714 - DNA, 8 bp, Unknown
  misc_feature (1)..( 8): Matrix.004 file - promoters50/3435239
attcgtat

SEQ ID NO: 71715 - DNA, 6 bp, Unknown
  misc_feature (1)..( 6): Matrix.004 file - promoters50/3435239
ttgttt

SEQ ID NO: 71716 - DNA, 8 bp, Unknown
  misc_feature (1)..( 8): Matrix.004 file - promoters50/3435258
atttgttt

SEQ ID NO: 71717 - DNA, 7 bp, Unknown
  misc_feature (1)..( 7): Matrix.004 file - promoters50/3435258
taaattt

SEQ ID NO: 71718 - DNA, 8 bp, Unknown
  misc_feature (1)..( 8): Matrix.004 file - promoters50/3435258
aaattaaa

SEQ ID NO: 71719 - DNA, 11 bp, Unknown
  misc_feature (1)..( 11): Matrix.004 file - promoters50/3435258
attattaattt

SEQ ID NO: 71720 - DNA, 12 bp, Unknown
  misc_feature (1)..( 12): Matrix.004 file - promoters50/3435258
attattaattta

SEQ ID NO: 71721 - DNA, 8 bp, Unknown
  misc_feature (1)..( 8): Matrix.004 file - promoters50/3435258
tattaaat

SEQ ID NO: 71722 - DNA, 9 bp, Unknown
  misc_feature (1)..( 9): Matrix.004 file - promoters50/3435258
tttatggat

SEQ ID NO: 71723 - DNA, 9 bp, Unknown
  misc_feature (1)..( 9): Matrix.004 file - promoters50/3435258
tattaaatt

SEQ ID NO: 71724 - DNA, 8 bp, Unknown
  misc_feature (1)..( 8): Matrix.004 file - promoters50/3435258
caaattaa

SEQ ID NO: 71725 - DNA, 11 bp, Unknown
  misc_feature (1)..( 11): Matrix.004 file - promoters50/3435258
ttatatataaa

SEQ ID NO: 71726 - DNA, 9 bp, Unknown
  misc_feature (1)..( 9): Matrix.004 file - promoters50/3435274
atttggaat

SEQ ID NO: 71727 - DNA, 12 bp, Unknown
  misc_feature (1)..( 12): Matrix.004 file - promoters50/3435282
caggattgattt

SEQ ID NO: 71728 - DNA, 6 bp, Unknown
  misc_feature (1)..( 6): Matrix.004 file - promoters50/3435282
attatt

SEQ ID NO: 71729 - DNA, 11 bp, Unknown
  misc_feature (1)..( 11): Matrix.004 file - promoters50/3435282
tgaaaatatta

SEQ ID NO: 71730 - DNA, 9 bp, Unknown
  misc_feature (1)..( 9): Matrix.004 file - promoters50/3435282
ataatatca

SEQ ID NO: 71731 - DNA, 11 bp, Unknown
  misc_feature (1)..( 11): Matrix.004 file - promoters50/3435282
aactgtaaaat

SEQ ID NO: 71732 - DNA, 11 bp, Unknown
  misc_feature (1)..( 11): Matrix.004 file - promoters50/3435341
caagaaaataa

SEQ ID NO: 71733 - DNA, 8 bp, Unknown
  misc_feature (1)..( 8): Matrix.004 file - promoters50/3435372
attggttt

SEQ ID NO: 71734 - DNA, 6 bp, Unknown
  misc_feature (1)..( 6): Matrix.004 file - promoters50/3435424
acatac

SEQ ID NO: 71735 - DNA, 7 bp, Unknown
  misc_feature (1)..( 7): Matrix.004 file - promoters50/3435424
tttaaaa

SEQ ID NO: 71736 - DNA, 8 bp, Unknown
  misc_feature (1)..( 8): Matrix.004 file - promoters50/3435424
tacttttt

SEQ ID NO: 71737 - DNA, 8 bp, Unknown
  misc_feature (1)..( 8): Matrix.004 file - promoters50/3435452
ttaattta

SEQ ID NO: 71738 - DNA, 14 bp, Unknown
  misc_feature (1)..( 14): Matrix.004 file - promoters50/3435452
aatttaaccccata

SEQ ID NO: 71739 - DNA, 8 bp, Unknown
  misc_feature (1)..( 8): Matrix.004 file - promoters50/3435463
aaaaacaa

SEQ ID NO: 71740 - DNA, 13 bp, Unknown
  misc_feature (1)..( 13): Matrix.004 file - promoters50/3435463
aatagaaaactaa

SEQ ID NO: 71741 - DNA, 11 bp, Unknown
  misc_feature (1)..( 11): Matrix.004 file - promoters50/3435463
atataaacaac

SEQ ID NO: 71742 - DNA, 10 bp, Unknown
  misc_feature (1)..( 10): Matrix.004 file - promoters50/3435463
aaaaaaaaat

SEQ ID NO: 71743 - DNA, 15 bp, Unknown
  misc_feature (1)..( 15): Matrix.004 file - promoters50/3435463
aaaattaaaataata

SEQ ID NO: 71744 - DNA, 11 bp, Unknown
  misc_feature (1)..( 11): Matrix.004 file - promoters50/3435463
tttgcaaaaat

SEQ ID NO: 71745 - DNA, 14 bp, Unknown
  misc_feature (1)..( 14): Matrix.004 file - promoters50/3435469
aaaatacaaaaatc

SEQ ID NO: 71746 - DNA, 10 bp, Unknown
  misc_feature (1)..( 10): Matrix.004 file - promoters50/3435469
aaacttttaa

SEQ ID NO: 71747 - DNA, 9 bp, Unknown
  misc_feature (1)..( 9): Matrix.004 file - promoters50/3435469
cttttatta

SEQ ID NO: 71748 - DNA, 10 bp, Unknown
  misc_feature (1)..( 10): Matrix.004 file - promoters50/3435469
agatataaaa

SEQ ID NO: 71749 - DNA, 11 bp, Unknown
  misc_feature (1)..( 11): Matrix.004 file - promoters50/3435469
ctagatttttt

SEQ ID NO: 71750 - DNA, 11 bp, Unknown
  misc_feature (1)..( 11): Matrix.004 file - promoters50/3435469
tattgtttaac

SEQ ID NO: 71751 - DNA, 12 bp, Unknown
  misc_feature (1)..( 12): Matrix.004 file - promoters50/3435469
cttatataaaca

SEQ ID NO: 71752 - DNA, 11 bp, Unknown
  misc_feature (1)..( 11): Matrix.004 file - promoters50/3435514
aaacttgtttt

SEQ ID NO: 71753 - DNA, 6 bp, Unknown
  misc_feature (1)..( 6): Matrix.004 file - promoters50/3435514
caaata

SEQ ID NO: 71754 - DNA, 6 bp, Unknown
  misc_feature (1)..( 6): Matrix.004 file - promoters50/3435514
tttgtt

SEQ ID NO: 71755 - DNA, 13 bp, Unknown
  misc_feature (1)..( 13): Matrix.004 file - promoters50/3435518
gacaattttgtca

SEQ ID NO: 71756 - DNA, 9 bp, Unknown
  misc_feature (1)..( 9): Matrix.004 file - promoters50/3435518
aagaggatc

SEQ ID NO: 71757 - DNA, 8 bp, Unknown
  misc_feature (1)..( 8): Matrix.004 file - promoters50/3435518
ttgctgac

SEQ ID NO: 71758 - DNA, 10 bp, Unknown
  misc_feature (1)..( 10): Matrix.004 file - promoters50/3435534
agaggaagta

SEQ ID NO: 71759 - DNA, 9 bp, Unknown
  misc_feature (1)..( 9): Matrix.004 file - promoters50/3435578
ttacttttt

SEQ ID NO: 71760 - DNA, 6 bp, Unknown
  misc_feature (1)..( 6): Matrix.004 file - promoters50/3435578
tatcaa

SEQ ID NO: 71761 - DNA, 12 bp, Unknown
  misc_feature (1)..( 12): Matrix.004 file - promoters50/3435578
aaaacatttgac

SEQ ID NO: 71762 - DNA, 8 bp, Unknown
  misc_feature (1)..( 8): Matrix.004 file - promoters50/3435578
ttcacaaa

SEQ ID NO: 71763 - DNA, 10 bp, Unknown
  misc_feature (1)..( 10): Matrix.004 file - promoters50/3435605
ttcacaaact

SEQ ID NO: 71764 - DNA, 10 bp, Unknown
  misc_feature (1)..( 10): Matrix.004 file - promoters50/3435605
tttattctaa

SEQ ID NO: 71765 - DNA, 8 bp, Unknown
  misc_feature (1)..( 8): Matrix.004 file - promoters50/3435605
atcaaaaa

SEQ ID NO: 71766 - DNA, 12 bp, Unknown
  misc_feature (1)..( 12): Matrix.004 file - promoters50/3435605
aaattattaaaa

SEQ ID NO: 71767 - DNA, 9 bp, Unknown
  misc_feature (1)..( 9): Matrix.004 file - promoters50/3435632
ttataaaaa

SEQ ID NO: 71768 - DNA, 11 bp, Unknown
  misc_feature (1)..( 11): Matrix.004 file - promoters50/3435632
aaaaatacact

SEQ ID NO: 71769 - DNA, 9 bp, Unknown
  misc_feature (1)..( 9): Matrix.004 file - promoters50/3435632
taaaataaa

SEQ ID NO: 71770 - DNA, 12 bp, Unknown
  misc_feature (1)..( 12): Matrix.004 file - promoters50/3435723
atgataaaaaat

SEQ ID NO: 71771 - DNA, 7 bp, Unknown
  misc_feature (1)..( 7): Matrix.004 file - promoters50/3435761
aaacaga

SEQ ID NO: 71772 - DNA, 9 bp, Unknown
  misc_feature (1)..( 9): Matrix.004 file - promoters50/3435761
aatttgagt

SEQ ID NO: 71773 - DNA, 10 bp, Unknown
  misc_feature (1)..( 10): Matrix.004 file - promoters50/3435765
atctttggat

SEQ ID NO: 71774 - DNA, 11 bp, Unknown
  misc_feature (1)..( 11): Matrix.004 file - promoters50/3435765
ccatttaaaat

SEQ ID NO: 71775 - DNA, 9 bp, Unknown
  misc_feature (1)..( 9): Matrix.004 file - promoters50/3435765
gttttatga

SEQ ID NO: 71776 - DNA, 10 bp, Unknown
  misc_feature (1)..( 10): Matrix.004 file - promoters50/3435765
ataaaataaa

SEQ ID NO: 71777 - DNA, 10 bp, Unknown
  misc_feature (1)..( 10): Matrix.004 file - promoters50/3435765
ataaaataaa

SEQ ID NO: 71778 - DNA, 5 bp, Unknown
  misc_feature (1)..( 5): Matrix.004 file - promoters50/3435765
aataa

SEQ ID NO: 71779 - DNA, 9 bp, Unknown
  misc_feature (1)..( 9): Matrix.004 file - promoters50/3435803
ttttatgat

SEQ ID NO: 71780 - DNA, 8 bp, Unknown
  misc_feature (1)..( 8): Matrix.004 file - promoters50/3435833
tttttttc

SEQ ID NO: 71781 - DNA, 8 bp, Unknown
  misc_feature (1)..( 8): Matrix.004 file - promoters50/3435833
agaaaaat

SEQ ID NO: 71782 - DNA, 14 bp, Unknown
  misc_feature (1)..( 14): Matrix.004 file - promoters50/3435833
ttaagaaaagtaac

SEQ ID NO: 71783 - DNA, 18 bp, Unknown
  misc_feature (1)..( 18): Matrix.004 file - promoters50/3435891
tattaatgagcttaaaga

SEQ ID NO: 71784 - DNA, 10 bp, Unknown
  misc_feature (1)..( 10): Matrix.004 file - promoters50/3435891
tgttttcact

SEQ ID NO: 71785 - DNA, 10 bp, Unknown
  misc_feature (1)..( 10): Matrix.004 file - promoters50/3435891
aactctttta

SEQ ID NO: 71786 - DNA, 7 bp, Unknown
  misc_feature (1)..( 7): Matrix.004 file - promoters50/3435891
acaaaaa

SEQ ID NO: 71787 - DNA, 7 bp, Unknown
  misc_feature (1)..( 7): Matrix.004 file - promoters50/3435891
tttatta

SEQ ID NO: 71788 - DNA, 9 bp, Unknown
  misc_feature (1)..( 9): Matrix.004 file - promoters50/3435917
ctgtcaaag

SEQ ID NO: 71789 - DNA, 7 bp, Unknown
  misc_feature (1)..( 7): Matrix.004 file - promoters50/3435917
ataaagt

SEQ ID NO: 71790 - DNA, 7 bp, Unknown
  misc_feature (1)..( 7): Matrix.004 file - promoters50/3435917
tttataa

SEQ ID NO: 71791 - DNA, 8 bp, Unknown
  misc_feature (1)..( 8): Matrix.004 file - promoters50/3435917
ataaaata

SEQ ID NO: 71792 - DNA, 8 bp, Unknown
  misc_feature (1)..( 8): Matrix.004 file - promoters50/3436121
tattttaa

SEQ ID NO: 71793 - DNA, 8 bp, Unknown
  misc_feature (1)..( 8): Matrix.004 file - promoters50/3436121
tttaaaag

SEQ ID NO: 71794 - DNA, 7 bp, Unknown
  misc_feature (1)..( 7): Matrix.004 file - promoters50/3436121
aagaaat

SEQ ID NO: 71795 - DNA, 8 bp, Unknown
  misc_feature (1)..( 8): Matrix.004 file - promoters50/3436121
ttatgtct

SEQ ID NO: 71796 - DNA, 7 bp, Unknown
  misc_feature (1)..( 7): Matrix.004 file - promoters50/3436139
gatcgat

SEQ ID NO: 71797 - DNA, 7 bp, Unknown
  misc_feature (1)..( 7): Matrix.004 file - promoters50/3436222
attaata

SEQ ID NO: 71798 - DNA, 7 bp, Unknown
  misc_feature (1)..( 7): Matrix.004 file - promoters50/3436222
aaaaata

SEQ ID NO: 71799 - DNA, 10 bp, Unknown
  misc_feature (1)..( 10): Matrix.004 file - promoters50/3436222
atcaaaaatg

SEQ ID NO: 71800 - DNA, 7 bp, Unknown
  misc_feature (1)..( 7): Matrix.004 file - promoters50/3436222
gacaaaa

SEQ ID NO: 71801 - DNA, 9 bp, Unknown
  misc_feature (1)..( 9): Matrix.004 file - promoters50/3436265
ataaaaata

SEQ ID NO: 71802 - DNA, 8 bp, Unknown
  misc_feature (1)..( 8): Matrix.004 file - promoters50/3436265
taaacttt

SEQ ID NO: 71803 - DNA, 11 bp, Unknown
  misc_feature (1)..( 11): Matrix.004 file - promoters50/3436265
attaataatat

SEQ ID NO: 71804 - DNA, 9 bp, Unknown
  misc_feature (1)..( 9): Matrix.004 file - promoters50/3436265
cttctttat

SEQ ID NO: 71805 - DNA, 9 bp, Unknown
  misc_feature (1)..( 9): Matrix.004 file - promoters50/3436267
attatgtat

SEQ ID NO: 71806 - DNA, 12 bp, Unknown
  misc_feature (1)..( 12): Matrix.004 file - promoters50/3436312
cattataaaacc

SEQ ID NO: 71807 - DNA, 10 bp, Unknown
  misc_feature (1)..( 10): Matrix.004 file - promoters50/3436319
ttttgctatg

SEQ ID NO: 71808 - DNA, 10 bp, Unknown
  misc_feature (1)..( 10): Matrix.004 file - promoters50/3436319
cctatttata

SEQ ID NO: 71809 - DNA, 8 bp, Unknown
  misc_feature (1)..( 8): Matrix.004 file - promoters50/3436319
acttttaa

SEQ ID NO: 71810 - DNA, 7 bp, Unknown
  misc_feature (1)..( 7): Matrix.004 file - promoters50/3436319
ttaaatt

SEQ ID NO: 71811 - DNA, 10 bp, Unknown
  misc_feature (1)..( 10): Matrix.004 file - promoters50/3436319
taataattaa

SEQ ID NO: 71812 - DNA, 8 bp, Unknown
  misc_feature (1)..( 8): Matrix.004 file - promoters50/3436319
aatgtttg

SEQ ID NO: 71813 - DNA, 8 bp, Unknown
  misc_feature (1)..( 8): Matrix.004 file - promoters50/3436412
catctttt

SEQ ID NO: 71814 - DNA, 9 bp, Unknown
  misc_feature (1)..( 9): Matrix.004 file - promoters50/3436481
tttgtatat

SEQ ID NO: 71815 - DNA, 10 bp, Unknown
  misc_feature (1)..( 10): Matrix.004 file - promoters50/3436481
aaaaatttca

SEQ ID NO: 71816 - DNA, 11 bp, Unknown
  misc_feature (1)..( 11): Matrix.004 file - promoters50/3436481
ataaaaaacaa

SEQ ID NO: 71817 - DNA, 11 bp, Unknown
  misc_feature (1)..( 11): Matrix.004 file - promoters50/3436481
taaacaaaata

SEQ ID NO: 71818 - DNA, 18 bp, Unknown
  misc_feature (1)..( 18): Matrix.004 file - promoters50/3436529
atcattaatttttttttt

SEQ ID NO: 71819 - DNA, 12 bp, Unknown
  misc_feature (1)..( 12): Matrix.004 file - promoters50/3436529
tatatataaaca

SEQ ID NO: 71820 - DNA, 9 bp, Unknown
  misc_feature (1)..( 9): Matrix.004 file - promoters50/3436529
tacttattt

SEQ ID NO: 71821 - DNA, 12 bp, Unknown
  misc_feature (1)..( 12): Matrix.004 file - promoters50/3436529
atttttgaaaaa

SEQ ID NO: 71822 - DNA, 14 bp, Unknown
  misc_feature (1)..( 14): Matrix.004 file - promoters50/3436655
actgatataaatga

SEQ ID NO: 71823 - DNA, 9 bp, Unknown
  misc_feature (1)..( 9): Matrix.004 file - promoters50/3436661
aaatggaat

SEQ ID NO: 71824 - DNA, 8 bp, Unknown
  misc_feature (1)..( 8): Matrix.004 file - promoters50/3436661
tttttttt

SEQ ID NO: 71825 - DNA, 13 bp, Unknown
  misc_feature (1)..( 13): Matrix.004 file - promoters50/3436661
ctttagttcaatg

SEQ ID NO: 71826 - DNA, 7 bp, Unknown
  misc_feature (1)..( 7): Matrix.004 file - promoters50/3436661
atacttt

SEQ ID NO: 71827 - DNA, 15 bp, Unknown
  misc_feature (1)..( 15): Matrix.004 file - promoters50/3436661
tttactgtagaacag

SEQ ID NO: 71828 - DNA, 14 bp, Unknown
  misc_feature (1)..( 14): Matrix.004 file - promoters50/3436661
tctaaaatattatt

SEQ ID NO: 71829 - DNA, 7 bp, Unknown
  misc_feature (1)..( 7): Matrix.004 file - promoters50/3436661
taaatgg

SEQ ID NO: 71830 - DNA, 9 bp, Unknown
  misc_feature (1)..( 9): Matrix.004 file - promoters50/3436661
gttaaatat

SEQ ID NO: 71831 - DNA, 13 bp, Unknown
  misc_feature (1)..( 13): Matrix.004 file - promoters50/3436661
ctaaaattttatt

SEQ ID NO: 71832 - DNA, 7 bp, Unknown
  misc_feature (1)..( 7): Matrix.004 file - promoters50/3436718
aaaatat

SEQ ID NO: 71833 - DNA, 12 bp, Unknown
  misc_feature (1)..( 12): Matrix.004 file - promoters50/3436718
gaaataagtttg

SEQ ID NO: 71834 - DNA, 8 bp, Unknown
  misc_feature (1)..( 8): Matrix.004 file - promoters50/3436718
cttgcttt

SEQ ID NO: 71835 - DNA, 8 bp, Unknown
  misc_feature (1)..( 8): Matrix.004 file - promoters50/3436718
ctaaaaac

SEQ ID NO: 71836 - DNA, 13 bp, Unknown
  misc_feature (1)..( 13): Matrix.004 file - promoters50/3436718
agtaattaatcac

SEQ ID NO: 71837 - DNA, 9 bp, Unknown
  misc_feature (1)..( 9): Matrix.004 file - promoters50/3436718
tttattaaa

SEQ ID NO: 71838 - DNA, 12 bp, Unknown
  misc_feature (1)..( 12): Matrix.004 file - promoters50/3436730
aaaagttcatct

SEQ ID NO: 71839 - DNA, 6 bp, Unknown
  misc_feature (1)..( 6): Matrix.004 file - promoters50/3436799
ttttta

SEQ ID NO: 71840 - DNA, 9 bp, Unknown
  misc_feature (1)..( 9): Matrix.004 file - promoters50/3436799
cttaaatat

SEQ ID NO: 71841 - DNA, 11 bp, Unknown
  misc_feature (1)..( 11): Matrix.004 file - promoters50/3436799
taacagaataa

SEQ ID NO: 71842 - DNA, 10 bp, Unknown
  misc_feature (1)..( 10): Matrix.004 file - promoters50/3436799
aaaaataaaa

SEQ ID NO: 71843 - DNA, 10 bp, Unknown
  misc_feature (1)..( 10): Matrix.004 file - promoters50/3436883
caattttttt

SEQ ID NO: 71844 - DNA, 10 bp, Unknown
  misc_feature (1)..( 10): Matrix.004 file - promoters50/3436943
taaaaaatta

SEQ ID NO: 71845 - DNA, 10 bp, Unknown
  misc_feature (1)..( 10): Matrix.004 file - promoters50/3436943
agatatcaga

SEQ ID NO: 71846 - DNA, 10 bp, Unknown
  misc_feature (1)..( 10): Matrix.004 file - promoters50/3436971
ttttccacaa

SEQ ID NO: 71847 - DNA, 8 bp, Unknown
  misc_feature (1)..( 8): Matrix.004 file - promoters50/3437072
cttacaaa

SEQ ID NO: 71848 - DNA, 12 bp, Unknown
  misc_feature (1)..( 12): Matrix.004 file - promoters50/3437072
atagaatcaata

SEQ ID NO: 71849 - DNA, 6 bp, Unknown
  misc_feature (1)..( 6): Matrix.004 file - promoters50/3437072
aattaa

SEQ ID NO: 71850 - DNA, 10 bp, Unknown
  misc_feature (1)..( 10): Matrix.004 file - promoters50/3437072
ataaaatata

SEQ ID NO: 71851 - DNA, 13 bp, Unknown
  misc_feature (1)..( 13): Matrix.004 file - promoters50/3437150
aattcttttaaat

SEQ ID NO: 71852 - DNA, 7 bp, Unknown
  misc_feature (1)..( 7): Matrix.004 file - promoters50/3437150
aaaaaag

SEQ ID NO: 71853 - DNA, 9 bp, Unknown
  misc_feature (1)..( 9): Matrix.004 file - promoters50/3437150
cttataaaa

SEQ ID NO: 71854 - DNA, 13 bp, Unknown
  misc_feature (1)..( 13): Matrix.004 file - promoters50/3437150
agaatttattatc

SEQ ID NO: 71855 - DNA, 15 bp, Unknown
  misc_feature (1)..( 15): Matrix.004 file - promoters50/3437150
gtgtatttgaattaa

SEQ ID NO: 71856 - DNA, 10 bp, Unknown
  misc_feature (1)..( 10): Matrix.004 file - promoters50/3437193
aaaattatta

SEQ ID NO: 71857 - DNA, 8 bp, Unknown
  misc_feature (1)..( 8): Matrix.004 file - promoters50/3437193
ttaaaaat

SEQ ID NO: 71858 - DNA, 16 bp, Unknown
  misc_feature (1)..( 16): Matrix.004 file - promoters50/3437193
agaaatacatacattt

SEQ ID NO: 71859 - DNA, 15 bp, Unknown
  misc_feature (1)..( 15): Matrix.004 file - promoters50/3437208
atacatattttttat

SEQ ID NO: 71860 - DNA, 11 bp, Unknown
  misc_feature (1)..( 11): Matrix.004 file - promoters50/3437208
aaattttcaga

SEQ ID NO: 71861 - DNA, 11 bp, Unknown
  misc_feature (1)..( 11): Matrix.004 file - promoters50/3437208
attaaataaaa

SEQ ID NO: 71862 - DNA, 8 bp, Unknown
  misc_feature (1)..( 8): Matrix.004 file - promoters50/3437208
aaatcaaa

SEQ ID NO: 71863 - DNA, 7 bp, Unknown
  misc_feature (1)..( 7): Matrix.004 file - promoters50/3437212
aaataag

SEQ ID NO: 71864 - DNA, 8 bp, Unknown
  misc_feature (1)..( 8): Matrix.004 file - promoters50/3437212
taaaagat

SEQ ID NO: 71865 - DNA, 6 bp, Unknown
  misc_feature (1)..( 6): Matrix.004 file - promoters50/3437212
tagata

SEQ ID NO: 71866 - DNA, 7 bp, Unknown
  misc_feature (1)..( 7): Matrix.004 file - promoters50/3437212
ataattt

SEQ ID NO: 71867 - DNA, 10 bp, Unknown
  misc_feature (1)..( 10): Matrix.004 file - promoters50/3437244
gttataaacg

SEQ ID NO: 71868 - DNA, 13 bp, Unknown
  misc_feature (1)..( 13): Matrix.004 file - promoters50/3437244
acgaatcaaacaa

SEQ ID NO: 71869 - DNA, 12 bp, Unknown
  misc_feature (1)..( 12): Matrix.004 file - promoters50/3437244
atgaaacaattc

SEQ ID NO: 71870 - DNA, 10 bp, Unknown
  misc_feature (1)..( 10): Matrix.004 file - promoters50/3437244
aaacaaaaac

SEQ ID NO: 71871 - DNA, 12 bp, Unknown
  misc_feature (1)..( 12): Matrix.004 file - promoters50/3437331
ataataaaataa

SEQ ID NO: 71872 - DNA, 11 bp, Unknown
  misc_feature (1)..( 11): Matrix.004 file - promoters50/3437331
gttttatttgt

SEQ ID NO: 71873 - DNA, 16 bp, Unknown
  misc_feature (1)..( 16): Matrix.004 file - promoters50/3437331
ttaagaaattcccaaa

SEQ ID NO: 71874 - DNA, 12 bp, Unknown
  misc_feature (1)..( 12): Matrix.004 file - promoters50/3437367
taccaaattaaa

SEQ ID NO: 71875 - DNA, 11 bp, Unknown
  misc_feature (1)..( 11): Matrix.004 file - promoters50/3437367
aaatttagaaa

SEQ ID NO: 71876 - DNA, 12 bp, Unknown
  misc_feature (1)..( 12): Matrix.004 file - promoters50/3437367
gtttattttttg

SEQ ID NO: 71877 - DNA, 8 bp, Unknown
  misc_feature (1)..( 8): Matrix.004 file - promoters50/3437367
attattaa

SEQ ID NO: 71878 - DNA, 19 bp, Unknown
  misc_feature (1)..( 19): Matrix.004 file - promoters50/3437575
tcaagttttaattgatatc

SEQ ID NO: 71879 - DNA, 10 bp, Unknown
  misc_feature (1)..( 10): Matrix.004 file - promoters50/3437575
aaaatgaaga

SEQ ID NO: 71880 - DNA, 8 bp, Unknown
  misc_feature (1)..( 8): Matrix.004 file - promoters50/3437652
taagttaa

SEQ ID NO: 71881 - DNA, 8 bp, Unknown
  misc_feature (1)..( 8): Matrix.004 file - promoters50/3437652
attaaaaa

SEQ ID NO: 71882 - DNA, 10 bp, Unknown
  misc_feature (1)..( 10): Matrix.004 file - promoters50/3437652
gaattttatt

SEQ ID NO: 71883 - DNA, 12 bp, Unknown
  misc_feature (1)..( 12): Matrix.004 file - promoters50/3437652
aagatatgacaa

SEQ ID NO: 71884 - DNA, 8 bp, Unknown
  misc_feature (1)..( 8): Matrix.004 file - promoters50/3437652
aaaagttg

SEQ ID NO: 71885 - DNA, 5 bp, Unknown
  misc_feature (1)..( 5): Matrix.004 file - promoters50/3437660
acaaa

SEQ ID NO: 71886 - DNA, 10 bp, Unknown
  misc_feature (1)..( 10): Matrix.004 file - promoters50/3437660
ataaatatag

SEQ ID NO: 71887 - DNA, 10 bp, Unknown
  misc_feature (1)..( 10): Matrix.004 file - promoters50/3437664
ataattcaaa

SEQ ID NO: 71888 - DNA, 7 bp, Unknown
  misc_feature (1)..( 7): Matrix.004 file - promoters50/3437664
atatata

SEQ ID NO: 71889 - DNA, 9 bp, Unknown
  misc_feature (1)..( 9): Matrix.004 file - promoters50/3437664
catttattt

SEQ ID NO: 71890 - DNA, 7 bp, Unknown
  misc_feature (1)..( 7): Matrix.004 file - promoters50/3437671
atttatt

SEQ ID NO: 71891 - DNA, 7 bp, Unknown
  misc_feature (1)..( 7): Matrix.004 file - promoters50/3437683
ttaggtg

SEQ ID NO: 71892 - DNA, 9 bp, Unknown
  misc_feature (1)..( 9): Matrix.004 file - promoters50/3437683
atatttttt

SEQ ID NO: 71893 - DNA, 10 bp, Unknown
  misc_feature (1)..( 10): Matrix.004 file - promoters50/3437683
ttctataaat

SEQ ID NO: 71894 - DNA, 8 bp, Unknown
  misc_feature (1)..( 8): Matrix.004 file - promoters50/3437683
aattgatt

SEQ ID NO: 71895 - DNA, 8 bp, Unknown
  misc_feature (1)..( 8): Matrix.004 file - promoters50/3437710
ttttacta

SEQ ID NO: 71896 - DNA, 11 bp, Unknown
  misc_feature (1)..( 11): Matrix.004 file - promoters50/3437710
cacataatttt

SEQ ID NO: 71897 - DNA, 13 bp, Unknown
  misc_feature (1)..( 13): Matrix.004 file - promoters50/3437710
tatataaatcaat

SEQ ID NO: 71898 - DNA, 9 bp, Unknown
  misc_feature (1)..( 9): Matrix.004 file - promoters50/3437725
aaattcatt

SEQ ID NO: 71899 - DNA, 8 bp, Unknown
  misc_feature (1)..( 8): Matrix.004 file - promoters50/3437725
gagaacaa

SEQ ID NO: 71900 - DNA, 8 bp, Unknown
  misc_feature (1)..( 8): Matrix.004 file - promoters50/3437776
tgaaaata

SEQ ID NO: 71901 - DNA, 7 bp, Unknown
  misc_feature (1)..( 7): Matrix.004 file - promoters50/3437779
atttacc

SEQ ID NO: 71902 - DNA, 9 bp, Unknown
  misc_feature (1)..( 9): Matrix.004 file - promoters50/3437779
agtatattt

SEQ ID NO: 71903 - DNA, 11 bp, Unknown
  misc_feature (1)..( 11): Matrix.004 file - promoters50/3437779
cttatgacaaa

SEQ ID NO: 71904 - DNA, 9 bp, Unknown
  misc_feature (1)..( 9): Matrix.004 file - promoters50/3437779
atttatttt

SEQ ID NO: 71905 - DNA, 12 bp, Unknown
  misc_feature (1)..( 12): Matrix.004 file - promoters50/3437803
aaaattattata

SEQ ID NO: 71906 - DNA, 12 bp, Unknown
  misc_feature (1)..( 12): Matrix.004 file - promoters50/3437803
tcctatttaaag

SEQ ID NO: 71907 - DNA, 8 bp, Unknown
  misc_feature (1)..( 8): Matrix.004 file - promoters50/3437871
ttccaaaa

SEQ ID NO: 71908 - DNA, 11 bp, Unknown
  misc_feature (1)..( 11): Matrix.004 file - promoters50/3437871
gaccaaaacaa

SEQ ID NO: 71909 - DNA, 11 bp, Unknown
  misc_feature (1)..( 11): Matrix.004 file - promoters50/3437871
aaagaaaattt

SEQ ID NO: 71910 - DNA, 10 bp, Unknown
  misc_feature (1)..( 10): Matrix.004 file - promoters50/3437962
cataaaagaa

SEQ ID NO: 71911 - DNA, 8 bp, Unknown
  misc_feature (1)..( 8): Matrix.004 file - promoters50/3437962
atttttta

SEQ ID NO: 71912 - DNA, 8 bp, Unknown
  misc_feature (1)..( 8): Matrix.004 file - promoters50/3438027
atttaaaa

SEQ ID NO: 71913 - DNA, 7 bp, Unknown
  misc_feature (1)..( 7): Matrix.004 file - promoters50/3438046
tttcttt

SEQ ID NO: 71914 - DNA, 9 bp, Unknown
  misc_feature (1)..( 9): Matrix.004 file - promoters50/3438046
taagaaaaa

SEQ ID NO: 71915 - DNA, 11 bp, Unknown
  misc_feature (1)..( 11): Matrix.004 file - promoters50/3438065
cctaaatttat

SEQ ID NO: 71916 - DNA, 8 bp, Unknown
  misc_feature (1)..( 8): Matrix.004 file - promoters50/3438065
agtaaaat

SEQ ID NO: 71917 - DNA, 12 bp, Unknown
  misc_feature (1)..( 12): Matrix.004 file - promoters50/3438065
ttaatcaaaaaa

SEQ ID NO: 71918 - DNA, 9 bp, Unknown
  misc_feature (1)..( 9): Matrix.004 file - promoters50/3438065
gaaaatttg

SEQ ID NO: 71919 - DNA, 13 bp, Unknown
  misc_feature (1)..( 13): Matrix.004 file - promoters50/3438077
aaaacaaaaaaaa

SEQ ID NO: 71920 - DNA, 10 bp, Unknown
  misc_feature (1)..( 10): Matrix.004 file - promoters50/3438077
aaggcccaat

SEQ ID NO: 71921 - DNA, 8 bp, Unknown
  misc_feature (1)..( 8): Matrix.004 file - promoters50/3438171
aggcccaa

SEQ ID NO: 71922 - DNA, 6 bp, Unknown
  misc_feature (1)..( 6): Matrix.004 file - promoters50/3438171
attttt

SEQ ID NO: 71923 - DNA, 12 bp, Unknown
  misc_feature (1)..( 12): Matrix.004 file - promoters50/3438171
catttaaaaaaa

SEQ ID NO: 71924 - DNA, 8 bp, Unknown
  misc_feature (1)..( 8): Matrix.004 file - promoters50/3438171
tatatata

SEQ ID NO: 71925 - DNA, 13 bp, Unknown
  misc_feature (1)..( 13): Matrix.004 file - promoters50/3438171
aaataaatattta

SEQ ID NO: 71926 - DNA, 9 bp, Unknown
  misc_feature (1)..( 9): Matrix.004 file - promoters50/3438171
taattttaa

SEQ ID NO: 71927 - DNA, 12 bp, Unknown
  misc_feature (1)..( 12): Matrix.004 file - promoters50/3438171
aaaaaaatttat

SEQ ID NO: 71928 - DNA, 12 bp, Unknown
  misc_feature (1)..( 12): Matrix.004 file - promoters50/3438194
cttaatatttaa

SEQ ID NO: 71929 - DNA, 13 bp, Unknown
  misc_feature (1)..( 13): Matrix.004 file - promoters50/3438208
acgaagcagagag

SEQ ID NO: 71930 - DNA, 7 bp, Unknown
  misc_feature (1)..( 7): Matrix.004 file - promoters50/3438222
aaacaat

SEQ ID NO: 71931 - DNA, 8 bp, Unknown
  misc_feature (1)..( 8): Matrix.004 file - promoters50/3438222
attactta

SEQ ID NO: 71932 - DNA, 9 bp, Unknown
  misc_feature (1)..( 9): Matrix.004 file - promoters50/3438226
tattaaatt

SEQ ID NO: 71933 - DNA, 13 bp, Unknown
  misc_feature (1)..( 13): Matrix.004 file - promoters50/3438236
tattaattttata

SEQ ID NO: 71934 - DNA, 12 bp, Unknown
  misc_feature (1)..( 12): Matrix.004 file - promoters50/3438236
gttatatataaa

SEQ ID NO: 71935 - DNA, 13 bp, Unknown
  misc_feature (1)..( 13): Matrix.004 file - promoters50/3438236
caaaataattctt

SEQ ID NO: 71936 - DNA, 17 bp, Unknown
  misc_feature (1)..( 17): Matrix.004 file - promoters50/3438291
gtaccaatttcttacac

SEQ ID NO: 71937 - DNA, 10 bp, Unknown
  misc_feature (1)..( 10): Matrix.004 file - promoters50/3438291
aaattgatct

SEQ ID NO: 71938 - DNA, 9 bp, Unknown
  misc_feature (1)..( 9): Matrix.004 file - promoters50/3438312
taaaatcaa

SEQ ID NO: 71939 - DNA, 30 bp, Unknown
  misc_feature (1)..( 30): Matrix.004 file - promoters50/3438312
acgtgtcaatttataattggctattgcttc

SEQ ID NO: 71940 - DNA, 15 bp, Unknown
  misc_feature (1)..( 15): Matrix.004 file - promoters50/3438312
cgccttagctttctc

SEQ ID NO: 71941 - DNA, 22 bp, Unknown
  misc_feature (1)..( 22): Matrix.004 file - promoters50/3438312
gaccgagtcgtcctcgtctttt

SEQ ID NO: 71942 - DNA, 20 bp, Unknown
  misc_feature (1)..( 20): Matrix.004 file - promoters50/3438312
ttcttcttctataaaacaat

SEQ ID NO: 71943 - DNA, 9 bp, Unknown
  misc_feature (1)..( 9): Matrix.004 file - promoters50/3438312
aaaaaaaac

SEQ ID NO: 71944 - DNA, 16 bp, Unknown
  misc_feature (1)..( 16): Matrix.004 file - promoters50/3438312
gaccgagtcgtcctcg

SEQ ID NO: 71945 - DNA, 8 bp, Unknown
  misc_feature (1)..( 8): Matrix.004 file - promoters50/3438369
ttcttgcc

SEQ ID NO: 71946 - DNA, 10 bp, Unknown
  misc_feature (1)..( 10): Matrix.004 file - promoters50/3438369
aagaatgaaa

SEQ ID NO: 71947 - DNA, 10 bp, Unknown
  misc_feature (1)..( 10): Matrix.004 file - promoters50/3438381
aaaatattaa

SEQ ID NO: 71948 - DNA, 11 bp, Unknown
  misc_feature (1)..( 11): Matrix.004 file - promoters50/3438420
ttctaacaccc

SEQ ID NO: 71949 - DNA, 12 bp, Unknown
  misc_feature (1)..( 12): Matrix.004 file - promoters50/3438420
aatgtataataa

SEQ ID NO: 71950 - DNA, 11 bp, Unknown
  misc_feature (1)..( 11): Matrix.004 file - promoters50/3438479
ccaataaaata

SEQ ID NO: 71951 - DNA, 8 bp, Unknown
  misc_feature (1)..( 8): Matrix.004 file - promoters50/3438494
cgttatct

SEQ ID NO: 71952 - DNA, 9 bp, Unknown
  misc_feature (1)..( 9): Matrix.004 file - promoters50/3438494
atatataaa

SEQ ID NO: 71953 - DNA, 10 bp, Unknown
  misc_feature (1)..( 10): Matrix.004 file - promoters50/3438505
aatttgagtt

SEQ ID NO: 71954 - DNA, 8 bp, Unknown
  misc_feature (1)..( 8): Matrix.004 file - promoters50/3438505
tacacata

SEQ ID NO: 71955 - DNA, 6 bp, Unknown
  misc_feature (1)..( 6): Matrix.004 file - promoters50/3438505
cgacat

SEQ ID NO: 71956 - DNA, 7 bp, Unknown
  misc_feature (1)..( 7): Matrix.004 file - promoters50/3438505
gttcctt

SEQ ID NO: 71957 - DNA, 8 bp, Unknown
  misc_feature (1)..( 8): Matrix.004 file - promoters50/3438512
gttgattc

SEQ ID NO: 71958 - DNA, 11 bp, Unknown
  misc_feature (1)..( 11): Matrix.004 file - promoters50/3438512
caaaaatttat

SEQ ID NO: 71959 - DNA, 13 bp, Unknown
  misc_feature (1)..( 13): Matrix.004 file - promoters50/3438512
tgactatatttta

SEQ ID NO: 71960 - DNA, 11 bp, Unknown
  misc_feature (1)..( 11): Matrix.004 file - promoters50/3438512
taaaaaaaata

SEQ ID NO: 71961 - DNA, 9 bp, Unknown
  misc_feature (1)..( 9): Matrix.004 file - promoters50/3438512
atgtttata

SEQ ID NO: 71962 - DNA, 9 bp, Unknown
  misc_feature (1)..( 9): Matrix.004 file - promoters50/3438512
acgttttta

SEQ ID NO: 71963 - DNA, 9 bp, Unknown
  misc_feature (1)..( 9): Matrix.004 file - promoters50/3438518
taaaaaaat

SEQ ID NO: 71964 - DNA, 10 bp, Unknown
  misc_feature (1)..( 10): Matrix.004 file - promoters50/3438594
ttatataaaa

SEQ ID NO: 71965 - DNA, 8 bp, Unknown
  misc_feature (1)..( 8): Matrix.004 file - promoters50/3438594
aattaatt

SEQ ID NO: 71966 - DNA, 10 bp, Unknown
  misc_feature (1)..( 10): Matrix.004 file - promoters50/3438594
taaattaaaa

SEQ ID NO: 71967 - DNA, 10 bp, Unknown
  misc_feature (1)..( 10): Matrix.004 file - promoters50/3438594
aaaagaaaag

SEQ ID NO: 71968 - DNA, 5 bp, Unknown
  misc_feature (1)..( 5): Matrix.004 file - promoters50/3438594
ccaaa

SEQ ID NO: 71969 - DNA, 9 bp, Unknown
  misc_feature (1)..( 9): Matrix.004 file - promoters50/3438594
taaaaaact

SEQ ID NO: 71970 - DNA, 11 bp, Unknown
  misc_feature (1)..( 11): Matrix.004 file - promoters50/3438594
aattattatgt

SEQ ID NO: 71971 - DNA, 8 bp, Unknown
  misc_feature (1)..( 8): Matrix.004 file - promoters50/3438594
ctatttag

SEQ ID NO: 71972 - DNA, 10 bp, Unknown
  misc_feature (1)..( 10): Matrix.004 file - promoters50/3438624
ttaaaaactt

SEQ ID NO: 71973 - DNA, 8 bp, Unknown
  misc_feature (1)..( 8): Matrix.004 file - promoters50/3438624
tgttttgc

SEQ ID NO: 71974 - DNA, 8 bp, Unknown
  misc_feature (1)..( 8): Matrix.004 file - promoters50/3438632
aaaaaatt

SEQ ID NO: 71975 - DNA, 7 bp, Unknown
  misc_feature (1)..( 7): Matrix.004 file - promoters50/3438634
gaaaaag

SEQ ID NO: 71976 - DNA, 10 bp, Unknown
  misc_feature (1)..( 10): Matrix.004 file - promoters50/3438648
tattcaaaac

SEQ ID NO: 71977 - DNA, 12 bp, Unknown
  misc_feature (1)..( 12): Matrix.004 file - promoters50/3438648
aaacagaaaaaa

SEQ ID NO: 71978 - DNA, 10 bp, Unknown
  misc_feature (1)..( 10): Matrix.004 file - promoters50/3438648
gaaaaaaaat

SEQ ID NO: 71979 - DNA, 13 bp, Unknown
  misc_feature (1)..( 13): Matrix.004 file - promoters50/3438771
attgaaaaaatta

SEQ ID NO: 71980 - DNA, 11 bp, Unknown
  misc_feature (1)..( 11): Matrix.004 file - promoters50/3438785
acaaaaataaa

SEQ ID NO: 71981 - DNA, 8 bp, Unknown
  misc_feature (1)..( 8): Matrix.004 file - promoters50/3438919
attagtga

SEQ ID NO: 71982 - DNA, 11 bp, Unknown
  misc_feature (1)..( 11): Matrix.004 file - promoters50/3438919
gtttaaacaaa

SEQ ID NO: 71983 - DNA, 7 bp, Unknown
  misc_feature (1)..( 7): Matrix.004 file - promoters50/3438927
ctttgat

SEQ ID NO: 71984 - DNA, 9 bp, Unknown
  misc_feature (1)..( 9): Matrix.004 file - promoters50/3438927
ataagtaaa

SEQ ID NO: 71985 - DNA, 9 bp, Unknown
  misc_feature (1)..( 9): Matrix.004 file - promoters50/3438927
aaaaaaaat

SEQ ID NO: 71986 - DNA, 9 bp, Unknown
  misc_feature (1)..( 9): Matrix.004 file - promoters50/3438927
aaaaaaaaa

SEQ ID NO: 71987 - DNA, 8 bp, Unknown
  misc_feature (1)..( 8): Matrix.004 file - promoters50/3438927
agtaaaaa

SEQ ID NO: 71988 - DNA, 13 bp, Unknown
  misc_feature (1)..( 13): Matrix.004 file - promoters50/3438944
gaaatatcttaac

SEQ ID NO: 71989 - DNA, 8 bp, Unknown
  misc_feature (1)..( 8): Matrix.004 file - promoters50/3438946
acaaaaag

SEQ ID NO: 71990 - DNA, 8 bp, Unknown
  misc_feature (1)..( 8): Matrix.004 file - promoters50/3438946
tcaaaatc

SEQ ID NO: 71991 - DNA, 7 bp, Unknown
  misc_feature (1)..( 7): Matrix.004 file - promoters50/3438946
agaaagt

SEQ ID NO: 71992 - DNA, 8 bp, Unknown
  misc_feature (1)..( 8): Matrix.004 file - promoters50/3438990
gttaattg

SEQ ID NO: 71993 - DNA, 10 bp, Unknown
  misc_feature (1)..( 10): Matrix.004 file - promoters50/3439000
tataaatata

SEQ ID NO: 71994 - DNA, 7 bp, Unknown
  misc_feature (1)..( 7): Matrix.004 file - promoters50/3439012
aataatt

SEQ ID NO: 71995 - DNA, 7 bp, Unknown
  misc_feature (1)..( 7): Matrix.004 file - promoters50/3439012
tctctat

SEQ ID NO: 71996 - DNA, 12 bp, Unknown
  misc_feature (1)..( 12): Matrix.004 file - promoters50/3439014
attaattacaga

SEQ ID NO: 71997 - DNA, 11 bp, Unknown
  misc_feature (1)..( 11): Matrix.004 file - promoters50/3439026
tttttgctcca

SEQ ID NO: 71998 - DNA, 8 bp, Unknown
  misc_feature (1)..( 8): Matrix.004 file - promoters50/3439026
aaagaata

SEQ ID NO: 71999 - DNA, 9 bp, Unknown
  misc_feature (1)..( 9): Matrix.004 file - promoters50/3439026
aagagtttt

SEQ ID NO: 72000 - DNA, 7 bp, Unknown
  misc_feature (1)..( 7): Matrix.004 file - promoters50/3439026
cgagatc

SEQ ID NO: 72001 - DNA, 8 bp, Unknown
  misc_feature (1)..( 8): Matrix.004 file - promoters50/3439026
aaataatt

SEQ ID NO: 72002 - DNA, 6 bp, Unknown
  misc_feature (1)..( 6): Matrix.004 file - promoters50/3439044
tttata

SEQ ID NO: 72003 - DNA, 9 bp, Unknown
  misc_feature (1)..( 9): Matrix.004 file - promoters50/3439044
aaaaaggtg

SEQ ID NO: 72004 - DNA, 9 bp, Unknown
  misc_feature (1)..( 9): Matrix.004 file - promoters50/3439056
agtttcttg

SEQ ID NO: 72005 - DNA, 14 bp, Unknown
  misc_feature (1)..( 14): Matrix.004 file - promoters50/3439059
aactgaaataatta

SEQ ID NO: 72006 - DNA, 9 bp, Unknown
  misc_feature (1)..( 9): Matrix.004 file - promoters50/3439059
ttataaata

SEQ ID NO: 72007 - DNA, 10 bp, Unknown
  misc_feature (1)..( 10): Matrix.004 file - promoters50/3439063
tataaaaatg

SEQ ID NO: 72008 - DNA, 12 bp, Unknown
  misc_feature (1)..( 12): Matrix.004 file - promoters50/3439063
aacatgtcttaa

SEQ ID NO: 72009 - DNA, 10 bp, Unknown
  misc_feature (1)..( 10): Matrix.004 file - promoters50/3439129
actcaaaatt

SEQ ID NO: 72010 - DNA, 8 bp, Unknown
  misc_feature (1)..( 8): Matrix.004 file - promoters50/3439129
tttaagaa

SEQ ID NO: 72011 - DNA, 7 bp, Unknown
  misc_feature (1)..( 7): Matrix.004 file - promoters50/3439129
taattta

SEQ ID NO: 72012 - DNA, 5 bp, Unknown
  misc_feature (1)..( 5): Matrix.004 file - promoters50/3439129
agaga

SEQ ID NO: 72013 - DNA, 9 bp, Unknown
  misc_feature (1)..( 9): Matrix.004 file - promoters50/3439129
tctatttaa

SEQ ID NO: 72014 - DNA, 7 bp, Unknown
  misc_feature (1)..( 7): Matrix.004 file - promoters50/3439129
aaacaga

SEQ ID NO: 72015 - DNA, 10 bp, Unknown
  misc_feature (1)..( 10): Matrix.004 file - promoters50/3439145
taacagagat

SEQ ID NO: 72016 - DNA, 7 bp, Unknown
  misc_feature (1)..( 7): Matrix.004 file - promoters50/3439145
ataatta

SEQ ID NO: 72017 - DNA, 7 bp, Unknown
  misc_feature (1)..( 7): Matrix.004 file - promoters50/3439175
ttaaaaa

SEQ ID NO: 72018 - DNA, 8 bp, Unknown
  misc_feature (1)..( 8): Matrix.004 file - promoters50/3439206
catgattt

SEQ ID NO: 72019 - DNA, 13 bp, Unknown
  misc_feature (1)..( 13): Matrix.004 file - promoters50/3439206
aagaaaattcttt

SEQ ID NO: 72020 - DNA, 7 bp, Unknown
  misc_feature (1)..( 7): Matrix.004 file - promoters50/3439224
caaaaaa

SEQ ID NO: 72021 - DNA, 12 bp, Unknown
  misc_feature (1)..( 12): Matrix.004 file - promoters50/3439224
attatatgggcc

SEQ ID NO: 72022 - DNA, 8 bp, Unknown
  misc_feature (1)..( 8): Matrix.004 file - promoters50/3439289
tttgttgt

SEQ ID NO: 72023 - DNA, 10 bp, Unknown
  misc_feature (1)..( 10): Matrix.004 file - promoters50/3439289
agttatttta

SEQ ID NO: 72024 - DNA, 10 bp, Unknown
  misc_feature (1)..( 10): Matrix.004 file - promoters50/3439289
actgattttt

SEQ ID NO: 72025 - DNA, 16 bp, Unknown
  misc_feature (1)..( 16): Matrix.004 file - promoters50/3439289
ccataaaaaaaaatat

SEQ ID NO: 72026 - DNA, 10 bp, Unknown
  misc_feature (1)..( 10): Matrix.004 file - promoters50/3439289
caaaaaaaga

SEQ ID NO: 72027 - DNA, 10 bp, Unknown
  misc_feature (1)..( 10): Matrix.004 file - promoters50/3439289
aattgtactt

SEQ ID NO: 72028 - DNA, 13 bp, Unknown
  misc_feature (1)..( 13): Matrix.004 file - promoters50/3439303
tcattaaagaaaa

SEQ ID NO: 72029 - DNA, 10 bp, Unknown
  misc_feature (1)..( 10): Matrix.004 file - promoters50/3439307
gtatggattc

SEQ ID NO: 72030 - DNA, 7 bp, Unknown
  misc_feature (1)..( 7): Matrix.004 file - promoters50/3439307
gaagatc

SEQ ID NO: 72031 - DNA, 8 bp, Unknown
  misc_feature (1)..( 8): Matrix.004 file - promoters50/3439330
tgataaga

SEQ ID NO: 72032 - DNA, 7 bp, Unknown
  misc_feature (1)..( 7): Matrix.004 file - promoters50/3439330
attttaa

SEQ ID NO: 72033 - DNA, 7 bp, Unknown
  misc_feature (1)..( 7): Matrix.004 file - promoters50/3439330
aataaaa

SEQ ID NO: 72034 - DNA, 8 bp, Unknown
  misc_feature (1)..( 8): Matrix.004 file - promoters50/3439334
aaaagaga

SEQ ID NO: 72035 - DNA, 9 bp, Unknown
  misc_feature (1)..( 9): Matrix.004 file - promoters50/3439334
ttttatttg

SEQ ID NO: 72036 - DNA, 7 bp, Unknown
  misc_feature (1)..( 7): Matrix.004 file - promoters50/3439334
ttatatg

SEQ ID NO: 72037 - DNA, 7 bp, Unknown
  misc_feature (1)..( 7): Matrix.004 file - promoters50/3439334
aaaataa

SEQ ID NO: 72038 - DNA, 8 bp, Unknown
  misc_feature (1)..( 8): Matrix.004 file - promoters50/3439334
aaaaataa

SEQ ID NO: 72039 - DNA, 7 bp, Unknown
  misc_feature (1)..( 7): Matrix.004 file - promoters50/3439334
ttaaaat

SEQ ID NO: 72040 - DNA, 6 bp, Unknown
  misc_feature (1)..( 6): Matrix.004 file - promoters50/3439353
aaactt

SEQ ID NO: 72041 - DNA, 8 bp, Unknown
  misc_feature (1)..( 8): Matrix.004 file - promoters50/3439364
aaatcttt

SEQ ID NO: 72042 - DNA, 7 bp, Unknown
  misc_feature (1)..( 7): Matrix.004 file - promoters50/3439364
aaaaaaa

SEQ ID NO: 72043 - DNA, 17 bp, Unknown
  misc_feature (1)..( 17): Matrix.004 file - promoters50/3439364
tagattttaacaaatat

SEQ ID NO: 72044 - DNA, 9 bp, Unknown
  misc_feature (1)..( 9): Matrix.004 file - promoters50/3439364
tctatataa

SEQ ID NO: 72045 - DNA, 9 bp, Unknown
  misc_feature (1)..( 9): Matrix.004 file - promoters50/3439364
aaaaaaaag

SEQ ID NO: 72046 - DNA, 10 bp, Unknown
  misc_feature (1)..( 10): Matrix.004 file - promoters50/3439374
attaaatata

SEQ ID NO: 72047 - DNA, 12 bp, Unknown
  misc_feature (1)..( 12): Matrix.004 file - promoters50/3439392
tcttaattaaaa

SEQ ID NO: 72048 - DNA, 9 bp, Unknown
  misc_feature (1)..( 9): Matrix.004 file - promoters50/3439416
aaaatggtt

SEQ ID NO: 72049 - DNA, 13 bp, Unknown
  misc_feature (1)..( 13): Matrix.004 file - promoters50/3439420
taaaataaaatgt

SEQ ID NO: 72050 - DNA, 11 bp, Unknown
  misc_feature (1)..( 11): Matrix.004 file - promoters50/3439420
tgattttacta

SEQ ID NO: 72051 - DNA, 9 bp, Unknown
  misc_feature (1)..( 9): Matrix.004 file - promoters50/3439457
gcgtcaaaa

SEQ ID NO: 72052 - DNA, 11 bp, Unknown
  misc_feature (1)..( 11): Matrix.004 file - promoters50/3439472
tgaatttttgt

SEQ ID NO: 72053 - DNA, 10 bp, Unknown
  misc_feature (1)..( 10): Matrix.004 file - promoters50/3439482
ccattttcta

SEQ ID NO: 72054 - DNA, 12 bp, Unknown
  misc_feature (1)..( 12): Matrix.004 file - promoters50/3439506
cacaaattatgc

SEQ ID NO: 72055 - DNA, 8 bp, Unknown
  misc_feature (1)..( 8): Matrix.004 file - promoters50/3439506
aaattgaa

SEQ ID NO: 72056 - DNA, 8 bp, Unknown
  misc_feature (1)..( 8): Matrix.004 file - promoters50/3439595
aaaaaaga

SEQ ID NO: 72057 - DNA, 11 bp, Unknown
  misc_feature (1)..( 11): Matrix.004 file - promoters50/3439605
cccttataaaa

SEQ ID NO: 72058 - DNA, 8 bp, Unknown
  misc_feature (1)..( 8): Matrix.004 file - promoters50/3439614
cgattaaa

SEQ ID NO: 72059 - DNA, 9 bp, Unknown
  misc_feature (1)..( 9): Matrix.004 file - promoters50/3439637
caaaaaaag

SEQ ID NO: 72060 - DNA, 9 bp, Unknown
  misc_feature (1)..( 9): Matrix.004 file - promoters50/3439637
aataaaata

SEQ ID NO: 72061 - DNA, 9 bp, Unknown
  misc_feature (1)..( 9): Matrix.004 file - promoters50/3439637
caaatttct

SEQ ID NO: 72062 - DNA, 8 bp, Unknown
  misc_feature (1)..( 8): Matrix.004 file - promoters50/3439662
caaagaaa

SEQ ID NO: 72063 - DNA, 16 bp, Unknown
  misc_feature (1)..( 16): Matrix.004 file - promoters50/3439905
atttgaaatacggaga

SEQ ID NO: 72064 - DNA, 7 bp, Unknown
  misc_feature (1)..( 7): Matrix.004 file - promoters50/3439905
aaataat

SEQ ID NO: 72065 - DNA, 7 bp, Unknown
  misc_feature (1)..( 7): Matrix.004 file - promoters50/3441755
taaaaaa

SEQ ID NO: 72066 - DNA, 8 bp, Unknown
  misc_feature (1)..( 8): Matrix.004 file - promoters50/3441755
tgtttatt

SEQ ID NO: 72067 - DNA, 8 bp, Unknown
  misc_feature (1)..( 8): Matrix.004 file - promoters50/3442171
ctgtgttg

SEQ ID NO: 72068 - DNA, 13 bp, Unknown
  misc_feature (1)..( 13): Matrix.004 file - promoters50/3442171
aatatgtttgatt

SEQ ID NO: 72069 - DNA, 12 bp, Unknown
  misc_feature (1)..( 12): Matrix.004 file - promoters50/3442286
acagatttgtta

SEQ ID NO: 72070 - DNA, 8 bp, Unknown
  misc_feature (1)..( 8): Matrix.004 file - promoters50/3442286
aattaaat

SEQ ID NO: 72071 - DNA, 9 bp, Unknown
  misc_feature (1)..( 9): Matrix.004 file - promoters50/3442286
taaaaaaaa

SEQ ID NO: 72072 - DNA, 11 bp, Unknown
  misc_feature (1)..( 11): Matrix.004 file - promoters50/3442286
cctcttcctag

SEQ ID NO: 72073 - DNA, 7 bp, Unknown
  misc_feature (1)..( 7): Matrix.004 file - promoters50/3442286
ttgtttc

SEQ ID NO: 72074 - DNA, 8 bp, Unknown
  misc_feature (1)..( 8): Matrix.004 file - promoters50/3442286
atatcatt

SEQ ID NO: 72075 - DNA, 10 bp, Unknown
  misc_feature (1)..( 10): Matrix.004 file - promoters50/3442286
taatgttttc

SEQ ID NO: 72076 - DNA, 7 bp, Unknown
  misc_feature (1)..( 7): Matrix.004 file - promoters50/3442286
gtttctc

SEQ ID NO: 72077 - DNA, 9 bp, Unknown
  misc_feature (1)..( 9): Matrix.004 file - promoters50/3442286
catgttttc

SEQ ID NO: 72078 - DNA, 7 bp, Unknown
  misc_feature (1)..( 7): Matrix.004 file - promoters50/3443646
caaaaac

SEQ ID NO: 72079 - DNA, 9 bp, Unknown
  misc_feature (1)..( 9): Matrix.004 file - promoters50/3443646
aattattaa

SEQ ID NO: 72080 - DNA, 7 bp, Unknown
  misc_feature (1)..( 7): Matrix.004 file - promoters50/3443646
atttaag

SEQ ID NO: 72081 - DNA, 12 bp, Unknown
  misc_feature (1)..( 12): Matrix.004 file - promoters50/3443646
gatcaaaaagaa

SEQ ID NO: 72082 - DNA, 9 bp, Unknown
  misc_feature (1)..( 9): Matrix.004 file - promoters50/3445482
aataaagct

SEQ ID NO: 72083 - DNA, 8 bp, Unknown
  misc_feature (1)..( 8): Matrix.004 file - promoters50/3445482
caaagaaa

SEQ ID NO: 72084 - DNA, 10 bp, Unknown
  misc_feature (1)..( 10): Matrix.004 file - promoters50/3445482
tgaaaaaaaa

SEQ ID NO: 72085 - DNA, 13 bp, Unknown
  misc_feature (1)..( 13): Matrix.004 file - promoters50/3447843
ttcgtatgattct

SEQ ID NO: 72086 - DNA, 8 bp, Unknown
  misc_feature (1)..( 8): Matrix.004 file - promoters50/3593205
aagatttt

SEQ ID NO: 72087 - DNA, 15 bp, Unknown
  misc_feature (1)..( 15): Matrix.004 file - promoters50/3593205
caataaattagatat

SEQ ID NO: 72088 - DNA, 13 bp, Unknown
  misc_feature (1)..( 13): Matrix.004 file - promoters50/3593205
aaaaccaaaaaac

SEQ ID NO: 72089 - DNA, 13 bp, Unknown
  misc_feature (1)..( 13): Matrix.004 file - promoters50/3593205
tatgctcagatta

SEQ ID NO: 72090 - DNA, 11 bp, Unknown
  misc_feature (1)..( 11): Matrix.004 file - promoters50/3593230
aactaatttat

SEQ ID NO: 72091 - DNA, 9 bp, Unknown
  misc_feature (1)..( 9): Matrix.004 file - promoters50/3593230
cacattcat

SEQ ID NO: 72092 - DNA, 10 bp, Unknown
  misc_feature (1)..( 10): Matrix.004 file - promoters50/3593243
cagaaaatta

SEQ ID NO: 72093 - DNA, 10 bp, Unknown
  misc_feature (1)..( 10): Matrix.004 file - promoters50/3593243
aaacataatg

SEQ ID NO: 72094 - DNA, 8 bp, Unknown
  misc_feature (1)..( 8): Matrix.004 file - promoters50/3593243
ttgttttc

SEQ ID NO: 72095 - DNA, 9 bp, Unknown
  misc_feature (1)..( 9): Matrix.004 file - promoters50/3593243
taacacata

SEQ ID NO: 72096 - DNA, 8 bp, Unknown
  misc_feature (1)..( 8): Matrix.004 file - promoters50/3593264
ccaatgtc

SEQ ID NO: 72097 - DNA, 7 bp, Unknown
  misc_feature (1)..( 7): Matrix.004 file - promoters50/3593264
aaacaaa

SEQ ID NO: 72098 - DNA, 6 bp, Unknown
  misc_feature (1)..( 6): Matrix.004 file - promoters50/3593264
aaaatt

SEQ ID NO: 72099 - DNA, 9 bp, Unknown
  misc_feature (1)..( 9): Matrix.004 file - promoters50/3593264
aaccaaacc

SEQ ID NO: 72100 - DNA, 11 bp, Unknown
  misc_feature (1)..( 11): Matrix.004 file - promoters50/3593290
tgttttgatta

SEQ ID NO: 72101 - DNA, 8 bp, Unknown
  misc_feature (1)..( 8): Matrix.004 file - promoters50/3593290
ttttgttt

SEQ ID NO: 72102 - DNA, 8 bp, Unknown
  misc_feature (1)..( 8): Matrix.004 file - promoters50/3593290
ctcagaag

SEQ ID NO: 72103 - DNA, 15 bp, Unknown
  misc_feature (1)..( 15): Matrix.004 file - promoters50/3593290
gattgttgtaacgca

SEQ ID NO: 72104 - DNA, 10 bp, Unknown
  misc_feature (1)..( 10): Matrix.004 file - promoters50/3593346
gagcttgaga

SEQ ID NO: 72105 - DNA, 8 bp, Unknown
  misc_feature (1)..( 8): Matrix.004 file - promoters50/3593538
aaacaaat

SEQ ID NO: 72106 - DNA, 8 bp, Unknown
  misc_feature (1)..( 8): Matrix.004 file - promoters50/3593538
aaacaaaa

SEQ ID NO: 72107 - DNA, 10 bp, Unknown
  misc_feature (1)..( 10): Matrix.004 file - promoters50/3593733
aaacaaaaga

SEQ ID NO: 72108 - DNA, 9 bp, Unknown
  misc_feature (1)..( 9): Matrix.004 file - promoters50/3593733
aataagtga

SEQ ID NO: 72109 - DNA, 12 bp, Unknown
  misc_feature (1)..( 12): Matrix.004 file - promoters50/3594312
acgcaaacaatt

SEQ ID NO: 72110 - DNA, 7 bp, Unknown
  misc_feature (1)..( 7): Matrix.004 file - promoters50/3594312
gtttata

SEQ ID NO: 72111 - DNA, 9 bp, Unknown
  misc_feature (1)..( 9): Matrix.004 file - promoters50/3594312
aattaaaaa

SEQ ID NO: 72112 - DNA, 11 bp, Unknown
  misc_feature (1)..( 11): Matrix.004 file - promoters50/3594312
aatgattttta

SEQ ID NO: 72113 - DNA, 9 bp, Unknown
  misc_feature (1)..( 9): Matrix.004 file - promoters50/3594312
aattttgtt

SEQ ID NO: 72114 - DNA, 11 bp, Unknown
  misc_feature (1)..( 11): Matrix.004 file - promoters50/3594312
gaaaaatttaa

SEQ ID NO: 72115 - DNA, 8 bp, Unknown
  misc_feature (1)..( 8): Matrix.004 file - promoters50/3594312
agcaaaaa

SEQ ID NO: 72116 - DNA, 13 bp, Unknown
  misc_feature (1)..( 13): Matrix.004 file - promoters50/3594312
attaaaaatacta

SEQ ID NO: 72117 - DNA, 11 bp, Unknown
  misc_feature (1)..( 11): Matrix.004 file - promoters50/3594312
taaaaaacttt

SEQ ID NO: 72118 - DNA, 7 bp, Unknown
  misc_feature (1)..( 7): Matrix.004 file - promoters50/3597145
aaatact

SEQ ID NO: 72119 - DNA, 9 bp, Unknown
  misc_feature (1)..( 9): Matrix.004 file - promoters50/3597145
cgaagaaaa

SEQ ID NO: 72120 - DNA, 11 bp, Unknown
  misc_feature (1)..( 11): Matrix.004 file - promoters50/3597145
aactaataaca

SEQ ID NO: 72121 - DNA, 13 bp, Unknown
  misc_feature (1)..( 13): Matrix.004 file - promoters50/3597145
taaaaagttcgca

SEQ ID NO: 72122 - DNA, 10 bp, Unknown
  misc_feature (1)..( 10): Matrix.004 file - promoters50/3597158
ttttctttaa

SEQ ID NO: 72123 - DNA, 8 bp, Unknown
  misc_feature (1)..( 8): Matrix.004 file - promoters50/3597158
tcacatag

SEQ ID NO: 72124 - DNA, 10 bp, Unknown
  misc_feature (1)..( 10): Matrix.004 file - promoters50/3597158
tttccaaaga

SEQ ID NO: 72125 - DNA, 12 bp, Unknown
  misc_feature (1)..( 12): Matrix.004 file - promoters50/3597158
attcagtttcac

SEQ ID NO: 72126 - DNA, 10 bp, Unknown
  misc_feature (1)..( 10): Matrix.004 file - promoters50/3597162
caaagcaaaa

SEQ ID NO: 72127 - DNA, 7 bp, Unknown
  misc_feature (1)..( 7): Matrix.004 file - promoters50/3597162
tgacttg

SEQ ID NO: 72128 - DNA, 8 bp, Unknown
  misc_feature (1)..( 8): Matrix.004 file - promoters50/3597162
agataaaa

SEQ ID NO: 72129 - DNA, 7 bp, Unknown
  misc_feature (1)..( 7): Matrix.004 file - promoters50/3597162
aatagat

SEQ ID NO: 72130 - DNA, 13 bp, Unknown
  misc_feature (1)..( 13): Matrix.004 file - promoters50/3597162
tctatataaatcc

SEQ ID NO: 72131 - DNA, 9 bp, Unknown
  misc_feature (1)..( 9): Matrix.004 file - promoters50/3597162
ttaaaattg

SEQ ID NO: 72132 - DNA, 9 bp, Unknown
  misc_feature (1)..( 9): Matrix.004 file - promoters50/3597162
ttcaattta

SEQ ID NO: 72133 - DNA, 9 bp, Unknown
  misc_feature (1)..( 9): Matrix.004 file - promoters50/3597162
ttttatttt

SEQ ID NO: 72134 - DNA, 10 bp, Unknown
  misc_feature (1)..( 10): Matrix.004 file - promoters50/3597162
aatttgaatt

SEQ ID NO: 72135 - DNA, 13 bp, Unknown
  misc_feature (1)..( 13): Matrix.004 file - promoters50/3597162
gtttaaacttaaa

SEQ ID NO: 72136 - DNA, 9 bp, Unknown
  misc_feature (1)..( 9): Matrix.004 file - promoters50/3597162
aaataaaaa

SEQ ID NO: 72137 - DNA, 10 bp, Unknown
  misc_feature (1)..( 10): Matrix.004 file - promoters50/3597175
aaagaaaatt

SEQ ID NO: 72138 - DNA, 13 bp, Unknown
  misc_feature (1)..( 13): Matrix.004 file - promoters50/3597175
aaccaaaaaaaga

SEQ ID NO: 72139 - DNA, 12 bp, Unknown
  misc_feature (1)..( 12): Matrix.004 file - promoters50/3597175
attattttttaa

SEQ ID NO: 72140 - DNA, 11 bp, Unknown
  misc_feature (1)..( 11): Matrix.004 file - promoters50/3597175
tttaattaaca

SEQ ID NO: 72141 - DNA, 8 bp, Unknown
  misc_feature (1)..( 8): Matrix.004 file - promoters50/3597175
tattataa

SEQ ID NO: 72142 - DNA, 10 bp, Unknown
  misc_feature (1)..( 10): Matrix.004 file - promoters50/3597175
aaataaatct

SEQ ID NO: 72143 - DNA, 11 bp, Unknown
  misc_feature (1)..( 11): Matrix.004 file - promoters50/3597175
gtaaaattgat

SEQ ID NO: 72144 - DNA, 11 bp, Unknown
  misc_feature (1)..( 11): Matrix.004 file - promoters50/3598435
ttaataaaata

SEQ ID NO: 72145 - DNA, 8 bp, Unknown
  misc_feature (1)..( 8): Matrix.004 file - promoters50/3598435
cttgctga

SEQ ID NO: 72146 - DNA, 12 bp, Unknown
  misc_feature (1)..( 12): Matrix.004 file - promoters50/3598610
tctttgcttgtg

SEQ ID NO: 72147 - DNA, 8 bp, Unknown
  misc_feature (1)..( 8): Matrix.004 file - promoters50/3600084
attggatt

SEQ ID NO: 72148 - DNA, 7 bp, Unknown
  misc_feature (1)..( 7): Matrix.004 file - promoters50/3600084
tccaaaa

SEQ ID NO: 72149 - DNA, 7 bp, Unknown
  misc_feature (1)..( 7): Matrix.004 file - promoters50/3611292
ttaaaaa

SEQ ID NO: 72150 - DNA, 10 bp, Unknown
  misc_feature (1)..( 10): Matrix.004 file - promoters50/3611292
taactaaaat

SEQ ID NO: 72151 - DNA, 10 bp, Unknown
  misc_feature (1)..( 10): Matrix.004 file - promoters50/3611292
ataaaattaa

SEQ ID NO: 72152 - DNA, 11 bp, Unknown
  misc_feature (1)..( 11): Matrix.004 file - promoters50/3629913
taaaaaaatta

SEQ ID NO: 72153 - DNA, 8 bp, Unknown
  misc_feature (1)..( 8): Matrix.004 file - promoters50/3629913
tactgaat

SEQ ID NO: 72154 - DNA, 7 bp, Unknown
  misc_feature (1)..( 7): Matrix.004 file - promoters50/3631200
caaatgt

SEQ ID NO: 72155 - DNA, 11 bp, Unknown
  misc_feature (1)..( 11): Matrix.004 file - promoters50/3631200
agaatatgata

SEQ ID NO: 72156 - DNA, 8 bp, Unknown
  misc_feature (1)..( 8): Matrix.004 file - promoters50/3631200
aagctata

SEQ ID NO: 72157 - DNA, 9 bp, Unknown
  misc_feature (1)..( 9): Matrix.004 file - promoters50/3659211
cttagattg

SEQ ID NO: 72158 - DNA, 8 bp, Unknown
  misc_feature (1)..( 8): Matrix.004 file - promoters50/4254292
ataaatta

SEQ ID NO: 72159 - DNA, 7 bp, Unknown
  misc_feature (1)..( 7): Matrix.004 file - promoters50/4254292
attaatt

SEQ ID NO: 72160 - DNA, 8 bp, Unknown
  misc_feature (1)..( 8): Matrix.004 file - promoters50/4254292
actttaca

SEQ ID NO: 72161 - DNA, 8 bp, Unknown
  misc_feature (1)..( 8): Matrix.004 file - promoters50/4254299
ctaaaaaa

SEQ ID NO: 72162 - DNA, 11 bp, Unknown
  misc_feature (1)..( 11): Matrix.004 file - promoters50/4254299
atttttctttc

SEQ ID NO: 72163 - DNA, 10 bp, Unknown
  misc_feature (1)..( 10): Matrix.004 file - promoters50/4254299
ttaatttaac

SEQ ID NO: 72164 - DNA, 11 bp, Unknown
  misc_feature (1)..( 11): Matrix.004 file - promoters50/4254299
ataatttaatt

SEQ ID NO: 72165 - DNA, 13 bp, Unknown
  misc_feature (1)..( 13): Matrix.004 file - promoters50/4254307
aaaaatttaacct

SEQ ID NO: 72166 - DNA, 9 bp, Unknown
  misc_feature (1)..( 9): Matrix.004 file - promoters50/4254307
tgattcttt

SEQ ID NO: 72167 - DNA, 8 bp, Unknown
  misc_feature (1)..( 8): Matrix.004 file - promoters50/4254426
ttgatttt

SEQ ID NO: 72168 - DNA, 9 bp, Unknown
  misc_feature (1)..( 9): Matrix.004 file - promoters50/4254505
tccttataa

SEQ ID NO: 72169 - DNA, 11 bp, Unknown
  misc_feature (1)..( 11): Matrix.004 file - promoters50/4254505
tcactctaaac

SEQ ID NO: 72170 - DNA, 7 bp, Unknown
  misc_feature (1)..( 7): Matrix.004 file - promoters50/4254505
acagttt

SEQ ID NO: 72171 - DNA, 9 bp, Unknown
  misc_feature (1)..( 9): Matrix.004 file - promoters50/4254505
atcaaaaaa

SEQ ID NO: 72172 - DNA, 8 bp, Unknown
  misc_feature (1)..( 8): Matrix.004 file - promoters50/4254505
agtgtttc

SEQ ID NO: 72173 - DNA, 8 bp, Unknown
  misc_feature (1)..( 8): Matrix.004 file - promoters50/4254505
aaaatatt

SEQ ID NO: 72174 - DNA, 13 bp, Unknown
  misc_feature (1)..( 13): Matrix.004 file - promoters50/4262398
aaatttataattt

SEQ ID NO: 72175 - DNA, 9 bp, Unknown
  misc_feature (1)..( 9): Matrix.004 file - promoters50/4262420
cttttctcg

SEQ ID NO: 72176 - DNA, 7 bp, Unknown
  misc_feature (1)..( 7): Matrix.004 file - promoters50/4262420
aaaaaca

SEQ ID NO: 72177 - DNA, 10 bp, Unknown
  misc_feature (1)..( 10): Matrix.004 file - promoters50/4262420
cgagaaaaaa

SEQ ID NO: 72178 - DNA, 6 bp, Unknown
  misc_feature (1)..( 6): Matrix.004 file - promoters50/4262422
aatttt

SEQ ID NO: 72179 - DNA, 7 bp, Unknown
  misc_feature (1)..( 7): Matrix.004 file - promoters50/4262422
atgataa

SEQ ID NO: 72180 - DNA, 8 bp, Unknown
  misc_feature (1)..( 8): Matrix.004 file - promoters50/4262428
tgatttga

SEQ ID NO: 72181 - DNA, 10 bp, Unknown
  misc_feature (1)..( 10): Matrix.004 file - promoters50/4262428
attatgtcat

SEQ ID NO: 72182 - DNA, 12 bp, Unknown
  misc_feature (1)..( 12): Matrix.004 file - promoters50/4262428
taaaataaatat

SEQ ID NO: 72183 - DNA, 11 bp, Unknown
  misc_feature (1)..( 11): Matrix.004 file - promoters50/4262446
atgttaaataa

SEQ ID NO: 72184 - DNA, 12 bp, Unknown
  misc_feature (1)..( 12): Matrix.004 file - promoters50/4262446
ctacataaaaaa

SEQ ID NO: 72185 - DNA, 9 bp, Unknown
  misc_feature (1)..( 9): Matrix.004 file - promoters50/4262446
caaaaataa

SEQ ID NO: 72186 - DNA, 12 bp, Unknown
  misc_feature (1)..( 12): Matrix.004 file - promoters50/4262446
actatcaaatca

SEQ ID NO: 72187 - DNA, 14 bp, Unknown
  misc_feature (1)..( 14): Matrix.004 file - promoters50/4262480
aaattttgaaatta

SEQ ID NO: 72188 - DNA, 11 bp, Unknown
  misc_feature (1)..( 11): Matrix.004 file - promoters50/4262480
atggttgaact

SEQ ID NO: 72189 - DNA, 9 bp, Unknown
  misc_feature (1)..( 9): Matrix.004 file - promoters50/4262496
atggctgaa

SEQ ID NO: 72190 - DNA, 13 bp, Unknown
  misc_feature (1)..( 13): Matrix.004 file - promoters50/4262503
actaattaaagat

SEQ ID NO: 72191 - DNA, 8 bp, Unknown
  misc_feature (1)..( 8): Matrix.004 file - promoters50/4262503
aacacaaa

SEQ ID NO: 72192 - DNA, 9 bp, Unknown
  misc_feature (1)..( 9): Matrix.004 file - promoters50/4262562
acatttgtt

SEQ ID NO: 72193 - DNA, 15 bp, Unknown
  misc_feature (1)..( 15): Matrix.004 file - promoters50/4265060
ctaatttaacttttt

SEQ ID NO: 72194 - DNA, 9 bp, Unknown
  misc_feature (1)..( 9): Matrix.004 file - promoters50/4265060
agaagataa

SEQ ID NO: 72195 - DNA, 8 bp, Unknown
  misc_feature (1)..( 8): Matrix.004 file - promoters50/4265060
aatctctc

SEQ ID NO: 72196 - DNA, 7 bp, Unknown
  misc_feature (1)..( 7): Matrix.004 file - promoters50/4265060
agaaatg

SEQ ID NO: 72197 - DNA, 9 bp, Unknown
  misc_feature (1)..( 9): Matrix.004 file - promoters50/4265060
taaacatat

SEQ ID NO: 72198 - DNA, 9 bp, Unknown
  misc_feature (1)..( 9): Matrix.004 file - promoters50/4265699
tcagagaaa

SEQ ID NO: 72199 - DNA, 8 bp, Unknown
  misc_feature (1)..( 8): Matrix.004 file - promoters50/4265699
taaatcaa

SEQ ID NO: 72200 - DNA, 8 bp, Unknown
  misc_feature (1)..( 8): Matrix.004 file - promoters50/4266227
aaagaaaa

SEQ ID NO: 72201 - DNA, 8 bp, Unknown
  misc_feature (1)..( 8): Matrix.004 file - promoters50/4266608
ttggaaga

SEQ ID NO: 72202 - DNA, 8 bp, Unknown
  misc_feature (1)..( 8): Matrix.004 file - promoters50/4266608
aagtaaac

SEQ ID NO: 72203 - DNA, 10 bp, Unknown
  misc_feature (1)..( 10): Matrix.004 file - promoters50/4267125
agataaaaat

SEQ ID NO: 72204 - DNA, 15 bp, Unknown
  misc_feature (1)..( 15): Matrix.004 file - promoters50/4267125
gttttatttgtgtga

SEQ ID NO: 72205 - DNA, 12 bp, Unknown
  misc_feature (1)..( 12): Matrix.004 file - promoters50/4267125
aaagaacatcat

SEQ ID NO: 72206 - DNA, 18 bp, Unknown
  misc_feature (1)..( 18): Matrix.004 file - promoters50/4267125
tcaacaacattttgtttt

SEQ ID NO: 72207 - DNA, 10 bp, Unknown
  misc_feature (1)..( 10): Matrix.004 file - promoters50/4268705
ctttttgttt

SEQ ID NO: 72208 - DNA, 8 bp, Unknown
  misc_feature (1)..( 8): Matrix.004 file - promoters50/4268705
ttgaattt

SEQ ID NO: 72209 - DNA, 12 bp, Unknown
  misc_feature (1)..( 12): Matrix.004 file - promoters50/4270131
ataaatgggcta

SEQ ID NO: 72210 - DNA, 8 bp, Unknown
  misc_feature (1)..( 8): Matrix.004 file - promoters50/4270131
ttaataac

SEQ ID NO: 72211 - DNA, 11 bp, Unknown
  misc_feature (1)..( 11): Matrix.004 file - promoters50/4281568
tttgtttcttt

SEQ ID NO: 72212 - DNA, 8 bp, Unknown
  misc_feature (1)..( 8): Matrix.004 file - promoters50/4281576
taaaaaag

SEQ ID NO: 72213 - DNA, 10 bp, Unknown
  misc_feature (1)..( 10): Matrix.004 file - promoters50/4281645
taataaaaat

SEQ ID NO: 72214 - DNA, 8 bp, Unknown
  misc_feature (1)..( 8): Matrix.004 file - promoters50/4281659
aatatgat

SEQ ID NO: 72215 - DNA, 8 bp, Unknown
  misc_feature (1)..( 8): Matrix.004 file - promoters50/4281659
cttcatta

SEQ ID NO: 72216 - DNA, 8 bp, Unknown
  misc_feature (1)..( 8): Matrix.004 file - promoters50/4281676
aaatatgt

SEQ ID NO: 72217 - DNA, 8 bp, Unknown
  misc_feature (1)..( 8): Matrix.004 file - promoters50/4281690
attctttg

SEQ ID NO: 72218 - DNA, 11 bp, Unknown
  misc_feature (1)..( 11): Matrix.004 file - promoters50/4281690
aacaaacaaac

SEQ ID NO: 72219 - DNA, 13 bp, Unknown
  misc_feature (1)..( 13): Matrix.004 file - promoters50/4281690
taacaaaaaaatc

SEQ ID NO: 72220 - DNA, 12 bp, Unknown
  misc_feature (1)..( 12): Matrix.004 file - promoters50/4281690
agatttatttca

SEQ ID NO: 72221 - DNA, 8 bp, Unknown
  misc_feature (1)..( 8): Matrix.004 file - promoters50/4281698
aaaaaaag

SEQ ID NO: 72222 - DNA, 8 bp, Unknown
  misc_feature (1)..( 8): Matrix.004 file - promoters50/4281698
aaaggctt

SEQ ID NO: 72223 - DNA, 12 bp, Unknown
  misc_feature (1)..( 12): Matrix.004 file - promoters50/4281711
tgtattcgattt

SEQ ID NO: 72224 - DNA, 16 bp, Unknown
  misc_feature (1)..( 16): Matrix.004 file - promoters50/4281711
ctagattaaaaaagta

SEQ ID NO: 72225 - DNA, 6 bp, Unknown
  misc_feature (1)..( 6): Matrix.004 file - promoters50/4281737
taataa

SEQ ID NO: 72226 - DNA, 10 bp, Unknown
  misc_feature (1)..( 10): Matrix.004 file - promoters50/4281744
atataaaaaa

SEQ ID NO: 72227 - DNA, 13 bp, Unknown
  misc_feature (1)..( 13): Matrix.004 file - promoters50/4281773
aatatgatttaac

SEQ ID NO: 72228 - DNA, 11 bp, Unknown
  misc_feature (1)..( 11): Matrix.004 file - promoters50/4281773
atacataggtt

SEQ ID NO: 72229 - DNA, 10 bp, Unknown
  misc_feature (1)..( 10): Matrix.004 file - promoters50/4281830
caagaaaaag

SEQ ID NO: 72230 - DNA, 11 bp, Unknown
  misc_feature (1)..( 11): Matrix.004 file - promoters50/4281830
caaacgtataa

SEQ ID NO: 72231 - DNA, 9 bp, Unknown
  misc_feature (1)..( 9): Matrix.004 file - promoters50/4281845
aaatatata

SEQ ID NO: 72232 - DNA, 8 bp, Unknown
  misc_feature (1)..( 8): Matrix.004 file - promoters50/4281876
taaaaaat

SEQ ID NO: 72233 - DNA, 7 bp, Unknown
  misc_feature (1)..( 7): Matrix.004 file - promoters50/4281876
agtattc

SEQ ID NO: 72234 - DNA, 5 bp, Unknown
  misc_feature (1)..( 5): Matrix.004 file - promoters50/4281880
ttttg

SEQ ID NO: 72235 - DNA, 8 bp, Unknown
  misc_feature (1)..( 8): Matrix.004 file - promoters50/4281880
tattagat

SEQ ID NO: 72236 - DNA, 11 bp, Unknown
  misc_feature (1)..( 11): Matrix.004 file - promoters50/4281896
aatagtaaaat

SEQ ID NO: 72237 - DNA, 8 bp, Unknown
  misc_feature (1)..( 8): Matrix.004 file - promoters50/4281925
tcgatttt

SEQ ID NO: 72238 - DNA, 7 bp, Unknown
  misc_feature (1)..( 7): Matrix.004 file - promoters50/4281925
taaaaat

SEQ ID NO: 72239 - DNA, 13 bp, Unknown
  misc_feature (1)..( 13): Matrix.004 file - promoters50/4281925
atgaattaaaaat

SEQ ID NO: 72240 - DNA, 8 bp, Unknown
  misc_feature (1)..( 8): Matrix.004 file - promoters50/4281961
taaattat

SEQ ID NO: 72241 - DNA, 9 bp, Unknown
  misc_feature (1)..( 9): Matrix.004 file - promoters50/4281994
aaagattga

SEQ ID NO: 72242 - DNA, 7 bp, Unknown
  misc_feature (1)..( 7): Matrix.004 file - promoters50/4281994
aatattt

SEQ ID NO: 72243 - DNA, 9 bp, Unknown
  misc_feature (1)..( 9): Matrix.004 file - promoters50/4281994
ataaaaatt

SEQ ID NO: 72244 - DNA, 9 bp, Unknown
  misc_feature (1)..( 9): Matrix.004 file - promoters50/4281994
ataaaatta

SEQ ID NO: 72245 - DNA, 9 bp, Unknown
  misc_feature (1)..( 9): Matrix.004 file - promoters50/4281994
attttaatt

SEQ ID NO: 72246 - DNA, 9 bp, Unknown
  misc_feature (1)..( 9): Matrix.004 file - promoters50/4281997
tataaatta

SEQ ID NO: 72247 - DNA, 12 bp, Unknown
  misc_feature (1)..( 12): Matrix.004 file - promoters50/4281997
agtttagggaaa

SEQ ID NO: 72248 - DNA, 7 bp, Unknown
  misc_feature (1)..( 7): Matrix.004 file - promoters50/4281997
aattatc

SEQ ID NO: 72249 - DNA, 8 bp, Unknown
  misc_feature (1)..( 8): Matrix.004 file - promoters50/4281997
aatgtttt

SEQ ID NO: 72250 - DNA, 6 bp, Unknown
  misc_feature (1)..( 6): Matrix.004 file - promoters50/4281997
ttttac

SEQ ID NO: 72251 - DNA, 9 bp, Unknown
  misc_feature (1)..( 9): Matrix.004 file - promoters50/4281997
acattcaat

SEQ ID NO: 72252 - DNA, 6 bp, Unknown
  misc_feature (1)..( 6): Matrix.004 file - promoters50/4281997
cattat

SEQ ID NO: 72253 - DNA, 7 bp, Unknown
  misc_feature (1)..( 7): Matrix.004 file - promoters50/4282012
acgcaaa

SEQ ID NO: 72254 - DNA, 7 bp, Unknown
  misc_feature (1)..( 7): Matrix.004 file - promoters50/4282059
aaattat

SEQ ID NO: 72255 - DNA, 9 bp, Unknown
  misc_feature (1)..( 9): Matrix.004 file - promoters50/4282066
aaaaacttt

SEQ ID NO: 72256 - DNA, 8 bp, Unknown
  misc_feature (1)..( 8): Matrix.004 file - promoters50/4282066
gataaaga

SEQ ID NO: 72257 - DNA, 8 bp, Unknown
  misc_feature (1)..( 8): Matrix.004 file - promoters50/4282066
gaagttga

SEQ ID NO: 72258 - DNA, 10 bp, Unknown
  misc_feature (1)..( 10): Matrix.004 file - promoters50/4282066
tgaagttcac

SEQ ID NO: 72259 - DNA, 10 bp, Unknown
  misc_feature (1)..( 10): Matrix.004 file - promoters50/4282066
gagtgttttt

SEQ ID NO: 72260 - DNA, 8 bp, Unknown
  misc_feature (1)..( 8): Matrix.004 file - promoters50/4282066
tggatcgg

SEQ ID NO: 72261 - DNA, 7 bp, Unknown
  misc_feature (1)..( 7): Matrix.004 file - promoters50/4282072
ggtttga

SEQ ID NO: 72262 - DNA, 7 bp, Unknown
  misc_feature (1)..( 7): Matrix.004 file - promoters50/4282072
caaaaac

SEQ ID NO: 72263 - DNA, 9 bp, Unknown
  misc_feature (1)..( 9): Matrix.004 file - promoters50/4282072
ttcaaaaac

SEQ ID NO: 72264 - DNA, 9 bp, Unknown
  misc_feature (1)..( 9): Matrix.004 file - promoters50/4282086
atttgtttt

SEQ ID NO: 72265 - DNA, 10 bp, Unknown
  misc_feature (1)..( 10): Matrix.004 file - promoters50/4282126
aatctgcttt

SEQ ID NO: 72266 - DNA, 11 bp, Unknown
  misc_feature (1)..( 11): Matrix.004 file - promoters50/4282126
aatttatagtt

SEQ ID NO: 72267 - DNA, 8 bp, Unknown
  misc_feature (1)..( 8): Matrix.004 file - promoters50/4282145
tttgtaat

SEQ ID NO: 72268 - DNA, 8 bp, Unknown
  misc_feature (1)..( 8): Matrix.004 file - promoters50/4282145
ttgacaaa

SEQ ID NO: 72269 - DNA, 8 bp, Unknown
  misc_feature (1)..( 8): Matrix.004 file - promoters50/4282145
tataataa

SEQ ID NO: 72270 - DNA, 11 bp, Unknown
  misc_feature (1)..( 11): Matrix.004 file - promoters50/4282145
aataaaagaaa

SEQ ID NO: 72271 - DNA, 10 bp, Unknown
  misc_feature (1)..( 10): Matrix.004 file - promoters50/4282145
gaaaatgatt

SEQ ID NO: 72272 - DNA, 8 bp, Unknown
  misc_feature (1)..( 8): Matrix.004 file - promoters50/4282182
aaattaca

SEQ ID NO: 72273 - DNA, 9 bp, Unknown
  misc_feature (1)..( 9): Matrix.004 file - promoters50/4282182
tgaataaaa

SEQ ID NO: 72274 - DNA, 9 bp, Unknown
  misc_feature (1)..( 9): Matrix.004 file - promoters50/4282182
agaaaatta

SEQ ID NO: 72275 - DNA, 10 bp, Unknown
  misc_feature (1)..( 10): Matrix.004 file - promoters50/4282186
cctttatttt

SEQ ID NO: 72276 - DNA, 10 bp, Unknown
  misc_feature (1)..( 10): Matrix.004 file - promoters50/4282186
tttttgttta

SEQ ID NO: 72277 - DNA, 13 bp, Unknown
  misc_feature (1)..( 13): Matrix.004 file - promoters50/4282198
ctaaaatttataa

SEQ ID NO: 72278 - DNA, 12 bp, Unknown
  misc_feature (1)..( 12): Matrix.004 file - promoters50/4282198
aaataaaacgaa

SEQ ID NO: 72279 - DNA, 14 bp, Unknown
  misc_feature (1)..( 14): Matrix.004 file - promoters50/4282202
ccaataatacaaca

SEQ ID NO: 72280 - DNA, 15 bp, Unknown
  misc_feature (1)..( 15): Matrix.004 file - promoters50/4282202
aaaaagaaaacaata

SEQ ID NO: 72281 - DNA, 8 bp, Unknown
  misc_feature (1)..( 8): Matrix.004 file - promoters50/4282251
caaaacaa

SEQ ID NO: 72282 - DNA, 10 bp, Unknown
  misc_feature (1)..( 10): Matrix.004 file - promoters50/4282251
gttcaaaaaa

SEQ ID NO: 72283 - DNA, 8 bp, Unknown
  misc_feature (1)..( 8): Matrix.004 file - promoters50/4282251
caaataag

SEQ ID NO: 72284 - DNA, 8 bp, Unknown
  misc_feature (1)..( 8): Matrix.004 file - promoters50/4282251
tgaatgat

SEQ ID NO: 72285 - DNA, 12 bp, Unknown
  misc_feature (1)..( 12): Matrix.004 file - promoters50/4282292
gtagatttgtat

SEQ ID NO: 72286 - DNA, 7 bp, Unknown
  misc_feature (1)..( 7): Matrix.004 file - promoters50/4282292
aaattaa

SEQ ID NO: 72287 - DNA, 7 bp, Unknown
  misc_feature (1)..( 7): Matrix.004 file - promoters50/4282308
aaagcaa

SEQ ID NO: 72288 - DNA, 8 bp, Unknown
  misc_feature (1)..( 8): Matrix.004 file - promoters50/4282308
gttacaat

SEQ ID NO: 72289 - DNA, 10 bp, Unknown
  misc_feature (1)..( 10): Matrix.004 file - promoters50/4282308
tgattattac

SEQ ID NO: 72290 - DNA, 13 bp, Unknown
  misc_feature (1)..( 13): Matrix.004 file - promoters50/4282308
aataagttatata

SEQ ID NO: 72291 - DNA, 6 bp, Unknown
  misc_feature (1)..( 6): Matrix.004 file - promoters50/4282316
tcaaaa

SEQ ID NO: 72292 - DNA, 18 bp, Unknown
  misc_feature (1)..( 18): Matrix.004 file - promoters50/4282316
aaaagtttagggaaaatg

SEQ ID NO: 72293 - DNA, 7 bp, Unknown
  misc_feature (1)..( 7): Matrix.004 file - promoters50/4282316
aattatc

SEQ ID NO: 72294 - DNA, 7 bp, Unknown
  misc_feature (1)..( 7): Matrix.004 file - promoters50/4282316
gaaaatg

SEQ ID NO: 72295 - DNA, 8 bp, Unknown
  misc_feature (1)..( 8): Matrix.004 file - promoters50/4282316
aatgtttt

SEQ ID NO: 72296 - DNA, 6 bp, Unknown
  misc_feature (1)..( 6): Matrix.004 file - promoters50/4282316
ttttac

SEQ ID NO: 72297 - DNA, 9 bp, Unknown
  misc_feature (1)..( 9): Matrix.004 file - promoters50/4282316
acattcaat

SEQ ID NO: 72298 - DNA, 6 bp, Unknown
  misc_feature (1)..( 6): Matrix.004 file - promoters50/4282316
cattat

SEQ ID NO: 72299 - DNA, 7 bp, Unknown
  misc_feature (1)..( 7): Matrix.004 file - promoters50/4282320
acgcaaa

SEQ ID NO: 72300 - DNA, 7 bp, Unknown
  misc_feature (1)..( 7): Matrix.004 file - promoters50/4282324
ttgaagt

SEQ ID NO: 72301 - DNA, 10 bp, Unknown
  misc_feature (1)..( 10): Matrix.004 file - promoters50/4282324
aatttaaatt

SEQ ID NO: 72302 - DNA, 17 bp, Unknown
  misc_feature (1)..( 17): Matrix.004 file - promoters50/4282324
aaatttcttgaactaaa

SEQ ID NO: 72303 - DNA, 15 bp, Unknown
  misc_feature (1)..( 15): Matrix.004 file - promoters50/4282324
ttaattttaagaatt

SEQ ID NO: 72304 - DNA, 11 bp, Unknown
  misc_feature (1)..( 11): Matrix.004 file - promoters50/4282327
ttaattataag

SEQ ID NO: 72305 - DNA, 7 bp, Unknown
  misc_feature (1)..( 7): Matrix.004 file - promoters50/4282327
ttaaaac

SEQ ID NO: 72306 - DNA, 9 bp, Unknown
  misc_feature (1)..( 9): Matrix.004 file - promoters50/4282327
ttaattagt

SEQ ID NO: 72307 - DNA, 8 bp, Unknown
  misc_feature (1)..( 8): Matrix.004 file - promoters50/4282327
gaaaagaa

SEQ ID NO: 72308 - DNA, 9 bp, Unknown
  misc_feature (1)..( 9): Matrix.004 file - promoters50/4282329
cttaattag

SEQ ID NO: 72309 - DNA, 12 bp, Unknown
  misc_feature (1)..( 12): Matrix.004 file - promoters50/4282406
aaccttgctgac

SEQ ID NO: 72310 - DNA, 7 bp, Unknown
  misc_feature (1)..( 7): Matrix.004 file - promoters50/4282406
aaaaaaa

SEQ ID NO: 72311 - DNA, 10 bp, Unknown
  misc_feature (1)..( 10): Matrix.004 file - promoters50/4282406
ataatgtaat

SEQ ID NO: 72312 - DNA, 13 bp, Unknown
  misc_feature (1)..( 13): Matrix.004 file - promoters50/4282406
caaaaacaatttt

SEQ ID NO: 72313 - DNA, 8 bp, Unknown
  misc_feature (1)..( 8): Matrix.004 file - promoters50/4282414
tctaaact

SEQ ID NO: 72314 - DNA, 6 bp, Unknown
  misc_feature (1)..( 6): Matrix.004 file - promoters50/4282414
atttct

SEQ ID NO: 72315 - DNA, 5 bp, Unknown
  misc_feature (1)..( 5): Matrix.004 file - promoters50/4282414
caaac

SEQ ID NO: 72316 - DNA, 10 bp, Unknown
  misc_feature (1)..( 10): Matrix.004 file - promoters50/4282414
acaaaatttt

SEQ ID NO: 72317 - DNA, 10 bp, Unknown
  misc_feature (1)..( 10): Matrix.004 file - promoters50/4282418
taaacaaaat

SEQ ID NO: 72318 - DNA, 10 bp, Unknown
  misc_feature (1)..( 10): Matrix.004 file - promoters50/4282418
taaaatataa

SEQ ID NO: 72319 - DNA, 10 bp, Unknown
  misc_feature (1)..( 10): Matrix.004 file - promoters50/4282418
gaaaaaaata

SEQ ID NO: 72320 - DNA, 14 bp, Unknown
  misc_feature (1)..( 14): Matrix.004 file - promoters50/4282421
ttaagaaaattaat

SEQ ID NO: 72321 - DNA, 8 bp, Unknown
  misc_feature (1)..( 8): Matrix.004 file - promoters50/4282421
ttttcatt

SEQ ID NO: 72322 - DNA, 6 bp, Unknown
  misc_feature (1)..( 6): Matrix.004 file - promoters50/4282425
atttgt

SEQ ID NO: 72323 - DNA, 8 bp, Unknown
  misc_feature (1)..( 8): Matrix.004 file - promoters50/4282425
ttaaatta

SEQ ID NO: 72324 - DNA, 8 bp, Unknown
  misc_feature (1)..( 8): Matrix.004 file - promoters50/4282425
atttataa

SEQ ID NO: 72325 - DNA, 13 bp, Unknown
  misc_feature (1)..( 13): Matrix.004 file - promoters50/4282425
gtgacatcaaaaa

SEQ ID NO: 72326 - DNA, 9 bp, Unknown
  misc_feature (1)..( 9): Matrix.004 file - promoters50/4282425
atatataat

SEQ ID NO: 72327 - DNA, 8 bp, Unknown
  misc_feature (1)..( 8): Matrix.004 file - promoters50/4282425
tattaata

SEQ ID NO: 72328 - DNA, 8 bp, Unknown
  misc_feature (1)..( 8): Matrix.004 file - promoters50/4282425
atataaaa

SEQ ID NO: 72329 - DNA, 8 bp, Unknown
  misc_feature (1)..( 8): Matrix.004 file - promoters50/4282428
atcaataa

SEQ ID NO: 72330 - DNA, 8 bp, Unknown
  misc_feature (1)..( 8): Matrix.004 file - promoters50/4282436
attgatgt

SEQ ID NO: 72331 - DNA, 31 bp, Unknown
  misc_feature (1)..( 31): Matrix.004 file - promoters50/4282436
tacgtgtcaatttataattggctattgcttc

SEQ ID NO: 72332 - DNA, 15 bp, Unknown
  misc_feature (1)..( 15): Matrix.004 file - promoters50/4282436
cgccttagctttctc

SEQ ID NO: 72333 - DNA, 22 bp, Unknown
  misc_feature (1)..( 22): Matrix.004 file - promoters50/4282436
gaccgagtcgtcctcgtctttt

SEQ ID NO: 72334 - DNA, 19 bp, Unknown
  misc_feature (1)..( 19): Matrix.004 file - promoters50/4282477
ttcttcttctataaatcaa

SEQ ID NO: 72335 - DNA, 13 bp, Unknown
  misc_feature (1)..( 13): Matrix.004 file - promoters50/4282477
atatttaacaaaa

SEQ ID NO: 72336 - DNA, 10 bp, Unknown
  misc_feature (1)..( 10): Matrix.004 file - promoters50/4282477
taaaatttga

SEQ ID NO: 72337 - DNA, 8 bp, Unknown
  misc_feature (1)..( 8): Matrix.004 file - promoters50/4282477
ataaaatt

SEQ ID NO: 72338 - DNA, 11 bp, Unknown
  misc_feature (1)..( 11): Matrix.004 file - promoters50/4282477
aataaatcgaa

SEQ ID NO: 72339 - DNA, 9 bp, Unknown
  misc_feature (1)..( 9): Matrix.004 file - promoters50/4282487
cataaattt

SEQ ID NO: 72340 - DNA, 11 bp, Unknown
  misc_feature (1)..( 11): Matrix.004 file - promoters50/4282487
tcttttgattt

SEQ ID NO: 72341 - DNA, 9 bp, Unknown
  misc_feature (1)..( 9): Matrix.004 file - promoters50/4282487
ttttagttt

SEQ ID NO: 72342 - DNA, 7 bp, Unknown
  misc_feature (1)..( 7): Matrix.004 file - promoters50/4282487
aatattt

SEQ ID NO: 72343 - DNA, 8 bp, Unknown
  misc_feature (1)..( 8): Matrix.004 file - promoters50/4282487
taataaat

SEQ ID NO: 72344 - DNA, 10 bp, Unknown
  misc_feature (1)..( 10): Matrix.004 file - promoters50/4282487
ttttgatttg

SEQ ID NO: 72345 - DNA, 12 bp, Unknown
  misc_feature (1)..( 12): Matrix.004 file - promoters50/4282503
aacttttaagta

SEQ ID NO: 72346 - DNA, 10 bp, Unknown
  misc_feature (1)..( 10): Matrix.004 file - promoters50/4282503
ttttaataac

SEQ ID NO: 72347 - DNA, 11 bp, Unknown
  misc_feature (1)..( 11): Matrix.004 file - promoters50/4282503
tttattaaatg

SEQ ID NO: 72348 - DNA, 7 bp, Unknown
  misc_feature (1)..( 7): Matrix.004 file - promoters50/4282506
taaaatc

SEQ ID NO: 72349 - DNA, 10 bp, Unknown
  misc_feature (1)..( 10): Matrix.004 file - promoters50/4282510
caataaccaa

SEQ ID NO: 72350 - DNA, 10 bp, Unknown
  misc_feature (1)..( 10): Matrix.004 file - promoters50/4282510
aataaattaa

SEQ ID NO: 72351 - DNA, 7 bp, Unknown
  misc_feature (1)..( 7): Matrix.004 file - promoters50/4282560
aaaaaca

SEQ ID NO: 72352 - DNA, 9 bp, Unknown
  misc_feature (1)..( 9): Matrix.004 file - promoters50/4282560
tataaacaa

SEQ ID NO: 72353 - DNA, 9 bp, Unknown
  misc_feature (1)..( 9): Matrix.004 file - promoters50/4282560
atttcttac

SEQ ID NO: 72354 - DNA, 9 bp, Unknown
  misc_feature (1)..( 9): Matrix.004 file - promoters50/4282560
tttacaaaa

SEQ ID NO: 72355 - DNA, 9 bp, Unknown
  misc_feature (1)..( 9): Matrix.004 file - promoters50/4282560
agcttatta

SEQ ID NO: 72356 - DNA, 11 bp, Unknown
  misc_feature (1)..( 11): Matrix.004 file - promoters50/4282580
agtaaatttga

SEQ ID NO: 72357 - DNA, 9 bp, Unknown
  misc_feature (1)..( 9): Matrix.004 file - promoters50/4282580
aaacaaaaa

SEQ ID NO: 72358 - DNA, 9 bp, Unknown
  misc_feature (1)..( 9): Matrix.004 file - promoters50/4282580
tcaattttg

SEQ ID NO: 72359 - DNA, 14 bp, Unknown
  misc_feature (1)..( 14): Matrix.004 file - promoters50/4282588
atgataataatttt

SEQ ID NO: 72360 - DNA, 8 bp, Unknown
  misc_feature (1)..( 8): Matrix.004 file - promoters50/4282588
tttaaact

SEQ ID NO: 72361 - DNA, 7 bp, Unknown
  misc_feature (1)..( 7): Matrix.004 file - promoters50/4282588
aataata

SEQ ID NO: 72362 - DNA, 11 bp, Unknown
  misc_feature (1)..( 11): Matrix.004 file - promoters50/4282588
caataataaag

SEQ ID NO: 72363 - DNA, 11 bp, Unknown
  misc_feature (1)..( 11): Matrix.004 file - promoters50/4282588
aaaaaatataa

SEQ ID NO: 72364 - DNA, 10 bp, Unknown
  misc_feature (1)..( 10): Matrix.004 file - promoters50/4282588
ttgatttttt

SEQ ID NO: 72365 - DNA, 9 bp, Unknown
  misc_feature (1)..( 9): Matrix.004 file - promoters50/4282588
ctatatata

SEQ ID NO: 72366 - DNA, 11 bp, Unknown
  misc_feature (1)..( 11): Matrix.004 file - promoters50/4282588
gaaatatctaa

SEQ ID NO: 72367 - DNA, 9 bp, Unknown
  misc_feature (1)..( 9): Matrix.004 file - promoters50/4282588
ttatttttt

SEQ ID NO: 72368 - DNA, 7 bp, Unknown
  misc_feature (1)..( 7): Matrix.004 file - promoters50/4282588
tttttaa

SEQ ID NO: 72369 - DNA, 8 bp, Unknown
  misc_feature (1)..( 8): Matrix.004 file - promoters50/4282588
agaaaaac

SEQ ID NO: 72370 - DNA, 10 bp, Unknown
  misc_feature (1)..( 10): Matrix.004 file - promoters50/4282588
ttcaaataaa

SEQ ID NO: 72371 - DNA, 8 bp, Unknown
  misc_feature (1)..( 8): Matrix.004 file - promoters50/4282588
ttttaaaa

SEQ ID NO: 72372 - DNA, 9 bp, Unknown
  misc_feature (1)..( 9): Matrix.004 file - promoters50/4282588
attgtcaaa

SEQ ID NO: 72373 - DNA, 7 bp, Unknown
  misc_feature (1)..( 7): Matrix.004 file - promoters50/4282611
aaaaatc

SEQ ID NO: 72374 - DNA, 9 bp, Unknown
  misc_feature (1)..( 9): Matrix.004 file - promoters50/4282614
ttttggttc

SEQ ID NO: 72375 - DNA, 13 bp, Unknown
  misc_feature (1)..( 13): Matrix.004 file - promoters50/4282614
catataatttcat

SEQ ID NO: 72376 - DNA, 13 bp, Unknown
  misc_feature (1)..( 13): Matrix.004 file - promoters50/4282614
ctaataaatatta

SEQ ID NO: 72377 - DNA, 14 bp, Unknown
  misc_feature (1)..( 14): Matrix.004 file - promoters50/4282614
aaaatattttatat

SEQ ID NO: 72378 - DNA, 12 bp, Unknown
  misc_feature (1)..( 12): Matrix.004 file - promoters50/4282626
aaatatatttta

SEQ ID NO: 72379 - DNA, 7 bp, Unknown
  misc_feature (1)..( 7): Matrix.004 file - promoters50/4282626
aaatttg

SEQ ID NO: 72380 - DNA, 7 bp, Unknown
  misc_feature (1)..( 7): Matrix.004 file - promoters50/4282637
ataaatt

SEQ ID NO: 72381 - DNA, 8 bp, Unknown
  misc_feature (1)..( 8): Matrix.004 file - promoters50/4282647
tttgagag

SEQ ID NO: 72382 - DNA, 9 bp, Unknown
  misc_feature (1)..( 9): Matrix.004 file - promoters50/4282647
tatatataa

SEQ ID NO: 72383 - DNA, 10 bp, Unknown
  misc_feature (1)..( 10): Matrix.004 file - promoters50/4282647
aaggaattaa

SEQ ID NO: 72384 - DNA, 8 bp, Unknown
  misc_feature (1)..( 8): Matrix.004 file - promoters50/4282651
tatataaa

SEQ ID NO: 72385 - DNA, 9 bp, Unknown
  misc_feature (1)..( 9): Matrix.004 file - promoters50/4282667
aaatagaaa

SEQ ID NO: 72386 - DNA, 8 bp, Unknown
  misc_feature (1)..( 8): Matrix.004 file - promoters50/4282681
attattta

SEQ ID NO: 72387 - DNA, 9 bp, Unknown
  misc_feature (1)..( 9): Matrix.004 file - promoters50/4282681
tttaatata

SEQ ID NO: 72388 - DNA, 14 bp, Unknown
  misc_feature (1)..( 14): Matrix.004 file - promoters50/4282681
ttaaaatattaaaa

SEQ ID NO: 72389 - DNA, 7 bp, Unknown
  misc_feature (1)..( 7): Matrix.004 file - promoters50/4282681
ataaatg

SEQ ID NO: 72390 - DNA, 7 bp, Unknown
  misc_feature (1)..( 7): Matrix.004 file - promoters50/4282681
aaaaaaa

SEQ ID NO: 72391 - DNA, 9 bp, Unknown
  misc_feature (1)..( 9): Matrix.004 file - promoters50/4282681
attttaaaa

SEQ ID NO: 72392 - DNA, 7 bp, Unknown
  misc_feature (1)..( 7): Matrix.004 file - promoters50/4282695
tcttata

SEQ ID NO: 72393 - DNA, 9 bp, Unknown
  misc_feature (1)..( 9): Matrix.004 file - promoters50/4282695
tatacttaa

SEQ ID NO: 72394 - DNA, 9 bp, Unknown
  misc_feature (1)..( 9): Matrix.004 file - promoters50/4282717
taacaaaac

SEQ ID NO: 72395 - DNA, 8 bp, Unknown
  misc_feature (1)..( 8): Matrix.004 file - promoters50/4282717
ctgaggct

SEQ ID NO: 72396 - DNA, 8 bp, Unknown
  misc_feature (1)..( 8): Matrix.004 file - promoters50/4282717
taaaatta

SEQ ID NO: 72397 - DNA, 12 bp, Unknown
  misc_feature (1)..( 12): Matrix.004 file - promoters50/4282717
cttaaaataaaa

SEQ ID NO: 72398 - DNA, 8 bp, Unknown
  misc_feature (1)..( 8): Matrix.004 file - promoters50/4282717
caaattga

SEQ ID NO: 72399 - DNA, 12 bp, Unknown
  misc_feature (1)..( 12): Matrix.004 file - promoters50/4282717
ttgataacattt

SEQ ID NO: 72400 - DNA, 10 bp, Unknown
  misc_feature (1)..( 10): Matrix.004 file - promoters50/4282717
ttacattttt

SEQ ID NO: 72401 - DNA, 9 bp, Unknown
  misc_feature (1)..( 9): Matrix.004 file - promoters50/4282744
aaaacattg

SEQ ID NO: 72402 - DNA, 8 bp, Unknown
  misc_feature (1)..( 8): Matrix.004 file - promoters50/4282748
aaacataa

SEQ ID NO: 72403 - DNA, 8 bp, Unknown
  misc_feature (1)..( 8): Matrix.004 file - promoters50/4282760
cataaatt

SEQ ID NO: 72404 - DNA, 9 bp, Unknown
  misc_feature (1)..( 9): Matrix.004 file - promoters50/4282760
taaaaaaaa

SEQ ID NO: 72405 - DNA, 9 bp, Unknown
  misc_feature (1)..( 9): Matrix.004 file - promoters50/4282760
taaaattga

SEQ ID NO: 72406 - DNA, 9 bp, Unknown
  misc_feature (1)..( 9): Matrix.004 file - promoters50/4282760
gttgaataa

SEQ ID NO: 72407 - DNA, 10 bp, Unknown
  misc_feature (1)..( 10): Matrix.004 file - promoters50/4282760
attttatcaa

SEQ ID NO: 72408 - DNA, 12 bp, Unknown
  misc_feature (1)..( 12): Matrix.004 file - promoters50/4282760
accaaaagtcaa

SEQ ID NO: 72409 - DNA, 7 bp, Unknown
  misc_feature (1)..( 7): Matrix.004 file - promoters50/4282776
gttttat

SEQ ID NO: 72410 - DNA, 9 bp, Unknown
  misc_feature (1)..( 9): Matrix.004 file - promoters50/4282776
gataaaaca

SEQ ID NO: 72411 - DNA, 8 bp, Unknown
  misc_feature (1)..( 8): Matrix.004 file - promoters50/4282776
attaaaaa

SEQ ID NO: 72412 - DNA, 6 bp, Unknown
  misc_feature (1)..( 6): Matrix.004 file - promoters50/4282776
aaaatc

SEQ ID NO: 72413 - DNA, 8 bp, Unknown
  misc_feature (1)..( 8): Matrix.004 file - promoters50/4282776
actacttc

SEQ ID NO: 72414 - DNA, 7 bp, Unknown
  misc_feature (1)..( 7): Matrix.004 file - promoters50/4282776
ataaaat

SEQ ID NO: 72415 - DNA, 9 bp, Unknown
  misc_feature (1)..( 9): Matrix.004 file - promoters50/4282776
aaagtagaa

SEQ ID NO: 72416 - DNA, 9 bp, Unknown
  misc_feature (1)..( 9): Matrix.004 file - promoters50/4282776
caattctct

SEQ ID NO: 72417 - DNA, 7 bp, Unknown
  misc_feature (1)..( 7): Matrix.004 file - promoters50/4282788
ttaggtc

SEQ ID NO: 72418 - DNA, 8 bp, Unknown
  misc_feature (1)..( 8): Matrix.004 file - promoters50/4282788
tttgattg

SEQ ID NO: 72419 - DNA, 12 bp, Unknown
  misc_feature (1)..( 12): Matrix.004 file - promoters50/4282795
ctacttctctaa

SEQ ID NO: 72420 - DNA, 10 bp, Unknown
  misc_feature (1)..( 10): Matrix.004 file - promoters50/4282795
cttttgattt

SEQ ID NO: 72421 - DNA, 12 bp, Unknown
  misc_feature (1)..( 12): Matrix.004 file - promoters50/4282795
tttagtttattc

SEQ ID NO: 72422 - DNA, 7 bp, Unknown
  misc_feature (1)..( 7): Matrix.004 file - promoters50/4282795
aatattt

SEQ ID NO: 72423 - DNA, 13 bp, Unknown
  misc_feature (1)..( 13): Matrix.004 file - promoters50/4282795
aagttaatgatct

SEQ ID NO: 72424 - DNA, 9 bp, Unknown
  misc_feature (1)..( 9): Matrix.004 file - promoters50/4282795
ttatataaa

SEQ ID NO: 72425 - DNA, 12 bp, Unknown
  misc_feature (1)..( 12): Matrix.004 file - promoters50/4282877
aacttttaagta

SEQ ID NO: 72426 - DNA, 9 bp, Unknown
  misc_feature (1)..( 9): Matrix.004 file - promoters50/4282877
gaaaagaaa

SEQ ID NO: 72427 - DNA, 10 bp, Unknown
  misc_feature (1)..( 10): Matrix.004 file - promoters50/4282877
atttcttggg

SEQ ID NO: 72428 - DNA, 9 bp, Unknown
  misc_feature (1)..( 9): Matrix.004 file - promoters50/4282915
gagtatttt

SEQ ID NO: 72429 - DNA, 8 bp, Unknown
  misc_feature (1)..( 8): Matrix.004 file - promoters50/4282923
tatcacaa

SEQ ID NO: 72430 - DNA, 10 bp, Unknown
  misc_feature (1)..( 10): Matrix.004 file - promoters50/4282931
aacttataaa

SEQ ID NO: 72431 - DNA, 7 bp, Unknown
  misc_feature (1)..( 7): Matrix.004 file - promoters50/4282931
attaaaa

SEQ ID NO: 72432 - DNA, 8 bp, Unknown
  misc_feature (1)..( 8): Matrix.004 file - promoters50/4282931
aaaatcta

SEQ ID NO: 72433 - DNA, 10 bp, Unknown
  misc_feature (1)..( 10): Matrix.004 file - promoters50/4282931
aaattcaaaa

SEQ ID NO: 72434 - DNA, 9 bp, Unknown
  misc_feature (1)..( 9): Matrix.004 file - promoters50/4282931
aatcataaa

SEQ ID NO: 72435 - DNA, 10 bp, Unknown
  misc_feature (1)..( 10): Matrix.004 file - promoters50/4282931
caataattca

SEQ ID NO: 72436 - DNA, 6 bp, Unknown
  misc_feature (1)..( 6): Matrix.004 file - promoters50/4282939
aaaatc

SEQ ID NO: 72437 - DNA, 8 bp, Unknown
  misc_feature (1)..( 8): Matrix.004 file - promoters50/4282945
tttagaaa

SEQ ID NO: 72438 - DNA, 6 bp, Unknown
  misc_feature (1)..( 6): Matrix.004 file - promoters50/4282945
aatata

SEQ ID NO: 72439 - DNA, 9 bp, Unknown
  misc_feature (1)..( 9): Matrix.004 file - promoters50/4282945
aatgaacat

SEQ ID NO: 72440 - DNA, 8 bp, Unknown
  misc_feature (1)..( 8): Matrix.004 file - promoters50/4282945
tcatcttt

SEQ ID NO: 72441 - DNA, 8 bp, Unknown
  misc_feature (1)..( 8): Matrix.004 file - promoters50/4282957
atttcttt

SEQ ID NO: 72442 - DNA, 7 bp, Unknown
  misc_feature (1)..( 7): Matrix.004 file - promoters50/4282957
gttttaa

SEQ ID NO: 72443 - DNA, 10 bp, Unknown
  misc_feature (1)..( 10): Matrix.004 file - promoters50/4282957
ttactacctt

SEQ ID NO: 72444 - DNA, 12 bp, Unknown
  misc_feature (1)..( 12): Matrix.004 file - promoters50/4282957
aaagaaactatc

SEQ ID NO: 72445 - DNA, 7 bp, Unknown
  misc_feature (1)..( 7): Matrix.004 file - promoters50/4282995
aaaaaac

SEQ ID NO: 72446 - DNA, 10 bp, Unknown
  misc_feature (1)..( 10): Matrix.004 file - promoters50/4282995
gagcttgaga

SEQ ID NO: 72447 - DNA, 7 bp, Unknown
  misc_feature (1)..( 7): Matrix.004 file - promoters50/4282995
aattgaa

SEQ ID NO: 72448 - DNA, 8 bp, Unknown
  misc_feature (1)..( 8): Matrix.004 file - promoters50/4283003
gaaaatca

SEQ ID NO: 72449 - DNA, 11 bp, Unknown
  misc_feature (1)..( 11): Matrix.004 file - promoters50/4283003
aataatttata

SEQ ID NO: 72450 - DNA, 8 bp, Unknown
  misc_feature (1)..( 8): Matrix.004 file - promoters50/4283003
atctcata

SEQ ID NO: 72451 - DNA, 9 bp, Unknown
  misc_feature (1)..( 9): Matrix.004 file - promoters50/4283003
ctatatata

SEQ ID NO: 72452 - DNA, 8 bp, Unknown
  misc_feature (1)..( 8): Matrix.004 file - promoters50/4283003
agaaaaaa

SEQ ID NO: 72453 - DNA, 8 bp, Unknown
  misc_feature (1)..( 8): Matrix.004 file - promoters50/4283005
aaacattg

SEQ ID NO: 72454 - DNA, 11 bp, Unknown
  misc_feature (1)..( 11): Matrix.004 file - promoters50/4283041
tcaaaaaaaag

SEQ ID NO: 72455 - DNA, 11 bp, Unknown
  misc_feature (1)..( 11): Matrix.004 file - promoters50/4283057
aaaaaaagaaa

SEQ ID NO: 72456 - DNA, 7 bp, Unknown
  misc_feature (1)..( 7): Matrix.004 file - promoters50/4283057
gttataa

SEQ ID NO: 72457 - DNA, 14 bp, Unknown
  misc_feature (1)..( 14): Matrix.004 file - promoters50/4283191
ctttggaaaagaaa

SEQ ID NO: 72458 - DNA, 8 bp, Unknown
  misc_feature (1)..( 8): Matrix.004 file - promoters50/4283191
atttttga

SEQ ID NO: 72459 - DNA, 8 bp, Unknown
  misc_feature (1)..( 8): Matrix.004 file - promoters50/4283191
ttaggttg

SEQ ID NO: 72460 - DNA, 8 bp, Unknown
  misc_feature (1)..( 8): Matrix.004 file - promoters50/4283191
aaattaaa

SEQ ID NO: 72461 - DNA, 11 bp, Unknown
  misc_feature (1)..( 11): Matrix.004 file - promoters50/4283218
tcgatttgtga

SEQ ID NO: 72462 - DNA, 9 bp, Unknown
  misc_feature (1)..( 9): Matrix.004 file - promoters50/4283218
gtttcttaa

SEQ ID NO: 72463 - DNA, 16 bp, Unknown
  misc_feature (1)..( 16): Matrix.004 file - promoters50/4283218
tctatataaacgccgc

SEQ ID NO: 72464 - DNA, 7 bp, Unknown
  misc_feature (1)..( 7): Matrix.004 file - promoters50/4283222
aaaaatt

SEQ ID NO: 72465 - DNA, 9 bp, Unknown
  misc_feature (1)..( 9): Matrix.004 file - promoters50/4283222
aaaatattt

SEQ ID NO: 72466 - DNA, 13 bp, Unknown
  misc_feature (1)..( 13): Matrix.004 file - promoters50/4283222
atgaataatatat

SEQ ID NO: 72467 - DNA, 11 bp, Unknown
  misc_feature (1)..( 11): Matrix.004 file - promoters50/4283222
gaaactaattt

SEQ ID NO: 72468 - DNA, 10 bp, Unknown
  misc_feature (1)..( 10): Matrix.004 file - promoters50/4283222
aaatatttta

SEQ ID NO: 72469 - DNA, 8 bp, Unknown
  misc_feature (1)..( 8): Matrix.004 file - promoters50/4283230
aaatatat

SEQ ID NO: 72470 - DNA, 9 bp, Unknown
  misc_feature (1)..( 9): Matrix.004 file - promoters50/4283230
gataaaaat

SEQ ID NO: 72471 - DNA, 15 bp, Unknown
  misc_feature (1)..( 15): Matrix.004 file - promoters50/4283230
aagtaaaaaaatatt

SEQ ID NO: 72472 - DNA, 9 bp, Unknown
  misc_feature (1)..( 9): Matrix.004 file - promoters50/4283240
aaaaataat

SEQ ID NO: 72473 - DNA, 11 bp, Unknown
  misc_feature (1)..( 11): Matrix.004 file - promoters50/4283240
ataaattgata

SEQ ID NO: 72474 - DNA, 7 bp, Unknown
  misc_feature (1)..( 7): Matrix.004 file - promoters50/4283247
taaattt

SEQ ID NO: 72475 - DNA, 6 bp, Unknown
  misc_feature (1)..( 6): Matrix.004 file - promoters50/4283247
aattta

SEQ ID NO: 72476 - DNA, 8 bp, Unknown
  misc_feature (1)..( 8): Matrix.004 file - promoters50/4283278
gatttttg

SEQ ID NO: 72477 - DNA, 14 bp, Unknown
  misc_feature (1)..( 14): Matrix.004 file - promoters50/4283278
acataattttatat

SEQ ID NO: 72478 - DNA, 10 bp, Unknown
  misc_feature (1)..( 10): Matrix.004 file - promoters50/4283282
tttaaaatat

SEQ ID NO: 72479 - DNA, 10 bp, Unknown
  misc_feature (1)..( 10): Matrix.004 file - promoters50/4283293
ctttttaaag

SEQ ID NO: 72480 - DNA, 7 bp, Unknown
  misc_feature (1)..( 7): Matrix.004 file - promoters50/4283293
tatttaa

SEQ ID NO: 72481 - DNA, 9 bp, Unknown
  misc_feature (1)..( 9): Matrix.004 file - promoters50/4283297
aaaaagaac

SEQ ID NO: 72482 - DNA, 9 bp, Unknown
  misc_feature (1)..( 9): Matrix.004 file - promoters50/4283309
aaaaaattt

SEQ ID NO: 72483 - DNA, 12 bp, Unknown
  misc_feature (1)..( 12): Matrix.004 file - promoters50/4283309
aataaaaatata

SEQ ID NO: 72484 - DNA, 8 bp, Unknown
  misc_feature (1)..( 8): Matrix.004 file - promoters50/4283309
aaagcaaa

SEQ ID NO: 72485 - DNA, 7 bp, Unknown
  misc_feature (1)..( 7): Matrix.004 file - promoters50/4283315
atcaaat

SEQ ID NO: 72486 - DNA, 8 bp, Unknown
  misc_feature (1)..( 8): Matrix.004 file - promoters50/4283338
tcacattc

SEQ ID NO: 72487 - DNA, 11 bp, Unknown
  misc_feature (1)..( 11): Matrix.004 file - promoters50/4283347
tagtaaatgtt

SEQ ID NO: 72488 - DNA, 8 bp, Unknown
  misc_feature (1)..( 8): Matrix.004 file - promoters50/4283347
ataaaaat

SEQ ID NO: 72489 - DNA, 8 bp, Unknown
  misc_feature (1)..( 8): Matrix.004 file - promoters50/4283347
tactgtta

SEQ ID NO: 72490 - DNA, 9 bp, Unknown
  misc_feature (1)..( 9): Matrix.004 file - promoters50/4283355
aattcgtac

SEQ ID NO: 72491 - DNA, 8 bp, Unknown
  misc_feature (1)..( 8): Matrix.004 file - promoters50/4283358
aaaacaaa

SEQ ID NO: 72492 - DNA, 14 bp, Unknown
  misc_feature (1)..( 14): Matrix.004 file - promoters50/4283358
ttatattttttata

SEQ ID NO: 72493 - DNA, 11 bp, Unknown
  misc_feature (1)..( 11): Matrix.004 file - promoters50/4283378
ttatatttttt

SEQ ID NO: 72494 - DNA, 7 bp, Unknown
  misc_feature (1)..( 7): Matrix.004 file - promoters50/4283378
aatgtaa

SEQ ID NO: 72495 - DNA, 11 bp, Unknown
  misc_feature (1)..( 11): Matrix.004 file - promoters50/4283378
tttaatttcat

SEQ ID NO: 72496 - DNA, 9 bp, Unknown
  misc_feature (1)..( 9): Matrix.004 file - promoters50/4283378
ctatataaa

SEQ ID NO: 72497 - DNA, 15 bp, Unknown
  misc_feature (1)..( 15): Matrix.004 file - promoters50/4283378
ataactttatattaa

SEQ ID NO: 72498 - DNA, 11 bp, Unknown
  misc_feature (1)..( 11): Matrix.004 file - promoters50/4283378
attttataagt

SEQ ID NO: 72499 - DNA, 9 bp, Unknown
  misc_feature (1)..( 9): Matrix.004 file - promoters50/4283378
atataattt

SEQ ID NO: 72500 - DNA, 8 bp, Unknown
  misc_feature (1)..( 8): Matrix.004 file - promoters50/4283378
ttttgaaa

SEQ ID NO: 72501 - DNA, 9 bp, Unknown
  misc_feature (1)..( 9): Matrix.004 file - promoters50/4283378
aaattctaa

SEQ ID NO: 72502 - DNA, 12 bp, Unknown
  misc_feature (1)..( 12): Matrix.004 file - promoters50/4283378
aatgatttaata

SEQ ID NO: 72503 - DNA, 10 bp, Unknown
  misc_feature (1)..( 10): Matrix.004 file - promoters50/4283378
ttaatttttt

SEQ ID NO: 72504 - DNA, 8 bp, Unknown
  misc_feature (1)..( 8): Matrix.004 file - promoters50/4283378
tgaaaagt

SEQ ID NO: 72505 - DNA, 14 bp, Unknown
  misc_feature (1)..( 14): Matrix.004 file - promoters50/4283378
ataaattttaaaat

SEQ ID NO: 72506 - DNA, 14 bp, Unknown
  misc_feature (1)..( 14): Matrix.004 file - promoters50/4283378
gatataaaacctga

SEQ ID NO: 72507 - DNA, 9 bp, Unknown
  misc_feature (1)..( 9): Matrix.004 file - promoters50/4283390
gtataattt

SEQ ID NO: 72508 - DNA, 8 bp, Unknown
  misc_feature (1)..( 8): Matrix.004 file - promoters50/4283394
aataaatt

SEQ ID NO: 72509 - DNA, 9 bp, Unknown
  misc_feature (1)..( 9): Matrix.004 file - promoters50/4283394
tatgtcttt

SEQ ID NO: 72510 - DNA, 10 bp, Unknown
  misc_feature (1)..( 10): Matrix.004 file - promoters50/4283397
actgattttt

SEQ ID NO: 72511 - DNA, 8 bp, Unknown
  misc_feature (1)..( 8): Matrix.004 file - promoters50/4283397
attttaaa

SEQ ID NO: 72512 - DNA, 8 bp, Unknown
  misc_feature (1)..( 8): Matrix.004 file - promoters50/4283397
aatcaatt

SEQ ID NO: 72513 - DNA, 7 bp, Unknown
  misc_feature (1)..( 7): Matrix.004 file - promoters50/4283397
aaatttt

SEQ ID NO: 72514 - DNA, 9 bp, Unknown
  misc_feature (1)..( 9): Matrix.004 file - promoters50/4283397
aaaaaaaat

SEQ ID NO: 72515 - DNA, 10 bp, Unknown
  misc_feature (1)..( 10): Matrix.004 file - promoters50/4283397
aataaaaaaa

SEQ ID NO: 72516 - DNA, 7 bp, Unknown
  misc_feature (1)..( 7): Matrix.004 file - promoters50/4283397
aattttc

SEQ ID NO: 72517 - DNA, 10 bp, Unknown
  misc_feature (1)..( 10): Matrix.004 file - promoters50/4283397
attttcaaaa

SEQ ID NO: 72518 - DNA, 9 bp, Unknown
  misc_feature (1)..( 9): Matrix.004 file - promoters50/4283397
aacaaaaaa

SEQ ID NO: 72519 - DNA, 8 bp, Unknown
  misc_feature (1)..( 8): Matrix.004 file - promoters50/4283397
aaaaaaga

SEQ ID NO: 72520 - DNA, 10 bp, Unknown
  misc_feature (1)..( 10): Matrix.004 file - promoters50/4283422
aaaaaacaaa

SEQ ID NO: 72521 - DNA, 8 bp, Unknown
  misc_feature (1)..( 8): Matrix.004 file - promoters50/4283422
aatatttt

SEQ ID NO: 72522 - DNA, 10 bp, Unknown
  misc_feature (1)..( 10): Matrix.004 file - promoters50/4283422
aaactataga

SEQ ID NO: 72523 - DNA, 9 bp, Unknown
  misc_feature (1)..( 9): Matrix.004 file - promoters50/4283425
ataaatgat

SEQ ID NO: 72524 - DNA, 8 bp, Unknown
  misc_feature (1)..( 8): Matrix.004 file - promoters50/4283425
ccaaaaaa

SEQ ID NO: 72525 - DNA, 7 bp, Unknown
  misc_feature (1)..( 7): Matrix.004 file - promoters50/4283425
tatatat

SEQ ID NO: 72526 - DNA, 9 bp, Unknown
  misc_feature (1)..( 9): Matrix.004 file - promoters50/4283433
ggtctaaag

SEQ ID NO: 72527 - DNA, 8 bp, Unknown
  misc_feature (1)..( 8): Matrix.004 file - promoters50/4283433
cttcttaa

SEQ ID NO: 72528 - DNA, 12 bp, Unknown
  misc_feature (1)..( 12): Matrix.004 file - promoters50/4283441
attttgaagaac

SEQ ID NO: 72529 - DNA, 9 bp, Unknown
  misc_feature (1)..( 9): Matrix.004 file - promoters50/4283441
tcattatgt

SEQ ID NO: 72530 - DNA, 12 bp, Unknown
  misc_feature (1)..( 12): Matrix.004 file - promoters50/4283441
actttataaaat

SEQ ID NO: 72531 - DNA, 10 bp, Unknown
  misc_feature (1)..( 10): Matrix.004 file - promoters50/4283445
aattatttca

SEQ ID NO: 72532 - DNA, 8 bp, Unknown
  misc_feature (1)..( 8): Matrix.004 file - promoters50/4283453
ataatgtt

SEQ ID NO: 72533 - DNA, 9 bp, Unknown
  misc_feature (1)..( 9): Matrix.004 file - promoters50/4283453
catgttcta

SEQ ID NO: 72534 - DNA, 9 bp, Unknown
  misc_feature (1)..( 9): Matrix.004 file - promoters50/4283453
cgtcaaaaa

SEQ ID NO: 72535 - DNA, 9 bp, Unknown
  misc_feature (1)..( 9): Matrix.004 file - promoters50/4283476
atttccaaa

SEQ ID NO: 72536 - DNA, 10 bp, Unknown
  misc_feature (1)..( 10): Matrix.004 file - promoters50/4283482
gtttgaattt

SEQ ID NO: 72537 - DNA, 8 bp, Unknown
  misc_feature (1)..( 8): Matrix.004 file - promoters50/4283522
ttctcagt

SEQ ID NO: 72538 - DNA, 12 bp, Unknown
  misc_feature (1)..( 12): Matrix.004 file - promoters50/4283522
caaacattttac

SEQ ID NO: 72539 - DNA, 8 bp, Unknown
  misc_feature (1)..( 8): Matrix.004 file - promoters50/4283522
aatgaaaa

SEQ ID NO: 72540 - DNA, 9 bp, Unknown
  misc_feature (1)..( 9): Matrix.004 file - promoters50/4283522
cttttctat

SEQ ID NO: 72541 - DNA, 7 bp, Unknown
  misc_feature (1)..( 7): Matrix.004 file - promoters50/4283550
tttctat

SEQ ID NO: 72542 - DNA, 11 bp, Unknown
  misc_feature (1)..( 11): Matrix.004 file - promoters50/4283550
aatttatttat

SEQ ID NO: 72543 - DNA, 8 bp, Unknown
  misc_feature (1)..( 8): Matrix.004 file - promoters50/4283550
tatgtttt

SEQ ID NO: 72544 - DNA, 12 bp, Unknown
  misc_feature (1)..( 12): Matrix.004 file - promoters50/4283550
ttcggatatttt

SEQ ID NO: 72545 - DNA, 9 bp, Unknown
  misc_feature (1)..( 9): Matrix.004 file - promoters50/4283554
gataatttg

SEQ ID NO: 72546 - DNA, 9 bp, Unknown
  misc_feature (1)..( 9): Matrix.004 file - promoters50/4283554
cattttgta

SEQ ID NO: 72547 - DNA, 7 bp, Unknown
  misc_feature (1)..( 7): Matrix.004 file - promoters50/4283554
ttgtttt

SEQ ID NO: 72548 - DNA, 8 bp, Unknown
  misc_feature (1)..( 8): Matrix.004 file - promoters50/4283564
attattaa

SEQ ID NO: 72549 - DNA, 12 bp, Unknown
  misc_feature (1)..( 12): Matrix.004 file - promoters50/4283573
ccaaaacaaaac

SEQ ID NO: 72550 - DNA, 7 bp, Unknown
  misc_feature (1)..( 7): Matrix.004 file - promoters50/4283573
aaaaatc

SEQ ID NO: 72551 - DNA, 7 bp, Unknown
  misc_feature (1)..( 7): Matrix.004 file - promoters50/4283579
taaaaat

SEQ ID NO: 72552 - DNA, 11 bp, Unknown
  misc_feature (1)..( 11): Matrix.004 file - promoters50/4283591
caaaaatagaa

SEQ ID NO: 72553 - DNA, 9 bp, Unknown
  misc_feature (1)..( 9): Matrix.004 file - promoters50/4283591
caaatatat

SEQ ID NO: 72554 - DNA, 9 bp, Unknown
  misc_feature (1)..( 9): Matrix.004 file - promoters50/4283591
tttttattt

SEQ ID NO: 72555 - DNA, 9 bp, Unknown
  misc_feature (1)..( 9): Matrix.004 file - promoters50/4283591
gaaaaattt

SEQ ID NO: 72556 - DNA, 7 bp, Unknown
  misc_feature (1)..( 7): Matrix.004 file - promoters50/4283591
ttttaaa

SEQ ID NO: 72557 - DNA, 9 bp, Unknown
  misc_feature (1)..( 9): Matrix.004 file - promoters50/4283591
cataaacta

SEQ ID NO: 72558 - DNA, 8 bp, Unknown
  misc_feature (1)..( 8): Matrix.004 file - promoters50/4283591
ttaattta

SEQ ID NO: 72559 - DNA, 11 bp, Unknown
  misc_feature (1)..( 11): Matrix.004 file - promoters50/4283591
caaatatatat

SEQ ID NO: 72560 - DNA, 12 bp, Unknown
  misc_feature (1)..( 12): Matrix.004 file - promoters50/4283591
tttcaaatatat

SEQ ID NO: 72561 - DNA, 10 bp, Unknown
  misc_feature (1)..( 10): Matrix.004 file - promoters50/4283591
aaactatata

SEQ ID NO: 72562 - DNA, 10 bp, Unknown
  misc_feature (1)..( 10): Matrix.004 file - promoters50/4283591
aaactatata

SEQ ID NO: 72563 - DNA, 11 bp, Unknown
  misc_feature (1)..( 11): Matrix.004 file - promoters50/4283591
ccatatatata

SEQ ID NO: 72564 - DNA, 9 bp, Unknown
  misc_feature (1)..( 9): Matrix.004 file - promoters50/4283591
tacaaaacc

SEQ ID NO: 72565 - DNA, 7 bp, Unknown
  misc_feature (1)..( 7): Matrix.004 file - promoters50/4283591
gtttaaa

SEQ ID NO: 72566 - DNA, 8 bp, Unknown
  misc_feature (1)..( 8): Matrix.004 file - promoters50/4283591
tgtttttc

SEQ ID NO: 72567 - DNA, 8 bp, Unknown
  misc_feature (1)..( 8): Matrix.004 file - promoters50/4283607
aaaaatta

SEQ ID NO: 72568 - DNA, 8 bp, Unknown
  misc_feature (1)..( 8): Matrix.004 file - promoters50/4283614
ttcttgcc

SEQ ID NO: 72569 - DNA, 9 bp, Unknown
  misc_feature (1)..( 9): Matrix.004 file - promoters50/4283616
aaccctaaa

SEQ ID NO: 72570 - DNA, 9 bp, Unknown
  misc_feature (1)..( 9): Matrix.004 file - promoters50/4283616
agactacag

SEQ ID NO: 72571 - DNA, 9 bp, Unknown
  misc_feature (1)..( 9): Matrix.004 file - promoters50/4283616
gatgaagaa

SEQ ID NO: 72572 - DNA, 15 bp, Unknown
  misc_feature (1)..( 15): Matrix.004 file - promoters50/4283620
taaccagtaaacttt

SEQ ID NO: 72573 - DNA, 10 bp, Unknown
  misc_feature (1)..( 10): Matrix.004 file - promoters50/4283620
tggttattca

SEQ ID NO: 72574 - DNA, 8 bp, Unknown
  misc_feature (1)..( 8): Matrix.004 file - promoters50/4283620
ttcaacat

SEQ ID NO: 72575 - DNA, 10 bp, Unknown
  misc_feature (1)..( 10): Matrix.004 file - promoters50/4283620
aaataattga

SEQ ID NO: 72576 - DNA, 9 bp, Unknown
  misc_feature (1)..( 9): Matrix.004 file - promoters50/4283626
aattttggt

SEQ ID NO: 72577 - DNA, 8 bp, Unknown
  misc_feature (1)..( 8): Matrix.004 file - promoters50/4283626
tataattt

SEQ ID NO: 72578 - DNA, 10 bp, Unknown
  misc_feature (1)..( 10): Matrix.004 file - promoters50/4283632
tttaatttcc

SEQ ID NO: 72579 - DNA, 8 bp, Unknown
  misc_feature (1)..( 8): Matrix.004 file - promoters50/4304982
tttattat

SEQ ID NO: 72580 - DNA, 4 bp, Unknown
  misc_feature (1)..( 4): Matrix.004 file - promoters50/4304982
aaat

SEQ ID NO: 72581 - DNA, 8 bp, Unknown
  misc_feature (1)..( 8): Matrix.004 file - promoters50/4304982
caaattaa

SEQ ID NO: 72582 - DNA, 10 bp, Unknown
  misc_feature (1)..( 10): Matrix.004 file - promoters50/4305800
aatgataaat

SEQ ID NO: 72583 - DNA, 8 bp, Unknown
  misc_feature (1)..( 8): Matrix.004 file - promoters50/4305800
atattact

SEQ ID NO: 72584 - DNA, 9 bp, Unknown
  misc_feature (1)..( 9): Matrix.004 file - promoters50/4305800
agaatttgt

SEQ ID NO: 72585 - DNA, 8 bp, Unknown
  misc_feature (1)..( 8): Matrix.004 file - promoters50/4305800
tcctgctg

SEQ ID NO: 72586 - DNA, 9 bp, Unknown
  misc_feature (1)..( 9): Matrix.004 file - promoters50/4307922
tccacttgt

SEQ ID NO: 72587 - DNA, 10 bp, Unknown
  misc_feature (1)..( 10): Matrix.004 file - promoters50/4378608
atatagaaat

SEQ ID NO: 72588 - DNA, 11 bp, Unknown
  misc_feature (1)..( 11): Matrix.004 file - promoters50/4577400
aaatttacatc

SEQ ID NO: 72589 - DNA, 11 bp, Unknown
  misc_feature (1)..( 11): Matrix.004 file - promoters50/4577400
aaataattaag

SEQ ID NO: 72590 - DNA, 10 bp, Unknown
  misc_feature (1)..( 10): Matrix.004 file - promoters50/4607469
taataaaaat

SEQ ID NO: 72591 - DNA, 10 bp, Unknown
  misc_feature (1)..( 10): Matrix.004 file - promoters50/4607469
ctctctctct

SEQ ID NO: 72592 - DNA, 8 bp, Unknown
  misc_feature (1)..( 8): Matrix.004 file - promoters50/4607469
aaatcaaa

SEQ ID NO: 72593 - DNA, 8 bp, Unknown
  misc_feature (1)..( 8): Matrix.004 file - promoters50/4607671
aaatcaat

SEQ ID NO: 72594 - DNA, 8 bp, Unknown
  misc_feature (1)..( 8): Matrix.004 file - promoters50/4607671
ttatataa

SEQ ID NO: 72595 - DNA, 9 bp, Unknown
  misc_feature (1)..( 9): Matrix.004 file - promoters50/4607671
aagtttttc

SEQ ID NO: 72596 - DNA, 12 bp, Unknown
  misc_feature (1)..( 12): Matrix.004 file - promoters50/4607671
ttaacaaaaagt

SEQ ID NO: 72597 - DNA, 8 bp, Unknown
  misc_feature (1)..( 8): Matrix.004 file - promoters50/4607671
taagtttt

SEQ ID NO: 72598 - DNA, 7 bp, Unknown
  misc_feature (1)..( 7): Matrix.004 file - promoters50/4607678
acaaaaa

SEQ ID NO: 72599 - DNA, 12 bp, Unknown
  misc_feature (1)..( 12): Matrix.004 file - promoters50/4607692
tctatttaaagt

SEQ ID NO: 72600 - DNA, 8 bp, Unknown
  misc_feature (1)..( 8): Matrix.004 file - promoters50/4607692
aaaaatta

SEQ ID NO: 72601 - DNA, 7 bp, Unknown
  misc_feature (1)..( 7): Matrix.004 file - promoters50/4607692
ataaaat

SEQ ID NO: 72602 - DNA, 11 bp, Unknown
  misc_feature (1)..( 11): Matrix.004 file - promoters50/4607692
aaaaaacgtaa

SEQ ID NO: 72603 - DNA, 11 bp, Unknown
  misc_feature (1)..( 11): Matrix.004 file - promoters50/4607692
tttacttgtaa

SEQ ID NO: 72604 - DNA, 10 bp, Unknown
  misc_feature (1)..( 10): Matrix.004 file - promoters50/4607692
aaaagacaaa

SEQ ID NO: 72605 - DNA, 9 bp, Unknown
  misc_feature (1)..( 9): Matrix.004 file - promoters50/4607692
ggcaaatat

SEQ ID NO: 72606 - DNA, 11 bp, Unknown
  misc_feature (1)..( 11): Matrix.004 file - promoters50/4607692
tttatttttta

SEQ ID NO: 72607 - DNA, 12 bp, Unknown
  misc_feature (1)..( 12): Matrix.004 file - promoters50/4607719
ataaagtttttt

SEQ ID NO: 72608 - DNA, 10 bp, Unknown
  misc_feature (1)..( 10): Matrix.004 file - promoters50/4607719
agtaagattg

SEQ ID NO: 72609 - DNA, 9 bp, Unknown
  misc_feature (1)..( 9): Matrix.004 file - promoters50/4607719
taatttact

SEQ ID NO: 72610 - DNA, 11 bp, Unknown
  misc_feature (1)..( 11): Matrix.004 file - promoters50/4607719
agttacaatat

SEQ ID NO: 72611 - DNA, 10 bp, Unknown
  misc_feature (1)..( 10): Matrix.004 file - promoters50/4607719
attgataaaa

SEQ ID NO: 72612 - DNA, 10 bp, Unknown
  misc_feature (1)..( 10): Matrix.004 file - promoters50/4607719
ctaaaaataa

SEQ ID NO: 72613 - DNA, 9 bp, Unknown
  misc_feature (1)..( 9): Matrix.004 file - promoters50/4608096
attagtaaa

SEQ ID NO: 72614 - DNA, 11 bp, Unknown
  misc_feature (1)..( 11): Matrix.004 file - promoters50/4608140
tttataaatct

SEQ ID NO: 72615 - DNA, 10 bp, Unknown
  misc_feature (1)..( 10): Matrix.004 file - promoters50/4608140
aacatatgat

SEQ ID NO: 72616 - DNA, 8 bp, Unknown
  misc_feature (1)..( 8): Matrix.004 file - promoters50/4608140
aaaaataa

SEQ ID NO: 72617 - DNA, 7 bp, Unknown
  misc_feature (1)..( 7): Matrix.004 file - promoters50/4608140
tttgatt

SEQ ID NO: 72618 - DNA, 8 bp, Unknown
  misc_feature (1)..( 8): Matrix.004 file - promoters50/4608140
attttttt

SEQ ID NO: 72619 - DNA, 17 bp, Unknown
  misc_feature (1)..( 17): Matrix.004 file - promoters50/4608140
attgataaaaaacttaa

SEQ ID NO: 72620 - DNA, 12 bp, Unknown
  misc_feature (1)..( 12): Matrix.004 file - promoters50/4608140
taagaaaaatta

SEQ ID NO: 72621 - DNA, 11 bp, Unknown
  misc_feature (1)..( 11): Matrix.004 file - promoters50/4608140
aaagaaaaacc

SEQ ID NO: 72622 - DNA, 12 bp, Unknown
  misc_feature (1)..( 12): Matrix.004 file - promoters50/4608140
aattactatttt

SEQ ID NO: 72623 - DNA, 7 bp, Unknown
  misc_feature (1)..( 7): Matrix.004 file - promoters50/4608140
aaaatat

SEQ ID NO: 72624 - DNA, 9 bp, Unknown
  misc_feature (1)..( 9): Matrix.004 file - promoters50/4608140
tagaaaaaa

SEQ ID NO: 72625 - DNA, 12 bp, Unknown
  misc_feature (1)..( 12): Matrix.004 file - promoters50/4608143
agttacaaaaca

SEQ ID NO: 72626 - DNA, 7 bp, Unknown
  misc_feature (1)..( 7): Matrix.004 file - promoters50/4608143
ttaattt

SEQ ID NO: 72627 - DNA, 10 bp, Unknown
  misc_feature (1)..( 10): Matrix.004 file - promoters50/4608143
aagtataaca

SEQ ID NO: 72628 - DNA, 8 bp, Unknown
  misc_feature (1)..( 8): Matrix.004 file - promoters50/4608143
attatata

SEQ ID NO: 72629 - DNA, 8 bp, Unknown
  misc_feature (1)..( 8): Matrix.004 file - promoters50/4608143
aaatatgt

SEQ ID NO: 72630 - DNA, 8 bp, Unknown
  misc_feature (1)..( 8): Matrix.004 file - promoters50/4608143
aatatata

SEQ ID NO: 72631 - DNA, 15 bp, Unknown
  misc_feature (1)..( 15): Matrix.004 file - promoters50/4608143
aaggatgatggacca

SEQ ID NO: 72632 - DNA, 21 bp, Unknown
  misc_feature (1)..( 21): Matrix.004 file - promoters50/4608143
tacacattaataacgtggtcc

SEQ ID NO: 72633 - DNA, 9 bp, Unknown
  misc_feature (1)..( 9): Matrix.004 file - promoters50/4608143
taaataaat

SEQ ID NO: 72634 - DNA, 10 bp, Unknown
  misc_feature (1)..( 10): Matrix.004 file - promoters50/4608345
cttaaataaa

SEQ ID NO: 72635 - DNA, 9 bp, Unknown
  misc_feature (1)..( 9): Matrix.004 file - promoters50/4608965
aaaacataa

SEQ ID NO: 72636 - DNA, 11 bp, Unknown
  misc_feature (1)..( 11): Matrix.004 file - promoters50/4608965
gattaaatcaa

SEQ ID NO: 72637 - DNA, 13 bp, Unknown
  misc_feature (1)..( 13): Matrix.004 file - promoters50/4608965
cattagtttcctg

SEQ ID NO: 72638 - DNA, 9 bp, Unknown
  misc_feature (1)..( 9): Matrix.004 file - promoters50/4608983
taacgaaat

SEQ ID NO: 72639 - DNA, 8 bp, Unknown
  misc_feature (1)..( 8): Matrix.004 file - promoters50/4608985
gaagtaag

SEQ ID NO: 72640 - DNA, 10 bp, Unknown
  misc_feature (1)..( 10): Matrix.004 file - promoters50/4608985
aatttaaaaa

SEQ ID NO: 72641 - DNA, 11 bp, Unknown
  misc_feature (1)..( 11): Matrix.004 file - promoters50/4608985
agttaataaaa

SEQ ID NO: 72642 - DNA, 14 bp, Unknown
  misc_feature (1)..( 14): Matrix.004 file - promoters50/4608985
aattttatttttaa

SEQ ID NO: 72643 - DNA, 9 bp, Unknown
  misc_feature (1)..( 9): Matrix.004 file - promoters50/4608985
ttaatatta

SEQ ID NO: 72644 - DNA, 8 bp, Unknown
  misc_feature (1)..( 8): Matrix.004 file - promoters50/4608985
ataaatat

SEQ ID NO: 72645 - DNA, 9 bp, Unknown
  misc_feature (1)..( 9): Matrix.004 file - promoters50/4608985
gtgacaaaa

SEQ ID NO: 72646 - DNA, 10 bp, Unknown
  misc_feature (1)..( 10): Matrix.004 file - promoters50/4608985
ttaaaagaaa

SEQ ID NO: 72647 - DNA, 10 bp, Unknown
  misc_feature (1)..( 10): Matrix.004 file - promoters50/4608985
cctatatata

SEQ ID NO: 72648 - DNA, 10 bp, Unknown
  misc_feature (1)..( 10): Matrix.004 file - promoters50/4608985
ttttcttttc

SEQ ID NO: 72649 - DNA, 8 bp, Unknown
  misc_feature (1)..( 8): Matrix.004 file - promoters50/4608985
tttaaaaa

SEQ ID NO: 72650 - DNA, 8 bp, Unknown
  misc_feature (1)..( 8): Matrix.004 file - promoters50/4608985
taaaatat

SEQ ID NO: 72651 - DNA, 9 bp, Unknown
  misc_feature (1)..( 9): Matrix.004 file - promoters50/4610292
taaaaaaat

SEQ ID NO: 72652 - DNA, 12 bp, Unknown
  misc_feature (1)..( 12): Matrix.004 file - promoters50/4610551
cagtttcaataa

SEQ ID NO: 72653 - DNA, 10 bp, Unknown
  misc_feature (1)..( 10): Matrix.004 file - promoters50/4610551
actgtttgtt

SEQ ID NO: 72654 - DNA, 15 bp, Unknown
  misc_feature (1)..( 15): Matrix.004 file - promoters50/4610628
tacgttttttggttt

SEQ ID NO: 72655 - DNA, 9 bp, Unknown
  misc_feature (1)..( 9): Matrix.004 file - promoters50/4701809
ttctgtttg

SEQ ID NO: 72656 - DNA, 8 bp, Unknown
  misc_feature (1)..( 8): Matrix.004 file - promoters50/4701809
aaaattaa

SEQ ID NO: 72657 - DNA, 8 bp, Unknown
  misc_feature (1)..( 8): Matrix.004 file - promoters50/4701809
taaattta

SEQ ID NO: 72658 - DNA, 7 bp, Unknown
  misc_feature (1)..( 7): Matrix.004 file - promoters50/4701809
ataaagt

SEQ ID NO: 72659 - DNA, 12 bp, Unknown
  misc_feature (1)..( 12): Matrix.004 file - promoters50/4701809
ttaaaaattaaa

SEQ ID NO: 72660 - DNA, 7 bp, Unknown
  misc_feature (1)..( 7): Matrix.004 file - promoters50/4702444
ttggttg

SEQ ID NO: 72661 - DNA, 9 bp, Unknown
  misc_feature (1)..( 9): Matrix.004 file - promoters50/4702444
gaaaatttt

SEQ ID NO: 72662 - DNA, 9 bp, Unknown
  misc_feature (1)..( 9): Matrix.004 file - promoters50/4702444
ttaaaatta

SEQ ID NO: 72663 - DNA, 11 bp, Unknown
  misc_feature (1)..( 11): Matrix.004 file - promoters50/4702444
cggaaagtctt

SEQ ID NO: 72664 - DNA, 10 bp, Unknown
  misc_feature (1)..( 10): Matrix.004 file - promoters50/4702444
attaatcata

SEQ ID NO: 72665 - DNA, 13 bp, Unknown
  misc_feature (1)..( 13): Matrix.004 file - promoters50/4702444
ttttacttttctt

SEQ ID NO: 72666 - DNA, 10 bp, Unknown
  misc_feature (1)..( 10): Matrix.004 file - promoters50/4702444
ttttgcaatt

SEQ ID NO: 72667 - DNA, 8 bp, Unknown
  misc_feature (1)..( 8): Matrix.004 file - promoters50/4702444
tttcgaaa

SEQ ID NO: 72668 - DNA, 11 bp, Unknown
  misc_feature (1)..( 11): Matrix.004 file - promoters50/4766314
gaagaaactaa

SEQ ID NO: 72669 - DNA, 8 bp, Unknown
  misc_feature (1)..( 8): Matrix.004 file - promoters50/4766314
tatgttat

SEQ ID NO: 72670 - DNA, 6 bp, Unknown
  misc_feature (1)..( 6): Matrix.004 file - promoters50/4766314
acgaag

SEQ ID NO: 72671 - DNA, 8 bp, Unknown
  misc_feature (1)..( 8): Matrix.004 file - promoters50/4766314
aacaatga

SEQ ID NO: 72672 - DNA, 10 bp, Unknown
  misc_feature (1)..( 10): Matrix.004 file - promoters50/4766320
aatgagattt

SEQ ID NO: 72673 - DNA, 14 bp, Unknown
  misc_feature (1)..( 14): Matrix.004 file - promoters50/4766320
ttaatttccaaaga

SEQ ID NO: 72674 - DNA, 14 bp, Unknown
  misc_feature (1)..( 14): Matrix.004 file - promoters50/4766324
ttcctatctctata

SEQ ID NO: 72675 - DNA, 13 bp, Unknown
  misc_feature (1)..( 13): Matrix.004 file - promoters50/4766324
atttttcattgaa

SEQ ID NO: 72676 - DNA, 13 bp, Unknown
  misc_feature (1)..( 13): Matrix.004 file - promoters50/4766324
actatataatact

SEQ ID NO: 72677 - DNA, 12 bp, Unknown
  misc_feature (1)..( 12): Matrix.004 file - promoters50/4766335
agaatttctttt

SEQ ID NO: 72678 - DNA, 10 bp, Unknown
  misc_feature (1)..( 10): Matrix.004 file - promoters50/4766335
ttaaatgaag

SEQ ID NO: 72679 - DNA, 11 bp, Unknown
  misc_feature (1)..( 11): Matrix.004 file - promoters50/4766335
cgtctataaat

SEQ ID NO: 72680 - DNA, 12 bp, Unknown
  misc_feature (1)..( 12): Matrix.004 file - promoters50/4766335
aaaatttgaatt

SEQ ID NO: 72681 - DNA, 10 bp, Unknown
  misc_feature (1)..( 10): Matrix.004 file - promoters50/4766350
gattctttca

SEQ ID NO: 72682 - DNA, 5 bp, Unknown
  misc_feature (1)..( 5): Matrix.004 file - promoters50/4766350
atagc

SEQ ID NO: 72683 - DNA, 6 bp, Unknown
  misc_feature (1)..( 6): Matrix.004 file - promoters50/4766350
aaaaga

SEQ ID NO: 72684 - DNA, 8 bp, Unknown
  misc_feature (1)..( 8): Matrix.004 file - promoters50/4766350
ctgagaac

SEQ ID NO: 72685 - DNA, 9 bp, Unknown
  misc_feature (1)..( 9): Matrix.004 file - promoters50/4766350
caaaaaaaa

SEQ ID NO: 72686 - DNA, 9 bp, Unknown
  misc_feature (1)..( 9): Matrix.004 file - promoters50/4766353
ctaatggag

SEQ ID NO: 72687 - DNA, 8 bp, Unknown
  misc_feature (1)..( 8): Matrix.004 file - promoters50/4766353
tatagtaa

SEQ ID NO: 72688 - DNA, 10 bp, Unknown
  misc_feature (1)..( 10): Matrix.004 file - promoters50/4766353
ttgtaataat

SEQ ID NO: 72689 - DNA, 7 bp, Unknown
  misc_feature (1)..( 7): Matrix.004 file - promoters50/4766365
tttataa

SEQ ID NO: 72690 - DNA, 12 bp, Unknown
  misc_feature (1)..( 12): Matrix.004 file - promoters50/4766372
aaagtaaatatt

SEQ ID NO: 72691 - DNA, 10 bp, Unknown
  misc_feature (1)..( 10): Matrix.004 file - promoters50/4766372
gttttcctta

SEQ ID NO: 72692 - DNA, 10 bp, Unknown
  misc_feature (1)..( 10): Matrix.004 file - promoters50/4766372
aaaaaattta

SEQ ID NO: 72693 - DNA, 8 bp, Unknown
  misc_feature (1)..( 8): Matrix.004 file - promoters50/4766376
gaattttt

SEQ ID NO: 72694 - DNA, 11 bp, Unknown
  misc_feature (1)..( 11): Matrix.004 file - promoters50/4766376
agtgaaaacac

SEQ ID NO: 72695 - DNA, 9 bp, Unknown
  misc_feature (1)..( 9): Matrix.004 file - promoters50/4766376
ctataaata

SEQ ID NO: 72696 - DNA, 9 bp, Unknown
  misc_feature (1)..( 9): Matrix.004 file - promoters50/4766391
ctataaata

SEQ ID NO: 72697 - DNA, 13 bp, Unknown
  misc_feature (1)..( 13): Matrix.004 file - promoters50/4766395
aaaaaataaaaaa

SEQ ID NO: 72698 - DNA, 12 bp, Unknown
  misc_feature (1)..( 12): Matrix.004 file - promoters50/4766395
atttaacaaaaa

SEQ ID NO: 72699 - DNA, 14 bp, Unknown
  misc_feature (1)..( 14): Matrix.004 file - promoters50/4766421
caattatttaatat

SEQ ID NO: 72700 - DNA, 8 bp, Unknown
  misc_feature (1)..( 8): Matrix.004 file - promoters50/4766421
aattgatt

SEQ ID NO: 72701 - DNA, 7 bp, Unknown
  misc_feature (1)..( 7): Matrix.004 file - promoters50/4766421
caaaatt

SEQ ID NO: 72702 - DNA, 7 bp, Unknown
  misc_feature (1)..( 7): Matrix.004 file - promoters50/4766421
atgtttt

SEQ ID NO: 72703 - DNA, 8 bp, Unknown
  misc_feature (1)..( 8): Matrix.004 file - promoters50/4766425
ttaaaatt

SEQ ID NO: 72704 - DNA, 8 bp, Unknown
  misc_feature (1)..( 8): Matrix.004 file - promoters50/4766429
gcggtctg

SEQ ID NO: 72705 - DNA, 8 bp, Unknown
  misc_feature (1)..( 8): Matrix.004 file - promoters50/4766458
taagaaac

SEQ ID NO: 72706 - DNA, 9 bp, Unknown
  misc_feature (1)..( 9): Matrix.004 file - promoters50/4766458
aaatttgac

SEQ ID NO: 72707 - DNA, 8 bp, Unknown
  misc_feature (1)..( 8): Matrix.004 file - promoters50/4766458
attataat

SEQ ID NO: 72708 - DNA, 7 bp, Unknown
  misc_feature (1)..( 7): Matrix.004 file - promoters50/4766458
aaaaagt

SEQ ID NO: 72709 - DNA, 12 bp, Unknown
  misc_feature (1)..( 12): Matrix.004 file - promoters50/4766477
accaaattaaaa

SEQ ID NO: 72710 - DNA, 11 bp, Unknown
  misc_feature (1)..( 11): Matrix.004 file - promoters50/4766477
aatttttgggc

SEQ ID NO: 72711 - DNA, 10 bp, Unknown
  misc_feature (1)..( 10): Matrix.004 file - promoters50/4766477
aagtttttac

SEQ ID NO: 72712 - DNA, 10 bp, Unknown
  misc_feature (1)..( 10): Matrix.004 file - promoters50/4766477
aacaaaatta

SEQ ID NO: 72713 - DNA, 10 bp, Unknown
  misc_feature (1)..( 10): Matrix.004 file - promoters50/4766477
tacaaaagtt

SEQ ID NO: 72714 - DNA, 13 bp, Unknown
  misc_feature (1)..( 13): Matrix.004 file - promoters50/4766481
taacaatttacat

SEQ ID NO: 72715 - DNA, 8 bp, Unknown
  misc_feature (1)..( 8): Matrix.004 file - promoters50/4766481
attttgtg

SEQ ID NO: 72716 - DNA, 8 bp, Unknown
  misc_feature (1)..( 8): Matrix.004 file - promoters50/4766490
ctcaattt

SEQ ID NO: 72717 - DNA, 7 bp, Unknown
  misc_feature (1)..( 7): Matrix.004 file - promoters50/4766497
gaaaaaa

SEQ ID NO: 72718 - DNA, 6 bp, Unknown
  misc_feature (1)..( 6): Matrix.004 file - promoters50/4766497
aagctt

SEQ ID NO: 72719 - DNA, 7 bp, Unknown
  misc_feature (1)..( 7): Matrix.004 file - promoters50/4766497
attattt

SEQ ID NO: 72720 - DNA, 10 bp, Unknown
  misc_feature (1)..( 10): Matrix.004 file - promoters50/4766497
ttaatattat

SEQ ID NO: 72721 - DNA, 8 bp, Unknown
  misc_feature (1)..( 8): Matrix.004 file - promoters50/4766497
aaacgaat

SEQ ID NO: 72722 - DNA, 11 bp, Unknown
  misc_feature (1)..( 11): Matrix.004 file - promoters50/4766497
taataacaaat

SEQ ID NO: 72723 - DNA, 7 bp, Unknown
  misc_feature (1)..( 7): Matrix.004 file - promoters50/4766497
aaagaag

SEQ ID NO: 72724 - DNA, 10 bp, Unknown
  misc_feature (1)..( 10): Matrix.004 file - promoters50/4766500
aaaatcaaaa

SEQ ID NO: 72725 - DNA, 8 bp, Unknown
  misc_feature (1)..( 8): Matrix.004 file - promoters50/4766524
atcacatt

SEQ ID NO: 72726 - DNA, 12 bp, Unknown
  misc_feature (1)..( 12): Matrix.004 file - promoters50/4766524
tttgaagatttt

SEQ ID NO: 72727 - DNA, 9 bp, Unknown
  misc_feature (1)..( 9): Matrix.004 file - promoters50/4766524
tttttcaaa

SEQ ID NO: 72728 - DNA, 13 bp, Unknown
  misc_feature (1)..( 13): Matrix.004 file - promoters50/4766524
tttttataccatt

SEQ ID NO: 72729 - DNA, 9 bp, Unknown
  misc_feature (1)..( 9): Matrix.004 file - promoters50/4766524
aaacaaaag

SEQ ID NO: 72730 - DNA, 9 bp, Unknown
  misc_feature (1)..( 9): Matrix.004 file - promoters50/4766524
tttatttat

SEQ ID NO: 72731 - DNA, 8 bp, Unknown
  misc_feature (1)..( 8): Matrix.004 file - promoters50/4766553
attattac

SEQ ID NO: 72732 - DNA, 11 bp, Unknown
  misc_feature (1)..( 11): Matrix.004 file - promoters50/4766553
tctgataacaa

SEQ ID NO: 72733 - DNA, 8 bp, Unknown
  misc_feature (1)..( 8): Matrix.004 file - promoters50/4766553
aacaacac

SEQ ID NO: 72734 - DNA, 8 bp, Unknown
  misc_feature (1)..( 8): Matrix.004 file - promoters50/4766553
gtagagaa

SEQ ID NO: 72735 - DNA, 8 bp, Unknown
  misc_feature (1)..( 8): Matrix.004 file - promoters50/4766578
aagaagaa

SEQ ID NO: 72736 - DNA, 12 bp, Unknown
  misc_feature (1)..( 12): Matrix.004 file - promoters50/4766578
taaataattaag

SEQ ID NO: 72737 - DNA, 7 bp, Unknown
  misc_feature (1)..( 7): Matrix.004 file - promoters50/4766578
taattaa

SEQ ID NO: 72738 - DNA, 9 bp, Unknown
  misc_feature (1)..( 9): Matrix.004 file - promoters50/4766578
aaaaattaa

SEQ ID NO: 72739 - DNA, 7 bp, Unknown
  misc_feature (1)..( 7): Matrix.004 file - promoters50/4766578
aaaaaaa

SEQ ID NO: 72740 - DNA, 16 bp, Unknown
  misc_feature (1)..( 16): Matrix.004 file - promoters50/4766585
tatttctttaattatg

SEQ ID NO: 72741 - DNA, 8 bp, Unknown
  misc_feature (1)..( 8): Matrix.004 file - promoters50/4766585
ttttaatt

SEQ ID NO: 72742 - DNA, 11 bp, Unknown
  misc_feature (1)..( 11): Matrix.004 file - promoters50/4766585
gttgacgtttg

SEQ ID NO: 72743 - DNA, 8 bp, Unknown
  misc_feature (1)..( 8): Matrix.004 file - promoters50/4766602
ccttttat

SEQ ID NO: 72744 - DNA, 8 bp, Unknown
  misc_feature (1)..( 8): Matrix.004 file - promoters50/4766602
actatata

SEQ ID NO: 72745 - DNA, 6 bp, Unknown
  misc_feature (1)..( 6): Matrix.004 file - promoters50/4766602
ttttta

SEQ ID NO: 72746 - DNA, 11 bp, Unknown
  misc_feature (1)..( 11): Matrix.004 file - promoters50/4766654
attttcatttt

SEQ ID NO: 72747 - DNA, 7 bp, Unknown
  misc_feature (1)..( 7): Matrix.004 file - promoters50/4766654
tttatat

SEQ ID NO: 72748 - DNA, 8 bp, Unknown
  misc_feature (1)..( 8): Matrix.004 file - promoters50/4766654
gtttataa

SEQ ID NO: 72749 - DNA, 7 bp, Unknown
  misc_feature (1)..( 7): Matrix.004 file - promoters50/4766654
gataaaa

SEQ ID NO: 72750 - DNA, 8 bp, Unknown
  misc_feature (1)..( 8): Matrix.004 file - promoters50/4766678
aacacttt

SEQ ID NO: 72751 - DNA, 8 bp, Unknown
  misc_feature (1)..( 8): Matrix.004 file - promoters50/4766678
gaaaaaaa

SEQ ID NO: 72752 - DNA, 8 bp, Unknown
  misc_feature (1)..( 8): Matrix.004 file - promoters50/4766678
gttaaaaa

SEQ ID NO: 72753 - DNA, 7 bp, Unknown
  misc_feature (1)..( 7): Matrix.004 file - promoters50/4766678
tttcatt

SEQ ID NO: 72754 - DNA, 8 bp, Unknown
  misc_feature (1)..( 8): Matrix.004 file - promoters50/4766727
aaatttcc

SEQ ID NO: 72755 - DNA, 10 bp, Unknown
  misc_feature (1)..( 10): Matrix.004 file - promoters50/4766727
atataaatta

SEQ ID NO: 72756 - DNA, 9 bp, Unknown
  misc_feature (1)..( 9): Matrix.004 file - promoters50/4766738
taatgatta

SEQ ID NO: 72757 - DNA, 10 bp, Unknown
  misc_feature (1)..( 10): Matrix.004 file - promoters50/4766746
aatactaaaa

SEQ ID NO: 72758 - DNA, 9 bp, Unknown
  misc_feature (1)..( 9): Matrix.004 file - promoters50/4766746
gtatataaa

SEQ ID NO: 72759 - DNA, 8 bp, Unknown
  misc_feature (1)..( 8): Matrix.004 file - promoters50/4766750
aaattggg

SEQ ID NO: 72760 - DNA, 8 bp, Unknown
  misc_feature (1)..( 8): Matrix.004 file - promoters50/4766754
atttctaa

SEQ ID NO: 72761 - DNA, 8 bp, Unknown
  misc_feature (1)..( 8): Matrix.004 file - promoters50/4766776
agtatata

SEQ ID NO: 72762 - DNA, 8 bp, Unknown
  misc_feature (1)..( 8): Matrix.004 file - promoters50/4766776
tatatatc

SEQ ID NO: 72763 - DNA, 8 bp, Unknown
  misc_feature (1)..( 8): Matrix.004 file - promoters50/4766776
aaaaatat

SEQ ID NO: 72764 - DNA, 12 bp, Unknown
  misc_feature (1)..( 12): Matrix.004 file - promoters50/4766776
atcttaaaatat

SEQ ID NO: 72765 - DNA, 8 bp, Unknown
  misc_feature (1)..( 8): Matrix.004 file - promoters50/4766784
aaatcaat

SEQ ID NO: 72766 - DNA, 11 bp, Unknown
  misc_feature (1)..( 11): Matrix.004 file - promoters50/4766788
acaagtttttt

SEQ ID NO: 72767 - DNA, 3 bp, Unknown
  misc_feature (1)..( 3): Matrix.004 file - promoters50/4766788
att

SEQ ID NO: 72768 - DNA, 6 bp, Unknown
  misc_feature (1)..( 6): Matrix.004 file - promoters50/4766792
atttca

SEQ ID NO: 72769 - DNA, 7 bp, Unknown
  misc_feature (1)..( 7): Matrix.004 file - promoters50/4766792
ctttatt

SEQ ID NO: 72770 - DNA, 9 bp, Unknown
  misc_feature (1)..( 9): Matrix.004 file - promoters50/4766792
aaataaaca

SEQ ID NO: 72771 - DNA, 7 bp, Unknown
  misc_feature (1)..( 7): Matrix.004 file - promoters50/4766812
tttattt

SEQ ID NO: 72772 - DNA, 7 bp, Unknown
  misc_feature (1)..( 7): Matrix.004 file - promoters50/4766812
aattttt

SEQ ID NO: 72773 - DNA, 9 bp, Unknown
  misc_feature (1)..( 9): Matrix.004 file - promoters50/4766812
aataaaaat

SEQ ID NO: 72774 - DNA, 9 bp, Unknown
  misc_feature (1)..( 9): Matrix.004 file - promoters50/4766812
agtaattat

SEQ ID NO: 72775 - DNA, 7 bp, Unknown
  misc_feature (1)..( 7): Matrix.004 file - promoters50/4766812
aatcaag

SEQ ID NO: 72776 - DNA, 8 bp, Unknown
  misc_feature (1)..( 8): Matrix.004 file - promoters50/4766816
agaaaacc

SEQ ID NO: 72777 - DNA, 9 bp, Unknown
  misc_feature (1)..( 9): Matrix.004 file - promoters50/4766823
caaatatgg

SEQ ID NO: 72778 - DNA, 8 bp, Unknown
  misc_feature (1)..( 8): Matrix.004 file - promoters50/4766835
ttgttcca

SEQ ID NO: 72779 - DNA, 9 bp, Unknown
  misc_feature (1)..( 9): Matrix.004 file - promoters50/4766835
agataaaat

SEQ ID NO: 72780 - DNA, 7 bp, Unknown
  misc_feature (1)..( 7): Matrix.004 file - promoters50/4766835
ttaattt

SEQ ID NO: 72781 - DNA, 9 bp, Unknown
  misc_feature (1)..( 9): Matrix.004 file - promoters50/4766835
tcataaaaa

SEQ ID NO: 72782 - DNA, 8 bp, Unknown
  misc_feature (1)..( 8): Matrix.004 file - promoters50/4766835
aagttcaa

SEQ ID NO: 72783 - DNA, 7 bp, Unknown
  misc_feature (1)..( 7): Matrix.004 file - promoters50/4766835
atcaaaa

SEQ ID NO: 72784 - DNA, 8 bp, Unknown
  misc_feature (1)..( 8): Matrix.004 file - promoters50/4766835
aaacaaaa

SEQ ID NO: 72785 - DNA, 10 bp, Unknown
  misc_feature (1)..( 10): Matrix.004 file - promoters50/4766835
aaataattga

SEQ ID NO: 72786 - DNA, 8 bp, Unknown
  misc_feature (1)..( 8): Matrix.004 file - promoters50/4766835
acacataa

SEQ ID NO: 72787 - DNA, 7 bp, Unknown
  misc_feature (1)..( 7): Matrix.004 file - promoters50/4766858
ttttcag

SEQ ID NO: 72788 - DNA, 8 bp, Unknown
  misc_feature (1)..( 8): Matrix.004 file - promoters50/4766862
aagatctt

SEQ ID NO: 72789 - DNA, 8 bp, Unknown
  misc_feature (1)..( 8): Matrix.004 file - promoters50/4766862
attgaaat

SEQ ID NO: 72790 - DNA, 10 bp, Unknown
  misc_feature (1)..( 10): Matrix.004 file - promoters50/4766866
aggttaaaga

SEQ ID NO: 72791 - DNA, 13 bp, Unknown
  misc_feature (1)..( 13): Matrix.004 file - promoters50/4766866
aaaagaaatttag

SEQ ID NO: 72792 - DNA, 12 bp, Unknown
  misc_feature (1)..( 12): Matrix.004 file - promoters50/4766866
ttgagacaaaaa

SEQ ID NO: 72793 - DNA, 4 bp, Unknown
  misc_feature (1)..( 4): Matrix.004 file - promoters50/4766870
taaa

SEQ ID NO: 72794 - DNA, 7 bp, Unknown
  misc_feature (1)..( 7): Matrix.004 file - promoters50/4766870
gattttg

SEQ ID NO: 72795 - DNA, 7 bp, Unknown
  misc_feature (1)..( 7): Matrix.004 file - promoters50/4766908
tcttaaa

SEQ ID NO: 72796 - DNA, 9 bp, Unknown
  misc_feature (1)..( 9): Matrix.004 file - promoters50/4766908
ttgctttaa

SEQ ID NO: 72797 - DNA, 9 bp, Unknown
  misc_feature (1)..( 9): Matrix.004 file - promoters50/4766908
aaacaaaaa

SEQ ID NO: 72798 - DNA, 10 bp, Unknown
  misc_feature (1)..( 10): Matrix.004 file - promoters50/4766912
acccactaaa

SEQ ID NO: 72799 - DNA, 9 bp, Unknown
  misc_feature (1)..( 9): Matrix.004 file - promoters50/4766912
gcttattaa

SEQ ID NO: 72800 - DNA, 7 bp, Unknown
  misc_feature (1)..( 7): Matrix.004 file - promoters50/4766912
agtattc

SEQ ID NO: 72801 - DNA, 9 bp, Unknown
  misc_feature (1)..( 9): Matrix.004 file - promoters50/4766912
gtttgtgtt

SEQ ID NO: 72802 - DNA, 7 bp, Unknown
  misc_feature (1)..( 7): Matrix.004 file - promoters50/4766912
gttgtga

SEQ ID NO: 72803 - DNA, 7 bp, Unknown
  misc_feature (1)..( 7): Matrix.004 file - promoters50/4766912
tcttgtc

SEQ ID NO: 72804 - DNA, 9 bp, Unknown
  misc_feature (1)..( 9): Matrix.004 file - promoters50/4766916
cagagatcc

SEQ ID NO: 72805 - DNA, 10 bp, Unknown
  misc_feature (1)..( 10): Matrix.004 file - promoters50/4766916
ttacaaaata

SEQ ID NO: 72806 - DNA, 7 bp, Unknown
  misc_feature (1)..( 7): Matrix.004 file - promoters50/4766916
aatttta

SEQ ID NO: 72807 - DNA, 6 bp, Unknown
  misc_feature (1)..( 6): Matrix.004 file - promoters50/4766916
taaaaa

SEQ ID NO: 72808 - DNA, 8 bp, Unknown
  misc_feature (1)..( 8): Matrix.004 file - promoters50/4766936
aaaacaaa

SEQ ID NO: 72809 - DNA, 12 bp, Unknown
  misc_feature (1)..( 12): Matrix.004 file - promoters50/4766957
atctttataaag

SEQ ID NO: 72810 - DNA, 13 bp, Unknown
  misc_feature (1)..( 13): Matrix.004 file - promoters50/4766957
acgtttttcattc

SEQ ID NO: 72811 - DNA, 12 bp, Unknown
  misc_feature (1)..( 12): Matrix.004 file - promoters50/4766957
ttaaataaaaaa

SEQ ID NO: 72812 - DNA, 13 bp, Unknown
  misc_feature (1)..( 13): Matrix.004 file - promoters50/4766977
ttaaataaaaact

SEQ ID NO: 72813 - DNA, 7 bp, Unknown
  misc_feature (1)..( 7): Matrix.004 file - promoters50/4766977
taaaatt

SEQ ID NO: 72814 - DNA, 11 bp, Unknown
  misc_feature (1)..( 11): Matrix.004 file - promoters50/4766977
atataaataaa

SEQ ID NO: 72815 - DNA, 14 bp, Unknown
  misc_feature (1)..( 14): Matrix.004 file - promoters50/4766977
aagagtataaaatt

SEQ ID NO: 72816 - DNA, 12 bp, Unknown
  misc_feature (1)..( 12): Matrix.004 file - promoters50/4766977
aaaattttcgta

SEQ ID NO: 72817 - DNA, 10 bp, Unknown
  misc_feature (1)..( 10): Matrix.004 file - promoters50/4766977
gaactaaact

SEQ ID NO: 72818 - DNA, 12 bp, Unknown
  misc_feature (1)..( 12): Matrix.004 file - promoters50/4766977
acacattaatat

SEQ ID NO: 72819 - DNA, 11 bp, Unknown
  misc_feature (1)..( 11): Matrix.004 file - promoters50/4766977
aaaaatatttt

SEQ ID NO: 72820 - DNA, 10 bp, Unknown
  misc_feature (1)..( 10): Matrix.004 file - promoters50/4766977
tactttttaa

SEQ ID NO: 72821 - DNA, 12 bp, Unknown
  misc_feature (1)..( 12): Matrix.004 file - promoters50/4766977
accattaaaata

SEQ ID NO: 72822 - DNA, 13 bp, Unknown
  misc_feature (1)..( 13): Matrix.004 file - promoters50/4766977
taaaatatatttt

SEQ ID NO: 72823 - DNA, 16 bp, Unknown
  misc_feature (1)..( 16): Matrix.004 file - promoters50/4766980
aaattaagatattttt

SEQ ID NO: 72824 - DNA, 9 bp, Unknown
  misc_feature (1)..( 9): Matrix.004 file - promoters50/4766980
aatagactg

SEQ ID NO: 72825 - DNA, 8 bp, Unknown
  misc_feature (1)..( 8): Matrix.004 file - promoters50/4766983
ggaagaaa

SEQ ID NO: 72826 - DNA, 8 bp, Unknown
  misc_feature (1)..( 8): Matrix.004 file - promoters50/4766983
aattctat

SEQ ID NO: 72827 - DNA, 8 bp, Unknown
  misc_feature (1)..( 8): Matrix.004 file - promoters50/4766983
attaaact

SEQ ID NO: 72828 - DNA, 12 bp, Unknown
  misc_feature (1)..( 12): Matrix.004 file - promoters50/4766983
aaattgattaaa

SEQ ID NO: 72829 - DNA, 7 bp, Unknown
  misc_feature (1)..( 7): Matrix.004 file - promoters50/4766983
aaaaata

SEQ ID NO: 72830 - DNA, 15 bp, Unknown
  misc_feature (1)..( 15): Matrix.004 file - promoters50/4766983
ataaaattgacatct

SEQ ID NO: 72831 - DNA, 7 bp, Unknown
  misc_feature (1)..( 7): Matrix.004 file - promoters50/4766983
aaatata

SEQ ID NO: 72832 - DNA, 7 bp, Unknown
  misc_feature (1)..( 7): Matrix.004 file - promoters50/4766983
taaaaaa

SEQ ID NO: 72833 - DNA, 8 bp, Unknown
  misc_feature (1)..( 8): Matrix.004 file - promoters50/4766983
ttgttttt

SEQ ID NO: 72834 - DNA, 8 bp, Unknown
  misc_feature (1)..( 8): Matrix.004 file - promoters50/4766983
aatcaaag

SEQ ID NO: 72835 - DNA, 13 bp, Unknown
  misc_feature (1)..( 13): Matrix.004 file - promoters50/4766991
aaattgacttcaa

SEQ ID NO: 72836 - DNA, 11 bp, Unknown
  misc_feature (1)..( 11): Matrix.004 file - promoters50/4766991
ataaaagaaaa

SEQ ID NO: 72837 - DNA, 6 bp, Unknown
  misc_feature (1)..( 6): Matrix.004 file - promoters50/4767003
aaataa

SEQ ID NO: 72838 - DNA, 7 bp, Unknown
  misc_feature (1)..( 7): Matrix.004 file - promoters50/4767024
cattcta

SEQ ID NO: 72839 - DNA, 9 bp, Unknown
  misc_feature (1)..( 9): Matrix.004 file - promoters50/4767038
gaaataaaa

SEQ ID NO: 72840 - DNA, 16 bp, Unknown
  misc_feature (1)..( 16): Matrix.004 file - promoters50/4767050
agttaataaataaaaa

SEQ ID NO: 72841 - DNA, 8 bp, Unknown
  misc_feature (1)..( 8): Matrix.004 file - promoters50/4767054
atataaat

SEQ ID NO: 72842 - DNA, 10 bp, Unknown
  misc_feature (1)..( 10): Matrix.004 file - promoters50/4767054
atttctcaac

SEQ ID NO: 72843 - DNA, 7 bp, Unknown
  misc_feature (1)..( 7): Matrix.004 file - promoters50/4767059
aaacata

SEQ ID NO: 72844 - DNA, 8 bp, Unknown
  misc_feature (1)..( 8): Matrix.004 file - promoters50/4767059
gaactttg

SEQ ID NO: 72845 - DNA, 7 bp, Unknown
  misc_feature (1)..( 7): Matrix.004 file - promoters50/4767063
taaattt

SEQ ID NO: 72846 - DNA, 7 bp, Unknown
  misc_feature (1)..( 7): Matrix.004 file - promoters50/4767063
tttcttt

SEQ ID NO: 72847 - DNA, 7 bp, Unknown
  misc_feature (1)..( 7): Matrix.004 file - promoters50/4767063
aaaatga

SEQ ID NO: 72848 - DNA, 8 bp, Unknown
  misc_feature (1)..( 8): Matrix.004 file - promoters50/4767063
atttaatg

SEQ ID NO: 72849 - DNA, 7 bp, Unknown
  misc_feature (1)..( 7): Matrix.004 file - promoters50/4767066
attaatt

SEQ ID NO: 72850 - DNA, 8 bp, Unknown
  misc_feature (1)..( 8): Matrix.004 file - promoters50/4767066
cttagtca

SEQ ID NO: 72851 - DNA, 9 bp, Unknown
  misc_feature (1)..( 9): Matrix.004 file - promoters50/4767066
tattattca

SEQ ID NO: 72852 - DNA, 8 bp, Unknown
  misc_feature (1)..( 8): Matrix.004 file - promoters50/4767066
cattgatg

SEQ ID NO: 72853 - DNA, 7 bp, Unknown
  misc_feature (1)..( 7): Matrix.004 file - promoters50/4767066
caaaaac

SEQ ID NO: 72854 - DNA, 6 bp, Unknown
  misc_feature (1)..( 6): Matrix.004 file - promoters50/4767066
aagaaa

SEQ ID NO: 72855 - DNA, 9 bp, Unknown
  misc_feature (1)..( 9): Matrix.004 file - promoters50/4767066
aattttttt

SEQ ID NO: 72856 - DNA, 9 bp, Unknown
  misc_feature (1)..( 9): Matrix.004 file - promoters50/4767066
aaaaacaaa

SEQ ID NO: 72857 - DNA, 14 bp, Unknown
  misc_feature (1)..( 14): Matrix.004 file - promoters50/4767085
gtttccaaattctc

SEQ ID NO: 72858 - DNA, 8 bp, Unknown
  misc_feature (1)..( 8): Matrix.004 file - promoters50/4767085
aaaacttt

SEQ ID NO: 72859 - DNA, 14 bp, Unknown
  misc_feature (1)..( 14): Matrix.004 file - promoters50/4767103
tataatttagacat

SEQ ID NO: 72860 - DNA, 11 bp, Unknown
  misc_feature (1)..( 11): Matrix.004 file - promoters50/4767103
tcactggttta

SEQ ID NO: 72861 - DNA, 8 bp, Unknown
  misc_feature (1)..( 8): Matrix.004 file - promoters50/4767109
ggaaattt

SEQ ID NO: 72862 - DNA, 10 bp, Unknown
  misc_feature (1)..( 10): Matrix.004 file - promoters50/4767109
gatacaaaat

SEQ ID NO: 72863 - DNA, 7 bp, Unknown
  misc_feature (1)..( 7): Matrix.004 file - promoters50/4767109
tttaatt

SEQ ID NO: 72864 - DNA, 11 bp, Unknown
  misc_feature (1)..( 11): Matrix.004 file - promoters50/4767109
gataaaaaata

SEQ ID NO: 72865 - DNA, 10 bp, Unknown
  misc_feature (1)..( 10): Matrix.004 file - promoters50/4767109
tctatatata

SEQ ID NO: 72866 - DNA, 7 bp, Unknown
  misc_feature (1)..( 7): Matrix.004 file - promoters50/4767129
caaattt

SEQ ID NO: 72867 - DNA, 8 bp, Unknown
  misc_feature (1)..( 8): Matrix.004 file - promoters50/4767129
ttttgtat

SEQ ID NO: 72868 - DNA, 7 bp, Unknown
  misc_feature (1)..( 7): Matrix.004 file - promoters50/4767129
tttctct

SEQ ID NO: 72869 - DNA, 9 bp, Unknown
  misc_feature (1)..( 9): Matrix.004 file - promoters50/4767133
tcataaact

SEQ ID NO: 72870 - DNA, 9 bp, Unknown
  misc_feature (1)..( 9): Matrix.004 file - promoters50/4767133
aaattattt

SEQ ID NO: 72871 - DNA, 8 bp, Unknown
  misc_feature (1)..( 8): Matrix.004 file - promoters50/4767148
ttaatgta

SEQ ID NO: 72872 - DNA, 8 bp, Unknown
  misc_feature (1)..( 8): Matrix.004 file - promoters50/4767148
atttatat

SEQ ID NO: 72873 - DNA, 9 bp, Unknown
  misc_feature (1)..( 9): Matrix.004 file - promoters50/4767148
atttcttac

SEQ ID NO: 72874 - DNA, 11 bp, Unknown
  misc_feature (1)..( 11): Matrix.004 file - promoters50/4767148
agtaaatttga

SEQ ID NO: 72875 - DNA, 8 bp, Unknown
  misc_feature (1)..( 8): Matrix.004 file - promoters50/4767156
atttatta

SEQ ID NO: 72876 - DNA, 6 bp, Unknown
  misc_feature (1)..( 6): Matrix.004 file - promoters50/4767156
aaaatt

SEQ ID NO: 72877 - DNA, 15 bp, Unknown
  misc_feature (1)..( 15): Matrix.004 file - promoters50/4767169
taaaattaaaaaaca

SEQ ID NO: 72878 - DNA, 8 bp, Unknown
  misc_feature (1)..( 8): Matrix.004 file - promoters50/4767199
gtttattg

SEQ ID NO: 72879 - DNA, 7 bp, Unknown
  misc_feature (1)..( 7): Matrix.004 file - promoters50/4767199
attattt

SEQ ID NO: 72880 - DNA, 7 bp, Unknown
  misc_feature (1)..( 7): Matrix.004 file - promoters50/4767199
ttttttt

SEQ ID NO: 72881 - DNA, 8 bp, Unknown
  misc_feature (1)..( 8): Matrix.004 file - promoters50/4767199
attaaaaa

SEQ ID NO: 72882 - DNA, 10 bp, Unknown
  misc_feature (1)..( 10): Matrix.004 file - promoters50/4767199
taatttattt

SEQ ID NO: 72883 - DNA, 10 bp, Unknown
  misc_feature (1)..( 10): Matrix.004 file - promoters50/4767226
taatcttaga

SEQ ID NO: 72884 - DNA, 9 bp, Unknown
  misc_feature (1)..( 9): Matrix.004 file - promoters50/4767230
aatattctt

SEQ ID NO: 72885 - DNA, 11 bp, Unknown
  misc_feature (1)..( 11): Matrix.004 file - promoters50/4767230
aaaatcttcaa

SEQ ID NO: 72886 - DNA, 15 bp, Unknown
  misc_feature (1)..( 15): Matrix.004 file - promoters50/4767255
atttgactttggcaa

SEQ ID NO: 72887 - DNA, 8 bp, Unknown
  misc_feature (1)..( 8): Matrix.004 file - promoters50/4767267
ccttctct

SEQ ID NO: 72888 - DNA, 7 bp, Unknown
  misc_feature (1)..( 7): Matrix.004 file - promoters50/4767267
atttaat

SEQ ID NO: 72889 - DNA, 10 bp, Unknown
  misc_feature (1)..( 10): Matrix.004 file - promoters50/4767267
aatatattga

SEQ ID NO: 72890 - DNA, 11 bp, Unknown
  misc_feature (1)..( 11): Matrix.004 file - promoters50/4767279
aatttgaaaaa

SEQ ID NO: 72891 - DNA, 9 bp, Unknown
  misc_feature (1)..( 9): Matrix.004 file - promoters50/4767279
ttaacattg

SEQ ID NO: 72892 - DNA, 9 bp, Unknown
  misc_feature (1)..( 9): Matrix.004 file - promoters50/4767283
attaaaagg

SEQ ID NO: 72893 - DNA, 5 bp, Unknown
  misc_feature (1)..( 5): Matrix.004 file - promoters50/4767283
actta

SEQ ID NO: 72894 - DNA, 7 bp, Unknown
  misc_feature (1)..( 7): Matrix.004 file - promoters50/4767294
taaatta

SEQ ID NO: 72895 - DNA, 9 bp, Unknown
  misc_feature (1)..( 9): Matrix.004 file - promoters50/4767298
aaaaaatca

SEQ ID NO: 72896 - DNA, 13 bp, Unknown
  misc_feature (1)..( 13): Matrix.004 file - promoters50/4767298
ttctaaaataaac

SEQ ID NO: 72897 - DNA, 11 bp, Unknown
  misc_feature (1)..( 11): Matrix.004 file - promoters50/4767298
tgacaaataaa

SEQ ID NO: 72898 - DNA, 10 bp, Unknown
  misc_feature (1)..( 10): Matrix.004 file - promoters50/4767298
tatatcaata

SEQ ID NO: 72899 - DNA, 10 bp, Unknown
  misc_feature (1)..( 10): Matrix.004 file - promoters50/4767298
tcaaaaaaga

SEQ ID NO: 72900 - DNA, 11 bp, Unknown
  misc_feature (1)..( 11): Matrix.004 file - promoters50/4767298
aaaatattact

SEQ ID NO: 72901 - DNA, 13 bp, Unknown
  misc_feature (1)..( 13): Matrix.004 file - promoters50/4767314
tgacttttataaa

SEQ ID NO: 72902 - DNA, 8 bp, Unknown
  misc_feature (1)..( 8): Matrix.004 file - promoters50/4767314
aaaacttt

SEQ ID NO: 72903 - DNA, 12 bp, Unknown
  misc_feature (1)..( 12): Matrix.004 file - promoters50/4767318
ttttaagtgata

SEQ ID NO: 72904 - DNA, 9 bp, Unknown
  misc_feature (1)..( 9): Matrix.004 file - promoters50/4767318
tgttatttc

SEQ ID NO: 72905 - DNA, 11 bp, Unknown
  misc_feature (1)..( 11): Matrix.004 file - promoters50/4767318
aaacattaata

SEQ ID NO: 72906 - DNA, 9 bp, Unknown
  misc_feature (1)..( 9): Matrix.004 file - promoters50/4767318
tttacttaa

SEQ ID NO: 72907 - DNA, 10 bp, Unknown
  misc_feature (1)..( 10): Matrix.004 file - promoters50/4767318
aaaaacacac

SEQ ID NO: 72908 - DNA, 7 bp, Unknown
  misc_feature (1)..( 7): Matrix.004 file - promoters50/4767318
aaattat

SEQ ID NO: 72909 - DNA, 9 bp, Unknown
  misc_feature (1)..( 9): Matrix.004 file - promoters50/4767318
aaatactta

SEQ ID NO: 72910 - DNA, 7 bp, Unknown
  misc_feature (1)..( 7): Matrix.004 file - promoters50/4767318
ttcattt

SEQ ID NO: 72911 - DNA, 8 bp, Unknown
  misc_feature (1)..( 8): Matrix.004 file - promoters50/4767318
acaagatt

SEQ ID NO: 72912 - DNA, 10 bp, Unknown
  misc_feature (1)..( 10): Matrix.004 file - promoters50/4767318
gtcttcattt

SEQ ID NO: 72913 - DNA, 9 bp, Unknown
  misc_feature (1)..( 9): Matrix.004 file - promoters50/4767330
aaaattatt

SEQ ID NO: 72914 - DNA, 8 bp, Unknown
  misc_feature (1)..( 8): Matrix.004 file - promoters50/4767330
caatattt

SEQ ID NO: 72915 - DNA, 11 bp, Unknown
  misc_feature (1)..( 11): Matrix.004 file - promoters50/4767335
atttgtgtttg

SEQ ID NO: 72916 - DNA, 13 bp, Unknown
  misc_feature (1)..( 13): Matrix.004 file - promoters50/4767369
atgaattgcttca

SEQ ID NO: 72917 - DNA, 9 bp, Unknown
  misc_feature (1)..( 9): Matrix.004 file - promoters50/4767377
caataaatt

SEQ ID NO: 72918 - DNA, 7 bp, Unknown
  misc_feature (1)..( 7): Matrix.004 file - promoters50/4767377
ttaaaaa

SEQ ID NO: 72919 - DNA, 12 bp, Unknown
  misc_feature (1)..( 12): Matrix.004 file - promoters50/4767377
aaattaaaatag

SEQ ID NO: 72920 - DNA, 8 bp, Unknown
  misc_feature (1)..( 8): Matrix.004 file - promoters50/4767377
ataaacca

SEQ ID NO: 72921 - DNA, 8 bp, Unknown
  misc_feature (1)..( 8): Matrix.004 file - promoters50/4767377
aaaataaa

SEQ ID NO: 72922 - DNA, 7 bp, Unknown
  misc_feature (1)..( 7): Matrix.004 file - promoters50/4767377
gaaataa

SEQ ID NO: 72923 - DNA, 12 bp, Unknown
  misc_feature (1)..( 12): Matrix.004 file - promoters50/4767379
ttaaaaataaat

SEQ ID NO: 72924 - DNA, 14 bp, Unknown
  misc_feature (1)..( 14): Matrix.004 file - promoters50/4767379
taaaaatgatatac

SEQ ID NO: 72925 - DNA, 9 bp, Unknown
  misc_feature (1)..( 9): Matrix.004 file - promoters50/4767379
ataaaaaaa

SEQ ID NO: 72926 - DNA, 10 bp, Unknown
  misc_feature (1)..( 10): Matrix.004 file - promoters50/4767379
aaaatgaatg

SEQ ID NO: 72927 - DNA, 7 bp, Unknown
  misc_feature (1)..( 7): Matrix.004 file - promoters50/4767379
gtaaaga

SEQ ID NO: 72928 - DNA, 11 bp, Unknown
  misc_feature (1)..( 11): Matrix.004 file - promoters50/4767379
ataatgttaac

SEQ ID NO: 72929 - DNA, 11 bp, Unknown
  misc_feature (1)..( 11): Matrix.004 file - promoters50/4767379
tctgtttaaga

SEQ ID NO: 72930 - DNA, 11 bp, Unknown
  misc_feature (1)..( 11): Matrix.004 file - promoters50/4767379
aaaaattaata

SEQ ID NO: 72931 - DNA, 8 bp, Unknown
  misc_feature (1)..( 8): Matrix.004 file - promoters50/4767379
aaaaatta

SEQ ID NO: 72932 - DNA, 10 bp, Unknown
  misc_feature (1)..( 10): Matrix.004 file - promoters50/4767379
aaataaaata

SEQ ID NO: 72933 - DNA, 7 bp, Unknown
  misc_feature (1)..( 7): Matrix.004 file - promoters50/4767379
aaacaaa

SEQ ID NO: 72934 - DNA, 11 bp, Unknown
  misc_feature (1)..( 11): Matrix.004 file - promoters50/4767379
accataaaaaa

SEQ ID NO: 72935 - DNA, 12 bp, Unknown
  misc_feature (1)..( 12): Matrix.004 file - promoters50/4767395
tcaaaaaataaa

SEQ ID NO: 72936 - DNA, 8 bp, Unknown
  misc_feature (1)..( 8): Matrix.004 file - promoters50/4767410
atcaataa

SEQ ID NO: 72937 - DNA, 7 bp, Unknown
  misc_feature (1)..( 7): Matrix.004 file - promoters50/4767410
tatgaaa

SEQ ID NO: 72938 - DNA, 8 bp, Unknown
  misc_feature (1)..( 8): Matrix.004 file - promoters50/4767410
agttaaag

SEQ ID NO: 72939 - DNA, 9 bp, Unknown
  misc_feature (1)..( 9): Matrix.004 file - promoters50/4767452
ggatttgtt

SEQ ID NO: 72940 - DNA, 12 bp, Unknown
  misc_feature (1)..( 12): Matrix.004 file - promoters50/4767487
caaaaagatatg

SEQ ID NO: 72941 - DNA, 9 bp, Unknown
  misc_feature (1)..( 9): Matrix.004 file - promoters50/4767487
ataaattta

SEQ ID NO: 72942 - DNA, 10 bp, Unknown
  misc_feature (1)..( 10): Matrix.004 file - promoters50/4767490
ccattttatt

SEQ ID NO: 72943 - DNA, 10 bp, Unknown
  misc_feature (1)..( 10): Matrix.004 file - promoters50/4767490
taaagtttaa

SEQ ID NO: 72944 - DNA, 13 bp, Unknown
  misc_feature (1)..( 13): Matrix.004 file - promoters50/4767490
agtcatatataaa

SEQ ID NO: 72945 - DNA, 10 bp, Unknown
  misc_feature (1)..( 10): Matrix.004 file - promoters50/4767490
ctggttttta

SEQ ID NO: 72946 - DNA, 10 bp, Unknown
  misc_feature (1)..( 10): Matrix.004 file - promoters50/4767509
ttttgaaact

SEQ ID NO: 72947 - DNA, 6 bp, Unknown
  misc_feature (1)..( 6): Matrix.004 file - promoters50/4767509
atcaac

SEQ ID NO: 72948 - DNA, 11 bp, Unknown
  misc_feature (1)..( 11): Matrix.004 file - promoters50/4767515
tataatataat

SEQ ID NO: 72949 - DNA, 5 bp, Unknown
  misc_feature (1)..( 5): Matrix.004 file - promoters50/4767515
tttga

SEQ ID NO: 72950 - DNA, 11 bp, Unknown
  misc_feature (1)..( 11): Matrix.004 file - promoters50/4767515
ttaacaaaaca

SEQ ID NO: 72951 - DNA, 9 bp, Unknown
  misc_feature (1)..( 9): Matrix.004 file - promoters50/4767519
tattataaa

SEQ ID NO: 72952 - DNA, 7 bp, Unknown
  misc_feature (1)..( 7): Matrix.004 file - promoters50/4767519
aagttat

SEQ ID NO: 72953 - DNA, 11 bp, Unknown
  misc_feature (1)..( 11): Matrix.004 file - promoters50/4767519
ataattatatg

SEQ ID NO: 72954 - DNA, 7 bp, Unknown
  misc_feature (1)..( 7): Matrix.004 file - promoters50/4767519
tagaaac

SEQ ID NO: 72955 - DNA, 7 bp, Unknown
  misc_feature (1)..( 7): Matrix.004 file - promoters50/4767519
aaataaa

SEQ ID NO: 72956 - DNA, 5 bp, Unknown
  misc_feature (1)..( 5): Matrix.004 file - promoters50/4767519
aaata

SEQ ID NO: 72957 - DNA, 7 bp, Unknown
  misc_feature (1)..( 7): Matrix.004 file - promoters50/4767519
agaaact

SEQ ID NO: 72958 - DNA, 11 bp, Unknown
  misc_feature (1)..( 11): Matrix.004 file - promoters50/4767519
aaacactatat

SEQ ID NO: 72959 - DNA, 8 bp, Unknown
  misc_feature (1)..( 8): Matrix.004 file - promoters50/4767519
atttaaat

SEQ ID NO: 72960 - DNA, 10 bp, Unknown
  misc_feature (1)..( 10): Matrix.004 file - promoters50/4767519
atttaagaaa

SEQ ID NO: 72961 - DNA, 8 bp, Unknown
  misc_feature (1)..( 8): Matrix.004 file - promoters50/4767539
aacatttt

SEQ ID NO: 72962 - DNA, 9 bp, Unknown
  misc_feature (1)..( 9): Matrix.004 file - promoters50/4767539
tatctctgc

SEQ ID NO: 72963 - DNA, 10 bp, Unknown
  misc_feature (1)..( 10): Matrix.004 file - promoters50/4767539
tataaaactc

SEQ ID NO: 72964 - DNA, 11 bp, Unknown
  misc_feature (1)..( 11): Matrix.004 file - promoters50/4767545
tagatcttcgt

SEQ ID NO: 72965 - DNA, 11 bp, Unknown
  misc_feature (1)..( 11): Matrix.004 file - promoters50/4767545
ctttctttaaa

SEQ ID NO: 72966 - DNA, 10 bp, Unknown
  misc_feature (1)..( 10): Matrix.004 file - promoters50/4767545
taaaaataaa

SEQ ID NO: 72967 - DNA, 10 bp, Unknown
  misc_feature (1)..( 10): Matrix.004 file - promoters50/4767545
aaataataat

SEQ ID NO: 72968 - DNA, 13 bp, Unknown
  misc_feature (1)..( 13): Matrix.004 file - promoters50/4767552
aaaaataattata

SEQ ID NO: 72969 - DNA, 7 bp, Unknown
  misc_feature (1)..( 7): Matrix.004 file - promoters50/4767574
agaaata

SEQ ID NO: 72970 - DNA, 9 bp, Unknown
  misc_feature (1)..( 9): Matrix.004 file - promoters50/4767574
agaatgatt

SEQ ID NO: 72971 - DNA, 8 bp, Unknown
  misc_feature (1)..( 8): Matrix.004 file - promoters50/4767574
tgatattg

SEQ ID NO: 72972 - DNA, 10 bp, Unknown
  misc_feature (1)..( 10): Matrix.004 file - promoters50/4767574
agacaatctt

SEQ ID NO: 72973 - DNA, 8 bp, Unknown
  misc_feature (1)..( 8): Matrix.004 file - promoters50/4767574
agatataa

SEQ ID NO: 72974 - DNA, 11 bp, Unknown
  misc_feature (1)..( 11): Matrix.004 file - promoters50/4767578
ttgatgtagaa

SEQ ID NO: 72975 - DNA, 10 bp, Unknown
  misc_feature (1)..( 10): Matrix.004 file - promoters50/4767578
taatttatct

SEQ ID NO: 72976 - DNA, 11 bp, Unknown
  misc_feature (1)..( 11): Matrix.004 file - promoters50/4767586
aacaaaatgta

SEQ ID NO: 72977 - DNA, 10 bp, Unknown
  misc_feature (1)..( 10): Matrix.004 file - promoters50/4767586
aaatttaata

SEQ ID NO: 72978 - DNA, 6 bp, Unknown
  misc_feature (1)..( 6): Matrix.004 file - promoters50/4767588
atataa

SEQ ID NO: 72979 - DNA, 7 bp, Unknown
  misc_feature (1)..( 7): Matrix.004 file - promoters50/4767610
ttgtttc

SEQ ID NO: 72980 - DNA, 8 bp, Unknown
  misc_feature (1)..( 8): Matrix.004 file - promoters50/4767610
tattttaa

SEQ ID NO: 72981 - DNA, 8 bp, Unknown
  misc_feature (1)..( 8): Matrix.004 file - promoters50/4767617
cttaatta

SEQ ID NO: 72982 - DNA, 8 bp, Unknown
  misc_feature (1)..( 8): Matrix.004 file - promoters50/4767638
attaaata

SEQ ID NO: 72983 - DNA, 10 bp, Unknown
  misc_feature (1)..( 10): Matrix.004 file - promoters50/4767638
atttttttaa

SEQ ID NO: 72984 - DNA, 11 bp, Unknown
  misc_feature (1)..( 11): Matrix.004 file - promoters50/4767638
attataattaa

SEQ ID NO: 72985 - DNA, 10 bp, Unknown
  misc_feature (1)..( 10): Matrix.004 file - promoters50/4767663
aataaaaaaa

SEQ ID NO: 72986 - DNA, 9 bp, Unknown
  misc_feature (1)..( 9): Matrix.004 file - promoters50/4767663
aataataaa

SEQ ID NO: 72987 - DNA, 6 bp, Unknown
  misc_feature (1)..( 6): Matrix.004 file - promoters50/4767663
aaaatg

SEQ ID NO: 72988 - DNA, 10 bp, Unknown
  misc_feature (1)..( 10): Matrix.004 file - promoters50/4767663
ataaatcaaa

SEQ ID NO: 72989 - DNA, 11 bp, Unknown
  misc_feature (1)..( 11): Matrix.004 file - promoters50/4767663
atatatataaa

SEQ ID NO: 72990 - DNA, 11 bp, Unknown
  misc_feature (1)..( 11): Matrix.004 file - promoters50/4767663
atttaattttc

SEQ ID NO: 72991 - DNA, 10 bp, Unknown
  misc_feature (1)..( 10): Matrix.004 file - promoters50/4767663
agaaatatat

SEQ ID NO: 72992 - DNA, 12 bp, Unknown
  misc_feature (1)..( 12): Matrix.004 file - promoters50/4767663
atcttacttata

SEQ ID NO: 72993 - DNA, 9 bp, Unknown
  misc_feature (1)..( 9): Matrix.004 file - promoters50/4767675
agaaaaata

SEQ ID NO: 72994 - DNA, 9 bp, Unknown
  misc_feature (1)..( 9): Matrix.004 file - promoters50/4767679
aaagcaaaa

SEQ ID NO: 72995 - DNA, 8 bp, Unknown
  misc_feature (1)..( 8): Matrix.004 file - promoters50/4767683
aacaatca

SEQ ID NO: 72996 - DNA, 8 bp, Unknown
  misc_feature (1)..( 8): Matrix.004 file - promoters50/4767683
ttatataa

SEQ ID NO: 72997 - DNA, 20 bp, Unknown
  misc_feature (1)..( 20): Matrix.004 file - promoters50/4767701
tagaaaaaaatattgataat

SEQ ID NO: 72998 - DNA, 7 bp, Unknown
  misc_feature (1)..( 7): Matrix.004 file - promoters50/4767701
cttaatt

SEQ ID NO: 72999 - DNA, 12 bp, Unknown
  misc_feature (1)..( 12): Matrix.004 file - promoters50/4767701
tctatgaatcat

SEQ ID NO: 73000 - DNA, 10 bp, Unknown
  misc_feature (1)..( 10): Matrix.004 file - promoters50/4767701
cttaatgtaa

SEQ ID NO: 73001 - DNA, 12 bp, Unknown
  misc_feature (1)..( 12): Matrix.004 file - promoters50/4767701
ccaattatccaa

SEQ ID NO: 73002 - DNA, 11 bp, Unknown
  misc_feature (1)..( 11): Matrix.004 file - promoters50/4767705
ccaagaaattc

SEQ ID NO: 73003 - DNA, 20 bp, Unknown
  misc_feature (1)..( 20): Matrix.004 file - promoters50/4767705
taagaataatttttaagcta

SEQ ID NO: 73004 - DNA, 14 bp, Unknown
  misc_feature (1)..( 14): Matrix.004 file - promoters50/4767705
ataataatttaatt

SEQ ID NO: 73005 - DNA, 7 bp, Unknown
  misc_feature (1)..( 7): Matrix.004 file - promoters50/4767705
taatttt

SEQ ID NO: 73006 - DNA, 12 bp, Unknown
  misc_feature (1)..( 12): Matrix.004 file - promoters50/4767705
attttaattttt

SEQ ID NO: 73007 - DNA, 9 bp, Unknown
  misc_feature (1)..( 9): Matrix.004 file - promoters50/4767705
ctatatata

SEQ ID NO: 73008 - DNA, 12 bp, Unknown
  misc_feature (1)..( 12): Matrix.004 file - promoters50/4767705
caaaaaattgat

SEQ ID NO: 73009 - DNA, 9 bp, Unknown
  misc_feature (1)..( 9): Matrix.004 file - promoters50/4767705
gaataaaat

SEQ ID NO: 73010 - DNA, 14 bp, Unknown
  misc_feature (1)..( 14): Matrix.004 file - promoters50/4767705
tgacaaaaaattta

SEQ ID NO: 73011 - DNA, 12 bp, Unknown
  misc_feature (1)..( 12): Matrix.004 file - promoters50/4767705
caaattaattaa

SEQ ID NO: 73012 - DNA, 9 bp, Unknown
  misc_feature (1)..( 9): Matrix.004 file - promoters50/4767705
tatatataa

SEQ ID NO: 73013 - DNA, 13 bp, Unknown
  misc_feature (1)..( 13): Matrix.004 file - promoters50/4767709
actaattaaagtg

SEQ ID NO: 73014 - DNA, 11 bp, Unknown
  misc_feature (1)..( 11): Matrix.004 file - promoters50/4767709
caaaaatagac

SEQ ID NO: 73015 - DNA, 7 bp, Unknown
  misc_feature (1)..( 7): Matrix.004 file - promoters50/4767715
attgtga

SEQ ID NO: 73016 - DNA, 9 bp, Unknown
  misc_feature (1)..( 9): Matrix.004 file - promoters50/4767722
atattatac

SEQ ID NO: 73017 - DNA, 14 bp, Unknown
  misc_feature (1)..( 14): Matrix.004 file - promoters50/4767722
attttaattaagaa

SEQ ID NO: 73018 - DNA, 11 bp, Unknown
  misc_feature (1)..( 11): Matrix.004 file - promoters50/4767722
gccttttatgt

SEQ ID NO: 73019 - DNA, 13 bp, Unknown
  misc_feature (1)..( 13): Matrix.004 file - promoters50/4767733
ttgttaaaaaatc

SEQ ID NO: 73020 - DNA, 7 bp, Unknown
  misc_feature (1)..( 7): Matrix.004 file - promoters50/4767733
gagaaag

SEQ ID NO: 73021 - DNA, 7 bp, Unknown
  misc_feature (1)..( 7): Matrix.004 file - promoters50/4767748
tcaaaag

SEQ ID NO: 73022 - DNA, 12 bp, Unknown
  misc_feature (1)..( 12): Matrix.004 file - promoters50/4767748
ttaataaatttt

SEQ ID NO: 73023 - DNA, 7 bp, Unknown
  misc_feature (1)..( 7): Matrix.004 file - promoters50/4767755
tatagta

SEQ ID NO: 73024 - DNA, 9 bp, Unknown
  misc_feature (1)..( 9): Matrix.004 file - promoters50/4767755
ttaatatta

SEQ ID NO: 73025 - DNA, 8 bp, Unknown
  misc_feature (1)..( 8): Matrix.004 file - promoters50/4767755
agattttt

SEQ ID NO: 73026 - DNA, 8 bp, Unknown
  misc_feature (1)..( 8): Matrix.004 file - promoters50/4767755
caaatttt

SEQ ID NO: 73027 - DNA, 8 bp, Unknown
  misc_feature (1)..( 8): Matrix.004 file - promoters50/4767755
ttttttct

SEQ ID NO: 73028 - DNA, 7 bp, Unknown
  misc_feature (1)..( 7): Matrix.004 file - promoters50/4767755
ataaaac

SEQ ID NO: 73029 - DNA, 11 bp, Unknown
  misc_feature (1)..( 11): Matrix.004 file - promoters50/4767764
caaaagaaaaa

SEQ ID NO: 73030 - DNA, 15 bp, Unknown
  misc_feature (1)..( 15): Matrix.004 file - promoters50/4767764
aaattgtatctatat

SEQ ID NO: 73031 - DNA, 11 bp, Unknown
  misc_feature (1)..( 11): Matrix.004 file - promoters50/4767764
ttataatcttt

SEQ ID NO: 73032 - DNA, 11 bp, Unknown
  misc_feature (1)..( 11): Matrix.004 file - promoters50/4767764
tagatctttat

SEQ ID NO: 73033 - DNA, 9 bp, Unknown
  misc_feature (1)..( 9): Matrix.004 file - promoters50/4767767
aaaaataac

SEQ ID NO: 73034 - DNA, 10 bp, Unknown
  misc_feature (1)..( 10): Matrix.004 file - promoters50/4767767
aaccttaaaa

SEQ ID NO: 73035 - DNA, 10 bp, Unknown
  misc_feature (1)..( 10): Matrix.004 file - promoters50/4767767
cgaatccata

SEQ ID NO: 73036 - DNA, 10 bp, Unknown
  misc_feature (1)..( 10): Matrix.004 file - promoters50/4767795
aacattaaaa

SEQ ID NO: 73037 - DNA, 13 bp, Unknown
  misc_feature (1)..( 13): Matrix.004 file - promoters50/4767795
ctcaaaattgatt

SEQ ID NO: 73038 - DNA, 10 bp, Unknown
  misc_feature (1)..( 10): Matrix.004 file - promoters50/4767795
tgattagtta

SEQ ID NO: 73039 - DNA, 8 bp, Unknown
  misc_feature (1)..( 8): Matrix.004 file - promoters50/4767799
tttcttaa

SEQ ID NO: 73040 - DNA, 9 bp, Unknown
  misc_feature (1)..( 9): Matrix.004 file - promoters50/4767799
gagattgag

SEQ ID NO: 73041 - DNA, 10 bp, Unknown
  misc_feature (1)..( 10): Matrix.004 file - promoters50/4767799
tgagcttgag

SEQ ID NO: 73042 - DNA, 8 bp, Unknown
  misc_feature (1)..( 8): Matrix.004 file - promoters50/4767803
ctaaacat

SEQ ID NO: 73043 - DNA, 7 bp, Unknown
  misc_feature (1)..( 7): Matrix.004 file - promoters50/4767803
agagttt

SEQ ID NO: 73044 - DNA, 10 bp, Unknown
  misc_feature (1)..( 10): Matrix.004 file - promoters50/4767803
ataactttct

SEQ ID NO: 73045 - DNA, 10 bp, Unknown
  misc_feature (1)..( 10): Matrix.004 file - promoters50/4767803
ataactttct

SEQ ID NO: 73046 - DNA, 8 bp, Unknown
  misc_feature (1)..( 8): Matrix.004 file - promoters50/4767821
atatcttc

SEQ ID NO: 73047 - DNA, 8 bp, Unknown
  misc_feature (1)..( 8): Matrix.004 file - promoters50/4767821
taaattaa

SEQ ID NO: 73048 - DNA, 10 bp, Unknown
  misc_feature (1)..( 10): Matrix.004 file - promoters50/4767821
taaattgaaa

SEQ ID NO: 73049 - DNA, 9 bp, Unknown
  misc_feature (1)..( 9): Matrix.004 file - promoters50/4767829
ttatatata

SEQ ID NO: 73050 - DNA, 7 bp, Unknown
  misc_feature (1)..( 7): Matrix.004 file - promoters50/4767829
aaaattt

SEQ ID NO: 73051 - DNA, 10 bp, Unknown
  misc_feature (1)..( 10): Matrix.004 file - promoters50/4767829
taaaaatttt

SEQ ID NO: 73052 - DNA, 8 bp, Unknown
  misc_feature (1)..( 8): Matrix.004 file - promoters50/4767829
ataccaac

SEQ ID NO: 73053 - DNA, 9 bp, Unknown
  misc_feature (1)..( 9): Matrix.004 file - promoters50/4767829
aacgaaaga

SEQ ID NO: 73054 - DNA, 9 bp, Unknown
  misc_feature (1)..( 9): Matrix.004 file - promoters50/4767829
catttatta

SEQ ID NO: 73055 - DNA, 10 bp, Unknown
  misc_feature (1)..( 10): Matrix.004 file - promoters50/4767829
ttttggaaat

SEQ ID NO: 73056 - DNA, 8 bp, Unknown
  misc_feature (1)..( 8): Matrix.004 file - promoters50/4767829
ttatcatt

SEQ ID NO: 73057 - DNA, 9 bp, Unknown
  misc_feature (1)..( 9): Matrix.004 file - promoters50/4767829
ataattttc

SEQ ID NO: 73058 - DNA, 9 bp, Unknown
  misc_feature (1)..( 9): Matrix.004 file - promoters50/4767837
aagaaaaga

SEQ ID NO: 73059 - DNA, 9 bp, Unknown
  misc_feature (1)..( 9): Matrix.004 file - promoters50/4767837
ttcttcaat

SEQ ID NO: 73060 - DNA, 12 bp, Unknown
  misc_feature (1)..( 12): Matrix.004 file - promoters50/4767863
acaaaaaacaat

SEQ ID NO: 73061 - DNA, 10 bp, Unknown
  misc_feature (1)..( 10): Matrix.004 file - promoters50/4767863
ataaaacata

SEQ ID NO: 73062 - DNA, 8 bp, Unknown
  misc_feature (1)..( 8): Matrix.004 file - promoters50/4767871
aagaaaaa

SEQ ID NO: 73063 - DNA, 8 bp, Unknown
  misc_feature (1)..( 8): Matrix.004 file - promoters50/4767871
ttagtagc

SEQ ID NO: 73064 - DNA, 11 bp, Unknown
  misc_feature (1)..( 11): Matrix.004 file - promoters50/4767871
tagcaaaagag

SEQ ID NO: 73065 - DNA, 10 bp, Unknown
  misc_feature (1)..( 10): Matrix.004 file - promoters50/4767871
aaatttaatt

SEQ ID NO: 73066 - DNA, 9 bp, Unknown
  misc_feature (1)..( 9): Matrix.004 file - promoters50/4767871
ttatttaaa

SEQ ID NO: 73067 - DNA, 7 bp, Unknown
  misc_feature (1)..( 7): Matrix.004 file - promoters50/4767871
ctttttg

SEQ ID NO: 73068 - DNA, 12 bp, Unknown
  misc_feature (1)..( 12): Matrix.004 file - promoters50/4767877
gaataaacattt

SEQ ID NO: 73069 - DNA, 7 bp, Unknown
  misc_feature (1)..( 7): Matrix.004 file - promoters50/4767884
aatgaaa

SEQ ID NO: 73070 - DNA, 12 bp, Unknown
  misc_feature (1)..( 12): Matrix.004 file - promoters50/4767884
ttaaaatacttt

SEQ ID NO: 73071 - DNA, 12 bp, Unknown
  misc_feature (1)..( 12): Matrix.004 file - promoters50/4767884
taatcaaaaaaa

SEQ ID NO: 73072 - DNA, 8 bp, Unknown
  misc_feature (1)..( 8): Matrix.004 file - promoters50/4767892
aaaataag

SEQ ID NO: 73073 - DNA, 11 bp, Unknown
  misc_feature (1)..( 11): Matrix.004 file - promoters50/4767892
taatacaaaat

SEQ ID NO: 73074 - DNA, 9 bp, Unknown
  misc_feature (1)..( 9): Matrix.004 file - promoters50/4767929
ttgttaaca

SEQ ID NO: 73075 - DNA, 7 bp, Unknown
  misc_feature (1)..( 7): Matrix.004 file - promoters50/4767929
ttgatca

SEQ ID NO: 73076 - DNA, 7 bp, Unknown
  misc_feature (1)..( 7): Matrix.004 file - promoters50/4767929
atttgtt

SEQ ID NO: 73077 - DNA, 9 bp, Unknown
  misc_feature (1)..( 9): Matrix.004 file - promoters50/4767929
ttaataaca

SEQ ID NO: 73078 - DNA, 8 bp, Unknown
  misc_feature (1)..( 8): Matrix.004 file - promoters50/4767929
tctaagtg

SEQ ID NO: 73079 - DNA, 8 bp, Unknown
  misc_feature (1)..( 8): Matrix.004 file - promoters50/4767933
tttcaatt

SEQ ID NO: 73080 - DNA, 8 bp, Unknown
  misc_feature (1)..( 8): Matrix.004 file - promoters50/4767933
atccaaaa

SEQ ID NO: 73081 - DNA, 7 bp, Unknown
  misc_feature (1)..( 7): Matrix.004 file - promoters50/4767933
tccttta

SEQ ID NO: 73082 - DNA, 10 bp, Unknown
  misc_feature (1)..( 10): Matrix.004 file - promoters50/4767933
ttaaaaactc

SEQ ID NO: 73083 - DNA, 10 bp, Unknown
  misc_feature (1)..( 10): Matrix.004 file - promoters50/4767948
aaattgaaac

SEQ ID NO: 73084 - DNA, 10 bp, Unknown
  misc_feature (1)..( 10): Matrix.004 file - promoters50/4767952
gtatacaaaa

SEQ ID NO: 73085 - DNA, 9 bp, Unknown
  misc_feature (1)..( 9): Matrix.004 file - promoters50/4767952
tattaaatg

SEQ ID NO: 73086 - DNA, 9 bp, Unknown
  misc_feature (1)..( 9): Matrix.004 file - promoters50/4767956
agatcaaat

SEQ ID NO: 73087 - DNA, 11 bp, Unknown
  misc_feature (1)..( 11): Matrix.004 file - promoters50/4767956
caaacataatt

SEQ ID NO: 73088 - DNA, 9 bp, Unknown
  misc_feature (1)..( 9): Matrix.004 file - promoters50/4767960
caaacaaat

SEQ ID NO: 73089 - DNA, 7 bp, Unknown
  misc_feature (1)..( 7): Matrix.004 file - promoters50/4767960
tctttga

SEQ ID NO: 73090 - DNA, 8 bp, Unknown
  misc_feature (1)..( 8): Matrix.004 file - promoters50/4767960
tcaacaaa

SEQ ID NO: 73091 - DNA, 7 bp, Unknown
  misc_feature (1)..( 7): Matrix.004 file - promoters50/4767972
gcagaat

SEQ ID NO: 73092 - DNA, 7 bp, Unknown
  misc_feature (1)..( 7): Matrix.004 file - promoters50/4767972
aaaaatc

SEQ ID NO: 73093 - DNA, 9 bp, Unknown
  misc_feature (1)..( 9): Matrix.004 file - promoters50/4767972
gaaaataat

SEQ ID NO: 73094 - DNA, 12 bp, Unknown
  misc_feature (1)..( 12): Matrix.004 file - promoters50/4767972
aaaaaaaaatat

SEQ ID NO: 73095 - DNA, 14 bp, Unknown
  misc_feature (1)..( 14): Matrix.004 file - promoters50/4767972
tatttgaaaaatat

SEQ ID NO: 73096 - DNA, 7 bp, Unknown
  misc_feature (1)..( 7): Matrix.004 file - promoters50/4767972
taatata

SEQ ID NO: 73097 - DNA, 10 bp, Unknown
  misc_feature (1)..( 10): Matrix.004 file - promoters50/4767972
aagaaaaata

SEQ ID NO: 73098 - DNA, 10 bp, Unknown
  misc_feature (1)..( 10): Matrix.004 file - promoters50/4767976
taactaattt

SEQ ID NO: 73099 - DNA, 8 bp, Unknown
  misc_feature (1)..( 8): Matrix.004 file - promoters50/4767976
ttttaatt

SEQ ID NO: 73100 - DNA, 11 bp, Unknown
  misc_feature (1)..( 11): Matrix.004 file - promoters50/4767976
tgtattaactt

SEQ ID NO: 73101 - DNA, 8 bp, Unknown
  misc_feature (1)..( 8): Matrix.004 file - promoters50/4767978
tcaaatca

SEQ ID NO: 73102 - DNA, 9 bp, Unknown
  misc_feature (1)..( 9): Matrix.004 file - promoters50/4767990
ttggaaaaa

SEQ ID NO: 73103 - DNA, 8 bp, Unknown
  misc_feature (1)..( 8): Matrix.004 file - promoters50/4768000
caaatttg

SEQ ID NO: 73104 - DNA, 8 bp, Unknown
  misc_feature (1)..( 8): Matrix.004 file - promoters50/4768000
ctcaattt

SEQ ID NO: 73105 - DNA, 9 bp, Unknown
  misc_feature (1)..( 9): Matrix.004 file - promoters50/4768000
taattgaaa

SEQ ID NO: 73106 - DNA, 7 bp, Unknown
  misc_feature (1)..( 7): Matrix.004 file - promoters50/4768000
ttattta

SEQ ID NO: 73107 - DNA, 7 bp, Unknown
  misc_feature (1)..( 7): Matrix.004 file - promoters50/4768000
ttatttt

SEQ ID NO: 73108 - DNA, 10 bp, Unknown
  misc_feature (1)..( 10): Matrix.004 file - promoters50/4768000
tttttttaaa

SEQ ID NO: 73109 - DNA, 7 bp, Unknown
  misc_feature (1)..( 7): Matrix.004 file - promoters50/4768007
ttacatt

SEQ ID NO: 73110 - DNA, 4 bp, Unknown
  misc_feature (1)..( 4): Matrix.004 file - promoters50/4768007
aaaa

SEQ ID NO: 73111 - DNA, 10 bp, Unknown
  misc_feature (1)..( 10): Matrix.004 file - promoters50/4768007
ctttccattc

SEQ ID NO: 73112 - DNA, 10 bp, Unknown
  misc_feature (1)..( 10): Matrix.004 file - promoters50/4768007
ttatatataa

SEQ ID NO: 73113 - DNA, 14 bp, Unknown
  misc_feature (1)..( 14): Matrix.004 file - promoters50/4768007
atcgtaacaaaaaa

SEQ ID NO: 73114 - DNA, 10 bp, Unknown
  misc_feature (1)..( 10): Matrix.004 file - promoters50/4768011
atataaaact

SEQ ID NO: 73115 - DNA, 8 bp, Unknown
  misc_feature (1)..( 8): Matrix.004 file - promoters50/4768011
taatacaa

SEQ ID NO: 73116 - DNA, 11 bp, Unknown
  misc_feature (1)..( 11): Matrix.004 file - promoters50/4768011
aaaatcagtaa

SEQ ID NO: 73117 - DNA, 8 bp, Unknown
  misc_feature (1)..( 8): Matrix.004 file - promoters50/4768011
tgaatatt

SEQ ID NO: 73118 - DNA, 10 bp, Unknown
  misc_feature (1)..( 10): Matrix.004 file - promoters50/4768011
gtacaaaata

SEQ ID NO: 73119 - DNA, 9 bp, Unknown
  misc_feature (1)..( 9): Matrix.004 file - promoters50/4768011
aatttaaat

SEQ ID NO: 73120 - DNA, 8 bp, Unknown
  misc_feature (1)..( 8): Matrix.004 file - promoters50/4768011
atttccaa

SEQ ID NO: 73121 - DNA, 12 bp, Unknown
  misc_feature (1)..( 12): Matrix.004 file - promoters50/4768011
gtacaaaataaa

SEQ ID NO: 73122 - DNA, 11 bp, Unknown
  misc_feature (1)..( 11): Matrix.004 file - promoters50/4768027
tttagactttt

SEQ ID NO: 73123 - DNA, 11 bp, Unknown
  misc_feature (1)..( 11): Matrix.004 file - promoters50/4768027
aaaagcttagt

SEQ ID NO: 73124 - DNA, 8 bp, Unknown
  misc_feature (1)..( 8): Matrix.004 file - promoters50/4768027
gttaatta

SEQ ID NO: 73125 - DNA, 12 bp, Unknown
  misc_feature (1)..( 12): Matrix.004 file - promoters50/4768027
aggatttgtgat

SEQ ID NO: 73126 - DNA, 13 bp, Unknown
  misc_feature (1)..( 13): Matrix.004 file - promoters50/4768027
gaggatttgtgat

SEQ ID NO: 73127 - DNA, 11 bp, Unknown
  misc_feature (1)..( 11): Matrix.004 file - promoters50/4768027
agataaaacag

SEQ ID NO: 73128 - DNA, 9 bp, Unknown
  misc_feature (1)..( 9): Matrix.004 file - promoters50/4768027
tgacacagg

SEQ ID NO: 73129 - DNA, 8 bp, Unknown
  misc_feature (1)..( 8): Matrix.004 file - promoters50/4768027
gagttaaa

SEQ ID NO: 73130 - DNA, 6 bp, Unknown
  misc_feature (1)..( 6): Matrix.004 file - promoters50/4768035
aaaaca

SEQ ID NO: 73131 - DNA, 11 bp, Unknown
  misc_feature (1)..( 11): Matrix.004 file - promoters50/4768039
gttcatgcctg

SEQ ID NO: 73132 - DNA, 12 bp, Unknown
  misc_feature (1)..( 12): Matrix.004 file - promoters50/4768039
tttattataaat

SEQ ID NO: 73133 - DNA, 11 bp, Unknown
  misc_feature (1)..( 11): Matrix.004 file - promoters50/4768039
aaaaaaaaaaa

SEQ ID NO: 73134 - DNA, 5 bp, Unknown
  misc_feature (1)..( 5): Matrix.004 file - promoters50/4768063
aaata

SEQ ID NO: 73135 - DNA, 8 bp, Unknown
  misc_feature (1)..( 8): Matrix.004 file - promoters50/4768063
caaaacaa

SEQ ID NO: 73136 - DNA, 9 bp, Unknown
  misc_feature (1)..( 9): Matrix.004 file - promoters50/4768066
tatataaat

SEQ ID NO: 73137 - DNA, 6 bp, Unknown
  misc_feature (1)..( 6): Matrix.004 file - promoters50/4768077
gtatat

SEQ ID NO: 73138 - DNA, 7 bp, Unknown
  misc_feature (1)..( 7): Matrix.004 file - promoters50/4768077
catgttt

SEQ ID NO: 73139 - DNA, 8 bp, Unknown
  misc_feature (1)..( 8): Matrix.004 file - promoters50/4768093
tttggaat

SEQ ID NO: 73140 - DNA, 11 bp, Unknown
  misc_feature (1)..( 11): Matrix.004 file - promoters50/4768093
tttttacaacc

SEQ ID NO: 73141 - DNA, 10 bp, Unknown
  misc_feature (1)..( 10): Matrix.004 file - promoters50/4768093
tatattcata

SEQ ID NO: 73142 - DNA, 9 bp, Unknown
  misc_feature (1)..( 9): Matrix.004 file - promoters50/4768093
tatttaatt

SEQ ID NO: 73143 - DNA, 10 bp, Unknown
  misc_feature (1)..( 10): Matrix.004 file - promoters50/4768093
agattttaat

SEQ ID NO: 73144 - DNA, 14 bp, Unknown
  misc_feature (1)..( 14): Matrix.004 file - promoters50/4768093
ttagattttaatat

SEQ ID NO: 73145 - DNA, 7 bp, Unknown
  misc_feature (1)..( 7): Matrix.004 file - promoters50/4768093
ctaatta

SEQ ID NO: 73146 - DNA, 14 bp, Unknown
  misc_feature (1)..( 14): Matrix.004 file - promoters50/4768093
aaaaatatatttaa

SEQ ID NO: 73147 - DNA, 10 bp, Unknown
  misc_feature (1)..( 10): Matrix.004 file - promoters50/4768093
aatcaaattt

SEQ ID NO: 73148 - DNA, 8 bp, Unknown
  misc_feature (1)..( 8): Matrix.004 file - promoters50/4768093
attacata

SEQ ID NO: 73149 - DNA, 10 bp, Unknown
  misc_feature (1)..( 10): Matrix.004 file - promoters50/4768104
tatatacata

SEQ ID NO: 73150 - DNA, 9 bp, Unknown
  misc_feature (1)..( 9): Matrix.004 file - promoters50/4768104
cacgaaaaa

SEQ ID NO: 73151 - DNA, 12 bp, Unknown
  misc_feature (1)..( 12): Matrix.004 file - promoters50/4768104
cccaaaaagatt

SEQ ID NO: 73152 - DNA, 10 bp, Unknown
  misc_feature (1)..( 10): Matrix.004 file - promoters50/4768112
aaacatttaa

SEQ ID NO: 73153 - DNA, 10 bp, Unknown
  misc_feature (1)..( 10): Matrix.004 file - promoters50/4768112
tgtgttttga

SEQ ID NO: 73154 - DNA, 11 bp, Unknown
  misc_feature (1)..( 11): Matrix.004 file - promoters50/4768112
atttataactt

SEQ ID NO: 73155 - DNA, 10 bp, Unknown
  misc_feature (1)..( 10): Matrix.004 file - promoters50/4768143
atatcttcat

SEQ ID NO: 73156 - DNA, 7 bp, Unknown
  misc_feature (1)..( 7): Matrix.004 file - promoters50/4768143
aaagaaa

SEQ ID NO: 73157 - DNA, 10 bp, Unknown
  misc_feature (1)..( 10): Matrix.004 file - promoters50/4768147
atatgacttt

SEQ ID NO: 73158 - DNA, 13 bp, Unknown
  misc_feature (1)..( 13): Matrix.004 file - promoters50/4768147
caataatttttcc

SEQ ID NO: 73159 - DNA, 7 bp, Unknown
  misc_feature (1)..( 7): Matrix.004 file - promoters50/4768147
tattata

SEQ ID NO: 73160 - DNA, 10 bp, Unknown
  misc_feature (1)..( 10): Matrix.004 file - promoters50/4768155
aaaacaataa

SEQ ID NO: 73161 - DNA, 8 bp, Unknown
  misc_feature (1)..( 8): Matrix.004 file - promoters50/4768159
atatataa

SEQ ID NO: 73162 - DNA, 7 bp, Unknown
  misc_feature (1)..( 7): Matrix.004 file - promoters50/4768169
caagggt

SEQ ID NO: 73163 - DNA, 8 bp, Unknown
  misc_feature (1)..( 8): Matrix.004 file - promoters50/4768198
gtttgaaa

SEQ ID NO: 73164 - DNA, 10 bp, Unknown
  misc_feature (1)..( 10): Matrix.004 file - promoters50/4768198
ttaaaattta

SEQ ID NO: 73165 - DNA, 11 bp, Unknown
  misc_feature (1)..( 11): Matrix.004 file - promoters50/4768198
aatcaattgtt

SEQ ID NO: 73166 - DNA, 11 bp, Unknown
  misc_feature (1)..( 11): Matrix.004 file - promoters50/4768198
tatcaaattat

SEQ ID NO: 73167 - DNA, 9 bp, Unknown
  misc_feature (1)..( 9): Matrix.004 file - promoters50/4768209
tgtgtcttc

SEQ ID NO: 73168 - DNA, 8 bp, Unknown
  misc_feature (1)..( 8): Matrix.004 file - promoters50/4768217
gttatttt

SEQ ID NO: 73169 - DNA, 10 bp, Unknown
  misc_feature (1)..( 10): Matrix.004 file - promoters50/4768236
aaagattttg

SEQ ID NO: 73170 - DNA, 9 bp, Unknown
  misc_feature (1)..( 9): Matrix.004 file - promoters50/4768236
tgaaaatat

SEQ ID NO: 73171 - DNA, 13 bp, Unknown
  misc_feature (1)..( 13): Matrix.004 file - promoters50/4768236
ctgaataaaaaaa

SEQ ID NO: 73172 - DNA, 14 bp, Unknown
  misc_feature (1)..( 14): Matrix.004 file - promoters50/4768236
gtacaaaaaaaaat

SEQ ID NO: 73173 - DNA, 9 bp, Unknown
  misc_feature (1)..( 9): Matrix.004 file - promoters50/4768236
aaaaaaatt

SEQ ID NO: 73174 - DNA, 13 bp, Unknown
  misc_feature (1)..( 13): Matrix.004 file - promoters50/4768239
aaaattattttat

SEQ ID NO: 73175 - DNA, 13 bp, Unknown
  misc_feature (1)..( 13): Matrix.004 file - promoters50/4768239
atattacaaaata

SEQ ID NO: 73176 - DNA, 11 bp, Unknown
  misc_feature (1)..( 11): Matrix.004 file - promoters50/4768239
taataattgaa

SEQ ID NO: 73177 - DNA, 10 bp, Unknown
  misc_feature (1)..( 10): Matrix.004 file - promoters50/4768246
ttttaaaact

SEQ ID NO: 73178 - DNA, 9 bp, Unknown
  misc_feature (1)..( 9): Matrix.004 file - promoters50/4768246
tttaagatt

SEQ ID NO: 73179 - DNA, 9 bp, Unknown
  misc_feature (1)..( 9): Matrix.004 file - promoters50/4768246
tatttaaat

SEQ ID NO: 73180 - DNA, 7 bp, Unknown
  misc_feature (1)..( 7): Matrix.004 file - promoters50/4768246
tatatta

SEQ ID NO: 73181 - DNA, 9 bp, Unknown
  misc_feature (1)..( 9): Matrix.004 file - promoters50/4768250
ttttgggtt

SEQ ID NO: 73182 - DNA, 9 bp, Unknown
  misc_feature (1)..( 9): Matrix.004 file - promoters50/4768250
tcttttagt

SEQ ID NO: 73183 - DNA, 11 bp, Unknown
  misc_feature (1)..( 11): Matrix.004 file - promoters50/4768250
gttataaaata

SEQ ID NO: 73184 - DNA, 10 bp, Unknown
  misc_feature (1)..( 10): Matrix.004 file - promoters50/4768250
taaaataata

SEQ ID NO: 73185 - DNA, 14 bp, Unknown
  misc_feature (1)..( 14): Matrix.004 file - promoters50/4768250
caccgacttcatta

SEQ ID NO: 73186 - DNA, 8 bp, Unknown
  misc_feature (1)..( 8): Matrix.004 file - promoters50/4768250
taaaatat

SEQ ID NO: 73187 - DNA, 7 bp, Unknown
  misc_feature (1)..( 7): Matrix.004 file - promoters50/4768253
aaaataa

SEQ ID NO: 73188 - DNA, 11 bp, Unknown
  misc_feature (1)..( 11): Matrix.004 file - promoters50/4768253
aaaaagaaaaa

SEQ ID NO: 73189 - DNA, 9 bp, Unknown
  misc_feature (1)..( 9): Matrix.004 file - promoters50/4768253
aaagaaaaa

SEQ ID NO: 73190 - DNA, 9 bp, Unknown
  misc_feature (1)..( 9): Matrix.004 file - promoters50/4768265
taattgaaa

SEQ ID NO: 73191 - DNA, 5 bp, Unknown
  misc_feature (1)..( 5): Matrix.004 file - promoters50/4768265
cattt

SEQ ID NO: 73192 - DNA, 13 bp, Unknown
  misc_feature (1)..( 13): Matrix.004 file - promoters50/4768265
gtgtattaggatt

SEQ ID NO: 73193 - DNA, 8 bp, Unknown
  misc_feature (1)..( 8): Matrix.004 file - promoters50/4768265
aaaatttg

SEQ ID NO: 73194 - DNA, 12 bp, Unknown
  misc_feature (1)..( 12): Matrix.004 file - promoters50/4768265
atcaagtttgat

SEQ ID NO: 73195 - DNA, 9 bp, Unknown
  misc_feature (1)..( 9): Matrix.004 file - promoters50/4768285
aaaacattg

SEQ ID NO: 73196 - DNA, 9 bp, Unknown
  misc_feature (1)..( 9): Matrix.004 file - promoters50/4768289
ttataaaaa

SEQ ID NO: 73197 - DNA, 9 bp, Unknown
  misc_feature (1)..( 9): Matrix.004 file - promoters50/4768289
gtttattaa

SEQ ID NO: 73198 - DNA, 7 bp, Unknown
  misc_feature (1)..( 7): Matrix.004 file - promoters50/4768293
cgagatt

SEQ ID NO: 73199 - DNA, 8 bp, Unknown
  misc_feature (1)..( 8): Matrix.004 file - promoters50/4768293
cattttca

SEQ ID NO: 73200 - DNA, 10 bp, Unknown
  misc_feature (1)..( 10): Matrix.004 file - promoters50/4768300
attttcacac

SEQ ID NO: 73201 - DNA, 9 bp, Unknown
  misc_feature (1)..( 9): Matrix.004 file - promoters50/4768300
acaagatta

SEQ ID NO: 73202 - DNA, 9 bp, Unknown
  misc_feature (1)..( 9): Matrix.004 file - promoters50/4768319
tttacttaa

SEQ ID NO: 73203 - DNA, 14 bp, Unknown
  misc_feature (1)..( 14): Matrix.004 file - promoters50/4768319
cactttctttgtct

SEQ ID NO: 73204 - DNA, 12 bp, Unknown
  misc_feature (1)..( 12): Matrix.004 file - promoters50/4768319
atagacaattgt

SEQ ID NO: 73205 - DNA, 10 bp, Unknown
  misc_feature (1)..( 10): Matrix.004 file - promoters50/4768319
attaaaaatt

SEQ ID NO: 73206 - DNA, 11 bp, Unknown
  misc_feature (1)..( 11): Matrix.004 file - promoters50/4768319
tttcattttta

SEQ ID NO: 73207 - DNA, 9 bp, Unknown
  misc_feature (1)..( 9): Matrix.004 file - promoters50/4768323
taaacaaat

SEQ ID NO: 73208 - DNA, 7 bp, Unknown
  misc_feature (1)..( 7): Matrix.004 file - promoters50/4768323
ctttttc

SEQ ID NO: 73209 - DNA, 8 bp, Unknown
  misc_feature (1)..( 8): Matrix.004 file - promoters50/4768323
tttcttat

SEQ ID NO: 73210 - DNA, 7 bp, Unknown
  misc_feature (1)..( 7): Matrix.004 file - promoters50/4768323
ttggtca

SEQ ID NO: 73211 - DNA, 7 bp, Unknown
  misc_feature (1)..( 7): Matrix.004 file - promoters50/4768346
ttttctg

SEQ ID NO: 73212 - DNA, 12 bp, Unknown
  misc_feature (1)..( 12): Matrix.004 file - promoters50/4768350
aaaatatctgaa

SEQ ID NO: 73213 - DNA, 9 bp, Unknown
  misc_feature (1)..( 9): Matrix.004 file - promoters50/4768350
gtttttgat

SEQ ID NO: 73214 - DNA, 9 bp, Unknown
  misc_feature (1)..( 9): Matrix.004 file - promoters50/4768350
agtttgtct

SEQ ID NO: 73215 - DNA, 8 bp, Unknown
  misc_feature (1)..( 8): Matrix.004 file - promoters50/4768354
tgagtttt

SEQ ID NO: 73216 - DNA, 8 bp, Unknown
  misc_feature (1)..( 8): Matrix.004 file - promoters50/4768354
aaaatttt

SEQ ID NO: 73217 - DNA, 11 bp, Unknown
  misc_feature (1)..( 11): Matrix.004 file - promoters50/4768354
taacatttttt

SEQ ID NO: 73218 - DNA, 9 bp, Unknown
  misc_feature (1)..( 9): Matrix.004 file - promoters50/4768354
tttaatcaa

SEQ ID NO: 73219 - DNA, 7 bp, Unknown
  misc_feature (1)..( 7): Matrix.004 file - promoters50/4768444
aaatcat

SEQ ID NO: 73220 - DNA, 7 bp, Unknown
  misc_feature (1)..( 7): Matrix.004 file - promoters50/4768444
accttct

SEQ ID NO: 73221 - DNA, 7 bp, Unknown
  misc_feature (1)..( 7): Matrix.004 file - promoters50/4768478
tatctta

SEQ ID NO: 73222 - DNA, 7 bp, Unknown
  misc_feature (1)..( 7): Matrix.004 file - promoters50/4768478
tgagctt

SEQ ID NO: 73223 - DNA, 10 bp, Unknown
  misc_feature (1)..( 10): Matrix.004 file - promoters50/4768499
gaaacaaatt

SEQ ID NO: 73224 - DNA, 7 bp, Unknown
  misc_feature (1)..( 7): Matrix.004 file - promoters50/4768499
atcctct

SEQ ID NO: 73225 - DNA, 11 bp, Unknown
  misc_feature (1)..( 11): Matrix.004 file - promoters50/4768514
aagtttgggtt

SEQ ID NO: 73226 - DNA, 9 bp, Unknown
  misc_feature (1)..( 9): Matrix.004 file - promoters50/4768520
gctttcgtg

SEQ ID NO: 73227 - DNA, 13 bp, Unknown
  misc_feature (1)..( 13): Matrix.004 file - promoters50/4768520
ggtttttattttc

SEQ ID NO: 73228 - DNA, 13 bp, Unknown
  misc_feature (1)..( 13): Matrix.004 file - promoters50/4768528
ggtatttattttc

SEQ ID NO: 73229 - DNA, 9 bp, Unknown
  misc_feature (1)..( 9): Matrix.004 file - promoters50/4768528
aaaatttct

SEQ ID NO: 73230 - DNA, 8 bp, Unknown
  misc_feature (1)..( 8): Matrix.004 file - promoters50/4768528
tgtgaaac

SEQ ID NO: 73231 - DNA, 9 bp, Unknown
  misc_feature (1)..( 9): Matrix.004 file - promoters50/4768528
aaaatttct

SEQ ID NO: 73232 - DNA, 9 bp, Unknown
  misc_feature (1)..( 9): Matrix.004 file - promoters50/4768532
tttcaaaat

SEQ ID NO: 73233 - DNA, 13 bp, Unknown
  misc_feature (1)..( 13): Matrix.004 file - promoters50/4768539
cctaatagataaa

SEQ ID NO: 73234 - DNA, 6 bp, Unknown
  misc_feature (1)..( 6): Matrix.004 file - promoters50/4768539
tgttat

SEQ ID NO: 73235 - DNA, 7 bp, Unknown
  misc_feature (1)..( 7): Matrix.004 file - promoters50/4768539
aaataac

SEQ ID NO: 73236 - DNA, 9 bp, Unknown
  misc_feature (1)..( 9): Matrix.004 file - promoters50/4768539
ggacacaaa

SEQ ID NO: 73237 - DNA, 6 bp, Unknown
  misc_feature (1)..( 6): Matrix.004 file - promoters50/4768539
aaaaca

SEQ ID NO: 73238 - DNA, 22 bp, Unknown
  misc_feature (1)..( 22): Matrix.004 file - promoters50/4768539
gataaaaatcaaacttcaccta

SEQ ID NO: 73239 - DNA, 8 bp, Unknown
  misc_feature (1)..( 8): Matrix.004 file - promoters50/4768539
tttatcac

SEQ ID NO: 73240 - DNA, 9 bp, Unknown
  misc_feature (1)..( 9): Matrix.004 file - promoters50/4768547
aattgtttt

SEQ ID NO: 73241 - DNA, 11 bp, Unknown
  misc_feature (1)..( 11): Matrix.004 file - promoters50/4768547
acttaaatata

SEQ ID NO: 73242 - DNA, 9 bp, Unknown
  misc_feature (1)..( 9): Matrix.004 file - promoters50/4768547
acttttata

SEQ ID NO: 73243 - DNA, 8 bp, Unknown
  misc_feature (1)..( 8): Matrix.004 file - promoters50/4768558
atttggtg

SEQ ID NO: 73244 - DNA, 7 bp, Unknown
  misc_feature (1)..( 7): Matrix.004 file - promoters50/4768558
ttaaaat

SEQ ID NO: 73245 - DNA, 7 bp, Unknown
  misc_feature (1)..( 7): Matrix.004 file - promoters50/4768558
aaaatta

SEQ ID NO: 73246 - DNA, 10 bp, Unknown
  misc_feature (1)..( 10): Matrix.004 file - promoters50/4768558
aaataattaa

SEQ ID NO: 73247 - DNA, 8 bp, Unknown
  misc_feature (1)..( 8): Matrix.004 file - promoters50/4768558
aaatataa

SEQ ID NO: 73248 - DNA, 11 bp, Unknown
  misc_feature (1)..( 11): Matrix.004 file - promoters50/4768568
aaacaaaaatt

SEQ ID NO: 73249 - DNA, 11 bp, Unknown
  misc_feature (1)..( 11): Matrix.004 file - promoters50/4768568
gaggattaatt

SEQ ID NO: 73250 - DNA, 6 bp, Unknown
  misc_feature (1)..( 6): Matrix.004 file - promoters50/4768568
cttttc

SEQ ID NO: 73251 - DNA, 9 bp, Unknown
  misc_feature (1)..( 9): Matrix.004 file - promoters50/4768599
aataaaaaa

SEQ ID NO: 73252 - DNA, 13 bp, Unknown
  misc_feature (1)..( 13): Matrix.004 file - promoters50/4768599
aattaataatttg

SEQ ID NO: 73253 - DNA, 13 bp, Unknown
  misc_feature (1)..( 13): Matrix.004 file - promoters50/4768599
aaatttgattata

SEQ ID NO: 73254 - DNA, 11 bp, Unknown
  misc_feature (1)..( 11): Matrix.004 file - promoters50/4768599
tttgaatttta

SEQ ID NO: 73255 - DNA, 6 bp, Unknown
  misc_feature (1)..( 6): Matrix.004 file - promoters50/4768599
aatatt

SEQ ID NO: 73256 - DNA, 6 bp, Unknown
  misc_feature (1)..( 6): Matrix.004 file - promoters50/4768599
tttaat

SEQ ID NO: 73257 - DNA, 12 bp, Unknown
  misc_feature (1)..( 12): Matrix.004 file - promoters50/4768615
tttgatttccat

SEQ ID NO: 73258 - DNA, 10 bp, Unknown
  misc_feature (1)..( 10): Matrix.004 file - promoters50/4768615
tttacaaaaa

SEQ ID NO: 73259 - DNA, 12 bp, Unknown
  misc_feature (1)..( 12): Matrix.004 file - promoters50/4768615
caaaaaaaatta

SEQ ID NO: 73260 - DNA, 14 bp, Unknown
  misc_feature (1)..( 14): Matrix.004 file - promoters50/4768615
aaaattaatatata

SEQ ID NO: 73261 - DNA, 10 bp, Unknown
  misc_feature (1)..( 10): Matrix.004 file - promoters50/4768615
agtaaaacaa

SEQ ID NO: 73262 - DNA, 9 bp, Unknown
  misc_feature (1)..( 9): Matrix.004 file - promoters50/4768615
acaaaaaca

SEQ ID NO: 73263 - DNA, 11 bp, Unknown
  misc_feature (1)..( 11): Matrix.004 file - promoters50/4768615
gattaacaaaa

SEQ ID NO: 73264 - DNA, 14 bp, Unknown
  misc_feature (1)..( 14): Matrix.004 file - promoters50/4768615
aacaacaaaaataa

SEQ ID NO: 73265 - DNA, 14 bp, Unknown
  misc_feature (1)..( 14): Matrix.004 file - promoters50/4768615
aacaagaaaacaat

SEQ ID NO: 73266 - DNA, 8 bp, Unknown
  misc_feature (1)..( 8): Matrix.004 file - promoters50/4768615
tataaaca

SEQ ID NO: 73267 - DNA, 12 bp, Unknown
  misc_feature (1)..( 12): Matrix.004 file - promoters50/4768615
tagttattataa

SEQ ID NO: 73268 - DNA, 10 bp, Unknown
  misc_feature (1)..( 10): Matrix.004 file - promoters50/4768615
cctatatata

SEQ ID NO: 73269 - DNA, 11 bp, Unknown
  misc_feature (1)..( 11): Matrix.004 file - promoters50/4768615
aacaacaaaaa

SEQ ID NO: 73270 - DNA, 8 bp, Unknown
  misc_feature (1)..( 8): Matrix.004 file - promoters50/4768615
aaaaaatt

SEQ ID NO: 73271 - DNA, 11 bp, Unknown
  misc_feature (1)..( 11): Matrix.004 file - promoters50/4768615
aatactaaata

SEQ ID NO: 73272 - DNA, 9 bp, Unknown
  misc_feature (1)..( 9): Matrix.004 file - promoters50/4768623
taagttaaa

SEQ ID NO: 73273 - DNA, 7 bp, Unknown
  misc_feature (1)..( 7): Matrix.004 file - promoters50/4768623
cttaata

SEQ ID NO: 73274 - DNA, 8 bp, Unknown
  misc_feature (1)..( 8): Matrix.004 file - promoters50/4768631
attattga

SEQ ID NO: 73275 - DNA, 11 bp, Unknown
  misc_feature (1)..( 11): Matrix.004 file - promoters50/4768635
tgataatctca

SEQ ID NO: 73276 - DNA, 11 bp, Unknown
  misc_feature (1)..( 11): Matrix.004 file - promoters50/4768635
tttaatgatta

SEQ ID NO: 73277 - DNA, 10 bp, Unknown
  misc_feature (1)..( 10): Matrix.004 file - promoters50/4768635
tttgatgatt

SEQ ID NO: 73278 - DNA, 10 bp, Unknown
  misc_feature (1)..( 10): Matrix.004 file - promoters50/4768635
tttgttactt

SEQ ID NO: 73279 - DNA, 7 bp, Unknown
  misc_feature (1)..( 7): Matrix.004 file - promoters50/4768635
attttta

SEQ ID NO: 73280 - DNA, 9 bp, Unknown
  misc_feature (1)..( 9): Matrix.004 file - promoters50/4768663
atcaaaatt

SEQ ID NO: 73281 - DNA, 9 bp, Unknown
  misc_feature (1)..( 9): Matrix.004 file - promoters50/4768663
aaattacaa

SEQ ID NO: 73282 - DNA, 14 bp, Unknown
  misc_feature (1)..( 14): Matrix.004 file - promoters50/4768678
atcaaagatttaaa

SEQ ID NO: 73283 - DNA, 7 bp, Unknown
  misc_feature (1)..( 7): Matrix.004 file - promoters50/4768698
caaattc

SEQ ID NO: 73284 - DNA, 15 bp, Unknown
  misc_feature (1)..( 15): Matrix.004 file - promoters50/4768698
ataactttataataa

SEQ ID NO: 73285 - DNA, 15 bp, Unknown
  misc_feature (1)..( 15): Matrix.004 file - promoters50/4768698
attgtgaaataattt

SEQ ID NO: 73286 - DNA, 11 bp, Unknown
  misc_feature (1)..( 11): Matrix.004 file - promoters50/4768698
attaataagtt

SEQ ID NO: 73287 - DNA, 12 bp, Unknown
  misc_feature (1)..( 12): Matrix.004 file - promoters50/4768698
ggccgaaaattt

SEQ ID NO: 73288 - DNA, 10 bp, Unknown
  misc_feature (1)..( 10): Matrix.004 file - promoters50/4768698
gtatataaat

SEQ ID NO: 73289 - DNA, 10 bp, Unknown
  misc_feature (1)..( 10): Matrix.004 file - promoters50/4768698
tttttgatga

SEQ ID NO: 73290 - DNA, 15 bp, Unknown
  misc_feature (1)..( 15): Matrix.004 file - promoters50/4768708
tgttaaatatgaaaa

SEQ ID NO: 73291 - DNA, 10 bp, Unknown
  misc_feature (1)..( 10): Matrix.004 file - promoters50/4768708
taagttgttt

SEQ ID NO: 73292 - DNA, 8 bp, Unknown
  misc_feature (1)..( 8): Matrix.004 file - promoters50/4768708
tttaagat

SEQ ID NO: 73293 - DNA, 10 bp, Unknown
  misc_feature (1)..( 10): Matrix.004 file - promoters50/4768708
gaagaaaaac

SEQ ID NO: 73294 - DNA, 6 bp, Unknown
  misc_feature (1)..( 6): Matrix.004 file - promoters50/4768708
tttttt

SEQ ID NO: 73295 - DNA, 8 bp, Unknown
  misc_feature (1)..( 8): Matrix.004 file - promoters50/4768754
aaagtaaa

SEQ ID NO: 73296 - DNA, 8 bp, Unknown
  misc_feature (1)..( 8): Matrix.004 file - promoters50/4768754
aaaacaat

SEQ ID NO: 73297 - DNA, 10 bp, Unknown
  misc_feature (1)..( 10): Matrix.004 file - promoters50/4768762
tatgttctgt

SEQ ID NO: 73298 - DNA, 10 bp, Unknown
  misc_feature (1)..( 10): Matrix.004 file - promoters50/4768762
tcattctcat

SEQ ID NO: 73299 - DNA, 9 bp, Unknown
  misc_feature (1)..( 9): Matrix.004 file - promoters50/4768778
ttaaattga

SEQ ID NO: 73300 - DNA, 11 bp, Unknown
  misc_feature (1)..( 11): Matrix.004 file - promoters50/4768782
aaaaaatttat

SEQ ID NO: 73301 - DNA, 12 bp, Unknown
  misc_feature (1)..( 12): Matrix.004 file - promoters50/4768782
attattcttaat

SEQ ID NO: 73302 - DNA, 9 bp, Unknown
  misc_feature (1)..( 9): Matrix.004 file - promoters50/4768782
tattgatta

SEQ ID NO: 73303 - DNA, 12 bp, Unknown
  misc_feature (1)..( 12): Matrix.004 file - promoters50/4768782
ctgatctcttct

SEQ ID NO: 73304 - DNA, 11 bp, Unknown
  misc_feature (1)..( 11): Matrix.004 file - promoters50/4768782
tatgacaacat

SEQ ID NO: 73305 - DNA, 9 bp, Unknown
  misc_feature (1)..( 9): Matrix.004 file - promoters50/4768804
cttcttata

SEQ ID NO: 73306 - DNA, 7 bp, Unknown
  misc_feature (1)..( 7): Matrix.004 file - promoters50/4768804
ctaacaa

SEQ ID NO: 73307 - DNA, 7 bp, Unknown
  misc_feature (1)..( 7): Matrix.004 file - promoters50/4768811
aattata

SEQ ID NO: 73308 - DNA, 7 bp, Unknown
  misc_feature (1)..( 7): Matrix.004 file - promoters50/4768829
atatata

SEQ ID NO: 73309 - DNA, 6 bp, Unknown
  misc_feature (1)..( 6): Matrix.004 file - promoters50/4768829
ttattt

SEQ ID NO: 73310 - DNA, 11 bp, Unknown
  misc_feature (1)..( 11): Matrix.004 file - promoters50/4768829
tatagtattaa

SEQ ID NO: 73311 - DNA, 13 bp, Unknown
  misc_feature (1)..( 13): Matrix.004 file - promoters50/4768829
aaataaattttta

SEQ ID NO: 73312 - DNA, 5 bp, Unknown
  misc_feature (1)..( 5): Matrix.004 file - promoters50/4768829
taata

SEQ ID NO: 73313 - DNA, 11 bp, Unknown
  misc_feature (1)..( 11): Matrix.004 file - promoters50/4768833
aatgtattatt

SEQ ID NO: 73314 - DNA, 9 bp, Unknown
  misc_feature (1)..( 9): Matrix.004 file - promoters50/4768833
gcaacaaat

SEQ ID NO: 73315 - DNA, 11 bp, Unknown
  misc_feature (1)..( 11): Matrix.004 file - promoters50/4768833
aaaaaaccaaa

SEQ ID NO: 73316 - DNA, 7 bp, Unknown
  misc_feature (1)..( 7): Matrix.004 file - promoters50/4768848
aaaaaat

SEQ ID NO: 73317 - DNA, 8 bp, Unknown
  misc_feature (1)..( 8): Matrix.004 file - promoters50/4768848
cattaaaa

SEQ ID NO: 73318 - DNA, 9 bp, Unknown
  misc_feature (1)..( 9): Matrix.004 file - promoters50/4768852
tggaaaata

SEQ ID NO: 73319 - DNA, 9 bp, Unknown
  misc_feature (1)..( 9): Matrix.004 file - promoters50/4768852
aaacaaaaa

SEQ ID NO: 73320 - DNA, 7 bp, Unknown
  misc_feature (1)..( 7): Matrix.004 file - promoters50/4768852
gtttaaa

SEQ ID NO: 73321 - DNA, 12 bp, Unknown
  misc_feature (1)..( 12): Matrix.004 file - promoters50/4768852
aaaatttatgca

SEQ ID NO: 73322 - DNA, 14 bp, Unknown
  misc_feature (1)..( 14): Matrix.004 file - promoters50/4768852
acaatttataacca

SEQ ID NO: 73323 - DNA, 10 bp, Unknown
  misc_feature (1)..( 10): Matrix.004 file - promoters50/4768856
actctataaa

SEQ ID NO: 73324 - DNA, 7 bp, Unknown
  misc_feature (1)..( 7): Matrix.004 file - promoters50/4768856
cataaat

SEQ ID NO: 73325 - DNA, 11 bp, Unknown
  misc_feature (1)..( 11): Matrix.004 file - promoters50/4768860
aagtaaaaaaa

SEQ ID NO: 73326 - DNA, 8 bp, Unknown
  misc_feature (1)..( 8): Matrix.004 file - promoters50/4768864
acattgaa

SEQ ID NO: 73327 - DNA, 8 bp, Unknown
  misc_feature (1)..( 8): Matrix.004 file - promoters50/4768864
aaggagaa

SEQ ID NO: 73328 - DNA, 8 bp, Unknown
  misc_feature (1)..( 8): Matrix.004 file - promoters50/4768864
ttaatttg

SEQ ID NO: 73329 - DNA, 16 bp, Unknown
  misc_feature (1)..( 16): Matrix.004 file - promoters50/4768864
aaaagaaaaaaacaaa

SEQ ID NO: 73330 - DNA, 15 bp, Unknown
  misc_feature (1)..( 15): Matrix.004 file - promoters50/4768864
aaataaaaatcacaa

SEQ ID NO: 73331 - DNA, 10 bp, Unknown
  misc_feature (1)..( 10): Matrix.004 file - promoters50/4768864
tgacgatgat

SEQ ID NO: 73332 - DNA, 7 bp, Unknown
  misc_feature (1)..( 7): Matrix.004 file - promoters50/4768864
ttaaaaa

SEQ ID NO: 73333 - DNA, 13 bp, Unknown
  misc_feature (1)..( 13): Matrix.004 file - promoters50/4768864
aaaaaaagaaaaa

SEQ ID NO: 73334 - DNA, 9 bp, Unknown
  misc_feature (1)..( 9): Matrix.004 file - promoters50/4768864
ttgaattct

SEQ ID NO: 73335 - DNA, 13 bp, Unknown
  misc_feature (1)..( 13): Matrix.004 file - promoters50/4768880
caagaaaaaaaca

SEQ ID NO: 73336 - DNA, 7 bp, Unknown
  misc_feature (1)..( 7): Matrix.004 file - promoters50/4768928
cttctct

SEQ ID NO: 73337 - DNA, 8 bp, Unknown
  misc_feature (1)..( 8): Matrix.004 file - promoters50/4769032
aaagaaaa

SEQ ID NO: 73338 - DNA, 7 bp, Unknown
  misc_feature (1)..( 7): Matrix.004 file - promoters50/4769032
tgagagg

SEQ ID NO: 73339 - DNA, 10 bp, Unknown
  misc_feature (1)..( 10): Matrix.004 file - promoters50/4769032
acacctaatt

SEQ ID NO: 73340 - DNA, 13 bp, Unknown
  misc_feature (1)..( 13): Matrix.004 file - promoters50/4769032
aacaaaaaaaaga

SEQ ID NO: 73341 - DNA, 9 bp, Unknown
  misc_feature (1)..( 9): Matrix.004 file - promoters50/4769032
agtcaaaaa

SEQ ID NO: 73342 - DNA, 7 bp, Unknown
  misc_feature (1)..( 7): Matrix.004 file - promoters50/4769048
tgagaga

SEQ ID NO: 73343 - DNA, 8 bp, Unknown
  misc_feature (1)..( 8): Matrix.004 file - promoters50/4769048
aaatttgg

SEQ ID NO: 73344 - DNA, 7 bp, Unknown
  misc_feature (1)..( 7): Matrix.004 file - promoters50/4769055
aatttgg

SEQ ID NO: 73345 - DNA, 6 bp, Unknown
  misc_feature (1)..( 6): Matrix.004 file - promoters50/4769055
aaaatt

SEQ ID NO: 73346 - DNA, 14 bp, Unknown
  misc_feature (1)..( 14): Matrix.004 file - promoters50/4769055
tttaaaattattca

SEQ ID NO: 73347 - DNA, 13 bp, Unknown
  misc_feature (1)..( 13): Matrix.004 file - promoters50/4769059
aagaaaaaacaaa

SEQ ID NO: 73348 - DNA, 12 bp, Unknown
  misc_feature (1)..( 12): Matrix.004 file - promoters50/4769075
ctagatcgttac

SEQ ID NO: 73349 - DNA, 9 bp, Unknown
  misc_feature (1)..( 9): Matrix.004 file - promoters50/4769075
ttttgattt

SEQ ID NO: 73350 - DNA, 11 bp, Unknown
  misc_feature (1)..( 11): Matrix.004 file - promoters50/4769083
acactatactg

SEQ ID NO: 73351 - DNA, 9 bp, Unknown
  misc_feature (1)..( 9): Matrix.004 file - promoters50/4769083
ttaatttat

SEQ ID NO: 73352 - DNA, 7 bp, Unknown
  misc_feature (1)..( 7): Matrix.004 file - promoters50/4769083
aatttat

SEQ ID NO: 73353 - DNA, 7 bp, Unknown
  misc_feature (1)..( 7): Matrix.004 file - promoters50/4769083
taaaata

SEQ ID NO: 73354 - DNA, 9 bp, Unknown
  misc_feature (1)..( 9): Matrix.004 file - promoters50/4769083
taaagaaaa

SEQ ID NO: 73355 - DNA, 8 bp, Unknown
  misc_feature (1)..( 8): Matrix.004 file - promoters50/4769083
aaaataaa

SEQ ID NO: 73356 - DNA, 8 bp, Unknown
  misc_feature (1)..( 8): Matrix.004 file - promoters50/4769087
ctaaaaat

SEQ ID NO: 73357 - DNA, 7 bp, Unknown
  misc_feature (1)..( 7): Matrix.004 file - promoters50/4769087
agaaaat

SEQ ID NO: 73358 - DNA, 7 bp, Unknown
  misc_feature (1)..( 7): Matrix.004 file - promoters50/4769087
tccaaaa

SEQ ID NO: 73359 - DNA, 8 bp, Unknown
  misc_feature (1)..( 8): Matrix.004 file - promoters50/4769087
aaaatttc

SEQ ID NO: 73360 - DNA, 8 bp, Unknown
  misc_feature (1)..( 8): Matrix.004 file - promoters50/4769096
ttttgaac

SEQ ID NO: 73361 - DNA, 9 bp, Unknown
  misc_feature (1)..( 9): Matrix.004 file - promoters50/4769107
tctttcagt

SEQ ID NO: 73362 - DNA, 7 bp, Unknown
  misc_feature (1)..( 7): Matrix.004 file - promoters50/4769107
aaaaaca

SEQ ID NO: 73363 - DNA, 8 bp, Unknown
  misc_feature (1)..( 8): Matrix.004 file - promoters50/4769107
caattaac

SEQ ID NO: 73364 - DNA, 9 bp, Unknown
  misc_feature (1)..( 9): Matrix.004 file - promoters50/4769107
ttctttttt

SEQ ID NO: 73365 - DNA, 11 bp, Unknown
  misc_feature (1)..( 11): Matrix.004 file - promoters50/4769107
ctttttatatt

SEQ ID NO: 73366 - DNA, 9 bp, Unknown
  misc_feature (1)..( 9): Matrix.004 file - promoters50/4769107
ttttaaaaa

SEQ ID NO: 73367 - DNA, 9 bp, Unknown
  misc_feature (1)..( 9): Matrix.004 file - promoters50/4769107
tttattttc

SEQ ID NO: 73368 - DNA, 8 bp, Unknown
  misc_feature (1)..( 8): Matrix.004 file - promoters50/4769107
gaaaatga

SEQ ID NO: 73369 - DNA, 8 bp, Unknown
  misc_feature (1)..( 8): Matrix.004 file - promoters50/4769107
aaatcaat

SEQ ID NO: 73370 - DNA, 9 bp, Unknown
  misc_feature (1)..( 9): Matrix.004 file - promoters50/4769107
ttttttata

SEQ ID NO: 73371 - DNA, 7 bp, Unknown
  misc_feature (1)..( 7): Matrix.004 file - promoters50/4769127
acaaaat

SEQ ID NO: 73372 - DNA, 9 bp, Unknown
  misc_feature (1)..( 9): Matrix.004 file - promoters50/4769127
aaagttttc

SEQ ID NO: 73373 - DNA, 7 bp, Unknown
  misc_feature (1)..( 7): Matrix.004 file - promoters50/4769127
atggaat

SEQ ID NO: 73374 - DNA, 10 bp, Unknown
  misc_feature (1)..( 10): Matrix.004 file - promoters50/4769127
gtcaaaaaaa

SEQ ID NO: 73375 - DNA, 9 bp, Unknown
  misc_feature (1)..( 9): Matrix.004 file - promoters50/4769137
attaaaaaa

SEQ ID NO: 73376 - DNA, 12 bp, Unknown
  misc_feature (1)..( 12): Matrix.004 file - promoters50/4769137
tttactttgtct

SEQ ID NO: 73377 - DNA, 10 bp, Unknown
  misc_feature (1)..( 10): Matrix.004 file - promoters50/4769141
cttcacatgc

SEQ ID NO: 73378 - DNA, 8 bp, Unknown
  misc_feature (1)..( 8): Matrix.004 file - promoters50/4769141
cctatata

SEQ ID NO: 73379 - DNA, 8 bp, Unknown
  misc_feature (1)..( 8): Matrix.004 file - promoters50/4769141
caaaaata

SEQ ID NO: 73380 - DNA, 10 bp, Unknown
  misc_feature (1)..( 10): Matrix.004 file - promoters50/4769141
tttataaaac

SEQ ID NO: 73381 - DNA, 9 bp, Unknown
  misc_feature (1)..( 9): Matrix.004 file - promoters50/4769145
tttctttta

SEQ ID NO: 73382 - DNA, 7 bp, Unknown
  misc_feature (1)..( 7): Matrix.004 file - promoters50/4769149
ttttaac

SEQ ID NO: 73383 - DNA, 12 bp, Unknown
  misc_feature (1)..( 12): Matrix.004 file - promoters50/4769149
aaacataaataa

SEQ ID NO: 73384 - DNA, 8 bp, Unknown
  misc_feature (1)..( 8): Matrix.004 file - promoters50/4769149
tatcattt

SEQ ID NO: 73385 - DNA, 10 bp, Unknown
  misc_feature (1)..( 10): Matrix.004 file - promoters50/4769149
tttcttttct

SEQ ID NO: 73386 - DNA, 8 bp, Unknown
  misc_feature (1)..( 8): Matrix.004 file - promoters50/4769149
tcttattt

SEQ ID NO: 73387 - DNA, 9 bp, Unknown
  misc_feature (1)..( 9): Matrix.004 file - promoters50/4769149
aaaataaaa

SEQ ID NO: 73388 - DNA, 9 bp, Unknown
  misc_feature (1)..( 9): Matrix.004 file - promoters50/4769149
ttttgttga

SEQ ID NO: 73389 - DNA, 6 bp, Unknown
  misc_feature (1)..( 6): Matrix.004 file - promoters50/4769149
aaagaa

SEQ ID NO: 73390 - DNA, 9 bp, Unknown
  misc_feature (1)..( 9): Matrix.004 file - promoters50/4769149
ataatttaa

SEQ ID NO: 73391 - DNA, 8 bp, Unknown
  misc_feature (1)..( 8): Matrix.004 file - promoters50/4769153
caatgatt

SEQ ID NO: 73392 - DNA, 11 bp, Unknown
  misc_feature (1)..( 11): Matrix.004 file - promoters50/4769153
aaaataaaatt

SEQ ID NO: 73393 - DNA, 8 bp, Unknown
  misc_feature (1)..( 8): Matrix.004 file - promoters50/4769153
aaaatata

SEQ ID NO: 73394 - DNA, 9 bp, Unknown
  misc_feature (1)..( 9): Matrix.004 file - promoters50/4769153
aaataaata

SEQ ID NO: 73395 - DNA, 9 bp, Unknown
  misc_feature (1)..( 9): Matrix.004 file - promoters50/4769169
caaaaatat

SEQ ID NO: 73396 - DNA, 14 bp, Unknown
  misc_feature (1)..( 14): Matrix.004 file - promoters50/4769169
ctaataacaaaaac

SEQ ID NO: 73397 - DNA, 8 bp, Unknown
  misc_feature (1)..( 8): Matrix.004 file - promoters50/4769169
aaaaaaca

SEQ ID NO: 73398 - DNA, 11 bp, Unknown
  misc_feature (1)..( 11): Matrix.004 file - promoters50/4769177
aaaaatttaaa

SEQ ID NO: 73399 - DNA, 9 bp, Unknown
  misc_feature (1)..( 9): Matrix.004 file - promoters50/4769177
atatgttca

SEQ ID NO: 73400 - DNA, 9 bp, Unknown
  misc_feature (1)..( 9): Matrix.004 file - promoters50/4769180
caatatttt

SEQ ID NO: 73401 - DNA, 13 bp, Unknown
  misc_feature (1)..( 13): Matrix.004 file - promoters50/4769180
aaaaaatattaaa

SEQ ID NO: 73402 - DNA, 10 bp, Unknown
  misc_feature (1)..( 10): Matrix.004 file - promoters50/4769180
taaattaatc

SEQ ID NO: 73403 - DNA, 12 bp, Unknown
  misc_feature (1)..( 12): Matrix.004 file - promoters50/4769184
taaataaccaat

SEQ ID NO: 73404 - DNA, 10 bp, Unknown
  misc_feature (1)..( 10): Matrix.004 file - promoters50/4769186
ttaaaaattc

SEQ ID NO: 73405 - DNA, 10 bp, Unknown
  misc_feature (1)..( 10): Matrix.004 file - promoters50/4769186
cgaaaagaaa

SEQ ID NO: 73406 - DNA, 7 bp, Unknown
  misc_feature (1)..( 7): Matrix.004 file - promoters50/4769186
aaaatat

SEQ ID NO: 73407 - DNA, 10 bp, Unknown
  misc_feature (1)..( 10): Matrix.004 file - promoters50/4769186
atgtagaaaa

SEQ ID NO: 73408 - DNA, 8 bp, Unknown
  misc_feature (1)..( 8): Matrix.004 file - promoters50/4769201
ggttttgt

SEQ ID NO: 73409 - DNA, 13 bp, Unknown
  misc_feature (1)..( 13): Matrix.004 file - promoters50/4769209
aacaaattattaa

SEQ ID NO: 73410 - DNA, 17 bp, Unknown
  misc_feature (1)..( 17): Matrix.004 file - promoters50/4769217
tatttccttctcaattt

SEQ ID NO: 73411 - DNA, 5 bp, Unknown
  misc_feature (1)..( 5): Matrix.004 file - promoters50/4769217
tttct

SEQ ID NO: 73412 - DNA, 8 bp, Unknown
  misc_feature (1)..( 8): Matrix.004 file - promoters50/4769217
atttatgt

SEQ ID NO: 73413 - DNA, 7 bp, Unknown
  misc_feature (1)..( 7): Matrix.004 file - promoters50/4769217
gttaata

SEQ ID NO: 73414 - DNA, 12 bp, Unknown
  misc_feature (1)..( 12): Matrix.004 file - promoters50/4769217
tctgtcatttta

SEQ ID NO: 73415 - DNA, 9 bp, Unknown
  misc_feature (1)..( 9): Matrix.004 file - promoters50/4769217
ataatttaa

SEQ ID NO: 73416 - DNA, 8 bp, Unknown
  misc_feature (1)..( 8): Matrix.004 file - promoters50/4769217
aatttaaa

SEQ ID NO: 73417 - DNA, 9 bp, Unknown
  misc_feature (1)..( 9): Matrix.004 file - promoters50/4769221
atactaaaa

SEQ ID NO: 73418 - DNA, 9 bp, Unknown
  misc_feature (1)..( 9): Matrix.004 file - promoters50/4769257
taaaaatta

SEQ ID NO: 73419 - DNA, 6 bp, Unknown
  misc_feature (1)..( 6): Matrix.004 file - promoters50/4769257
ttaaac

SEQ ID NO: 73420 - DNA, 10 bp, Unknown
  misc_feature (1)..( 10): Matrix.004 file - promoters50/4769257
ttttattaat

SEQ ID NO: 73421 - DNA, 8 bp, Unknown
  misc_feature (1)..( 8): Matrix.004 file - promoters50/4769257
caaaaaaa

SEQ ID NO: 73422 - DNA, 9 bp, Unknown
  misc_feature (1)..( 9): Matrix.004 file - promoters50/4769257
ttaaaattt

SEQ ID NO: 73423 - DNA, 8 bp, Unknown
  misc_feature (1)..( 8): Matrix.004 file - promoters50/4769260
aatacaaa

SEQ ID NO: 73424 - DNA, 11 bp, Unknown
  misc_feature (1)..( 11): Matrix.004 file - promoters50/4769260
atgattttttt

SEQ ID NO: 73425 - DNA, 9 bp, Unknown
  misc_feature (1)..( 9): Matrix.004 file - promoters50/4769276
ataaaaacc

SEQ ID NO: 73426 - DNA, 7 bp, Unknown
  misc_feature (1)..( 7): Matrix.004 file - promoters50/4769296
gaacatt

SEQ ID NO: 73427 - DNA, 8 bp, Unknown
  misc_feature (1)..( 8): Matrix.004 file - promoters50/4769296
acttcatc

SEQ ID NO: 73428 - DNA, 10 bp, Unknown
  misc_feature (1)..( 10): Matrix.004 file - promoters50/4769296
aaaagaaaca

SEQ ID NO: 73429 - DNA, 8 bp, Unknown
  misc_feature (1)..( 8): Matrix.004 file - promoters50/4769301
ctctatat

SEQ ID NO: 73430 - DNA, 15 bp, Unknown
  misc_feature (1)..( 15): Matrix.004 file - promoters50/4769301
agacatacaattttt

SEQ ID NO: 73431 - DNA, 8 bp, Unknown
  misc_feature (1)..( 8): Matrix.004 file - promoters50/4769301
atttttgg

SEQ ID NO: 73432 - DNA, 10 bp, Unknown
  misc_feature (1)..( 10): Matrix.004 file - promoters50/4769308
tttcaaaaaa

SEQ ID NO: 73433 - DNA, 9 bp, Unknown
  misc_feature (1)..( 9): Matrix.004 file - promoters50/4769312
atgtttgga

SEQ ID NO: 73434 - DNA, 11 bp, Unknown
  misc_feature (1)..( 11): Matrix.004 file - promoters50/4769312
tctatataaac

SEQ ID NO: 73435 - DNA, 11 bp, Unknown
  misc_feature (1)..( 11): Matrix.004 file - promoters50/4769312
caaataaaaaa

SEQ ID NO: 73436 - DNA, 10 bp, Unknown
  misc_feature (1)..( 10): Matrix.004 file - promoters50/4769320
caaatagaaa

SEQ ID NO: 73437 - DNA, 14 bp, Unknown
  misc_feature (1)..( 14): Matrix.004 file - promoters50/4769320
atttaatagtcatt

SEQ ID NO: 73438 - DNA, 8 bp, Unknown
  misc_feature (1)..( 8): Matrix.004 file - promoters50/4769320
aattttgg

SEQ ID NO: 73439 - DNA, 9 bp, Unknown
  misc_feature (1)..( 9): Matrix.004 file - promoters50/4769320
tatatttgt

SEQ ID NO: 73440 - DNA, 8 bp, Unknown
  misc_feature (1)..( 8): Matrix.004 file - promoters50/4769320
attacaca

SEQ ID NO: 73441 - DNA, 8 bp, Unknown
  misc_feature (1)..( 8): Matrix.004 file - promoters50/4769328
tatttttt

SEQ ID NO: 73442 - DNA, 12 bp, Unknown
  misc_feature (1)..( 12): Matrix.004 file - promoters50/4769328
taacaaatttgt

SEQ ID NO: 73443 - DNA, 12 bp, Unknown
  misc_feature (1)..( 12): Matrix.004 file - promoters50/4769366
tataaattttca

SEQ ID NO: 73444 - DNA, 12 bp, Unknown
  misc_feature (1)..( 12): Matrix.004 file - promoters50/4769366
actaaaaatttt

SEQ ID NO: 73445 - DNA, 9 bp, Unknown
  misc_feature (1)..( 9): Matrix.004 file - promoters50/4769366
acaactaag

SEQ ID NO: 73446 - DNA, 13 bp, Unknown
  misc_feature (1)..( 13): Matrix.004 file - promoters50/4769384
ttcttattaaaac

SEQ ID NO: 73447 - DNA, 9 bp, Unknown
  misc_feature (1)..( 9): Matrix.004 file - promoters50/4769407
gtatatata

SEQ ID NO: 73448 - DNA, 9 bp, Unknown
  misc_feature (1)..( 9): Matrix.004 file - promoters50/4769411
atattttca

SEQ ID NO: 73449 - DNA, 11 bp, Unknown
  misc_feature (1)..( 11): Matrix.004 file - promoters50/4769411
ataaaattgat

SEQ ID NO: 73450 - DNA, 7 bp, Unknown
  misc_feature (1)..( 7): Matrix.004 file - promoters50/4769413
tattaaa

SEQ ID NO: 73451 - DNA, 7 bp, Unknown
  misc_feature (1)..( 7): Matrix.004 file - promoters50/4769420
tttgttt

SEQ ID NO: 73452 - DNA, 12 bp, Unknown
  misc_feature (1)..( 12): Matrix.004 file - promoters50/4769741
aaaaagtatttt

SEQ ID NO: 73453 - DNA, 9 bp, Unknown
  misc_feature (1)..( 9): Matrix.004 file - promoters50/4769741
aaaaataaa

SEQ ID NO: 73454 - DNA, 8 bp, Unknown
  misc_feature (1)..( 8): Matrix.004 file - promoters50/4770260
atcaccaa

SEQ ID NO: 73455 - DNA, 12 bp, Unknown
  misc_feature (1)..( 12): Matrix.004 file - promoters50/4770260
ttccctttataa

SEQ ID NO: 73456 - DNA, 13 bp, Unknown
  misc_feature (1)..( 13): Matrix.004 file - promoters50/4770260
atttcaaacaaaa

SEQ ID NO: 73457 - DNA, 14 bp, Unknown
  misc_feature (1)..( 14): Matrix.004 file - promoters50/4770264
cattctaaaatttc

SEQ ID NO: 73458 - DNA, 13 bp, Unknown
  misc_feature (1)..( 13): Matrix.004 file - promoters50/4770264
tttattaaaaaaa

SEQ ID NO: 73459 - DNA, 7 bp, Unknown
  misc_feature (1)..( 7): Matrix.004 file - promoters50/4770264
aaaataa

SEQ ID NO: 73460 - DNA, 11 bp, Unknown
  misc_feature (1)..( 11): Matrix.004 file - promoters50/4770264
tcaaatatttc

SEQ ID NO: 73461 - DNA, 9 bp, Unknown
  misc_feature (1)..( 9): Matrix.004 file - promoters50/4770264
gaaaaaatt

SEQ ID NO: 73462 - DNA, 7 bp, Unknown
  misc_feature (1)..( 7): Matrix.004 file - promoters50/4770264
tttattt

SEQ ID NO: 73463 - DNA, 10 bp, Unknown
  misc_feature (1)..( 10): Matrix.004 file - promoters50/4770264
atttttaaat

SEQ ID NO: 73464 - DNA, 9 bp, Unknown
  misc_feature (1)..( 9): Matrix.004 file - promoters50/4770264
tgaaaaaat

SEQ ID NO: 73465 - DNA, 9 bp, Unknown
  misc_feature (1)..( 9): Matrix.004 file - promoters50/4770264
tgaaagaat

SEQ ID NO: 73466 - DNA, 8 bp, Unknown
  misc_feature (1)..( 8): Matrix.004 file - promoters50/4770268
gatgtatt

SEQ ID NO: 73467 - DNA, 11 bp, Unknown
  misc_feature (1)..( 11): Matrix.004 file - promoters50/4770268
aatgattttgt

SEQ ID NO: 73468 - DNA, 15 bp, Unknown
  misc_feature (1)..( 15): Matrix.004 file - promoters50/4770268
gaaatttattttgaa

SEQ ID NO: 73469 - DNA, 13 bp, Unknown
  misc_feature (1)..( 13): Matrix.004 file - promoters50/4770274
taaatttttgtta

SEQ ID NO: 73470 - DNA, 9 bp, Unknown
  misc_feature (1)..( 9): Matrix.004 file - promoters50/4770274
gattatata

SEQ ID NO: 73471 - DNA, 7 bp, Unknown
  misc_feature (1)..( 7): Matrix.004 file - promoters50/4770274
ataaata

SEQ ID NO: 73472 - DNA, 7 bp, Unknown
  misc_feature (1)..( 7): Matrix.004 file - promoters50/4770278
aaaaata

SEQ ID NO: 73473 - DNA, 11 bp, Unknown
  misc_feature (1)..( 11): Matrix.004 file - promoters50/4770278
aaatgtatttg

SEQ ID NO: 73474 - DNA, 11 bp, Unknown
  misc_feature (1)..( 11): Matrix.004 file - promoters50/4770288
aaatgtattta

SEQ ID NO: 73475 - DNA, 9 bp, Unknown
  misc_feature (1)..( 9): Matrix.004 file - promoters50/4770288
caataaaca

SEQ ID NO: 73476 - DNA, 10 bp, Unknown
  misc_feature (1)..( 10): Matrix.004 file - promoters50/4770288
aaaaaacaaa

SEQ ID NO: 73477 - DNA, 13 bp, Unknown
  misc_feature (1)..( 13): Matrix.004 file - promoters50/4770288
aaccaattaaaat

SEQ ID NO: 73478 - DNA, 9 bp, Unknown
  misc_feature (1)..( 9): Matrix.004 file - promoters50/4770288
taaaaaaat

SEQ ID NO: 73479 - DNA, 9 bp, Unknown
  misc_feature (1)..( 9): Matrix.004 file - promoters50/4770288
acaatgaaa

SEQ ID NO: 73480 - DNA, 11 bp, Unknown
  misc_feature (1)..( 11): Matrix.004 file - promoters50/4770288
ataaataaaaa

SEQ ID NO: 73481 - DNA, 11 bp, Unknown
  misc_feature (1)..( 11): Matrix.004 file - promoters50/4770305
gaaaaaaaaaa

SEQ ID NO: 73482 - DNA, 11 bp, Unknown
  misc_feature (1)..( 11): Matrix.004 file - promoters50/4770333
aaagaactata

SEQ ID NO: 73483 - DNA, 17 bp, Unknown
  misc_feature (1)..( 17): Matrix.004 file - promoters50/4770367
gaataaaagaaacaaat

SEQ ID NO: 73484 - DNA, 11 bp, Unknown
  misc_feature (1)..( 11): Matrix.004 file - promoters50/4770367
ctttgattaaa

SEQ ID NO: 73485 - DNA, 9 bp, Unknown
  misc_feature (1)..( 9): Matrix.004 file - promoters50/4770371
gtaaacagt

SEQ ID NO: 73486 - DNA, 9 bp, Unknown
  misc_feature (1)..( 9): Matrix.004 file - promoters50/4770371
taaaaaata

SEQ ID NO: 73487 - DNA, 10 bp, Unknown
  misc_feature (1)..( 10): Matrix.004 file - promoters50/4770371
taaaaagtaa

SEQ ID NO: 73488 - DNA, 8 bp, Unknown
  misc_feature (1)..( 8): Matrix.004 file - promoters50/4770371
taaaaagt

SEQ ID NO: 73489 - DNA, 13 bp, Unknown
  misc_feature (1)..( 13): Matrix.004 file - promoters50/4770371
aacataataaaaa

SEQ ID NO: 73490 - DNA, 10 bp, Unknown
  misc_feature (1)..( 10): Matrix.004 file - promoters50/4770371
taaaagaaaa

SEQ ID NO: 73491 - DNA, 8 bp, Unknown
  misc_feature (1)..( 8): Matrix.004 file - promoters50/4770371
aaaaaaga

SEQ ID NO: 73492 - DNA, 7 bp, Unknown
  misc_feature (1)..( 7): Matrix.004 file - promoters50/4770371
ccaaaaa

SEQ ID NO: 73493 - DNA, 8 bp, Unknown
  misc_feature (1)..( 8): Matrix.004 file - promoters50/4770371
caaaacaa

SEQ ID NO: 73494 - DNA, 8 bp, Unknown
  misc_feature (1)..( 8): Matrix.004 file - promoters50/4770371
agataata

SEQ ID NO: 73495 - DNA, 9 bp, Unknown
  misc_feature (1)..( 9): Matrix.004 file - promoters50/4770371
atgtatgat

SEQ ID NO: 73496 - DNA, 7 bp, Unknown
  misc_feature (1)..( 7): Matrix.004 file - promoters50/4770371
taataat

SEQ ID NO: 73497 - DNA, 12 bp, Unknown
  misc_feature (1)..( 12): Matrix.004 file - promoters50/4770379
aaagaaaaagat

SEQ ID NO: 73498 - DNA, 8 bp, Unknown
  misc_feature (1)..( 8): Matrix.004 file - promoters50/4770379
tatataaa

SEQ ID NO: 73499 - DNA, 8 bp, Unknown
  misc_feature (1)..( 8): Matrix.004 file - promoters50/4770379
aatttttt

SEQ ID NO: 73500 - DNA, 9 bp, Unknown
  misc_feature (1)..( 9): Matrix.004 file - promoters50/4770398
tttgatata

SEQ ID NO: 73501 - DNA, 9 bp, Unknown
  misc_feature (1)..( 9): Matrix.004 file - promoters50/4770406
cacaatcat

SEQ ID NO: 73502 - DNA, 9 bp, Unknown
  misc_feature (1)..( 9): Matrix.004 file - promoters50/4770406
taataaaca

SEQ ID NO: 73503 - DNA, 8 bp, Unknown
  misc_feature (1)..( 8): Matrix.004 file - promoters50/4770406
aacataaa

SEQ ID NO: 73504 - DNA, 6 bp, Unknown
  misc_feature (1)..( 6): Matrix.004 file - promoters50/4770414
tgtttt

SEQ ID NO: 73505 - DNA, 11 bp, Unknown
  misc_feature (1)..( 11): Matrix.004 file - promoters50/4770414
tcaacacaaaa

SEQ ID NO: 73506 - DNA, 6 bp, Unknown
  misc_feature (1)..( 6): Matrix.004 file - promoters50/4770428
ataaaa

SEQ ID NO: 73507 - DNA, 11 bp, Unknown
  misc_feature (1)..( 11): Matrix.004 file - promoters50/4770439
ggtttgtatga

SEQ ID NO: 73508 - DNA, 10 bp, Unknown
  misc_feature (1)..( 10): Matrix.004 file - promoters50/4770439
atacaataat

SEQ ID NO: 73509 - DNA, 7 bp, Unknown
  misc_feature (1)..( 7): Matrix.004 file - promoters50/4770443
aacaaac

SEQ ID NO: 73510 - DNA, 15 bp, Unknown
  misc_feature (1)..( 15): Matrix.004 file - promoters50/4770447
aaaaattatttattt

SEQ ID NO: 73511 - DNA, 7 bp, Unknown
  misc_feature (1)..( 7): Matrix.004 file - promoters50/4770447
ttgttta

SEQ ID NO: 73512 - DNA, 13 bp, Unknown
  misc_feature (1)..( 13): Matrix.004 file - promoters50/4770466
ttttcttactaag

SEQ ID NO: 73513 - DNA, 14 bp, Unknown
  misc_feature (1)..( 14): Matrix.004 file - promoters50/4770466
gtcttatatttcga

SEQ ID NO: 73514 - DNA, 5 bp, Unknown
  misc_feature (1)..( 5): Matrix.004 file - promoters50/4770466
ttaac

SEQ ID NO: 73515 - DNA, 13 bp, Unknown
  misc_feature (1)..( 13): Matrix.004 file - promoters50/4770481
aaacattaaatat

SEQ ID NO: 73516 - DNA, 14 bp, Unknown
  misc_feature (1)..( 14): Matrix.004 file - promoters50/4770481
ataataagcaaata

SEQ ID NO: 73517 - DNA, 9 bp, Unknown
  misc_feature (1)..( 9): Matrix.004 file - promoters50/4770481
aaaaaacat

SEQ ID NO: 73518 - DNA, 9 bp, Unknown
  misc_feature (1)..( 9): Matrix.004 file - promoters50/4770499
gcaaataaa

SEQ ID NO: 73519 - DNA, 9 bp, Unknown
  misc_feature (1)..( 9): Matrix.004 file - promoters50/4770499
ctttttaat

SEQ ID NO: 73520 - DNA, 10 bp, Unknown
  misc_feature (1)..( 10): Matrix.004 file - promoters50/4770562
aaataaaata

SEQ ID NO: 73521 - DNA, 7 bp, Unknown
  misc_feature (1)..( 7): Matrix.004 file - promoters50/4770562
caacttg

SEQ ID NO: 73522 - DNA, 7 bp, Unknown
  misc_feature (1)..( 7): Matrix.004 file - promoters50/4770562
aaaatat

SEQ ID NO: 73523 - DNA, 12 bp, Unknown
  misc_feature (1)..( 12): Matrix.004 file - promoters50/4770562
aaactgaaatta

SEQ ID NO: 73524 - DNA, 12 bp, Unknown
  misc_feature (1)..( 12): Matrix.004 file - promoters50/4770562
aaaatatgaaaa

SEQ ID NO: 73525 - DNA, 10 bp, Unknown
  misc_feature (1)..( 10): Matrix.004 file - promoters50/4770562
tatatttaaa

SEQ ID NO: 73526 - DNA, 8 bp, Unknown
  misc_feature (1)..( 8): Matrix.004 file - promoters50/4770562
tatataaa

SEQ ID NO: 73527 - DNA, 8 bp, Unknown
  misc_feature (1)..( 8): Matrix.004 file - promoters50/4770594
gaatgtaa

SEQ ID NO: 73528 - DNA, 6 bp, Unknown
  misc_feature (1)..( 6): Matrix.004 file - promoters50/4770594
caaaat

SEQ ID NO: 73529 - DNA, 13 bp, Unknown
  misc_feature (1)..( 13): Matrix.004 file - promoters50/4770594
aaaaccattacaa

SEQ ID NO: 73530 - DNA, 9 bp, Unknown
  misc_feature (1)..( 9): Matrix.004 file - promoters50/4770604
atatattaa

SEQ ID NO: 73531 - DNA, 8 bp, Unknown
  misc_feature (1)..( 8): Matrix.004 file - promoters50/4770604
tatattaa

SEQ ID NO: 73532 - DNA, 9 bp, Unknown
  misc_feature (1)..( 9): Matrix.004 file - promoters50/4770604
aataaattc

SEQ ID NO: 73533 - DNA, 9 bp, Unknown
  misc_feature (1)..( 9): Matrix.004 file - promoters50/4770604
ctattttaa

SEQ ID NO: 73534 - DNA, 9 bp, Unknown
  misc_feature (1)..( 9): Matrix.004 file - promoters50/4770604
gcaaaaaaa

SEQ ID NO: 73535 - DNA, 9 bp, Unknown
  misc_feature (1)..( 9): Matrix.004 file - promoters50/4770604
gaaaataat

SEQ ID NO: 73536 - DNA, 10 bp, Unknown
  misc_feature (1)..( 10): Matrix.004 file - promoters50/4770620
tttataattg

SEQ ID NO: 73537 - DNA, 10 bp, Unknown
  misc_feature (1)..( 10): Matrix.004 file - promoters50/4770620
atcataaatt

SEQ ID NO: 73538 - DNA, 10 bp, Unknown
  misc_feature (1)..( 10): Matrix.004 file - promoters50/4770620
aaaataacaa

SEQ ID NO: 73539 - DNA, 9 bp, Unknown
  misc_feature (1)..( 9): Matrix.004 file - promoters50/4770620
aacttacaa

SEQ ID NO: 73540 - DNA, 16 bp, Unknown
  misc_feature (1)..( 16): Matrix.004 file - promoters50/4770620
atacaaattgtctacg

SEQ ID NO: 73541 - DNA, 10 bp, Unknown
  misc_feature (1)..( 10): Matrix.004 file - promoters50/4770624
attccatttt

SEQ ID NO: 73542 - DNA, 14 bp, Unknown
  misc_feature (1)..( 14): Matrix.004 file - promoters50/4770624
aaacttaaaaaaaa

SEQ ID NO: 73543 - DNA, 13 bp, Unknown
  misc_feature (1)..( 13): Matrix.004 file - promoters50/4770647
atgaaaaaaaaaa

SEQ ID NO: 73544 - DNA, 8 bp, Unknown
  misc_feature (1)..( 8): Matrix.004 file - promoters50/4770651
taaaacgg

SEQ ID NO: 73545 - DNA, 9 bp, Unknown
  misc_feature (1)..( 9): Matrix.004 file - promoters50/4770651
atacaaaac

SEQ ID NO: 73546 - DNA, 9 bp, Unknown
  misc_feature (1)..( 9): Matrix.004 file - promoters50/4770651
caaaatttt

SEQ ID NO: 73547 - DNA, 8 bp, Unknown
  misc_feature (1)..( 8): Matrix.004 file - promoters50/4770651
tgttttgt

SEQ ID NO: 73548 - DNA, 14 bp, Unknown
  misc_feature (1)..( 14): Matrix.004 file - promoters50/4770651
aatcaaaatattat

SEQ ID NO: 73549 - DNA, 8 bp, Unknown
  misc_feature (1)..( 8): Matrix.004 file - promoters50/4770651
atcaaaat

SEQ ID NO: 73550 - DNA, 9 bp, Unknown
  misc_feature (1)..( 9): Matrix.004 file - promoters50/4770651
aattttaac

SEQ ID NO: 73551 - DNA, 14 bp, Unknown
  misc_feature (1)..( 14): Matrix.004 file - promoters50/4770651
aatcaaaattttat

SEQ ID NO: 73552 - DNA, 8 bp, Unknown
  misc_feature (1)..( 8): Matrix.004 file - promoters50/4770651
tctaattt

SEQ ID NO: 73553 - DNA, 10 bp, Unknown
  misc_feature (1)..( 10): Matrix.004 file - promoters50/4770651
atttaatata

SEQ ID NO: 73554 - DNA, 9 bp, Unknown
  misc_feature (1)..( 9): Matrix.004 file - promoters50/4770651
ataatcaaa

SEQ ID NO: 73555 - DNA, 9 bp, Unknown
  misc_feature (1)..( 9): Matrix.004 file - promoters50/4770659
caaaattta

SEQ ID NO: 73556 - DNA, 7 bp, Unknown
  misc_feature (1)..( 7): Matrix.004 file - promoters50/4770659
agtatat

SEQ ID NO: 73557 - DNA, 10 bp, Unknown
  misc_feature (1)..( 10): Matrix.004 file - promoters50/4770659
aaaataaata

SEQ ID NO: 73558 - DNA, 8 bp, Unknown
  misc_feature (1)..( 8): Matrix.004 file - promoters50/4770666
aatagata

SEQ ID NO: 73559 - DNA, 7 bp, Unknown
  misc_feature (1)..( 7): Matrix.004 file - promoters50/4770666
ttggatt

SEQ ID NO: 73560 - DNA, 7 bp, Unknown
  misc_feature (1)..( 7): Matrix.004 file - promoters50/4770880
ataattg

SEQ ID NO: 73561 - DNA, 11 bp, Unknown
  misc_feature (1)..( 11): Matrix.004 file - promoters50/4770880
caaattttaca

SEQ ID NO: 73562 - DNA, 7 bp, Unknown
  misc_feature (1)..( 7): Matrix.004 file - promoters50/4770880
gatttta

SEQ ID NO: 73563 - DNA, 9 bp, Unknown
  misc_feature (1)..( 9): Matrix.004 file - promoters50/4770880
aatgagatt

SEQ ID NO: 73564 - DNA, 8 bp, Unknown
  misc_feature (1)..( 8): Matrix.004 file - promoters50/4770880
atccatct

SEQ ID NO: 73565 - DNA, 9 bp, Unknown
  misc_feature (1)..( 9): Matrix.004 file - promoters50/4770880
aactaaaga

SEQ ID NO: 73566 - DNA, 12 bp, Unknown
  misc_feature (1)..( 12): Matrix.004 file - promoters50/4770880
tgatatgtattt

SEQ ID NO: 73567 - DNA, 8 bp, Unknown
  misc_feature (1)..( 8): Matrix.004 file - promoters50/4770880
ttaacttt

SEQ ID NO: 73568 - DNA, 6 bp, Unknown
  misc_feature (1)..( 6): Matrix.004 file - promoters50/4770880
caaatt

SEQ ID NO: 73569 - DNA, 7 bp, Unknown
  misc_feature (1)..( 7): Matrix.004 file - promoters50/4771231
tcaaatt

SEQ ID NO: 73570 - DNA, 12 bp, Unknown
  misc_feature (1)..( 12): Matrix.004 file - promoters50/4771245
tttatgtttttt

SEQ ID NO: 73571 - DNA, 8 bp, Unknown
  misc_feature (1)..( 8): Matrix.004 file - promoters50/4771245
atatttgt

SEQ ID NO: 73572 - DNA, 8 bp, Unknown
  misc_feature (1)..( 8): Matrix.004 file - promoters50/4771252
tatctgtt

SEQ ID NO: 73573 - DNA, 10 bp, Unknown
  misc_feature (1)..( 10): Matrix.004 file - promoters50/4771255
aaaggataaa

SEQ ID NO: 73574 - DNA, 8 bp, Unknown
  misc_feature (1)..( 8): Matrix.004 file - promoters50/4771255
tttgttga

SEQ ID NO: 73575 - DNA, 14 bp, Unknown
  misc_feature (1)..( 14): Matrix.004 file - promoters50/4771255
attttatctttttc

SEQ ID NO: 73576 - DNA, 12 bp, Unknown
  misc_feature (1)..( 12): Matrix.004 file - promoters50/4771271
tcttatttaaat

SEQ ID NO: 73577 - DNA, 7 bp, Unknown
  misc_feature (1)..( 7): Matrix.004 file - promoters50/4771278
atttatt

SEQ ID NO: 73578 - DNA, 10 bp, Unknown
  misc_feature (1)..( 10): Matrix.004 file - promoters50/4771282
aaaatcgaca

SEQ ID NO: 73579 - DNA, 9 bp, Unknown
  misc_feature (1)..( 9): Matrix.004 file - promoters50/4771286
tattcttac

SEQ ID NO: 73580 - DNA, 6 bp, Unknown
  misc_feature (1)..( 6): Matrix.004 file - promoters50/4771286
tatata

SEQ ID NO: 73581 - DNA, 10 bp, Unknown
  misc_feature (1)..( 10): Matrix.004 file - promoters50/4771286
aattttgaaa

SEQ ID NO: 73582 - DNA, 13 bp, Unknown
  misc_feature (1)..( 13): Matrix.004 file - promoters50/4771286
attaaaaatatta

SEQ ID NO: 73583 - DNA, 15 bp, Unknown
  misc_feature (1)..( 15): Matrix.004 file - promoters50/4771286
acatcgatccgcgtc

SEQ ID NO: 73584 - DNA, 7 bp, Unknown
  misc_feature (1)..( 7): Matrix.004 file - promoters50/4771325
ataaata

SEQ ID NO: 73585 - DNA, 7 bp, Unknown
  misc_feature (1)..( 7): Matrix.004 file - promoters50/4771325
gaaaaaa

SEQ ID NO: 73586 - DNA, 7 bp, Unknown
  misc_feature (1)..( 7): Matrix.004 file - promoters50/4771325
aagaaat

SEQ ID NO: 73587 - DNA, 11 bp, Unknown
  misc_feature (1)..( 11): Matrix.004 file - promoters50/4771325
atatttgcatt

SEQ ID NO: 73588 - DNA, 9 bp, Unknown
  misc_feature (1)..( 9): Matrix.004 file - promoters50/4771330
gtttagttg

SEQ ID NO: 73589 - DNA, 10 bp, Unknown
  misc_feature (1)..( 10): Matrix.004 file - promoters50/4771330
aagaggaaga

SEQ ID NO: 73590 - DNA, 6 bp, Unknown
  misc_feature (1)..( 6): Matrix.004 file - promoters50/4771330
gaagag

SEQ ID NO: 73591 - DNA, 10 bp, Unknown
  misc_feature (1)..( 10): Matrix.004 file - promoters50/4771330
aagaggattg

SEQ ID NO: 73592 - DNA, 8 bp, Unknown
  misc_feature (1)..( 8): Matrix.004 file - promoters50/4771334
aaaaagag

SEQ ID NO: 73593 - DNA, 11 bp, Unknown
  misc_feature (1)..( 11): Matrix.004 file - promoters50/4771334
caaaaaatatt

SEQ ID NO: 73594 - DNA, 17 bp, Unknown
  misc_feature (1)..( 17): Matrix.004 file - promoters50/4771348
gtgcttctaacaaaata

SEQ ID NO: 73595 - DNA, 7 bp, Unknown
  misc_feature (1)..( 7): Matrix.004 file - promoters50/4771348
acactgt

SEQ ID NO: 73596 - DNA, 8 bp, Unknown
  misc_feature (1)..( 8): Matrix.004 file - promoters50/4771348
tgtcttta

SEQ ID NO: 73597 - DNA, 10 bp, Unknown
  misc_feature (1)..( 10): Matrix.004 file - promoters50/4771348
cattagtaaa

SEQ ID NO: 73598 - DNA, 9 bp, Unknown
  misc_feature (1)..( 9): Matrix.004 file - promoters50/4771348
caacaattt

SEQ ID NO: 73599 - DNA, 9 bp, Unknown
  misc_feature (1)..( 9): Matrix.004 file - promoters50/4771348
tttagttat

SEQ ID NO: 73600 - DNA, 10 bp, Unknown
  misc_feature (1)..( 10): Matrix.004 file - promoters50/4771360
tagtaaatgg

SEQ ID NO: 73601 - DNA, 12 bp, Unknown
  misc_feature (1)..( 12): Matrix.004 file - promoters50/4771360
agaaaaaacgat

SEQ ID NO: 73602 - DNA, 14 bp, Unknown
  misc_feature (1)..( 14): Matrix.004 file - promoters50/4771360
aaaaatcttaactt

SEQ ID NO: 73603 - DNA, 12 bp, Unknown
  misc_feature (1)..( 12): Matrix.004 file - promoters50/4771364
caaaatataagt

SEQ ID NO: 73604 - DNA, 9 bp, Unknown
  misc_feature (1)..( 9): Matrix.004 file - promoters50/4771364
actttgaca

SEQ ID NO: 73605 - DNA, 10 bp, Unknown
  misc_feature (1)..( 10): Matrix.004 file - promoters50/4771372
atggaccaaa

SEQ ID NO: 73606 - DNA, 12 bp, Unknown
  misc_feature (1)..( 12): Matrix.004 file - promoters50/4771404
cgatgagatcta

SEQ ID NO: 73607 - DNA, 9 bp, Unknown
  misc_feature (1)..( 9): Matrix.004 file - promoters50/4771407
taatagaat

SEQ ID NO: 73608 - DNA, 13 bp, Unknown
  misc_feature (1)..( 13): Matrix.004 file - promoters50/4771407
tcaaactaattaa

SEQ ID NO: 73609 - DNA, 9 bp, Unknown
  misc_feature (1)..( 9): Matrix.004 file - promoters50/4771410
tattttcaa

SEQ ID NO: 73610 - DNA, 10 bp, Unknown
  misc_feature (1)..( 10): Matrix.004 file - promoters50/4771410
ttacttttta

SEQ ID NO: 73611 - DNA, 13 bp, Unknown
  misc_feature (1)..( 13): Matrix.004 file - promoters50/4771410
atttttactacta

SEQ ID NO: 73612 - DNA, 12 bp, Unknown
  misc_feature (1)..( 12): Matrix.004 file - promoters50/4771410
tatgaaaaatat

SEQ ID NO: 73613 - DNA, 6 bp, Unknown
  misc_feature (1)..( 6): Matrix.004 file - promoters50/4771422
aaccca

SEQ ID NO: 73614 - DNA, 6 bp, Unknown
  misc_feature (1)..( 6): Matrix.004 file - promoters50/4771422
ttttag

SEQ ID NO: 73615 - DNA, 8 bp, Unknown
  misc_feature (1)..( 8): Matrix.004 file - promoters50/4771426
aaatgaaa

SEQ ID NO: 73616 - DNA, 14 bp, Unknown
  misc_feature (1)..( 14): Matrix.004 file - promoters50/4771426
caaattacaaaatt

SEQ ID NO: 73617 - DNA, 21 bp, Unknown
  misc_feature (1)..( 21): Matrix.004 file - promoters50/4771426
aagttgctacttaaattatta

SEQ ID NO: 73618 - DNA, 17 bp, Unknown
  misc_feature (1)..( 17): Matrix.004 file - promoters50/4771426
tctttttgaagatttcg

SEQ ID NO: 73619 - DNA, 7 bp, Unknown
  misc_feature (1)..( 7): Matrix.004 file - promoters50/4771426
aaatata

SEQ ID NO: 73620 - DNA, 11 bp, Unknown
  misc_feature (1)..( 11): Matrix.004 file - promoters50/4771426
gcttattttga

SEQ ID NO: 73621 - DNA, 11 bp, Unknown
  misc_feature (1)..( 11): Matrix.004 file - promoters50/4771426
aaataaaattg

SEQ ID NO: 73622 - DNA, 12 bp, Unknown
  misc_feature (1)..( 12): Matrix.004 file - promoters50/4771426
attaaataaaaa

SEQ ID NO: 73623 - DNA, 11 bp, Unknown
  misc_feature (1)..( 11): Matrix.004 file - promoters50/4771426
aaaaataaaaa

SEQ ID NO: 73624 - DNA, 12 bp, Unknown
  misc_feature (1)..( 12): Matrix.004 file - promoters50/4771426
aaataaaaaaat

SEQ ID NO: 73625 - DNA, 9 bp, Unknown
  misc_feature (1)..( 9): Matrix.004 file - promoters50/4771433
aaaaaatta

SEQ ID NO: 73626 - DNA, 7 bp, Unknown
  misc_feature (1)..( 7): Matrix.004 file - promoters50/4771441
ttgacca

SEQ ID NO: 73627 - DNA, 8 bp, Unknown
  misc_feature (1)..( 8): Matrix.004 file - promoters50/4771441
gttttttt

SEQ ID NO: 73628 - DNA, 10 bp, Unknown
  misc_feature (1)..( 10): Matrix.004 file - promoters50/4771446
tctaatcttt

SEQ ID NO: 73629 - DNA, 8 bp, Unknown
  misc_feature (1)..( 8): Matrix.004 file - promoters50/4771446
gtttcttt

SEQ ID NO: 73630 - DNA, 8 bp, Unknown
  misc_feature (1)..( 8): Matrix.004 file - promoters50/4771446
ataaaaaa

SEQ ID NO: 73631 - DNA, 7 bp, Unknown
  misc_feature (1)..( 7): Matrix.004 file - promoters50/4771446
caaattt

SEQ ID NO: 73632 - DNA, 8 bp, Unknown
  misc_feature (1)..( 8): Matrix.004 file - promoters50/4771446
aaagaaaa

SEQ ID NO: 73633 - DNA, 10 bp, Unknown
  misc_feature (1)..( 10): Matrix.004 file - promoters50/4771457
aatgtttttt

SEQ ID NO: 73634 - DNA, 10 bp, Unknown
  misc_feature (1)..( 10): Matrix.004 file - promoters50/4771457
ggtttatttt

SEQ ID NO: 73635 - DNA, 9 bp, Unknown
  misc_feature (1)..( 9): Matrix.004 file - promoters50/4771457
aaaacctgt

SEQ ID NO: 73636 - DNA, 7 bp, Unknown
  misc_feature (1)..( 7): Matrix.004 file - promoters50/4771464
attcctt

SEQ ID NO: 73637 - DNA, 10 bp, Unknown
  misc_feature (1)..( 10): Matrix.004 file - promoters50/4771467
taaagctttg

SEQ ID NO: 73638 - DNA, 9 bp, Unknown
  misc_feature (1)..( 9): Matrix.004 file - promoters50/4771469
tataatttg

SEQ ID NO: 73639 - DNA, 7 bp, Unknown
  misc_feature (1)..( 7): Matrix.004 file - promoters50/4771469
caaaact

SEQ ID NO: 73640 - DNA, 8 bp, Unknown
  misc_feature (1)..( 8): Matrix.004 file - promoters50/4771469
cataaaat

SEQ ID NO: 73641 - DNA, 8 bp, Unknown
  misc_feature (1)..( 8): Matrix.004 file - promoters50/4771472
gaggctca

SEQ ID NO: 73642 - DNA, 8 bp, Unknown
  misc_feature (1)..( 8): Matrix.004 file - promoters50/4771472
taaacttt

SEQ ID NO: 73643 - DNA, 10 bp, Unknown
  misc_feature (1)..( 10): Matrix.004 file - promoters50/4771472
cttatataaa

SEQ ID NO: 73644 - DNA, 14 bp, Unknown
  misc_feature (1)..( 14): Matrix.004 file - promoters50/4771478
taatattttcaaaa

SEQ ID NO: 73645 - DNA, 10 bp, Unknown
  misc_feature (1)..( 10): Matrix.004 file - promoters50/4771478
gaaaataaaa

SEQ ID NO: 73646 - DNA, 12 bp, Unknown
  misc_feature (1)..( 12): Matrix.004 file - promoters50/4771478
agaaaataaaaa

SEQ ID NO: 73647 - DNA, 12 bp, Unknown
  misc_feature (1)..( 12): Matrix.004 file - promoters50/4771482
ataaaacataaa

SEQ ID NO: 73648 - DNA, 7 bp, Unknown
  misc_feature (1)..( 7): Matrix.004 file - promoters50/4771495
taaagtg

SEQ ID NO: 73649 - DNA, 9 bp, Unknown
  misc_feature (1)..( 9): Matrix.004 file - promoters50/4771495
aaattgtag

SEQ ID NO: 73650 - DNA, 11 bp, Unknown
  misc_feature (1)..( 11): Matrix.004 file - promoters50/4771495
tatttaaaatt

SEQ ID NO: 73651 - DNA, 12 bp, Unknown
  misc_feature (1)..( 12): Matrix.004 file - promoters50/4771502
ttaaattgttct

SEQ ID NO: 73652 - DNA, 7 bp, Unknown
  misc_feature (1)..( 7): Matrix.004 file - promoters50/4771502
caatttt

SEQ ID NO: 73653 - DNA, 13 bp, Unknown
  misc_feature (1)..( 13): Matrix.004 file - promoters50/4771519
atatatttcattt

SEQ ID NO: 73654 - DNA, 13 bp, Unknown
  misc_feature (1)..( 13): Matrix.004 file - promoters50/4771523
gaaatctctatta

SEQ ID NO: 73655 - DNA, 9 bp, Unknown
  misc_feature (1)..( 9): Matrix.004 file - promoters50/4771523
ttaaactaa

SEQ ID NO: 73656 - DNA, 15 bp, Unknown
  misc_feature (1)..( 15): Matrix.004 file - promoters50/4771565
tcagaaaaaatgtga

SEQ ID NO: 73657 - DNA, 10 bp, Unknown
  misc_feature (1)..( 10): Matrix.004 file - promoters50/4771565
catttgggtc

SEQ ID NO: 73658 - DNA, 12 bp, Unknown
  misc_feature (1)..( 12): Matrix.004 file - promoters50/4771565
tatatttatttt

SEQ ID NO: 73659 - DNA, 10 bp, Unknown
  misc_feature (1)..( 10): Matrix.004 file - promoters50/4771579
ttttttactt

SEQ ID NO: 73660 - DNA, 7 bp, Unknown
  misc_feature (1)..( 7): Matrix.004 file - promoters50/4771586
aaacaaa

SEQ ID NO: 73661 - DNA, 13 bp, Unknown
  misc_feature (1)..( 13): Matrix.004 file - promoters50/4771586
ttataaaattgat

SEQ ID NO: 73662 - DNA, 10 bp, Unknown
  misc_feature (1)..( 10): Matrix.004 file - promoters50/4771601
aataaaattt

SEQ ID NO: 73663 - DNA, 8 bp, Unknown
  misc_feature (1)..( 8): Matrix.004 file - promoters50/4771601
aaaaagtt

SEQ ID NO: 73664 - DNA, 11 bp, Unknown
  misc_feature (1)..( 11): Matrix.004 file - promoters50/4771601
aaaacttaaaa

SEQ ID NO: 73665 - DNA, 14 bp, Unknown
  misc_feature (1)..( 14): Matrix.004 file - promoters50/4771601
atatatgtatctct

SEQ ID NO: 73666 - DNA, 7 bp, Unknown
  misc_feature (1)..( 7): Matrix.004 file - promoters50/4771601
atatata

SEQ ID NO: 73667 - DNA, 10 bp, Unknown
  misc_feature (1)..( 10): Matrix.004 file - promoters50/4771612
tatcaaacaa

SEQ ID NO: 73668 - DNA, 8 bp, Unknown
  misc_feature (1)..( 8): Matrix.004 file - promoters50/4771612
cgaatctt

SEQ ID NO: 73669 - DNA, 8 bp, Unknown
  misc_feature (1)..( 8): Matrix.004 file - promoters50/4771612
ttcacaaa

SEQ ID NO: 73670 - DNA, 8 bp, Unknown
  misc_feature (1)..( 8): Matrix.004 file - promoters50/4771616
aaatcaaa

SEQ ID NO: 73671 - DNA, 8 bp, Unknown
  misc_feature (1)..( 8): Matrix.004 file - promoters50/4771616
caataatg

SEQ ID NO: 73672 - DNA, 10 bp, Unknown
  misc_feature (1)..( 10): Matrix.004 file - promoters50/4771616
ttcatagata

SEQ ID NO: 73673 - DNA, 10 bp, Unknown
  misc_feature (1)..( 10): Matrix.004 file - promoters50/4771616
aaaaaaaaat

SEQ ID NO: 73674 - DNA, 7 bp, Unknown
  misc_feature (1)..( 7): Matrix.004 file - promoters50/4771616
ataaata

SEQ ID NO: 73675 - DNA, 8 bp, Unknown
  misc_feature (1)..( 8): Matrix.004 file - promoters50/4771616
aaaatttt

SEQ ID NO: 73676 - DNA, 12 bp, Unknown
  misc_feature (1)..( 12): Matrix.004 file - promoters50/4771616
gttactatcttt

SEQ ID NO: 73677 - DNA, 10 bp, Unknown
  misc_feature (1)..( 10): Matrix.004 file - promoters50/4771616
taaaaaaaat

SEQ ID NO: 73678 - DNA, 8 bp, Unknown
  misc_feature (1)..( 8): Matrix.004 file - promoters50/4771616
taaaaaaa

SEQ ID NO: 73679 - DNA, 6 bp, Unknown
  misc_feature (1)..( 6): Matrix.004 file - promoters50/4771616
acaatt

SEQ ID NO: 73680 - DNA, 8 bp, Unknown
  misc_feature (1)..( 8): Matrix.004 file - promoters50/4771616
ttagaaaa

SEQ ID NO: 73681 - DNA, 8 bp, Unknown
  misc_feature (1)..( 8): Matrix.004 file - promoters50/4771620
taaaaaaa

SEQ ID NO: 73682 - DNA, 7 bp, Unknown
  misc_feature (1)..( 7): Matrix.004 file - promoters50/4771620
ttatatt

SEQ ID NO: 73683 - DNA, 8 bp, Unknown
  misc_feature (1)..( 8): Matrix.004 file - promoters50/4771624
catacatt

SEQ ID NO: 73684 - DNA, 11 bp, Unknown
  misc_feature (1)..( 11): Matrix.004 file - promoters50/4771624
ggattttcaaa

SEQ ID NO: 73685 - DNA, 8 bp, Unknown
  misc_feature (1)..( 8): Matrix.004 file - promoters50/4771624
tttataaa

SEQ ID NO: 73686 - DNA, 12 bp, Unknown
  misc_feature (1)..( 12): Matrix.004 file - promoters50/4771624
tataaaaagaag

SEQ ID NO: 73687 - DNA, 9 bp, Unknown
  misc_feature (1)..( 9): Matrix.004 file - promoters50/4771638
aagaaaatt

SEQ ID NO: 73688 - DNA, 11 bp, Unknown
  misc_feature (1)..( 11): Matrix.004 file - promoters50/4771638
agtgattaatc

SEQ ID NO: 73689 - DNA, 10 bp, Unknown
  misc_feature (1)..( 10): Matrix.004 file - promoters50/4771638
tttattaaag

SEQ ID NO: 73690 - DNA, 9 bp, Unknown
  misc_feature (1)..( 9): Matrix.004 file - promoters50/4771646
ttttataca

SEQ ID NO: 73691 - DNA, 9 bp, Unknown
  misc_feature (1)..( 9): Matrix.004 file - promoters50/4771658
attaatatt

SEQ ID NO: 73692 - DNA, 8 bp, Unknown
  misc_feature (1)..( 8): Matrix.004 file - promoters50/4771658
catgtttt

SEQ ID NO: 73693 - DNA, 7 bp, Unknown
  misc_feature (1)..( 7): Matrix.004 file - promoters50/4771674
gatagaa

SEQ ID NO: 73694 - DNA, 7 bp, Unknown
  misc_feature (1)..( 7): Matrix.004 file - promoters50/4771677
attcaat

SEQ ID NO: 73695 - DNA, 7 bp, Unknown
  misc_feature (1)..( 7): Matrix.004 file - promoters50/4771677
aaaatta

SEQ ID NO: 73696 - DNA, 13 bp, Unknown
  misc_feature (1)..( 13): Matrix.004 file - promoters50/4771677
ccataaaacaaac

SEQ ID NO: 73697 - DNA, 10 bp, Unknown
  misc_feature (1)..( 10): Matrix.004 file - promoters50/4771677
caatgtcaat

SEQ ID NO: 73698 - DNA, 11 bp, Unknown
  misc_feature (1)..( 11): Matrix.004 file - promoters50/4771677
aaaaaccaaaa

SEQ ID NO: 73699 - DNA, 8 bp, Unknown
  misc_feature (1)..( 8): Matrix.004 file - promoters50/4771713
aacaataa

SEQ ID NO: 73700 - DNA, 8 bp, Unknown
  misc_feature (1)..( 8): Matrix.004 file - promoters50/4771713
aaattggg

SEQ ID NO: 73701 - DNA, 8 bp, Unknown
  misc_feature (1)..( 8): Matrix.004 file - promoters50/4771713
ttattaag

SEQ ID NO: 73702 - DNA, 8 bp, Unknown
  misc_feature (1)..( 8): Matrix.004 file - promoters50/4771713
aataaaac

SEQ ID NO: 73703 - DNA, 11 bp, Unknown
  misc_feature (1)..( 11): Matrix.004 file - promoters50/4771713
aaacaattatt

SEQ ID NO: 73704 - DNA, 7 bp, Unknown
  misc_feature (1)..( 7): Matrix.004 file - promoters50/4771713
atttatt

SEQ ID NO: 73705 - DNA, 9 bp, Unknown
  misc_feature (1)..( 9): Matrix.004 file - promoters50/4771713
aaatttgtt

SEQ ID NO: 73706 - DNA, 10 bp, Unknown
  misc_feature (1)..( 10): Matrix.004 file - promoters50/4771725
aaaagaaaag

SEQ ID NO: 73707 - DNA, 13 bp, Unknown
  misc_feature (1)..( 13): Matrix.004 file - promoters50/4771725
cagagtaattaaa

SEQ ID NO: 73708 - DNA, 8 bp, Unknown
  misc_feature (1)..( 8): Matrix.004 file - promoters50/4771737
atcaaata

SEQ ID NO: 73709 - DNA, 10 bp, Unknown
  misc_feature (1)..( 10): Matrix.004 file - promoters50/4771741
atgaaaataa

SEQ ID NO: 73710 - DNA, 8 bp, Unknown
  misc_feature (1)..( 8): Matrix.004 file - promoters50/4771741
taaaagaa

SEQ ID NO: 73711 - DNA, 12 bp, Unknown
  misc_feature (1)..( 12): Matrix.004 file - promoters50/4771741
cactttctctct

SEQ ID NO: 73712 - DNA, 10 bp, Unknown
  misc_feature (1)..( 10): Matrix.004 file - promoters50/4771741
tttaattatt

SEQ ID NO: 73713 - DNA, 8 bp, Unknown
  misc_feature (1)..( 8): Matrix.004 file - promoters50/4771741
aaaaaaaa

SEQ ID NO: 73714 - DNA, 8 bp, Unknown
  misc_feature (1)..( 8): Matrix.004 file - promoters50/4771741
tataaata

SEQ ID NO: 73715 - DNA, 8 bp, Unknown
  misc_feature (1)..( 8): Matrix.004 file - promoters50/4771745
ttttaatt

SEQ ID NO: 73716 - DNA, 8 bp, Unknown
  misc_feature (1)..( 8): Matrix.004 file - promoters50/4771785
ggataatt

SEQ ID NO: 73717 - DNA, 8 bp, Unknown
  misc_feature (1)..( 8): Matrix.004 file - promoters50/4771785
atatttta

SEQ ID NO: 73718 - DNA, 11 bp, Unknown
  misc_feature (1)..( 11): Matrix.004 file - promoters50/4771785
gatattataaa

SEQ ID NO: 73719 - DNA, 7 bp, Unknown
  misc_feature (1)..( 7): Matrix.004 file - promoters50/4771785
atattat

SEQ ID NO: 73720 - DNA, 11 bp, Unknown
  misc_feature (1)..( 11): Matrix.004 file - promoters50/4771785
ataaatgaaga

SEQ ID NO: 73721 - DNA, 9 bp, Unknown
  misc_feature (1)..( 9): Matrix.004 file - promoters50/4771785
tatatttaa

SEQ ID NO: 73722 - DNA, 7 bp, Unknown
  misc_feature (1)..( 7): Matrix.004 file - promoters50/4771785
gatttat

SEQ ID NO: 73723 - DNA, 7 bp, Unknown
  misc_feature (1)..( 7): Matrix.004 file - promoters50/4771785
tattttt

SEQ ID NO: 73724 - DNA, 8 bp, Unknown
  misc_feature (1)..( 8): Matrix.004 file - promoters50/4771785
tattttta

SEQ ID NO: 73725 - DNA, 9 bp, Unknown
  misc_feature (1)..( 9): Matrix.004 file - promoters50/4771785
atggatttt

SEQ ID NO: 73726 - DNA, 9 bp, Unknown
  misc_feature (1)..( 9): Matrix.004 file - promoters50/4771785
agaaatata

SEQ ID NO: 73727 - DNA, 8 bp, Unknown
  misc_feature (1)..( 8): Matrix.004 file - promoters50/4771785
aagtgaat

SEQ ID NO: 73728 - DNA, 14 bp, Unknown
  misc_feature (1)..( 14): Matrix.004 file - promoters50/4771785
ttaacaattttttt

SEQ ID NO: 73729 - DNA, 13 bp, Unknown
  misc_feature (1)..( 13): Matrix.004 file - promoters50/4771785
ttaaaaatttatt

SEQ ID NO: 73730 - DNA, 13 bp, Unknown
  misc_feature (1)..( 13): Matrix.004 file - promoters50/4771785
ttgaatcaatatt

SEQ ID NO: 73731 - DNA, 7 bp, Unknown
  misc_feature (1)..( 7): Matrix.004 file - promoters50/4771785
tgaaaaa

SEQ ID NO: 73732 - DNA, 9 bp, Unknown
  misc_feature (1)..( 9): Matrix.004 file - promoters50/4771789
taaatttct

SEQ ID NO: 73733 - DNA, 14 bp, Unknown
  misc_feature (1)..( 14): Matrix.004 file - promoters50/4771789
gtatttaagttttt

SEQ ID NO: 73734 - DNA, 12 bp, Unknown
  misc_feature (1)..( 12): Matrix.004 file - promoters50/4771789
tttttgtttgtt

SEQ ID NO: 73735 - DNA, 8 bp, Unknown
  misc_feature (1)..( 8): Matrix.004 file - promoters50/4771789
aaataaat

SEQ ID NO: 73736 - DNA, 8 bp, Unknown
  misc_feature (1)..( 8): Matrix.004 file - promoters50/4771793
aaccaaaa

SEQ ID NO: 73737 - DNA, 8 bp, Unknown
  misc_feature (1)..( 8): Matrix.004 file - promoters50/4771793
tacttttt

SEQ ID NO: 73738 - DNA, 9 bp, Unknown
  misc_feature (1)..( 9): Matrix.004 file - promoters50/4771793
ttaaaaaaa

SEQ ID NO: 73739 - DNA, 10 bp, Unknown
  misc_feature (1)..( 10): Matrix.004 file - promoters50/4771808
aattgaaaaa

SEQ ID NO: 73740 - DNA, 9 bp, Unknown
  misc_feature (1)..( 9): Matrix.004 file - promoters50/4771872
gaaactaaa

SEQ ID NO: 73741 - DNA, 12 bp, Unknown
  misc_feature (1)..( 12): Matrix.004 file - promoters50/4771872
aattaaattgtt

SEQ ID NO: 73742 - DNA, 13 bp, Unknown
  misc_feature (1)..( 13): Matrix.004 file - promoters50/4771872
attgtttaaagaa

SEQ ID NO: 73743 - DNA, 8 bp, Unknown
  misc_feature (1)..( 8): Matrix.004 file - promoters50/4771879
ggataagc

SEQ ID NO: 73744 - DNA, 12 bp, Unknown
  misc_feature (1)..( 12): Matrix.004 file - promoters50/4771879
gtcatatctaat

SEQ ID NO: 73745 - DNA, 8 bp, Unknown
  misc_feature (1)..( 8): Matrix.004 file - promoters50/4771883
gtaatttg

SEQ ID NO: 73746 - DNA, 15 bp, Unknown
  misc_feature (1)..( 15): Matrix.004 file - promoters50/4771883
aataacatatatata

SEQ ID NO: 73747 - DNA, 10 bp, Unknown
  misc_feature (1)..( 10): Matrix.004 file - promoters50/4771883
aaatacaaag

SEQ ID NO: 73748 - DNA, 9 bp, Unknown
  misc_feature (1)..( 9): Matrix.004 file - promoters50/4771883
aaataatta

SEQ ID NO: 73749 - DNA, 8 bp, Unknown
  misc_feature (1)..( 8): Matrix.004 file - promoters50/4771895
tcggttta

SEQ ID NO: 73750 - DNA, 12 bp, Unknown
  misc_feature (1)..( 12): Matrix.004 file - promoters50/4771895
aatttagatctt

SEQ ID NO: 73751 - DNA, 16 bp, Unknown
  misc_feature (1)..( 16): Matrix.004 file - promoters50/4771903
tatcaaaaaaactaaa

SEQ ID NO: 73752 - DNA, 5 bp, Unknown
  misc_feature (1)..( 5): Matrix.004 file - promoters50/4771903
gttct

SEQ ID NO: 73753 - DNA, 13 bp, Unknown
  misc_feature (1)..( 13): Matrix.004 file - promoters50/4771903
ttgaataaaaatt

SEQ ID NO: 73754 - DNA, 10 bp, Unknown
  misc_feature (1)..( 10): Matrix.004 file - promoters50/4771903
acttatttga

SEQ ID NO: 73755 - DNA, 11 bp, Unknown
  misc_feature (1)..( 11): Matrix.004 file - promoters50/4771903
gataaaattaa

SEQ ID NO: 73756 - DNA, 7 bp, Unknown
  misc_feature (1)..( 7): Matrix.004 file - promoters50/4771903
atttttt

SEQ ID NO: 73757 - DNA, 10 bp, Unknown
  misc_feature (1)..( 10): Matrix.004 file - promoters50/4771903
aaaattattt

SEQ ID NO: 73758 - DNA, 9 bp, Unknown
  misc_feature (1)..( 9): Matrix.004 file - promoters50/4771911
aaaaattat

SEQ ID NO: 73759 - DNA, 13 bp, Unknown
  misc_feature (1)..( 13): Matrix.004 file - promoters50/4771911
gaaacaaaaacat

SEQ ID NO: 73760 - DNA, 9 bp, Unknown
  misc_feature (1)..( 9): Matrix.004 file - promoters50/4771911
aaaataaaa

SEQ ID NO: 73761 - DNA, 8 bp, Unknown
  misc_feature (1)..( 8): Matrix.004 file - promoters50/4771911
aaaatatc

SEQ ID NO: 73762 - DNA, 8 bp, Unknown
  misc_feature (1)..( 8): Matrix.004 file - promoters50/4771911
aacaaaat

SEQ ID NO: 73763 - DNA, 13 bp, Unknown
  misc_feature (1)..( 13): Matrix.004 file - promoters50/4771911
tttggaaaagaaa

SEQ ID NO: 73764 - DNA, 8 bp, Unknown
  misc_feature (1)..( 8): Matrix.004 file - promoters50/4771911
ttatttat

SEQ ID NO: 73765 - DNA, 11 bp, Unknown
  misc_feature (1)..( 11): Matrix.004 file - promoters50/4771913
aaaaaaagaaa

SEQ ID NO: 73766 - DNA, 9 bp, Unknown
  misc_feature (1)..( 9): Matrix.004 file - promoters50/4771913
caaagatat

SEQ ID NO: 73767 - DNA, 10 bp, Unknown
  misc_feature (1)..( 10): Matrix.004 file - promoters50/4771928
cacaaaaaaa

SEQ ID NO: 73768 - DNA, 9 bp, Unknown
  misc_feature (1)..( 9): Matrix.004 file - promoters50/4771928
agaaattta

SEQ ID NO: 73769 - DNA, 8 bp, Unknown
  misc_feature (1)..( 8): Matrix.004 file - promoters50/4771928
atttttgg

SEQ ID NO: 73770 - DNA, 8 bp, Unknown
  misc_feature (1)..( 8): Matrix.004 file - promoters50/4771928
aataaatc

SEQ ID NO: 73771 - DNA, 10 bp, Unknown
  misc_feature (1)..( 10): Matrix.004 file - promoters50/4771944
tttcaaaaaa

SEQ ID NO: 73772 - DNA, 13 bp, Unknown
  misc_feature (1)..( 13): Matrix.004 file - promoters50/4771944
ttaaataaaaact

SEQ ID NO: 73773 - DNA, 16 bp, Unknown
  misc_feature (1)..( 16): Matrix.004 file - promoters50/4771952
tactgtttttcattct

SEQ ID NO: 73774 - DNA, 8 bp, Unknown
  misc_feature (1)..( 8): Matrix.004 file - promoters50/4771956
ctcaaatt

SEQ ID NO: 73775 - DNA, 11 bp, Unknown
  misc_feature (1)..( 11): Matrix.004 file - promoters50/4771956
aaactatttaa

SEQ ID NO: 73776 - DNA, 10 bp, Unknown
  misc_feature (1)..( 10): Matrix.004 file - promoters50/4771960
taaataagtt

SEQ ID NO: 73777 - DNA, 10 bp, Unknown
  misc_feature (1)..( 10): Matrix.004 file - promoters50/4771960
caaatacttg

SEQ ID NO: 73778 - DNA, 13 bp, Unknown
  misc_feature (1)..( 13): Matrix.004 file - promoters50/4771960
caaaaataaaatc

SEQ ID NO: 73779 - DNA, 9 bp, Unknown
  misc_feature (1)..( 9): Matrix.004 file - promoters50/4771968
aaacattaa

SEQ ID NO: 73780 - DNA, 5 bp, Unknown
  misc_feature (1)..( 5): Matrix.004 file - promoters50/4771968
catat

SEQ ID NO: 73781 - DNA, 11 bp, Unknown
  misc_feature (1)..( 11): Matrix.004 file - promoters50/4771972
tatatataatc

SEQ ID NO: 73782 - DNA, 9 bp, Unknown
  misc_feature (1)..( 9): Matrix.004 file - promoters50/4771972
gaaacaaaa

SEQ ID NO: 73783 - DNA, 8 bp, Unknown
  misc_feature (1)..( 8): Matrix.004 file - promoters50/4771972
ttttgttt

SEQ ID NO: 73784 - DNA, 7 bp, Unknown
  misc_feature (1)..( 7): Matrix.004 file - promoters50/4771972
taaaaat

SEQ ID NO: 73785 - DNA, 10 bp, Unknown
  misc_feature (1)..( 10): Matrix.004 file - promoters50/4771975
taaaataaaa

SEQ ID NO: 73786 - DNA, 7 bp, Unknown
  misc_feature (1)..( 7): Matrix.004 file - promoters50/4771990
acttaat

SEQ ID NO: 73787 - DNA, 8 bp, Unknown
  misc_feature (1)..( 8): Matrix.004 file - promoters50/4772005
aataaaat

SEQ ID NO: 73788 - DNA, 12 bp, Unknown
  misc_feature (1)..( 12): Matrix.004 file - promoters50/4772005
tctttttaaatt

SEQ ID NO: 73789 - DNA, 11 bp, Unknown
  misc_feature (1)..( 11): Matrix.004 file - promoters50/4772005
ataatatacat

SEQ ID NO: 73790 - DNA, 10 bp, Unknown
  misc_feature (1)..( 10): Matrix.004 file - promoters50/4772042
tttgaatatt

SEQ ID NO: 73791 - DNA, 8 bp, Unknown
  misc_feature (1)..( 8): Matrix.004 file - promoters50/4772042
taaaaaca

SEQ ID NO: 73792 - DNA, 8 bp, Unknown
  misc_feature (1)..( 8): Matrix.004 file - promoters50/4772050
ttatcttt

SEQ ID NO: 73793 - DNA, 10 bp, Unknown
  misc_feature (1)..( 10): Matrix.004 file - promoters50/4772062
aacaacatgt

SEQ ID NO: 73794 - DNA, 10 bp, Unknown
  misc_feature (1)..( 10): Matrix.004 file - promoters50/4772062
aataattaat

SEQ ID NO: 73795 - DNA, 9 bp, Unknown
  misc_feature (1)..( 9): Matrix.004 file - promoters50/4772062
tatttggta

SEQ ID NO: 73796 - DNA, 12 bp, Unknown
  misc_feature (1)..( 12): Matrix.004 file - promoters50/4772062
tgaacaaaatta

SEQ ID NO: 73797 - DNA, 7 bp, Unknown
  misc_feature (1)..( 7): Matrix.004 file - promoters50/4772062
aaaaaaa

SEQ ID NO: 73798 - DNA, 16 bp, Unknown
  misc_feature (1)..( 16): Matrix.004 file - promoters50/4772062
ttaaaaaaaattaatg

SEQ ID NO: 73799 - DNA, 11 bp, Unknown
  misc_feature (1)..( 11): Matrix.004 file - promoters50/4772062
ttaaaaaaaat

SEQ ID NO: 73800 - DNA, 11 bp, Unknown
  misc_feature (1)..( 11): Matrix.004 file - promoters50/4772066
aagaaaaatta

SEQ ID NO: 73801 - DNA, 12 bp, Unknown
  misc_feature (1)..( 12): Matrix.004 file - promoters50/4772066
actatagatcaa

SEQ ID NO: 73802 - DNA, 9 bp, Unknown
  misc_feature (1)..( 9): Matrix.004 file - promoters50/4772070
ttggatgat

SEQ ID NO: 73803 - DNA, 9 bp, Unknown
  misc_feature (1)..( 9): Matrix.004 file - promoters50/4772084
tgatggtac

SEQ ID NO: 73804 - DNA, 8 bp, Unknown
  misc_feature (1)..( 8): Matrix.004 file - promoters50/4772084
aacttatt

SEQ ID NO: 73805 - DNA, 10 bp, Unknown
  misc_feature (1)..( 10): Matrix.004 file - promoters50/4772084
aaaaatgata

SEQ ID NO: 73806 - DNA, 14 bp, Unknown
  misc_feature (1)..( 14): Matrix.004 file - promoters50/4772084
tttaaacaattata

SEQ ID NO: 73807 - DNA, 6 bp, Unknown
  misc_feature (1)..( 6): Matrix.004 file - promoters50/4772084
taattt

SEQ ID NO: 73808 - DNA, 9 bp, Unknown
  misc_feature (1)..( 9): Matrix.004 file - promoters50/4772084
gatactttt

SEQ ID NO: 73809 - DNA, 9 bp, Unknown
  misc_feature (1)..( 9): Matrix.004 file - promoters50/4772095
taataaaaa

SEQ ID NO: 73810 - DNA, 14 bp, Unknown
  misc_feature (1)..( 14): Matrix.004 file - promoters50/4772103
tatgtttcaaatat

SEQ ID NO: 73811 - DNA, 15 bp, Unknown
  misc_feature (1)..( 15): Matrix.004 file - promoters50/4772115
aaaaacaaaaaagct

SEQ ID NO: 73812 - DNA, 9 bp, Unknown
  misc_feature (1)..( 9): Matrix.004 file - promoters50/4772115
aaacctact

SEQ ID NO: 73813 - DNA, 7 bp, Unknown
  misc_feature (1)..( 7): Matrix.004 file - promoters50/4772122
ataattt

SEQ ID NO: 73814 - DNA, 9 bp, Unknown
  misc_feature (1)..( 9): Matrix.004 file - promoters50/4772130
ggacaaaat

SEQ ID NO: 73815 - DNA, 9 bp, Unknown
  misc_feature (1)..( 9): Matrix.004 file - promoters50/4772130
gcataaatt

SEQ ID NO: 73816 - DNA, 13 bp, Unknown
  misc_feature (1)..( 13): Matrix.004 file - promoters50/4772133
acatcaaaaattt

SEQ ID NO: 73817 - DNA, 7 bp, Unknown
  misc_feature (1)..( 7): Matrix.004 file - promoters50/4772137
aagaatg

SEQ ID NO: 73818 - DNA, 8 bp, Unknown
  misc_feature (1)..( 8): Matrix.004 file - promoters50/4772137
gtctggat

SEQ ID NO: 73819 - DNA, 10 bp, Unknown
  misc_feature (1)..( 10): Matrix.004 file - promoters50/4772137
gaaaatttat

SEQ ID NO: 73820 - DNA, 14 bp, Unknown
  misc_feature (1)..( 14): Matrix.004 file - promoters50/4772155
ctttctttttttgg

SEQ ID NO: 73821 - DNA, 9 bp, Unknown
  misc_feature (1)..( 9): Matrix.004 file - promoters50/4772155
caaaaaaaa

SEQ ID NO: 73822 - DNA, 8 bp, Unknown
  misc_feature (1)..( 8): Matrix.004 file - promoters50/4772155
atttttta

SEQ ID NO: 73823 - DNA, 10 bp, Unknown
  misc_feature (1)..( 10): Matrix.004 file - promoters50/4772155
gatcataaca

SEQ ID NO: 73824 - DNA, 8 bp, Unknown
  misc_feature (1)..( 8): Matrix.004 file - promoters50/4772155
tctttaga

SEQ ID NO: 73825 - DNA, 8 bp, Unknown
  misc_feature (1)..( 8): Matrix.004 file - promoters50/4772167
tttgttta

SEQ ID NO: 73826 - DNA, 7 bp, Unknown
  misc_feature (1)..( 7): Matrix.004 file - promoters50/4772167
gaagaaa

SEQ ID NO: 73827 - DNA, 8 bp, Unknown
  misc_feature (1)..( 8): Matrix.004 file - promoters50/4772167
aaacaaac

SEQ ID NO: 73828 - DNA, 7 bp, Unknown
  misc_feature (1)..( 7): Matrix.004 file - promoters50/4772167
aaaaccc

SEQ ID NO: 73829 - DNA, 9 bp, Unknown
  misc_feature (1)..( 9): Matrix.004 file - promoters50/4772167
gagaatctt

SEQ ID NO: 73830 - DNA, 8 bp, Unknown
  misc_feature (1)..( 8): Matrix.004 file - promoters50/4772167
tgaatcaa

SEQ ID NO: 73831 - DNA, 9 bp, Unknown
  misc_feature (1)..( 9): Matrix.004 file - promoters50/4772167
tttgaattt

SEQ ID NO: 73832 - DNA, 10 bp, Unknown
  misc_feature (1)..( 10): Matrix.004 file - promoters50/4772167
atgattttac

SEQ ID NO: 73833 - DNA, 8 bp, Unknown
  misc_feature (1)..( 8): Matrix.004 file - promoters50/4772171
aaattttt

SEQ ID NO: 73834 - DNA, 7 bp, Unknown
  misc_feature (1)..( 7): Matrix.004 file - promoters50/4772171
taattta

SEQ ID NO: 73835 - DNA, 9 bp, Unknown
  misc_feature (1)..( 9): Matrix.004 file - promoters50/4772171
ctatatata

SEQ ID NO: 73836 - DNA, 7 bp, Unknown
  misc_feature (1)..( 7): Matrix.004 file - promoters50/4772171
attcaat

SEQ ID NO: 73837 - DNA, 11 bp, Unknown
  misc_feature (1)..( 11): Matrix.004 file - promoters50/4772171
tatagcaaaaa

SEQ ID NO: 73838 - DNA, 7 bp, Unknown
  misc_feature (1)..( 7): Matrix.004 file - promoters50/4772195
cttttct

SEQ ID NO: 73839 - DNA, 7 bp, Unknown
  misc_feature (1)..( 7): Matrix.004 file - promoters50/4772198
ttcattt

SEQ ID NO: 73840 - DNA, 9 bp, Unknown
  misc_feature (1)..( 9): Matrix.004 file - promoters50/4772198
aatttgtat

SEQ ID NO: 73841 - DNA, 7 bp, Unknown
  misc_feature (1)..( 7): Matrix.004 file - promoters50/4772198
gaaaaag

SEQ ID NO: 73842 - DNA, 8 bp, Unknown
  misc_feature (1)..( 8): Matrix.004 file - promoters50/4772208
aaaaaaaa

SEQ ID NO: 73843 - DNA, 14 bp, Unknown
  misc_feature (1)..( 14): Matrix.004 file - promoters50/4772208
atattttgattttt

SEQ ID NO: 73844 - DNA, 9 bp, Unknown
  misc_feature (1)..( 9): Matrix.004 file - promoters50/4772208
attaaatgt

SEQ ID NO: 73845 - DNA, 11 bp, Unknown
  misc_feature (1)..( 11): Matrix.004 file - promoters50/4772208
tattttcaaaa

SEQ ID NO: 73846 - DNA, 10 bp, Unknown
  misc_feature (1)..( 10): Matrix.004 file - promoters50/4772212
ttcaaattat

SEQ ID NO: 73847 - DNA, 8 bp, Unknown
  misc_feature (1)..( 8): Matrix.004 file - promoters50/4772212
tttgttta

SEQ ID NO: 73848 - DNA, 10 bp, Unknown
  misc_feature (1)..( 10): Matrix.004 file - promoters50/4772212
tataatattt

SEQ ID NO: 73849 - DNA, 7 bp, Unknown
  misc_feature (1)..( 7): Matrix.004 file - promoters50/4772212
cttgtaa

SEQ ID NO: 73850 - DNA, 9 bp, Unknown
  misc_feature (1)..( 9): Matrix.004 file - promoters50/4772212
tccaataat

SEQ ID NO: 73851 - DNA, 9 bp, Unknown
  misc_feature (1)..( 9): Matrix.004 file - promoters50/4772212
ttttcatat

SEQ ID NO: 73852 - DNA, 8 bp, Unknown
  misc_feature (1)..( 8): Matrix.004 file - promoters50/4772212
ttttattt

SEQ ID NO: 73853 - DNA, 8 bp, Unknown
  misc_feature (1)..( 8): Matrix.004 file - promoters50/4772212
atactttg

SEQ ID NO: 73854 - DNA, 7 bp, Unknown
  misc_feature (1)..( 7): Matrix.004 file - promoters50/4772219
ctataat

SEQ ID NO: 73855 - DNA, 10 bp, Unknown
  misc_feature (1)..( 10): Matrix.004 file - promoters50/4772223
tataaaaata

SEQ ID NO: 73856 - DNA, 9 bp, Unknown
  misc_feature (1)..( 9): Matrix.004 file - promoters50/4772223
acttatata

SEQ ID NO: 73857 - DNA, 9 bp, Unknown
  misc_feature (1)..( 9): Matrix.004 file - promoters50/4772223
caaacacta

SEQ ID NO: 73858 - DNA, 8 bp, Unknown
  misc_feature (1)..( 8): Matrix.004 file - promoters50/4772223
ataatttt

SEQ ID NO: 73859 - DNA, 9 bp, Unknown
  misc_feature (1)..( 9): Matrix.004 file - promoters50/4772223
acaagaaaa

SEQ ID NO: 73860 - DNA, 9 bp, Unknown
  misc_feature (1)..( 9): Matrix.004 file - promoters50/4772223
tcaaaacaa

SEQ ID NO: 73861 - DNA, 8 bp, Unknown
  misc_feature (1)..( 8): Matrix.004 file - promoters50/4772223
tttagaca

SEQ ID NO: 73862 - DNA, 12 bp, Unknown
  misc_feature (1)..( 12): Matrix.004 file - promoters50/4772223
ttatcaaattga

SEQ ID NO: 73863 - DNA, 8 bp, Unknown
  misc_feature (1)..( 8): Matrix.004 file - promoters50/4772230
atttcaaa

SEQ ID NO: 73864 - DNA, 9 bp, Unknown
  misc_feature (1)..( 9): Matrix.004 file - promoters50/4772230
aatagattt

SEQ ID NO: 73865 - DNA, 10 bp, Unknown
  misc_feature (1)..( 10): Matrix.004 file - promoters50/4772240
aaatattcac

SEQ ID NO: 73866 - DNA, 16 bp, Unknown
  misc_feature (1)..( 16): Matrix.004 file - promoters50/4772240
atttttatgaaaaaaa

SEQ ID NO: 73867 - DNA, 14 bp, Unknown
  misc_feature (1)..( 14): Matrix.004 file - promoters50/4772240
ttaaattgttcctc

SEQ ID NO: 73868 - DNA, 12 bp, Unknown
  misc_feature (1)..( 12): Matrix.004 file - promoters50/4772248
ttactaaaaaaa

SEQ ID NO: 73869 - DNA, 7 bp, Unknown
  misc_feature (1)..( 7): Matrix.004 file - promoters50/4772248
tttttgt

SEQ ID NO: 73870 - DNA, 11 bp, Unknown
  misc_feature (1)..( 11): Matrix.004 file - promoters50/4772248
aatttactata

SEQ ID NO: 73871 - DNA, 15 bp, Unknown
  misc_feature (1)..( 15): Matrix.004 file - promoters50/4772248
actaattttgattaa

SEQ ID NO: 73872 - DNA, 13 bp, Unknown
  misc_feature (1)..( 13): Matrix.004 file - promoters50/4772248
attgtgtttctgt

SEQ ID NO: 73873 - DNA, 10 bp, Unknown
  misc_feature (1)..( 10): Matrix.004 file - promoters50/4772248
tcataaattt

SEQ ID NO: 73874 - DNA, 13 bp, Unknown
  misc_feature (1)..( 13): Matrix.004 file - promoters50/4772248
cataaaacttctc

SEQ ID NO: 73875 - DNA, 14 bp, Unknown
  misc_feature (1)..( 14): Matrix.004 file - promoters50/4772248
atatcttttataat

SEQ ID NO: 73876 - DNA, 10 bp, Unknown
  misc_feature (1)..( 10): Matrix.004 file - promoters50/4772248
ttttataaat

SEQ ID NO: 73877 - DNA, 8 bp, Unknown
  misc_feature (1)..( 8): Matrix.004 file - promoters50/4772248
ttttctaa

SEQ ID NO: 73878 - DNA, 10 bp, Unknown
  misc_feature (1)..( 10): Matrix.004 file - promoters50/4772248
taaatttttc

SEQ ID NO: 73879 - DNA, 11 bp, Unknown
  misc_feature (1)..( 11): Matrix.004 file - promoters50/4772248
cacttataaaa

SEQ ID NO: 73880 - DNA, 9 bp, Unknown
  misc_feature (1)..( 9): Matrix.004 file - promoters50/4772258
aaaacttct

SEQ ID NO: 73881 - DNA, 8 bp, Unknown
  misc_feature (1)..( 8): Matrix.004 file - promoters50/4772258
tgttgttt

SEQ ID NO: 73882 - DNA, 9 bp, Unknown
  misc_feature (1)..( 9): Matrix.004 file - promoters50/4772274
attttttat

SEQ ID NO: 73883 - DNA, 8 bp, Unknown
  misc_feature (1)..( 8): Matrix.004 file - promoters50/4772274
tttctttt

SEQ ID NO: 73884 - DNA, 6 bp, Unknown
  misc_feature (1)..( 6): Matrix.004 file - promoters50/4772274
ttcttt

SEQ ID NO: 73885 - DNA, 15 bp, Unknown
  misc_feature (1)..( 15): Matrix.004 file - promoters50/4772285
ataccaaacttatca

SEQ ID NO: 73886 - DNA, 11 bp, Unknown
  misc_feature (1)..( 11): Matrix.004 file - promoters50/4772285
gataataaaag

SEQ ID NO: 73887 - DNA, 7 bp, Unknown
  misc_feature (1)..( 7): Matrix.004 file - promoters50/4772285
aaaataa

SEQ ID NO: 73888 - DNA, 9 bp, Unknown
  misc_feature (1)..( 9): Matrix.004 file - promoters50/4772285
taatattat

SEQ ID NO: 73889 - DNA, 10 bp, Unknown
  misc_feature (1)..( 10): Matrix.004 file - promoters50/4772289
caaaaatgta

SEQ ID NO: 73890 - DNA, 8 bp, Unknown
  misc_feature (1)..( 8): Matrix.004 file - promoters50/4772289
gaaacaaa

SEQ ID NO: 73891 - DNA, 7 bp, Unknown
  misc_feature (1)..( 7): Matrix.004 file - promoters50/4772311
agatgtg

SEQ ID NO: 73892 - DNA, 9 bp, Unknown
  misc_feature (1)..( 9): Matrix.004 file - promoters50/4772311
aaaaacaaa

SEQ ID NO: 73893 - DNA, 11 bp, Unknown
  misc_feature (1)..( 11): Matrix.004 file - promoters50/4772311
aaatcttcata

SEQ ID NO: 73894 - DNA, 13 bp, Unknown
  misc_feature (1)..( 13): Matrix.004 file - promoters50/4772311
aaaatgttttatc

SEQ ID NO: 73895 - DNA, 14 bp, Unknown
  misc_feature (1)..( 14): Matrix.004 file - promoters50/4772311
attttataaaaaaa

SEQ ID NO: 73896 - DNA, 11 bp, Unknown
  misc_feature (1)..( 11): Matrix.004 file - promoters50/4772311
ttgagaaaaaa

SEQ ID NO: 73897 - DNA, 11 bp, Unknown
  misc_feature (1)..( 11): Matrix.004 file - promoters50/4772311
ataaagaaaaa

SEQ ID NO: 73898 - DNA, 9 bp, Unknown
  misc_feature (1)..( 9): Matrix.004 file - promoters50/4772311
tgtttctaa

SEQ ID NO: 73899 - DNA, 11 bp, Unknown
  misc_feature (1)..( 11): Matrix.004 file - promoters50/4772315
attaaaaaagc

SEQ ID NO: 73900 - DNA, 15 bp, Unknown
  misc_feature (1)..( 15): Matrix.004 file - promoters50/4772323
ttgattttttcgtat

SEQ ID NO: 73901 - DNA, 9 bp, Unknown
  misc_feature (1)..( 9): Matrix.004 file - promoters50/4772329
ttttgtcta

SEQ ID NO: 73902 - DNA, 7 bp, Unknown
  misc_feature (1)..( 7): Matrix.004 file - promoters50/4772329
aaaacat

SEQ ID NO: 73903 - DNA, 8 bp, Unknown
  misc_feature (1)..( 8): Matrix.004 file - promoters50/4772329
tttgttta

SEQ ID NO: 73904 - DNA, 9 bp, Unknown
  misc_feature (1)..( 9): Matrix.004 file - promoters50/4772329
taacttaat

SEQ ID NO: 73905 - DNA, 7 bp, Unknown
  misc_feature (1)..( 7): Matrix.004 file - promoters50/4772329
ttatata

SEQ ID NO: 73906 - DNA, 7 bp, Unknown
  misc_feature (1)..( 7): Matrix.004 file - promoters50/4772329
attatta

SEQ ID NO: 73907 - DNA, 8 bp, Unknown
  misc_feature (1)..( 8): Matrix.004 file - promoters50/4772329
aatattca

SEQ ID NO: 73908 - DNA, 12 bp, Unknown
  misc_feature (1)..( 12): Matrix.004 file - promoters50/4772329
atagtttacata

SEQ ID NO: 73909 - DNA, 8 bp, Unknown
  misc_feature (1)..( 8): Matrix.004 file - promoters50/4772329
aaacatta

SEQ ID NO: 73910 - DNA, 10 bp, Unknown
  misc_feature (1)..( 10): Matrix.004 file - promoters50/4772329
ctttatataa

SEQ ID NO: 73911 - DNA, 8 bp, Unknown
  misc_feature (1)..( 8): Matrix.004 file - promoters50/4772336
ttcttctc

SEQ ID NO: 73912 - DNA, 18 bp, Unknown
  misc_feature (1)..( 18): Matrix.004 file - promoters50/4772336
atcatcaatcaaaattaa

SEQ ID NO: 73913 - DNA, 6 bp, Unknown
  misc_feature (1)..( 6): Matrix.004 file - promoters50/4772336
ttatat

SEQ ID NO: 73914 - DNA, 12 bp, Unknown
  misc_feature (1)..( 12): Matrix.004 file - promoters50/4772340
agttgaatattc

SEQ ID NO: 73915 - DNA, 9 bp, Unknown
  misc_feature (1)..( 9): Matrix.004 file - promoters50/4772340
ctataaaaa

SEQ ID NO: 73916 - DNA, 11 bp, Unknown
  misc_feature (1)..( 11): Matrix.004 file - promoters50/4772346
aattaatcttt

SEQ ID NO: 73917 - DNA, 11 bp, Unknown
  misc_feature (1)..( 11): Matrix.004 file - promoters50/4772370
cagagacatca

SEQ ID NO: 73918 - DNA, 12 bp, Unknown
  misc_feature (1)..( 12): Matrix.004 file - promoters50/4772370
atgtaataacac

SEQ ID NO: 73919 - DNA, 8 bp, Unknown
  misc_feature (1)..( 8): Matrix.004 file - promoters50/4772370
aaaaagag

SEQ ID NO: 73920 - DNA, 8 bp, Unknown
  misc_feature (1)..( 8): Matrix.004 file - promoters50/4772370
attaaaaa

SEQ ID NO: 73921 - DNA, 8 bp, Unknown
  misc_feature (1)..( 8): Matrix.004 file - promoters50/4772378
tataaaaa

SEQ ID NO: 73922 - DNA, 14 bp, Unknown
  misc_feature (1)..( 14): Matrix.004 file - promoters50/4772382
aagtttgaaaagtc

SEQ ID NO: 73923 - DNA, 9 bp, Unknown
  misc_feature (1)..( 9): Matrix.004 file - promoters50/4772382
ctatataaa

SEQ ID NO: 73924 - DNA, 9 bp, Unknown
  misc_feature (1)..( 9): Matrix.004 file - promoters50/4772382
gaaatctaa

SEQ ID NO: 73925 - DNA, 10 bp, Unknown
  misc_feature (1)..( 10): Matrix.004 file - promoters50/4772389
tatataaata

SEQ ID NO: 73926 - DNA, 9 bp, Unknown
  misc_feature (1)..( 9): Matrix.004 file - promoters50/4772389
caaaaaatt

SEQ ID NO: 73927 - DNA, 7 bp, Unknown
  misc_feature (1)..( 7): Matrix.004 file - promoters50/4772389
aaatatt

SEQ ID NO: 73928 - DNA, 12 bp, Unknown
  misc_feature (1)..( 12): Matrix.004 file - promoters50/4772389
taattaaattaa

SEQ ID NO: 73929 - DNA, 11 bp, Unknown
  misc_feature (1)..( 11): Matrix.004 file - promoters50/4772389
acaaaaagtta

SEQ ID NO: 73930 - DNA, 8 bp, Unknown
  misc_feature (1)..( 8): Matrix.004 file - promoters50/4772389
gaaaaaca

SEQ ID NO: 73931 - DNA, 10 bp, Unknown
  misc_feature (1)..( 10): Matrix.004 file - promoters50/4772389
aaaatttatt

SEQ ID NO: 73932 - DNA, 10 bp, Unknown
  misc_feature (1)..( 10): Matrix.004 file - promoters50/4772389
tagtgaactt

SEQ ID NO: 73933 - DNA, 11 bp, Unknown
  misc_feature (1)..( 11): Matrix.004 file - promoters50/4772389
aaattaatatt

SEQ ID NO: 73934 - DNA, 11 bp, Unknown
  misc_feature (1)..( 11): Matrix.004 file - promoters50/4772389
gttaaaaaaat

SEQ ID NO: 73935 - DNA, 7 bp, Unknown
  misc_feature (1)..( 7): Matrix.004 file - promoters50/4772398
aaaaata

SEQ ID NO: 73936 - DNA, 12 bp, Unknown
  misc_feature (1)..( 12): Matrix.004 file - promoters50/4772402
tagaattttatt

SEQ ID NO: 73937 - DNA, 13 bp, Unknown
  misc_feature (1)..( 13): Matrix.004 file - promoters50/4772410
atgtataaacaaa

SEQ ID NO: 73938 - DNA, 12 bp, Unknown
  misc_feature (1)..( 12): Matrix.004 file - promoters50/4772410
tatatttgattc

SEQ ID NO: 73939 - DNA, 10 bp, Unknown
  misc_feature (1)..( 10): Matrix.004 file - promoters50/4772410
tatgtttgat

SEQ ID NO: 73940 - DNA, 9 bp, Unknown
  misc_feature (1)..( 9): Matrix.004 file - promoters50/4772410
taaaacaca

SEQ ID NO: 73941 - DNA, 8 bp, Unknown
  misc_feature (1)..( 8): Matrix.004 file - promoters50/4772413
aaaacaag

SEQ ID NO: 73942 - DNA, 13 bp, Unknown
  misc_feature (1)..( 13): Matrix.004 file - promoters50/4772413
gaaaaatttgtgt

SEQ ID NO: 73943 - DNA, 10 bp, Unknown
  misc_feature (1)..( 10): Matrix.004 file - promoters50/4772420
ttattaaatt

SEQ ID NO: 73944 - DNA, 9 bp, Unknown
  misc_feature (1)..( 9): Matrix.004 file - promoters50/4772472
agaatcaac

SEQ ID NO: 73945 - DNA, 8 bp, Unknown
  misc_feature (1)..( 8): Matrix.004 file - promoters50/4772472
ttagaaaa

SEQ ID NO: 73946 - DNA, 9 bp, Unknown
  misc_feature (1)..( 9): Matrix.004 file - promoters50/4772472
gtacacttt

SEQ ID NO: 73947 - DNA, 10 bp, Unknown
  misc_feature (1)..( 10): Matrix.004 file - promoters50/4772472
cacaagatca

SEQ ID NO: 73948 - DNA, 9 bp, Unknown
  misc_feature (1)..( 9): Matrix.004 file - promoters50/4772472
aaaaacaaa

SEQ ID NO: 73949 - DNA, 8 bp, Unknown
  misc_feature (1)..( 8): Matrix.004 file - promoters50/4772472
aaaataaa

SEQ ID NO: 73950 - DNA, 8 bp, Unknown
  misc_feature (1)..( 8): Matrix.004 file - promoters50/4772472
cacaagat

SEQ ID NO: 73951 - DNA, 7 bp, Unknown
  misc_feature (1)..( 7): Matrix.004 file - promoters50/4772472
caaatta

SEQ ID NO: 73952 - DNA, 9 bp, Unknown
  misc_feature (1)..( 9): Matrix.004 file - promoters50/4772472
attttgtag

SEQ ID NO: 73953 - DNA, 8 bp, Unknown
  misc_feature (1)..( 8): Matrix.004 file - promoters50/4772472
atcttaca

SEQ ID NO: 73954 - DNA, 10 bp, Unknown
  misc_feature (1)..( 10): Matrix.004 file - promoters50/4772700
ttatttaaaa

SEQ ID NO: 73955 - DNA, 13 bp, Unknown
  misc_feature (1)..( 13): Matrix.004 file - promoters50/4772710
ccatctcttattt

SEQ ID NO: 73956 - DNA, 7 bp, Unknown
  misc_feature (1)..( 7): Matrix.004 file - promoters50/4772710
tattttt

SEQ ID NO: 73957 - DNA, 9 bp, Unknown
  misc_feature (1)..( 9): Matrix.004 file - promoters50/4772710
ttattttgc

SEQ ID NO: 73958 - DNA, 8 bp, Unknown
  misc_feature (1)..( 8): Matrix.004 file - promoters50/4772720
gaatcaaa

SEQ ID NO: 73959 - DNA, 8 bp, Unknown
  misc_feature (1)..( 8): Matrix.004 file - promoters50/4772720
aattaatg

SEQ ID NO: 73960 - DNA, 7 bp, Unknown
  misc_feature (1)..( 7): Matrix.004 file - promoters50/4772720
gaatcaa

SEQ ID NO: 73961 - DNA, 7 bp, Unknown
  misc_feature (1)..( 7): Matrix.004 file - promoters50/4772724
gaaacaa

SEQ ID NO: 73962 - DNA, 7 bp, Unknown
  misc_feature (1)..( 7): Matrix.004 file - promoters50/4772735
atgtgga

SEQ ID NO: 73963 - DNA, 10 bp, Unknown
  misc_feature (1)..( 10): Matrix.004 file - promoters50/4772735
tctttgtaat

SEQ ID NO: 73964 - DNA, 8 bp, Unknown
  misc_feature (1)..( 8): Matrix.004 file - promoters50/4772735
aatcataa

SEQ ID NO: 73965 - DNA, 9 bp, Unknown
  misc_feature (1)..( 9): Matrix.004 file - promoters50/4772735
tatttatct

SEQ ID NO: 73966 - DNA, 7 bp, Unknown
  misc_feature (1)..( 7): Matrix.004 file - promoters50/4772743
taaatca

SEQ ID NO: 73967 - DNA, 7 bp, Unknown
  misc_feature (1)..( 7): Matrix.004 file - promoters50/4772743
aattttt

SEQ ID NO: 73968 - DNA, 8 bp, Unknown
  misc_feature (1)..( 8): Matrix.004 file - promoters50/4772751
aaaaaaaa

SEQ ID NO: 73969 - DNA, 10 bp, Unknown
  misc_feature (1)..( 10): Matrix.004 file - promoters50/4772772
ttaaaataaa

SEQ ID NO: 73970 - DNA, 10 bp, Unknown
  misc_feature (1)..( 10): Matrix.004 file - promoters50/4772772
cctatatata

SEQ ID NO: 73971 - DNA, 8 bp, Unknown
  misc_feature (1)..( 8): Matrix.004 file - promoters50/4772772
taacaaaa

SEQ ID NO: 73972 - DNA, 8 bp, Unknown
  misc_feature (1)..( 8): Matrix.004 file - promoters50/4772772
ttcttatt

SEQ ID NO: 73973 - DNA, 12 bp, Unknown
  misc_feature (1)..( 12): Matrix.004 file - promoters50/4772824
aataatataaat

SEQ ID NO: 73974 - DNA, 7 bp, Unknown
  misc_feature (1)..( 7): Matrix.004 file - promoters50/4772824
tattttc

SEQ ID NO: 73975 - DNA, 11 bp, Unknown
  misc_feature (1)..( 11): Matrix.004 file - promoters50/4772835
atatgaagttt

SEQ ID NO: 73976 - DNA, 8 bp, Unknown
  misc_feature (1)..( 8): Matrix.004 file - promoters50/4772843
ataaaaac

SEQ ID NO: 73977 - DNA, 12 bp, Unknown
  misc_feature (1)..( 12): Matrix.004 file - promoters50/4772843
caaaatgtgctt

SEQ ID NO: 73978 - DNA, 7 bp, Unknown
  misc_feature (1)..( 7): Matrix.004 file - promoters50/4772853
aatcatg

SEQ ID NO: 73979 - DNA, 8 bp, Unknown
  misc_feature (1)..( 8): Matrix.004 file - promoters50/4772853
aaattaat

SEQ ID NO: 73980 - DNA, 11 bp, Unknown
  misc_feature (1)..( 11): Matrix.004 file - promoters50/4772853
ttttaacaaat

SEQ ID NO: 73981 - DNA, 10 bp, Unknown
  misc_feature (1)..( 10): Matrix.004 file - promoters50/4772853
taaaatgttt

SEQ ID NO: 73982 - DNA, 13 bp, Unknown
  misc_feature (1)..( 13): Matrix.004 file - promoters50/4772853
ttcatcgaaaaat

SEQ ID NO: 73983 - DNA, 8 bp, Unknown
  misc_feature (1)..( 8): Matrix.004 file - promoters50/4772853
tcaaaatt

SEQ ID NO: 73984 - DNA, 8 bp, Unknown
  misc_feature (1)..( 8): Matrix.004 file - promoters50/4772853
tctatttt

SEQ ID NO: 73985 - DNA, 10 bp, Unknown
  misc_feature (1)..( 10): Matrix.004 file - promoters50/4772853
taatttaaaa

SEQ ID NO: 73986 - DNA, 9 bp, Unknown
  misc_feature (1)..( 9): Matrix.004 file - promoters50/4772855
aatttaaaa

SEQ ID NO: 73987 - DNA, 9 bp, Unknown
  misc_feature (1)..( 9): Matrix.004 file - promoters50/4772855
caatatgtt

SEQ ID NO: 73988 - DNA, 7 bp, Unknown
  misc_feature (1)..( 7): Matrix.004 file - promoters50/4772855
aaattta

SEQ ID NO: 73989 - DNA, 11 bp, Unknown
  misc_feature (1)..( 11): Matrix.004 file - promoters50/4772855
ctaaaaataaa

SEQ ID NO: 73990 - DNA, 8 bp, Unknown
  misc_feature (1)..( 8): Matrix.004 file - promoters50/4772855
cctataaa

SEQ ID NO: 73991 - DNA, 9 bp, Unknown
  misc_feature (1)..( 9): Matrix.004 file - promoters50/4772855
tttaaaaat

SEQ ID NO: 73992 - DNA, 9 bp, Unknown
  misc_feature (1)..( 9): Matrix.004 file - promoters50/4772855
aattcgttt

SEQ ID NO: 73993 - DNA, 9 bp, Unknown
  misc_feature (1)..( 9): Matrix.004 file - promoters50/4772855
atataagat

SEQ ID NO: 73994 - DNA, 12 bp, Unknown
  misc_feature (1)..( 12): Matrix.004 file - promoters50/4772855
aaaaacaaaaca

SEQ ID NO: 73995 - DNA, 7 bp, Unknown
  misc_feature (1)..( 7): Matrix.004 file - promoters50/4772873
aaaaata

SEQ ID NO: 73996 - DNA, 6 bp, Unknown
  misc_feature (1)..( 6): Matrix.004 file - promoters50/4772873
aaaaga

SEQ ID NO: 73997 - DNA, 9 bp, Unknown
  misc_feature (1)..( 9): Matrix.004 file - promoters50/4772879
aaataaaaa

SEQ ID NO: 73998 - DNA, 10 bp, Unknown
  misc_feature (1)..( 10): Matrix.004 file - promoters50/4772879
aattttttta

SEQ ID NO: 73999 - DNA, 7 bp, Unknown
  misc_feature (1)..( 7): Matrix.004 file - promoters50/4772879
ataataa

SEQ ID NO: 74000 - DNA, 9 bp, Unknown
  misc_feature (1)..( 9): Matrix.004 file - promoters50/4772879
tttattgat

SEQ ID NO: 74001 - DNA, 9 bp, Unknown
  misc_feature (1)..( 9): Matrix.004 file - promoters50/4772879
aatttattt

SEQ ID NO: 74002 - DNA, 9 bp, Unknown
  misc_feature (1)..( 9): Matrix.004 file - promoters50/4772879
aatttattt

SEQ ID NO: 74003 - DNA, 12 bp, Unknown
  misc_feature (1)..( 12): Matrix.004 file - promoters50/4772879
atgaatattaga

SEQ ID NO: 74004 - DNA, 12 bp, Unknown
  misc_feature (1)..( 12): Matrix.004 file - promoters50/4772879
tcataaaaaata

SEQ ID NO: 74005 - DNA, 8 bp, Unknown
  misc_feature (1)..( 8): Matrix.004 file - promoters50/4772883
gaaaaaag

SEQ ID NO: 74006 - DNA, 13 bp, Unknown
  misc_feature (1)..( 13): Matrix.004 file - promoters50/4772883
aaaaaaaaaatca

SEQ ID NO: 74007 - DNA, 10 bp, Unknown
  misc_feature (1)..( 10): Matrix.004 file - promoters50/4772883
aaaatttgaa

SEQ ID NO: 74008 - DNA, 8 bp, Unknown
  misc_feature (1)..( 8): Matrix.004 file - promoters50/4772883
ttttttaa

SEQ ID NO: 74009 - DNA, 10 bp, Unknown
  misc_feature (1)..( 10): Matrix.004 file - promoters50/4772883
aaaaacaaaa

SEQ ID NO: 74010 - DNA, 12 bp, Unknown
  misc_feature (1)..( 12): Matrix.004 file - promoters50/4772883
aaaaacaaaaca

SEQ ID NO: 74011 - DNA, 10 bp, Unknown
  misc_feature (1)..( 10): Matrix.004 file - promoters50/4772887
atactaatgt

SEQ ID NO: 74012 - DNA, 10 bp, Unknown
  misc_feature (1)..( 10): Matrix.004 file - promoters50/4772917
ttttctatta

SEQ ID NO: 74013 - DNA, 7 bp, Unknown
  misc_feature (1)..( 7): Matrix.004 file - promoters50/4772917
cataaac

SEQ ID NO: 74014 - DNA, 10 bp, Unknown
  misc_feature (1)..( 10): Matrix.004 file - promoters50/4772925
tctctcttat

SEQ ID NO: 74015 - DNA, 7 bp, Unknown
  misc_feature (1)..( 7): Matrix.004 file - promoters50/4772925
atgtttt

SEQ ID NO: 74016 - DNA, 10 bp, Unknown
  misc_feature (1)..( 10): Matrix.004 file - promoters50/4772925
ttgtaataaa

SEQ ID NO: 74017 - DNA, 9 bp, Unknown
  misc_feature (1)..( 9): Matrix.004 file - promoters50/4772947
gttatatgt

SEQ ID NO: 74018 - DNA, 7 bp, Unknown
  misc_feature (1)..( 7): Matrix.004 file - promoters50/4772947
aaactaa

SEQ ID NO: 74019 - DNA, 9 bp, Unknown
  misc_feature (1)..( 9): Matrix.004 file - promoters50/4772983
agtttttct

SEQ ID NO: 74020 - DNA, 9 bp, Unknown
  misc_feature (1)..( 9): Matrix.004 file - promoters50/4772983
tgcaaagag

SEQ ID NO: 74021 - DNA, 11 bp, Unknown
  misc_feature (1)..( 11): Matrix.004 file - promoters50/4772991
gaagcttgcgg

SEQ ID NO: 74022 - DNA, 7 bp, Unknown
  misc_feature (1)..( 7): Matrix.004 file - promoters50/4772991
cttggat

SEQ ID NO: 74023 - DNA, 10 bp, Unknown
  misc_feature (1)..( 10): Matrix.004 file - promoters50/4772995
ttataaattt

SEQ ID NO: 74024 - DNA, 6 bp, Unknown
  misc_feature (1)..( 6): Matrix.004 file - promoters50/4772995
tttgat

SEQ ID NO: 74025 - DNA, 10 bp, Unknown
  misc_feature (1)..( 10): Matrix.004 file - promoters50/4773015
ccaaattaac

SEQ ID NO: 74026 - DNA, 10 bp, Unknown
  misc_feature (1)..( 10): Matrix.004 file - promoters50/4773035
accaaaaaaa

SEQ ID NO: 74027 - DNA, 10 bp, Unknown
  misc_feature (1)..( 10): Matrix.004 file - promoters50/4773035
ttacaaaaaa

SEQ ID NO: 74028 - DNA, 14 bp, Unknown
  misc_feature (1)..( 14): Matrix.004 file - promoters50/4773046
ttattaaaattatt

SEQ ID NO: 74029 - DNA, 8 bp, Unknown
  misc_feature (1)..( 8): Matrix.004 file - promoters50/4773068
aattgttt

SEQ ID NO: 74030 - DNA, 8 bp, Unknown
  misc_feature (1)..( 8): Matrix.004 file - promoters50/4773068
ttcttgcc

SEQ ID NO: 74031 - DNA, 31 bp, Unknown; identical to SEQ ID NO: 72331
  misc_feature (1)..( 31): Matrix.004 file - promoters50/4773068

SEQ ID NO: 74032 - DNA, 30 bp, Unknown; identical to SEQ ID NO: 71939
  misc_feature (1)..( 30): Matrix.004 file - promoters50/4773068

SEQ ID NO: 74033 - DNA, 15 bp, Unknown
  misc_feature (1)..( 15): Matrix.004 file - promoters50/4773068
cgccttagctttctc

SEQ ID NO: 74034 - DNA, 22 bp, Unknown
  misc_feature (1)..( 22): Matrix.004 file - promoters50/4773068
gaccgagtcgtcctcgtctttt

SEQ ID NO: 74035 - DNA, 19 bp, Unknown
  misc_feature (1)..( 19): Matrix.004 file - promoters50/4773068
ttcttcttctataaaacaa

SEQ ID NO: 74036 - DNA, 9 bp, Unknown
  misc_feature (1)..( 9): Matrix.004 file - promoters50/4773068
caaaaaaac

SEQ ID NO: 74037 - DNA, 6 bp, Unknown
  misc_feature (1)..( 6): Matrix.004 file - promoters50/4773074
aaaaca

SEQ ID NO: 74038 - DNA, 7 bp, Unknown
  misc_feature (1)..( 7): Matrix.004 file - promoters50/4773074
tctataa

SEQ ID NO: 74039 - DNA, 9 bp, Unknown
  misc_feature (1)..( 9): Matrix.004 file - promoters50/4773085
aaaaaccct

SEQ ID NO: 74040 - DNA, 10 bp, Unknown
  misc_feature (1)..( 10): Matrix.004 file - promoters50/4773085
actaaggaaa

SEQ ID NO: 74041 - DNA, 10 bp, Unknown
  misc_feature (1)..( 10): Matrix.004 file - promoters50/4773085
agaaagaaat

SEQ ID NO: 74042 - DNA, 8 bp, Unknown
  misc_feature (1)..( 8): Matrix.004 file - promoters50/4773085
tatataaa

SEQ ID NO: 74043 - DNA, 8 bp, Unknown
  misc_feature (1)..( 8): Matrix.004 file - promoters50/4773085
tctaatct

SEQ ID NO: 74044 - DNA, 8 bp, Unknown
  misc_feature (1)..( 8): Matrix.004 file - promoters50/4773089
actaaata

SEQ ID NO: 74045 - DNA, 10 bp, Unknown
  misc_feature (1)..( 10): Matrix.004 file - promoters50/4773089
aaaaataagc

SEQ ID NO: 74046 - DNA, 8 bp, Unknown
  misc_feature (1)..( 8): Matrix.004 file - promoters50/4773089
taaataat

SEQ ID NO: 74047 - DNA, 17 bp, Unknown
  misc_feature (1)..( 17): Matrix.004 file - promoters50/4773089
tttaaatttatcataca

SEQ ID NO: 74048 - DNA, 8 bp, Unknown
  misc_feature (1)..( 8): Matrix.004 file - promoters50/4773093
aataaatt

SEQ ID NO: 74049 - DNA, 8 bp, Unknown
  misc_feature (1)..( 8): Matrix.004 file - promoters50/4773093
tttgatat

SEQ ID NO: 74050 - DNA, 8 bp, Unknown
  misc_feature (1)..( 8): Matrix.004 file - promoters50/4773093
tttccatc

SEQ ID NO: 74051 - DNA, 9 bp, Unknown
  misc_feature (1)..( 9): Matrix.004 file - promoters50/4773093
gattttttt

SEQ ID NO: 74052 - DNA, 7 bp, Unknown
  misc_feature (1)..( 7): Matrix.004 file - promoters50/4773093
tgatttt

SEQ ID NO: 74053 - DNA, 10 bp, Unknown
  misc_feature (1)..( 10): Matrix.004 file - promoters50/4773093
tttctctctt

SEQ ID NO: 74054 - DNA, 11 bp, Unknown
  misc_feature (1)..( 11): Matrix.004 file - promoters50/4773101
gaaacttcaaa

SEQ ID NO: 74055 - DNA, 8 bp, Unknown
  misc_feature (1)..( 8): Matrix.004 file - promoters50/4773108
taaaattt

SEQ ID NO: 74056 - DNA, 11 bp, Unknown
  misc_feature (1)..( 11): Matrix.004 file - promoters50/4773108
gttgaattttt

SEQ ID NO: 74057 - DNA, 7 bp, Unknown
  misc_feature (1)..( 7): Matrix.004 file - promoters50/4773112
cacagtt

SEQ ID NO: 74058 - DNA, 9 bp, Unknown
  misc_feature (1)..( 9): Matrix.004 file - promoters50/4773112
tgttaattt

SEQ ID NO: 74059 - DNA, 8 bp, Unknown
  misc_feature (1)..( 8): Matrix.004 file - promoters50/4773121
cattcgga

SEQ ID NO: 74060 - DNA, 7 bp, Unknown
  misc_feature (1)..( 7): Matrix.004 file - promoters50/4773124
caaaaac

SEQ ID NO: 74061 - DNA, 8 bp, Unknown
  misc_feature (1)..( 8): Matrix.004 file - promoters50/4773124
tgatcttt

SEQ ID NO: 74062 - DNA, 8 bp, Unknown
  misc_feature (1)..( 8): Matrix.004 file - promoters50/4773124
atctttag

SEQ ID NO: 74063 - DNA, 10 bp, Unknown
  misc_feature (1)..( 10): Matrix.004 file - promoters50/4773124
atatagaaat

SEQ ID NO: 74064 - DNA, 8 bp, Unknown
  misc_feature (1)..( 8): Matrix.004 file - promoters50/4773124
aatatatt

SEQ ID NO: 74065 - DNA, 7 bp, Unknown
  misc_feature (1)..( 7): Matrix.004 file - promoters50/4773127
ttctaat

SEQ ID NO: 74066 - DNA, 11 bp, Unknown
  misc_feature (1)..( 11): Matrix.004 file - promoters50/4773134
atttaaatatt

SEQ ID NO: 74067 - DNA, 14 bp, Unknown
  misc_feature (1)..( 14): Matrix.004 file - promoters50/4773134
atttaatagtcatt

SEQ ID NO: 74068 - DNA, 8 bp, Unknown
  misc_feature (1)..( 8): Matrix.004 file - promoters50/4773134
aattttgg

SEQ ID NO: 74069 - DNA, 9 bp, Unknown
  misc_feature (1)..( 9): Matrix.004 file - promoters50/4773134
tatatttgt

SEQ ID NO: 74070 - DNA, 8 bp, Unknown
  misc_feature (1)..( 8): Matrix.004 file - promoters50/4773134
tatttttt

SEQ ID NO: 74071 - DNA, 8 bp, Unknown
  misc_feature (1)..( 8): Matrix.004 file - promoters50/4773142
attacaca

SEQ ID NO: 74072 - DNA, 9 bp, Unknown
  misc_feature (1)..( 9): Matrix.004 file - promoters50/4773142
ggttataaa

SEQ ID NO: 74073 - DNA, 15 bp, Unknown
  misc_feature (1)..( 15): Matrix.004 file - promoters50/4773182
aaacacataatcttt

SEQ ID NO: 74074 - DNA, 10 bp, Unknown
  misc_feature (1)..( 10): Matrix.004 file - promoters50/4773182
aattttaaaa

SEQ ID NO: 74075 - DNA, 13 bp, Unknown
  misc_feature (1)..( 13): Matrix.004 file - promoters50/4773185
ttttaaaataaaa

SEQ ID NO: 74076 - DNA, 7 bp, Unknown
  misc_feature (1)..( 7): Matrix.004 file - promoters50/4773185
aataatt

SEQ ID NO: 74077 - DNA, 8 bp, Unknown
  misc_feature (1)..( 8): Matrix.004 file - promoters50/4773185
aatcataa

SEQ ID NO: 74078 - DNA, 13 bp, Unknown
  misc_feature (1)..( 13): Matrix.004 file - promoters50/4773185
aacttcttaattt

SEQ ID NO: 74079 - DNA, 12 bp, Unknown
  misc_feature (1)..( 12): Matrix.004 file - promoters50/4773185
aaattattttaa

SEQ ID NO: 74080 - DNA, 10 bp, Unknown
  misc_feature (1)..( 10): Matrix.004 file - promoters50/4773185
acaaaaattg

SEQ ID NO: 74081 - DNA, 11 bp, Unknown
  misc_feature (1)..( 11): Matrix.004 file - promoters50/4773205
attttataata

SEQ ID NO: 74082 - DNA, 8 bp, Unknown
  misc_feature (1)..( 8): Matrix.004 file - promoters50/4773205
gatggtta

SEQ ID NO: 74083 - DNA, 8 bp, Unknown
  misc_feature (1)..( 8): Matrix.004 file - promoters50/4773205
taaaaaga

SEQ ID NO: 74084 - DNA, 8 bp, Unknown
  misc_feature (1)..( 8): Matrix.004 file - promoters50/4773205
ttctctct

SEQ ID NO: 74085 - DNA, 11 bp, Unknown
  misc_feature (1)..( 11): Matrix.004 file - promoters50/4773205
ataaataatta

SEQ ID NO: 74086 - DNA, 10 bp, Unknown
  misc_feature (1)..( 10): Matrix.004 file - promoters50/4773205
aaaacaattt

SEQ ID NO: 74087 - DNA, 7 bp, Unknown
  misc_feature (1)..( 7): Matrix.004 file - promoters50/4773225
gataact

SEQ ID NO: 74088 - DNA, 9 bp, Unknown
  misc_feature (1)..( 9): Matrix.004 file - promoters50/4773225
atttagctt

SEQ ID NO: 74089 - DNA, 7 bp, Unknown
  misc_feature (1)..( 7): Matrix.004 file - promoters50/4773225
ctgaaaa

SEQ ID NO: 74090 - DNA, 9 bp, Unknown
  misc_feature (1)..( 9): Matrix.004 file - promoters50/4773249
aaaaaataa

SEQ ID NO: 74091 - DNA, 8 bp, Unknown
  misc_feature (1)..( 8): Matrix.004 file - promoters50/4773299
tttcaatg

SEQ ID NO: 74092 - DNA, 8 bp, Unknown
  misc_feature (1)..( 8): Matrix.004 file - promoters50/4773299
atcttctt

SEQ ID NO: 74093 - DNA, 16 bp, Unknown
  misc_feature (1)..( 16): Matrix.004 file - promoters50/4773323
gtaagattaaccttga

SEQ ID NO: 74094 - DNA, 7 bp, Unknown
  misc_feature (1)..( 7): Matrix.004 file - promoters50/4773323
tttaata

SEQ ID NO: 74095 - DNA, 7 bp, Unknown
  misc_feature (1)..( 7): Matrix.004 file - promoters50/4773331
attaata

SEQ ID NO: 74096 - DNA, 9 bp, Unknown
  misc_feature (1)..( 9): Matrix.004 file - promoters50/4773331
taatcaaat

SEQ ID NO: 74097 - DNA, 15 bp, Unknown
  misc_feature (1)..( 15): Matrix.004 file - promoters50/4773331
tccagaagaaaattc

SEQ ID NO: 74098 - DNA, 9 bp, Unknown
  misc_feature (1)..( 9): Matrix.004 file - promoters50/4773351
gaaatgaag

SEQ ID NO: 74099 - DNA, 8 bp, Unknown
  misc_feature (1)..( 8): Matrix.004 file - promoters50/4773355
ataaagag

SEQ ID NO: 74100 - DNA, 11 bp, Unknown
  misc_feature (1)..( 11): Matrix.004 file - promoters50/4773384
ttacttttaac

SEQ ID NO: 74101 - DNA, 9 bp, Unknown
  misc_feature (1)..( 9): Matrix.004 file - promoters50/4773384
agaaaaaga

SEQ ID NO: 74102 - DNA, 8 bp, Unknown
  misc_feature (1)..( 8): Matrix.004 file - promoters50/4773384
aaataata

SEQ ID NO: 74103 - DNA, 9 bp, Unknown
  misc_feature (1)..( 9): Matrix.004 file - promoters50/4773384
taatttatt

SEQ ID NO: 74104 - DNA, 7 bp, Unknown
  misc_feature (1)..( 7): Matrix.004 file - promoters50/4773384
tttcaat

SEQ ID NO: 74105 - DNA, 8 bp, Unknown
  misc_feature (1)..( 8): Matrix.004 file - promoters50/4773384
acatatta

SEQ ID NO: 74106 - DNA, 7 bp, Unknown
  misc_feature (1)..( 7): Matrix.004 file - promoters50/4773384
taagaaa

SEQ ID NO: 74107 - DNA, 7 bp, Unknown
  misc_feature (1)..( 7): Matrix.004 file - promoters50/4773384
catatta

SEQ ID NO: 74108 - DNA, 8 bp, Unknown
  misc_feature (1)..( 8): Matrix.004 file - promoters50/4773384
gaacaaaa

SEQ ID NO: 74109 - DNA, 7 bp, Unknown
  misc_feature (1)..( 7): Matrix.004 file - promoters50/4773384
tttatta

SEQ ID NO: 74110 - DNA, 8 bp, Unknown
  misc_feature (1)..( 8): Matrix.004 file - promoters50/4773392
agaaaaaa

SEQ ID NO: 74111 - DNA, 9 bp, Unknown
  misc_feature (1)..( 9): Matrix.004 file - promoters50/4773400
aaaacaaaa

SEQ ID NO: 74112 - DNA, 10 bp, Unknown
  misc_feature (1)..( 10): Matrix.004 file - promoters50/4773400
gaaataaaac

SEQ ID NO: 74113 - DNA, 7 bp, Unknown
  misc_feature (1)..( 7): Matrix.004 file - promoters50/4773793
tatttgc

SEQ ID NO: 74114 - DNA, 8 bp, Unknown
  misc_feature (1)..( 8): Matrix.004 file - promoters50/4773795
aataagat

SEQ ID NO: 74115 - DNA, 9 bp, Unknown
  misc_feature (1)..( 9): Matrix.004 file - promoters50/4773819
atttaattt

SEQ ID NO: 74116 - DNA, 11 bp, Unknown
  misc_feature (1)..( 11): Matrix.004 file - promoters50/4773819
aagataattaa

SEQ ID NO: 74117 - DNA, 11 bp, Unknown
  misc_feature (1)..( 11): Matrix.004 file - promoters50/4773819
tgtttaaaaag

SEQ ID NO: 74118 - DNA, 9 bp, Unknown
  misc_feature (1)..( 9): Matrix.004 file - promoters50/4773823
gatgctttt

SEQ ID NO: 74119 - DNA, 9 bp, Unknown
  misc_feature (1)..( 9): Matrix.004 file - promoters50/4773836
taaaaacaa

SEQ ID NO: 74120 - DNA, 9 bp, Unknown
  misc_feature (1)..( 9): Matrix.004 file - promoters50/4773836
atttatcat

SEQ ID NO: 74121 - DNA, 9 bp, Unknown
  misc_feature (1)..( 9): Matrix.004 file - promoters50/4773846
gtcaaaaaa

SEQ ID NO: 74122 - DNA, 10 bp, Unknown
  misc_feature (1)..( 10): Matrix.004 file - promoters50/4773846
tatgaaaaaa

SEQ ID NO: 74123 - DNA, 9 bp, Unknown
  misc_feature (1)..( 9): Matrix.004 file - promoters50/4773846
atatatttt

SEQ ID NO: 74124 - DNA, 8 bp, Unknown
  misc_feature (1)..( 8): Matrix.004 file - promoters50/4773846
aatacaaa

SEQ ID NO: 74125 - DNA, 9 bp, Unknown
  misc_feature (1)..( 9): Matrix.004 file - promoters50/4773846
attttatct

SEQ ID NO: 74126 - DNA, 7 bp, Unknown
  misc_feature (1)..( 7): Matrix.004 file - promoters50/4773846
acagcaa

SEQ ID NO: 74127 - DNA, 8 bp, Unknown
  misc_feature (1)..( 8): Matrix.004 file - promoters50/4773846
aattaaaa

SEQ ID NO: 74128 - DNA, 13 bp, Unknown
  misc_feature (1)..( 13): Matrix.004 file - promoters50/4773846
attagatacttta

SEQ ID NO: 74129 - DNA, 8 bp, Unknown
  misc_feature (1)..( 8): Matrix.004 file - promoters50/4773846
attcaaat

SEQ ID NO: 74130 - DNA, 9 bp, Unknown
  misc_feature (1)..( 9): Matrix.004 file - promoters50/4773846
aaattcaaa

SEQ ID NO: 74131 - DNA, 9 bp, Unknown
  misc_feature (1)..( 9): Matrix.004 file - promoters50/4773846
aatatttat

SEQ ID NO: 74132 - DNA, 7 bp, Unknown
  misc_feature (1)..( 7): Matrix.004 file - promoters50/4773846
aaagata

SEQ ID NO: 74133 - DNA, 7 bp, Unknown
  misc_feature (1)..( 7): Matrix.004 file - promoters50/4773846
tatctat

SEQ ID NO: 74134 - DNA, 8 bp, Unknown
  misc_feature (1)..( 8): Matrix.004 file - promoters50/4773846
taactata

SEQ ID NO: 74135 - DNA, 10 bp, Unknown
  misc_feature (1)..( 10): Matrix.004 file - promoters50/4773846
atgcatgtaa

SEQ ID NO: 74136 - DNA, 9 bp, Unknown
  misc_feature (1)..( 9): Matrix.004 file - promoters50/4773846
aataaatat

SEQ ID NO: 74137 - DNA, 8 bp, Unknown
  misc_feature (1)..( 8): Matrix.004 file - promoters50/4801635
aattaaaa

SEQ ID NO: 74138 - DNA, 12 bp, Unknown
  misc_feature (1)..( 12): Matrix.004 file - promoters50/4801635
aactgaaatttt

SEQ ID NO: 74139 - DNA, 12 bp, Unknown
  misc_feature (1)..( 12): Matrix.004 file - promoters50/4801635
caactagaaaac

SEQ ID NO: 74140 - DNA, 7 bp, Unknown
  misc_feature (1)..( 7): Matrix.004 file - promoters50/4801635
tgtattt

SEQ ID NO: 74141 - DNA, 9 bp, Unknown
  misc_feature (1)..( 9): Matrix.004 file - promoters50/4801635
tttgaaaca

SEQ ID NO: 74142 - DNA, 9 bp, Unknown
  misc_feature (1)..( 9): Matrix.004 file - promoters50/4801635
ttaagaaaa

SEQ ID NO: 74143 - DNA, 10 bp, Unknown
  misc_feature (1)..( 10): Matrix.004 file - promoters50/4801635
acaactagaa

SEQ ID NO: 74144 - DNA, 13 bp, Unknown
  misc_feature (1)..( 13): Matrix.004 file - promoters50/4801635
ataacaccattat

SEQ ID NO: 74145 - DNA, 14 bp, Unknown
  misc_feature (1)..( 14): Matrix.004 file - promoters50/4801635
ctttatctcatctt

SEQ ID NO: 74146 - DNA, 6 bp, Unknown
  misc_feature (1)..( 6): Matrix.004 file - promoters50/4801635
aaaata

SEQ ID NO: 74147 - DNA, 12 bp, Unknown
  misc_feature (1)..( 12): Matrix.004 file - promoters50/4802537
atttttagttca

SEQ ID NO: 74148 - DNA, 10 bp, Unknown
  misc_feature (1)..( 10): Matrix.004 file - promoters50/4803329
tatattaaag

SEQ ID NO: 74149 - DNA, 8 bp, Unknown
  misc_feature (1)..( 8): Matrix.004 file - promoters50/4803329
aaaaaaca

SEQ ID NO: 74150 - DNA, 10 bp, Unknown
  misc_feature (1)..( 10): Matrix.004 file - promoters50/4803329
caaaaaatat

SEQ ID NO: 74151 - DNA, 11 bp, Unknown
  misc_feature (1)..( 11): Matrix.004 file - promoters50/4803451
gaagacaaaaa

SEQ ID NO: 74152 - DNA, 8 bp, Unknown
  misc_feature (1)..( 8): Matrix.004 file - promoters50/4803451
cttataaa

SEQ ID NO: 74153 - DNA, 8 bp, Unknown
  misc_feature (1)..( 8): Matrix.004 file - promoters50/4806023
tataaatt

SEQ ID NO: 74154 - DNA, 10 bp, Unknown
  misc_feature (1)..( 10): Matrix.004 file - promoters50/4806023
atcttgattt

SEQ ID NO: 74155 - DNA, 7 bp, Unknown
  misc_feature (1)..( 7): Matrix.004 file - promoters50/4806023
gaccgtt

SEQ ID NO: 74156 - DNA, 9 bp, Unknown
  misc_feature (1)..( 9): Matrix.004 file - promoters50/4806023
cagctttag

SEQ ID NO: 74157 - DNA, 6 bp, Unknown
  misc_feature (1)..( 6): Matrix.004 file - promoters50/4807018
ggccca

SEQ ID NO: 74158 - DNA, 11 bp, Unknown
  misc_feature (1)..( 11): Matrix.004 file - promoters50/4807026
tgaaaatttat

SEQ ID NO: 74159 - DNA, 10 bp, Unknown
  misc_feature (1)..( 10): Matrix.004 file - promoters50/4807026
atcaaaaatt

SEQ ID NO: 74160 - DNA, 15 bp, Unknown
  misc_feature (1)..( 15): Matrix.004 file - promoters50/4807026
aaaaaaaaacatatt

SEQ ID NO: 74161 - DNA, 9 bp, Unknown
  misc_feature (1)..( 9): Matrix.004 file - promoters50/4807026
tgtaaaatt

SEQ ID NO: 74162 - DNA, 10 bp, Unknown
  misc_feature (1)..( 10): Matrix.004 file - promoters50/4807026
tctaaaaata

SEQ ID NO: 74163 - DNA, 10 bp, Unknown
  misc_feature (1)..( 10): Matrix.004 file - promoters50/4807026
cttaattaaa

SEQ ID NO: 74164 - DNA, 9 bp, Unknown
  misc_feature (1)..( 9): Matrix.004 file - promoters50/4807054
aattaatat

SEQ ID NO: 74165 - DNA, 9 bp, Unknown
  misc_feature (1)..( 9): Matrix.004 file - promoters50/4807258
atttattaa

SEQ ID NO: 74166 - DNA, 8 bp, Unknown
  misc_feature (1)..( 8): Matrix.004 file - promoters50/4807258
acttgttg

SEQ ID NO: 74167 - DNA, 8 bp, Unknown
  misc_feature (1)..( 8): Matrix.004 file - promoters50/4807258
ttttttgt

SEQ ID NO: 74168 - DNA, 10 bp, Unknown
  misc_feature (1)..( 10): Matrix.004 file - promoters50/4809022
actatttaat

SEQ ID NO: 74169 - DNA, 7 bp, Unknown
  misc_feature (1)..( 7): Matrix.004 file - promoters50/4809022
ttaccat

SEQ ID NO: 74170 - DNA, 6 bp, Unknown
  misc_feature (1)..( 6): Matrix.004 file - promoters50/4809022
aaaaat

SEQ ID NO: 74171 - DNA, 8 bp, Unknown
  misc_feature (1)..( 8): Matrix.004 file - promoters50/4809022
atcaaata

SEQ ID NO: 74172 - DNA, 9 bp, Unknown
  misc_feature (1)..( 9): Matrix.004 file - promoters50/4809022
tatataata

SEQ ID NO: 74173 - DNA, 11 bp, Unknown
  misc_feature (1)..( 11): Matrix.004 file - promoters50/4809801
aaactttgatt

SEQ ID NO: 74174 - DNA, 8 bp, Unknown
  misc_feature (1)..( 8): Matrix.004 file - promoters50/4809801
attgccat

SEQ ID NO: 74175 - DNA, 8 bp, Unknown
  misc_feature (1)..( 8): Matrix.004 file - promoters50/4809801
caaaatga

SEQ ID NO: 74176 - DNA, 8 bp, Unknown
  misc_feature (1)..( 8): Matrix.004 file - promoters50/4809801
ctttttgc

SEQ ID NO: 74177 - DNA, 7 bp, Unknown
  misc_feature (1)..( 7): Matrix.004 file - promoters50/4810509
agatctc

SEQ ID NO: 74178 - DNA, 12 bp, Unknown
  misc_feature (1)..( 12): Matrix.004 file - promoters50/4811341
agaaatttgtca

SEQ ID NO: 74179 - DNA, 9 bp, Unknown
  misc_feature (1)..( 9): Matrix.004 file - promoters50/4811854
atgtacata

SEQ ID NO: 74180 - DNA, 8 bp, Unknown
  misc_feature (1)..( 8): Matrix.004 file - promoters50/4811854
tctatatt

SEQ ID NO: 74181 - DNA, 8 bp, Unknown
  misc_feature (1)..( 8): Matrix.004 file - promoters50/4811854
atttcatt

SEQ ID NO: 74182 - DNA, 13 bp, Unknown
  misc_feature (1)..( 13): Matrix.004 file - promoters50/4811854
tttaaacctaaat

SEQ ID NO: 74183 - DNA, 11 bp, Unknown
  misc_feature (1)..( 11): Matrix.004 file - promoters50/4811854
aataattttta

SEQ ID NO: 74184 - DNA, 9 bp, Unknown
  misc_feature (1)..( 9): Matrix.004 file - promoters50/4811854
aaaagttaa

SEQ ID NO: 74185 - DNA, 10 bp, Unknown
  misc_feature (1)..( 10): Matrix.004 file - promoters50/4811854
ttatacatat

SEQ ID NO: 74186 - DNA, 9 bp, Unknown
  misc_feature (1)..( 9): Matrix.004 file - promoters50/4811975
attatatta

SEQ ID NO: 74187 - DNA, 8 bp, Unknown
  misc_feature (1)..( 8): Matrix.004 file - promoters50/4811975
attttttt

SEQ ID NO: 74188 - DNA, 7 bp, Unknown
  misc_feature (1)..( 7): Matrix.004 file - promoters50/4815093
cttgaaa

SEQ ID NO: 74189 - DNA, 9 bp, Unknown
  misc_feature (1)..( 9): Matrix.004 file - promoters50/4815135
gttgtacaa

SEQ ID NO: 74190 - DNA, 8 bp, Unknown
  misc_feature (1)..( 8): Matrix.004 file - promoters50/4815135
gacgaaaa

SEQ ID NO: 74191 - DNA, 8 bp, Unknown
  misc_feature (1)..( 8): Matrix.004 file - promoters50/4815135
accaaaaa

SEQ ID NO: 74192 - DNA, 7 bp, Unknown
  misc_feature (1)..( 7): Matrix.004 file - promoters50/4815135
ccacaaa

SEQ ID NO: 74193 - DNA, 10 bp, Unknown
  misc_feature (1)..( 10): Matrix.004 file - promoters50/4815135
caaatttgtt

SEQ ID NO: 74194 - DNA, 12 bp, Unknown
  misc_feature (1)..( 12): Matrix.004 file - promoters50/4816112
tttgttgtattc

SEQ ID NO: 74195 - DNA, 9 bp, Unknown
  misc_feature (1)..( 9): Matrix.004 file - promoters50/4816112
tttgatttt

SEQ ID NO: 74196 - DNA, 9 bp, Unknown
  misc_feature (1)..( 9): Matrix.004 file - promoters50/4854186
ttttgattt

SEQ ID NO: 74197 - DNA, 12 bp, Unknown
  misc_feature (1)..( 12): Matrix.004 file - promoters50/4854186
aacgaagaataa

SEQ ID NO: 74198 - DNA, 8 bp, Unknown
  misc_feature (1)..( 8): Matrix.004 file - promoters50/4854186
aaaaaata

SEQ ID NO: 74199 - DNA, 12 bp, Unknown
  misc_feature (1)..( 12): Matrix.004 file - promoters50/4854186
attaaaatataa

SEQ ID NO: 74200 - DNA, 13 bp, Unknown
  misc_feature (1)..( 13): Matrix.004 file - promoters50/4899797
tagtgactaaaaa

SEQ ID NO: 74201 - DNA, 9 bp, Unknown
  misc_feature (1)..( 9): Matrix.004 file - promoters50/4899797
tatttttgc

SEQ ID NO: 74202 - DNA, 8 bp, Unknown
  misc_feature (1)..( 8): Matrix.004 file - promoters50/4899822
taataaat

SEQ ID NO: 74203 - DNA, 11 bp, Unknown
  misc_feature (1)..( 11): Matrix.004 file - promoters50/4899822
agtaaataaaa

SEQ ID NO: 74204 - DNA, 9 bp, Unknown
  misc_feature (1)..( 9): Matrix.004 file - promoters50/4899830
ctattttca

SEQ ID NO: 74205 - DNA, 8 bp, Unknown
  misc_feature (1)..( 8): Matrix.004 file - promoters50/4899830
actatata

SEQ ID NO: 74206 - DNA, 9 bp, Unknown
  misc_feature (1)..( 9): Matrix.004 file - promoters50/4899830
gaaaaaaat

SEQ ID NO: 74207 - DNA, 10 bp, Unknown
  misc_feature (1)..( 10): Matrix.004 file - promoters50/4899830
gaaaaattaa

SEQ ID NO: 74208 - DNA, 8 bp, Unknown
  misc_feature (1)..( 8): Matrix.004 file - promoters50/4899830
tatagtaa

SEQ ID NO: 74209 - DNA, 10 bp, Unknown
  misc_feature (1)..( 10): Matrix.004 file - promoters50/4899830
gaaaaaaaat

SEQ ID NO: 74210 - DNA, 5 bp, Unknown
  misc_feature (1)..( 5): Matrix.004 file - promoters50/4899858
ttctt

SEQ ID NO: 74211 - DNA, 7 bp, Unknown
  misc_feature (1)..( 7): Matrix.004 file - promoters50/4899858
tttttgg

SEQ ID NO: 74212 - DNA, 10 bp, Unknown
  misc_feature (1)..( 10): Matrix.004 file - promoters50/4899858
gcaaagaaca

SEQ ID NO: 74213 - DNA, 8 bp, Unknown
  misc_feature (1)..( 8): Matrix.004 file - promoters50/4899858
ttttcaat

SEQ ID NO: 74214 - DNA, 11 bp, Unknown
  misc_feature (1)..( 11): Matrix.004 file - promoters50/4899880
accactcaatt

SEQ ID NO: 74215 - DNA, 8 bp, Unknown
  misc_feature (1)..( 8): Matrix.004 file - promoters50/4899880
atttttag

SEQ ID NO: 74216 - DNA, 6 bp, Unknown
  misc_feature (1)..( 6): Matrix.004 file - promoters50/4899880
tttgta

SEQ ID NO: 74217 - DNA, 6 bp, Unknown
  misc_feature (1)..( 6): Matrix.004 file - promoters50/4899880
taaaat

SEQ ID NO: 74218 - DNA, 7 bp, Unknown
  misc_feature (1)..( 7): Matrix.004 file - promoters50/4899880
ttaatat

SEQ ID NO: 74219 - DNA, 7 bp, Unknown
  misc_feature (1)..( 7): Matrix.004 file - promoters50/4899880
aattcca

SEQ ID NO: 74220 - DNA, 8 bp, Unknown
  misc_feature (1)..( 8): Matrix.004 file - promoters50/4899880
ctttggaa

SEQ ID NO: 74221 - DNA, 8 bp, Unknown
  misc_feature (1)..( 8): Matrix.004 file - promoters50/4899993
actacgag

SEQ ID NO: 74222 - DNA, 10 bp, Unknown
  misc_feature (1)..( 10): Matrix.004 file - promoters50/4899993
atgaaagagt

SEQ ID NO: 74223 - DNA, 9 bp, Unknown
  misc_feature (1)..( 9): Matrix.004 file - promoters50/4900035
ccgtcaaaa

SEQ ID NO: 74224 - DNA, 8 bp, Unknown
  misc_feature (1)..( 8): Matrix.004 file - promoters50/4900121
cattacaa

SEQ ID NO: 74225 - DNA, 9 bp, Unknown
  misc_feature (1)..( 9): Matrix.004 file - promoters50/4900121
aaagagatt

SEQ ID NO: 74226 - DNA, 7 bp, Unknown
  misc_feature (1)..( 7): Matrix.004 file - promoters50/4900121
aaaaaaa

SEQ ID NO: 74227 - DNA, 8 bp, Unknown
  misc_feature (1)..( 8): Matrix.004 file - promoters50/4900121
atttattt

SEQ ID NO: 74228 - DNA, 10 bp, Unknown
  misc_feature (1)..( 10): Matrix.004 file - promoters50/4900121
atatttataa

SEQ ID NO: 74229 - DNA, 9 bp, Unknown
  misc_feature (1)..( 9): Matrix.004 file - promoters50/4900121
tgttttgta

SEQ ID NO: 74230 - DNA, 9 bp, Unknown
  misc_feature (1)..( 9): Matrix.004 file - promoters50/4900121
tgtatattt

SEQ ID NO: 74231 - DNA, 10 bp, Unknown
  misc_feature (1)..( 10): Matrix.004 file - promoters50/4900121
aaaccttctg

SEQ ID NO: 74232 - DNA, 8 bp, Unknown
  misc_feature (1)..( 8): Matrix.004 file - promoters50/4900121
atttgtac

SEQ ID NO: 74233 - DNA, 9 bp, Unknown
  misc_feature (1)..( 9): Matrix.004 file - promoters50/4900213
caaaaaaca

SEQ ID NO: 74234 - DNA, 8 bp, Unknown
  misc_feature (1)..( 8): Matrix.004 file - promoters50/4900213
acttaagt

SEQ ID NO: 74235 - DNA, 8 bp, Unknown
  misc_feature (1)..( 8): Matrix.004 file - promoters50/4900213
tgattaaa

SEQ ID NO: 74236 - DNA, 7 bp, Unknown
  misc_feature (1)..( 7): Matrix.004 file - promoters50/4900213
taaattt

SEQ ID NO: 74237 - DNA, 8 bp, Unknown
  misc_feature (1)..( 8): Matrix.004 file - promoters50/4900353
accaaaaa

SEQ ID NO: 74238 - DNA, 9 bp, Unknown
  misc_feature (1)..( 9): Matrix.004 file - promoters50/4900353
accattttt

SEQ ID NO: 74239 - DNA, 11 bp, Unknown
  misc_feature (1)..( 11): Matrix.004 file - promoters50/4900353
taatatatata

SEQ ID NO: 74240 - DNA, 14 bp, Unknown
  misc_feature (1)..( 14): Matrix.004 file - promoters50/4900353
agtgattcttatta

SEQ ID NO: 74241 - DNA, 5 bp, Unknown
  misc_feature (1)..( 5): Matrix.004 file - promoters50/4900353
aaaat

SEQ ID NO: 74242 - DNA, 15 bp, Unknown
  misc_feature (1)..( 15): Matrix.004 file - promoters50/4900417
aaatataatttattt

SEQ ID NO: 74243 - DNA, 11 bp, Unknown
  misc_feature (1)..( 11): Matrix.004 file - promoters50/4900417
aattttaatta

SEQ ID NO: 74244 - DNA, 10 bp, Unknown
  misc_feature (1)..( 10): Matrix.004 file - promoters50/4900417
ttgagaaaag

SEQ ID NO: 74245 - DNA, 11 bp, Unknown
  misc_feature (1)..( 11): Matrix.004 file - promoters50/4900417
ataatataaga

SEQ ID NO: 74246 - DNA, 7 bp, Unknown
  misc_feature (1)..( 7): Matrix.004 file - promoters50/4900417
tataaga

SEQ ID NO: 74247 - DNA, 12 bp, Unknown
  misc_feature (1)..( 12): Matrix.004 file - promoters50/4900417
attttcaaattt

SEQ ID NO: 74248 - DNA, 7 bp, Unknown
  misc_feature (1)..( 7): Matrix.004 file - promoters50/4900589
atttctt

SEQ ID NO: 74249 - DNA, 11 bp, Unknown
  misc_feature (1)..( 11): Matrix.004 file - promoters50/4900589
gtataaattga

SEQ ID NO: 74250 - DNA, 9 bp, Unknown
  misc_feature (1)..( 9): Matrix.004 file - promoters50/4900589
caaaaagag

SEQ ID NO: 74251 - DNA, 9 bp, Unknown
  misc_feature (1)..( 9): Matrix.004 file - promoters50/4900589
tttgttttt

SEQ ID NO: 74252 - DNA, 8 bp, Unknown
  misc_feature (1)..( 8): Matrix.004 file - promoters50/4900589
tgaaacaa

SEQ ID NO: 74253 - DNA, 9 bp, Unknown
  misc_feature (1)..( 9): Matrix.004 file - promoters50/4900589
tatttattt

SEQ ID NO: 74254 - DNA, 8 bp, Unknown
  misc_feature (1)..( 8): Matrix.004 file - promoters50/4900589
gtaaatca

SEQ ID NO: 74255 - DNA, 8 bp, Unknown
  misc_feature (1)..( 8): Matrix.004 file - promoters50/4900589
tttgtttt

SEQ ID NO: 74256 - DNA, 13 bp, Unknown
  misc_feature (1)..( 13): Matrix.004 file - promoters50/4900589
aatccaaaatttg

SEQ ID NO: 74257 - DNA, 4 bp, Unknown
  misc_feature (1)..( 4): Matrix.004 file - promoters50/4900589
aaaa

SEQ ID NO: 74258 - DNA, 7 bp, Unknown
  misc_feature (1)..( 7): Matrix.004 file - promoters50/4900589
caaaaag

SEQ ID NO: 74259 - DNA, 8 bp, Unknown
  misc_feature (1)..( 8): Matrix.004 file - promoters50/4900589
tgggtttt

SEQ ID NO: 74260 - DNA, 8 bp, Unknown
  misc_feature (1)..( 8): Matrix.004 file - promoters50/4900643
ttttaatt

SEQ ID NO: 74261 - DNA, 8 bp, Unknown
  misc_feature (1)..( 8): Matrix.004 file - promoters50/4900643
tgtgggtt

SEQ ID NO: 74262 - DNA, 9 bp, Unknown
  misc_feature (1)..( 9): Matrix.004 file - promoters50/4900800
tttatttac

SEQ ID NO: 74263 - DNA, 9 bp, Unknown
  misc_feature (1)..( 9): Matrix.004 file - promoters50/4900800
caagaaaga

SEQ ID NO: 74264 - DNA, 13 bp, Unknown
  misc_feature (1)..( 13): Matrix.004 file - promoters50/4900939
aaatgcacgaaga

SEQ ID NO: 74265 - DNA, 11 bp, Unknown
  misc_feature (1)..( 11): Matrix.004 file - promoters50/4901133
aaaatcaaata

SEQ ID NO: 74266 - DNA, 16 bp, Unknown
  misc_feature (1)..( 16): Matrix.004 file - promoters50/4901133
taatttatgttttaat

SEQ ID NO: 74267 - DNA, 10 bp, Unknown
  misc_feature (1)..( 10): Matrix.004 file - promoters50/4901149
atttcaaaac

SEQ ID NO: 74268 - DNA, 8 bp, Unknown
  misc_feature (1)..( 8): Matrix.004 file - promoters50/4901149
aatttctt

SEQ ID NO: 74269 - DNA, 9 bp, Unknown
  misc_feature (1)..( 9): Matrix.004 file - promoters50/4901149
aatgaaaat

SEQ ID NO: 74270 - DNA, 7 bp, Unknown
  misc_feature (1)..( 7): Matrix.004 file - promoters50/4901149
tctaata

SEQ ID NO: 74271 - DNA, 8 bp, Unknown
  misc_feature (1)..( 8): Matrix.004 file - promoters50/4901149
ctctcctt

SEQ ID NO: 74272 - DNA, 8 bp, Unknown
  misc_feature (1)..( 8): Matrix.004 file - promoters50/4901149
tttaacaa

SEQ ID NO: 74273 - DNA, 8 bp, Unknown
  misc_feature (1)..( 8): Matrix.004 file - promoters50/4901149
ttttcttt

SEQ ID NO: 74274 - DNA, 7 bp, Unknown
  misc_feature (1)..( 7): Matrix.004 file - promoters50/4901149
agatata

SEQ ID NO: 74275 - DNA, 8 bp, Unknown
  misc_feature (1)..( 8): Matrix.004 file - promoters50/4901225
ttactgtc

SEQ ID NO: 74276 - DNA, 10 bp, Unknown
  misc_feature (1)..( 10): Matrix.004 file - promoters50/4901241
acaaaacacg

SEQ ID NO: 74277 - DNA, 11 bp, Unknown
  misc_feature (1)..( 11): Matrix.004 file - promoters50/4901241
aattaaattta

SEQ ID NO: 74278 - DNA, 14 bp, Unknown
  misc_feature (1)..( 14): Matrix.004 file - promoters50/4901241
aaaaaaagatttaa

SEQ ID NO: 74279 - DNA, 12 bp, Unknown
  misc_feature (1)..( 12): Matrix.004 file - promoters50/4901241
agattaattaat

SEQ ID NO: 74280 - DNA, 10 bp, Unknown
  misc_feature (1)..( 10): Matrix.004 file - promoters50/4901241
cataattaaa

SEQ ID NO: 74281 - DNA, 10 bp, Unknown
  misc_feature (1)..( 10): Matrix.004 file - promoters50/4901241
aaatttttaa

SEQ ID NO: 74282 - DNA, 10 bp, Unknown
  misc_feature (1)..( 10): Matrix.004 file - promoters50/4901241
tgataaaaat

SEQ ID NO: 74283 - DNA, 12 bp, Unknown
  misc_feature (1)..( 12): Matrix.004 file - promoters50/4901241
tcaaatttgaaa

SEQ ID NO: 74284 - DNA, 10 bp, Unknown
  misc_feature (1)..( 10): Matrix.004 file - promoters50/4901241
atctgaaaaa

SEQ ID NO: 74285 - DNA, 6 bp, Unknown
  misc_feature (1)..( 6): Matrix.004 file - promoters50/4901241
aaagaa

SEQ ID NO: 74286 - DNA, 13 bp, Unknown
  misc_feature (1)..( 13): Matrix.004 file - promoters50/4901241
ataaaataaaaat

SEQ ID NO: 74287 - DNA, 17 bp, Unknown
  misc_feature (1)..( 17): Matrix.004 file - promoters50/4901241
aataaaaaatattttga

SEQ ID NO: 74288 - DNA, 9 bp, Unknown
  misc_feature (1)..( 9): Matrix.004 file - promoters50/4901241
gaaaaaata

SEQ ID NO: 74289 - DNA, 14 bp, Unknown
  misc_feature (1)..( 14): Matrix.004 file - promoters50/4901241
attaaaatataaat

SEQ ID NO: 74290 - DNA, 13 bp, Unknown
  misc_feature (1)..( 13): Matrix.004 file - promoters50/4901516
ttgaaatatattt

SEQ ID NO: 74291 - DNA, 14 bp, Unknown
  misc_feature (1)..( 14): Matrix.004 file - promoters50/4901516
gaaacaaaaacatt

SEQ ID NO: 74292 - DNA, 9 bp, Unknown
  misc_feature (1)..( 9): Matrix.004 file - promoters50/4901516
cccactaaa

SEQ ID NO: 74293 - DNA, 8 bp, Unknown
  misc_feature (1)..( 8): Matrix.004 file - promoters50/4901516
tatatatt

SEQ ID NO: 74294 - DNA, 10 bp, Unknown
  misc_feature (1)..( 10): Matrix.004 file - promoters50/4901528
aaataaaata

SEQ ID NO: 74295 - DNA, 12 bp, Unknown
  misc_feature (1)..( 12): Matrix.004 file - promoters50/4901564
taaattcaaaat

SEQ ID NO: 74296 - DNA, 16 bp, Unknown
  misc_feature (1)..( 16): Matrix.004 file - promoters50/4901564
atggataagcccatta

SEQ ID NO: 74297 - DNA, 12 bp, Unknown
  misc_feature (1)..( 12): Matrix.004 file - promoters50/4901568
attaagattatg

SEQ ID NO: 74298 - DNA, 9 bp, Unknown
  misc_feature (1)..( 9): Matrix.004 file - promoters50/4901568
gaagatgca

SEQ ID NO: 74299 - DNA, 6 bp, Unknown
  misc_feature (1)..( 6): Matrix.004 file - promoters50/4901568
tttgga

SEQ ID NO: 74300 - DNA, 11 bp, Unknown
  misc_feature (1)..( 11): Matrix.004 file - promoters50/4901592
gaaataaatga

SEQ ID NO: 74301 - DNA, 9 bp, Unknown
  misc_feature (1)..( 9): Matrix.004 file - promoters50/4901592
tttgttttg

SEQ ID NO: 74302 - DNA, 7 bp, Unknown
  misc_feature (1)..( 7): Matrix.004 file - promoters50/4901592
tttgttg

SEQ ID NO: 74303 - DNA, 8 bp, Unknown
  misc_feature (1)..( 8): Matrix.004 file - promoters50/4901673
atttgtaa

SEQ ID NO: 74304 - DNA, 7 bp, Unknown
  misc_feature (1)..( 7): Matrix.004 file - promoters50/4901673
aattcaa

SEQ ID NO: 74305 - DNA, 9 bp, Unknown
  misc_feature (1)..( 9): Matrix.004 file - promoters50/4901673
tatttaagc

SEQ ID NO: 74306 - DNA, 11 bp, Unknown
  misc_feature (1)..( 11): Matrix.004 file - promoters50/4901673
ttcctagctac

SEQ ID NO: 74307 - DNA, 8 bp, Unknown
  misc_feature (1)..( 8): Matrix.004 file - promoters50/4901736
attccata

SEQ ID NO: 74308 - DNA, 10 bp, Unknown
  misc_feature (1)..( 10): Matrix.004 file - promoters50/4901736
aaaattgttt

SEQ ID NO: 74309 - DNA, 13 bp, Unknown
  misc_feature (1)..( 13): Matrix.004 file - promoters50/4901736
taaatttttggtt

SEQ ID NO: 74310 - DNA, 10 bp, Unknown
  misc_feature (1)..( 10): Matrix.004 file - promoters50/4901793
aaggcccaaa

SEQ ID NO: 74311 - DNA, 8 bp, Unknown
  misc_feature (1)..( 8): Matrix.004 file - promoters50/4901822
taacttat

SEQ ID NO: 74312 - DNA, 10 bp, Unknown
  misc_feature (1)..( 10): Matrix.004 file - promoters50/4901822
tgaatcaata

SEQ ID NO: 74313 - DNA, 10 bp, Unknown
  misc_feature (1)..( 10): Matrix.004 file - promoters50/4901822
atggtttttg

SEQ ID NO: 74314 - DNA, 7 bp, Unknown
  misc_feature (1)..( 7): Matrix.004 file - promoters50/4901822
catgtga

SEQ ID NO: 74315 - DNA, 8 bp, Unknown
  misc_feature (1)..( 8): Matrix.004 file - promoters50/4901823
ttaacctt

SEQ ID NO: 74316 - DNA, 11 bp, Unknown
  misc_feature (1)..( 11): Matrix.004 file - promoters50/4901823
atttttttgtc

SEQ ID NO: 74317 - DNA, 10 bp, Unknown
  misc_feature (1)..( 10): Matrix.004 file - promoters50/4901842
ttgaattttt

SEQ ID NO: 74318 - DNA, 8 bp, Unknown
  misc_feature (1)..( 8): Matrix.004 file - promoters50/4901842
ggaagaaa

SEQ ID NO: 74319 - DNA, 7 bp, Unknown
  misc_feature (1)..( 7): Matrix.004 file - promoters50/4901842
caaataa

SEQ ID NO: 74320 - DNA, 8 bp, Unknown
  misc_feature (1)..( 8): Matrix.004 file - promoters50/4901884
taaagcaa

SEQ ID NO: 74321 - DNA, 9 bp, Unknown
  misc_feature (1)..( 9): Matrix.004 file - promoters50/4901884
aaaaaactt

SEQ ID NO: 74322 - DNA, 9 bp, Unknown
  misc_feature (1)..( 9): Matrix.004 file - promoters50/4901884
aaaaataat

SEQ ID NO: 74323 - DNA, 6 bp, Unknown
  misc_feature (1)..( 6): Matrix.004 file - promoters50/4902029
aaacaa

SEQ ID NO: 74324 - DNA, 10 bp, Unknown
  misc_feature (1)..( 10): Matrix.004 file - promoters50/4902029
ctttttattt

SEQ ID NO: 74325 - DNA, 7 bp, Unknown
  misc_feature (1)..( 7): Matrix.004 file - promoters50/4902029
cataaaa

SEQ ID NO: 74326 - DNA, 13 bp, Unknown
  misc_feature (1)..( 13): Matrix.004 file - promoters50/4902038
attaaatcttttt

SEQ ID NO: 74327 - DNA, 8 bp, Unknown
  misc_feature (1)..( 8): Matrix.004 file - promoters50/4902038
tgaaaact

SEQ ID NO: 74328 - DNA, 7 bp, Unknown
  misc_feature (1)..( 7): Matrix.004 file - promoters50/4902082
cacgaaa

SEQ ID NO: 74329 - DNA, 13 bp, Unknown
  misc_feature (1)..( 13): Matrix.004 file - promoters50/4902082
ttccttcacattg

SEQ ID NO: 74330 - DNA, 6 bp, Unknown
  misc_feature (1)..( 6): Matrix.004 file - promoters50/4902143
ataatt

SEQ ID NO: 74331 - DNA, 6 bp, Unknown
  misc_feature (1)..( 6): Matrix.004 file - promoters50/4902387
tggttt

SEQ ID NO: 74332 - DNA, 8 bp, Unknown
  misc_feature (1)..( 8): Matrix.004 file - promoters50/4902387
tataaaca

SEQ ID NO: 74333 - DNA, 9 bp, Unknown
  misc_feature (1)..( 9): Matrix.004 file - promoters50/4902425
aaatgttta

SEQ ID NO: 74334 - DNA, 9 bp, Unknown
  misc_feature (1)..( 9): Matrix.004 file - promoters50/4902456
ccactacat

SEQ ID NO: 74335 - DNA, 9 bp, Unknown
  misc_feature (1)..( 9): Matrix.004 file - promoters50/4902456
caatatctt

SEQ ID NO: 74336 - DNA, 9 bp, Unknown
  misc_feature (1)..( 9): Matrix.004 file - promoters50/4902456
gaaaaaaca

SEQ ID NO: 74337 - DNA, 9 bp, Unknown
  misc_feature (1)..( 9): Matrix.004 file - promoters50/4902456
aaaaataag

SEQ ID NO: 74338 - DNA, 7 bp, Unknown
  misc_feature (1)..( 7): Matrix.004 file - promoters50/4902456
aaaaaag

SEQ ID NO: 74339 - DNA, 8 bp, Unknown
  misc_feature (1)..( 8): Matrix.004 file - promoters50/4902456
agatatta

SEQ ID NO: 74340 - DNA, 8 bp, Unknown
  misc_feature (1)..( 8): Matrix.004 file - promoters50/4902456
aaatagat

SEQ ID NO: 74341 - DNA, 8 bp, Unknown
  misc_feature (1)..( 8): Matrix.004 file - promoters50/4902791
atttttat

SEQ ID NO: 74342 - DNA, 10 bp, Unknown
  misc_feature (1)..( 10): Matrix.004 file - promoters50/4903159
gccattttta

SEQ ID NO: 74343 - DNA, 12 bp, Unknown
  misc_feature (1)..( 12): Matrix.004 file - promoters50/4903171
attggttaaata

SEQ ID NO: 74344 - DNA, 9 bp, Unknown
  misc_feature (1)..( 9): Matrix.004 file - promoters50/4903171
atatgattt

SEQ ID NO: 74345 - DNA, 8 bp, Unknown
  misc_feature (1)..( 8): Matrix.004 file - promoters50/4903171
acttagaa

SEQ ID NO: 74346 - DNA, 8 bp, Unknown
  misc_feature (1)..( 8): Matrix.004 file - promoters50/4903171
gaaaaatc

SEQ ID NO: 74347 - DNA, 7 bp, Unknown
  misc_feature (1)..( 7): Matrix.004 file - promoters50/4903178
gattgga

SEQ ID NO: 74348 - DNA, 6 bp, Unknown
  misc_feature (1)..( 6): Matrix.004 file - promoters50/4903178
aattaa

SEQ ID NO: 74349 - DNA, 11 bp, Unknown
  misc_feature (1)..( 11): Matrix.004 file - promoters50/4903407
actctgtattc

SEQ ID NO: 74350 - DNA, 9 bp, Unknown
  misc_feature (1)..( 9): Matrix.004 file - promoters50/4903407
ctaaaaata

SEQ ID NO: 74351 - DNA, 8 bp, Unknown
  misc_feature (1)..( 8): Matrix.004 file - promoters50/4903407
tttattta

SEQ ID NO: 74352 - DNA, 8 bp, Unknown
  misc_feature (1)..( 8): Matrix.004 file - promoters50/4903407
cattattt

SEQ ID NO: 74353 - DNA, 11 bp, Unknown
  misc_feature (1)..( 11): Matrix.004 file - promoters50/4903407
tttaaaaataa

SEQ ID NO: 74354 - DNA, 12 bp, Unknown
  misc_feature (1)..( 12): Matrix.004 file - promoters50/4903614
ccaaaaataaat

SEQ ID NO: 74355 - DNA, 10 bp, Unknown
  misc_feature (1)..( 10): Matrix.004 file - promoters50/4903653
ttaatataaa

SEQ ID NO: 74356 - DNA, 10 bp, Unknown
  misc_feature (1)..( 10): Matrix.004 file - promoters50/4903653
tttgtatatc

SEQ ID NO: 74357 - DNA, 10 bp, Unknown
  misc_feature (1)..( 10): Matrix.004 file - promoters50/4906473
tcaaaaaaaa

SEQ ID NO: 74358 - DNA, 8 bp, Unknown
  misc_feature (1)..( 8): Matrix.004 file - promoters50/4907396
tttggaag

SEQ ID NO: 74359 - DNA, 10 bp, Unknown
  misc_feature (1)..( 10): Matrix.004 file - promoters50/4909449
atctttagta

SEQ ID NO: 74360 - DNA, 10 bp, Unknown
  misc_feature (1)..( 10): Matrix.004 file - promoters50/4909449
atataaatac

SEQ ID NO: 74361 - DNA, 9 bp, Unknown
  misc_feature (1)..( 9): Matrix.004 file - promoters50/4909449
gaatcaaaa

SEQ ID NO: 74362 - DNA, 10 bp, Unknown
  misc_feature (1)..( 10): Matrix.004 file - promoters50/4910180
taaatattaa

SEQ ID NO: 74363 - DNA, 10 bp, Unknown
  misc_feature (1)..( 10): Matrix.004 file - promoters50/4910180
ttgaatttga

SEQ ID NO: 74364 - DNA, 11 bp, Unknown
  misc_feature (1)..( 11): Matrix.004 file - promoters50/4910287
aaagttactat

SEQ ID NO: 74365 - DNA, 11 bp, Unknown
  misc_feature (1)..( 11): Matrix.004 file - promoters50/4910298
ttatttaatta

SEQ ID NO: 74366 - DNA, 10 bp, Unknown
  misc_feature (1)..( 10): Matrix.004 file - promoters50/4910298
atttttctaa

SEQ ID NO: 74367 - DNA, 9 bp, Unknown
  misc_feature (1)..( 9): Matrix.004 file - promoters50/4910298
ttttttaaa

SEQ ID NO: 74368 - DNA, 7 bp, Unknown
  misc_feature (1)..( 7): Matrix.004 file - promoters50/4910298
acaaaag

SEQ ID NO: 74369 - DNA, 8 bp, Unknown
  misc_feature (1)..( 8): Matrix.004 file - promoters50/4910362
caaaagtt

SEQ ID NO: 74370 - DNA, 8 bp, Unknown
  misc_feature (1)..( 8): Matrix.004 file - promoters50/4910362
atttgtct

SEQ ID NO: 74371 - DNA, 7 bp, Unknown
  misc_feature (1)..( 7): Matrix.004 file - promoters50/4910362
ttctttg

SEQ ID NO: 74372 - DNA, 9 bp, Unknown
  misc_feature (1)..( 9): Matrix.004 file - promoters50/4910362
aatttactt

SEQ ID NO: 74373 - DNA, 7 bp, Unknown
  misc_feature (1)..( 7): Matrix.004 file - promoters50/4910362
ttttgta

SEQ ID NO: 74374 - DNA, 10 bp, Unknown
  misc_feature (1)..( 10): Matrix.004 file - promoters50/4910362
gaaaaaagaa

SEQ ID NO: 74375 - DNA, 7 bp, Unknown
  misc_feature (1)..( 7): Matrix.004 file - promoters50/4910362
gttcttt

SEQ ID NO: 74376 - DNA, 12 bp, Unknown
  misc_feature (1)..( 12): Matrix.004 file - promoters50/4910362
ttgaccttattt

SEQ ID NO: 74377 - DNA, 10 bp, Unknown
  misc_feature (1)..( 10): Matrix.004 file - promoters50/4910366
tttcctaagt

SEQ ID NO: 74378 - DNA, 16 bp, Unknown
  misc_feature (1)..( 16): Matrix.004 file - promoters50/4910366
gtttttaaacaaataa

SEQ ID NO: 74379 - DNA, 11 bp, Unknown
  misc_feature (1)..( 11): Matrix.004 file - promoters50/4910417
gaaagaaagag

SEQ ID NO: 74380 - DNA, 8 bp, Unknown
  misc_feature (1)..( 8): Matrix.004 file - promoters50/4910426
ctacaaaa

SEQ ID NO: 74381 - DNA, 11 bp, Unknown
  misc_feature (1)..( 11): Matrix.004 file - promoters50/4910426
ctatatatata

SEQ ID NO: 74382 - DNA, 12 bp, Unknown
  misc_feature (1)..( 12): Matrix.004 file - promoters50/4910426
ttaattatcgac

SEQ ID NO: 74383 - DNA, 10 bp, Unknown
  misc_feature (1)..( 10): Matrix.004 file - promoters50/4910874
aaaatattga

SEQ ID NO: 74384 - DNA, 12 bp, Unknown
  misc_feature (1)..( 12): Matrix.004 file - promoters50/4910874
attgagttttca

SEQ ID NO: 74385 - DNA, 14 bp, Unknown
  misc_feature (1)..( 14): Matrix.004 file - promoters50/4910874
acaacaaaataaaa

SEQ ID NO: 74386 - DNA, 6 bp, Unknown
  misc_feature (1)..( 6): Matrix.004 file - promoters50/4910902
agtttt

SEQ ID NO: 74387 - DNA, 8 bp, Unknown
  misc_feature (1)..( 8): Matrix.004 file - promoters50/4910902
cttcatga

SEQ ID NO: 74388 - DNA, 9 bp, Unknown
  misc_feature (1)..( 9): Matrix.004 file - promoters50/4910902
ttatattta

SEQ ID NO: 74389 - DNA, 7 bp, Unknown
  misc_feature (1)..( 7): Matrix.004 file - promoters50/4910949
atattta

SEQ ID NO: 74390 - DNA, 8 bp, Unknown
  misc_feature (1)..( 8): Matrix.004 file - promoters50/4910949
tttcttgt

SEQ ID NO: 74391 - DNA, 7 bp, Unknown
  misc_feature (1)..( 7): Matrix.004 file - promoters50/4910949
tatgatt

SEQ ID NO: 74392 - DNA, 8 bp, Unknown
  misc_feature (1)..( 8): Matrix.004 file - promoters50/4910949
cttgtgtt

SEQ ID NO: 74393 - DNA, 15 bp, Unknown
  misc_feature (1)..( 15): Matrix.004 file - promoters50/4910949
tttttttgtttatca

SEQ ID NO: 74394 - DNA, 11 bp, Unknown
  misc_feature (1)..( 11): Matrix.004 file - promoters50/4910949
tagctttctgt

SEQ ID NO: 74395 - DNA, 10 bp, Unknown
  misc_feature (1)..( 10): Matrix.004 file - promoters50/4910949
aacacctttt

SEQ ID NO: 74396 - DNA, 9 bp, Unknown
  misc_feature (1)..( 9): Matrix.004 file - promoters50/4910949
ctacctttt

SEQ ID NO: 74397 - DNA, 9 bp, Unknown
  misc_feature (1)..( 9): Matrix.004 file - promoters50/4910949
tttttttgt

SEQ ID NO: 74398 - DNA, 11 bp, Unknown
  misc_feature (1)..( 11): Matrix.004 file - promoters50/4911303
tacttggtcgt

SEQ ID NO: 74399 - DNA, 8 bp, Unknown
  misc_feature (1)..( 8): Matrix.004 file - promoters50/4911303
tttaagaa

SEQ ID NO: 74400 - DNA, 7 bp, Unknown
  misc_feature (1)..( 7): Matrix.004 file - promoters50/4911303
taattta

SEQ ID NO: 74401 - DNA, 5 bp, Unknown
  misc_feature (1)..( 5): Matrix.004 file - promoters50/4911303
agaga

SEQ ID NO: 74402 - DNA, 9 bp, Unknown
  misc_feature (1)..( 9): Matrix.004 file - promoters50/4911303
tctatttaa

SEQ ID NO: 74403 - DNA, 8 bp, Unknown
  misc_feature (1)..( 8): Matrix.004 file - promoters50/4911303
gttctatt

SEQ ID NO: 74404 - DNA, 10 bp, Unknown
  misc_feature (1)..( 10): Matrix.004 file - promoters50/4911309
taacagagat

SEQ ID NO: 74405 - DNA, 10 bp, Unknown
  misc_feature (1)..( 10): Matrix.004 file - promoters50/4911309
ttcttttgaa

SEQ ID NO: 74406 - DNA, 8 bp, Unknown
  misc_feature (1)..( 8): Matrix.004 file - promoters50/4911309
tcttctta

SEQ ID NO: 74407 - DNA, 11 bp, Unknown
  misc_feature (1)..( 11): Matrix.004 file - promoters50/4911309
caaaatttctt

SEQ ID NO: 74408 - DNA, 6 bp, Unknown
  misc_feature (1)..( 6): Matrix.004 file - promoters50/4911309
ttttct

SEQ ID NO: 74409 - DNA, 8 bp, Unknown
  misc_feature (1)..( 8): Matrix.004 file - promoters50/4911309
atgcttat

SEQ ID NO: 74410 - DNA, 8 bp, Unknown
  misc_feature (1)..( 8): Matrix.004 file - promoters50/4911312
cttattat

SEQ ID NO: 74411 - DNA, 13 bp, Unknown
  misc_feature (1)..( 13): Matrix.004 file - promoters50/4911314
agatcacattaaa

SEQ ID NO: 74412 - DNA, 7 bp, Unknown
  misc_feature (1)..( 7): Matrix.004 file - promoters50/4911314
cagttgt

SEQ ID NO: 74413 - DNA, 9 bp, Unknown
  misc_feature (1)..( 9): Matrix.004 file - promoters50/4911314
ctgatgaaa

SEQ ID NO: 74414 - DNA, 9 bp, Unknown
  misc_feature (1)..( 9): Matrix.004 file - promoters50/4911314
ttgatttaa

SEQ ID NO: 74415 - DNA, 7 bp, Unknown
  misc_feature (1)..( 7): Matrix.004 file - promoters50/4911314
ttggaaa

SEQ ID NO: 74416 - DNA, 16 bp, Unknown
  misc_feature (1)..( 16): Matrix.004 file - promoters50/4911344
aaaaaaaaaacaaatt

SEQ ID NO: 74417 - DNA, 9 bp, Unknown
  misc_feature (1)..( 9): Matrix.004 file - promoters50/4911380
cagtttatg

SEQ ID NO: 74418 - DNA, 7 bp, Unknown
  misc_feature (1)..( 7): Matrix.004 file - promoters50/4911380
aaaaaat

SEQ ID NO: 74419 - DNA, 12 bp, Unknown
  misc_feature (1)..( 12): Matrix.004 file - promoters50/4911457
ttatatatcaaa

SEQ ID NO: 74420 - DNA, 13 bp, Unknown
  misc_feature (1)..( 13): Matrix.004 file - promoters50/4911457
cttgagtcgttta

SEQ ID NO: 74421 - DNA, 10 bp, Unknown
  misc_feature (1)..( 10): Matrix.004 file - promoters50/4911457
tgttggagat

SEQ ID NO: 74422 - DNA, 10 bp, Unknown
  misc_feature (1)..( 10): Matrix.004 file - promoters50/4911485
gaatttgaga

SEQ ID NO: 74423 - DNA, 8 bp, Unknown
  misc_feature (1)..( 8): Matrix.004 file - promoters50/4911485
atttttac

SEQ ID NO: 74424 - DNA, 9 bp, Unknown
  misc_feature (1)..( 9): Matrix.004 file - promoters50/4911485
gagtttgat

SEQ ID NO: 74425 - DNA, 10 bp, Unknown
  misc_feature (1)..( 10): Matrix.004 file - promoters50/4911485
ttatcaatag

SEQ ID NO: 74426 - DNA, 14 bp, Unknown
  misc_feature (1)..( 14): Matrix.004 file - promoters50/4911485
ggagtaaattttat

SEQ ID NO: 74427 - DNA, 10 bp, Unknown
  misc_feature (1)..( 10): Matrix.004 file - promoters50/4911485
ataaaaattt

SEQ ID NO: 74428 - DNA, 15 bp, Unknown
  misc_feature (1)..( 15): Matrix.004 file - promoters50/4911485
ttaatgtttgattgt

SEQ ID NO: 74429 - DNA, 12 bp, Unknown
  misc_feature (1)..( 12): Matrix.004 file - promoters50/4911485
atgtttgtgtcc

SEQ ID NO: 74430 - DNA, 10 bp, Unknown
  misc_feature (1)..( 10): Matrix.004 file - promoters50/4911492
atgtttataa

SEQ ID NO: 74431 - DNA, 11 bp, Unknown
  misc_feature (1)..( 11): Matrix.004 file - promoters50/4911492
tattttgtaat

SEQ ID NO: 74432 - DNA, 9 bp, Unknown
  misc_feature (1)..( 9): Matrix.004 file - promoters50/4911492
ctaaaatat

SEQ ID NO: 74433 - DNA, 11 bp, Unknown
  misc_feature (1)..( 11): Matrix.004 file - promoters50/4911492
gttttatttca

SEQ ID NO: 74434 - DNA, 12 bp, Unknown
  misc_feature (1)..( 12): Matrix.004 file - promoters50/4911492
tgtaataattta

SEQ ID NO: 74435 - DNA, 10 bp, Unknown
  misc_feature (1)..( 10): Matrix.004 file - promoters50/4911492
ttcaattgta

SEQ ID NO: 74436 - DNA, 7 bp, Unknown
  misc_feature (1)..( 7): Matrix.004 file - promoters50/4911582
aaaaata

SEQ ID NO: 74437 - DNA, 7 bp, Unknown
  misc_feature (1)..( 7): Matrix.004 file - promoters50/4911598
ttttctt

SEQ ID NO: 74438 - DNA, 8 bp, Unknown
  misc_feature (1)..( 8): Matrix.004 file - promoters50/4911598
taaaatgt

SEQ ID NO: 74439 - DNA, 9 bp, Unknown
  misc_feature (1)..( 9): Matrix.004 file - promoters50/4911598
aagtataat

SEQ ID NO: 74440 - DNA, 14 bp, Unknown
  misc_feature (1)..( 14): Matrix.004 file - promoters50/4911598
taaacacatattga

SEQ ID NO: 74441 - DNA, 11 bp, Unknown
  misc_feature (1)..( 11): Matrix.004 file - promoters50/4911598
tttatctctaa

SEQ ID NO: 74442 - DNA, 14 bp, Unknown
  misc_feature (1)..( 14): Matrix.004 file - promoters50/4911598
cttacaaaaatatt

SEQ ID NO: 74443 - DNA, 9 bp, Unknown
  misc_feature (1)..( 9): Matrix.004 file - promoters50/4911598
aatgtgtct

SEQ ID NO: 74444 - DNA, 7 bp, Unknown
  misc_feature (1)..( 7): Matrix.004 file - promoters50/4911598
aatttta

SEQ ID NO: 74445 - DNA, 11 bp, Unknown
  misc_feature (1)..( 11): Matrix.004 file - promoters50/4911598
tatattttgaa

SEQ ID NO: 74446 - DNA, 11 bp, Unknown
  misc_feature (1)..( 11): Matrix.004 file - promoters50/4911598
gaagaaaacta

SEQ ID NO: 74447 - DNA, 9 bp, Unknown
  misc_feature (1)..( 9): Matrix.004 file - promoters50/4911946
tatttttct

SEQ ID NO: 74448 - DNA, 8 bp, Unknown
  misc_feature (1)..( 8): Matrix.004 file - promoters50/4911946
tgaaaaaa

SEQ ID NO: 74449 - DNA, 7 bp, Unknown
  misc_feature (1)..( 7): Matrix.004 file - promoters50/4911946
aattgtt

SEQ ID NO: 74450 - DNA, 9 bp, Unknown
  misc_feature (1)..( 9): Matrix.004 file - promoters50/4911950
ttgaattca

SEQ ID NO: 74451 - DNA, 10 bp, Unknown
  misc_feature (1)..( 10): Matrix.004 file - promoters50/4911994
caaaatcgta

SEQ ID NO: 74452 - DNA, 9 bp, Unknown
  misc_feature (1)..( 9): Matrix.004 file - promoters50/4912060
ttctttttt

SEQ ID NO: 74453 - DNA, 8 bp, Unknown
  misc_feature (1)..( 8): Matrix.004 file - promoters50/4912060
taattttt

SEQ ID NO: 74454 - DNA, 7 bp, Unknown
  misc_feature (1)..( 7): Matrix.004 file - promoters50/4912130
tttgttt

SEQ ID NO: 74455 - DNA, 9 bp, Unknown
  misc_feature (1)..( 9): Matrix.004 file - promoters50/4912130
tatatttta

SEQ ID NO: 74456 - DNA, 10 bp, Unknown
  misc_feature (1)..( 10): Matrix.004 file - promoters50/4912130
agtgtataaa

SEQ ID NO: 74457 - DNA, 9 bp, Unknown
  misc_feature (1)..( 9): Matrix.004 file - promoters50/4912137
ttaccaaat

SEQ ID NO: 74458 - DNA, 17 bp, Unknown
  misc_feature (1)..( 17): Matrix.004 file - promoters50/4912137
tgatcaaaattaataaa

SEQ ID NO: 74459 - DNA, 9 bp, Unknown
  misc_feature (1)..( 9): Matrix.004 file - promoters50/4912137
attatataa

SEQ ID NO: 74460 - DNA, 7 bp, Unknown
  misc_feature (1)..( 7): Matrix.004 file - promoters50/4912176
aaaataa

SEQ ID NO: 74461 - DNA, 9 bp, Unknown
  misc_feature (1)..( 9): Matrix.004 file - promoters50/4912240
tatatttga

SEQ ID NO: 74462 - DNA, 9 bp, Unknown
  misc_feature (1)..( 9): Matrix.004 file - promoters50/4912240
gtggattta

SEQ ID NO: 74463 - DNA, 8 bp, Unknown
  misc_feature (1)..( 8): Matrix.004 file - promoters50/4912240
caaaacac

SEQ ID NO: 74464 - DNA, 16 bp, Unknown
  misc_feature (1)..( 16): Matrix.004 file - promoters50/4912541
taagtgattcaaaatt

SEQ ID NO: 74465 - DNA, 8 bp, Unknown
  misc_feature (1)..( 8): Matrix.004 file - promoters50/4912541
gtttaaaa

SEQ ID NO: 74466 - DNA, 9 bp, Unknown
  misc_feature (1)..( 9): Matrix.004 file - promoters50/4912541
agattctaa

SEQ ID NO: 74467 - DNA, 10 bp, Unknown
  misc_feature (1)..( 10): Matrix.004 file - promoters50/4913011
tagggagaga

SEQ ID NO: 74468 - DNA, 8 bp, Unknown
  misc_feature (1)..( 8): Matrix.004 file - promoters50/4913068
ctaattaa

SEQ ID NO: 74469 - DNA, 11 bp, Unknown
  misc_feature (1)..( 11): Matrix.004 file - promoters50/4913068
atgaaaaattt

SEQ ID NO: 74470 - DNA, 11 bp, Unknown
  misc_feature (1)..( 11): Matrix.004 file - promoters50/4913068
gattattttgg

SEQ ID NO: 74471 - DNA, 10 bp, Unknown
  misc_feature (1)..( 10): Matrix.004 file - promoters50/4913068
acaaattaaa

SEQ ID NO: 74472 - DNA, 18 bp, Unknown
  misc_feature (1)..( 18): Matrix.004 file - promoters50/4913068
aaaaaaatagtaaattaa

SEQ ID NO: 74473 - DNA, 15 bp, Unknown
  misc_feature (1)..( 15): Matrix.004 file - promoters50/4913724
ttgtataaaaaaagt

SEQ ID NO: 74474 - DNA, 13 bp, Unknown
  misc_feature (1)..( 13): Matrix.004 file - promoters50/4914111
aacattttggttt

SEQ ID NO: 74475 - DNA, 7 bp, Unknown
  misc_feature (1)..( 7): Matrix.004 file - promoters50/4914111
tgtatat

SEQ ID NO: 74476 - DNA, 9 bp, Unknown
  misc_feature (1)..( 9): Matrix.004 file - promoters50/4914111
ctgtgtctc

SEQ ID NO: 74477 - DNA, 7 bp, Unknown
  misc_feature (1)..( 7): Matrix.004 file - promoters50/4914111
aatttct

SEQ ID NO: 74478 - DNA, 8 bp, Unknown
  misc_feature (1)..( 8): Matrix.004 file - promoters50/4914111
ctgtttat

SEQ ID NO: 74479 - DNA, 7 bp, Unknown
  misc_feature (1)..( 7): Matrix.004 file - promoters50/4914111
tttattg

SEQ ID NO: 74480 - DNA, 7 bp, Unknown
  misc_feature (1)..( 7): Matrix.004 file - promoters50/4914111
gatgcag

SEQ ID NO: 74481 - DNA, 9 bp, Unknown
  misc_feature (1)..( 9): Matrix.004 file - promoters50/4914111
taatggttt

SEQ ID NO: 74482 - DNA, 8 bp, Unknown
  misc_feature (1)..( 8): Matrix.004 file - promoters50/4914111
ttcttgtt

SEQ ID NO: 74483 - DNA, 13 bp, Unknown
  misc_feature (1)..( 13): Matrix.004 file - promoters50/4914228
ttcgatgatgctg

SEQ ID NO: 74484 - DNA, 8 bp, Unknown
  misc_feature (1)..( 8): Matrix.004 file - promoters50/4914228
aagaagaa

SEQ ID NO: 74485 - DNA, 7 bp, Unknown
  misc_feature (1)..( 7): Matrix.004 file - promoters50/4914228
gatggat

SEQ ID NO: 74486 - DNA, 7 bp, Unknown
  misc_feature (1)..( 7): Matrix.004 file - promoters50/4914228
aagaaag

SEQ ID NO: 74487 - DNA, 8 bp, Unknown
  misc_feature (1)..( 8): Matrix.004 file - promoters50/4914438
ttaaaatg

SEQ ID NO: 74488 - DNA, 10 bp, Unknown
  misc_feature (1)..( 10): Matrix.004 file - promoters50/4915127
aaattgattc

SEQ ID NO: 74489 - DNA, 9 bp, Unknown
  misc_feature (1)..( 9): Matrix.004 file - promoters50/4915163
actataaat

SEQ ID NO: 74490 - DNA, 13 bp, Unknown
  misc_feature (1)..( 13): Matrix.004 file - promoters50/4915163
taaattctaaaat

SEQ ID NO: 74491 - DNA, 13 bp, Unknown
  misc_feature (1)..( 13): Matrix.004 file - promoters50/4915163
ctataaaaaccaa

SEQ ID NO: 74492 - DNA, 12 bp, Unknown
  misc_feature (1)..( 12): Matrix.004 file - promoters50/4915163
tttataagtaaa

SEQ ID NO: 74493 - DNA, 14 bp, Unknown
  misc_feature (1)..( 14): Matrix.004 file - promoters50/4915199
aaatttataaataa

SEQ ID NO: 74494 - DNA, 6 bp, Unknown
  misc_feature (1)..( 6): Matrix.004 file - promoters50/4915199
tttctt

SEQ ID NO: 74495 - DNA, 13 bp, Unknown
  misc_feature (1)..( 13): Matrix.004 file - promoters50/4915199
attgtttctctga

SEQ ID NO: 74496 - DNA, 10 bp, Unknown
  misc_feature (1)..( 10): Matrix.004 file - promoters50/4915199
tcactgtttt

SEQ ID NO: 74497 - DNA, 8 bp, Unknown
  misc_feature (1)..( 8): Matrix.004 file - promoters50/4915199
gtttagat

SEQ ID NO: 74498 - DNA, 8 bp, Unknown
  misc_feature (1)..( 8): Matrix.004 file - promoters50/4915199
tgttttgg

SEQ ID NO: 74499 - DNA, 8 bp, Unknown
  misc_feature (1)..( 8): Matrix.004 file - promoters50/4915199
ttttgctt

SEQ ID NO: 74500 - DNA, 7 bp, Unknown
  misc_feature (1)..( 7): Matrix.004 file - promoters50/4915199
tttgttt

SEQ ID NO: 74501 - DNA, 8 bp, Unknown
  misc_feature (1)..( 8): Matrix.004 file - promoters50/4915199
tgtttttg

SEQ ID NO: 74502 - DNA, 9 bp, Unknown
  misc_feature (1)..( 9): Matrix.004 file - promoters50/4915199
tgtttttgg

SEQ ID NO: 74503 - DNA, 9 bp, Unknown
  misc_feature (1)..( 9): Matrix.004 file - promoters50/4915199
aatttggtt

SEQ ID NO: 74504 - DNA, 11 bp, Unknown
  misc_feature (1)..( 11): Matrix.004 file - promoters50/4915199
atagaaaaata

SEQ ID NO: 74505 - DNA, 8 bp, Unknown
  misc_feature (1)..( 8): Matrix.004 file - promoters50/4915244
tgttgttg

SEQ ID NO: 74506 - DNA, 9 bp, Unknown
  misc_feature (1)..( 9): Matrix.004 file - promoters50/4915244
aataaatat

SEQ ID NO: 74507 - DNA, 7 bp, Unknown
  misc_feature (1)..( 7): Matrix.004 file - promoters50/4915244
cttgagt

SEQ ID NO: 74508 - DNA, 8 bp, Unknown
  misc_feature (1)..( 8): Matrix.004 file - promoters50/4915244
accaagta

SEQ ID NO: 74509 - DNA, 11 bp, Unknown
  misc_feature (1)..( 11): Matrix.004 file - promoters50/4915347
atttcaatttt

SEQ ID NO: 74510 - DNA, 9 bp, Unknown
  misc_feature (1)..( 9): Matrix.004 file - promoters50/4915355
attttttta

SEQ ID NO: 74511 - DNA, 12 bp, Unknown
  misc_feature (1)..( 12): Matrix.004 file - promoters50/4915355
aacaaaatctaa

SEQ ID NO: 74512 - DNA, 13 bp, Unknown
  misc_feature (1)..( 13): Matrix.004 file - promoters50/4915355
tattaaaataatt

SEQ ID NO: 74513 - DNA, 9 bp, Unknown
  misc_feature (1)..( 9): Matrix.004 file - promoters50/4915355
attcaaacg

SEQ ID NO: 74514 - DNA, 12 bp, Unknown
  misc_feature (1)..( 12): Matrix.004 file - promoters50/4915384
aaaatatcaatt

SEQ ID NO: 74515 - DNA, 8 bp, Unknown
  misc_feature (1)..( 8): Matrix.004 file - promoters50/4915384
ttttaatt

SEQ ID NO: 74516 - DNA, 10 bp, Unknown
  misc_feature (1)..( 10): Matrix.004 file - promoters50/4915384
gttttatttt

SEQ ID NO: 74517 - DNA, 8 bp, Unknown
  misc_feature (1)..( 8): Matrix.004 file - promoters50/4915384
ttaagaga

SEQ ID NO: 74518 - DNA, 8 bp, Unknown
  misc_feature (1)..( 8): Matrix.004 file - promoters50/4915384
gaaaagta

SEQ ID NO: 74519 - DNA, 7 bp, Unknown
  misc_feature (1)..( 7): Matrix.004 file - promoters50/4915384
taagaga

SEQ ID NO: 74520 - DNA, 9 bp, Unknown
  misc_feature (1)..( 9): Matrix.004 file - promoters50/4915384
tcaaattga

SEQ ID NO: 74521 - DNA, 13 bp, Unknown
  misc_feature (1)..( 13): Matrix.004 file - promoters50/4915384
ttttaaattatta

SEQ ID NO: 74522 - DNA, 8 bp, Unknown
  misc_feature (1)..( 8): Matrix.004 file - promoters50/4915384
aaatttgt

SEQ ID NO: 74523 - DNA, 11 bp, Unknown
  misc_feature (1)..( 11): Matrix.004 file - promoters50/4915395
tgtttaaataa

SEQ ID NO: 74524 - DNA, 9 bp, Unknown
  misc_feature (1)..( 9): Matrix.004 file - promoters50/4915395
tttataaaa

SEQ ID NO: 74525 - DNA, 7 bp, Unknown
  misc_feature (1)..( 7): Matrix.004 file - promoters50/4915395
caaatga

SEQ ID NO: 74526 - DNA, 8 bp, Unknown
  misc_feature (1)..( 8): Matrix.004 file - promoters50/4915420
aaaataaa

SEQ ID NO: 74527 - DNA, 5 bp, Unknown
  misc_feature (1)..( 5): Matrix.004 file - promoters50/4915420
attga

SEQ ID NO: 74528 - DNA, 8 bp, Unknown
  misc_feature (1)..( 8): Matrix.004 file - promoters50/4915420
atattagt

SEQ ID NO: 74529 - DNA, 7 bp, Unknown
  misc_feature (1)..( 7): Matrix.004 file - promoters50/4915511
ttattag

SEQ ID NO: 74530 - DNA, 7 bp, Unknown
  misc_feature (1)..( 7): Matrix.004 file - promoters50/4915511
taaaaca

SEQ ID NO: 74531 - DNA, 8 bp, Unknown
  misc_feature (1)..( 8): Matrix.004 file - promoters50/4915511
ctctgaaa

SEQ ID NO: 74532 - DNA, 8 bp, Unknown
  misc_feature (1)..( 8): Matrix.004 file - promoters50/4915511
cagttata

SEQ ID NO: 74533 - DNA, 6 bp, Unknown
  misc_feature (1)..( 6): Matrix.004 file - promoters50/4915606
aaaacc

SEQ ID NO: 74534 - DNA, 7 bp, Unknown
  misc_feature (1)..( 7): Matrix.004 file - promoters50/4915606
tattaat

SEQ ID NO: 74535 - DNA, 11 bp, Unknown
  misc_feature (1)..( 11): Matrix.004 file - promoters50/4915606
aaaaacaaaga

SEQ ID NO: 74536 - DNA, 14 bp, Unknown
  misc_feature (1)..( 14): Matrix.004 file - promoters50/4915606
aaaacatattaaat

SEQ ID NO: 74537 - DNA, 9 bp, Unknown
  misc_feature (1)..( 9): Matrix.004 file - promoters50/4915606
aaaaaaaaa

SEQ ID NO: 74538 - DNA, 10 bp, Unknown
  misc_feature (1)..( 10): Matrix.004 file - promoters50/4915606
tccatatata

SEQ ID NO: 74539 - DNA, 9 bp, Unknown
  misc_feature (1)..( 9): Matrix.004 file - promoters50/4915606
aaaaagtta

SEQ ID NO: 74540 - DNA, 10 bp, Unknown
  misc_feature (1)..( 10): Matrix.004 file - promoters50/4915606
aaagatttac

SEQ ID NO: 74541 - DNA, 8 bp, Unknown
  misc_feature (1)..( 8): Matrix.004 file - promoters50/4915606
aaaattta

SEQ ID NO: 74542 - DNA, 6 bp, Unknown
  misc_feature (1)..( 6): Matrix.004 file - promoters50/4915606
taaaat

SEQ ID NO: 74543 - DNA, 11 bp, Unknown
  misc_feature (1)..( 11): Matrix.004 file - promoters50/4915668
tatttattttt

SEQ ID NO: 74544 - DNA, 7 bp, Unknown
  misc_feature (1)..( 7): Matrix.004 file - promoters50/4915668
taccaat

SEQ ID NO: 74545 - DNA, 10 bp, Unknown
  misc_feature (1)..( 10): Matrix.004 file - promoters50/4915694
gaatgtgtta

SEQ ID NO: 74546 - DNA, 11 bp, Unknown
  misc_feature (1)..( 11): Matrix.004 file - promoters50/4915694
gattcaaaatc

SEQ ID NO: 74547 - DNA, 9 bp, Unknown
  misc_feature (1)..( 9): Matrix.004 file - promoters50/4915694
tttttcaaa

SEQ ID NO: 74548 - DNA, 9 bp, Unknown
  misc_feature (1)..( 9): Matrix.004 file - promoters50/4915694
ctacaaaaa

SEQ ID NO: 74549 - DNA, 14 bp, Unknown
  misc_feature (1)..( 14): Matrix.004 file - promoters50/4915694
ctaatattttatgt

SEQ ID NO: 74550 - DNA, 13 bp, Unknown
  misc_feature (1)..( 13): Matrix.004 file - promoters50/4915694
ttaatcaatatat

SEQ ID NO: 74551 - DNA, 9 bp, Unknown
  misc_feature (1)..( 9): Matrix.004 file - promoters50/4915694
ctaatttta

SEQ ID NO: 74552 - DNA, 9 bp, Unknown
  misc_feature (1)..( 9): Matrix.004 file - promoters50/4915694
caaattttg

SEQ ID NO: 74553 - DNA, 12 bp, Unknown
  misc_feature (1)..( 12): Matrix.004 file - promoters50/4915701
attttgaataaa

SEQ ID NO: 74554 - DNA, 10 bp, Unknown
  misc_feature (1)..( 10): Matrix.004 file - promoters50/4915701
tgtaatcggg

SEQ ID NO: 74555 - DNA, 9 bp, Unknown
  misc_feature (1)..( 9): Matrix.004 file - promoters50/4915709
tcggtgttg

SEQ ID NO: 74556 - DNA, 8 bp, Unknown
  misc_feature (1)..( 8): Matrix.004 file - promoters50/4915724
attgcttt

SEQ ID NO: 74557 - DNA, 13 bp, Unknown
  misc_feature (1)..( 13): Matrix.004 file - promoters50/4915724
aataaagaagaat

SEQ ID NO: 74558 - DNA, 9 bp, Unknown
  misc_feature (1)..( 9): Matrix.004 file - promoters50/4915724
ataaaaaaa

SEQ ID NO: 74559 - DNA, 14 bp, Unknown
  misc_feature (1)..( 14): Matrix.004 file - promoters50/4915745
actaaaatacaacc

SEQ ID NO: 74560 - DNA, 9 bp, Unknown
  misc_feature (1)..( 9): Matrix.004 file - promoters50/4915745
atatttttt

SEQ ID NO: 74561 - DNA, 8 bp, Unknown
  misc_feature (1)..( 8): Matrix.004 file - promoters50/4915745
aattgatt

SEQ ID NO: 74562 - DNA, 8 bp, Unknown
  misc_feature (1)..( 8): Matrix.004 file - promoters50/4915774
ttttacta

SEQ ID NO: 74563 - DNA, 7 bp, Unknown
  misc_feature (1)..( 7): Matrix.004 file - promoters50/4915774
ctatatt

SEQ ID NO: 74564 - DNA, 8 bp, Unknown
  misc_feature (1)..( 8): Matrix.004 file - promoters50/4915774
taataaag

SEQ ID NO: 74565 - DNA, 9 bp, Unknown
  misc_feature (1)..( 9): Matrix.004 file - promoters50/4915774
ccttggagt

SEQ ID NO: 74566 - DNA, 8 bp, Unknown
  misc_feature (1)..( 8): Matrix.004 file - promoters50/4915804
ctctttca

SEQ ID NO: 74567 - DNA, 11 bp, Unknown
  misc_feature (1)..( 11): Matrix.004 file - promoters50/4915804
attgactattg

SEQ ID NO: 74568 - DNA, 7 bp, Unknown
  misc_feature (1)..( 7): Matrix.004 file - promoters50/4915804
ttataaa

SEQ ID NO: 74569 - DNA, 8 bp, Unknown
  misc_feature (1)..( 8): Matrix.004 file - promoters50/4915816
atatcttt

SEQ ID NO: 74570 - DNA, 11 bp, Unknown
  misc_feature (1)..( 11): Matrix.004 file - promoters50/4915819
caaatttcttt

SEQ ID NO: 74571 - DNA, 9 bp, Unknown
  misc_feature (1)..( 9): Matrix.004 file - promoters50/4921122
aaattcaag

SEQ ID NO: 74572 - DNA, 15 bp, Unknown
  misc_feature (1)..( 15): Matrix.004 file - promoters50/4921373
gtgttacaatttctt

SEQ ID NO: 74573 - DNA, 7 bp, Unknown
  misc_feature (1)..( 7): Matrix.004 file - promoters50/4921373
aattata

SEQ ID NO: 74574 - DNA, 10 bp, Unknown
  misc_feature (1)..( 10): Matrix.004 file - promoters50/4921373
aaagattaga

SEQ ID NO: 74575 - DNA, 10 bp, Unknown
  misc_feature (1)..( 10): Matrix.004 file - promoters50/4921433
gagttaattg

SEQ ID NO: 74576 - DNA, 7 bp, Unknown
  misc_feature (1)..( 7): Matrix.004 file - promoters50/4921433
tttgatt

SEQ ID NO: 74577 - DNA, 9 bp, Unknown
  misc_feature (1)..( 9): Matrix.004 file - promoters50/4921447
gaaaaattt

SEQ ID NO: 74578 - DNA, 13 bp, Unknown
  misc_feature (1)..( 13): Matrix.004 file - promoters50/4921447
tagttttaacagg

SEQ ID NO: 74579 - DNA, 11 bp, Unknown
  misc_feature (1)..( 11): Matrix.004 file - promoters50/4921447
ttgatgaaaga

SEQ ID NO: 74580 - DNA, 14 bp, Unknown
  misc_feature (1)..( 14): Matrix.004 file - promoters50/4921447
tattgatgaaaatg

SEQ ID NO: 74581 - DNA, 9 bp, Unknown
  misc_feature (1)..( 9): Matrix.004 file - promoters50/4922491
atattaaag

SEQ ID NO: 74582 - DNA, 10 bp, Unknown
  misc_feature (1)..( 10): Matrix.004 file - promoters50/4934904
aaaatcttct

SEQ ID NO: 74583 - DNA, 12 bp, Unknown
  misc_feature (1)..( 12): Matrix.004 file - promoters50/4934904
tctgggaaatcg

SEQ ID NO: 74584 - DNA, 6 bp, Unknown
  misc_feature (1)..( 6): Matrix.004 file - promoters50/4934904
tttcaa

SEQ ID NO: 74585 - DNA, 8 bp, Unknown
  misc_feature (1)..( 8): Matrix.004 file - promoters50/4934904
acatctca

SEQ ID NO: 74586 - DNA, 7 bp, Unknown
  misc_feature (1)..( 7): Matrix.004 file - promoters50/4934904
ttctctc

SEQ ID NO: 74587 - DNA, 8 bp, Unknown
  misc_feature (1)..( 8): Matrix.004 file - promoters50/4938731
gagctctc

SEQ ID NO: 74588 - DNA, 14 bp, Unknown
  misc_feature (1)..( 14): Matrix.004 file - promoters50/4938731
tttataaacaaaaa

SEQ ID NO: 74589 - DNA, 10 bp, Unknown
  misc_feature (1)..( 10): Matrix.004 file - promoters50/4938731
taaattaaca

SEQ ID NO: 74590 - DNA, 10 bp, Unknown
  misc_feature (1)..( 10): Matrix.004 file - promoters50/4943425
acttatttca

SEQ ID NO: 74591 - DNA, 11 bp, Unknown
  misc_feature (1)..( 11): Matrix.004 file - promoters50/4943425
agtttattctt

SEQ ID NO: 74592 - DNA, 14 bp, Unknown
  misc_feature (1)..( 14): Matrix.004 file - promoters50/4943425
tgatgtttttattt

SEQ ID NO: 74593 - DNA, 16 bp, Unknown
  misc_feature (1)..( 16): Matrix.004 file - promoters50/4943637
attgtataaagatcct

SEQ ID NO: 74594 - DNA, 14 bp, Unknown
  misc_feature (1)..( 14): Matrix.004 file - promoters50/4943637
tattagtttgttct

SEQ ID NO: 74595 - DNA, 8 bp, Unknown
  misc_feature (1)..( 8): Matrix.004 file - promoters50/4974495
taagaaaa

SEQ ID NO: 74596 - DNA, 11 bp, Unknown
  misc_feature (1)..( 11): Matrix.004 file - promoters50/4978201
ttaggatgcag

SEQ ID NO: 74597 - DNA, 12 bp, Unknown
  misc_feature (1)..( 12): Matrix.004 file - promoters50/4978201
aatgcttgatca

SEQ ID NO: 74598 - DNA, 16 bp, Unknown
  misc_feature (1)..( 16): Matrix.004 file - promoters50/4992383
aattcaaaaaaaaaaa

SEQ ID NO: 74599 - DNA, 6 bp, Unknown
  misc_feature (1)..( 6): Matrix.004 file - promoters50/4992383
tttata

SEQ ID NO: 74600 - DNA, 9 bp, Unknown
  misc_feature (1)..( 9): Matrix.004 file - promoters50/4992383
tttgatttg

SEQ ID NO: 74601 - DNA, 11 bp, Unknown
  misc_feature (1)..( 11): Matrix.004 file - promoters50/4992383
tattttgattt

SEQ ID NO: 74602 - DNA, 7 bp, Unknown
  misc_feature (1)..( 7): Matrix.004 file - promoters50/4992383
ttttcta

SEQ ID NO: 74603 - DNA, 14 bp, Unknown
  misc_feature (1)..( 14): Matrix.004 file - promoters50/4992383
aacttttaagtaga

SEQ ID NO: 74604 - DNA, 12 bp, Unknown
  misc_feature (1)..( 12): Matrix.004 file - promoters50/4992383
ttttaactaaca

SEQ ID NO: 74605 - DNA, 12 bp, Unknown
  misc_feature (1)..( 12): Matrix.004 file - promoters50/4992383
tatatttagttt

SEQ ID NO: 74606 - DNA, 9 bp, Unknown
  misc_feature (1)..( 9): Matrix.004 file - promoters50/4992383
aatttattt

SEQ ID NO: 74607 - DNA, 7 bp, Unknown
  misc_feature (1)..( 7): Matrix.004 file - promoters50/4992383
aatgttt

SEQ ID NO: 74608 - DNA, 9 bp, Unknown
  misc_feature (1)..( 9): Matrix.004 file - promoters50/4992452
atttatttt

SEQ ID NO: 74609 - DNA, 11 bp, Unknown
  misc_feature (1)..( 11): Matrix.004 file - promoters50/4992452
tattataccaa

SEQ ID NO: 74610 - DNA, 10 bp, Unknown
  misc_feature (1)..( 10): Matrix.004 file - promoters50/4992452
gattacaaat

SEQ ID NO: 74611 - DNA, 13 bp, Unknown
  misc_feature (1)..( 13): Matrix.004 file - promoters50/4992452
aaatctgtaattt

SEQ ID NO: 74612 - DNA, 9 bp, Unknown
  misc_feature (1)..( 9): Matrix.004 file - promoters50/4992452
taatattaa

SEQ ID NO: 74613 - DNA, 8 bp, Unknown
  misc_feature (1)..( 8): Matrix.004 file - promoters50/4992452
tattttta

SEQ ID NO: 74614 - DNA, 7 bp, Unknown
  misc_feature (1)..( 7): Matrix.004 file - promoters50/5003710
atttcat

SEQ ID NO: 74615 - DNA, 19 bp, Unknown
  misc_feature (1)..( 19): Matrix.004 file - promoters50/5003710
tatacgaaatataaattta

SEQ ID NO: 74616 - DNA, 11 bp, Unknown
  misc_feature (1)..( 11): Matrix.004 file - promoters50/5003710
taaaatataaa

SEQ ID NO: 74617 - DNA, 12 bp, Unknown
  misc_feature (1)..( 12): Matrix.004 file - promoters50/5003710
gatacaaaataa

SEQ ID NO: 74618 - DNA, 13 bp, Unknown
  misc_feature (1)..( 13): Matrix.004 file - promoters50/5003830
taattttatttca

SEQ ID NO: 74619 - DNA, 9 bp, Unknown
  misc_feature (1)..( 9): Matrix.004 file - promoters50/5003830
aaaagaata

SEQ ID NO: 74620 - DNA, 8 bp, Unknown
  misc_feature (1)..( 8): Matrix.004 file - promoters50/5003830
caattata

SEQ ID NO: 74621 - DNA, 11 bp, Unknown
  misc_feature (1)..( 11): Matrix.004 file - promoters50/5003830
tttcacttttt

SEQ ID NO: 74622 - DNA, 8 bp, Unknown
  misc_feature (1)..( 8): Matrix.004 file - promoters50/5662739
gagaattt

SEQ ID NO: 74623 - DNA, 9 bp, Unknown
  misc_feature (1)..( 9): Matrix.004 file - promoters50/5662739
aaaaaaaaa

SEQ ID NO: 74624 - DNA, 9 bp, Unknown
  misc_feature (1)..( 9): Matrix.004 file - promoters50/5662739
taaaaattt

SEQ ID NO: 74625 - DNA, 8 bp, Unknown
  misc_feature (1)..( 8): Matrix.004 file - promoters50/5662739
ttacaaaa

SEQ ID NO: 74626 - DNA, 10 bp, Unknown
  misc_feature (1)..( 10): Matrix.004 file - promoters50/5662739
attttataaa

SEQ ID NO: 74627 - DNA, 7 bp, Unknown
  misc_feature (1)..( 7): Matrix.004 file - promoters50/5662743
taaaaag

SEQ ID NO: 74628 - DNA, 10 bp, Unknown
  misc_feature (1)..( 10): Matrix.004 file - promoters50/5662743
attaagttag

SEQ ID NO: 74629 - DNA, 8 bp, Unknown
  misc_feature (1)..( 8): Matrix.004 file - promoters50/5662743
atttgata

SEQ ID NO: 74630 - DNA, 10 bp, Unknown
  misc_feature (1)..( 10): Matrix.004 file - promoters50/5662743
tattctttta

SEQ ID NO: 74631 - DNA, 13 bp, Unknown
  misc_feature (1)..( 13): Matrix.004 file - promoters50/5662743
aatttgaattttt

SEQ ID NO: 74632 - DNA, 14 bp, Unknown
  misc_feature (1)..( 14): Matrix.004 file - promoters50/5662743
tttatttgataaaa

SEQ ID NO: 74633 - DNA, 10 bp, Unknown
  misc_feature (1)..( 10): Matrix.004 file - promoters50/5662749
acaagattta

SEQ ID NO: 74634 - DNA, 10 bp, Unknown
  misc_feature (1)..( 10): Matrix.004 file - promoters50/5662749
taaaataatc

SEQ ID NO: 74635 - DNA, 11 bp, Unknown
  misc_feature (1)..( 11): Matrix.004 file - promoters50/5662763
ttgcaaaaatc

SEQ ID NO: 74636 - DNA, 8 bp, Unknown
  misc_feature (1)..( 8): Matrix.004 file - promoters50/5662763
ttttaata

SEQ ID NO: 74637 - DNA, 9 bp, Unknown
  misc_feature (1)..( 9): Matrix.004 file - promoters50/5662763
tttgttttt

SEQ ID NO: 74638 - DNA, 9 bp, Unknown
  misc_feature (1)..( 9): Matrix.004 file - promoters50/5662763
atgattttg

SEQ ID NO: 74639 - DNA, 7 bp, Unknown
  misc_feature (1)..( 7): Matrix.004 file - promoters50/5662763
aatatgt

SEQ ID NO: 74640 - DNA, 8 bp, Unknown
  misc_feature (1)..( 8): Matrix.004 file - promoters50/5662763
ataattta

SEQ ID NO: 74641 - DNA, 10 bp, Unknown
  misc_feature (1)..( 10): Matrix.004 file - promoters50/5662763
atttttctgt

SEQ ID NO: 74642 - DNA, 8 bp, Unknown
  misc_feature (1)..( 8): Matrix.004 file - promoters50/5662763
taacaaaa

SEQ ID NO: 74643 - DNA, 8 bp, Unknown
  misc_feature (1)..( 8): Matrix.004 file - promoters50/5662763
taatataa

SEQ ID NO: 74644 - DNA, 10 bp, Unknown
  misc_feature (1)..( 10): Matrix.004 file - promoters50/5662765
ttttgaattg

SEQ ID NO: 74645 - DNA, 9 bp, Unknown
  misc_feature (1)..( 9): Matrix.004 file - promoters50/5662765
attgttttc

SEQ ID NO: 74646 - DNA, 12 bp, Unknown
  misc_feature (1)..( 12): Matrix.004 file - promoters50/5662765
attttgataatt

SEQ ID NO: 74647 - DNA, 11 bp, Unknown
  misc_feature (1)..( 11): Matrix.004 file - promoters50/5662765
aatatgatcga

SEQ ID NO: 74648 - DNA, 10 bp, Unknown
  misc_feature (1)..( 10): Matrix.004 file - promoters50/5662765
atattttcat

SEQ ID NO: 74649 - DNA, 13 bp, Unknown
  misc_feature (1)..( 13): Matrix.004 file - promoters50/5662765
ttttttaactttt

SEQ ID NO: 74650 - DNA, 14 bp, Unknown
  misc_feature (1)..( 14): Matrix.004 file - promoters50/5662765
tatcaatagaaaca

SEQ ID NO: 74651 - DNA, 10 bp, Unknown
  misc_feature (1)..( 10): Matrix.004 file - promoters50/5662765
taaggcccaa

SEQ ID NO: 74652 - DNA, 9 bp, Unknown
  misc_feature (1)..( 9): Matrix.004 file - promoters50/5662769
tatctaatt

SEQ ID NO: 74653 - DNA, 7 bp, Unknown
  misc_feature (1)..( 7): Matrix.004 file - promoters50/5662769
taataaa

SEQ ID NO: 74654 - DNA, 9 bp, Unknown
  misc_feature (1)..( 9): Matrix.004 file - promoters50/5662779
ttgttttgc

SEQ ID NO: 74655 - DNA, 13 bp, Unknown
  misc_feature (1)..( 13): Matrix.004 file - promoters50/5662779
aaaaaataaatga

SEQ ID NO: 74656 - DNA, 14 bp, Unknown
  misc_feature (1)..( 14): Matrix.004 file - promoters50/5662779
ttgcaaaagaggca

SEQ ID NO: 74657 - DNA, 13 bp, Unknown
  misc_feature (1)..( 13): Matrix.004 file - promoters50/5662779
aaaaaattgatgt

SEQ ID NO: 74658 - DNA, 11 bp, Unknown
  misc_feature (1)..( 11): Matrix.004 file - promoters50/5662779
agttaaataaa

SEQ ID NO: 74659 - DNA, 15 bp, Unknown
  misc_feature (1)..( 15): Matrix.004 file - promoters50/5662779
aaaaaattaatgtaa

SEQ ID NO: 74660 - DNA, 8 bp, Unknown
  misc_feature (1)..( 8): Matrix.004 file - promoters50/5662783
agtgaaca

SEQ ID NO: 74661 - DNA, 10 bp, Unknown
  misc_feature (1)..( 10): Matrix.004 file - promoters50/5662783
aatgaattaa

SEQ ID NO: 74662 - DNA, 10 bp, Unknown
  misc_feature (1)..( 10): Matrix.004 file - promoters50/5662783
ataaaattca

SEQ ID NO: 74663 - DNA, 13 bp, Unknown
  misc_feature (1)..( 13): Matrix.004 file - promoters50/5662785
tatcaaatagttg

SEQ ID NO: 74664 - DNA, 10 bp, Unknown
  misc_feature (1)..( 10): Matrix.004 file - promoters50/5662785
attgtttaat

SEQ ID NO: 74665 - DNA, 8 bp, Unknown
  misc_feature (1)..( 8): Matrix.004 file - promoters50/5662805
atttctta

SEQ ID NO: 74666 - DNA, 7 bp, Unknown
  misc_feature (1)..( 7): Matrix.004 file - promoters50/5662805
tttggtt

SEQ ID NO: 74667 - DNA, 9 bp, Unknown
  misc_feature (1)..( 9): Matrix.004 file - promoters50/5662805
tttttatat

SEQ ID NO: 74668 - DNA, 7 bp, Unknown
  misc_feature (1)..( 7): Matrix.004 file - promoters50/5662805
gttgtgg

SEQ ID NO: 74669 - DNA, 17 bp, Unknown
  misc_feature (1)..( 17): Matrix.004 file - promoters50/5662809
tactatataaacataac

SEQ ID NO: 74670 - DNA, 9 bp, Unknown
  misc_feature (1)..( 9): Matrix.004 file - promoters50/5662809
attttttta

SEQ ID NO: 74671 - DNA, 7 bp, Unknown
  misc_feature (1)..( 7): Matrix.004 file - promoters50/5662828
tttttat

SEQ ID NO: 74672 - DNA, 11 bp, Unknown
  misc_feature (1)..( 11): Matrix.004 file - promoters50/5662828
tttataaatat

SEQ ID NO: 74673 - DNA, 10 bp, Unknown
  misc_feature (1)..( 10): Matrix.004 file - promoters50/5662828
taaattttga

SEQ ID NO: 74674 - DNA, 17 bp, Unknown
  misc_feature (1)..( 17): Matrix.004 file - promoters50/5662832
taaattctaaaataatg

SEQ ID NO: 74675 - DNA, 8 bp, Unknown
  misc_feature (1)..( 8): Matrix.004 file - promoters50/5662832
tttggttc

SEQ ID NO: 74676 - DNA, 8 bp, Unknown
  misc_feature (1)..( 8): Matrix.004 file - promoters50/5662832
attattta

SEQ ID NO: 74677 - DNA, 14 bp, Unknown
  misc_feature (1)..( 14): Matrix.004 file - promoters50/5662835
gattctcgcacgaa

SEQ ID NO: 74678 - DNA, 10 bp, Unknown
  misc_feature (1)..( 10): Matrix.004 file - promoters50/5662843
aaacaaattt

SEQ ID NO: 74679 - DNA, 10 bp, Unknown
  misc_feature (1)..( 10): Matrix.004 file - promoters50/5662846
aatcataaat

SEQ ID NO: 74680 - DNA, 10 bp, Unknown
  misc_feature (1)..( 10): Matrix.004 file - promoters50/5662846
tttcttttta

SEQ ID NO: 74681 - DNA, 12 bp, Unknown
  misc_feature (1)..( 12): Matrix.004 file - promoters50/5662846
ataaaatataaa

SEQ ID NO: 74682 - DNA, 8 bp, Unknown
  misc_feature (1)..( 8): Matrix.004 file - promoters50/5662846
tttcgaaa

SEQ ID NO: 74683 - DNA, 7 bp, Unknown
  misc_feature (1)..( 7): Matrix.004 file - promoters50/5662846
taaaaaa

SEQ ID NO: 74684 - DNA, 16 bp, Unknown
  misc_feature (1)..( 16): Matrix.004 file - promoters50/5662846
aaaataattacctaat

SEQ ID NO: 74685 - DNA, 9 bp, Unknown
  misc_feature (1)..( 9): Matrix.004 file - promoters50/5662846
tcaaaaata

SEQ ID NO: 74686 - DNA, 11 bp, Unknown
  misc_feature (1)..( 11): Matrix.004 file - promoters50/5662850
aaaaatacaaa

SEQ ID NO: 74687 - DNA, 8 bp, Unknown
  misc_feature (1)..( 8): Matrix.004 file - promoters50/5662850
gcaaattt

SEQ ID NO: 74688 - DNA, 9 bp, Unknown
  misc_feature (1)..( 9): Matrix.004 file - promoters50/5662850
aataaagga

SEQ ID NO: 74689 - DNA, 11 bp, Unknown
  misc_feature (1)..( 11): Matrix.004 file - promoters50/5662850
cgtatctaaag

SEQ ID NO: 74690 - DNA, 12 bp, Unknown
  misc_feature (1)..( 12): Matrix.004 file - promoters50/5662850
taatttatatgt

SEQ ID NO: 74691 - DNA, 13 bp, Unknown
  misc_feature (1)..( 13): Matrix.004 file - promoters50/5662850
taaattatatgtt

SEQ ID NO: 74692 - DNA, 9 bp, Unknown
  misc_feature (1)..( 9): Matrix.004 file - promoters50/5662850
tcttcattt

SEQ ID NO: 74693 - DNA, 7 bp, Unknown
  misc_feature (1)..( 7): Matrix.004 file - promoters50/5662850
tttttct

SEQ ID NO: 74694 - DNA, 10 bp, Unknown
  misc_feature (1)..( 10): Matrix.004 file - promoters50/5662850
ctttattctt

SEQ ID NO: 74695 - DNA, 9 bp, Unknown
  misc_feature (1)..( 9): Matrix.004 file - promoters50/5662850
tatataaaa

SEQ ID NO: 74696 - DNA, 9 bp, Unknown
  misc_feature (1)..( 9): Matrix.004 file - promoters50/5662850
ataatactt

SEQ ID NO: 74697 - DNA, 7 bp, Unknown
  misc_feature (1)..( 7): Matrix.004 file - promoters50/5662893
tttcggg

SEQ ID NO: 74698 - DNA, 9 bp, Unknown
  misc_feature (1)..( 9): Matrix.004 file - promoters50/5662893
tttttattg

SEQ ID NO: 74699 - DNA, 11 bp, Unknown
  misc_feature (1)..( 11): Matrix.004 file - promoters50/5662893
agacaaaaaaa

SEQ ID NO: 74700 - DNA, 11 bp, Unknown
  misc_feature (1)..( 11): Matrix.004 file - promoters50/5662895
aaaattataaa

SEQ ID NO: 74701 - DNA, 11 bp, Unknown
  misc_feature (1)..( 11): Matrix.004 file - promoters50/5662895
atattcttaac

SEQ ID NO: 74702 - DNA, 12 bp, Unknown
  misc_feature (1)..( 12): Matrix.004 file - promoters50/5662895
aaaattcttaac

SEQ ID NO: 74703 - DNA, 8 bp, Unknown
  misc_feature (1)..( 8): Matrix.004 file - promoters50/5662902
ataaaaaa

SEQ ID NO: 74704 - DNA, 12 bp, Unknown
  misc_feature (1)..( 12): Matrix.004 file - promoters50/5662906
agaagatggtaa

SEQ ID NO: 74705 - DNA, 9 bp, Unknown
  misc_feature (1)..( 9): Matrix.004 file - promoters50/5662906
acaaaaaaa

SEQ ID NO: 74706 - DNA, 8 bp, Unknown
  misc_feature (1)..( 8): Matrix.004 file - promoters50/5662910
ataaaaaa

SEQ ID NO: 74707 - DNA, 11 bp, Unknown
  misc_feature (1)..( 11): Matrix.004 file - promoters50/5662910
atatgagaaaa

SEQ ID NO: 74708 - DNA, 8 bp, Unknown
  misc_feature (1)..( 8): Matrix.004 file - promoters50/5662910
aaattaaa

SEQ ID NO: 74709 - DNA, 10 bp, Unknown
  misc_feature (1)..( 10): Matrix.004 file - promoters50/5662914
aagaatatat

SEQ ID NO: 74710 - DNA, 9 bp, Unknown
  misc_feature (1)..( 9): Matrix.004 file - promoters50/5662914
aagaagttg

SEQ ID NO: 74711 - DNA, 10 bp, Unknown
  misc_feature (1)..( 10): Matrix.004 file - promoters50/5662921
tttattaaaa

SEQ ID NO: 74712 - DNA, 11 bp, Unknown
  misc_feature (1)..( 11): Matrix.004 file - promoters50/5662945
ctaatttcaaa

SEQ ID NO: 74713 - DNA, 7 bp, Unknown
  misc_feature (1)..( 7): Matrix.004 file - promoters50/5662945
aattgat

SEQ ID NO: 74714 - DNA, 7 bp, Unknown
  misc_feature (1)..( 7): Matrix.004 file - promoters50/5662945
ccaagaa

SEQ ID NO: 74715 - DNA, 8 bp, Unknown
  misc_feature (1)..( 8): Matrix.004 file - promoters50/5662948
attgtttg

SEQ ID NO: 74716 - DNA, 15 bp, Unknown
  misc_feature (1)..( 15): Matrix.004 file - promoters50/5662963
atctgatgttgtttg

SEQ ID NO: 74717 - DNA, 7 bp, Unknown
  misc_feature (1)..( 7): Matrix.004 file - promoters50/5662967
tttgtat

SEQ ID NO: 74718 - DNA, 14 bp, Unknown
  misc_feature (1)..( 14): Matrix.004 file - promoters50/5662967
ttagataagaaaaa

SEQ ID NO: 74719 - DNA, 9 bp, Unknown
  misc_feature (1)..( 9): Matrix.004 file - promoters50/5662967
aataaaata

SEQ ID NO: 74720 - DNA, 12 bp, Unknown
  misc_feature (1)..( 12): Matrix.004 file - promoters50/5662967
caaaaaaaatca

SEQ ID NO: 74721 - DNA, 10 bp, Unknown
  misc_feature (1)..( 10): Matrix.004 file - promoters50/5662967
aaataaacaa

SEQ ID NO: 74722 - DNA, 10 bp, Unknown
  misc_feature (1)..( 10): Matrix.004 file - promoters50/5662967
aaataaaaag

SEQ ID NO: 74723 - DNA, 9 bp, Unknown
  misc_feature (1)..( 9): Matrix.004 file - promoters50/5662992
ttatataga

SEQ ID NO: 74724 - DNA, 8 bp, Unknown
  misc_feature (1)..( 8): Matrix.004 file - promoters50/5662992
aaacaaat

SEQ ID NO: 74725 - DNA, 9 bp, Unknown
  misc_feature (1)..( 9): Matrix.004 file - promoters50/5662992
aaagtaact

SEQ ID NO: 74726 - DNA, 7 bp, Unknown
  misc_feature (1)..( 7): Matrix.004 file - promoters50/5662992
cgaaaat

SEQ ID NO: 74727 - DNA, 8 bp, Unknown
  misc_feature (1)..( 8): Matrix.004 file - promoters50/5662992
gaaaatat

SEQ ID NO: 74728 - DNA, 7 bp, Unknown
  misc_feature (1)..( 7): Matrix.004 file - promoters50/5662992
ttatata

SEQ ID NO: 74729 - DNA, 13 bp, Unknown
  misc_feature (1)..( 13): Matrix.004 file - promoters50/5662992
taattagaaaaaa

SEQ ID NO: 74730 - DNA, 8 bp, Unknown
  misc_feature (1)..( 8): Matrix.004 file - promoters50/5662992
attttaaa

SEQ ID NO: 74731 - DNA, 11 bp, Unknown
  misc_feature (1)..( 11): Matrix.004 file - promoters50/5662992
atattaatatc

SEQ ID NO: 74732 - DNA, 11 bp, Unknown
  misc_feature (1)..( 11): Matrix.004 file - promoters50/5662992
ttagaaaaaat

SEQ ID NO: 74733 - DNA, 10 bp, Unknown
  misc_feature (1)..( 10): Matrix.004 file - promoters50/5663017
ttctttttca

SEQ ID NO: 74734 - DNA, 7 bp, Unknown
  misc_feature (1)..( 7): Matrix.004 file - promoters50/5663017
catgaag

SEQ ID NO: 74735 - DNA, 9 bp, Unknown
  misc_feature (1)..( 9): Matrix.004 file - promoters50/5663017
cagaattta

SEQ ID NO: 74736 - DNA, 10 bp, Unknown
  misc_feature (1)..( 10): Matrix.004 file - promoters50/5663028
gaagatggaa

SEQ ID NO: 74737 - DNA, 7 bp, Unknown
  misc_feature (1)..( 7): Matrix.004 file - promoters50/5663030
acaaaaa

SEQ ID NO: 74738 - DNA, 9 bp, Unknown
  misc_feature (1)..( 9): Matrix.004 file - promoters50/5663030
gcttgcttt

SEQ ID NO: 74739 - DNA, 9 bp, Unknown
  misc_feature (1)..( 9): Matrix.004 file - promoters50/5663034
aagaaaccg

SEQ ID NO: 74740 - DNA, 14 bp, Unknown
  misc_feature (1)..( 14): Matrix.004 file - promoters50/5663034
aactcattttctta

SEQ ID NO: 74741 - DNA, 10 bp, Unknown
  misc_feature (1)..( 10): Matrix.004 file - promoters50/5663034
aattttaggt

SEQ ID NO: 74742 - DNA, 8 bp, Unknown
  misc_feature (1)..( 8): Matrix.004 file - promoters50/5663050
attttgtt

SEQ ID NO: 74743 - DNA, 8 bp, Unknown
  misc_feature (1)..( 8): Matrix.004 file - promoters50/5663050
atcaaatt

SEQ ID NO: 74744 - DNA, 8 bp, Unknown
  misc_feature (1)..( 8): Matrix.004 file - promoters50/5663050
cttattta

SEQ ID NO: 74745 - DNA, 7 bp, Unknown
  misc_feature (1)..( 7): Matrix.004 file - promoters50/5663054
tatttat

SEQ ID NO: 74746 - DNA, 9 bp, Unknown
  misc_feature (1)..( 9): Matrix.004 file - promoters50/5663054
ttcacaaat

SEQ ID NO: 74747 - DNA, 12 bp, Unknown
  misc_feature (1)..( 12): Matrix.004 file - promoters50/5663054
aaattcaaagat

SEQ ID NO: 74748 - DNA, 8 bp, Unknown
  misc_feature (1)..( 8): Matrix.004 file - promoters50/5663054
aaagatga

SEQ ID NO: 74749 - DNA, 7 bp, Unknown
  misc_feature (1)..( 7): Matrix.004 file - promoters50/5663054
ataatta

SEQ ID NO: 74750 - DNA, 10 bp, Unknown
  misc_feature (1)..( 10): Matrix.004 file - promoters50/5663054
gatttatgta

SEQ ID NO: 74751 - DNA, 7 bp, Unknown
  misc_feature (1)..( 7): Matrix.004 file - promoters50/5663054
ccctata

SEQ ID NO: 74752 - DNA, 11 bp, Unknown
  misc_feature (1)..( 11): Matrix.004 file - promoters50/5663054
cattatcaaaa

SEQ ID NO: 74753 - DNA, 8 bp, Unknown
  misc_feature (1)..( 8): Matrix.004 file - promoters50/5663054
ttttacag

SEQ ID NO: 74754 - DNA, 10 bp, Unknown
  misc_feature (1)..( 10): Matrix.004 file - promoters50/5663054
aacattcaaa

SEQ ID NO: 74755 - DNA, 9 bp, Unknown
  misc_feature (1)..( 9): Matrix.004 file - promoters50/5663061
cctataaaa

SEQ ID NO: 74756 - DNA, 12 bp, Unknown
  misc_feature (1)..( 12): Matrix.004 file - promoters50/5663069
gagtttttctca

SEQ ID NO: 74757 - DNA, 11 bp, Unknown
  misc_feature (1)..( 11): Matrix.004 file - promoters50/5663069
ttttcgaaaaa

SEQ ID NO: 74758 - DNA, 10 bp, Unknown
  misc_feature (1)..( 10): Matrix.004 file - promoters50/5663093
gtctaaaaaa

SEQ ID NO: 74759 - DNA, 12 bp, Unknown
  misc_feature (1)..( 12): Matrix.004 file - promoters50/5663093
gttgatctttca

SEQ ID NO: 74760 - DNA, 7 bp, Unknown
  misc_feature (1)..( 7): Matrix.004 file - promoters50/5663093
aaagttg

SEQ ID NO: 74761 - DNA, 8 bp, Unknown
  misc_feature (1)..( 8): Matrix.004 file - promoters50/5663093
attacttg

SEQ ID NO: 74762 - DNA, 10 bp, Unknown
  misc_feature (1)..( 10): Matrix.004 file - promoters50/5663093
atttatgtgt

SEQ ID NO: 74763 - DNA, 7 bp, Unknown
  misc_feature (1)..( 7): Matrix.004 file - promoters50/5663093
tgaaaat

SEQ ID NO: 74764 - DNA, 12 bp, Unknown
  misc_feature (1)..( 12): Matrix.004 file - promoters50/5663093
ttaagtgtaaac

SEQ ID NO: 74765 - DNA, 7 bp, Unknown
  misc_feature (1)..( 7): Matrix.004 file - promoters50/5663093
atgatgt

SEQ ID NO: 74766 - DNA, 8 bp, Unknown
  misc_feature (1)..( 8): Matrix.004 file - promoters50/5663093
tgggattt

SEQ ID NO: 74767 - DNA, 7 bp, Unknown
  misc_feature (1)..( 7): Matrix.004 file - promoters50/5663097
acattgc

SEQ ID NO: 74768 - DNA, 7 bp, Unknown
  misc_feature (1)..( 7): Matrix.004 file - promoters50/5663097
ataaaca

SEQ ID NO: 74769 - DNA, 15 bp, Unknown
  misc_feature (1)..( 15): Matrix.004 file - promoters50/5663116
ctcatatatataaag

SEQ ID NO: 74770 - DNA, 13 bp, Unknown
  misc_feature (1)..( 13): Matrix.004 file - promoters50/5663116
cattaatttcctc

SEQ ID NO: 74771 - DNA, 6 bp, Unknown
  misc_feature (1)..( 6): Matrix.004 file - promoters50/5663116
tttaat

SEQ ID NO: 74772 - DNA, 14 bp, Unknown
  misc_feature (1)..( 14): Matrix.004 file - promoters50/5663134
aaaaatttatgctt

SEQ ID NO: 74773 - DNA, 10 bp, Unknown
  misc_feature (1)..( 10): Matrix.004 file - promoters50/5663138
ttaaaataaa

SEQ ID NO: 74774 - DNA, 14 bp, Unknown
  misc_feature (1)..( 14): Matrix.004 file - promoters50/5663138
actaaacaaaagat

SEQ ID NO: 74775 - DNA, 16 bp, Unknown
  misc_feature (1)..( 16): Matrix.004 file - promoters50/5663142
ttgaagcaaaaatatt

SEQ ID NO: 74776 - DNA, 8 bp, Unknown
  misc_feature (1)..( 8): Matrix.004 file - promoters50/5663142
aaataatg

SEQ ID NO: 74777 - DNA, 10 bp, Unknown
  misc_feature (1)..( 10): Matrix.004 file - promoters50/5663142
tcaaataaaa

SEQ ID NO: 74778 - DNA, 13 bp, Unknown
  misc_feature (1)..( 13): Matrix.004 file - promoters50/5663142
acttataataaat

SEQ ID NO: 74779 - DNA, 6 bp, Unknown
  misc_feature (1)..( 6): Matrix.004 file - promoters50/5663148
aaaata

SEQ ID NO: 74780 - DNA, 10 bp, Unknown
  misc_feature (1)..( 10): Matrix.004 file - promoters50/5663148
tataagtgtt

SEQ ID NO: 74781 - DNA, 9 bp, Unknown
  misc_feature (1)..( 9): Matrix.004 file - promoters50/5663148
tctcttata

SEQ ID NO: 74782 - DNA, 8 bp, Unknown
  misc_feature (1)..( 8): Matrix.004 file - promoters50/5663148
tttatgca

SEQ ID NO: 74783 - DNA, 10 bp, Unknown
  misc_feature (1)..( 10): Matrix.004 file - promoters50/5663151
cagatttatt

SEQ ID NO: 74784 - DNA, 10 bp, Unknown
  misc_feature (1)..( 10): Matrix.004 file - promoters50/5663151
aagaaatgat

SEQ ID NO: 74785 - DNA, 9 bp, Unknown
  misc_feature (1)..( 9): Matrix.004 file - promoters50/5663154
caaacccaa

SEQ ID NO: 74786 - DNA, 5 bp, Unknown
  misc_feature (1)..( 5): Matrix.004 file - promoters50/5663154
aaatt

SEQ ID NO: 74787 - DNA, 10 bp, Unknown
  misc_feature (1)..( 10): Matrix.004 file - promoters50/5663154
aatgataaaa

SEQ ID NO: 74788 - DNA, 12 bp, Unknown
  misc_feature (1)..( 12): Matrix.004 file - promoters50/5663154
aaatgtttaata

SEQ ID NO: 74789 - DNA, 9 bp, Unknown
  misc_feature (1)..( 9): Matrix.004 file - promoters50/5663162
taatttttt

SEQ ID NO: 74790 - DNA, 8 bp, Unknown
  misc_feature (1)..( 8): Matrix.004 file - promoters50/5663162
ctcaatat

SEQ ID NO: 74791 - DNA, 11 bp, Unknown
  misc_feature (1)..( 11): Matrix.004 file - promoters50/5663162
taatcaaaatt

SEQ ID NO: 74792 - DNA, 8 bp, Unknown
  misc_feature (1)..( 8): Matrix.004 file - promoters50/5663162
aaatctat

SEQ ID NO: 74793 - DNA, 10 bp, Unknown
  misc_feature (1)..( 10): Matrix.004 file - promoters50/5663162
ttaaaataac

SEQ ID NO: 74794 - DNA, 7 bp, Unknown
  misc_feature (1)..( 7): Matrix.004 file - promoters50/5663162
ttaaaaa

SEQ ID NO: 74795 - DNA, 7 bp, Unknown
  misc_feature (1)..( 7): Matrix.004 file - promoters50/5663170
aattaaa

SEQ ID NO: 74796 - DNA, 10 bp, Unknown
  misc_feature (1)..( 10): Matrix.004 file - promoters50/5663170
ataagaataa

SEQ ID NO: 74797 - DNA, 7 bp, Unknown
  misc_feature (1)..( 7): Matrix.004 file - promoters50/5663170
taaataa

SEQ ID NO: 74798 - DNA, 9 bp, Unknown
  misc_feature (1)..( 9): Matrix.004 file - promoters50/5663174
aagaattta

SEQ ID NO: 74799 - DNA, 7 bp, Unknown
  misc_feature (1)..( 7): Matrix.004 file - promoters50/5663182
aaaagat

SEQ ID NO: 74800 - DNA, 10 bp, Unknown
  misc_feature (1)..( 10): Matrix.004 file - promoters50/5663182
aaaaatgtaa

SEQ ID NO: 74801 - DNA, 8 bp, Unknown
  misc_feature (1)..( 8): Matrix.004 file - promoters50/5663182
aaataaat

SEQ ID NO: 74802 - DNA, 6 bp, Unknown
  misc_feature (1)..( 6): Matrix.004 file - promoters50/5663182
ataaat

SEQ ID NO: 74803 - DNA, 9 bp, Unknown
  misc_feature (1)..( 9): Matrix.004 file - promoters50/5663186
tttcggttc

SEQ ID NO: 74804 - DNA, 8 bp, Unknown
  misc_feature (1)..( 8): Matrix.004 file - promoters50/5663197
ataaatac

SEQ ID NO: 74805 - DNA, 9 bp, Unknown
  misc_feature (1)..( 9): Matrix.004 file - promoters50/5663197
gaggtgatg

SEQ ID NO: 74806 - DNA, 7 bp, Unknown
  misc_feature (1)..( 7): Matrix.004 file - promoters50/5663197
gaagaag

SEQ ID NO: 74807 - DNA, 10 bp, Unknown
  misc_feature (1)..( 10): Matrix.004 file - promoters50/5663221
ctttccttct

SEQ ID NO: 74808 - DNA, 12 bp, Unknown
  misc_feature (1)..( 12): Matrix.004 file - promoters50/5663224
ttaagacccgaa

SEQ ID NO: 74809 - DNA, 11 bp, Unknown
  misc_feature (1)..( 11): Matrix.004 file - promoters50/5663224
actatttataa

SEQ ID NO: 74810 - DNA, 11 bp, Unknown
  misc_feature (1)..( 11): Matrix.004 file - promoters50/5663224
atcagaatttt

SEQ ID NO: 74811 - DNA, 8 bp, Unknown
  misc_feature (1)..( 8): Matrix.004 file - promoters50/5663224
catttgtt

SEQ ID NO: 74812 - DNA, 10 bp, Unknown
  misc_feature (1)..( 10): Matrix.004 file - promoters50/5663224
aatttttatt

SEQ ID NO: 74813 - DNA, 6 bp, Unknown
  misc_feature (1)..( 6): Matrix.004 file - promoters50/5663234
atcaat

SEQ ID NO: 74814 - DNA, 12 bp, Unknown
  misc_feature (1)..( 12): Matrix.004 file - promoters50/5663234
atcataaaagaa

SEQ ID NO: 74815 - DNA, 11 bp, Unknown
  misc_feature (1)..( 11): Matrix.004 file - promoters50/5663234
attatttttat

SEQ ID NO: 74816 - DNA, 4 bp, Unknown
  misc_feature (1)..( 4): Matrix.004 file - promoters50/5663234
taaa

SEQ ID NO: 74817 - DNA, 10 bp, Unknown
  misc_feature (1)..( 10): Matrix.004 file - promoters50/5663234
catttaaaaa

SEQ ID NO: 74818 - DNA, 12 bp, Unknown
  misc_feature (1)..( 12): Matrix.004 file - promoters50/5663249
tatatataaaaa

SEQ ID NO: 74819 - DNA, 7 bp, Unknown
  misc_feature (1)..( 7): Matrix.004 file - promoters50/5663249
attttct

SEQ ID NO: 74820 - DNA, 8 bp, Unknown
  misc_feature (1)..( 8): Matrix.004 file - promoters50/5663249
taaattaa

SEQ ID NO: 74821 - DNA, 11 bp, Unknown
  misc_feature (1)..( 11): Matrix.004 file - promoters50/5663249
tcaaattaatc

SEQ ID NO: 74822 - DNA, 12 bp, Unknown
  misc_feature (1)..( 12): Matrix.004 file - promoters50/5663253
tatttttcataa

SEQ ID NO: 74823 - DNA, 7 bp, Unknown
  misc_feature (1)..( 7): Matrix.004 file - promoters50/5663264
gaaggaa

SEQ ID NO: 74824 - DNA, 7 bp, Unknown
  misc_feature (1)..( 7): Matrix.004 file - promoters50/5663301
aatgggc

SEQ ID NO: 74825 - DNA, 9 bp, Unknown
  misc_feature (1)..( 9): Matrix.004 file - promoters50/5663301
aaaaaataa

SEQ ID NO: 74826 - DNA, 10 bp, Unknown
  misc_feature (1)..( 10): Matrix.004 file - promoters50/5663301
aaaaacaaaa

SEQ ID NO: 74827 - DNA, 10 bp, Unknown
  misc_feature (1)..( 10): Matrix.004 file - promoters50/5663301
attaaaacaa

SEQ ID NO: 74828 - DNA, 13 bp, Unknown
  misc_feature (1)..( 13): Matrix.004 file - promoters50/5663305
tctaacttgtttt

SEQ ID NO: 74829 - DNA, 10 bp, Unknown
  misc_feature (1)..( 10): Matrix.004 file - promoters50/5663305
gtttaatata

SEQ ID NO: 74830 - DNA, 10 bp, Unknown
  misc_feature (1)..( 10): Matrix.004 file - promoters50/5663305
aacagagata

SEQ ID NO: 74831 - DNA, 10 bp, Unknown
  misc_feature (1)..( 10): Matrix.004 file - promoters50/5663313
aaattgatat

SEQ ID NO: 74832 - DNA, 7 bp, Unknown
  misc_feature (1)..( 7): Matrix.004 file - promoters50/5663313
tgattag

SEQ ID NO: 74833 - DNA, 7 bp, Unknown
  misc_feature (1)..( 7): Matrix.004 file - promoters50/5663313
gaattgc

SEQ ID NO: 74834 - DNA, 7 bp, Unknown
  misc_feature (1)..( 7): Matrix.004 file - promoters50/5663313
attcttc

SEQ ID NO: 74835 - DNA, 8 bp, Unknown
  misc_feature (1)..( 8): Matrix.005 file - promoters50/5663313
ggtgttgt

SEQ ID NO: 74836 - DNA, 10 bp, Unknown
  misc_feature (1)..( 10): Matrix.005 file - promoters50/5663313
tgtaatcggg

SEQ ID NO: 74837 - DNA, 11 bp, Unknown
  misc_feature (1)..( 11): Matrix.005 file - promoters50/5663327
tacattttttc

SEQ ID NO: 74838 - DNA, 12 bp, Unknown
  misc_feature (1)..( 12): Matrix.005 file - promoters50/5663327
tttataatctaa

SEQ ID NO: 74839 - DNA, 8 bp, Unknown
  misc_feature (1)..( 8): Matrix.005 file - promoters50/5663327
aaatctaa

SEQ ID NO: 74840 - DNA, 11 bp, Unknown
  misc_feature (1)..( 11): Matrix.005 file - promoters50/5663327
tacattttttt

SEQ ID NO: 74841 - DNA, 14 bp, Unknown
  misc_feature (1)..( 14): Matrix.005 file - promoters50/5663327
aatattttatcctt

SEQ ID NO: 74842 - DNA, 9 bp, Unknown
  misc_feature (1)..( 9): Matrix.005 file - promoters50/5663329
gttggtttt

SEQ ID NO: 74843 - DNA, 11 bp, Unknown
  misc_feature (1)..( 11): Matrix.005 file - promoters50/5663333
cgatcatgaat

SEQ ID NO: 74844 - DNA, 8 bp, Unknown
  misc_feature (1)..( 8): Matrix.005 file - promoters50/5663333
catgaata

SEQ ID NO: 74845 - DNA, 15 bp, Unknown
  misc_feature (1)..( 15): Matrix.005 file - promoters50/5663336
aaataattaaacatt

SEQ ID NO: 74846 - DNA, 6 bp, Unknown
  misc_feature (1)..( 6): Matrix.005 file - promoters50/5663336
ctaaaa

SEQ ID NO: 74847 - DNA, 13 bp, Unknown
  misc_feature (1)..( 13): Matrix.005 file - promoters50/5663336
ctaatttttttaa

SEQ ID NO: 74848 - DNA, 9 bp, Unknown
  misc_feature (1)..( 9): Matrix.005 file - promoters50/5663336
aatttattg

SEQ ID NO: 74849 - DNA, 8 bp, Unknown
  misc_feature (1)..( 8): Matrix.005 file - promoters50/5663336
tataagta

SEQ ID NO: 74850 - DNA, 8 bp, Unknown
  misc_feature (1)..( 8): Matrix.005 file - promoters50/5663347
gttgtaat

SEQ ID NO: 74851 - DNA, 7 bp, Unknown
  misc_feature (1)..( 7): Matrix.005 file - promoters50/5663347
tcaaaac

SEQ ID NO: 74852 - DNA, 11 bp, Unknown
  misc_feature (1)..( 11): Matrix.005 file - promoters50/5663347
acgaagactat

SEQ ID NO: 74853 - DNA, 8 bp, Unknown
  misc_feature (1)..( 8): Matrix.005 file - promoters50/5663358
aaaaaaaa

SEQ ID NO: 74854 - DNA, 9 bp, Unknown
  misc_feature (1)..( 9): Matrix.005 file - promoters50/5663358
gaaaaaaac

SEQ ID NO: 74855 - DNA, 9 bp, Unknown
  misc_feature (1)..( 9): Matrix.005 file - promoters50/5663370
tggtaatta

SEQ ID NO: 74856 - DNA, 8 bp, Unknown
  misc_feature (1)..( 8): Matrix.005 file - promoters50/5663370
ttcaacat

SEQ ID NO: 74857 - DNA, 16 bp, Unknown
  misc_feature (1)..( 16): Matrix.005 file - promoters50/5663374
aataaattaaatatct

SEQ ID NO: 74858 - DNA, 10 bp, Unknown
  misc_feature (1)..( 10): Matrix.005 file - promoters50/5663374
agacattttc

SEQ ID NO: 74859 - DNA, 9 bp, Unknown
  misc_feature (1)..( 9): Matrix.005 file - promoters50/5663374
ttcccacta

SEQ ID NO: 74860 - DNA, 7 bp, Unknown
  misc_feature (1)..( 7): Matrix.005 file - promoters50/5663374
atttcca

SEQ ID NO: 74861 - DNA, 10 bp, Unknown
  misc_feature (1)..( 10): Matrix.005 file - promoters50/5663374
catcatgttc

SEQ ID NO: 74862 - DNA, 11 bp, Unknown
  misc_feature (1)..( 11): Matrix.005 file - promoters50/5663374
ttaattcaaaa

SEQ ID NO: 74863 - DNA, 7 bp, Unknown
  misc_feature (1)..( 7): Matrix.005 file - promoters50/5663406
attgtga

SEQ ID NO: 74864 - DNA, 11 bp, Unknown
  misc_feature (1)..( 11): Matrix.005 file - promoters50/5663406
cttacctaaat

SEQ ID NO: 74865 - DNA, 12 bp, Unknown
  misc_feature (1)..( 12): Matrix.005 file - promoters50/5663406
tgtcaatcattt

SEQ ID NO: 74866 - DNA, 14 bp, Unknown
  misc_feature (1)..( 14): Matrix.005 file - promoters50/5663418
ggtctattctcaat

SEQ ID NO: 74867 - DNA, 10 bp, Unknown
  misc_feature (1)..( 10): Matrix.005 file - promoters50/5663418
aaattatgat

SEQ ID NO: 74868 - DNA, 10 bp, Unknown
  misc_feature (1)..( 10): Matrix.005 file - promoters50/5663433
ggcttagatt

SEQ ID NO: 74869 - DNA, 8 bp, Unknown
  misc_feature (1)..( 8): Matrix.005 file - promoters50/5663433
tttttaga

SEQ ID NO: 74870 - DNA, 11 bp, Unknown
  misc_feature (1)..( 11): Matrix.005 file - promoters50/5663440
aaaaaaagaaa

SEQ ID NO: 74871 - DNA, 10 bp, Unknown
  misc_feature (1)..( 10): Matrix.005 file - promoters50/5663448
gattgttatg

SEQ ID NO: 74872 - DNA, 12 bp, Unknown
  misc_feature (1)..( 12): Matrix.005 file - promoters50/5663448
aactcaattaac

SEQ ID NO: 74873 - DNA, 9 bp, Unknown
  misc_feature (1)..( 9): Matrix.005 file - promoters50/5663448
tgtattgat

SEQ ID NO: 74874 - DNA, 15 bp, Unknown
  misc_feature (1)..( 15): Matrix.005 file - promoters50/5663448
tgttataattttcaa

SEQ ID NO: 74875 - DNA, 11 bp, Unknown
  misc_feature (1)..( 11): Matrix.005 file - promoters50/5663464
tttaaataatg

SEQ ID NO: 74876 - DNA, 8 bp, Unknown
  misc_feature (1)..( 8): Matrix.005 file - promoters50/5663464
tttttctt

SEQ ID NO: 74877 - DNA, 8 bp, Unknown
  misc_feature (1)..( 8): Matrix.005 file - promoters50/5663464
aatggaaa

SEQ ID NO: 74878 - DNA, 9 bp, Unknown
  misc_feature (1)..( 9): Matrix.005 file - promoters50/5663474
tcacaaaga

SEQ ID NO: 74879 - DNA, 7 bp, Unknown
  misc_feature (1)..( 7): Matrix.005 file - promoters50/5663474
gtttgat

SEQ ID NO: 74880 - DNA, 7 bp, Unknown
  misc_feature (1)..( 7): Matrix.005 file - promoters50/5663474
catataa

SEQ ID NO: 74881 - DNA, 9 bp, Unknown
  misc_feature (1)..( 9): Matrix.005 file - promoters50/5663474
tcaataatt

SEQ ID NO: 74882 - DNA, 8 bp, Unknown
  misc_feature (1)..( 8): Matrix.005 file - promoters50/5663474
aaagaaaa

SEQ ID NO: 74883 - DNA, 7 bp, Unknown
  misc_feature (1)..( 7): Matrix.005 file - promoters50/5663474
ataaatg

SEQ ID NO: 74884 - DNA, 13 bp, Unknown
  misc_feature (1)..( 13): Matrix.005 file - promoters50/5663478
ctcaaaattgaat

SEQ ID NO: 74885 - DNA, 8 bp, Unknown
  misc_feature (1)..( 8): Matrix.005 file - promoters50/5663478
tttattaa

SEQ ID NO: 74886 - DNA, 10 bp, Unknown
  misc_feature (1)..( 10): Matrix.005 file - promoters50/5663478
tgattagtaa

SEQ ID NO: 74887 - DNA, 9 bp, Unknown
  misc_feature (1)..( 9): Matrix.005 file - promoters50/5663482
ttgatagac

SEQ ID NO: 74888 - DNA, 7 bp, Unknown
  misc_feature (1)..( 7): Matrix.005 file - promoters50/5663482
gatagac

SEQ ID NO: 74889 - DNA, 11 bp, Unknown
  misc_feature (1)..( 11): Matrix.005 file - promoters50/5663482
gaacactaaag

SEQ ID NO: 74890 - DNA, 10 bp, Unknown
  misc_feature (1)..( 10): Matrix.005 file - promoters50/5663482
aacacttaag

SEQ ID NO: 74891 - DNA, 11 bp, Unknown
  misc_feature (1)..( 11): Matrix.005 file - promoters50/5663490
agttggagttt

SEQ ID NO: 74892 - DNA, 6 bp, Unknown
  misc_feature (1)..( 6): Matrix.005 file - promoters50/5663490
aaacga

SEQ ID NO: 74893 - DNA, 9 bp, Unknown
  misc_feature (1)..( 9): Matrix.005 file - promoters50/5663502
catttcttt

SEQ ID NO: 74894 - DNA, 11 bp, Unknown
  misc_feature (1)..( 11): Matrix.005 file - promoters50/5663502
atttatcaaat

SEQ ID NO: 74895 - DNA, 7 bp, Unknown
  misc_feature (1)..( 7): Matrix.005 file - promoters50/5663502
ttaaatt

SEQ ID NO: 74896 - DNA, 8 bp, Unknown
  misc_feature (1)..( 8): Matrix.005 file - promoters50/5663502
aattctta

SEQ ID NO: 74897 - DNA, 8 bp, Unknown
  misc_feature (1)..( 8): Matrix.005 file - promoters50/5663502
tttcaaac

SEQ ID NO: 74898 - DNA, 13 bp, Unknown
  misc_feature (1)..( 13): Matrix.005 file - promoters50/5663502
tcatatttttttg

SEQ ID NO: 74899 - DNA, 10 bp, Unknown
  misc_feature (1)..( 10): Matrix.005 file - promoters50/5663502
aaacacatct

SEQ ID NO: 74900 - DNA, 7 bp, Unknown
  misc_feature (1)..( 7): Matrix.005 file - promoters50/5663502
aaaaaat

SEQ ID NO: 74901 - DNA, 7 bp, Unknown
  misc_feature (1)..( 7): Matrix.005 file - promoters50/5663502
actttta

SEQ ID NO: 74902 - DNA, 7 bp, Unknown
  misc_feature (1)..( 7): Matrix.005 file - promoters50/5663502
cttttac

SEQ ID NO: 74903 - DNA, 6 bp, Unknown
  misc_feature (1)..( 6): Matrix.005 file - promoters50/5663535
ttacat

SEQ ID NO: 74904 - DNA, 8 bp, Unknown
  misc_feature (1)..( 8): Matrix.005 file - promoters50/5663535
ccactttt

SEQ ID NO: 74905 - DNA, 10 bp, Unknown
  misc_feature (1)..( 10): Matrix.005 file - promoters50/5663539
ttaataccat

SEQ ID NO: 74906 - DNA, 7 bp, Unknown
  misc_feature (1)..( 7): Matrix.005 file - promoters50/5663539
tattttt

SEQ ID NO: 74907 - DNA, 7 bp, Unknown
  misc_feature (1)..( 7): Matrix.005 file - promoters50/5663539
taatttt

SEQ ID NO: 74908 - DNA, 7 bp, Unknown
  misc_feature (1)..( 7): Matrix.005 file - promoters50/5663539
tttgagt

SEQ ID NO: 74909 - DNA, 7 bp, Unknown
  misc_feature (1)..( 7): Matrix.005 file - promoters50/5663539
tgtgttg

SEQ ID NO: 74910 - DNA, 8 bp, Unknown
  misc_feature (1)..( 8): Matrix.005 file - promoters50/5663539
tatttttt

SEQ ID NO: 74911 - DNA, 8 bp, Unknown
  misc_feature (1)..( 8): Matrix.005 file - promoters50/5663539
taatttaa

SEQ ID NO: 74912 - DNA, 7 bp, Unknown
  misc_feature (1)..( 7): Matrix.005 file - promoters50/5663539
aaataat

SEQ ID NO: 74913 - DNA, 6 bp, Unknown
  misc_feature (1)..( 6): Matrix.005 file - promoters50/5663539
tattgt

SEQ ID NO: 74914 - DNA, 9 bp, Unknown
  misc_feature (1)..( 9): Matrix.005 file - promoters50/5663539
tccatccat

SEQ ID NO: 74915 - DNA, 9 bp, Unknown
  misc_feature (1)..( 9): Matrix.005 file - promoters50/5663589
taggttaag

SEQ ID NO: 74916 - DNA, 8 bp, Unknown
  misc_feature (1)..( 8): Matrix.005 file - promoters50/5663589
ggatttat

SEQ ID NO: 74917 - DNA, 8 bp, Unknown
  misc_feature (1)..( 8): Matrix.005 file - promoters50/5663595
ttttattt

SEQ ID NO: 74918 - DNA, 8 bp, Unknown
  misc_feature (1)..( 8): Matrix.005 file - promoters50/5663607
aataaata

SEQ ID NO: 74919 - DNA, 8 bp, Unknown
  misc_feature (1)..( 8): Matrix.005 file - promoters50/5663614
aaacatta

SEQ ID NO: 74920 - DNA, 10 bp, Unknown
  misc_feature (1)..( 10): Matrix.005 file - promoters50/5663614
agataaatta

SEQ ID NO: 74921 - DNA, 12 bp, Unknown
  misc_feature (1)..( 12): Matrix.005 file - promoters50/5663614
taaacaccattg

SEQ ID NO: 74922 - DNA, 11 bp, Unknown
  misc_feature (1)..( 11): Matrix.005 file - promoters50/5663614
aaaaaattaat

SEQ ID NO: 74923 - DNA, 8 bp, Unknown
  misc_feature (1)..( 8): Matrix.005 file - promoters50/5663614
atttgaaa

SEQ ID NO: 74924 - DNA, 8 bp, Unknown
  misc_feature (1)..( 8): Matrix.005 file - promoters50/5663625
atatgagt

SEQ ID NO: 74925 - DNA, 11 bp, Unknown
  misc_feature (1)..( 11): Matrix.005 file - promoters50/5663625
ataataacttt

SEQ ID NO: 74926 - DNA, 9 bp, Unknown
  misc_feature (1)..( 9): Matrix.005 file - promoters50/5663625
ttaaaataa

SEQ ID NO: 74927 - DNA, 11 bp, Unknown
  misc_feature (1)..( 11): Matrix.005 file - promoters50/5663625
ttcttttattt

SEQ ID NO: 74928 - DNA, 11 bp, Unknown
  misc_feature (1)..( 11): Matrix.005 file - promoters50/5663625
attttactttt

SEQ ID NO: 74929 - DNA, 9 bp, Unknown
  misc_feature (1)..( 9): Matrix.005 file - promoters50/5663644
aaactaaaa

SEQ ID NO: 74930 - DNA, 8 bp, Unknown
  misc_feature (1)..( 8): Matrix.005 file - promoters50/5663644
aaattttt

SEQ ID NO: 74931 - DNA, 8 bp, Unknown
  misc_feature (1)..( 8): Matrix.005 file - promoters50/5663644
attttttt

SEQ ID NO: 74932 - DNA, 12 bp, Unknown
  misc_feature (1)..( 12): Matrix.005 file - promoters50/5663644
gaaaaaatattt

SEQ ID NO: 74933 - DNA, 7 bp, Unknown
  misc_feature (1)..( 7): Matrix.005 file - promoters50/5663644
tattttt

SEQ ID NO: 74934 - DNA, 9 bp, Unknown
  misc_feature (1)..( 9): Matrix.005 file - promoters50/5663688
attatttct

SEQ ID NO: 74935 - DNA, 7 bp, Unknown
  misc_feature (1)..( 7): Matrix.005 file - promoters50/5663688
tgtggat

SEQ ID NO: 74936 - DNA, 9 bp, Unknown
  misc_feature (1)..( 9): Matrix.005 file - promoters50/5663688
tattacttg

SEQ ID NO: 74937 - DNA, 9 bp, Unknown
  misc_feature (1)..( 9): Matrix.005 file - promoters50/5663688
ttaagaaac

SEQ ID NO: 74938 - DNA, 9 bp, Unknown
  misc_feature (1)..( 9): Matrix.005 file - promoters50/5663688
tatttggtg

SEQ ID NO: 74939 - DNA, 8 bp, Unknown
  misc_feature (1)..( 8): Matrix.005 file - promoters50/5663700
taaaatat

SEQ ID NO: 74940 - DNA, 7 bp, Unknown
  misc_feature (1)..( 7): Matrix.005 file - promoters50/5663700
tttatgt

SEQ ID NO: 74941 - DNA, 15 bp, Unknown
  misc_feature (1)..( 15): Matrix.005 file - promoters50/5663706
tgagattctatagtt

SEQ ID NO: 74942 - DNA, 10 bp, Unknown
  misc_feature (1)..( 10): Matrix.005 file - promoters50/5663706
taattaattt

SEQ ID NO: 74943 - DNA, 7 bp, Unknown
  misc_feature (1)..( 7): Matrix.005 file - promoters50/5663706
gtaaaaa

SEQ ID NO: 74944 - DNA, 9 bp, Unknown
  misc_feature (1)..( 9): Matrix.005 file - promoters50/5663706
aaataattc

SEQ ID NO: 74945 - DNA, 11 bp, Unknown
  misc_feature (1)..( 11): Matrix.005 file - promoters50/5663706
aaaaattttat

SEQ ID NO: 74946 - DNA, 10 bp, Unknown
  misc_feature (1)..( 10): Matrix.005 file - promoters50/5663706
cctatataaa

SEQ ID NO: 74947 - DNA, 8 bp, Unknown
  misc_feature (1)..( 8): Matrix.005 file - promoters50/5663710
catgaata

SEQ ID NO: 74948 - DNA, 11 bp, Unknown
  misc_feature (1)..( 11): Matrix.005 file - promoters50/5663710
tctatcaaagt

SEQ ID NO: 74949 - DNA, 7 bp, Unknown
  misc_feature (1)..( 7): Matrix.005 file - promoters50/5663710
tatatat

SEQ ID NO: 74950 - DNA, 7 bp, Unknown
  misc_feature (1)..( 7): Matrix.005 file - promoters50/5663728
gcatata

SEQ ID NO: 74951 - DNA, 9 bp, Unknown
  misc_feature (1)..( 9): Matrix.005 file - promoters50/5663728
ttttaaaaa

SEQ ID NO: 74952 - DNA, 8 bp, Unknown
  misc_feature (1)..( 8): Matrix.005 file - promoters50/5663732
ctaatatt

SEQ ID NO: 74953 - DNA, 12 bp, Unknown
  misc_feature (1)..( 12): Matrix.005 file - promoters50/5663732
ttttgtctaaaa

SEQ ID NO: 74954 - DNA, 7 bp, Unknown
  misc_feature (1)..( 7): Matrix.005 file - promoters50/5663740
tatactt

SEQ ID NO: 74955 - DNA, 9 bp, Unknown
  misc_feature (1)..( 9): Matrix.005 file - promoters50/5663740
gtattatct

SEQ ID NO: 74956 - DNA, 10 bp, Unknown
  misc_feature (1)..( 10): Matrix.005 file - promoters50/5663740
ccattttgca

SEQ ID NO: 74957 - DNA, 8 bp, Unknown
  misc_feature (1)..( 8): Matrix.005 file - promoters50/5663740
tagatact

SEQ ID NO: 74958 - DNA, 6 bp, Unknown
  misc_feature (1)..( 6): Matrix.005 file - promoters50/5663740
ttaaat

SEQ ID NO: 74959 - DNA, 8 bp, Unknown
  misc_feature (1)..( 8): Matrix.005 file - promoters50/5663746
tatctatt

SEQ ID NO: 74960 - DNA, 9 bp, Unknown
  misc_feature (1)..( 9): Matrix.005 file - promoters50/5663748
aaaaaaata

SEQ ID NO: 74961 - DNA, 13 bp, Unknown
  misc_feature (1)..( 13): Matrix.005 file - promoters50/5663748
aaaaaaataaaaa

SEQ ID NO: 74962 - DNA, 8 bp, Unknown
  misc_feature (1)..( 8): Matrix.005 file - promoters50/5663752
aaattaac

SEQ ID NO: 74963 - DNA, 9 bp, Unknown
  misc_feature (1)..( 9): Matrix.005 file - promoters50/5663752
taatttaaa

SEQ ID NO: 74964 - DNA, 11 bp, Unknown
  misc_feature (1)..( 11): Matrix.005 file - promoters50/5663752
aagaaagaaaa

SEQ ID NO: 74965 - DNA, 12 bp, Unknown
  misc_feature (1)..( 12): Matrix.005 file - promoters50/5663752
aaaacaaaatag

SEQ ID NO: 74966 - DNA, 7 bp, Unknown
  misc_feature (1)..( 7): Matrix.005 file - promoters50/5663752
caaaaaa

SEQ ID NO: 74967 - DNA, 7 bp, Unknown
  misc_feature (1)..( 7): Matrix.005 file - promoters50/5663752
tctttta

SEQ ID NO: 74968 - DNA, 11 bp, Unknown
  misc_feature (1)..( 11): Matrix.005 file - promoters50/5663752
ttaataacaga

SEQ ID NO: 74969 - DNA, 12 bp, Unknown
  misc_feature (1)..( 12): Matrix.005 file - promoters50/5663752
aaaatcaatgca

SEQ ID NO: 74970 - DNA, 8 bp, Unknown
  misc_feature (1)..( 8): Matrix.005 file - promoters50/5663752
aaatttat

SEQ ID NO: 74971 - DNA, 8 bp, Unknown
  misc_feature (1)..( 8): Matrix.005 file - promoters50/5663752
tagaatgc

SEQ ID NO: 74972 - DNA, 12 bp, Unknown
  misc_feature (1)..( 12): Matrix.005 file - promoters50/5663752
aaaaacaaaaca

SEQ ID NO: 74973 - DNA, 9 bp, Unknown
  misc_feature (1)..( 9): Matrix.005 file - promoters50/5663752
gaatcttca

SEQ ID NO: 74974 - DNA, 8 bp, Unknown
  misc_feature (1)..( 8): Matrix.005 file - promoters50/5663758
ctaaaatt

SEQ ID NO: 74975 - DNA, 7 bp, Unknown
  misc_feature (1)..( 7): Matrix.005 file - promoters50/5663772
attgaat

SEQ ID NO: 74976 - DNA, 10 bp, Unknown
  misc_feature (1)..( 10): Matrix.005 file - promoters50/5663772
tggctttaag

SEQ ID NO: 74977 - DNA, 7 bp, Unknown
  misc_feature (1)..( 7): Matrix.005 file - promoters50/5663772
aaatcac

SEQ ID NO: 74978 - DNA, 6 bp, Unknown
  misc_feature (1)..( 6): Matrix.005 file - promoters50/5663774
ttttct

SEQ ID NO: 74979 - DNA, 8 bp, Unknown
  misc_feature (1)..( 8): Matrix.005 file - promoters50/5663774
aattttta

SEQ ID NO: 74980 - DNA, 11 bp, Unknown
  misc_feature (1)..( 11): Matrix.005 file - promoters50/5663774
aacaataaata

SEQ ID NO: 74981 - DNA, 15 bp, Unknown
  misc_feature (1)..( 15): Matrix.005 file - promoters50/5663774
agaaataaaacgaaa

SEQ ID NO: 74982 - DNA, 12 bp, Unknown
  misc_feature (1)..( 12): Matrix.005 file - promoters50/5663778
gaaatgtatgga

SEQ ID NO: 74983 - DNA, 11 bp, Unknown
  misc_feature (1)..( 11): Matrix.005 file - promoters50/5663778
tactaatgttt

SEQ ID NO: 74984 - DNA, 9 bp, Unknown
  misc_feature (1)..( 9): Matrix.005 file - promoters50/5663778
tgtttgatt

SEQ ID NO: 74985 - DNA, 10 bp, Unknown
  misc_feature (1)..( 10): Matrix.005 file - promoters50/5663778
atttaacctg

SEQ ID NO: 74986 - DNA, 10 bp, Unknown
  misc_feature (1)..( 10): Matrix.005 file - promoters50/5663785
aaaaataaaa

SEQ ID NO: 74987 - DNA, 10 bp, Unknown
  misc_feature (1)..( 10): Matrix.005 file - promoters50/5663785
attaaaaata

SEQ ID NO: 74988 - DNA, 10 bp, Unknown
  misc_feature (1)..( 10): Matrix.005 file - promoters50/5663785
aaacaaaaat

SEQ ID NO: 74989 - DNA, 12 bp, Unknown
  misc_feature (1)..( 12): Matrix.005 file - promoters50/5663785
tttaaactaaaa

SEQ ID NO: 74990 - DNA, 12 bp, Unknown
  misc_feature (1)..( 12): Matrix.005 file - promoters50/5663805
acttataatgga

SEQ ID NO: 74991 - DNA, 7 bp, Unknown
  misc_feature (1)..( 7): Matrix.005 file - promoters50/5663805
ataaaaa

SEQ ID NO: 74992 - DNA, 3 bp, Unknown
  misc_feature (1)..( 3): Matrix.005 file - promoters50/5663805
ttt

SEQ ID NO: 74993 - DNA, 9 bp, Unknown
  misc_feature (1)..( 9): Matrix.005 file - promoters50/5663805
tttaatgat

SEQ ID NO: 74994 - DNA, 10 bp, Unknown
  misc_feature (1)..( 10): Matrix.005 file - promoters50/5663805
ataaaaaata

SEQ ID NO: 74995 - DNA, 8 bp, Unknown
  misc_feature (1)..( 8): Matrix.005 file - promoters50/5663805
ataaaaaa

SEQ ID NO: 74996 - DNA, 11 bp, Unknown
  misc_feature (1)..( 11): Matrix.005 file - promoters50/5663805
tcaatcaaaag

SEQ ID NO: 74997 - DNA, 11 bp, Unknown
  misc_feature (1)..( 11): Matrix.005 file - promoters50/5663805
cgaatattaaa

SEQ ID NO: 74998 - DNA, 11 bp, Unknown
  misc_feature (1)..( 11): Matrix.005 file - promoters50/5663805
aaatatatatc

SEQ ID NO: 74999 - DNA, 7 bp, Unknown
  misc_feature (1)..( 7): Matrix.005 file - promoters50/5663841
taaaacg

SEQ ID NO: 75000 - DNA, 10 bp, Unknown
  misc_feature (1)..( 10): Matrix.005 file - promoters50/5663841
ttatttactt

SEQ ID NO: 75001 - DNA, 9 bp, Unknown
  misc_feature (1)..( 9): Matrix.005 file - promoters50/5663847
aaatctttt

SEQ ID NO: 75002 - DNA, 9 bp, Unknown
  misc_feature (1)..( 9): Matrix.005 file - promoters50/5663847
ttttaaata

SEQ ID NO: 75003 - DNA, 9 bp, Unknown
  misc_feature (1)..( 9): Matrix.005 file - promoters50/5663847
acattaaca

SEQ ID NO: 75004 - DNA, 6 bp, Unknown
  misc_feature (1)..( 6): Matrix.005 file - promoters50/5663847
atataa

SEQ ID NO: 75005 - DNA, 12 bp, Unknown
  misc_feature (1)..( 12): Matrix.005 file - promoters50/5663847
aaagattctttt

SEQ ID NO: 75006 - DNA, 9 bp, Unknown
  misc_feature (1)..( 9): Matrix.005 file - promoters50/5663847
tttcaaaaa

SEQ ID NO: 75007 - DNA, 8 bp, Unknown
  misc_feature (1)..( 8): Matrix.005 file - promoters50/5663847
aaataaaa

SEQ ID NO: 75008 - DNA, 8 bp, Unknown
  misc_feature (1)..( 8): Matrix.005 file - promoters50/5663847
atcctgta

SEQ ID NO: 75009 - DNA, 9 bp, Unknown
  misc_feature (1)..( 9): Matrix.005 file - promoters50/5663847
tttgtaaaa

SEQ ID NO: 75010 - DNA, 9 bp, Unknown
  misc_feature (1)..( 9): Matrix.005 file - promoters50/5663847
aaatatttt

SEQ ID NO: 75011 - DNA, 8 bp, Unknown
  misc_feature (1)..( 8): Matrix.005 file - promoters50/5663851
aaaatgtg

SEQ ID NO: 75012 - DNA, 12 bp, Unknown
  misc_feature (1)..( 12): Matrix.005 file - promoters50/5663862
aagatttgattg

SEQ ID NO: 75013 - DNA, 10 bp, Unknown
  misc_feature (1)..( 10): Matrix.005 file - promoters50/5663862
aattttttaa

SEQ ID NO: 75014 - DNA, 10 bp, Unknown
  misc_feature (1)..( 10): Matrix.005 file - promoters50/5663865
aaccaaacaa

SEQ ID NO: 75015 - DNA, 9 bp, Unknown
  misc_feature (1)..( 9): Matrix.005 file - promoters50/5663865
aattaacaa

SEQ ID NO: 75016 - DNA, 8 bp, Unknown
  misc_feature (1)..( 8): Matrix.005 file - promoters50/5663873
tttgttta

SEQ ID NO: 75017 - DNA, 7 bp, Unknown
  misc_feature (1)..( 7): Matrix.005 file - promoters50/5663873
gttttgt

SEQ ID NO: 75018 - DNA, 10 bp, Unknown
  misc_feature (1)..( 10): Matrix.005 file - promoters50/5663881
atgatgaatt

SEQ ID NO: 75019 - DNA, 10 bp, Unknown
  misc_feature (1)..( 10): Matrix.005 file - promoters50/5663884
gtatcataat

SEQ ID NO: 75020 - DNA, 7 bp, Unknown
  misc_feature (1)..( 7): Matrix.005 file - promoters50/5663895
taaatat

SEQ ID NO: 75021 - DNA, 7 bp, Unknown
  misc_feature (1)..( 7): Matrix.005 file - promoters50/5663895
attgttc

SEQ ID NO: 75022 - DNA, 9 bp, Unknown
  misc_feature (1)..( 9): Matrix.005 file - promoters50/5663895
tataattca

SEQ ID NO: 75023 - DNA, 15 bp, Unknown
  misc_feature (1)..( 15): Matrix.005 file - promoters50/5663895
gaatttttatttttt

SEQ ID NO: 75024 - DNA, 10 bp, Unknown
  misc_feature (1)..( 10): Matrix.005 file - promoters50/5663895
acaacaaaaa

SEQ ID NO: 75025 - DNA, 9 bp, Unknown
  misc_feature (1)..( 9): Matrix.005 file - promoters50/5663916
ctgatataa

SEQ ID NO: 75026 - DNA, 8 bp, Unknown
  misc_feature (1)..( 8): Matrix.005 file - promoters50/5663916
tttgacat

SEQ ID NO: 75027 - DNA, 12 bp, Unknown
  misc_feature (1)..( 12): Matrix.005 file - promoters50/5663928
aaacataatcgt

SEQ ID NO: 75028 - DNA, 7 bp, Unknown
  misc_feature (1)..( 7): Matrix.005 file - promoters50/5663928
gatgatt

SEQ ID NO: 75029 - DNA, 9 bp, Unknown
  misc_feature (1)..( 9): Matrix.005 file - promoters50/5663934
ataaataaa

SEQ ID NO: 75030 - DNA, 12 bp, Unknown
  misc_feature (1)..( 12): Matrix.005 file - promoters50/5663934
aaaaaaatttat

SEQ ID NO: 75031 - DNA, 11 bp, Unknown
  misc_feature (1)..( 11): Matrix.005 file - promoters50/5663934
ttaaattttgg

SEQ ID NO: 75032 - DNA, 7 bp, Unknown
  misc_feature (1)..( 7): Matrix.005 file - promoters50/5663934
aaaaaac

SEQ ID NO: 75033 - DNA, 10 bp, Unknown
  misc_feature (1)..( 10): Matrix.005 file - promoters50/5663934
attaattaaa

SEQ ID NO: 75034 - DNA, 9 bp, Unknown
  misc_feature (1)..( 9): Matrix.005 file - promoters50/5663934
gaaaaaata

SEQ ID NO: 75035 - DNA, 13 bp, Unknown
  misc_feature (1)..( 13): Matrix.005 file - promoters50/5663934
tgacataaaattt

SEQ ID NO: 75036 - DNA, 8 bp, Unknown
  misc_feature (1)..( 8): Matrix.005 file - promoters50/5663946
taaagaaa

SEQ ID NO: 75037 - DNA, 10 bp, Unknown
  misc_feature (1)..( 10): Matrix.005 file - promoters50/5663946
cttattcttt

SEQ ID NO: 75038 - DNA, 8 bp, Unknown
  misc_feature (1)..( 8): Matrix.005 file - promoters50/5663946
tttctttt

SEQ ID NO: 75039 - DNA, 11 bp, Unknown
  misc_feature (1)..( 11): Matrix.005 file - promoters50/5663946
aatttggtctt

SEQ ID NO: 75040 - DNA, 11 bp, Unknown
  misc_feature (1)..( 11): Matrix.005 file - promoters50/5663950
aaaagattgtt

SEQ ID NO: 75041 - DNA, 10 bp, Unknown
  misc_feature (1)..( 10): Matrix.005 file - promoters50/5663954
aatactgaga

SEQ ID NO: 75042 - DNA, 11 bp, Unknown
  misc_feature (1)..( 11): Matrix.005 file - promoters50/5663954
gatagttttta

SEQ ID NO: 75043 - DNA, 9 bp, Unknown
  misc_feature (1)..( 9): Matrix.005 file - promoters50/5663978
tggtaagat

SEQ ID NO: 75044 - DNA, 8 bp, Unknown
  misc_feature (1)..( 8): Matrix.005 file - promoters50/5663982
agaaaaga

SEQ ID NO: 75045 - DNA, 9 bp, Unknown
  misc_feature (1)..( 9): Matrix.005 file - promoters50/5663982
agaaaagaa

SEQ ID NO: 75046 - DNA, 9 bp, Unknown
  misc_feature (1)..( 9): Matrix.005 file - promoters50/5663982
tatggtgtt

SEQ ID NO: 75047 - DNA, 7 bp, Unknown
  misc_feature (1)..( 7): Matrix.005 file - promoters50/5663982
aaacata

SEQ ID NO: 75048 - DNA, 10 bp, Unknown
  misc_feature (1)..( 10): Matrix.005 file - promoters50/5663985
cattttggtt

SEQ ID NO: 75049 - DNA, 9 bp, Unknown
  misc_feature (1)..( 9): Matrix.005 file - promoters50/5663985
aattttatt

SEQ ID NO: 75050 - DNA, 9 bp, Unknown
  misc_feature (1)..( 9): Matrix.005 file - promoters50/5663985
gatttatta

SEQ ID NO: 75051 - DNA, 14 bp, Unknown
  misc_feature (1)..( 14): Matrix.005 file - promoters50/5663996
atttatgaatcaac

SEQ ID NO: 75052 - DNA, 10 bp, Unknown
  misc_feature (1)..( 10): Matrix.005 file - promoters50/5663996
taacaaatta

SEQ ID NO: 75053 - DNA, 14 bp, Unknown
  misc_feature (1)..( 14): Matrix.005 file - promoters50/5663996
ctgaatcaaaattt

SEQ ID NO: 75054 - DNA, 8 bp, Unknown
  misc_feature (1)..( 8): Matrix.005 file - promoters50/5664022
accaaaaa

SEQ ID NO: 75055 - DNA, 8 bp, Unknown
  misc_feature (1)..( 8): Matrix.005 file - promoters50/5664049
tcttcttc

SEQ ID NO: 75056 - DNA, 7 bp, Unknown
  misc_feature (1)..( 7): Matrix.005 file - promoters50/5664060
aaacaaa

SEQ ID NO: 75057 - DNA, 8 bp, Unknown
  misc_feature (1)..( 8): Matrix.005 file - promoters50/5664072
ctctattt

SEQ ID NO: 75058 - DNA, 8 bp, Unknown
  misc_feature (1)..( 8): Matrix.005 file - promoters50/5664080
tgaagaaa

SEQ ID NO: 75059 - DNA, 13 bp, Unknown
  misc_feature (1)..( 13): Matrix.005 file - promoters50/5664080
gaaactttaagac

SEQ ID NO: 75060 - DNA, 9 bp, Unknown
  misc_feature (1)..( 9): Matrix.005 file - promoters50/5664080
acatcaatt

SEQ ID NO: 75061 - DNA, 11 bp, Unknown
  misc_feature (1)..( 11): Matrix.005 file - promoters50/5664080
agacatctatt

SEQ ID NO: 75062 - DNA, 10 bp, Unknown
  misc_feature (1)..( 10): Matrix.005 file - promoters50/5664080
cttcaaaatt

SEQ ID NO: 75063 - DNA, 8 bp, Unknown
  misc_feature (1)..( 8): Matrix.005 file - promoters50/5664084
aaagttaa

SEQ ID NO: 75064 - DNA, 10 bp, Unknown
  misc_feature (1)..( 10): Matrix.005 file - promoters50/5664084
ttttaatttt

SEQ ID NO: 75065 - DNA, 9 bp, Unknown
  misc_feature (1)..( 9): Matrix.005 file - promoters50/5664084
tccaaaaaa

SEQ ID NO: 75066 - DNA, 10 bp, Unknown
  misc_feature (1)..( 10): Matrix.005 file - promoters50/5664084
atcaaatgga

SEQ ID NO: 75067 - DNA, 6 bp, Unknown
  misc_feature (1)..( 6): Matrix.005 file - promoters50/5664084
atataa

SEQ ID NO: 75068 - DNA, 8 bp, Unknown
  misc_feature (1)..( 8): Matrix.005 file - promoters50/5664084
tgtatctt

SEQ ID NO: 75069 - DNA, 9 bp, Unknown
  misc_feature (1)..( 9): Matrix.005 file - promoters50/5664088
gtagaaaaa

SEQ ID NO: 75070 - DNA, 11 bp, Unknown
  misc_feature (1)..( 11): Matrix.005 file - promoters50/5664088
gcatcaattaa

SEQ ID NO: 75071 - DNA, 11 bp, Unknown
  misc_feature (1)..( 11): Matrix.005 file - promoters50/5664088
gaaaaataata

SEQ ID NO: 75072 - DNA, 7 bp, Unknown
  misc_feature (1)..( 7): Matrix.005 file - promoters50/5664088
gaaatat

SEQ ID NO: 75073 - DNA, 9 bp, Unknown
  misc_feature (1)..( 9): Matrix.005 file - promoters50/5664092
taatttgaa

SEQ ID NO: 75074 - DNA, 8 bp, Unknown
  misc_feature (1)..( 8): Matrix.005 file - promoters50/5664092
gaataaag

SEQ ID NO: 75075 - DNA, 7 bp, Unknown
  misc_feature (1)..( 7): Matrix.005 file - promoters50/5664095
agtaatt

SEQ ID NO: 75076 - DNA, 8 bp, Unknown
  misc_feature (1)..( 8): Matrix.005 file - promoters50/5664115
aaactaaa

SEQ ID NO: 75077 - DNA, 9 bp, Unknown
  misc_feature (1)..( 9): Matrix.005 file - promoters50/5664115
caaaaatta

SEQ ID NO: 75078 - DNA, 9 bp, Unknown
  misc_feature (1)..( 9): Matrix.005 file - promoters50/5664115
tatctcatt

SEQ ID NO: 75079 - DNA, 13 bp, Unknown
  misc_feature (1)..( 13): Matrix.005 file - promoters50/5664115
caaaaaaagaaaa

SEQ ID NO: 75080 - DNA, 11 bp, Unknown
  misc_feature (1)..( 11): Matrix.005 file - promoters50/5664115
ttaataaaacc

SEQ ID NO: 75081 - DNA, 7 bp, Unknown
  misc_feature (1)..( 7): Matrix.005 file - promoters50/5664115
atataaa

SEQ ID NO: 75082 - DNA, 7 bp, Unknown
  misc_feature (1)..( 7): Matrix.005 file - promoters50/5664126
attctac

SEQ ID NO: 75083 - DNA, 7 bp, Unknown
  misc_feature (1)..( 7): Matrix.005 file - promoters50/5664126
gaaaatc

SEQ ID NO: 75084 - DNA, 14 bp, Unknown
  misc_feature (1)..( 14): Matrix.005 file - promoters50/5664126
taattcagaaaaat

SEQ ID NO: 75085 - DNA, 8 bp, Unknown
  misc_feature (1)..( 8): Matrix.005 file - promoters50/5664126
aatataaa

SEQ ID NO: 75086 - DNA, 7 bp, Unknown
  misc_feature (1)..( 7): Matrix.005 file - promoters50/5664126
aaaattc

SEQ ID NO: 75087 - DNA, 8 bp, Unknown
  misc_feature (1)..( 8): Matrix.005 file - promoters50/5664126
aacagaaa

SEQ ID NO: 75088 - DNA, 7 bp, Unknown
  misc_feature (1)..( 7): Matrix.005 file - promoters50/5664126
tttattt

SEQ ID NO: 75089 - DNA, 8 bp, Unknown
  misc_feature (1)..( 8): Matrix.005 file - promoters50/5664126
taatttgt

SEQ ID NO: 75090 - DNA, 16 bp, Unknown
  misc_feature (1)..( 16): Matrix.005 file - promoters50/5664126
gttcggttcggtttac

SEQ ID NO: 75091 - DNA, 9 bp, Unknown
  misc_feature (1)..( 9): Matrix.005 file - promoters50/5664126
aaaatatat

SEQ ID NO: 75092 - DNA, 10 bp, Unknown
  misc_feature (1)..( 10): Matrix.005 file - promoters50/5664133
aaacataatt

SEQ ID NO: 75093 - DNA, 9 bp, Unknown
  misc_feature (1)..( 9): Matrix.005 file - promoters50/5664133
ataaacatg

SEQ ID NO: 75094 - DNA, 8 bp, Unknown
  misc_feature (1)..( 8): Matrix.005 file - promoters50/5664133
caaacaaa

SEQ ID NO: 75095 - DNA, 7 bp, Unknown
  misc_feature (1)..( 7): Matrix.005 file - promoters50/5664133
caaacat

SEQ ID NO: 75096 - DNA, 7 bp, Unknown
  misc_feature (1)..( 7): Matrix.005 file - promoters50/5664133
tcacaaa

SEQ ID NO: 75097 - DNA, 9 bp, Unknown
  misc_feature (1)..( 9): Matrix.005 file - promoters50/5664133
aattaagtt

SEQ ID NO: 75098 - DNA, 8 bp, Unknown
  misc_feature (1)..( 8): Matrix.005 file - promoters50/5664133
cacaaaac

SEQ ID NO: 75099 - DNA, 9 bp, Unknown
  misc_feature (1)..( 9): Matrix.005 file - promoters50/5664141
tgatttgtt

SEQ ID NO: 75100 - DNA, 14 bp, Unknown
  misc_feature (1)..( 14): Matrix.005 file - promoters50/5664141
aagcttttaagaaa

SEQ ID NO: 75101 - DNA, 11 bp, Unknown
  misc_feature (1)..( 11): Matrix.005 file - promoters50/5664141
ttataaaaaca

SEQ ID NO: 75102 - DNA, 9 bp, Unknown
  misc_feature (1)..( 9): Matrix.005 file - promoters50/5664141
tcaaaaaaa

SEQ ID NO: 75103 - DNA, 8 bp, Unknown
  misc_feature (1)..( 8): Matrix.005 file - promoters50/5664149
ttatgtac

SEQ ID NO: 75104 - DNA, 7 bp, Unknown
  misc_feature (1)..( 7): Matrix.005 file - promoters50/5664149
ataatac

SEQ ID NO: 75105 - DNA, 10 bp, Unknown
  misc_feature (1)..( 10): Matrix.005 file - promoters50/5664149
taatacaatc

SEQ ID NO: 75106 - DNA, 10 bp, Unknown
  misc_feature (1)..( 10): Matrix.005 file - promoters50/5664153
atgtttcaaa

SEQ ID NO: 75107 - DNA, 8 bp, Unknown
  misc_feature (1)..( 8): Matrix.005 file - promoters50/5664153
ataataaa

SEQ ID NO: 75108 - DNA, 10 bp, Unknown
  misc_feature (1)..( 10): Matrix.005 file - promoters50/5664174
atccaatgta

SEQ ID NO: 75109 - DNA, 11 bp, Unknown
  misc_feature (1)..( 11): Matrix.005 file - promoters50/5664174
aattaaaaaac

SEQ ID NO: 75110 - DNA, 12 bp, Unknown
  misc_feature (1)..( 12): Matrix.005 file - promoters50/5664174
atcaaatgtaac

SEQ ID NO: 75111 - DNA, 8 bp, Unknown
  misc_feature (1)..( 8): Matrix.005 file - promoters50/5664174
ttttgatt

SEQ ID NO: 75112 - DNA, 9 bp, Unknown
  misc_feature (1)..( 9): Matrix.005 file - promoters50/5664178
tttatatat

SEQ ID NO: 75113 - DNA, 8 bp, Unknown
  misc_feature (1)..( 8): Matrix.005 file - promoters50/5664178
taaaagaa

SEQ ID NO: 75114 - DNA, 10 bp, Unknown
  misc_feature (1)..( 10): Matrix.005 file - promoters50/5664178
aaaaacaaaa

SEQ ID NO: 75115 - DNA, 9 bp, Unknown
  misc_feature (1)..( 9): Matrix.005 file - promoters50/5664178
ttatttata

SEQ ID NO: 75116 - DNA, 10 bp, Unknown
  misc_feature (1)..( 10): Matrix.005 file - promoters50/5664178
aagaggattg

SEQ ID NO: 75117 - DNA, 8 bp, Unknown
  misc_feature (1)..( 8): Matrix.005 file - promoters50/5664178
aaaaagag

SEQ ID NO: 75118 - DNA, 8 bp, Unknown
  misc_feature (1)..( 8): Matrix.005 file - promoters50/5664186
ttcttcgt

SEQ ID NO: 75119 - DNA, 9 bp, Unknown
  misc_feature (1)..( 9): Matrix.005 file - promoters50/5664186
ctctccacc

SEQ ID NO: 75120 - DNA, 6 bp, Unknown
  misc_feature (1)..( 6): Matrix.005 file - promoters50/5664186
attctt

SEQ ID NO: 75121 - DNA, 8 bp, Unknown
  misc_feature (1)..( 8): Matrix.005 file - promoters50/5664186
taaacatt

SEQ ID NO: 75122 - DNA, 7 bp, Unknown
  misc_feature (1)..( 7): Matrix.005 file - promoters50/5664209
aagtaaa

SEQ ID NO: 75123 - DNA, 10 bp, Unknown
  misc_feature (1)..( 10): Matrix.005 file - promoters50/5664209
aaataaaata

SEQ ID NO: 75124 - DNA, 8 bp, Unknown
  misc_feature (1)..( 8): Matrix.005 file - promoters50/5664209
agaataat

SEQ ID NO: 75125 - DNA, 5 bp, Unknown
  misc_feature (1)..( 5): Matrix.005 file - promoters50/5664216
atttg

SEQ ID NO: 75126 - DNA, 10 bp, Unknown
  misc_feature (1)..( 10): Matrix.005 file - promoters50/5664216
atataaatac

SEQ ID NO: 75127 - DNA, 5 bp, Unknown
  misc_feature (1)..( 5): Matrix.005 file - promoters50/5664216
tgttt

SEQ ID NO: 75128 - DNA, 12 bp, Unknown
  misc_feature (1)..( 12): Matrix.005 file - promoters50/5664222
tcaattcatttt

SEQ ID NO: 75129 - DNA, 10 bp, Unknown
  misc_feature (1)..( 10): Matrix.005 file - promoters50/5664263
actagattct

SEQ ID NO: 75130 - DNA, 10 bp, Unknown
  misc_feature (1)..( 10): Matrix.005 file - promoters50/5664263
actagattct

SEQ ID NO: 75131 - DNA, 9 bp, Unknown
  misc_feature (1)..( 9): Matrix.005 file - promoters50/5664263
atgtttaag

SEQ ID NO: 75132 - DNA, 14 bp, Unknown
  misc_feature (1)..( 14): Matrix.005 file - promoters50/5664263
caattgattaaagt

SEQ ID NO: 75133 - DNA, 12 bp, Unknown
  misc_feature (1)..( 12): Matrix.005 file - promoters50/5664265
atggtttgaata

SEQ ID NO: 75134 - DNA, 10 bp, Unknown
  misc_feature (1)..( 10): Matrix.005 file - promoters50/5664265
aaagaaattg

SEQ ID NO: 75135 - DNA, 7 bp, Unknown
  misc_feature (1)..( 7): Matrix.005 file - promoters50/5664265
aaaaagt

SEQ ID NO: 75136 - DNA, 12 bp, Unknown
  misc_feature (1)..( 12): Matrix.005 file - promoters50/5664268
aattttactaac

SEQ ID NO: 75137 - DNA, 8 bp, Unknown
  misc_feature (1)..( 8): Matrix.005 file - promoters50/5664272
ttttgatt

SEQ ID NO: 75138 - DNA, 9 bp, Unknown
  misc_feature (1)..( 9): Matrix.005 file - promoters50/5664274
tttgagctt

SEQ ID NO: 75139 - DNA, 8 bp, Unknown
  misc_feature (1)..( 8): Matrix.005 file - promoters50/5664274
agtttctt

SEQ ID NO: 75140 - DNA, 8 bp, Unknown
  misc_feature (1)..( 8): Matrix.005 file - promoters50/5664274
aaaaaaat

SEQ ID NO: 75141 - DNA, 8 bp, Unknown
  misc_feature (1)..( 8): Matrix.005 file - promoters50/5664294
aaaatcga

SEQ ID NO: 75142 - DNA, 8 bp, Unknown
  misc_feature (1)..( 8): Matrix.005 file - promoters50/5664294
gataaaaa

SEQ ID NO: 75143 - DNA, 10 bp, Unknown
  misc_feature (1)..( 10): Matrix.005 file - promoters50/5664294
actttataat

SEQ ID NO: 75144 - DNA, 7 bp, Unknown
  misc_feature (1)..( 7): Matrix.005 file - promoters50/5664302
attaaaa

SEQ ID NO: 75145 - DNA, 8 bp, Unknown
  misc_feature (1)..( 8): Matrix.005 file - promoters50/5664302
aaaatcta

SEQ ID NO: 75146 - DNA, 10 bp, Unknown
  misc_feature (1)..( 10): Matrix.005 file - promoters50/5664302
aaattcaaaa

SEQ ID NO: 75147 - DNA, 9 bp, Unknown
  misc_feature (1)..( 9): Matrix.005 file - promoters50/5664302
aatcataaa

SEQ ID NO: 75148 - DNA, 10 bp, Unknown
  misc_feature (1)..( 10): Matrix.005 file - promoters50/5664302
caataattca

SEQ ID NO: 75149 - DNA, 6 bp, Unknown
  misc_feature (1)..( 6): Matrix.005 file - promoters50/5664302
aaaatc

SEQ ID NO: 75150 - DNA, 7 bp, Unknown
  misc_feature (1)..( 7): Matrix.005 file - promoters50/5664311
tgctttg

SEQ ID NO: 75151 - DNA, 9 bp, Unknown
  misc_feature (1)..( 9): Matrix.005 file - promoters50/5664318
ataagtaaa

SEQ ID NO: 75152 - DNA, 9 bp, Unknown
  misc_feature (1)..( 9): Matrix.005 file - promoters50/5664318
atttaaatt

SEQ ID NO: 75153 - DNA, 6 bp, Unknown
  misc_feature (1)..( 6): Matrix.005 file - promoters50/5664318
tttgaa

SEQ ID NO: 75154 - DNA, 10 bp, Unknown
  misc_feature (1)..( 10): Matrix.005 file - promoters50/5664318
ttaaattgta

SEQ ID NO: 75155 - DNA, 4 bp, Unknown
  misc_feature (1)..( 4): Matrix.005 file - promoters50/5664318
ttta

SEQ ID NO: 75156 - DNA, 11 bp, Unknown
  misc_feature (1)..( 11): Matrix.005 file - promoters50/5664318
aaaacgtaatg

SEQ ID NO: 75157 - DNA, 14 bp, Unknown
  misc_feature (1)..( 14): Matrix.005 file - promoters50/5664318
aaatcaaaattgaa

SEQ ID NO: 75158 - DNA, 9 bp, Unknown
  misc_feature (1)..( 9): Matrix.005 file - promoters50/5664318
tgtgtttgt

SEQ ID NO: 75159 - DNA, 7 bp, Unknown
  misc_feature (1)..( 7): Matrix.005 file - promoters50/5664329
aaataag

SEQ ID NO: 75160 - DNA, 9 bp, Unknown
  misc_feature (1)..( 9): Matrix.005 file - promoters50/5664337
gatatgttt

SEQ ID NO: 75161 - DNA, 7 bp, Unknown
  misc_feature (1)..( 7): Matrix.005 file - promoters50/5664337
aaatgtc

SEQ ID NO: 75162 - DNA, 7 bp, Unknown
  misc_feature (1)..( 7): Matrix.005 file - promoters50/5664337
aaaatcc

SEQ ID NO: 75163 - DNA, 8 bp, Unknown
  misc_feature (1)..( 8): Matrix.005 file - promoters50/5664341
ttattccc

SEQ ID NO: 75164 - DNA, 8 bp, Unknown
  misc_feature (1)..( 8): Matrix.005 file - promoters50/5664341
tgtttttc

SEQ ID NO: 75165 - DNA, 7 bp, Unknown
  misc_feature (1)..( 7): Matrix.005 file - promoters50/5664345
taaaatg

SEQ ID NO: 75166 - DNA, 11 bp, Unknown
  misc_feature (1)..( 11): Matrix.005 file - promoters50/5664352
taaaatctttt

SEQ ID NO: 75167 - DNA, 12 bp, Unknown
  misc_feature (1)..( 12): Matrix.005 file - promoters50/5664352
aatctctttcta

SEQ ID NO: 75168 - DNA, 7 bp, Unknown
  misc_feature (1)..( 7): Matrix.005 file - promoters50/5664352
gcataga

SEQ ID NO: 75169 - DNA, 4 bp, Unknown
  misc_feature (1)..( 4): Matrix.005 file - promoters50/5664362
ttgt

SEQ ID NO: 75170 - DNA, 10 bp, Unknown
  misc_feature (1)..( 10): Matrix.005 file - promoters50/5664362
aaatatatat

SEQ ID NO: 75171 - DNA, 10 bp, Unknown
  misc_feature (1)..( 10): Matrix.005 file - promoters50/5664362
agaaaaataa

SEQ ID NO: 75172 - DNA, 8 bp, Unknown
  misc_feature (1)..( 8): Matrix.005 file - promoters50/5664369
aataatta

SEQ ID NO: 75173 - DNA, 11 bp, Unknown
  misc_feature (1)..( 11): Matrix.005 file - promoters50/5664369
caaaaaacttg

SEQ ID NO: 75174 - DNA, 7 bp, Unknown
  misc_feature (1)..( 7): Matrix.005 file - promoters50/5664369
aattttt

SEQ ID NO: 75175 - DNA, 7 bp, Unknown
  misc_feature (1)..( 7): Matrix.005 file - promoters50/5664369
tatgaaa

SEQ ID NO: 75176 - DNA, 7 bp, Unknown
  misc_feature (1)..( 7): Matrix.005 file - promoters50/5664390
aattaca

SEQ ID NO: 75177 - DNA, 9 bp, Unknown
  misc_feature (1)..( 9): Matrix.005 file - promoters50/5664390
ttatttact

SEQ ID NO: 75178 - DNA, 13 bp, Unknown
  misc_feature (1)..( 13): Matrix.005 file - promoters50/5664390
acttaattacaaa

SEQ ID NO: 75179 - DNA, 7 bp, Unknown
  misc_feature (1)..( 7): Matrix.005 file - promoters50/5664402
ttatgaa

SEQ ID NO: 75180 - DNA, 10 bp, Unknown
  misc_feature (1)..( 10): Matrix.005 file - promoters50/5664402
ttaatgaaaa

SEQ ID NO: 75181 - DNA, 8 bp, Unknown
  misc_feature (1)..( 8): Matrix.005 file - promoters50/5664435
tttaatta

SEQ ID NO: 75182 - DNA, 12 bp, Unknown
  misc_feature (1)..( 12): Matrix.005 file - promoters50/5664435
acaattttactg

SEQ ID NO: 75183 - DNA, 9 bp, Unknown
  misc_feature (1)..( 9): Matrix.005 file - promoters50/5664435
aattttggt

SEQ ID NO: 75184 - DNA, 12 bp, Unknown
  misc_feature (1)..( 12): Matrix.005 file - promoters50/5664435
tataaagaaaaa

SEQ ID NO: 75185 - DNA, 11 bp, Unknown
  misc_feature (1)..( 11): Matrix.005 file - promoters50/5664435
gtaaatttatt

SEQ ID NO: 75186 - DNA, 8 bp, Unknown
  misc_feature (1)..( 8): Matrix.005 file - promoters50/5664438
ttataata

SEQ ID NO: 75187 - DNA, 8 bp, Unknown
  misc_feature (1)..( 8): Matrix.005 file - promoters50/5664438
aattcttt

SEQ ID NO: 75188 - DNA, 11 bp, Unknown
  misc_feature (1)..( 11): Matrix.005 file - promoters50/5664438
taaaaaatatc

SEQ ID NO: 75189 - DNA, 8 bp, Unknown
  misc_feature (1)..( 8): Matrix.005 file - promoters50/5664457
acaataaa

SEQ ID NO: 75190 - DNA, 9 bp, Unknown
  misc_feature (1)..( 9): Matrix.005 file - promoters50/5664472
tattatttt

SEQ ID NO: 75191 - DNA, 11 bp, Unknown
  misc_feature (1)..( 11): Matrix.005 file - promoters50/5664472
attttgctatt

SEQ ID NO: 75192 - DNA, 11 bp, Unknown
  misc_feature (1)..( 11): Matrix.005 file - promoters50/5664480
tgtttatgtga

SEQ ID NO: 75193 - DNA, 13 bp, Unknown
  misc_feature (1)..( 13): Matrix.005 file - promoters50/5664480
gttaaaatgaaga

SEQ ID NO: 75194 - DNA, 9 bp, Unknown
  misc_feature (1)..( 9): Matrix.005 file - promoters50/5664480
gcttataaa

SEQ ID NO: 75195 - DNA, 14 bp, Unknown
  misc_feature (1)..( 14): Matrix.005 file - promoters50/5664488
ataagtatatgaga

SEQ ID NO: 75196 - DNA, 8 bp, Unknown
  misc_feature (1)..( 8): Matrix.005 file - promoters50/5664505
attatccg

SEQ ID NO: 75197 - DNA, 13 bp, Unknown
  misc_feature (1)..( 13): Matrix.005 file - promoters50/5664535
aaaattgattaat

SEQ ID NO: 75198 - DNA, 9 bp, Unknown
  misc_feature (1)..( 9): Matrix.005 file - promoters50/5664535
taaaaacta

SEQ ID NO: 75199 - DNA, 8 bp, Unknown
  misc_feature (1)..( 8): Matrix.005 file - promoters50/5664535
aataaacc

SEQ ID NO: 75200 - DNA, 9 bp, Unknown
  misc_feature (1)..( 9): Matrix.005 file - promoters50/5664535
ggtttaaac

SEQ ID NO: 75201 - DNA, 8 bp, Unknown
  misc_feature (1)..( 8): Matrix.005 file - promoters50/5664535
tataaata

SEQ ID NO: 75202 - DNA, 7 bp, Unknown
  misc_feature (1)..( 7): Matrix.005 file - promoters50/5664633
tatttta

SEQ ID NO: 75203 - DNA, 10 bp, Unknown
  misc_feature (1)..( 10): Matrix.005 file - promoters50/5664633
tattttttta

SEQ ID NO: 75204 - DNA, 14 bp, Unknown
  misc_feature (1)..( 14): Matrix.005 file - promoters50/5664633
tccgatttcttttt

SEQ ID NO: 75205 - DNA, 8 bp, Unknown
  misc_feature (1)..( 8): Matrix.005 file - promoters50/5664633
aaaattaa

SEQ ID NO: 75206 - DNA, 7 bp, Unknown
  misc_feature (1)..( 7): Matrix.005 file - promoters50/5664633
ttgaatt

SEQ ID NO: 75207 - DNA, 10 bp, Unknown
  misc_feature (1)..( 10): Matrix.005 file - promoters50/5664633
aaaaaaatta

SEQ ID NO: 75208 - DNA, 9 bp, Unknown
  misc_feature (1)..( 9): Matrix.005 file - promoters50/5664633
cgatttctt

SEQ ID NO: 75209 - DNA, 5 bp, Unknown
  misc_feature (1)..( 5): Matrix.005 file - promoters50/5664657
taaaa

SEQ ID NO: 75210 - DNA, 8 bp, Unknown
  misc_feature (1)..( 8): Matrix.005 file - promoters50/5664657
tttttgtt

SEQ ID NO: 75211 - DNA, 8 bp, Unknown
  misc_feature (1)..( 8): Matrix.005 file - promoters50/5664657
ctttaaaa

SEQ ID NO: 75212 - DNA, 9 bp, Unknown
  misc_feature (1)..( 9): Matrix.005 file - promoters50/5664703
tttgtatat

SEQ ID NO: 75213 - DNA, 8 bp, Unknown
  misc_feature (1)..( 8): Matrix.005 file - promoters50/5664703
tctgaatt

SEQ ID NO: 75214 - DNA, 12 bp, Unknown
  misc_feature (1)..( 12): Matrix.005 file - promoters50/5664703
ctttttgtatat

SEQ ID NO: 75215 - DNA, 7 bp, Unknown
  misc_feature (1)..( 7): Matrix.005 file - promoters50/5664721
taataat

SEQ ID NO: 75216 - DNA, 9 bp, Unknown
  misc_feature (1)..( 9): Matrix.005 file - promoters50/5664749
attacttac

SEQ ID NO: 75217 - DNA, 11 bp, Unknown
  misc_feature (1)..( 11): Matrix.005 file - promoters50/5664749
tttactcaatc

SEQ ID NO: 75218 - DNA, 7 bp, Unknown
  misc_feature (1)..( 7): Matrix.005 file - promoters50/5664749
attctct

SEQ ID NO: 75219 - DNA, 11 bp, Unknown
  misc_feature (1)..( 11): Matrix.005 file - promoters50/5664787
atataaattaa

SEQ ID NO: 75220 - DNA, 13 bp, Unknown
  misc_feature (1)..( 13): Matrix.005 file - promoters50/5664787
aaattaaaaaggt

SEQ ID NO: 75221 - DNA, 10 bp, Unknown
  misc_feature (1)..( 10): Matrix.005 file - promoters50/5664806
aaagaaagga

SEQ ID NO: 75222 - DNA, 11 bp, Unknown
  misc_feature (1)..( 11): Matrix.005 file - promoters50/5664806
accaagaaaac

SEQ ID NO: 75223 - DNA, 11 bp, Unknown
  misc_feature (1)..( 11): Matrix.005 file - promoters50/5664806
tcttatttttt

SEQ ID NO: 75224 - DNA, 10 bp, Unknown
  misc_feature (1)..( 10): Matrix.005 file - promoters50/5664806
tataattaat

SEQ ID NO: 75225 - DNA, 8 bp, Unknown
  misc_feature (1)..( 8): Matrix.005 file - promoters50/5664806
tcatgaaa

SEQ ID NO: 75226 - DNA, 7 bp, Unknown
  misc_feature (1)..( 7): Matrix.005 file - promoters50/5664814
aataaaa

SEQ ID NO: 75227 - DNA, 11 bp, Unknown
  misc_feature (1)..( 11): Matrix.005 file - promoters50/5664814
attattttact

SEQ ID NO: 75228 - DNA, 8 bp, Unknown
  misc_feature (1)..( 8): Matrix.005 file - promoters50/5664865
ggattaaa

SEQ ID NO: 75229 - DNA, 7 bp, Unknown
  misc_feature (1)..( 7): Matrix.005 file - promoters50/5664869
aatattt

SEQ ID NO: 75230 - DNA, 8 bp, Unknown
  misc_feature (1)..( 8): Matrix.005 file - promoters50/5664869
aacagaaa

SEQ ID NO: 75231 - DNA, 7 bp, Unknown
  misc_feature (1)..( 7): Matrix.005 file - promoters50/5664873
aaaaata

SEQ ID NO: 75232 - DNA, 12 bp, Unknown
  misc_feature (1)..( 12): Matrix.005 file - promoters50/5664873
tcctatatataa

SEQ ID NO: 75233 - DNA, 15 bp, Unknown
  misc_feature (1)..( 15): Matrix.005 file - promoters50/5664873
tttaaaaaacgtcga

SEQ ID NO: 75234 - DNA, 9 bp, Unknown
  misc_feature (1)..( 9): Matrix.005 file - promoters50/5664893
aattccata

SEQ ID NO: 75235 - DNA, 6 bp, Unknown
  misc_feature (1)..( 6): Matrix.005 file - promoters50/5664942
aaaatc

SEQ ID NO: 75236 - DNA, 9 bp, Unknown
  misc_feature (1)..( 9): Matrix.005 file - promoters50/5664942
ctcaactta

SEQ ID NO: 75237 - DNA, 11 bp, Unknown
  misc_feature (1)..( 11): Matrix.005 file - promoters50/5665027
ctccttataaa

SEQ ID NO: 75238 - DNA, 9 bp, Unknown
  misc_feature (1)..( 9): Matrix.005 file - promoters50/5665027
tttattctt

SEQ ID NO: 75239 - DNA, 8 bp, Unknown
  misc_feature (1)..( 8): Matrix.005 file - promoters50/5665027
ttttctta

SEQ ID NO: 75240 - DNA, 13 bp, Unknown
  misc_feature (1)..( 13): Matrix.005 file - promoters50/5665027
aaaccaaaatttt

SEQ ID NO: 75241 - DNA, 9 bp, Unknown
  misc_feature (1)..( 9): Matrix.005 file - promoters50/5665071
ttaatcaat

SEQ ID NO: 75242 - DNA, 9 bp, Unknown
  misc_feature (1)..( 9): Matrix.005 file - promoters50/5665071
gattaagct

SEQ ID NO: 75243 - DNA, 16 bp, Unknown
  misc_feature (1)..( 16): Matrix.005 file - promoters50/5665071
caaaaactcaagattt

SEQ ID NO: 75244 - DNA, 7 bp, Unknown
  misc_feature (1)..( 7): Matrix.005 file - promoters50/5665083
gttttta

SEQ ID NO: 75245 - DNA, 8 bp, Unknown
  misc_feature (1)..( 8): Matrix.005 file - promoters50/5665087
tcaaaatc

SEQ ID NO: 75246 - DNA, 6 bp, Unknown
  misc_feature (1)..( 6): Matrix.005 file - promoters50/5665087
aaaact

SEQ ID NO: 75247 - DNA, 7 bp, Unknown
  misc_feature (1)..( 7): Matrix.005 file - promoters50/5665087
ttttgtt

SEQ ID NO: 75248 - DNA, 13 bp, Unknown
  misc_feature (1)..( 13): Matrix.005 file - promoters50/5665140
gagtattttcaaa

SEQ ID NO: 75249 - DNA, 14 bp, Unknown
  misc_feature (1)..( 14): Matrix.005 file - promoters50/5665140
gaaactttaattaa

SEQ ID NO: 75250 - DNA, 11 bp, Unknown
  misc_feature (1)..( 11): Matrix.005 file - promoters50/5665140
attaaatgtta

SEQ ID NO: 75251 - DNA, 8 bp, Unknown
  misc_feature (1)..( 8): Matrix.005 file - promoters50/5665199
aaaaaata

SEQ ID NO: 75252 - DNA, 8 bp, Unknown
  misc_feature (1)..( 8): Matrix.005 file - promoters50/5665199
actcaaaa

SEQ ID NO: 75253 - DNA, 9 bp, Unknown
  misc_feature (1)..( 9): Matrix.005 file - promoters50/5665199
aacaaaata

SEQ ID NO: 75254 - DNA, 8 bp, Unknown
  misc_feature (1)..( 8): Matrix.005 file - promoters50/5665199
tggcccaa

SEQ ID NO: 75255 - DNA, 7 bp, Unknown
  misc_feature (1)..( 7): Matrix.005 file - promoters50/5665260
tgaatta

SEQ ID NO: 75256 - DNA, 7 bp, Unknown
  misc_feature (1)..( 7): Matrix.005 file - promoters50/5665260
gaagata

SEQ ID NO: 75257 - DNA, 11 bp, Unknown
  misc_feature (1)..( 11): Matrix.005 file - promoters50/5665279
actatagtttc

SEQ ID NO: 75258 - DNA, 10 bp, Unknown
  misc_feature (1)..( 10): Matrix.005 file - promoters50/5665279
ttattctttg

SEQ ID NO: 75259 - DNA, 4 bp, Unknown
  misc_feature (1)..( 4): Matrix.005 file - promoters50/5665283
attg

SEQ ID NO: 75260 - DNA, 9 bp, Unknown
  misc_feature (1)..( 9): Matrix.005 file - promoters50/5665283
attaatatt

SEQ ID NO: 75261 - DNA, 8 bp, Unknown
  misc_feature (1)..( 8): Matrix.005 file - promoters50/5665306
gaaacgaa

SEQ ID NO: 75262 - DNA, 10 bp, Unknown
  misc_feature (1)..( 10): Matrix.005 file - promoters50/5665306
attcgttttg

SEQ ID NO: 75263 - DNA, 8 bp, Unknown
  misc_feature (1)..( 8): Matrix.005 file - promoters50/5665314
taaaggag

SEQ ID NO: 75264 - DNA, 8 bp, Unknown
  misc_feature (1)..( 8): Matrix.005 file - promoters50/5665314
ttttgagt

SEQ ID NO: 75265 - DNA, 10 bp, Unknown
  misc_feature (1)..( 10): Matrix.005 file - promoters50/5665326
taattattat

SEQ ID NO: 75266 - DNA, 10 bp, Unknown
  misc_feature (1)..( 10): Matrix.005 file - promoters50/5665326
caaaatcata

SEQ ID NO: 75267 - DNA, 11 bp, Unknown
  misc_feature (1)..( 11): Matrix.005 file - promoters50/5665343
tttttttattt

SEQ ID NO: 75268 - DNA, 8 bp, Unknown
  misc_feature (1)..( 8): Matrix.005 file - promoters50/5665343
acttattt

SEQ ID NO: 75269 - DNA, 13 bp, Unknown
  misc_feature (1)..( 13): Matrix.005 file - promoters50/5665343
ctaaaaactatga

SEQ ID NO: 75270 - DNA, 7 bp, Unknown
  misc_feature (1)..( 7): Matrix.005 file - promoters50/5665343
ttgtttc

SEQ ID NO: 75271 - DNA, 7 bp, Unknown
  misc_feature (1)..( 7): Matrix.005 file - promoters50/5665343
gaggaaa

SEQ ID NO: 75272 - DNA, 8 bp, Unknown
  misc_feature (1)..( 8): Matrix.005 file - promoters50/5665343
tttaagtt

SEQ ID NO: 75273 - DNA, 10 bp, Unknown
  misc_feature (1)..( 10): Matrix.005 file - promoters50/5665347
tatataaata

SEQ ID NO: 75274 - DNA, 9 bp, Unknown
  misc_feature (1)..( 9): Matrix.005 file - promoters50/5665347
taattttat

SEQ ID NO: 75275 - DNA, 10 bp, Unknown
  misc_feature (1)..( 10): Matrix.005 file - promoters50/5665351
attgtatcgt

SEQ ID NO: 75276 - DNA, 9 bp, Unknown
  misc_feature (1)..( 9): Matrix.005 file - promoters50/5665367
taaaaatag

SEQ ID NO: 75277 - DNA, 11 bp, Unknown
  misc_feature (1)..( 11): Matrix.005 file - promoters50/5665367
atagaaaataa

SEQ ID NO: 75278 - DNA, 8 bp, Unknown
  misc_feature (1)..( 8): Matrix.005 file - promoters50/5665367
atatataa

SEQ ID NO: 75279 - DNA, 9 bp, Unknown
  misc_feature (1)..( 9): Matrix.005 file - promoters50/5665371
aaaatttct

SEQ ID NO: 75280 - DNA, 8 bp, Unknown
  misc_feature (1)..( 8): Matrix.005 file - promoters50/5665371
tgtgaaac

SEQ ID NO: 75281 - DNA, 9 bp, Unknown
  misc_feature (1)..( 9): Matrix.005 file - promoters50/5665371
aaaatttct

SEQ ID NO: 75282 - DNA, 9 bp, Unknown
  misc_feature (1)..( 9): Matrix.005 file - promoters50/5665371
tttcaaaat

SEQ ID NO: 75283 - DNA, 12 bp, Unknown
  misc_feature (1)..( 12): Matrix.005 file - promoters50/5665374
caaaacaaatat

SEQ ID NO: 75284 - DNA, 11 bp, Unknown
  misc_feature (1)..( 11): Matrix.005 file - promoters50/5665374
cactatctaaa

SEQ ID NO: 75285 - DNA, 12 bp, Unknown
  misc_feature (1)..( 12): Matrix.005 file - promoters50/5665374
ttagaaaaataa

SEQ ID NO: 75286 - DNA, 11 bp, Unknown
  misc_feature (1)..( 11): Matrix.005 file - promoters50/5665374
aaaacaaaaaa

SEQ ID NO: 75287 - DNA, 8 bp, Unknown
  misc_feature (1)..( 8): Matrix.005 file - promoters50/5665374
aatttttg

SEQ ID NO: 75288 - DNA, 7 bp, Unknown
  misc_feature (1)..( 7): Matrix.005 file - promoters50/5665382
gatataa

SEQ ID NO: 75289 - DNA, 10 bp, Unknown
  misc_feature (1)..( 10): Matrix.005 file - promoters50/5665382
ttaatttgat

SEQ ID NO: 75290 - DNA, 11 bp, Unknown
  misc_feature (1)..( 11): Matrix.005 file - promoters50/5665386
aataaagtcct

SEQ ID NO: 75291 - DNA, 9 bp, Unknown
  misc_feature (1)..( 9): Matrix.005 file - promoters50/5665386
cttcttttt

SEQ ID NO: 75292 - DNA, 9 bp, Unknown
  misc_feature (1)..( 9): Matrix.005 file - promoters50/5665386
tttcagtca

SEQ ID NO: 75293 - DNA, 8 bp, Unknown
  misc_feature (1)..( 8): Matrix.005 file - promoters50/5665386
caaaaatc

SEQ ID NO: 75294 - DNA, 9 bp, Unknown
  misc_feature (1)..( 9): Matrix.005 file - promoters50/5665386
agtatctta

SEQ ID NO: 75295 - DNA, 7 bp, Unknown
  misc_feature (1)..( 7): Matrix.005 file - promoters50/5665390
tttaatt

SEQ ID NO: 75296 - DNA, 9 bp, Unknown
  misc_feature (1)..( 9): Matrix.005 file - promoters50/5665390
ataaacaaa

SEQ ID NO: 75297 - DNA, 7 bp, Unknown
  misc_feature (1)..( 7): Matrix.005 file - promoters50/5665390
attttta

SEQ ID NO: 75298 - DNA, 7 bp, Unknown
  misc_feature (1)..( 7): Matrix.005 file - promoters50/5665390
attcact

SEQ ID NO: 75299 - DNA, 6 bp, Unknown
  misc_feature (1)..( 6): Matrix.005 file - promoters50/5665390
tttata

SEQ ID NO: 75300 - DNA, 11 bp, Unknown
  misc_feature (1)..( 11): Matrix.005 file - promoters50/5665390
cataaagaaaa

SEQ ID NO: 75301 - DNA, 11 bp, Unknown
  misc_feature (1)..( 11): Matrix.005 file - promoters50/5665390
aaaaattaaaa

SEQ ID NO: 75302 - DNA, 7 bp, Unknown
  misc_feature (1)..( 7): Matrix.005 file - promoters50/5665404
tttgttt

SEQ ID NO: 75303 - DNA, 10 bp, Unknown
  misc_feature (1)..( 10): Matrix.005 file - promoters50/5665404
aaataaaata

SEQ ID NO: 75304 - DNA, 8 bp, Unknown
  misc_feature (1)..( 8): Matrix.005 file - promoters50/5665412
ttttcttg

SEQ ID NO: 75305 - DNA, 8 bp, Unknown
  misc_feature (1)..( 8): Matrix.005 file - promoters50/5665412
tttcttct

SEQ ID NO: 75306 - DNA, 10 bp, Unknown
  misc_feature (1)..( 10): Matrix.005 file - promoters50/5665420
aacattttac

SEQ ID NO: 75307 - DNA, 11 bp, Unknown
  misc_feature (1)..( 11): Matrix.005 file - promoters50/5665436
tataataatta

SEQ ID NO: 75308 - DNA, 9 bp, Unknown
  misc_feature (1)..( 9): Matrix.005 file - promoters50/5665507
taatatcct

SEQ ID NO: 75309 - DNA, 13 bp, Unknown
  misc_feature (1)..( 13): Matrix.005 file - promoters50/5665507
attttttgatcat

SEQ ID NO: 75310 - DNA, 13 bp, Unknown
  misc_feature (1)..( 13): Matrix.005 file - promoters50/5665507
atcgagaaaacaa

SEQ ID NO: 75311 - DNA, 5 bp, Unknown
  misc_feature (1)..( 5): Matrix.005 file - promoters50/5665507
aaact

SEQ ID NO: 75312 - DNA, 9 bp, Unknown
  misc_feature (1)..( 9): Matrix.005 file - promoters50/5665507
catttaaaa

SEQ ID NO: 75313 - DNA, 11 bp, Unknown
  misc_feature (1)..( 11): Matrix.005 file - promoters50/5665796
tagaatccact

SEQ ID NO: 75314 - DNA, 11 bp, Unknown
  misc_feature (1)..( 11): Matrix.005 file - promoters50/5665796
tagaatccaca

SEQ ID NO: 75315 - DNA, 9 bp, Unknown
  misc_feature (1)..( 9): Matrix.005 file - promoters50/5665796
atataagta

SEQ ID NO: 75316 - DNA, 8 bp, Unknown
  misc_feature (1)..( 8): Matrix.005 file - promoters50/5666614
ttataaaa

SEQ ID NO: 75317 - DNA, 7 bp, Unknown
  misc_feature (1)..( 7): Matrix.005 file - promoters50/5666614
gtttaac

SEQ ID NO: 75318 - DNA, 8 bp, Unknown
  misc_feature (1)..( 8): Matrix.005 file - promoters50/5666614
taacttcg

SEQ ID NO: 75319 - DNA, 9 bp, Unknown
  misc_feature (1)..( 9): Matrix.005 file - promoters50/5666614
gtttacact

SEQ ID NO: 75320 - DNA, 9 bp, Unknown
  misc_feature (1)..( 9): Matrix.005 file - promoters50/5666614
ttgtttaca

SEQ ID NO: 75321 - DNA, 8 bp, Unknown
  misc_feature (1)..( 8): Matrix.005 file - promoters50/5666614
atttcttc

SEQ ID NO: 75322 - DNA, 10 bp, Unknown
  misc_feature (1)..( 10): Matrix.005 file - promoters50/5667083
gaggtattgc

SEQ ID NO: 75323 - DNA, 11 bp, Unknown
  misc_feature (1)..( 11): Matrix.005 file - promoters50/5667083
gctaaaatgtt

SEQ ID NO: 75324 - DNA, 7 bp, Unknown
  misc_feature (1)..( 7): Matrix.005 file - promoters50/5667083
agagtaa

SEQ ID NO: 75325 - DNA, 8 bp, Unknown
  misc_feature (1)..( 8): Matrix.005 file - promoters50/5667083
aatgcgaa

SEQ ID NO: 75326 - DNA, 11 bp, Unknown
  misc_feature (1)..( 11): Matrix.005 file - promoters50/5667152
ttgcttgattt

SEQ ID NO: 75327 - DNA, 12 bp, Unknown
  misc_feature (1)..( 12): Matrix.005 file - promoters50/5667152
tttcttcttctt

SEQ ID NO: 75328 - DNA, 8 bp, Unknown
  misc_feature (1)..( 8): Matrix.005 file - promoters50/5667426
tgtttgta

SEQ ID NO: 75329 - DNA, 8 bp, Unknown
  misc_feature (1)..( 8): Matrix.005 file - promoters50/5667426
aaaactca

SEQ ID NO: 75330 - DNA, 7 bp, Unknown
  misc_feature (1)..( 7): Matrix.005 file - promoters50/5667426
atttgtt

SEQ ID NO: 75331 - DNA, 8 bp, Unknown
  misc_feature (1)..( 8): Matrix.005 file - promoters50/5667426
tttattat

SEQ ID NO: 75332 - DNA, 9 bp, Unknown
  misc_feature (1)..( 9): Matrix.005 file - promoters50/5667570
aaaaagaaa

SEQ ID NO: 75333 - DNA, 11 bp, Unknown
  misc_feature (1)..( 11): Matrix.005 file - promoters50/5667570
gaaaaaactaa

SEQ ID NO: 75334 - DNA, 7 bp, Unknown
  misc_feature (1)..( 7): Matrix.005 file - promoters50/5667570
ctatata

SEQ ID NO: 75335 - DNA, 10 bp, Unknown
  misc_feature (1)..( 10): Matrix.005 file - promoters50/5667588
tatctaagtg

SEQ ID NO: 75336 - DNA, 8 bp, Unknown
  misc_feature (1)..( 8): Matrix.005 file - promoters50/5667588
actatata

SEQ ID NO: 75337 - DNA, 8 bp, Unknown
  misc_feature (1)..( 8): Matrix.005 file - promoters50/5667588
ggtcaaga

SEQ ID NO: 75338 - DNA, 8 bp, Unknown
  misc_feature (1)..( 8): Matrix.005 file - promoters50/5667674
acaaaagt

SEQ ID NO: 75339 - DNA, 9 bp, Unknown
  misc_feature (1)..( 9): Matrix.005 file - promoters50/5667674
acaaaagtt

SEQ ID NO: 75340 - DNA, 8 bp, Unknown
  misc_feature (1)..( 8): Matrix.005 file - promoters50/5667674
agataaaa

SEQ ID NO: 75341 - DNA, 10 bp, Unknown
  misc_feature (1)..( 10): Matrix.005 file - promoters50/5667685
ttgtaaccaa

SEQ ID NO: 75342 - DNA, 7 bp, Unknown
  misc_feature (1)..( 7): Matrix.005 file - promoters50/5667689
taaaacc

SEQ ID NO: 75343 - DNA, 10 bp, Unknown
  misc_feature (1)..( 10): Matrix.005 file - promoters50/5667705
aatagaatca

SEQ ID NO: 75344 - DNA, 9 bp, Unknown
  misc_feature (1)..( 9): Matrix.005 file - promoters50/5667705
tttgttccg

SEQ ID NO: 75345 - DNA, 13 bp, Unknown
  misc_feature (1)..( 13): Matrix.005 file - promoters50/5667705
cgtttagattttt

SEQ ID NO: 75346 - DNA, 8 bp, Unknown
  misc_feature (1)..( 8): Matrix.005 file - promoters50/5667705
attgaaag

SEQ ID NO: 75347 - DNA, 8 bp, Unknown
  misc_feature (1)..( 8): Matrix.005 file - promoters50/5667720
tataaacc

SEQ ID NO: 75348 - DNA, 17 bp, Unknown
  misc_feature (1)..( 17): Matrix.005 file - promoters50/5667720
tataaccaaaaaaataa

SEQ ID NO: 75349 - DNA, 14 bp, Unknown
  misc_feature (1)..( 14): Matrix.005 file - promoters50/5667720
gtttataaaaaata

SEQ ID NO: 75350 - DNA, 8 bp, Unknown
  misc_feature (1)..( 8): Matrix.005 file - promoters50/5667720
ttaaaaaa

SEQ ID NO: 75351 - DNA, 15 bp, Unknown
  misc_feature (1)..( 15): Matrix.005 file - promoters50/5667720
tattaaaaaaagtta

SEQ ID NO: 75352 - DNA, 14 bp, Unknown
  misc_feature (1)..( 14): Matrix.005 file - promoters50/5667720
caaaaatttttaat

SEQ ID NO: 75353 - DNA, 14 bp, Unknown
  misc_feature (1)..( 14): Matrix.005 file - promoters50/5667720
atcaaatttattaa

SEQ ID NO: 75354 - DNA, 7 bp, Unknown
  misc_feature (1)..( 7): Matrix.005 file - promoters50/5667720
gtttttt

SEQ ID NO: 75355 - DNA, 8 bp, Unknown
  misc_feature (1)..( 8): Matrix.005 file - promoters50/5667720
aatgataa

SEQ ID NO: 75356 - DNA, 11 bp, Unknown
  misc_feature (1)..( 11): Matrix.005 file - promoters50/5667720
ggaaactttaa

SEQ ID NO: 75357 - DNA, 8 bp, Unknown
  misc_feature (1)..( 8): Matrix.005 file - promoters50/5667733
tattatta

SEQ ID NO: 75358 - DNA, 7 bp, Unknown
  misc_feature (1)..( 7): Matrix.005 file - promoters50/5667733
ctttttt

SEQ ID NO: 75359 - DNA, 9 bp, Unknown
  misc_feature (1)..( 9): Matrix.005 file - promoters50/5667737
tctaaaaag

SEQ ID NO: 75360 - DNA, 12 bp, Unknown
  misc_feature (1)..( 12): Matrix.005 file - promoters50/5667737
tctaaaaagact

SEQ ID NO: 75361 - DNA, 6 bp, Unknown
  misc_feature (1)..( 6): Matrix.005 file - promoters50/5667741
tatata

SEQ ID NO: 75362 - DNA, 7 bp, Unknown
  misc_feature (1)..( 7): Matrix.005 file - promoters50/5667766
atattca

SEQ ID NO: 75363 - DNA, 10 bp, Unknown
  misc_feature (1)..( 10): Matrix.005 file - promoters50/5667766
atttttgttg

SEQ ID NO: 75364 - DNA, 14 bp, Unknown
  misc_feature (1)..( 14): Matrix.005 file - promoters50/5667766
cattcggaaactgg

SEQ ID NO: 75365 - DNA, 10 bp, Unknown
  misc_feature (1)..( 10): Matrix.005 file - promoters50/5667770
aaatttattt

SEQ ID NO: 75366 - DNA, 8 bp, Unknown
  misc_feature (1)..( 8): Matrix.005 file - promoters50/5667785
gttcgtaa

SEQ ID NO: 75367 - DNA, 12 bp, Unknown
  misc_feature (1)..( 12): Matrix.005 file - promoters50/5667812
aaatagaaatat

SEQ ID NO: 75368 - DNA, 6 bp, Unknown
  misc_feature (1)..( 6): Matrix.005 file - promoters50/5667812
tataat

SEQ ID NO: 75369 - DNA, 12 bp, Unknown
  misc_feature (1)..( 12): Matrix.005 file - promoters50/5667814
taaattgaaaaa

SEQ ID NO: 75370 - DNA, 12 bp, Unknown
  misc_feature (1)..( 12): Matrix.005 file - promoters50/5667822
taaattgaaatt

SEQ ID NO: 75371 - DNA, 8 bp, Unknown
  misc_feature (1)..( 8): Matrix.005 file - promoters50/5667822
gataaaat

SEQ ID NO: 75372 - DNA, 10 bp, Unknown
  misc_feature (1)..( 10): Matrix.005 file - promoters50/5667822
tttataaaaa

SEQ ID NO: 75373 - DNA, 10 bp, Unknown
  misc_feature (1)..( 10): Matrix.005 file - promoters50/5667822
aaaaaaaaaa

SEQ ID NO: 75374 - DNA, 12 bp, Unknown
  misc_feature (1)..( 12): Matrix.005 file - promoters50/5667849
ctacattatgaa

SEQ ID NO: 75375 - DNA, 12 bp, Unknown
  misc_feature (1)..( 12): Matrix.005 file - promoters50/5667849
tctatgaatcat

SEQ ID NO: 75376 - DNA, 8 bp, Unknown
  misc_feature (1)..( 8): Matrix.005 file - promoters50/5668051
aacaatat

SEQ ID NO: 75377 - DNA, 14 bp, Unknown
  misc_feature (1)..( 14): Matrix.005 file - promoters50/5668065
cattttggtcaatt

SEQ ID NO: 75378 - DNA, 11 bp, Unknown
  misc_feature (1)..( 11): Matrix.005 file - promoters50/5668065
ttcgaaacaaa

SEQ ID NO: 75379 - DNA, 7 bp, Unknown
  misc_feature (1)..( 7): Matrix.005 file - promoters50/5668069
ttttatt

SEQ ID NO: 75380 - DNA, 13 bp, Unknown
  misc_feature (1)..( 13): Matrix.005 file - promoters50/5668085
ctcatcttccctt

SEQ ID NO: 75381 - DNA, 7 bp, Unknown
  misc_feature (1)..( 7): Matrix.005 file - promoters50/5668085
gcggaaa

SEQ ID NO: 75382 - DNA, 7 bp, Unknown
  misc_feature (1)..( 7): Matrix.005 file - promoters50/5668085
ctccttg

SEQ ID NO: 75383 - DNA, 12 bp, Unknown
  misc_feature (1)..( 12): Matrix.005 file - promoters50/5668101
agttattgatta

SEQ ID NO: 75384 - DNA, 10 bp, Unknown
  misc_feature (1)..( 10): Matrix.005 file - promoters50/5668101
ggacccgtga

SEQ ID NO: 75385 - DNA, 8 bp, Unknown
  misc_feature (1)..( 8): Matrix.005 file - promoters50/5668101
tttatgtt

SEQ ID NO: 75386 - DNA, 7 bp, Unknown
  misc_feature (1)..( 7): Matrix.005 file - promoters50/5668101
ttaagtt

SEQ ID NO: 75387 - DNA, 12 bp, Unknown
  misc_feature (1)..( 12): Matrix.005 file - promoters50/5668101
cttgtaaccaca

SEQ ID NO: 75388 - DNA, 10 bp, Unknown
  misc_feature (1)..( 10): Matrix.005 file - promoters50/5668111
aattataaag

SEQ ID NO: 75389 - DNA, 10 bp, Unknown
  misc_feature (1)..( 10): Matrix.005 file - promoters50/5668111
ctcgtaaaat

SEQ ID NO: 75390 - DNA, 9 bp, Unknown
  misc_feature (1)..( 9): Matrix.005 file - promoters50/5668111
taaacaaaa

SEQ ID NO: 75391 - DNA, 8 bp, Unknown
  misc_feature (1)..( 8): Matrix.005 file - promoters50/5668162
ttttattt

SEQ ID NO: 75392 - DNA, 6 bp, Unknown
  misc_feature (1)..( 6): Matrix.005 file - promoters50/5668277
tctctc

SEQ ID NO: 75393 - DNA, 9 bp, Unknown
  misc_feature (1)..( 9): Matrix.005 file - promoters50/5668294
catagattc

SEQ ID NO: 75394 - DNA, 12 bp, Unknown
  misc_feature (1)..( 12): Matrix.005 file - promoters50/5668294
gaataaaatgta

SEQ ID NO: 75395 - DNA, 9 bp, Unknown
  misc_feature (1)..( 9): Matrix.005 file - promoters50/5668294
agagataaa

SEQ ID NO: 75396 - DNA, 10 bp, Unknown
  misc_feature (1)..( 10): Matrix.005 file - promoters50/5668306
atccaagaag

SEQ ID NO: 75397 - DNA, 8 bp, Unknown
  misc_feature (1)..( 8): Matrix.005 file - promoters50/5668306
aaacactt

SEQ ID NO: 75398 - DNA, 8 bp, Unknown
  misc_feature (1)..( 8): Matrix.005 file - promoters50/5668310
tgaggaaa

SEQ ID NO: 75399 - DNA, 9 bp, Unknown
  misc_feature (1)..( 9): Matrix.005 file - promoters50/5668310
tggattgtg

SEQ ID NO: 75400 - DNA, 7 bp, Unknown
  misc_feature (1)..( 7): Matrix.005 file - promoters50/5668317
atgaaac

SEQ ID NO: 75401 - DNA, 11 bp, Unknown
  misc_feature (1)..( 11): Matrix.005 file - promoters50/5668317
aaaagtgtgtg

SEQ ID NO: 75402 - DNA, 14 bp, Unknown
  misc_feature (1)..( 14): Matrix.005 file - promoters50/5668317
aaaaagaaaattaa

SEQ ID NO: 75403 - DNA, 9 bp, Unknown
  misc_feature (1)..( 9): Matrix.005 file - promoters50/5668325
tttggattt

SEQ ID NO: 75404 - DNA, 10 bp, Unknown
  misc_feature (1)..( 10): Matrix.005 file - promoters50/5668325
aaacaaagtt

SEQ ID NO: 75405 - DNA, 8 bp, Unknown
  misc_feature (1)..( 8): Matrix.005 file - promoters50/5668348
aatttcga

SEQ ID NO: 75406 - DNA, 9 bp, Unknown
  misc_feature (1)..( 9): Matrix.005 file - promoters50/5668352
gaataaaat

SEQ ID NO: 75407 - DNA, 13 bp, Unknown
  misc_feature (1)..( 13): Matrix.005 file - promoters50/5668352
gtttctttaacta

SEQ ID NO: 75408 - DNA, 14 bp, Unknown
  misc_feature (1)..( 14): Matrix.005 file - promoters50/5668352
gtaaaaaaacataa

SEQ ID NO: 75409 - DNA, 9 bp, Unknown
  misc_feature (1)..( 9): Matrix.005 file - promoters50/5668352
agtaatata

SEQ ID NO: 75410 - DNA, 7 bp, Unknown
  misc_feature (1)..( 7): Matrix.005 file - promoters50/5668356
aaaaatg

SEQ ID NO: 75411 - DNA, 8 bp, Unknown
  misc_feature (1)..( 8): Matrix.005 file - promoters50/5668359
atggattt

SEQ ID NO: 75412 - DNA, 8 bp, Unknown
  misc_feature (1)..( 8): Matrix.005 file - promoters50/5668359
taatctaa

SEQ ID NO: 75413 - DNA, 13 bp, Unknown
  misc_feature (1)..( 13): Matrix.005 file - promoters50/5668367
gagaaccaaatta

SEQ ID NO: 75414 - DNA, 9 bp, Unknown
  misc_feature (1)..( 9): Matrix.005 file - promoters50/5668367
ttttttaaa

SEQ ID NO: 75415 - DNA, 14 bp, Unknown
  misc_feature (1)..( 14): Matrix.005 file - promoters50/5668367
tttttataacattt

SEQ ID NO: 75416 - DNA, 11 bp, Unknown
  misc_feature (1)..( 11): Matrix.005 file - promoters50/5668367
gaaaaacaatt

SEQ ID NO: 75417 - DNA, 9 bp, Unknown
  misc_feature (1)..( 9): Matrix.005 file - promoters50/5668367
aacaattta

SEQ ID NO: 75418 - DNA, 7 bp, Unknown
  misc_feature (1)..( 7): Matrix.005 file - promoters50/5668367
gttttcc

SEQ ID NO: 75419 - DNA, 10 bp, Unknown
  misc_feature (1)..( 10): Matrix.005 file - promoters50/5668367
atttaatttt

SEQ ID NO: 75420 - DNA, 13 bp, Unknown
  misc_feature (1)..( 13): Matrix.005 file - promoters50/5668367
aataaatacatca

SEQ ID NO: 75421 - DNA, 9 bp, Unknown
  misc_feature (1)..( 9): Matrix.005 file - promoters50/5668367
attattttc

SEQ ID NO: 75422 - DNA, 9 bp, Unknown
  misc_feature (1)..( 9): Matrix.005 file - promoters50/5668367
atatagtat

SEQ ID NO: 75423 - DNA, 7 bp, Unknown
  misc_feature (1)..( 7): Matrix.005 file - promoters50/5668367
catgatc

SEQ ID NO: 75424 - DNA, 9 bp, Unknown
  misc_feature (1)..( 9): Matrix.005 file - promoters50/5668367
tttgaatgg

SEQ ID NO: 75425 - DNA, 7 bp, Unknown
  misc_feature (1)..( 7): Matrix.005 file - promoters50/5668371
ttttaat

SEQ ID NO: 75426 - DNA, 8 bp, Unknown
  misc_feature (1)..( 8): Matrix.005 file - promoters50/5668375
tcttttct

SEQ ID NO: 75427 - DNA, 9 bp, Unknown
  misc_feature (1)..( 9): Matrix.005 file - promoters50/5668397
agattcaat

SEQ ID NO: 75428 - DNA, 8 bp, Unknown
  misc_feature (1)..( 8): Matrix.005 file - promoters50/5668397
tcaacttt

SEQ ID NO: 75429 - DNA, 11 bp, Unknown
  misc_feature (1)..( 11): Matrix.005 file - promoters50/5668397
taatttctttt

SEQ ID NO: 75430 - DNA, 10 bp, Unknown
  misc_feature (1)..( 10): Matrix.005 file - promoters50/5668397
tggaaacaat

SEQ ID NO: 75431 - DNA, 9 bp, Unknown
  misc_feature (1)..( 9): Matrix.005 file - promoters50/5668435
acaaacaaa

SEQ ID NO: 75432 - DNA, 11 bp, Unknown
  misc_feature (1)..( 11): Matrix.005 file - promoters50/5668439
tttttagaagt

SEQ ID NO: 75433 - DNA, 12 bp, Unknown
  misc_feature (1)..( 12): Matrix.005 file - promoters50/5668439
cattagataaaa

SEQ ID NO: 75434 - DNA, 7 bp, Unknown
  misc_feature (1)..( 7): Matrix.005 file - promoters50/5668439
aaaagaa

SEQ ID NO: 75435 - DNA, 7 bp, Unknown
  misc_feature (1)..( 7): Matrix.005 file - promoters50/5668439
gatgaca

SEQ ID NO: 75436 - DNA, 9 bp, Unknown
  misc_feature (1)..( 9): Matrix.005 file - promoters50/5668454
taaaataat

SEQ ID NO: 75437 - DNA, 9 bp, Unknown
  misc_feature (1)..( 9): Matrix.005 file - promoters50/5668457
ttgtttcta

SEQ ID NO: 75438 - DNA, 8 bp, Unknown
  misc_feature (1)..( 8): Matrix.005 file - promoters50/5668457
ttttttgg

SEQ ID NO: 75439 - DNA, 8 bp, Unknown
  misc_feature (1)..( 8): Matrix.005 file - promoters50/5668457
tttctata

SEQ ID NO: 75440 - DNA, 7 bp, Unknown
  misc_feature (1)..( 7): Matrix.005 file - promoters50/5668457
aatgcaa

SEQ ID NO: 75441 - DNA, 11 bp, Unknown
  misc_feature (1)..( 11): Matrix.005 file - promoters50/5668457
caatgtttact

SEQ ID NO: 75442 - DNA, 7 bp, Unknown
  misc_feature (1)..( 7): Matrix.005 file - promoters50/5668457
gagtttt

SEQ ID NO: 75443 - DNA, 8 bp, Unknown
  misc_feature (1)..( 8): Matrix.005 file - promoters50/5668457
ggttgatg

SEQ ID NO: 75444 - DNA, 11 bp, Unknown
  misc_feature (1)..( 11): Matrix.005 file - promoters50/5668469
tatttgttaac

SEQ ID NO: 75445 - DNA, 8 bp, Unknown
  misc_feature (1)..( 8): Matrix.005 file - promoters50/5668485
tttcaaat

SEQ ID NO: 75446 - DNA, 11 bp, Unknown
  misc_feature (1)..( 11): Matrix.005 file - promoters50/5668485
taccaaagttg

SEQ ID NO: 75447 - DNA, 10 bp, Unknown
  misc_feature (1)..( 10): Matrix.005 file - promoters50/5668485
atttttaaat

SEQ ID NO: 75448 - DNA, 7 bp, Unknown
  misc_feature (1)..( 7): Matrix.005 file - promoters50/5668485
tgatgca

SEQ ID NO: 75449 - DNA, 11 bp, Unknown
  misc_feature (1)..( 11): Matrix.005 file - promoters50/5668493
gcttgtttttt

SEQ ID NO: 75450 - DNA, 10 bp, Unknown
  misc_feature (1)..( 10): Matrix.005 file - promoters50/5668493
tgcttttatt

SEQ ID NO: 75451 - DNA, 9 bp, Unknown
  misc_feature (1)..( 9): Matrix.005 file - promoters50/5668493
aaaaattaa

SEQ ID NO: 75452 - DNA, 11 bp, Unknown
  misc_feature (1)..( 11): Matrix.005 file - promoters50/5668493
caaataatttt

SEQ ID NO: 75453 - DNA, 12 bp, Unknown
  misc_feature (1)..( 12): Matrix.005 file - promoters50/5668497
aactcaagattt

SEQ ID NO: 75454 - DNA, 7 bp, Unknown
  misc_feature (1)..( 7): Matrix.005 file - promoters50/5668497
ttgtttt

SEQ ID NO: 75455 - DNA, 8 bp, Unknown
  misc_feature (1)..( 8): Matrix.005 file - promoters50/5668497
tttatcta

SEQ ID NO: 75456 - DNA, 9 bp, Unknown
  misc_feature (1)..( 9): Matrix.005 file - promoters50/5668497
gaaacttga

SEQ ID NO: 75457 - DNA, 9 bp, Unknown
  misc_feature (1)..( 9): Matrix.005 file - promoters50/5668509
aaaaaatta

SEQ ID NO: 75458 - DNA, 11 bp, Unknown
  misc_feature (1)..( 11): Matrix.005 file - promoters50/5668509
catataaccaa

SEQ ID NO: 75459 - DNA, 10 bp, Unknown
  misc_feature (1)..( 10): Matrix.005 file - promoters50/5668509
aatcaaaaat

SEQ ID NO: 75460 - DNA, 6 bp, Unknown
  misc_feature (1)..( 6): Matrix.005 file - promoters50/5668509
atataa

SEQ ID NO: 75461 - DNA, 9 bp, Unknown
  misc_feature (1)..( 9): Matrix.005 file - promoters50/5668509
aaacaaatg

SEQ ID NO: 75462 - DNA, 11 bp, Unknown
  misc_feature (1)..( 11): Matrix.005 file - promoters50/5668509
gtaacaaataa

SEQ ID NO: 75463 - DNA, 10 bp, Unknown
  misc_feature (1)..( 10): Matrix.005 file - promoters50/5668529
taaaaaataa

SEQ ID NO: 75464 - DNA, 10 bp, Unknown
  misc_feature (1)..( 10): Matrix.005 file - promoters50/5668533
aaaataaaaa

SEQ ID NO: 75465 - DNA, 9 bp, Unknown
  misc_feature (1)..( 9): Matrix.005 file - promoters50/5668537
tatttttac

SEQ ID NO: 75466 - DNA, 12 bp, Unknown
  misc_feature (1)..( 12): Matrix.005 file - promoters50/5668537
caaatattttct

SEQ ID NO: 75467 - DNA, 9 bp, Unknown
  misc_feature (1)..( 9): Matrix.005 file - promoters50/5668537
ataattcat

SEQ ID NO: 75468 - DNA, 11 bp, Unknown
  misc_feature (1)..( 11): Matrix.005 file - promoters50/5668537
ttttctaaaat

SEQ ID NO: 75469 - DNA, 8 bp, Unknown
  misc_feature (1)..( 8): Matrix.005 file - promoters50/5668537
taaatttc

SEQ ID NO: 75470 - DNA, 13 bp, Unknown
  misc_feature (1)..( 13): Matrix.005 file - promoters50/5668541
aattatttaatat

SEQ ID NO: 75471 - DNA, 10 bp, Unknown
  misc_feature (1)..( 10): Matrix.005 file - promoters50/5668541
gaataaaatc

SEQ ID NO: 75472 - DNA, 13 bp, Unknown
  misc_feature (1)..( 13): Matrix.005 file - promoters50/5668541
tattatatttgaa

SEQ ID NO: 75473 - DNA, 11 bp, Unknown
  misc_feature (1)..( 11): Matrix.005 file - promoters50/5668541
tgaattttttt

SEQ ID NO: 75474 - DNA, 14 bp, Unknown
  misc_feature (1)..( 14): Matrix.005 file - promoters50/5668541
gaatatatttattt

SEQ ID NO: 75475 - DNA, 7 bp, Unknown
  misc_feature (1)..( 7): Matrix.005 file - promoters50/5668547
acgtgga

SEQ ID NO: 75476 - DNA, 7 bp, Unknown
  misc_feature (1)..( 7): Matrix.005 file - promoters50/5668547
gctgaaa

SEQ ID NO: 75477 - DNA, 9 bp, Unknown
  misc_feature (1)..( 9): Matrix.005 file - promoters50/5668547
tttttcttc

SEQ ID NO: 75478 - DNA, 8 bp, Unknown
  misc_feature (1)..( 8): Matrix.005 file - promoters50/5668547
tgtttcta

SEQ ID NO: 75479 - DNA, 9 bp, Unknown
  misc_feature (1)..( 9): Matrix.005 file - promoters50/5668547
gtgtcctct

SEQ ID NO: 75480 - DNA, 10 bp, Unknown
  misc_feature (1)..( 10): Matrix.005 file - promoters50/5668547
atgtggctga

SEQ ID NO: 75481 - DNA, 12 bp, Unknown
  misc_feature (1)..( 12): Matrix.005 file - promoters50/5668566
ttcctttcttaa

SEQ ID NO: 75482 - DNA, 7 bp, Unknown
  misc_feature (1)..( 7): Matrix.005 file - promoters50/5668592
attttga

SEQ ID NO: 75483 - DNA, 7 bp, Unknown
  misc_feature (1)..( 7): Matrix.005 file - promoters50/5668592
tgtttcg

SEQ ID NO: 75484 - DNA, 12 bp, Unknown
  misc_feature (1)..( 12): Matrix.005 file - promoters50/5668629
gaaaatttgaaa

SEQ ID NO: 75485 - DNA, 11 bp, Unknown
  misc_feature (1)..( 11): Matrix.005 file - promoters50/5668629
ttaaattttat

SEQ ID NO: 75486 - DNA, 13 bp, Unknown
  misc_feature (1)..( 13): Matrix.005 file - promoters50/5668629
tttttgtgtttaa

SEQ ID NO: 75487 - DNA, 11 bp, Unknown
  misc_feature (1)..( 11): Matrix.005 file - promoters50/5668629
taaatcttatt

SEQ ID NO: 75488 - DNA, 10 bp, Unknown
  misc_feature (1)..( 10): Matrix.005 file - promoters50/5668629
gacgaaaaag

SEQ ID NO: 75489 - DNA, 10 bp, Unknown
  misc_feature (1)..( 10): Matrix.005 file - promoters50/5668720
ttcaaaaata

SEQ ID NO: 75490 - DNA, 11 bp, Unknown
  misc_feature (1)..( 11): Matrix.005 file - promoters50/5668748
attaaaaatat

SEQ ID NO: 75491 - DNA, 11 bp, Unknown
  misc_feature (1)..( 11): Matrix.005 file - promoters50/5668748
tatttttcttt

SEQ ID NO: 75492 - DNA, 11 bp, Unknown
  misc_feature (1)..( 11): Matrix.005 file - promoters50/5668748
agataaaatat

SEQ ID NO: 75493 - DNA, 13 bp, Unknown
  misc_feature (1)..( 13): Matrix.005 file - promoters50/5668748
actaaaaatatga

SEQ ID NO: 75494 - DNA, 13 bp, Unknown
  misc_feature (1)..( 13): Matrix.005 file - promoters50/5668748
agaaaattacctc

SEQ ID NO: 75495 - DNA, 8 bp, Unknown
  misc_feature (1)..( 8): Matrix.005 file - promoters50/5668748
tataaaac

SEQ ID NO: 75496 - DNA, 16 bp, Unknown
  misc_feature (1)..( 16): Matrix.005 file - promoters50/5668748
ctaaaaaacatatctc

SEQ ID NO: 75497 - DNA, 9 bp, Unknown
  misc_feature (1)..( 9): Matrix.005 file - promoters50/5668748
ctataaata

SEQ ID NO: 75498 - DNA, 14 bp, Unknown
  misc_feature (1)..( 14): Matrix.005 file - promoters50/5668748
cattattaatcaat

SEQ ID NO: 75499 - DNA, 14 bp, Unknown
  misc_feature (1)..( 14): Matrix.005 file - promoters50/5668748
aacagattacatat

SEQ ID NO: 75500 - DNA, 9 bp, Unknown
  misc_feature (1)..( 9): Matrix.005 file - promoters50/5668788
agagaaaaa

SEQ ID NO: 75501 - DNA, 12 bp, Unknown
  misc_feature (1)..( 12): Matrix.005 file - promoters50/5668797
ctatataatgaa

SEQ ID NO: 75502 - DNA, 22 bp, Unknown
  misc_feature (1)..( 22): Matrix.005 file - promoters50/5668797
caaagaaaaaataaattgattt

SEQ ID NO: 75503 - DNA, 9 bp, Unknown
  misc_feature (1)..( 9): Matrix.005 file - promoters50/5668800
taacatttt

SEQ ID NO: 75504 - DNA, 11 bp, Unknown
  misc_feature (1)..( 11): Matrix.005 file - promoters50/5668800
atataaacaaa

SEQ ID NO: 75505 - DNA, 8 bp, Unknown
  misc_feature (1)..( 8): Matrix.005 file - promoters50/5668800
gataaaat

SEQ ID NO: 75506 - DNA, 11 bp, Unknown
  misc_feature (1)..( 11): Matrix.005 file - promoters50/5668800
tcttattttga

SEQ ID NO: 75507 - DNA, 22 bp, Unknown
  misc_feature (1)..( 22): Matrix.005 file - promoters50/5668800
tcttttctgatattgtttctca

SEQ ID NO: 75508 - DNA, 6 bp, Unknown
  misc_feature (1)..( 6): Matrix.005 file - promoters50/5668800
atagga

SEQ ID NO: 75509 - DNA, 8 bp, Unknown
  misc_feature (1)..( 8): Matrix.005 file - promoters50/5668800
ataaaatt

SEQ ID NO: 75510 - DNA, 12 bp, Unknown
  misc_feature (1)..( 12): Matrix.005 file - promoters50/5668800
aaaaaataaaaa

SEQ ID NO: 75511 - DNA, 7 bp, Unknown
  misc_feature (1)..( 7): Matrix.005 file - promoters50/5668800
aaatata

SEQ ID NO: 75512 - DNA, 8 bp, Unknown
  misc_feature (1)..( 8): Matrix.005 file - promoters50/5668800
aaaaaata

SEQ ID NO: 75513 - DNA, 7 bp, Unknown
  misc_feature (1)..( 7): Matrix.005 file - promoters50/5668800
agttgct

SEQ ID NO: 75514 - DNA, 9 bp, Unknown
  misc_feature (1)..( 9): Matrix.005 file - promoters50/5668800
ctcaaatct

SEQ ID NO: 75515 - DNA, 8 bp, Unknown
  misc_feature (1)..( 8): Matrix.005 file - promoters50/5668800
tttcaatg

SEQ ID NO: 75516 - DNA, 11 bp, Unknown
  misc_feature (1)..( 11): Matrix.005 file - promoters50/5668807
taatatttatc

SEQ ID NO: 75517 - DNA, 8 bp, Unknown
  misc_feature (1)..( 8): Matrix.005 file - promoters50/5668807
ctttaaaa

SEQ ID NO: 75518 - DNA, 8 bp, Unknown
  misc_feature (1)..( 8): Matrix.005 file - promoters50/5668807
tttcttaa

SEQ ID NO: 75519 - DNA, 7 bp, Unknown
  misc_feature (1)..( 7): Matrix.005 file - promoters50/5668814
gaacttt

SEQ ID NO: 75520 - DNA, 12 bp, Unknown
  misc_feature (1)..( 12): Matrix.005 file - promoters50/5668814
tattggaaaaat

SEQ ID NO: 75521 - DNA, 5 bp, Unknown
  misc_feature (1)..( 5): Matrix.005 file - promoters50/5668818
attaa

SEQ ID NO: 75522 - DNA, 12 bp, Unknown
  misc_feature (1)..( 12): Matrix.005 file - promoters50/5668818
aattaaaaaaaa

SEQ ID NO: 75523 - DNA, 8 bp, Unknown
  misc_feature (1)..( 8): Matrix.005 file - promoters50/5668818
aaaatatt

SEQ ID NO: 75524 - DNA, 9 bp, Unknown
  misc_feature (1)..( 9): Matrix.005 file - promoters50/5668818
aatttaaaa

SEQ ID NO: 75525 - DNA, 9 bp, Unknown
  misc_feature (1)..( 9): Matrix.005 file - promoters50/5668828
taccttttt

SEQ ID NO: 75526 - DNA, 8 bp, Unknown
  misc_feature (1)..( 8): Matrix.005 file - promoters50/5668828
gaatctat

SEQ ID NO: 75527 - DNA, 9 bp, Unknown
  misc_feature (1)..( 9): Matrix.005 file - promoters50/5668828
tcttgaatc

SEQ ID NO: 75528 - DNA, 7 bp, Unknown
  misc_feature (1)..( 7): Matrix.005 file - promoters50/5668832
attttaa

SEQ ID NO: 75529 - DNA, 8 bp, Unknown
  misc_feature (1)..( 8): Matrix.005 file - promoters50/5668832
ttttactt

SEQ ID NO: 75530 - DNA, 10 bp, Unknown
  misc_feature (1)..( 10): Matrix.005 file - promoters50/5668832
atttagacca

SEQ ID NO: 75531 - DNA, 10 bp, Unknown
  misc_feature (1)..( 10): Matrix.005 file - promoters50/5668832
ttcgtttttc

SEQ ID NO: 75532 - DNA, 12 bp, Unknown
  misc_feature (1)..( 12): Matrix.005 file - promoters50/5668832
attagatttttt

SEQ ID NO: 75533 - DNA, 12 bp, Unknown
  misc_feature (1)..( 12): Matrix.005 file - promoters50/5668832
taaaaatcaata

SEQ ID NO: 75534 - DNA, 6 bp, Unknown
  misc_feature (1)..( 6): Matrix.005 file - promoters50/5668832
attaga

SEQ ID NO: 75535 - DNA, 9 bp, Unknown
  misc_feature (1)..( 9): Matrix.005 file - promoters50/5668832
ttaaaaaaa

SEQ ID NO: 75536 - DNA, 9 bp, Unknown
  misc_feature (1)..( 9): Matrix.005 file - promoters50/5668832
tttcaaact

SEQ ID NO: 75537 - DNA, 7 bp, Unknown
  misc_feature (1)..( 7): Matrix.005 file - promoters50/5668832
aaaacaa

SEQ ID NO: 75538 - DNA, 8 bp, Unknown
  misc_feature (1)..( 8): Matrix.005 file - promoters50/5668832
tcattttg

SEQ ID NO: 75539 - DNA, 9 bp, Unknown
  misc_feature (1)..( 9): Matrix.005 file - promoters50/5668836
aaatttaag

SEQ ID NO: 75540 - DNA, 7 bp, Unknown
  misc_feature (1)..( 7): Matrix.005 file - promoters50/5668836
attttat

SEQ ID NO: 75541 - DNA, 9 bp, Unknown
  misc_feature (1)..( 9): Matrix.005 file - promoters50/5668836
aaaattaaa

SEQ ID NO: 75542 - DNA, 7 bp, Unknown
  misc_feature (1)..( 7): Matrix.005 file - promoters50/5668836
aaattaa

SEQ ID NO: 75543 - DNA, 9 bp, Unknown
  misc_feature (1)..( 9): Matrix.005 file - promoters50/5668836
aagtaacca

SEQ ID NO: 75544 - DNA, 8 bp, Unknown
  misc_feature (1)..( 8): Matrix.005 file - promoters50/5668836
taaaataa

SEQ ID NO: 75545 - DNA, 12 bp, Unknown
  misc_feature (1)..( 12): Matrix.005 file - promoters50/5668836
aaacatattaca

SEQ ID NO: 75546 - DNA, 11 bp, Unknown
  misc_feature (1)..( 11): Matrix.005 file - promoters50/5668836
taataatttaa

SEQ ID NO: 75547 - DNA, 9 bp, Unknown
  misc_feature (1)..( 9): Matrix.005 file - promoters50/5668852
aataaaatg

SEQ ID NO: 75548 - DNA, 14 bp, Unknown
  misc_feature (1)..( 14): Matrix.005 file - promoters50/5668852
aataaaggaaaaat

SEQ ID NO: 75549 - DNA, 8 bp, Unknown
  misc_feature (1)..( 8): Matrix.005 file - promoters50/5668860
catcgatt

SEQ ID NO: 75550 - DNA, 7 bp, Unknown
  misc_feature (1)..( 7): Matrix.005 file - promoters50/5668860
ctaaatt

SEQ ID NO: 75551 - DNA, 6 bp, Unknown
  misc_feature (1)..( 6): Matrix.005 file - promoters50/5668860
aaaaaa

SEQ ID NO: 75552 - DNA, 8 bp, Unknown
  misc_feature (1)..( 8): Matrix.005 file - promoters50/5668872
ttttagtc

SEQ ID NO: 75553 - DNA, 9 bp, Unknown
  misc_feature (1)..( 9): Matrix.005 file - promoters50/5668872
ctaagaaat

SEQ ID NO: 75554 - DNA, 13 bp, Unknown
  misc_feature (1)..( 13): Matrix.005 file - promoters50/5668882
accataagaaata

SEQ ID NO: 75555 - DNA, 10 bp, Unknown
  misc_feature (1)..( 10): Matrix.005 file - promoters50/5668882
tattttttct

SEQ ID NO: 75556 - DNA, 10 bp, Unknown
  misc_feature (1)..( 10): Matrix.005 file - promoters50/5668893
aatcttttat

SEQ ID NO: 75557 - DNA, 8 bp, Unknown
  misc_feature (1)..( 8): Matrix.005 file - promoters50/5668893
tcttttct

SEQ ID NO: 75558 - DNA, 12 bp, Unknown
  misc_feature (1)..( 12): Matrix.005 file - promoters50/5668903
tttgttgatttt

SEQ ID NO: 75559 - DNA, 8 bp, Unknown
  misc_feature (1)..( 8): Matrix.005 file - promoters50/5668903
agaatttg

SEQ ID NO: 75560 - DNA, 11 bp, Unknown
  misc_feature (1)..( 11): Matrix.005 file - promoters50/5668903
ttttattagtc

SEQ ID NO: 75561 - DNA, 11 bp, Unknown
  misc_feature (1)..( 11): Matrix.005 file - promoters50/5668903
tttgtatgatt

SEQ ID NO: 75562 - DNA, 7 bp, Unknown
  misc_feature (1)..( 7): Matrix.005 file - promoters50/5668919
taaattg

SEQ ID NO: 75563 - DNA, 7 bp, Unknown
  misc_feature (1)..( 7): Matrix.005 file - promoters50/5668930
cgagaaa

SEQ ID NO: 75564 - DNA, 10 bp, Unknown
  misc_feature (1)..( 10): Matrix.005 file - promoters50/5668930
taaattttct

SEQ ID NO: 75565 - DNA, 8 bp, Unknown
  misc_feature (1)..( 8): Matrix.005 file - promoters50/5668930
cagatcaa

SEQ ID NO: 75566 - DNA, 9 bp, Unknown
  misc_feature (1)..( 9): Matrix.005 file - promoters50/5668930
ctatctcac

SEQ ID NO: 75567 - DNA, 7 bp, Unknown
  misc_feature (1)..( 7): Matrix.005 file - promoters50/5668930
aaccaat

SEQ ID NO: 75568 - DNA, 8 bp, Unknown
  misc_feature (1)..( 8): Matrix.005 file - promoters50/5668951
attcaatt

SEQ ID NO: 75569 - DNA, 8 bp, Unknown
  misc_feature (1)..( 8): Matrix.005 file - promoters50/5668951
caaaacaa

SEQ ID NO: 75570 - DNA, 7 bp, Unknown
  misc_feature (1)..( 7): Matrix.005 file - promoters50/5668951
cttatct

SEQ ID NO: 75571 - DNA, 9 bp, Unknown
  misc_feature (1)..( 9): Matrix.005 file - promoters50/5668974
caaattaaa

SEQ ID NO: 75572 - DNA, 9 bp, Unknown
  misc_feature (1)..( 9): Matrix.005 file - promoters50/5669002
cataaaacc

SEQ ID NO: 75573 - DNA, 11 bp, Unknown
  misc_feature (1)..( 11): Matrix.005 file - promoters50/5669013
taaatatcttt

SEQ ID NO: 75574 - DNA, 11 bp, Unknown
  misc_feature (1)..( 11): Matrix.005 file - promoters50/5669025
aagttatgtta

SEQ ID NO: 75575 - DNA, 15 bp, Unknown
  misc_feature (1)..( 15): Matrix.005 file - promoters50/5669025
cgttttttagaataa

SEQ ID NO: 75576 - DNA, 7 bp, Unknown
  misc_feature (1)..( 7): Matrix.005 file - promoters50/5669236
gaaaaat

SEQ ID NO: 75577 - DNA, 9 bp, Unknown
  misc_feature (1)..( 9): Matrix.005 file - promoters50/5669236
aattttaaa

SEQ ID NO: 75578 - DNA, 8 bp, Unknown
  misc_feature (1)..( 8): Matrix.005 file - promoters50/5669243
taacttgt

SEQ ID NO: 75579 - DNA, 8 bp, Unknown
  misc_feature (1)..( 8): Matrix.005 file - promoters50/5669243
gcaagagt

SEQ ID NO: 75580 - DNA, 13 bp, Unknown
  misc_feature (1)..( 13): Matrix.005 file - promoters50/5669243
tttgcaaatgaaa

SEQ ID NO: 75581 - DNA, 9 bp, Unknown
  misc_feature (1)..( 9): Matrix.005 file - promoters50/5669243
aatgaaaat

SEQ ID NO: 75582 - DNA, 11 bp, Unknown
  misc_feature (1)..( 11): Matrix.005 file - promoters50/5669243
aatatatgttc

SEQ ID NO: 75583 - DNA, 8 bp, Unknown
  misc_feature (1)..( 8): Matrix.005 file - promoters50/5669243
ggtgttgt

SEQ ID NO: 75584 - DNA, 10 bp, Unknown
  misc_feature (1)..( 10): Matrix.005 file - promoters50/5669243
tgtaatcggg

SEQ ID NO: 75585 - DNA, 8 bp, Unknown
  misc_feature (1)..( 8): Matrix.005 file - promoters50/5669250
gaaaaaaa

SEQ ID NO: 75586 - DNA, 13 bp, Unknown
  misc_feature (1)..( 13): Matrix.005 file - promoters50/5669250
aaatcaaattata

SEQ ID NO: 75587 - DNA, 10 bp, Unknown
  misc_feature (1)..( 10): Matrix.005 file - promoters50/5669508
aatcaaaaat

SEQ ID NO: 75588 - DNA, 9 bp, Unknown
  misc_feature (1)..( 9): Matrix.005 file - promoters50/5669546
tgatatctc

SEQ ID NO: 75589 - DNA, 8 bp, Unknown
  misc_feature (1)..( 8): Matrix.005 file - promoters50/5669546
cgacatgt

SEQ ID NO: 75590 - DNA, 8 bp, Unknown
  misc_feature (1)..( 8): Matrix.005 file - promoters50/5669724
ttaatgtt

SEQ ID NO: 75591 - DNA, 8 bp, Unknown
  misc_feature (1)..( 8): Matrix.005 file - promoters50/5669838
ttatttca

SEQ ID NO: 75592 - DNA, 7 bp, Unknown
  misc_feature (1)..( 7): Matrix.005 file - promoters50/5669838
tttttct

SEQ ID NO: 75593 - DNA, 8 bp, Unknown
  misc_feature (1)..( 8): Matrix.005 file - promoters50/5670300
ttcttgcc

SEQ ID NO: 75594 - DNA, 31 bp, Unknown; identical to SEQ ID NO: 72331
  misc_feature (1)..( 31): Matrix.005 file - promoters50/5670300

SEQ ID NO: 75595 - DNA, 30 bp, Unknown; identical to SEQ ID NO: 71939
  misc_feature (1)..( 30): Matrix.005 file - promoters50/5670300

SEQ ID NO: 75596 - DNA, 15 bp, Unknown
  misc_feature (1)..( 15): Matrix.005 file - promoters50/5670300
cgccttagctttctc

SEQ ID NO: 75597 - DNA, 22 bp, Unknown
  misc_feature (1)..( 22): Matrix.005 file - promoters50/5670300
gaccgagtcgtcctcgtctttt

SEQ ID NO: 75598 - DNA, 19 bp, Unknown
  misc_feature (1)..( 19): Matrix.005 file - promoters50/5670300
ttcttcttctataaaacaa

SEQ ID NO: 75599 - DNA, 9 bp, Unknown
  misc_feature (1)..( 9): Matrix.005 file - promoters50/5670300
caaaaaaac

SEQ ID NO: 75600 - DNA, 6 bp, Unknown
  misc_feature (1)..( 6): Matrix.005 file - promoters50/5670300
aaaaca

SEQ ID NO: 75601 - DNA, 7 bp, Unknown
  misc_feature (1)..( 7): Matrix.005 file - promoters50/5670546
tgttcaa

SEQ ID NO: 75602 - DNA, 8 bp, Unknown
  misc_feature (1)..( 8): Matrix.005 file - promoters50/5670553
atgaacaa

SEQ ID NO: 75603 - DNA, 10 bp, Unknown
  misc_feature (1)..( 10): Matrix.005 file - promoters50/5670553
aaaaacccca

SEQ ID NO: 75604 - DNA, 11 bp, Unknown
  misc_feature (1)..( 11): Matrix.005 file - promoters50/5670592
aatacaaacat

SEQ ID NO: 75605 - DNA, 8 bp, Unknown
  misc_feature (1)..( 8): Matrix.005 file - promoters50/5670680
ataagata

SEQ ID NO: 75606 - DNA, 8 bp, Unknown
  misc_feature (1)..( 8): Matrix.005 file - promoters50/5670784
atttattt

SEQ ID NO: 75607 - DNA, 7 bp, Unknown
  misc_feature (1)..( 7): Matrix.005 file - promoters50/5670784
tgaaagt

SEQ ID NO: 75608 - DNA, 8 bp, Unknown
  misc_feature (1)..( 8): Matrix.005 file - promoters50/5670784
tttgaaaa

SEQ ID NO: 75609 - DNA, 8 bp, Unknown
  misc_feature (1)..( 8): Matrix.005 file - promoters50/5671204
tatcaaaa

SEQ ID NO: 75610 - DNA, 9 bp, Unknown
  misc_feature (1)..( 9): Matrix.005 file - promoters50/5671262
taaaccttg

SEQ ID NO: 75611 - DNA, 12 bp, Unknown
  misc_feature (1)..( 12): Matrix.005 file - promoters50/5671318
atacgtattatt

SEQ ID NO: 75612 - DNA, 8 bp, Unknown
  misc_feature (1)..( 8): Matrix.005 file - promoters50/5671318
ctacgtat

SEQ ID NO: 75613 - DNA, 7 bp, Unknown
  misc_feature (1)..( 7): Matrix.005 file - promoters50/5671338
attttgg

SEQ ID NO: 75614 - DNA, 10 bp, Unknown
  misc_feature (1)..( 10): Matrix.005 file - promoters50/5671338
gtaaatgtaa

SEQ ID NO: 75615 - DNA, 7 bp, Unknown
  misc_feature (1)..( 7): Matrix.005 file - promoters50/5671338
gttaaaa

SEQ ID NO: 75616 - DNA, 9 bp, Unknown
  misc_feature (1)..( 9): Matrix.005 file - promoters50/5671338
tgaaatttt

SEQ ID NO: 75617 - DNA, 10 bp, Unknown
  misc_feature (1)..( 10): Matrix.005 file - promoters50/5671338
tttaatgaat

SEQ ID NO: 75618 - DNA, 10 bp, Unknown
  misc_feature (1)..( 10): Matrix.005 file - promoters50/5671338
tttgattttt

SEQ ID NO: 75619 - DNA, 9 bp, Unknown
  misc_feature (1)..( 9): Matrix.005 file - promoters50/5671338
aataattct

SEQ ID NO: 75620 - DNA, 8 bp, Unknown
  misc_feature (1)..( 8): Matrix.005 file - promoters50/5671338
caaaatta

SEQ ID NO: 75621 - DNA, 8 bp, Unknown
  misc_feature (1)..( 8): Matrix.005 file - promoters50/5671710
gattcttt

SEQ ID NO: 75622 - DNA, 7 bp, Unknown
  misc_feature (1)..( 7): Matrix.005 file - promoters50/5671840
tatgtct

SEQ ID NO: 75623 - DNA, 7 bp, Unknown
  misc_feature (1)..( 7): Matrix.005 file - promoters50/5671840
aattaaa

SEQ ID NO: 75624 - DNA, 9 bp, Unknown
  misc_feature (1)..( 9): Matrix.005 file - promoters50/5671840
tgtttttgt

SEQ ID NO: 75625 - DNA, 8 bp, Unknown
  misc_feature (1)..( 8): Matrix.005 file - promoters50/5671852
ttcttgcc

SEQ ID NO: 75626 - DNA, 9 bp, Unknown
  misc_feature (1)..( 9): Matrix.005 file - promoters50/5671955
taattttac

SEQ ID NO: 75627 - DNA, 10 bp, Unknown
  misc_feature (1)..( 10): Matrix.005 file - promoters50/5671955
caattaaaaa

SEQ ID NO: 75628 - DNA, 11 bp, Unknown
  misc_feature (1)..( 11): Matrix.005 file - promoters50/5672281
gttttaaaagt

SEQ ID NO: 75629 - DNA, 6 bp, Unknown
  misc_feature (1)..( 6): Matrix.005 file - promoters50/5672661
catctc

SEQ ID NO: 75630 - DNA, 7 bp, Unknown
  misc_feature (1)..( 7): Matrix.005 file - promoters50/5672792
aatgtcg

SEQ ID NO: 75631 - DNA, 10 bp, Unknown
  misc_feature (1)..( 10): Matrix.005 file - promoters50/5672792
tgtattttgt

SEQ ID NO: 75632 - DNA, 12 bp, Unknown
  misc_feature (1)..( 12): Matrix.005 file - promoters50/5672792
ttatatctgtat

SEQ ID NO: 75633 - DNA, 11 bp, Unknown
  misc_feature (1)..( 11): Matrix.005 file - promoters50/5672792
atgtatttgtc

SEQ ID NO: 75634 - DNA, 12 bp, Unknown
  misc_feature (1)..( 12): Matrix.005 file - promoters50/5672842
aggcccaataaa

SEQ ID NO: 75635 - DNA, 12 bp, Unknown
  misc_feature (1)..( 12): Matrix.005 file - promoters50/5672842
taaaagaaataa

SEQ ID NO: 75636 - DNA, 10 bp, Unknown
  misc_feature (1)..( 10): Matrix.005 file - promoters50/5672842
taatttgtct

SEQ ID NO: 75637 - DNA, 11 bp, Unknown
  misc_feature (1)..( 11): Matrix.005 file - promoters50/5672842
aaaataaataa

SEQ ID NO: 75638 - DNA, 9 bp, Unknown
  misc_feature (1)..( 9): Matrix.005 file - promoters50/5672842
tacaaaaaa

SEQ ID NO: 75639 - DNA, 10 bp, Unknown
  misc_feature (1)..( 10): Matrix.005 file - promoters50/5672842
acaagaaaaa

SEQ ID NO: 75640 - DNA, 8 bp, Unknown
  misc_feature (1)..( 8): Matrix.005 file - promoters50/5672872
attagaat

SEQ ID NO: 75641 - DNA, 11 bp, Unknown
  misc_feature (1)..( 11): Matrix.005 file - promoters50/5672872
agactcatctc

SEQ ID NO: 75642 - DNA, 10 bp, Unknown
  misc_feature (1)..( 10): Matrix.005 file - promoters50/5672872
ttttattata

SEQ ID NO: 75643 - DNA, 17 bp, Unknown
  misc_feature (1)..( 17): Matrix.005 file - promoters50/5672872
ttttattttagatattt

SEQ ID NO: 75644 - DNA, 9 bp, Unknown
  misc_feature (1)..( 9): Matrix.005 file - promoters50/5672872
acgcataga

SEQ ID NO: 75645 - DNA, 8 bp, Unknown
  misc_feature (1)..( 8): Matrix.005 file - promoters50/5672872
taaattat

SEQ ID NO: 75646 - DNA, 13 bp, Unknown
  misc_feature (1)..( 13): Matrix.005 file - promoters50/5672872
gccgtattaattt

SEQ ID NO: 75647 - DNA, 7 bp, Unknown
  misc_feature (1)..( 7): Matrix.005 file - promoters50/5673089
tttatta

SEQ ID NO: 75648 - DNA, 9 bp, Unknown
  misc_feature (1)..( 9): Matrix.005 file - promoters50/5673089
ccgcacaaa

SEQ ID NO: 75649 - DNA, 11 bp, Unknown
  misc_feature (1)..( 11): Matrix.005 file - promoters50/5673089
tatgattatta

SEQ ID NO: 75650 - DNA, 9 bp, Unknown
  misc_feature (1)..( 9): Matrix.005 file - promoters50/5673348
aatgttatt

SEQ ID NO: 75651 - DNA, 8 bp, Unknown
  misc_feature (1)..( 8): Matrix.005 file - promoters50/5673348
aaatattt

SEQ ID NO: 75652 - DNA, 9 bp, Unknown
  misc_feature (1)..( 9): Matrix.005 file - promoters50/5673348
taaatcaac

SEQ ID NO: 75653 - DNA, 9 bp, Unknown
  misc_feature (1)..( 9): Matrix.005 file - promoters50/5673348
ctatagtat

SEQ ID NO: 75654 - DNA, 9 bp, Unknown
  misc_feature (1)..( 9): Matrix.005 file - promoters50/5673348
caaaacaat

SEQ ID NO: 75655 - DNA, 8 bp, Unknown
  misc_feature (1)..( 8): Matrix.005 file - promoters50/5673348
tttctata

SEQ ID NO: 75656 - DNA, 11 bp, Unknown
  misc_feature (1)..( 11): Matrix.005 file - promoters50/5673514
ataaattaata

SEQ ID NO: 75657 - DNA, 6 bp, Unknown
  misc_feature (1)..( 6): Matrix.005 file - promoters50/5673650
aaaatt

SEQ ID NO: 75658 - DNA, 10 bp, Unknown
  misc_feature (1)..( 10): Matrix.005 file - promoters50/5673674
aacaaacaaa

SEQ ID NO: 75659 - DNA, 10 bp, Unknown
  misc_feature (1)..( 10): Matrix.005 file - promoters50/5673674
ttcaaagaaa

SEQ ID NO: 75660 - DNA, 10 bp, Unknown
  misc_feature (1)..( 10): Matrix.005 file - promoters50/5673674
agaaaaaaaa

SEQ ID NO: 75661 - DNA, 10 bp, Unknown
  misc_feature (1)..( 10): Matrix.005 file - promoters50/5673773
acataaactt

SEQ ID NO: 75662 - DNA, 11 bp, Unknown
  misc_feature (1)..( 11): Matrix.005 file - promoters50/5673796
ttggttagaat

SEQ ID NO: 75663 - DNA, 8 bp, Unknown
  misc_feature (1)..( 8): Matrix.005 file - promoters50/5673796
ttttattt

SEQ ID NO: 75664 - DNA, 7 bp, Unknown
  misc_feature (1)..( 7): Matrix.005 file - promoters50/5674194
aataaaa

SEQ ID NO: 75665 - DNA, 14 bp, Unknown
  misc_feature (1)..( 14): Matrix.005 file - promoters50/5674194
aatcatgaaaggtt

SEQ ID NO: 75666 - DNA, 12 bp, Unknown
  misc_feature (1)..( 12): Matrix.005 file - promoters50/5674530
ataaccaaataa

SEQ ID NO: 75667 - DNA, 9 bp, Unknown
  misc_feature (1)..( 9): Matrix.005 file - promoters50/5674530
agaacaaac

SEQ ID NO: 75668 - DNA, 9 bp, Unknown
  misc_feature (1)..( 9): Matrix.005 file - promoters50/5674626
aaataaatt

SEQ ID NO: 75669 - DNA, 8 bp, Unknown
  misc_feature (1)..( 8): Matrix.005 file - promoters50/5674634
aaaatgtg

SEQ ID NO: 75670 - DNA, 10 bp, Unknown
  misc_feature (1)..( 10): Matrix.005 file - promoters50/5674634
ataaaatttg

SEQ ID NO: 75671 - DNA, 12 bp, Unknown
  misc_feature (1)..( 12): Matrix.005 file - promoters50/5674634
tttacatttatt

SEQ ID NO: 75672 - DNA, 15 bp, Unknown
  misc_feature (1)..( 15): Matrix.005 file - promoters50/5674634
tgatttcctgataaa

SEQ ID NO: 75673 - DNA, 10 bp, Unknown
  misc_feature (1)..( 10): Matrix.005 file - promoters50/5674666
aattaaaaga

SEQ ID NO: 75674 - DNA, 9 bp, Unknown
  misc_feature (1)..( 9): Matrix.005 file - promoters50/5674666
tctaccatt

SEQ ID NO: 75675 - DNA, 8 bp, Unknown
  misc_feature (1)..( 8): Matrix.005 file - promoters50/5674666
atataaat

SEQ ID NO: 75676 - DNA, 10 bp, Unknown
  misc_feature (1)..( 10): Matrix.005 file - promoters50/5675330
tttgtggtaa

SEQ ID NO: 75677 - DNA, 6 bp, Unknown
  misc_feature (1)..( 6): Matrix.005 file - promoters50/5675330
catgtt

SEQ ID NO: 75678 - DNA, 7 bp, Unknown
  misc_feature (1)..( 7): Matrix.005 file - promoters50/5675583
aaaaatt

SEQ ID NO: 75679 - DNA, 8 bp, Unknown
  misc_feature (1)..( 8): Matrix.005 file - promoters50/5675583
caataaac

SEQ ID NO: 75680 - DNA, 9 bp, Unknown
  misc_feature (1)..( 9): Matrix.005 file - promoters50/5675583
atgatttgg

SEQ ID NO: 75681 - DNA, 8 bp, Unknown
  misc_feature (1)..( 8): Matrix.005 file - promoters50/5675583
aaaactgc

SEQ ID NO: 75682 - DNA, 8 bp, Unknown
  misc_feature (1)..( 8): Matrix.005 file - promoters50/5675628
ttctttgt

SEQ ID NO: 75683 - DNA, 11 bp, Unknown
  misc_feature (1)..( 11): Matrix.005 file - promoters50/5675661
ttggatttaga

SEQ ID NO: 75684 - DNA, 9 bp, Unknown
  misc_feature (1)..( 9): Matrix.005 file - promoters50/5675661
agataaaag

SEQ ID NO: 75685 - DNA, 11 bp, Unknown
  misc_feature (1)..( 11): Matrix.005 file - promoters50/5676027
ctaatttcaaa

SEQ ID NO: 75686 - DNA, 11 bp, Unknown
  misc_feature (1)..( 11): Matrix.005 file - promoters50/5676027
aaacttaaatt

SEQ ID NO: 75687 - DNA, 9 bp, Unknown
  misc_feature (1)..( 9): Matrix.005 file - promoters50/5676160
attttgaat

SEQ ID NO: 75688 - DNA, 11 bp, Unknown
  misc_feature (1)..( 11): Matrix.005 file - promoters50/5676160
atgtgatataa

SEQ ID NO: 75689 - DNA, 17 bp, Unknown
  misc_feature (1)..( 17): Matrix.005 file - promoters50/5676160
taaagtaaatttttttt

SEQ ID NO: 75690 - DNA, 14 bp, Unknown
  misc_feature (1)..( 14): Matrix.005 file - promoters50/5676160
aaagtttataaaaa

SEQ ID NO: 75691 - DNA, 12 bp, Unknown
  misc_feature (1)..( 12): Matrix.005 file - promoters50/5676513
attattttattt

SEQ ID NO: 75692 - DNA, 8 bp, Unknown
  misc_feature (1)..( 8): Matrix.005 file - promoters50/5676513
tttgtttt

SEQ ID NO: 75693 - DNA, 11 bp, Unknown
  misc_feature (1)..( 11): Matrix.005 file - promoters50/5676647
gaattatcttt

SEQ ID NO: 75694 - DNA, 9 bp, Unknown
  misc_feature (1)..( 9): Matrix.005 file - promoters50/5676647
aaccaatta

SEQ ID NO: 75695 - DNA, 10 bp, Unknown
  misc_feature (1)..( 10): Matrix.005 file - promoters50/5676647
acaaaacaat

SEQ ID NO: 75696 - DNA, 7 bp, Unknown
  misc_feature (1)..( 7): Matrix.005 file - promoters50/5677230
ttttgaa

SEQ ID NO: 75697 - DNA, 11 bp, Unknown
  misc_feature (1)..( 11): Matrix.005 file - promoters50/5677230
aaaataaatta

SEQ ID NO: 75698 - DNA, 6 bp, Unknown
  misc_feature (1)..( 6): Matrix.005 file - promoters50/5677230
tgtgga

SEQ ID NO: 75699 - DNA, 6 bp, Unknown
  misc_feature (1)..( 6): Matrix.005 file - promoters50/5677230
gacatt

SEQ ID NO: 75700 - DNA, 7 bp, Unknown
  misc_feature (1)..( 7): Matrix.005 file - promoters50/5677230
aagtaaa

SEQ ID NO: 75701 - DNA, 6 bp, Unknown
  misc_feature (1)..( 6): Matrix.005 file - promoters50/5677230
tttgga

SEQ ID NO: 75702 - DNA, 8 bp, Unknown
  misc_feature (1)..( 8): Matrix.005 file - promoters50/5677230
atttgcag

SEQ ID NO: 75703 - DNA, 10 bp, Unknown
  misc_feature (1)..( 10): Matrix.005 file - promoters50/5677230
ggaaatgaaa

SEQ ID NO: 75704 - DNA, 11 bp, Unknown
  misc_feature (1)..( 11): Matrix.005 file - promoters50/5677240
taagttgttgt

SEQ ID NO: 75705 - DNA, 9 bp, Unknown
  misc_feature (1)..( 9): Matrix.005 file - promoters50/5677240
cttcatcta

SEQ ID NO: 75706 - DNA, 11 bp, Unknown
  misc_feature (1)..( 11): Matrix.005 file - promoters50/5677240
atataagtttt

SEQ ID NO: 75707 - DNA, 9 bp, Unknown
  misc_feature (1)..( 9): Matrix.005 file - promoters50/5677240
ttattacta

SEQ ID NO: 75708 - DNA, 6 bp, Unknown
  misc_feature (1)..( 6): Matrix.005 file - promoters50/5677240
agatat

SEQ ID NO: 75709 - DNA, 7 bp, Unknown
  misc_feature (1)..( 7): Matrix.005 file - promoters50/5677240
aaaaata

SEQ ID NO: 75710 - DNA, 10 bp, Unknown
  misc_feature (1)..( 10): Matrix.005 file - promoters50/5677274
acatttataa

SEQ ID NO: 75711 - DNA, 13 bp, Unknown
  misc_feature (1)..( 13): Matrix.005 file - promoters50/5677274
tttaaaatatgaa

SEQ ID NO: 75712 - DNA, 9 bp, Unknown
  misc_feature (1)..( 9): Matrix.005 file - promoters50/5677286
ggagaaaaa

SEQ ID NO: 75713 - DNA, 10 bp, Unknown
  misc_feature (1)..( 10): Matrix.005 file - promoters50/5677286
tttctaaaaa

SEQ ID NO: 75714 - DNA, 14 bp, Unknown
  misc_feature (1)..( 14): Matrix.005 file - promoters50/5677298
tattgatttggtac

SEQ ID NO: 75715 - DNA, 11 bp, Unknown
  misc_feature (1)..( 11): Matrix.005 file - promoters50/5677333
gttggttctcg

SEQ ID NO: 75716 - DNA, 13 bp, Unknown
  misc_feature (1)..( 13): Matrix.005 file - promoters50/5677344
caaaaataaaaca

SEQ ID NO: 75717 - DNA, 8 bp, Unknown
  misc_feature (1)..( 8): Matrix.005 file - promoters50/5677360
acttttaa

SEQ ID NO: 75718 - DNA, 8 bp, Unknown
  misc_feature (1)..( 8): Matrix.005 file - promoters50/5677360
aacatata

SEQ ID NO: 75719 - DNA, 9 bp, Unknown
  misc_feature (1)..( 9): Matrix.005 file - promoters50/5677360
aatatatca

SEQ ID NO: 75720 - DNA, 10 bp, Unknown
  misc_feature (1)..( 10): Matrix.005 file - promoters50/5677360
aaagtataaa

SEQ ID NO: 75721 - DNA, 8 bp, Unknown
  misc_feature (1)..( 8): Matrix.005 file - promoters50/5677360
atacatca

SEQ ID NO: 75722 - DNA, 8 bp, Unknown
  misc_feature (1)..( 8): Matrix.005 file - promoters50/5677360
aaagaaaa

SEQ ID NO: 75723 - DNA, 11 bp, Unknown
  misc_feature (1)..( 11): Matrix.005 file - promoters50/5677360
agagtttaaaa

SEQ ID NO: 75724 - DNA, 8 bp, Unknown
  misc_feature (1)..( 8): Matrix.005 file - promoters50/5677360
aatatata

SEQ ID NO: 75725 - DNA, 7 bp, Unknown
  misc_feature (1)..( 7): Matrix.005 file - promoters50/5677484
ttctttt

SEQ ID NO: 75726 - DNA, 8 bp, Unknown
  misc_feature (1)..( 8): Matrix.005 file - promoters50/5677501
atcagaaa

SEQ ID NO: 75727 - DNA, 11 bp, Unknown
  misc_feature (1)..( 11): Matrix.005 file - promoters50/5680986
attctacatta

SEQ ID NO: 75728 - DNA, 16 bp, Unknown
  misc_feature (1)..( 16): Matrix.005 file - promoters50/5681002
aaaaagttgattaaat

SEQ ID NO: 75729 - DNA, 10 bp, Unknown
  misc_feature (1)..( 10): Matrix.005 file - promoters50/5681002
tatttaaata

SEQ ID NO: 75730 - DNA, 10 bp, Unknown
  misc_feature (1)..( 10): Matrix.005 file - promoters50/5681002
taaaattaat

SEQ ID NO: 75731 - DNA, 7 bp, Unknown
  misc_feature (1)..( 7): Matrix.005 file - promoters50/5681002
gtattgt

SEQ ID NO: 75732 - DNA, 10 bp, Unknown
  misc_feature (1)..( 10): Matrix.005 file - promoters50/5681157
accttaaaaa

SEQ ID NO: 75733 - DNA, 6 bp, Unknown
  misc_feature (1)..( 6): Matrix.005 file - promoters50/5681157
ttaaaa

SEQ ID NO: 75734 - DNA, 10 bp, Unknown
  misc_feature (1)..( 10): Matrix.005 file - promoters50/5681157
acaaaataaa

SEQ ID NO: 75735 - DNA, 11 bp, Unknown
  misc_feature (1)..( 11): Matrix.005 file - promoters50/5681157
ataaaccaaaa

SEQ ID NO: 75736 - DNA, 9 bp, Unknown
  misc_feature (1)..( 9): Matrix.005 file - promoters50/5681157
aaaataaac

SEQ ID NO: 75737 - DNA, 10 bp, Unknown
  misc_feature (1)..( 10): Matrix.005 file - promoters50/5681157
tttgtaatat

SEQ ID NO: 75738 - DNA, 9 bp, Unknown
  misc_feature (1)..( 9): Matrix.005 file - promoters50/5681157
atttaaaaa

SEQ ID NO: 75739 - DNA, 10 bp, Unknown
  misc_feature (1)..( 10): Matrix.005 file - promoters50/5681157
attagcaatg

SEQ ID NO: 75740 - DNA, 8 bp, Unknown
  misc_feature (1)..( 8): Matrix.005 file - promoters50/5753942
caatcaaa

SEQ ID NO: 75741 - DNA, 11 bp, Unknown
  misc_feature (1)..( 11): Matrix.005 file - promoters50/5753942
attttgttttt

SEQ ID NO: 75742 - DNA, 10 bp, Unknown
  misc_feature (1)..( 10): Matrix.005 file - promoters50/5753942
aataataaat

SEQ ID NO: 75743 - DNA, 9 bp, Unknown
  misc_feature (1)..( 9): Matrix.005 file - promoters50/5753942
tacattgtt

SEQ ID NO: 75744 - DNA, 11 bp, Unknown
  misc_feature (1)..( 11): Matrix.005 file - promoters50/5753942
gaatttgggcc

SEQ ID NO: 75745 - DNA, 11 bp, Unknown
  misc_feature (1)..( 11): Matrix.005 file - promoters50/5754265
gatttttgttt

SEQ ID NO: 75746 - DNA, 8 bp, Unknown
  misc_feature (1)..( 8): Matrix.005 file - promoters50/5754269
tattatgg

SEQ ID NO: 75747 - DNA, 10 bp, Unknown
  misc_feature (1)..( 10): Matrix.005 file - promoters50/5754273
aaaaaaatta

SEQ ID NO: 75748 - DNA, 8 bp, Unknown
  misc_feature (1)..( 8): Matrix.005 file - promoters50/5754276
aaatcgat

SEQ ID NO: 75749 - DNA, 9 bp, Unknown
  misc_feature (1)..( 9): Matrix.005 file - promoters50/5754276
tctatttgt

SEQ ID NO: 75750 - DNA, 13 bp, Unknown
  misc_feature (1)..( 13): Matrix.005 file - promoters50/5754280
acaaaagatatga

SEQ ID NO: 75751 - DNA, 8 bp, Unknown
  misc_feature (1)..( 8): Matrix.005 file - promoters50/5754288
tacaaaaa

SEQ ID NO: 75752 - DNA, 10 bp, Unknown
  misc_feature (1)..( 10): Matrix.005 file - promoters50/5754288
ttattatata

SEQ ID NO: 75753 - DNA, 10 bp, Unknown
  misc_feature (1)..( 10): Matrix.005 file - promoters50/5754288
ttgaatgttt

SEQ ID NO: 75754 - DNA, 11 bp, Unknown
  misc_feature (1)..( 11): Matrix.005 file - promoters50/5754419
atataatgata

SEQ ID NO: 75755 - DNA, 14 bp, Unknown
  misc_feature (1)..( 14): Matrix.005 file - promoters50/5754419
aataaagaaaatta

SEQ ID NO: 75756 - DNA, 9 bp, Unknown
  misc_feature (1)..( 9): Matrix.005 file - promoters50/5754419
taataaaac

SEQ ID NO: 75757 - DNA, 8 bp, Unknown
  misc_feature (1)..( 8): Matrix.005 file - promoters50/5754419
taatatat

SEQ ID NO: 75758 - DNA, 14 bp, Unknown
  misc_feature (1)..( 14): Matrix.005 file - promoters50/5754423
ttatcttccaaata

SEQ ID NO: 75759 - DNA, 11 bp, Unknown
  misc_feature (1)..( 11): Matrix.005 file - promoters50/5754461
aataaattaat

SEQ ID NO: 75760 - DNA, 8 bp, Unknown
  misc_feature (1)..( 8): Matrix.005 file - promoters50/5754461
gtaataat

SEQ ID NO: 75761 - DNA, 13 bp, Unknown
  misc_feature (1)..( 13): Matrix.005 file - promoters50/5754461
caataatgtatat

SEQ ID NO: 75762 - DNA, 7 bp, Unknown
  misc_feature (1)..( 7): Matrix.005 file - promoters50/5755107
ggttttg

SEQ ID NO: 75763 - DNA, 7 bp, Unknown
  misc_feature (1)..( 7): Matrix.005 file - promoters50/5755107
gtgtttc

SEQ ID NO: 75764 - DNA, 11 bp, Unknown
  misc_feature (1)..( 11): Matrix.005 file - promoters50/5755107
acaattaagcc

SEQ ID NO: 75765 - DNA, 6 bp, Unknown
  misc_feature (1)..( 6): Matrix.005 file - promoters50/5755107
attgga

SEQ ID NO: 75766 - DNA, 7 bp, Unknown
  misc_feature (1)..( 7): Matrix.005 file - promoters50/5755107
aaacaat

SEQ ID NO: 75767 - DNA, 7 bp, Unknown
  misc_feature (1)..( 7): Matrix.005 file - promoters50/5755107
tttcata

SEQ ID NO: 75768 - DNA, 15 bp, Unknown
  misc_feature (1)..( 15): Matrix.005 file - promoters50/5755846
ctctaaaaacaaaat

SEQ ID NO: 75769 - DNA, 11 bp, Unknown
  misc_feature (1)..( 11): Matrix.005 file - promoters50/5755846
atttgatcaat

SEQ ID NO: 75770 - DNA, 7 bp, Unknown
  misc_feature (1)..( 7): Matrix.005 file - promoters50/5756166
tcttctt

SEQ ID NO: 75771 - DNA, 7 bp, Unknown
  misc_feature (1)..( 7): Matrix.005 file - promoters50/5756166
tttattt

SEQ ID NO: 75772 - DNA, 8 bp, Unknown
  misc_feature (1)..( 8): Matrix.005 file - promoters50/5756489
aaaatcta

SEQ ID NO: 75773 - DNA, 15 bp, Unknown
  misc_feature (1)..( 15): Matrix.005 file - promoters50/5756489
caaaatgaattattc

SEQ ID NO: 75774 - DNA, 9 bp, Unknown
  misc_feature (1)..( 9): Matrix.005 file - promoters50/5756489
actaataaa

SEQ ID NO: 75775 - DNA, 8 bp, Unknown
  misc_feature (1)..( 8): Matrix.005 file - promoters50/5756489
taatttac

SEQ ID NO: 75776 - DNA, 10 bp, Unknown
  misc_feature (1)..( 10): Matrix.005 file - promoters50/5756489
aaataataaa

SEQ ID NO: 75777 - DNA, 9 bp, Unknown
  misc_feature (1)..( 9): Matrix.005 file - promoters50/5756489
atatattct

SEQ ID NO: 75778 - DNA, 8 bp, Unknown
  misc_feature (1)..( 8): Matrix.005 file - promoters50/5756489
taatatta

SEQ ID NO: 75779 - DNA, 8 bp, Unknown
  misc_feature (1)..( 8): Matrix.005 file - promoters50/5756489
ctaacaaa

SEQ ID NO: 75780 - DNA, 9 bp, Unknown
  misc_feature (1)..( 9): Matrix.005 file - promoters50/5758021
ataacgata

SEQ ID NO: 75781 - DNA, 12 bp, Unknown
  misc_feature (1)..( 12): Matrix.005 file - promoters50/5759305
taaggcaaattt

SEQ ID NO: 75782 - DNA, 9 bp, Unknown
  misc_feature (1)..( 9): Matrix.005 file - promoters50/5759305
gcaatttta

SEQ ID NO: 75783 - DNA, 15 bp, Unknown
  misc_feature (1)..( 15): Matrix.005 file - promoters50/5773091
tagattcagactcgt

SEQ ID NO: 75784 - DNA, 8 bp, Unknown
  misc_feature (1)..( 8): Matrix.005 file - promoters50/5773091
attgatta

SEQ ID NO: 75785 - DNA, 10 bp, Unknown
  misc_feature (1)..( 10): Matrix.005 file - promoters50/5773091
taatttatta

SEQ ID NO: 75786 - DNA, 12 bp, Unknown
  misc_feature (1)..( 12): Matrix.005 file - promoters50/5773759
tttagcaataaa

SEQ ID NO: 75787 - DNA, 7 bp, Unknown
  misc_feature (1)..( 7): Matrix.005 file - promoters50/5773759
ttattta

SEQ ID NO: 75788 - DNA, 8 bp, Unknown
  misc_feature (1)..( 8): Matrix.005 file - promoters50/5773759
aatcgcat

SEQ ID NO: 75789 - DNA, 8 bp, Unknown
  misc_feature (1)..( 8): Matrix.005 file - promoters50/5773772
ttaaatta

SEQ ID NO: 75790 - DNA, 7 bp, Unknown
  misc_feature (1)..( 7): Matrix.005 file - promoters50/5773772
tttgatt

SEQ ID NO: 75791 - DNA, 9 bp, Unknown
  misc_feature (1)..( 9): Matrix.005 file - promoters50/5773772
attttttta

SEQ ID NO: 75792 - DNA, 11 bp, Unknown
  misc_feature (1)..( 11): Matrix.005 file - promoters50/5774459
ataaatcaatc

SEQ ID NO: 75793 - DNA, 8 bp, Unknown
  misc_feature (1)..( 8): Matrix.005 file - promoters50/5774459
tgcagtgg

SEQ ID NO: 75794 - DNA, 10 bp, Unknown
  misc_feature (1)..( 10): Matrix.005 file - promoters50/5774459
tgttttgtta

SEQ ID NO: 75795 - DNA, 7 bp, Unknown
  misc_feature (1)..( 7): Matrix.005 file - promoters50/5774545
ttaaata

SEQ ID NO: 75796 - DNA, 8 bp, Unknown
  misc_feature (1)..( 8): Matrix.005 file - promoters50/5774545
tttataaa

SEQ ID NO: 75797 - DNA, 8 bp, Unknown
  misc_feature (1)..( 8): Result.001 file - promoters75/1007152
ccttctct

SEQ ID NO: 75798 - DNA, 8 bp, Unknown
  misc_feature (1)..( 8): Result.001 file - promoters75/1007152
tcttctct

SEQ ID NO: 75799 - DNA, 9 bp, Unknown
  misc_feature (1)..( 9): Result.001 file - promoters75/1007152
tcttcttct

SEQ ID NO: 75800 - DNA, 9 bp, Unknown
  misc_feature (1)..( 9): Result.001 file - promoters75/1007152
attttgatt

SEQ ID NO: 75801 - DNA, 9 bp, Unknown
  misc_feature (1)..( 9): Result.001 file - promoters75/1007152
attttgatt

SEQ ID NO: 75802 - DNA, 9 bp, Unknown
  misc_feature (1)..( 9): Result.001 file - promoters75/1007273
gttttgact

SEQ ID NO: 75803 - DNA, 8 bp, Unknown
  misc_feature (1)..( 8): Result.001 file - promoters75/1007273
aaagaacc

SEQ ID NO: 75804 - DNA, 8 bp, Unknown
  misc_feature (1)..( 8): Result.001 file - promoters75/1007273
aaagaacg

SEQ ID NO: 75805 - DNA, 8 bp, Unknown
  misc_feature (1)..( 8): Result.001 file - promoters75/1007273
aaaaaacc

SEQ ID NO: 75806 - DNA, 7 bp, Unknown
  misc_feature (1)..( 7): Result.001 file - promoters75/1007273
cgattac

SEQ ID NO: 75807 - DNA, 7 bp, Unknown
  misc_feature (1)..( 7): Result.001 file - promoters75/1007273
agattac

SEQ ID NO: 75808 - DNA, 7 bp, Unknown
  misc_feature (1)..( 7): Result.001 file - promoters75/1007370
agattaa

SEQ ID NO: 75809 - DNA, 12 bp, Unknown
  misc_feature (1)..( 12): Result.001 file - promoters75/1007370
caacaatgtaca

SEQ ID NO: 75810 - DNA, 12 bp, Unknown
  misc_feature (1)..( 12): Result.001 file - promoters75/1007370
caataatttaca

SEQ ID NO: 75811 - DNA, 12 bp, Unknown
  misc_feature (1)..( 12): Result.001 file - promoters75/1007967
tgaaaatttata

SEQ ID NO: 75812 - DNA, 8 bp, Unknown
  misc_feature (1)..( 8): Result.001 file - promoters75/1007967
attcttaa

SEQ ID NO: 75813 - DNA, 8 bp, Unknown
  misc_feature (1)..( 8): Result.001 file - promoters75/1007967
attgttat

SEQ ID NO: 75814 - DNA, 8 bp, Unknown
  misc_feature (1)..( 8): Result.001 file - promoters75/1007967
gttcataa

SEQ ID NO: 75815 - DNA, 9 bp, Unknown
  misc_feature (1)..( 9): Result.001 file - promoters75/1007967
aatttcaac

SEQ ID NO: 75816 - DNA, 9 bp, Unknown
  misc_feature (1)..( 9): Result.001 file - promoters75/1007967
aatttgaac

SEQ ID NO: 75817 - DNA, 9 bp, Unknown
  misc_feature (1)..( 9): Result.001 file - promoters75/1008148
aatgtgaaa

SEQ ID NO: 75818 - DNA, 10 bp, Unknown
  misc_feature (1)..( 10): Result.001 file - promoters75/1008148
atatgttaat

SEQ ID NO: 75819 - DNA, 10 bp, Unknown
  misc_feature (1)..( 10): Result.001 file - promoters75/1008148
atatgtggta

SEQ ID NO: 75820 - DNA, 10 bp, Unknown
  misc_feature (1)..( 10): Result.001 file - promoters75/1008148
atatgataat

SEQ ID NO: 75821 - DNA, 10 bp, Unknown
  misc_feature (1)..( 10): Result.001 file - promoters75/1008218
atatgtgcaa

SEQ ID NO: 75822 - DNA, 8 bp, Unknown
  misc_feature (1)..( 8): Result.001 file - promoters75/1008218
atttattt

SEQ ID NO: 75823 - DNA, 8 bp, Unknown
  misc_feature (1)..( 8): Result.001 file - promoters75/1008218
atttattt

SEQ ID NO: 75824 - DNA, 8 bp, Unknown
  misc_feature (1)..( 8): Result.001 file - promoters75/1008218
atttatgt

SEQ ID NO: 75825 - DNA, 9 bp, Unknown
  misc_feature (1)..( 9): Result.001 file - promoters75/1008218
tatttgatt

SEQ ID NO: 75826 - DNA, 9 bp, Unknown
  misc_feature (1)..( 9): Result.001 file - promoters75/1008218
catttaatt

SEQ ID NO: 75827 - DNA, 9 bp, Unknown
  misc_feature (1)..( 9): Result.001 file - promoters75/1008218
catttatgt

SEQ ID NO: 75828 - DNA, 8 bp, Unknown
  misc_feature (1)..( 8): Result.001 file - promoters75/1008218
gtatagtt

SEQ ID NO: 75829 - DNA, 8 bp, Unknown
  misc_feature (1)..( 8): Result.001 file - promoters75/1008218
atatagtc

SEQ ID NO: 75830 - DNA, 8 bp, Unknown
  misc_feature (1)..( 8): Result.001 file - promoters75/1008218
gtatggtt

SEQ ID NO: 75831 - DNA, 10 bp, Unknown
  misc_feature (1)..( 10): Result.001 file - promoters75/1008218
ctttaatcaa

SEQ ID NO: 75832 - DNA, 10 bp, Unknown
  misc_feature (1)..( 10): Result.001 file - promoters75/1008218
aaacaatcaa

SEQ ID NO: 75833 - DNA, 10 bp, Unknown
  misc_feature (1)..( 10): Result.001 file - promoters75/1008218
cttaaatcat

SEQ ID NO: 75834 - DNA, 8 bp, Unknown
  misc_feature (1)..( 8): Result.001 file - promoters75/1008218
gagtatta

SEQ ID NO: 75835 - DNA, 8 bp, Unknown
  misc_feature (1)..( 8): Result.001 file - promoters75/1008218
tagtattt

SEQ ID NO: 75836 - DNA, 8 bp, Unknown
  misc_feature (1)..( 8): Result.001 file - promoters75/1008218
tagcattt

SEQ ID NO: 75837 - DNA, 10 bp, Unknown
  misc_feature (1)..( 10): Result.001 file - promoters75/1008218
atatttcttg

SEQ ID NO: 75838 - DNA, 10 bp, Unknown
  misc_feature (1)..( 10): Result.001 file - promoters75/1008218
ataattctcc

SEQ ID NO: 75839 - DNA, 10 bp, Unknown
  misc_feature (1)..( 10): Result.001 file - promoters75/1008443
gtttttcttg

SEQ ID NO: 75840 - DNA, 12 bp, Unknown
  misc_feature (1)..( 12): Result.001 file - promoters75/1008443
gataaatattca

SEQ ID NO: 75841 - DNA, 12 bp, Unknown
  misc_feature (1)..( 12): Result.001 file - promoters75/1008443
ataaaaaatttt

SEQ ID NO: 75842 - DNA, 12 bp, Unknown
  misc_feature (1)..( 12): Result.001 file - promoters75/1008443
atataaaatggt

SEQ ID NO: 75843 - DNA, 12 bp, Unknown
  misc_feature (1)..( 12): Result.001 file - promoters75/1008443
agaaaaaaaaaa

SEQ ID NO: 75844 - DNA, 12 bp, Unknown
  misc_feature (1)..( 12): Result.001 file - promoters75/1008443
attccaaatttt

SEQ ID NO: 75845 - DNA, 12 bp, Unknown
  misc_feature (1)..( 12): Result.001 file - promoters75/1008443
ccaaacaaaaca

SEQ ID NO: 75846 - DNA, 12 bp, Unknown
  misc_feature (1)..( 12): Result.001 file - promoters75/1008443
agaaacaaagta

SEQ ID NO: 75847 - DNA, 12 bp, Unknown
  misc_feature (1)..( 12): Result.001 file - promoters75/1008443
tcaaagaaattc

SEQ ID NO: 75848 - DNA, 12 bp, Unknown
  misc_feature (1)..( 12): Result.001 file - promoters75/1008443
agaaaaaaaaaa

SEQ ID NO: 75849 - DNA, 12 bp, Unknown
  misc_feature (1)..( 12): Result.001 file - promoters75/1008732
ataaaaaatttt

SEQ ID NO: 75850 - DNA, 9 bp, Unknown
  misc_feature (1)..( 9): Result.001 file - promoters75/1008732
agtaattta

SEQ ID NO: 75851 - DNA, 9 bp, Unknown
  misc_feature (1)..( 9): Result.001 file - promoters75/1008732
agtagtttc

SEQ ID NO: 75852 - DNA, 9 bp, Unknown
  misc_feature (1)..( 9): Result.001 file - promoters75/1008732
ttgagtttc

SEQ ID NO: 75853 - DNA, 9 bp, Unknown
  misc_feature (1)..( 9): Result.001 file - promoters75/1008732
aaattttaa

SEQ ID NO: 75854 - DNA, 9 bp, Unknown
  misc_feature (1)..( 9): Result.001 file - promoters75/1008732
aaatttgtt

SEQ ID NO: 75855 - DNA, 9 bp, Unknown
  misc_feature (1)..( 9): Result.001 file - promoters75/1008732
aaatatgtt

SEQ ID NO: 75856 - DNA, 8 bp, Unknown
  misc_feature (1)..( 8): Result.001 file - promoters75/1008732
acatattt

SEQ ID NO: 75857 - DNA, 8 bp, Unknown
  misc_feature (1)..( 8): Result.001 file - promoters75/1008732
acatatta

SEQ ID NO: 75858 - DNA, 8 bp, Unknown
  misc_feature (1)..( 8): Result.001 file - promoters75/1008732
tcatctta

SEQ ID NO: 75859 - DNA, 11 bp, Unknown
  misc_feature (1)..( 11): Result.001 file - promoters75/1008732
attttaatctc

SEQ ID NO: 75860 - DNA, 11 bp, Unknown
  misc_feature (1)..( 11): Result.001 file - promoters75/1008732
tttttattcta

SEQ ID NO: 75861 - DNA, 11 bp, Unknown
  misc_feature (1)..( 11): Result.001 file - promoters75/1008732
gttgtattcta

SEQ ID NO: 75862 - DNA, 11 bp, Unknown
  misc_feature (1)..( 11): Result.001 file - promoters75/1008732
tttttacggcg

SEQ ID NO: 75863 - DNA, 9 bp, Unknown
  misc_feature (1)..( 9): Result.001 file - promoters75/1008732
aatactttt

SEQ ID NO: 75864 - DNA, 9 bp, Unknown
  misc_feature (1)..( 9): Result.001 file - promoters75/1008732
aattctttt

SEQ ID NO: 75865 - DNA, 9 bp, Unknown
  misc_feature (1)..( 9): Result.001 file - promoters75/1008732
tttacttca

SEQ ID NO: 75866 - DNA, 9 bp, Unknown
  misc_feature (1)..( 9): Result.001 file - promoters75/1008732
atatatctt

SEQ ID NO: 75867 - DNA, 9 bp, Unknown
  misc_feature (1)..( 9): Result.001 file - promoters75/1008732
ataaatctt

SEQ ID NO: 75868 - DNA, 10 bp, Unknown
  misc_feature (1)..( 10): Result.001 file - promoters75/1008732
ttatcatatt

SEQ ID NO: 75869 - DNA, 8 bp, Unknown
  misc_feature (1)..( 8): Result.001 file - promoters75/1008732
atacatca

SEQ ID NO: 75870 - DNA, 8 bp, Unknown
  misc_feature (1)..( 8): Result.001 file - promoters75/1008732
ttacttca

SEQ ID NO: 75871 - DNA, 8 bp, Unknown
  misc_feature (1)..( 8): Result.001 file - promoters75/1008732
ttaattct

SEQ ID NO: 75872 - DNA, 8 bp, Unknown
  misc_feature (1)..( 8): Result.001 file - promoters75/1008732
ttattgaa

SEQ ID NO: 75873 - DNA, 8 bp, Unknown
  misc_feature (1)..( 8): Result.001 file - promoters75/1008732
atatagaa

SEQ ID NO: 75874 - DNA, 8 bp, Unknown
  misc_feature (1)..( 8): Result.001 file - promoters75/1008732
ctatgtag

SEQ ID NO: 75875 - DNA, 13 bp, Unknown
  misc_feature (1)..( 13): Result.001 file - promoters75/1008732
accttcctaaaaa

SEQ ID NO: 75876 - DNA, 13 bp, Unknown
  misc_feature (1)..( 13): Result.001 file - promoters75/1008732
aattaaataaaaa

SEQ ID NO: 75877 - DNA, 13 bp, Unknown
  misc_feature (1)..( 13): Result.001 file - promoters75/1008808
aaagaaataaatc

SEQ ID NO: 75878 - DNA, 7 bp, Unknown
  misc_feature (1)..( 7): Result.001 file - promoters75/1008808
cgaagaa

SEQ ID NO: 75879 - DNA, 7 bp, Unknown
  misc_feature (1)..( 7): Result.001 file - promoters75/1008808
cgatgaa

SEQ ID NO: 75880 - DNA, 7 bp, Unknown
  misc_feature (1)..( 7): Result.001 file - promoters75/1008808
agaagaa

SEQ ID NO: 75881 - DNA, 8 bp, Unknown
  misc_feature (1)..( 8): Result.001 file - promoters75/1008808
acttcctt

SEQ ID NO: 75882 - DNA, 8 bp, Unknown
  misc_feature (1)..( 8): Result.001 file - promoters75/1008808
gcttactt

SEQ ID NO: 75883 - DNA, 8 bp, Unknown
  misc_feature (1)..( 8): Result.001 file - promoters75/1008808
acttccgc

SEQ ID NO: 75884 - DNA, 7 bp, Unknown
  misc_feature (1)..( 7): Result.001 file - promoters75/1008808
ctttgaa

SEQ ID NO: 75885 - DNA, 7 bp, Unknown
  misc_feature (1)..( 7): Result.001 file - promoters75/1008808
gtttgaa

SEQ ID NO: 75886 - DNA, 7 bp, Unknown
  misc_feature (1)..( 7): Result.001 file - promoters75/1008808
gttagaa

SEQ ID NO: 75887 - DNA, 9 bp, Unknown
  misc_feature (1)..( 9): Result.001 file - promoters75/1008808
ctatggtta

SEQ ID NO: 75888 - DNA, 9 bp, Unknown
  misc_feature (1)..( 9): Result.001 file - promoters75/1008808
aaatgatta

SEQ ID NO: 75889 - DNA, 9 bp, Unknown
  misc_feature (1)..( 9): Result.001 file - promoters75/1008808
aaaggatta

SEQ ID NO: 75890 - DNA, 7 bp, Unknown
  misc_feature (1)..( 7): Result.001 file - promoters75/1008808
aatattg

SEQ ID NO: 75891 - DNA, 7 bp, Unknown
  misc_feature (1)..( 7): Result.001 file - promoters75/1008808
aatgttg

SEQ ID NO: 75892 - DNA, 7 bp, Unknown
  misc_feature (1)..( 7): Result.001 file - promoters75/1009030
aatattg

SEQ ID NO: 75893 - DNA, 10 bp, Unknown
  misc_feature (1)..( 10): Result.001 file - promoters75/1009030
tatattacgt

SEQ ID NO: 75894 - DNA, 10 bp, Unknown
  misc_feature (1)..( 10): Result.001 file - promoters75/1009030
tattttatta

SEQ ID NO: 75895 - DNA, 10 bp, Unknown
  misc_feature (1)..( 10): Result.001 file - promoters75/1009030
gatttgattt

SEQ ID NO: 75896 - DNA, 10 bp, Unknown
  misc_feature (1)..( 10): Result.001 file - promoters75/1009030
tgtttgatta

SEQ ID NO: 75897 - DNA, 10 bp, Unknown
  misc_feature (1)..( 10): Result.001 file - promoters75/1009211
ctgatgattt

SEQ ID NO: 75898 - DNA, 8 bp, Unknown
  misc_feature (1)..( 8): Result.001 file - promoters75/1009211
ttcgttac

SEQ ID NO: 75899 - DNA, 8 bp, Unknown
  misc_feature (1)..( 8): Result.001 file - promoters75/1009211
ttcattac

SEQ ID NO: 75900 - DNA, 8 bp, Unknown
  misc_feature (1)..( 8): Result.001 file - promoters75/1009941
ctcattat

SEQ ID NO: 75901 - DNA, 8 bp, Unknown
  misc_feature (1)..( 8): Result.001 file - promoters75/1009941
gttttaaa

SEQ ID NO: 75902 - DNA, 8 bp, Unknown
  misc_feature (1)..( 8): Result.001 file - promoters75/1009941
ttttgaaa

SEQ ID NO: 75903 - DNA, 8 bp, Unknown
  misc_feature (1)..( 8): Result.001 file - promoters75/1009941
ttttgagc

SEQ ID NO: 75904 - DNA, 7 bp, Unknown
  misc_feature (1)..( 7): Result.001 file - promoters75/1009941
cctaaat

SEQ ID NO: 75905 - DNA, 7 bp, Unknown
  misc_feature (1)..( 7): Result.001 file - promoters75/1009941
cctaaag

SEQ ID NO: 75906 - DNA, 7 bp, Unknown
  misc_feature (1)..( 7): Result.001 file - promoters75/1009941
ccttaat

SEQ ID NO: 75907 - DNA, 8 bp, Unknown
  misc_feature (1)..( 8): Result.001 file - promoters75/1009941
tcaatttc

SEQ ID NO: 75908 - DNA, 8 bp, Unknown
  misc_feature (1)..( 8): Result.001 file - promoters75/1009941
aaaatttc

SEQ ID NO: 75909 - DNA, 8 bp, Unknown
  misc_feature (1)..( 8): Result.001 file - promoters75/1009941
tcaattta

SEQ ID NO: 75910 - DNA, 10 bp, Unknown
  misc_feature (1)..( 10): Result.001 file - promoters75/1009941
atttctactc

SEQ ID NO: 75911 - DNA, 10 bp, Unknown
  misc_feature (1)..( 10): Result.001 file - promoters75/1009941
ttttcttctc

SEQ ID NO: 75912 - DNA, 10 bp, Unknown
  misc_feature (1)..( 10): Result.001 file - promoters75/1009941
ttttattcag

SEQ ID NO: 75913 - DNA, 9 bp, Unknown
  misc_feature (1)..( 9): Result.001 file - promoters75/1009941
ttaatcaaa

SEQ ID NO: 75914 - DNA, 9 bp, Unknown
  misc_feature (1)..( 9): Result.001 file - promoters75/1009941
acaataaaa

SEQ ID NO: 75915 - DNA, 9 bp, Unknown
  misc_feature (1)..( 9): Result.001 file - promoters75/1010094
acattaaaa

SEQ ID NO: 75916 - DNA, 11 bp, Unknown
  misc_feature (1)..( 11): Result.001 file - promoters75/1010094
gaaagaaaatc

SEQ ID NO: 75917 - DNA, 11 bp, Unknown
  misc_feature (1)..( 11): Result.001 file - promoters75/1010094
ggtggaaaatg

SEQ ID NO: 75918 - DNA, 11 bp, Unknown
  misc_feature (1)..( 11): Result.001 file - promoters75/1010094
gtaagaaaaaa

SEQ ID NO: 75919 - DNA, 11 bp, Unknown
  misc_feature (1)..( 11): Result.001 file - promoters75/1010094
gggaaaaaatc

SEQ ID NO: 75920 - DNA, 11 bp, Unknown
  misc_feature (1)..( 11): Result.001 file - promoters75/1010094
tataaaaaata

SEQ ID NO: 75921 - DNA, 11 bp, Unknown
  misc_feature (1)..( 11): Result.001 file - promoters75/1010094
agaataaaaac

SEQ ID NO: 75922 - DNA, 9 bp, Unknown
  misc_feature (1)..( 9): Result.001 file - promoters75/1010094
actttaata

SEQ ID NO: 75923 - DNA, 9 bp, Unknown
  misc_feature (1)..( 9): Result.001 file - promoters75/1010094
actataaaa

SEQ ID NO: 75924 - DNA, 9 bp, Unknown
  misc_feature (1)..( 9): Result.001 file - promoters75/1010094
tatataaaa

SEQ ID NO: 75925 - DNA, 9 bp, Unknown
  misc_feature (1)..( 9): Result.001 file - promoters75/1010094
tatttaaag

SEQ ID NO: 75926 - DNA, 9 bp, Unknown
  misc_feature (1)..( 9): Result.001 file - promoters75/1010094
aatataaag

SEQ ID NO: 75927 - DNA, 9 bp, Unknown
  misc_feature (1)..( 9): Result.001 file - promoters75/1010094
tatataagt

SEQ ID NO: 75928 - DNA, 9 bp, Unknown
  misc_feature (1)..( 9): Result.001 file - promoters75/1010094
ttttctacc

SEQ ID NO: 75929 - DNA, 9 bp, Unknown
  misc_feature (1)..( 9): Result.001 file - promoters75/1010094
ttttctact

SEQ ID NO: 75930 - DNA, 9 bp, Unknown
  misc_feature (1)..( 9): Result.001 file - promoters75/1010094
ctttctatt

SEQ ID NO: 75931 - DNA, 9 bp, Unknown
  misc_feature (1)..( 9): Result.001 file - promoters75/1010094
acttcaacc

SEQ ID NO: 75932 - DNA, 9 bp, Unknown
  misc_feature (1)..( 9): Result.001 file - promoters75/1010094
ctttttaca

SEQ ID NO: 75933 - DNA, 9 bp, Unknown
  misc_feature (1)..( 9): Result.001 file - promoters75/1010094
ttttctgga

SEQ ID NO: 75934 - DNA, 10 bp, Unknown
  misc_feature (1)..( 10): Result.001 file - promoters75/1010094
ttaataaaaa

SEQ ID NO: 75935 - DNA, 10 bp, Unknown
  misc_feature (1)..( 10): Result.001 file - promoters75/1010094
ctaatgaaat

SEQ ID NO: 75936 - DNA, 10 bp, Unknown
  misc_feature (1)..( 10): Result.001 file - promoters75/1010094
agaataaaaa

SEQ ID NO: 75937 - DNA, 10 bp, Unknown
  misc_feature (1)..( 10): Result.001 file - promoters75/1010094
atgatgaaat

SEQ ID NO: 75938 - DNA, 10 bp, Unknown
  misc_feature (1)..( 10): Result.001 file - promoters75/1010094
agaaaaaaaa

SEQ ID NO: 75939 - DNA, 10 bp, Unknown
  misc_feature (1)..( 10): Result.001 file - promoters75/1010367
atcaaaaaat

SEQ ID NO: 75940 - DNA, 8 bp, Unknown
  misc_feature (1)..( 8): Result.001 file - promoters75/1010367
ggaaaaaa

SEQ ID NO: 75941 - DNA, 8 bp, Unknown
  misc_feature (1)..( 8): Result.001 file - promoters75/1010367
ttaaaaaa

SEQ ID NO: 75942 - DNA, 8 bp, Unknown
  misc_feature (1)..( 8): Result.001 file - promoters75/1010367
ttaacaaa

SEQ ID NO: 75943 - DNA, 8 bp, Unknown
  misc_feature (1)..( 8): Result.001 file - promoters75/1010367
agaccaat

SEQ ID NO: 75944 - DNA, 8 bp, Unknown
  misc_feature (1)..( 8): Result.001 file - promoters75/1010367
aaaccaat

SEQ ID NO: 75945 - DNA, 8 bp, Unknown
  misc_feature (1)..( 8): Result.001 file - promoters75/1010367
aaaacaag

SEQ ID NO: 75946 - DNA, 8 bp, Unknown
  misc_feature (1)..( 8): Result.001 file - promoters75/1010367
agacaaac

SEQ ID NO: 75947 - DNA, 8 bp, Unknown
  misc_feature (1)..( 8): Result.001 file - promoters75/1010367
taacaaac

SEQ ID NO: 75948 - DNA, 8 bp, Unknown
  misc_feature (1)..( 8): Result.001 file - promoters75/1010367
ttaaaaaa

SEQ ID NO: 75949 - DNA, 7 bp, Unknown
  misc_feature (1)..( 7): Result.001 file - promoters75/1010367
ccttttt

SEQ ID NO: 75950 - DNA, 7 bp, Unknown
  misc_feature (1)..( 7): Result.001 file - promoters75/1010367
tcttttt

SEQ ID NO: 75951 - DNA, 7 bp, Unknown
  misc_feature (1)..( 7): Result.001 file - promoters75/1010385
tctcttt

SEQ ID NO: 75952 - DNA, 8 bp, Unknown
  misc_feature (1)..( 8): Result.001 file - promoters75/1010385
actttttg

SEQ ID NO: 75953 - DNA, 8 bp, Unknown
  misc_feature (1)..( 8): Result.001 file - promoters75/1010385
gctttttg

SEQ ID NO: 75954 - DNA, 8 bp, Unknown
  misc_feature (1)..( 8): Result.001 file - promoters75/1010435
gcttttcc

SEQ ID NO: 75955 - DNA, 10 bp, Unknown
  misc_feature (1)..( 10): Result.001 file - promoters75/1010435
aatctgaatc

SEQ ID NO: 75956 - DNA, 10 bp, Unknown
  misc_feature (1)..( 10): Result.001 file - promoters75/1010435
actctgcatc

SEQ ID NO: 75957 - DNA, 10 bp, Unknown
  misc_feature (1)..( 10): Result.001 file - promoters75/1010819
aatttgattt

SEQ ID NO: 75958 - DNA, 9 bp, Unknown
  misc_feature (1)..( 9): Result.001 file - promoters75/1010819
attgttgct

SEQ ID NO: 75959 - DNA, 9 bp, Unknown
  misc_feature (1)..( 9): Result.001 file - promoters75/1010819
atttttggt

SEQ ID NO: 75960 - DNA, 9 bp, Unknown
  misc_feature (1)..( 9): Result.001 file - promoters75/1011923
agtttaggt

SEQ ID NO: 75961 - DNA, 9 bp, Unknown
  misc_feature (1)..( 9): Result.001 file - promoters75/1011923
ttgttgttt

SEQ ID NO: 75962 - DNA, 9 bp, Unknown
  misc_feature (1)..( 9): Result.001 file - promoters75/1011923
ttgttgttt

SEQ ID NO: 75963 - DNA, 9 bp, Unknown
  misc_feature (1)..( 9): Result.001 file - promoters75/1011923
tttttgttt

SEQ ID NO: 75964 - DNA, 11 bp, Unknown
  misc_feature (1)..( 11): Result.001 file - promoters75/1011923
atcttcatgtt

SEQ ID NO: 75965 - DNA, 11 bp, Unknown
  misc_feature (1)..( 11): Result.001 file - promoters75/1011923
atgttcatgtt

SEQ ID NO: 75966 - DNA, 11 bp, Unknown
  misc_feature (1)..( 11): Result.001 file - promoters75/1011972
atcttcatgac

SEQ ID NO: 75967 - DNA, 7 bp, Unknown
  misc_feature (1)..( 7): Result.001 file - promoters75/1011972
gcataat

SEQ ID NO: 75968 - DNA, 7 bp, Unknown
  misc_feature (1)..( 7): Result.001 file - promoters75/1011972
gcataag

SEQ ID NO: 75969 - DNA, 7 bp, Unknown
  misc_feature (1)..( 7): Result.001 file - promoters75/1011972
ccataat

SEQ ID NO: 75970 - DNA, 7 bp, Unknown
  misc_feature (1)..( 7): Result.001 file - promoters75/1011972
tttaaaa

SEQ ID NO: 75971 - DNA, 7 bp, Unknown
  misc_feature (1)..( 7): Result.001 file - promoters75/1011972
tttaaag

SEQ ID NO: 75972 - DNA, 7 bp, Unknown
  misc_feature (1)..( 7): Result.001 file - promoters75/1011972
attaaag

SEQ ID NO: 75973 - DNA, 9 bp, Unknown
  misc_feature (1)..( 9): Result.001 file - promoters75/1011972
ttctgctaa

SEQ ID NO: 75974 - DNA, 9 bp, Unknown
  misc_feature (1)..( 9): Result.001 file - promoters75/1011972
ttctgcgaa

SEQ ID NO: 75975 - DNA, 9 bp, Unknown
  misc_feature (1)..( 9): Result.001 file - promoters75/1011972
atctcctaa

SEQ ID NO: 75976 - DNA, 9 bp, Unknown
  misc_feature (1)..( 9): Result.001 file - promoters75/1011972
tcatataaa

SEQ ID NO: 75977 - DNA, 9 bp, Unknown
  misc_feature (1)..( 9): Result.001 file - promoters75/1011972
ctatataaa

SEQ ID NO: 75978 - DNA, 9 bp, Unknown
  misc_feature (1)..( 9): Result.001 file - promoters75/1011972
ctacatatc

SEQ ID NO: 75979 - DNA, 10 bp, Unknown
  misc_feature (1)..( 10): Result.001 file - promoters75/1011972
atcttcatat

SEQ ID NO: 75980 - DNA, 10 bp, Unknown
  misc_feature (1)..( 10): Result.001 file - promoters75/1011972
atctacatat

SEQ ID NO: 75981 - DNA, 10 bp, Unknown
  misc_feature (1)..( 10): Result.001 file - promoters75/1012003
tactatataa

SEQ ID NO: 75982 - DNA, 8 bp, Unknown
  misc_feature (1)..( 8): Result.001 file - promoters75/1012003
cagagacg

SEQ ID NO: 75983 - DNA, 8 bp, Unknown
  misc_feature (1)..( 8): Result.001 file - promoters75/1012003
cagagaga

SEQ ID NO: 75984 - DNA, 8 bp, Unknown
  misc_feature (1)..( 8): Result.001 file - promoters75/1012074
tagagaga

SEQ ID NO: 75985 - DNA, 8 bp, Unknown
  misc_feature (1)..( 8): Result.001 file - promoters75/1012074
agtgttca

SEQ ID NO: 75986 - DNA, 8 bp, Unknown
  misc_feature (1)..( 8): Result.001 file - promoters75/1012074
agtcttcc

SEQ ID NO: 75987 - DNA, 8 bp, Unknown
  misc_feature (1)..( 8): Result.001 file - promoters75/1012074
agtgatca

SEQ ID NO: 75988 - DNA, 10 bp, Unknown
  misc_feature (1)..( 10): Result.001 file - promoters75/1012074
ttttaataag

SEQ ID NO: 75989 - DNA, 10 bp, Unknown
  misc_feature (1)..( 10): Result.001 file - promoters75/1012074
tttcaataac

SEQ ID NO: 75990 - DNA, 10 bp, Unknown
  misc_feature (1)..( 10): Result.001 file - promoters75/1012110
gtctaaaaag

SEQ ID NO: 75991 - DNA, 11 bp, Unknown
  misc_feature (1)..( 11): Result.001 file - promoters75/1012110
ccagaattaag

SEQ ID NO: 75992 - DNA, 11 bp, Unknown
  misc_feature (1)..( 11): Result.001 file - promoters75/1012110
ccataattagt

SEQ ID NO: 75993 - DNA, 11 bp, Unknown
  misc_feature (1)..( 11): Result.001 file - promoters75/1012128
atgtaattaag

SEQ ID NO: 75994 - DNA, 15 bp, Unknown
  misc_feature (1)..( 15): Result.001 file - promoters75/1012128
tcaaatcccacagtt

SEQ ID NO: 75995 - DNA, 15 bp, Unknown
  misc_feature (1)..( 15): Result.001 file - promoters75/1012128
tcaaattccacggtt

SEQ ID NO: 75996 - DNA, 15 bp, Unknown
  misc_feature (1)..( 15): Result.001 file - promoters75/1012128
ggccagaacacggta

SEQ ID NO: 75997 - DNA, 15 bp, Unknown
  misc_feature (1)..( 15): Result.001 file - promoters75/1012128
gtctccaagacggta

SEQ ID NO: 75998 - DNA, 12 bp, Unknown
  misc_feature (1)..( 12): Result.001 file - promoters75/1012128
attgaaaaatca

SEQ ID NO: 75999 - DNA, 12 bp, Unknown
  misc_feature (1)..( 12): Result.001 file - promoters75/1012128
gaagaagaattg

SEQ ID NO: 76000 - DNA, 12 bp, Unknown
  misc_feature (1)..( 12): Result.001 file - promoters75/1012128
attcaaaattct

SEQ ID NO: 76001 - DNA, 12 bp, Unknown
  misc_feature (1)..( 12): Result.001 file - promoters75/1012128
cagtaagcagaa

SEQ ID NO: 76002 - DNA, 8 bp, Unknown
  misc_feature (1)..( 8): Result.001 file - promoters75/1012128
aatatgta

SEQ ID NO: 76003 - DNA, 8 bp, Unknown
  misc_feature (1)..( 8): Result.001 file - promoters75/1012128
aatatgtg

SEQ ID NO: 76004 - DNA, 8 bp, Unknown
  misc_feature (1)..( 8): Result.001 file - promoters75/1012128
gatattat

SEQ ID NO: 76005 - DNA, 8 bp, Unknown
  misc_feature (1)..( 8): Result.001 file - promoters75/1012128
cttattat

SEQ ID NO: 76006 - DNA, 10 bp, Unknown
  misc_feature (1)..( 10): Result.001 file - promoters75/1012128
tatttatata

SEQ ID NO: 76007 - DNA, 10 bp, Unknown
  misc_feature (1)..( 10): Result.001 file - promoters75/1012128
tatttaattt

SEQ ID NO: 76008 - DNA, 10 bp, Unknown
  misc_feature (1)..( 10): Result.001 file - promoters75/1012128
catttaagcc

SEQ ID NO: 76009 - DNA, 10 bp, Unknown
  misc_feature (1)..( 10): Result.001 file - promoters75/1012334
catttgattt

SEQ ID NO: 76010 - DNA, 8 bp, Unknown
  misc_feature (1)..( 8): Result.001 file - promoters75/1012334
gttttttc

SEQ ID NO: 76011 - DNA, 8 bp, Unknown
  misc_feature (1)..( 8): Result.001 file - promoters75/1012334
gtttttct

SEQ ID NO: 76012 - DNA, 8 bp, Unknown
  misc_feature (1)..( 8): Result.001 file - promoters75/1012334
cttttttt

SEQ ID NO: 76013 - DNA, 8 bp, Unknown
  misc_feature (1)..( 8): Result.001 file - promoters75/1012334
gtttttgc

SEQ ID NO: 76014 - DNA, 9 bp, Unknown
  misc_feature (1)..( 9): Result.001 file - promoters75/1012334
ctttcttct

SEQ ID NO: 76015 - DNA, 9 bp, Unknown
  misc_feature (1)..( 9): Result.001 file - promoters75/1012349
gttcttgcc

SEQ ID NO: 76016 - DNA, 12 bp, Unknown
  misc_feature (1)..( 12): Result.001 file - promoters75/1012349
caacaatgtaca

SEQ ID NO: 76017 - DNA, 12 bp, Unknown
  misc_feature (1)..( 12): Result.001 file - promoters75/1012349
caataatttaca

SEQ ID NO: 76018 - DNA, 12 bp, Unknown
  misc_feature (1)..( 12): Result.001 file - promoters75/1012673
tgaaaatttata

SEQ ID NO: 76019 - DNA, 9 bp, Unknown
  misc_feature (1)..( 9): Result.001 file - promoters75/1012673
tatcatttt

SEQ ID NO: 76020 - DNA, 9 bp, Unknown
  misc_feature (1)..( 9): Result.001 file - promoters75/1012673
tatcatttt

SEQ ID NO: 76021 - DNA, 9 bp, Unknown
  misc_feature (1)..( 9): Result.001 file - promoters75/1012757
tatgattaa

SEQ ID NO: 76022 - DNA, 11 bp, Unknown
  misc_feature (1)..( 11): Result.001 file - promoters75/1012757
tgtttgaccat

SEQ ID NO: 76023 - DNA, 11 bp, Unknown
  misc_feature (1)..( 11): Result.001 file - promoters75/1012757
tatttgaacat

SEQ ID NO: 76024 - DNA, 11 bp, Unknown
  misc_feature (1)..( 11): Result.001 file - promoters75/1012757
tgtgtgagttc

SEQ ID NO: 76025 - DNA, 8 bp, Unknown
  misc_feature (1)..( 8): Result.001 file - promoters75/1012757
taacgaac

SEQ ID NO: 76026 - DNA, 8 bp, Unknown
  misc_feature (1)..( 8): Result.001 file - promoters75/1012757
caacgaaa

SEQ ID NO: 76027 - DNA, 8 bp, Unknown
  misc_feature (1)..( 8): Result.001 file - promoters75/1013128
caactaaa

SEQ ID NO: 76028 - DNA, 7 bp, Unknown
  misc_feature (1)..( 7): Result.001 file - promoters75/1013128
taaattg

SEQ ID NO: 76029 - DNA, 7 bp, Unknown
  misc_feature (1)..( 7): Result.001 file - promoters75/1013128
gaaattg

SEQ ID NO: 76030 - DNA, 7 bp, Unknown
  misc_feature (1)..( 7): Result.001 file - promoters75/1013128
gaagttg

SEQ ID NO: 76031 - DNA, 9 bp, Unknown
  misc_feature (1)..( 9): Result.001 file - promoters75/1013128
aaaataaag

SEQ ID NO: 76032 - DNA, 9 bp, Unknown
  misc_feature (1)..( 9): Result.001 file - promoters75/1013128
aaaaaaaag

SEQ ID NO: 76033 - DNA, 9 bp, Unknown
  misc_feature (1)..( 9): Result.001 file - promoters75/1013208
aagagaaag

SEQ ID NO: 76034 - DNA, 11 bp, Unknown
  misc_feature (1)..( 11): Result.001 file - promoters75/1013208
aaagtaattta

SEQ ID NO: 76035 - DNA, 11 bp, Unknown
  misc_feature (1)..( 11): Result.001 file - promoters75/1013208
acagtagtttc

SEQ ID NO: 76036 - DNA, 11 bp, Unknown
  misc_feature (1)..( 11): Result.001 file - promoters75/1013208
aaaataaacta

SEQ ID NO: 76037 - DNA, 11 bp, Unknown
  misc_feature (1)..( 11): Result.001 file - promoters75/1013208
tgttgagtttc

SEQ ID NO: 76038 - DNA, 11 bp, Unknown
  misc_feature (1)..( 11): Result.001 file - promoters75/1013208
attttaatctc

SEQ ID NO: 76039 - DNA, 11 bp, Unknown
  misc_feature (1)..( 11): Result.001 file - promoters75/1013208
tttttattcta

SEQ ID NO: 76040 - DNA, 11 bp, Unknown
  misc_feature (1)..( 11): Result.001 file - promoters75/1013208
gttgtattcta

SEQ ID NO: 76041 - DNA, 11 bp, Unknown
  misc_feature (1)..( 11): Result.001 file - promoters75/1013384
tttttacggcg

SEQ ID NO: 76042 - DNA, 8 bp, Unknown
  misc_feature (1)..( 8): Result.001 file - promoters75/1013384
aaaacaga

SEQ ID NO: 76043 - DNA, 8 bp, Unknown
  misc_feature (1)..( 8): Result.001 file - promoters75/1013384
aaaacagt

SEQ ID NO: 76044 - DNA, 8 bp, Unknown
  misc_feature (1)..( 8): Result.001 file - promoters75/1013540
aacacaaa

SEQ ID NO: 76045 - DNA, 15 bp, Unknown
  misc_feature (1)..( 15): Result.001 file - promoters75/1013540
acagagacaatgaaa

SEQ ID NO: 76046 - DNA, 15 bp, Unknown
  misc_feature (1)..( 15): Result.001 file - promoters75/1013540
ggtaagaaaataaaa

SEQ ID NO: 76047 - DNA, 15 bp, Unknown
  misc_feature (1)..( 15): Result.001 file - promoters75/1013893
acagagacattcacg

SEQ ID NO: 76048 - DNA, 12 bp, Unknown
  misc_feature (1)..( 12): Result.001 file - promoters75/1013893
aagaaaattgac

SEQ ID NO: 76049 - DNA, 12 bp, Unknown
  misc_feature (1)..( 12): Result.001 file - promoters75/1013893
aagaaatttgct

SEQ ID NO: 76050 - DNA, 12 bp, Unknown
  misc_feature (1)..( 12): Result.001 file - promoters75/1013893
tatgaatctgct

SEQ ID NO: 76051 - DNA, 11 bp, Unknown
  misc_feature (1)..( 11): Result.001 file - promoters75/1013893
aaatttcactt

SEQ ID NO: 76052 - DNA, 11 bp, Unknown
  misc_feature (1)..( 11): Result.001 file - promoters75/1013893
aaatttctgcc

SEQ ID NO: 76053 - DNA, 11 bp, Unknown
  misc_feature (1)..( 11): Result.001 file - promoters75/1013904
gtatttctctt

SEQ ID NO: 76054 - DNA, 9 bp, Unknown
  misc_feature (1)..( 9): Result.001 file - promoters75/1013904
ttagtaatt

SEQ ID NO: 76055 - DNA, 9 bp, Unknown
  misc_feature (1)..( 9): Result.001 file - promoters75/1013904
ttactaaca

SEQ ID NO: 76056 - DNA, 9 bp, Unknown
  misc_feature (1)..( 9): Result.001 file - promoters75/1013904
ttagtgatt

SEQ ID NO: 76057 - DNA, 8 bp, Unknown
  misc_feature (1)..( 8): Result.001 file - promoters75/1013904
atttatat

SEQ ID NO: 76058 - DNA, 8 bp, Unknown
  misc_feature (1)..( 8): Result.001 file - promoters75/1013904
aattatat

SEQ ID NO: 76059 - DNA, 8 bp, Unknown
  misc_feature (1)..( 8): Result.001 file - promoters75/1013904
aattgtat

SEQ ID NO: 76060 - DNA, 10 bp, Unknown
  misc_feature (1)..( 10): Result.001 file - promoters75/1013904
tgataaaatt

SEQ ID NO: 76061 - DNA, 10 bp, Unknown
  misc_feature (1)..( 10): Result.001 file - promoters75/1013904
tgatcaaatc

SEQ ID NO: 76062 - DNA, 10 bp, Unknown
  misc_feature (1)..( 10): Result.001 file - promoters75/1013904
ttataatatt

SEQ ID NO: 76063 - DNA, 7 bp, Unknown
  misc_feature (1)..( 7): Result.001 file - promoters75/1013904
gataaaa

SEQ ID NO: 76064 - DNA, 7 bp, Unknown
  misc_feature (1)..( 7): Result.001 file - promoters75/1013904
aataaaa

SEQ ID NO: 76065 - DNA, 7 bp, Unknown
  misc_feature (1)..( 7): Result.001 file - promoters75/1013904
aataaac

SEQ ID NO: 76066 - DNA, 8 bp, Unknown
  misc_feature (1)..( 8): Result.001 file - promoters75/1013904
gtttaggc

SEQ ID NO: 76067 - DNA, 8 bp, Unknown
  misc_feature (1)..( 8): Result.001 file - promoters75/1013904
gtttaggt

SEQ ID NO: 76068 - DNA, 8 bp, Unknown
  misc_feature (1)..( 8): Result.001 file - promoters75/1013904
tttttggt

SEQ ID NO: 76069 - DNA, 11 bp, Unknown
  misc_feature (1)..( 11): Result.001 file - promoters75/1013904
aagaaataaat

SEQ ID NO: 76070 - DNA, 11 bp, Unknown
  misc_feature (1)..( 11): Result.001 file - promoters75/1013904
aagaaaaaaat

SEQ ID NO: 76071 - DNA, 11 bp, Unknown
  misc_feature (1)..( 11): Result.001 file - promoters75/1013904
ctaaaataata

SEQ ID NO: 76072 - DNA, 8 bp, Unknown
  misc_feature (1)..( 8): Result.001 file - promoters75/1013904
ttaatata

SEQ ID NO: 76073 - DNA, 8 bp, Unknown
  misc_feature (1)..( 8): Result.001 file - promoters75/1013904
ttaataat

SEQ ID NO: 76074 - DNA, 8 bp, Unknown
  misc_feature (1)..( 8): Result.001 file - promoters75/1013904
ctaaaaat

SEQ ID NO: 76075 - DNA, 7 bp, Unknown
  misc_feature (1)..( 7): Result.001 file - promoters75/1013904
aaataat

SEQ ID NO: 76076 - DNA, 7 bp, Unknown
  misc_feature (1)..( 7): Result.001 file - promoters75/1013904
taataat

SEQ ID NO: 76077 - DNA, 7 bp, Unknown
  misc_feature (1)..( 7): Result.001 file - promoters75/1013904
taaaaat

SEQ ID NO: 76078 - DNA, 8 bp, Unknown
  misc_feature (1)..( 8): Result.001 file - promoters75/1013904
ttatattt

SEQ ID NO: 76079 - DNA, 8 bp, Unknown
  misc_feature (1)..( 8): Result.001 file - promoters75/1013904
caatattt

SEQ ID NO: 76080 - DNA, 8 bp, Unknown
  misc_feature (1)..( 8): Result.001 file - promoters75/1013904
caaaatta

SEQ ID NO: 76081 - DNA, 7 bp, Unknown
  misc_feature (1)..( 7): Result.001 file - promoters75/1013904
tttatat

SEQ ID NO: 76082 - DNA, 7 bp, Unknown
  misc_feature (1)..( 7): Result.001 file - promoters75/1013904
tttatat

SEQ ID NO: 76083 - DNA, 7 bp, Unknown
  misc_feature (1)..( 7): Result.001 file - promoters75/1014125
attatat

SEQ ID NO: 76084 - DNA, 11 bp, Unknown
  misc_feature (1)..( 11): Result.001 file - promoters75/1014125
aaactgtgaaa

SEQ ID NO: 76085 - DNA, 11 bp, Unknown
  misc_feature (1)..( 11): Result.001 file - promoters75/1014125
aaaatgtgaaa

SEQ ID NO: 76086 - DNA, 11 bp, Unknown
  misc_feature (1)..( 11): Result.001 file - promoters75/1014125
aaaataatttt

SEQ ID NO: 76087 - DNA, 11 bp, Unknown
  misc_feature (1)..( 11): Result.001 file - promoters75/1014125
ccaaatttggt

SEQ ID NO: 76088 - DNA, 11 bp, Unknown
  misc_feature (1)..( 11): Result.001 file - promoters75/1014125
ccaattttaag

SEQ ID NO: 76089 - DNA, 11 bp, Unknown
  misc_feature (1)..( 11): Result.001 file - promoters75/1014180
attattctaag

SEQ ID NO: 76090 - DNA, 8 bp, Unknown
  misc_feature (1)..( 8): Result.001 file - promoters75/1014180
tcagtttc

SEQ ID NO: 76091 - DNA, 8 bp, Unknown
  misc_feature (1)..( 8): Result.001 file - promoters75/1014180
tcaatttt

SEQ ID NO: 76092 - DNA, 8 bp, Unknown
  misc_feature (1)..( 8): Result.001 file - promoters75/1014180
ctaatttt

SEQ ID NO: 76093 - DNA, 7 bp, Unknown
  misc_feature (1)..( 7): Result.001 file - promoters75/1014180
caaaatt

SEQ ID NO: 76094 - DNA, 7 bp, Unknown
  misc_feature (1)..( 7): Result.001 file - promoters75/1014180
caatatt

SEQ ID NO: 76095 - DNA, 7 bp, Unknown
  misc_feature (1)..( 7): Result.001 file - promoters75/1014525
caatatg

SEQ ID NO: 76096 - DNA, 7 bp, Unknown
  misc_feature (1)..( 7): Result.001 file - promoters75/1014525
aaaaata

SEQ ID NO: 76097 - DNA, 7 bp, Unknown
  misc_feature (1)..( 7): Result.001 file - promoters75/1014525
aaacata

SEQ ID NO: 76098 - DNA, 7 bp, Unknown
  misc_feature (1)..( 7): Result.001 file - promoters75/1014525
aaaaatt

SEQ ID NO: 76099 - DNA, 8 bp, Unknown
  misc_feature (1)..( 8): Result.001 file - promoters75/1014525
aattaaaa

SEQ ID NO: 76100 - DNA, 8 bp, Unknown
  misc_feature (1)..( 8): Result.001 file - promoters75/1014525
aatgaaaa

SEQ ID NO: 76101 - DNA, 8 bp, Unknown
  misc_feature (1)..( 8): Result.001 file - promoters75/1014525
aatcaaat

SEQ ID NO: 76102 - DNA, 9 bp, Unknown
  misc_feature (1)..( 9): Result.001 file - promoters75/1014525
tatatatag

SEQ ID NO: 76103 - DNA, 9 bp, Unknown
  misc_feature (1)..( 9): Result.001 file - promoters75/1014525
tatatatac

SEQ ID NO: 76104 - DNA, 9 bp, Unknown
  misc_feature (1)..( 9): Result.001 file - promoters75/1014662
tatttatac

SEQ ID NO: 76105 - DNA, 9 bp, Unknown
  misc_feature (1)..( 9): Result.001 file - promoters75/1014662
aaaaatgaa

SEQ ID NO: 76106 - DNA, 9 bp, Unknown
  misc_feature (1)..( 9): Result.001 file - promoters75/1014662
aaaaaagaa

SEQ ID NO: 76107 - DNA, 9 bp, Unknown
  misc_feature (1)..( 9): Result.001 file - promoters75/1014662
gaaaaaggg

SEQ ID NO: 76108 - DNA, 8 bp, Unknown
  misc_feature (1)..( 8): Result.001 file - promoters75/1014662
ttttatca

SEQ ID NO: 76109 - DNA, 8 bp, Unknown
  misc_feature (1)..( 8): Result.001 file - promoters75/1014662
ttttgtca

SEQ ID NO: 76110 - DNA, 8 bp, Unknown
  misc_feature (1)..( 8): Result.001 file - promoters75/1014662
ttttgtat

SEQ ID NO: 76111 - DNA, 8 bp, Unknown
  misc_feature (1)..( 8): Result.001 file - promoters75/1014662
atatatat

SEQ ID NO: 76112 - DNA, 8 bp, Unknown
  misc_feature (1)..( 8): Result.001 file - promoters75/1014662
atatttat

SEQ ID NO: 76113 - DNA, 8 bp, Unknown
  misc_feature (1)..( 8): Result.001 file - promoters75/1014662
taatttat

SEQ ID NO: 76114 - DNA, 7 bp, Unknown
  misc_feature (1)..( 7): Result.001 file - promoters75/1014662
aatcaaa

SEQ ID NO: 76115 - DNA, 7 bp, Unknown
  misc_feature (1)..( 7): Result.001 file - promoters75/1014662
aatcaaa

SEQ ID NO: 76116 - DNA, 8 bp, Unknown
  misc_feature (1)..( 8): Result.001 file - promoters75/1014662
gatccaaa

SEQ ID NO: 76117 - DNA, 7 bp, Unknown
  misc_feature (1)..( 7): Result.001 file - promoters75/1014662
actatac

SEQ ID NO: 76118 - DNA, 7 bp, Unknown
  misc_feature (1)..( 7): Result.001 file - promoters75/1014662
actttac

SEQ ID NO: 76119 - DNA, 7 bp, Unknown
  misc_feature (1)..( 7): Result.001 file - promoters75/1014662
tctttac

SEQ ID NO: 76120 - DNA, 7 bp, Unknown
  misc_feature (1)..( 7): Result.001 file - promoters75/1014662
tataata

SEQ ID NO: 76121 - DNA, 7 bp, Unknown
  misc_feature (1)..( 7): Result.001 file - promoters75/1014662
tattata

SEQ ID NO: 76122 - DNA, 7 bp, Unknown
  misc_feature (1)..( 7): Result.001 file - promoters75/1014991
tataata

SEQ ID NO: 76123 - DNA, 8 bp, Unknown
  misc_feature (1)..( 8): Result.001 file - promoters75/1014991
tacagtaa

SEQ ID NO: 76124 - DNA, 8 bp, Unknown
  misc_feature (1)..( 8): Result.001 file - promoters75/1014991
tacagtaa

SEQ ID NO: 76125 - DNA, 8 bp, Unknown
  misc_feature (1)..( 8): Result.001 file - promoters75/1015214
tactgtat

SEQ ID NO: 76126 - DNA, 8 bp, Unknown
  misc_feature (1)..( 8): Result.001 file - promoters75/1015214
aaaacaaa

SEQ ID NO: 76127 - DNA, 8 bp, Unknown
  misc_feature (1)..( 8): Result.001 file - promoters75/1015214
gaaagaaa

SEQ ID NO: 76128 - DNA, 8 bp, Unknown
  misc_feature (1)..( 8): Result.001 file - promoters75/1015214
gaatgaaa

SEQ ID NO: 76129 - DNA, 9 bp, Unknown
  misc_feature (1)..( 9): Result.001 file - promoters75/1015214
tatgtaaac

SEQ ID NO: 76130 - DNA, 9 bp, Unknown
  misc_feature (1)..( 9): Result.001 file - promoters75/1015214
tatttaaaa

SEQ ID NO: 76131 - DNA, 9 bp, Unknown
  misc_feature (1)..( 9): Result.001 file - promoters75/1015214
tatctaaga

SEQ ID NO: 76132 - DNA, 9 bp, Unknown
  misc_feature (1)..( 9): Result.001 file - promoters75/1015214
gcattaaaa

SEQ ID NO: 76133 - DNA, 7 bp, Unknown
  misc_feature (1)..( 7): Result.001 file - promoters75/1015214
ctaaaaa

SEQ ID NO: 76134 - DNA, 7 bp, Unknown
  misc_feature (1)..( 7): Result.001 file - promoters75/1015214
ttaaaaa

SEQ ID NO: 76135 - DNA, 7 bp, Unknown
  misc_feature (1)..( 7): Result.001 file - promoters75/1015214
ttaaaat

SEQ ID NO: 76136 - DNA, 9 bp, Unknown
  misc_feature (1)..( 9): Result.001 file - promoters75/1015214
aaagtcctc

SEQ ID NO: 76137 - DNA, 9 bp, Unknown
  misc_feature (1)..( 9): Result.001 file - promoters75/1015214
aaattcctt

SEQ ID NO: 76138 - DNA, 9 bp, Unknown
  misc_feature (1)..( 9): Result.001 file - promoters75/1015214
cttttcctt

SEQ ID NO: 76139 - DNA, 9 bp, Unknown
  misc_feature (1)..( 9): Result.001 file - promoters75/1015214
aatttaacc

SEQ ID NO: 76140 - DNA, 9 bp, Unknown
  misc_feature (1)..( 9): Result.001 file - promoters75/1015214
attttgacc

SEQ ID NO: 76141 - DNA, 10 bp, Unknown
  misc_feature (1)..( 10): Result.001 file - promoters75/1015261
aattctgaaa

SEQ ID NO: 76142 - DNA, 11 bp, Unknown
  misc_feature (1)..( 11): Result.001 file - promoters75/1015261
ttggaaaagac

SEQ ID NO: 76143 - DNA, 11 bp, Unknown
  misc_feature (1)..( 11): Result.001 file - promoters75/1015261
ttgtaaatgtt

SEQ ID NO: 76144 - DNA, 11 bp, Unknown
  misc_feature (1)..( 11): Result.001 file - promoters75/1015261
ttgtaaatgtt

SEQ ID NO: 76145 - DNA, 7 bp, Unknown
  misc_feature (1)..( 7): Result.001 file - promoters75/1015261
tttcatt

SEQ ID NO: 76146 - DNA, 7 bp, Unknown
  misc_feature (1)..( 7): Result.001 file - promoters75/1015261
attcatt

SEQ ID NO: 76147 - DNA, 7 bp, Unknown
  misc_feature (1)..( 7): Result.001 file - promoters75/1015261
tttgatt

SEQ ID NO: 76148 - DNA, 12 bp, Unknown
  misc_feature (1)..( 12): Result.001 file - promoters75/1015261
attaataagggt

SEQ ID NO: 76149 - DNA, 12 bp, Unknown
  misc_feature (1)..( 12): Result.001 file - promoters75/1015261
attaatgggctt

SEQ ID NO: 76150 - DNA, 12 bp, Unknown
  misc_feature (1)..( 12): Result.001 file - promoters75/1015261
gttaatgggctt

SEQ ID NO: 76151 - DNA, 8 bp, Unknown
  misc_feature (1)..( 8): Result.001 file - promoters75/1015261
atagagaa

SEQ ID NO: 76152 - DNA, 8 bp, Unknown
  misc_feature (1)..( 8): Result.001 file - promoters75/1015261
ataaagag

SEQ ID NO: 76153 - DNA, 8 bp, Unknown
  misc_feature (1)..( 8): Result.001 file - promoters75/1015261
gcagagaa

SEQ ID NO: 76154 - DNA, 8 bp, Unknown
  misc_feature (1)..( 8): Result.001 file - promoters75/1015261
caagcaaa

SEQ ID NO: 76155 - DNA, 8 bp, Unknown
  misc_feature (1)..( 8): Result.001 file - promoters75/1015261
caatcaat

SEQ ID NO: 76156 - DNA, 8 bp, Unknown
  misc_feature (1)..( 8): Result.001 file - promoters75/1015337
gaagaaaa

SEQ ID NO: 76157 - DNA, 12 bp, Unknown
  misc_feature (1)..( 12): Result.001 file - promoters75/1015337
tactaaatttta

SEQ ID NO: 76158 - DNA, 12 bp, Unknown
  misc_feature (1)..( 12): Result.001 file - promoters75/1015337
cgttgaatctta

SEQ ID NO: 76159 - DNA, 12 bp, Unknown
  misc_feature (1)..( 12): Result.001 file - promoters75/1015337
taccaaatttaa

SEQ ID NO: 76160 - DNA, 6 bp, Unknown
  misc_feature (1)..( 6): Result.001 file - promoters75/1015337
attttt

SEQ ID NO: 76161 - DNA, 6 bp, Unknown
  misc_feature (1)..( 6): Result.001 file - promoters75/1015337
attttt

SEQ ID NO: 76162 - DNA, 6 bp, Unknown
  misc_feature (1)..( 6): Result.001 file - promoters75/1015475
attttt

SEQ ID NO: 76163 - DNA, 9 bp, Unknown
  misc_feature (1)..( 9): Result.001 file - promoters75/1015475
gtttccttt

SEQ ID NO: 76164 - DNA, 9 bp, Unknown
  misc_feature (1)..( 9): Result.001 file - promoters75/1015475
gttaccttt

SEQ ID NO: 76165 - DNA, 9 bp, Unknown
  misc_feature (1)..( 9): Result.001 file - promoters75/1015848
gcttcgttt

SEQ ID NO: 76166 - DNA, 9 bp, Unknown
  misc_feature (1)..( 9): Result.001 file - promoters75/1015848
gtttccttt

SEQ ID NO: 76167 - DNA, 9 bp, Unknown
  misc_feature (1)..( 9): Result.001 file - promoters75/1015848
gttaccttt

SEQ ID NO: 76168 - DNA, 9 bp, Unknown
  misc_feature (1)..( 9): Result.001 file - promoters75/1016250
gcttcgttt

SEQ ID NO: 76169 - DNA, 9 bp, Unknown
  misc_feature (1)..( 9): Result.001 file - promoters75/1016250
gttagattt

SEQ ID NO: 76170 - DNA, 9 bp, Unknown
  misc_feature (1)..( 9): Result.001 file - promoters75/1016250
gttaaattg

SEQ ID NO: 76171 - DNA, 9 bp, Unknown
  misc_feature (1)..( 9): Result.001 file - promoters75/1016250
ccaaaattg

SEQ ID NO: 76172 - DNA, 9 bp, Unknown
  misc_feature (1)..( 9): Result.001 file - promoters75/1016250
taattttgc

SEQ ID NO: 76173 - DNA, 9 bp, Unknown
  misc_feature (1)..( 9): Result.001 file - promoters75/1016250
taattttta

SEQ ID NO: 76174 - DNA, 9 bp, Unknown
  misc_feature (1)..( 9): Result.001 file - promoters75/1016278
tcattttta

SEQ ID NO: 76175 - DNA, 9 bp, Unknown
  misc_feature (1)..( 9): Result.001 file - promoters75/1016278
gggattttt

SEQ ID NO: 76176 - DNA, 9 bp, Unknown
  misc_feature (1)..( 9): Result.001 file - promoters75/1016278
gggttttta

SEQ ID NO: 76177 - DNA, 9 bp, Unknown
  misc_feature (1)..( 9): Result.001 file - promoters75/1016278
ttgattttt

SEQ ID NO: 76178 - DNA, 7 bp, Unknown
  misc_feature (1)..( 7): Result.001 file - promoters75/1016278
taattaa

SEQ ID NO: 76179 - DNA, 7 bp, Unknown
  misc_feature (1)..( 7): Result.001 file - promoters75/1016278
taattat

SEQ ID NO: 76180 - DNA, 7 bp, Unknown
  misc_feature (1)..( 7): Result.001 file - promoters75/1016468
taattat

SEQ ID NO: 76181 - DNA, 9 bp, Unknown
  misc_feature (1)..( 9): Result.001 file - promoters75/1016468
ttgagttta

SEQ ID NO: 76182 - DNA, 9 bp, Unknown
  misc_feature (1)..( 9): Result.001 file - promoters75/1016468
ttgactttt

SEQ ID NO: 76183 - DNA, 9 bp, Unknown
  misc_feature (1)..( 9): Result.001 file - promoters75/1016468
ttgaatttt

SEQ ID NO: 76184 - DNA, 9 bp, Unknown
  misc_feature (1)..( 9): Result.001 file - promoters75/1016468
tctaatttt

SEQ ID NO: 76185 - DNA, 8 bp, Unknown
  misc_feature (1)..( 8): Result.001 file - promoters75/1016468
aaacaaac

SEQ ID NO: 76186 - DNA, 8 bp, Unknown
  misc_feature (1)..( 8): Result.001 file - promoters75/1016468
gaacaaaa

SEQ ID NO: 76187 - DNA, 8 bp, Unknown
  misc_feature (1)..( 8): Result.001 file - promoters75/1016468
taaaaaaa

SEQ ID NO: 76188 - DNA, 8 bp, Unknown
  misc_feature (1)..( 8): Result.001 file - promoters75/1016468
taagaaaa

SEQ ID NO: 76189 - DNA, 8 bp, Unknown
  misc_feature (1)..( 8): Result.001 file - promoters75/1016468
aaataaaa

SEQ ID NO: 76190 - DNA, 8 bp, Unknown
  misc_feature (1)..( 8): Result.001 file - promoters75/1016468
ttataaaa

SEQ ID NO: 76191 - DNA, 8 bp, Unknown
  misc_feature (1)..( 8): Result.001 file - promoters75/1016468
ttagaaaa

SEQ ID NO: 76192 - DNA, 10 bp, Unknown
  misc_feature (1)..( 10): Result.001 file - promoters75/1016468
atgaaaaaca

SEQ ID NO: 76193 - DNA, 10 bp, Unknown
  misc_feature (1)..( 10): Result.001 file - promoters75/1016468
aagaaaaaat

SEQ ID NO: 76194 - DNA, 11 bp, Unknown
  misc_feature (1)..( 11): Result.001 file - promoters75/1016468
cggaacaaaac

SEQ ID NO: 76195 - DNA, 11 bp, Unknown
  misc_feature (1)..( 11): Result.001 file - promoters75/1016468
aagaaaatata

SEQ ID NO: 76196 - DNA, 9 bp, Unknown
  misc_feature (1)..( 9): Result.001 file - promoters75/1016468
atattatta

SEQ ID NO: 76197 - DNA, 9 bp, Unknown
  misc_feature (1)..( 9): Result.001 file - promoters75/1016468
atataatta

SEQ ID NO: 76198 - DNA, 9 bp, Unknown
  misc_feature (1)..( 9): Result.001 file - promoters75/1016468
ccttaatta

SEQ ID NO: 76199 - DNA, 9 bp, Unknown
  misc_feature (1)..( 9): Result.001 file - promoters75/1016468
gagtctaaa

SEQ ID NO: 76200 - DNA, 9 bp, Unknown
  misc_feature (1)..( 9): Result.001 file - promoters75/1016468
tggtcaaaa

SEQ ID NO: 76201 - DNA, 9 bp, Unknown
  misc_feature (1)..( 9): Result.001 file - promoters75/1016468
tggccaact

SEQ ID NO: 76202 - DNA, 7 bp, Unknown
  misc_feature (1)..( 7): Result.001 file - promoters75/1016468
aaatgtc

SEQ ID NO: 76203 - DNA, 7 bp, Unknown
  misc_feature (1)..( 7): Result.001 file - promoters75/1016468
aaatgtt

SEQ ID NO: 76204 - DNA, 8 bp, Unknown
  misc_feature (1)..( 8): Result.001 file - promoters75/1016468
aaattgtt

SEQ ID NO: 76205 - DNA, 8 bp, Unknown
  misc_feature (1)..( 8): Result.001 file - promoters75/1016468
tatatata

SEQ ID NO: 76206 - DNA, 8 bp, Unknown
  misc_feature (1)..( 8): Result.001 file - promoters75/1016468
tatatata

SEQ ID NO: 76207 - DNA, 8 bp, Unknown
  misc_feature (1)..( 8): Result.001 file - promoters75/1016468
catataaa

SEQ ID NO: 76208 - DNA, 8 bp, Unknown
  misc_feature (1)..( 8): Result.001 file - promoters75/1016468
taattttt

SEQ ID NO: 76209 - DNA, 8 bp, Unknown
  misc_feature (1)..( 8): Result.001 file - promoters75/1016468
taattttc

SEQ ID NO: 76210 - DNA, 8 bp, Unknown
  misc_feature (1)..( 8): Result.001 file - promoters75/1016771
gaattttt

SEQ ID NO: 76211 - DNA, 8 bp, Unknown
  misc_feature (1)..( 8): Result.001 file - promoters75/1016771
attaatgt

SEQ ID NO: 76212 - DNA, 8 bp, Unknown
  misc_feature (1)..( 8): Result.001 file - promoters75/1016771
attactgt

SEQ ID NO: 76213 - DNA, 8 bp, Unknown
  misc_feature (1)..( 8): Result.001 file - promoters75/1016771
attattgt

SEQ ID NO: 76214 - DNA, 8 bp, Unknown
  misc_feature (1)..( 8): Result.001 file - promoters75/1016771
tttactaa

SEQ ID NO: 76215 - DNA, 8 bp, Unknown
  misc_feature (1)..( 8): Result.001 file - promoters75/1016771
ttttctac

SEQ ID NO: 76216 - DNA, 8 bp, Unknown
  misc_feature (1)..( 8): Result.001 file - promoters75/1016771
attagtaa

SEQ ID NO: 76217 - DNA, 8 bp, Unknown
  misc_feature (1)..( 8): Result.001 file - promoters75/1016771
tttcactt

SEQ ID NO: 76218 - DNA, 8 bp, Unknown
  misc_feature (1)..( 8): Result.001 file - promoters75/1016771
tttcactc

SEQ ID NO: 76219 - DNA, 8 bp, Unknown
  misc_feature (1)..( 8): Result.001 file - promoters75/1016886
tatcactt

SEQ ID NO: 76220 - DNA, 15 bp, Unknown
  misc_feature (1)..( 15): Result.001 file - promoters75/1016886
ttcatttttaaaaac

SEQ ID NO: 76221 - DNA, 15 bp, Unknown
  misc_feature (1)..( 15): Result.001 file - promoters75/1016886
tctagatctaaaaac

SEQ ID NO: 76222 - DNA, 15 bp, Unknown
  misc_feature (1)..( 15): Result.001 file - promoters75/1017282
ttcacttttaaaaac

SEQ ID NO: 76223 - DNA, 9 bp, Unknown
  misc_feature (1)..( 9): Result.001 file - promoters75/1017282
atttccgaa

SEQ ID NO: 76224 - DNA, 9 bp, Unknown
  misc_feature (1)..( 9): Result.001 file - promoters75/1017282
ttttccgct

SEQ ID NO: 76225 - DNA, 9 bp, Unknown
  misc_feature (1)..( 9): Result.001 file - promoters75/1017618
ttttcagct

SEQ ID NO: 76226 - DNA, 8 bp, Unknown
  misc_feature (1)..( 8): Result.001 file - promoters75/1017618
ttaagaag

SEQ ID NO: 76227 - DNA, 8 bp, Unknown
  misc_feature (1)..( 8): Result.001 file - promoters75/1017618
ttatgaaa

SEQ ID NO: 76228 - DNA, 9 bp, Unknown
  misc_feature (1)..( 9): Result.001 file - promoters75/1018052
ccatgcaaa

SEQ ID NO: 76229 - DNA, 7 bp, Unknown
  misc_feature (1)..( 7): Result.001 file - promoters75/1018052
tcagttt

SEQ ID NO: 76230 - DNA, 7 bp, Unknown
  misc_feature (1)..( 7): Result.001 file - promoters75/1018052
tcagttg

SEQ ID NO: 76231 - DNA, 7 bp, Unknown
  misc_feature (1)..( 7): Result.001 file - promoters75/1018052
tcaattt

SEQ ID NO: 76232 - DNA, 9 bp, Unknown
  misc_feature (1)..( 9): Result.001 file - promoters75/1018052
attccacat

SEQ ID NO: 76233 - DNA, 9 bp, Unknown
  misc_feature (1)..( 9): Result.001 file - promoters75/1018052
cttcaacat

SEQ ID NO: 76234 - DNA, 9 bp, Unknown
  misc_feature (1)..( 9): Result.001 file - promoters75/1018052
cttcaaaat

SEQ ID NO: 76235 - DNA, 8 bp, Unknown
  misc_feature (1)..( 8): Result.001 file - promoters75/1018052
cttgttgt

SEQ ID NO: 76236 - DNA, 8 bp, Unknown
  misc_feature (1)..( 8): Result.001 file - promoters75/1018052
attgatgt

SEQ ID NO: 76237 - DNA, 8 bp, Unknown
  misc_feature (1)..( 8): Result.001 file - promoters75/1018190
gttttttt

SEQ ID NO: 76238 - DNA, 7 bp, Unknown
  misc_feature (1)..( 7): Result.001 file - promoters75/1018190
atttgtt

SEQ ID NO: 76239 - DNA, 7 bp, Unknown
  misc_feature (1)..( 7): Result.001 file - promoters75/1018190
atttgtt

SEQ ID NO: 76240 - DNA, 7 bp, Unknown
  misc_feature (1)..( 7): Result.001 file - promoters75/1018190
atttgta

SEQ ID NO: 76241 - DNA, 7 bp, Unknown
  misc_feature (1)..( 7): Result.001 file - promoters75/1018190
ttgattg

SEQ ID NO: 76242 - DNA, 7 bp, Unknown
  misc_feature (1)..( 7): Result.001 file - promoters75/1018190
ttgattg

SEQ ID NO: 76243 - DNA, 7 bp, Unknown
  misc_feature (1)..( 7): Result.001 file - promoters75/1018190
ttgattt

SEQ ID NO: 76244 - DNA, 9 bp, Unknown
  misc_feature (1)..( 9): Result.001 file - promoters75/1018190
attttttta

SEQ ID NO: 76245 - DNA, 9 bp, Unknown
  misc_feature (1)..( 9): Result.001 file - promoters75/1018190
cttttttta

SEQ ID NO: 76246 - DNA, 9 bp, Unknown
  misc_feature (1)..( 9): Result.001 file - promoters75/1018276
ctttgtttg

SEQ ID NO: 76247 - DNA, 9 bp, Unknown
  misc_feature (1)..( 9): Result.001 file - promoters75/1018276
acttcatat

SEQ ID NO: 76248 - DNA, 9 bp, Unknown
  misc_feature (1)..( 9): Result.001 file - promoters75/1018276
tcttcttat

SEQ ID NO: 76249 - DNA, 9 bp, Unknown
  misc_feature (1)..( 9): Result.001 file - promoters75/1018391
tcttcttca

SEQ ID NO: 76250 - DNA, 13 bp, Unknown
  misc_feature (1)..( 13): Result.001 file - promoters75/1018391
ctagtttattgtt

SEQ ID NO: 76251 - DNA, 13 bp, Unknown
  misc_feature (1)..( 13): Result.001 file - promoters75/1018391
ctagtttagaccc

SEQ ID NO: 76252 - DNA, 13 bp, Unknown
  misc_feature (1)..( 13): Result.001 file - promoters75/1018391
ggggtttgttgtt

SEQ ID NO: 76253 - DNA, 8 bp, Unknown
  misc_feature (1)..( 8): Result.001 file - promoters75/1018391
agagcata

SEQ ID NO: 76254 - DNA, 8 bp, Unknown
  misc_feature (1)..( 8): Result.001 file - promoters75/1018391
agatcatg

SEQ ID NO: 76255 - DNA, 8 bp, Unknown
  misc_feature (1)..( 8): Result.001 file - promoters75/1018523
cgattatg

SEQ ID NO: 76256 - DNA, 8 bp, Unknown
  misc_feature (1)..( 8): Result.001 file - promoters75/1018523
cccaaaaa

SEQ ID NO: 76257 - DNA, 8 bp, Unknown
  misc_feature (1)..( 8): Result.001 file - promoters75/1018523
tacaaaaa

SEQ ID NO: 76258 - DNA, 8 bp, Unknown
  misc_feature (1)..( 8): Result.001 file - promoters75/1018523
tcctaaaa

SEQ ID NO: 76259 - DNA, 8 bp, Unknown
  misc_feature (1)..( 8): Result.001 file - promoters75/1018523
aacaaaaa

SEQ ID NO: 76260 - DNA, 11 bp, Unknown
  misc_feature (1)..( 11): Result.001 file - promoters75/1018523
aaacagtaaaa

SEQ ID NO: 76261 - DNA, 11 bp, Unknown
  misc_feature (1)..( 11): Result.001 file - promoters75/1018523
aaacaataaaa

SEQ ID NO: 76262 - DNA, 11 bp, Unknown
  misc_feature (1)..( 11): Result.001 file - promoters75/1018523
agataatattt

SEQ ID NO: 76263 - DNA, 11 bp, Unknown
  misc_feature (1)..( 11): Result.001 file - promoters75/1018523
cgtcaaaaaac

SEQ ID NO: 76264 - DNA, 10 bp, Unknown
  misc_feature (1)..( 10): Result.001 file - promoters75/1018523
attaataaag

SEQ ID NO: 76265 - DNA, 10 bp, Unknown
  misc_feature (1)..( 10): Result.001 file - promoters75/1018523
attaatattt

SEQ ID NO: 76266 - DNA, 10 bp, Unknown
  misc_feature (1)..( 10): Result.001 file - promoters75/1018523
gataatattt

SEQ ID NO: 76267 - DNA, 10 bp, Unknown
  misc_feature (1)..( 10): Result.001 file - promoters75/1018523
tttattatag

SEQ ID NO: 76268 - DNA, 10 bp, Unknown
  misc_feature (1)..( 10): Result.001 file - promoters75/1018523
tttattttat

SEQ ID NO: 76269 - DNA, 12 bp, Unknown
  misc_feature (1)..( 12): Result.001 file - promoters75/1018523
taagaaatttcc

SEQ ID NO: 76270 - DNA, 12 bp, Unknown
  misc_feature (1)..( 12): Result.001 file - promoters75/1018523
taaaaaaactaa

SEQ ID NO: 76271 - DNA, 12 bp, Unknown
  misc_feature (1)..( 12): Result.001 file - promoters75/1018523
caagaaaactca

SEQ ID NO: 76272 - DNA, 12 bp, Unknown
  misc_feature (1)..( 12): Result.001 file - promoters75/1018523
taaataactaat

SEQ ID NO: 76273 - DNA, 7 bp, Unknown
  misc_feature (1)..( 7): Result.001 file - promoters75/1018523
taagatt

SEQ ID NO: 76274 - DNA, 7 bp, Unknown
  misc_feature (1)..( 7): Result.001 file - promoters75/1018523
taaaatt

SEQ ID NO: 76275 - DNA, 7 bp, Unknown
  misc_feature (1)..( 7): Result.001 file - promoters75/1018523
taagatc

SEQ ID NO: 76276 - DNA, 7 bp, Unknown
  misc_feature (1)..( 7): Result.001 file - promoters75/1018523
aaaaatt

SEQ ID NO: 76277 - DNA, 7 bp, Unknown
  misc_feature (1)..( 7): Result.001 file - promoters75/1018523
taaaaat

SEQ ID NO: 76278 - DNA, 11 bp, Unknown
  misc_feature (1)..( 11): Result.001 file - promoters75/1018523
caaagacaagt

SEQ ID NO: 76279 - DNA, 11 bp, Unknown
  misc_feature (1)..( 11): Result.001 file - promoters75/1018523
gatagataaga

SEQ ID NO: 76280 - DNA, 11 bp, Unknown
  misc_feature (1)..( 11): Result.001 file - promoters75/1018523
caaaaacaata

SEQ ID NO: 76281 - DNA, 11 bp, Unknown
  misc_feature (1)..( 11): Result.001 file - promoters75/1018523
gggttacaaaa

SEQ ID NO: 76282 - DNA, 14 bp, Unknown
  misc_feature (1)..( 14): Result.001 file - promoters75/1018523
taaataaatttttg

SEQ ID NO: 76283 - DNA, 14 bp, Unknown
  misc_feature (1)..( 14): Result.001 file - promoters75/1018523
caaacaaatgtttg

SEQ ID NO: 76284 - DNA, 14 bp, Unknown
  misc_feature (1)..( 14): Result.001 file - promoters75/1018523
taactaatttctta

SEQ ID NO: 76285 - DNA, 15 bp, Unknown
  misc_feature (1)..( 15): Result.001 file - promoters75/1018523
taatataactcttgg

SEQ ID NO: 76286 - DNA, 11 bp, Unknown
  misc_feature (1)..( 11): Result.001 file - promoters75/1018523
agttaaaaaat

SEQ ID NO: 76287 - DNA, 11 bp, Unknown
  misc_feature (1)..( 11): Result.001 file - promoters75/1018523
agttaatatat

SEQ ID NO: 76288 - DNA, 11 bp, Unknown
  misc_feature (1)..( 11): Result.001 file - promoters75/1018523
tgttattatat

SEQ ID NO: 76289 - DNA, 11 bp, Unknown
  misc_feature (1)..( 11): Result.001 file - promoters75/1018536
agttatttaaa

SEQ ID NO: 76290 - DNA, 8 bp, Unknown
  misc_feature (1)..( 8): Result.001 file - promoters75/1018536
attagttc

SEQ ID NO: 76291 - DNA, 8 bp, Unknown
  misc_feature (1)..( 8): Result.001 file - promoters75/1018536
atttgtta

SEQ ID NO: 76292 - DNA, 8 bp, Unknown
  misc_feature (1)..( 8): Result.001 file - promoters75/1018536
aattgtta

SEQ ID NO: 76293 - DNA, 7 bp, Unknown
  misc_feature (1)..( 7): Result.001 file - promoters75/1018536
tttcaat

SEQ ID NO: 76294 - DNA, 7 bp, Unknown
  misc_feature (1)..( 7): Result.001 file - promoters75/1018536
ttttaat

SEQ ID NO: 76295 - DNA, 7 bp, Unknown
  misc_feature (1)..( 7): Result.001 file - promoters75/1018536
ttttaaa

SEQ ID NO: 76296 - DNA, 8 bp, Unknown
  misc_feature (1)..( 8): Result.001 file - promoters75/1018536
aaattcaa

SEQ ID NO: 76297 - DNA, 8 bp, Unknown
  misc_feature (1)..( 8): Result.001 file - promoters75/1018536
aaattctc

SEQ ID NO: 76298 - DNA, 8 bp, Unknown
  misc_feature (1)..( 8): Result.001 file - promoters75/1018536
aaatcctc

SEQ ID NO: 76299 - DNA, 11 bp, Unknown
  misc_feature (1)..( 11): Result.001 file - promoters75/1018536
cttataattat

SEQ ID NO: 76300 - DNA, 11 bp, Unknown
  misc_feature (1)..( 11): Result.001 file - promoters75/1018536
tttataagtat

SEQ ID NO: 76301 - DNA, 11 bp, Unknown
  misc_feature (1)..( 11): Result.001 file - promoters75/1018770
tttgtaacttc

SEQ ID NO: 76302 - DNA, 13 bp, Unknown
  misc_feature (1)..( 13): Result.001 file - promoters75/1018770
tccatcgaattca

SEQ ID NO: 76303 - DNA, 13 bp, Unknown
  misc_feature (1)..( 13): Result.001 file - promoters75/1018770
caaatcaaatcga

SEQ ID NO: 76304 - DNA, 13 bp, Unknown
  misc_feature (1)..( 13): Result.001 file - promoters75/1018770
tccctcgaacccg

SEQ ID NO: 76305 - DNA, 13 bp, Unknown
  misc_feature (1)..( 13): Result.001 file - promoters75/1018770
attatcgaaatta

SEQ ID NO: 76306 - DNA, 13 bp, Unknown
  misc_feature (1)..( 13): Result.001 file - promoters75/1018770
aaaaccaaagaaa

SEQ ID NO: 76307 - DNA, 13 bp, Unknown
  misc_feature (1)..( 13): Result.001 file - promoters75/1018770
cttatcaaaccaa

SEQ ID NO: 76308 - DNA, 13 bp, Unknown
  misc_feature (1)..( 13): Result.001 file - promoters75/1018770
aaaaacgaatggc

SEQ ID NO: 76309 - DNA, 12 bp, Unknown
  misc_feature (1)..( 12): Result.001 file - promoters75/1018770
gaattcaagacc

SEQ ID NO: 76310 - DNA, 12 bp, Unknown
  misc_feature (1)..( 12): Result.001 file - promoters75/1018770
aatggcaaaacc

SEQ ID NO: 76311 - DNA, 12 bp, Unknown
  misc_feature (1)..( 12): Result.001 file - promoters75/1018770
caaatcaaatcg

SEQ ID NO: 76312 - DNA, 12 bp, Unknown
  misc_feature (1)..( 12): Result.001 file - promoters75/1018770
gaaattaaaatg

SEQ ID NO: 76313 - DNA, 12 bp, Unknown
  misc_feature (1)..( 12): Result.001 file - promoters75/1018770
caaaccaatgtg

SEQ ID NO: 76314 - DNA, 12 bp, Unknown
  misc_feature (1)..( 12): Result.001 file - promoters75/1018770
aaaacgaatggc

SEQ ID NO: 76315 - DNA, 12 bp, Unknown
  misc_feature (1)..( 12): Result.001 file - promoters75/1018770
agaatttttgcg

SEQ ID NO: 76316 - DNA, 12 bp, Unknown
  misc_feature (1)..( 12): Result.001 file - promoters75/1018770
actctttttgat

SEQ ID NO: 76317 - DNA, 12 bp, Unknown
  misc_feature (1)..( 12): Result.001 file - promoters75/1018770
ttcctttttgta

SEQ ID NO: 76318 - DNA, 12 bp, Unknown
  misc_feature (1)..( 12): Result.001 file - promoters75/1018770
attctttttgcc

SEQ ID NO: 76319 - DNA, 12 bp, Unknown
  misc_feature (1)..( 12): Result.001 file - promoters75/1018770
taaattttttat

SEQ ID NO: 76320 - DNA, 12 bp, Unknown
  misc_feature (1)..( 12): Result.001 file - promoters75/1018770
cctatttacaat

SEQ ID NO: 76321 - DNA, 12 bp, Unknown
  misc_feature (1)..( 12): Result.001 file - promoters75/1018770
ttactttgtcaa

SEQ ID NO: 76322 - DNA, 14 bp, Unknown
  misc_feature (1)..( 14): Result.001 file - promoters75/1018770
cctatttacaatgt

SEQ ID NO: 76323 - DNA, 14 bp, Unknown
  misc_feature (1)..( 14): Result.001 file - promoters75/1018770
tgtatttactttgt

SEQ ID NO: 76324 - DNA, 14 bp, Unknown
  misc_feature (1)..( 14): Result.001 file - promoters75/1018770
cctttttgtatcaa

SEQ ID NO: 76325 - DNA, 14 bp, Unknown
  misc_feature (1)..( 14): Result.001 file - promoters75/1018770
tgtatttcactctt

SEQ ID NO: 76326 - DNA, 14 bp, Unknown
  misc_feature (1)..( 14): Result.001 file - promoters75/1018770
attatttcaaatga

SEQ ID NO: 76327 - DNA, 14 bp, Unknown
  misc_feature (1)..( 14): Result.001 file - promoters75/1019734
catatttttttaaa

SEQ ID NO: 76328 - DNA, 9 bp, Unknown
  misc_feature (1)..( 9): Result.001 file - promoters75/1019734
actatcata

SEQ ID NO: 76329 - DNA, 9 bp, Unknown
  misc_feature (1)..( 9): Result.001 file - promoters75/1019734
tcaatcata

SEQ ID NO: 76330 - DNA, 9 bp, Unknown
  misc_feature (1)..( 9): Result.001 file - promoters75/1019734
tcaaccata

SEQ ID NO: 76331 - DNA, 9 bp, Unknown
  misc_feature (1)..( 9): Result.001 file - promoters75/1019734
aaatttcat

SEQ ID NO: 76332 - DNA, 9 bp, Unknown
  misc_feature (1)..( 9): Result.001 file - promoters75/1019734
taatttcat

SEQ ID NO: 76333 - DNA, 9 bp, Unknown
  misc_feature (1)..( 9): Result.001 file - promoters75/1019928
taatttatt

SEQ ID NO: 76334 - DNA, 8 bp, Unknown
  misc_feature (1)..( 8): Result.001 file - promoters75/1019928
attagttc

SEQ ID NO: 76335 - DNA, 8 bp, Unknown
  misc_feature (1)..( 8): Result.001 file - promoters75/1019928
atttgtta

SEQ ID NO: 76336 - DNA, 8 bp, Unknown
  misc_feature (1)..( 8): Result.001 file - promoters75/1019928
aattgtta

SEQ ID NO: 76337 - DNA, 7 bp, Unknown
  misc_feature (1)..( 7): Result.001 file - promoters75/1019928
tttcaat

SEQ ID NO: 76338 - DNA, 7 bp, Unknown
  misc_feature (1)..( 7): Result.001 file - promoters75/1019928
ttttaat

SEQ ID NO: 76339 - DNA, 7 bp, Unknown
  misc_feature (1)..( 7): Result.001 file - promoters75/1019928
ttttaaa

SEQ ID NO: 76340 - DNA, 8 bp, Unknown
  misc_feature (1)..( 8): Result.001 file - promoters75/1019928
aaattcaa

SEQ ID NO: 76341 - DNA, 8 bp, Unknown
  misc_feature (1)..( 8): Result.001 file - promoters75/1019928
aaattctc

SEQ ID NO: 76342 - DNA, 8 bp, Unknown
  misc_feature (1)..( 8): Result.001 file - promoters75/1019928
aaatcctc

SEQ ID NO: 76343 - DNA, 11 bp, Unknown
  misc_feature (1)..( 11): Result.001 file - promoters75/1019928
cttataattat

SEQ ID NO: 76344 - DNA, 11 bp, Unknown
  misc_feature (1)..( 11): Result.001 file - promoters75/1019928
tttataagtat

SEQ ID NO: 76345 - DNA, 11 bp, Unknown
  misc_feature (1)..( 11): Result.001 file - promoters75/1020223
tttgtaacttc

SEQ ID NO: 76346 - DNA, 8 bp, Unknown
  misc_feature (1)..( 8): Result.001 file - promoters75/1020223
atcatatt

SEQ ID NO: 76347 - DNA, 8 bp, Unknown
  misc_feature (1)..( 8): Result.001 file - promoters75/1020223
atcatatt

SEQ ID NO: 76348 - DNA, 8 bp, Unknown
  misc_feature (1)..( 8): Result.001 file - promoters75/1020223
atcatatt

SEQ ID NO: 76349 - DNA, 9 bp, Unknown
  misc_feature (1)..( 9): Result.001 file - promoters75/1020223
tttgtagtg

SEQ ID NO: 76350 - DNA, 9 bp, Unknown
  misc_feature (1)..( 9): Result.001 file - promoters75/1020223
attgtagct

SEQ ID NO: 76351 - DNA, 9 bp, Unknown
  misc_feature (1)..( 9): Result.001 file - promoters75/1020223
tttgttgtg

SEQ ID NO: 76352 - DNA, 8 bp, Unknown
  misc_feature (1)..( 8): Result.001 file - promoters75/1020223
tgatttgt

SEQ ID NO: 76353 - DNA, 8 bp, Unknown
  misc_feature (1)..( 8): Result.001 file - promoters75/1020223
agatatgt

SEQ ID NO: 76354 - DNA, 8 bp, Unknown
  misc_feature (1)..( 8): Result.001 file - promoters75/1020223
tgatttgg

SEQ ID NO: 76355 - DNA, 7 bp, Unknown
  misc_feature (1)..( 7): Result.001 file - promoters75/1020223
gtttgtt

SEQ ID NO: 76356 - DNA, 7 bp, Unknown
  misc_feature (1)..( 7): Result.001 file - promoters75/1020223
gtttgtg

SEQ ID NO: 76357 - DNA, 7 bp, Unknown
  misc_feature (1)..( 7): Result.001 file - promoters75/1020223
ttttgtt

SEQ ID NO: 76358 - DNA, 8 bp, Unknown
  misc_feature (1)..( 8): Result.001 file - promoters75/1020223
tgtttgtt

SEQ ID NO: 76359 - DNA, 8 bp, Unknown
  misc_feature (1)..( 8): Result.001 file - promoters75/1020223
gatttgtt

SEQ ID NO: 76360 - DNA, 8 bp, Unknown
  misc_feature (1)..( 8): Result.001 file - promoters75/1020265
gatatgta

SEQ ID NO: 76361 - DNA, 8 bp, Unknown
  misc_feature (1)..( 8): Result.001 file - promoters75/1020265
atgactac

SEQ ID NO: 76362 - DNA, 8 bp, Unknown
  misc_feature (1)..( 8): Result.001 file - promoters75/1020265
atgactta

SEQ ID NO: 76363 - DNA, 8 bp, Unknown
  misc_feature (1)..( 8): Result.001 file - promoters75/1020543
ttgattta

SEQ ID NO: 76364 - DNA, 10 bp, Unknown
  misc_feature (1)..( 10): Result.001 file - promoters75/1020543
tttgaaaaga

SEQ ID NO: 76365 - DNA, 10 bp, Unknown
  misc_feature (1)..( 10): Result.001 file - promoters75/1020543
aaaaaaaaga

SEQ ID NO: 76366 - DNA, 11 bp, Unknown
  misc_feature (1)..( 11): Result.001 file - promoters75/1020543
gaagaaacaga

SEQ ID NO: 76367 - DNA, 12 bp, Unknown
  misc_feature (1)..( 12): Result.001 file - promoters75/1020543
tgaaaagatgaa

SEQ ID NO: 76368 - DNA, 12 bp, Unknown
  misc_feature (1)..( 12): Result.001 file - promoters75/1020543
acacaagaagaa

SEQ ID NO: 76369 - DNA, 12 bp, Unknown
  misc_feature (1)..( 12): Result.001 file - promoters75/1020701
gaaaaaaaagaa

SEQ ID NO: 76370 - DNA, 11 bp, Unknown
  misc_feature (1)..( 11): Result.001 file - promoters75/1020701
tgtttgaccat

SEQ ID NO: 76371 - DNA, 11 bp, Unknown
  misc_feature (1)..( 11): Result.001 file - promoters75/1020701
tatttgaacat

SEQ ID NO: 76372 - DNA, 11 bp, Unknown
  misc_feature (1)..( 11): Result.001 file - promoters75/1020701
tgtgtgagttc

SEQ ID NO: 76373 - DNA, 8 bp, Unknown
  misc_feature (1)..( 8): Result.001 file - promoters75/1020701
taacgaac

SEQ ID NO: 76374 - DNA, 8 bp, Unknown
  misc_feature (1)..( 8): Result.001 file - promoters75/1020701
caacgaaa

SEQ ID NO: 76375 - DNA, 8 bp, Unknown
  misc_feature (1)..( 8): Result.001 file - promoters75/1020786
caactaaa

SEQ ID NO: 76376 - DNA, 6 bp, Unknown
  misc_feature (1)..( 6): Result.001 file - promoters75/1020786
tataaa

SEQ ID NO: 76377 - DNA, 6 bp, Unknown
  misc_feature (1)..( 6): Result.001 file - promoters75/1020786
tataaa

SEQ ID NO: 76378 - DNA, 6 bp, Unknown
  misc_feature (1)..( 6): Result.001 file - promoters75/1020786
tataaa

SEQ ID NO: 76379 - DNA, 6 bp, Unknown
  misc_feature (1)..( 6): Result.001 file - promoters75/1020786
caaaaa

SEQ ID NO: 76380 - DNA, 6 bp, Unknown
  misc_feature (1)..( 6): Result.001 file - promoters75/1020786
caaaaa

SEQ ID NO: 76381 - DNA, 6 bp, Unknown
  misc_feature (1)..( 6): Result.001 file - promoters75/1020786
caaaaa

SEQ ID NO: 76382 - DNA, 14 bp, Unknown
  misc_feature (1)..( 14): Result.001 file - promoters75/1020786
cacaacattgcttc

SEQ ID NO: 76383 - DNA, 14 bp, Unknown
  misc_feature (1)..( 14): Result.001 file - promoters75/1020786
aacaacaaaaaaag

SEQ ID NO: 76384 - DNA, 14 bp, Unknown
  misc_feature (1)..( 14): Result.001 file - promoters75/1020863
aacgacaaaacaag

SEQ ID NO: 76385 - DNA, 9 bp, Unknown
  misc_feature (1)..( 9): Result.001 file - promoters75/1020863
aaatattaa

SEQ ID NO: 76386 - DNA, 9 bp, Unknown
  misc_feature (1)..( 9): Result.001 file - promoters75/1020863
aaaaattaa

SEQ ID NO: 76387 - DNA, 9 bp, Unknown
  misc_feature (1)..( 9): Result.001 file - promoters75/1020863
taaaatttc

SEQ ID NO: 76388 - DNA, 10 bp, Unknown
  misc_feature (1)..( 10): Result.001 file - promoters75/1020863
cgaaaaataa

SEQ ID NO: 76389 - DNA, 10 bp, Unknown
  misc_feature (1)..( 10): Result.001 file - promoters75/1020863
ataaaattaa

SEQ ID NO: 76390 - DNA, 10 bp, Unknown
  misc_feature (1)..( 10): Result.001 file - promoters75/1020863
ataatatttc

SEQ ID NO: 76391 - DNA, 9 bp, Unknown
  misc_feature (1)..( 9): Result.001 file - promoters75/1020863
aataaaagc

SEQ ID NO: 76392 - DNA, 9 bp, Unknown
  misc_feature (1)..( 9): Result.001 file - promoters75/1020863
aataaaatt

SEQ ID NO: 76393 - DNA, 9 bp, Unknown
  misc_feature (1)..( 9): Result.001 file - promoters75/1020863
gataatatt

SEQ ID NO: 76394 - DNA, 7 bp, Unknown
  misc_feature (1)..( 7): Result.001 file - promoters75/1020863
aaacaaa

SEQ ID NO: 76395 - DNA, 7 bp, Unknown
  misc_feature (1)..( 7): Result.001 file - promoters75/1020863
aaataaa

SEQ ID NO: 76396 - DNA, 7 bp, Unknown
  misc_feature (1)..( 7): Result.001 file - promoters75/1020863
aaacaaa

SEQ ID NO: 76397 - DNA, 10 bp, Unknown
  misc_feature (1)..( 10): Result.001 file - promoters75/1020863
atattattag

SEQ ID NO: 76398 - DNA, 10 bp, Unknown
  misc_feature (1)..( 10): Result.001 file - promoters75/1020863
atattattag

SEQ ID NO: 76399 - DNA, 10 bp, Unknown
  misc_feature (1)..( 10): Result.001 file - promoters75/1021549
ttattatatt

SEQ ID NO: 76400 - DNA, 11 bp, Unknown
  misc_feature (1)..( 11): Result.001 file - promoters75/1021549
acatatatact

SEQ ID NO: 76401 - DNA, 11 bp, Unknown
  misc_feature (1)..( 11): Result.001 file - promoters75/1021549
gtatatatata

SEQ ID NO: 76402 - DNA, 11 bp, Unknown
  misc_feature (1)..( 11): Result.001 file - promoters75/1021549
aactatataac

SEQ ID NO: 76403 - DNA, 11 bp, Unknown
  misc_feature (1)..( 11): Result.001 file - promoters75/1021549
tggtatataaa

SEQ ID NO: 76404 - DNA, 11 bp, Unknown
  misc_feature (1)..( 11): Result.001 file - promoters75/1021549
cactatttaaa

SEQ ID NO: 76405 - DNA, 11 bp, Unknown
  misc_feature (1)..( 11): Result.001 file - promoters75/1021549
ggttatttagt

SEQ ID NO: 76406 - DNA, 12 bp, Unknown
  misc_feature (1)..( 12): Result.001 file - promoters75/1021549
agttgtacatat

SEQ ID NO: 76407 - DNA, 12 bp, Unknown
  misc_feature (1)..( 12): Result.001 file - promoters75/1021549
acaaatacataa

SEQ ID NO: 76408 - DNA, 12 bp, Unknown
  misc_feature (1)..( 12): Result.001 file - promoters75/1021549
agttatatatat

SEQ ID NO: 76409 - DNA, 12 bp, Unknown
  misc_feature (1)..( 12): Result.001 file - promoters75/1021549
gagcttagatat

SEQ ID NO: 76410 - DNA, 12 bp, Unknown
  misc_feature (1)..( 12): Result.001 file - promoters75/1021549
acagttgtataa

SEQ ID NO: 76411 - DNA, 12 bp, Unknown
  misc_feature (1)..( 12): Result.001 file - promoters75/1021952
atttttggatat

SEQ ID NO: 76412 - DNA, 7 bp, Unknown
  misc_feature (1)..( 7): Result.001 file - promoters75/1021952
ctaaaat

SEQ ID NO: 76413 - DNA, 7 bp, Unknown
  misc_feature (1)..( 7): Result.001 file - promoters75/1021952
ctaaaaa

SEQ ID NO: 76414 - DNA, 7 bp, Unknown
  misc_feature (1)..( 7): Result.001 file - promoters75/1021968
ctaaaaa

SEQ ID NO: 76415 - DNA, 12 bp, Unknown
  misc_feature (1)..( 12): Result.001 file - promoters75/1021968
caacaatgtaca

SEQ ID NO: 76416 - DNA, 12 bp, Unknown
  misc_feature (1)..( 12): Result.001 file - promoters75/1021968
caataatttaca

SEQ ID NO: 76417 - DNA, 12 bp, Unknown
  misc_feature (1)..( 12): Result.001 file - promoters75/1022324
tgaaaatttata

SEQ ID NO: 76418 - DNA, 14 bp, Unknown
  misc_feature (1)..( 14): Result.001 file - promoters75/1022324
agacccaaatgtgc

SEQ ID NO: 76419 - DNA, 14 bp, Unknown
  misc_feature (1)..( 14): Result.001 file - promoters75/1022324
caaccaaaagaatc

SEQ ID NO: 76420 - DNA, 14 bp, Unknown
  misc_feature (1)..( 14): Result.001 file - promoters75/1022324
agatccaccaccga

SEQ ID NO: 76421 - DNA, 14 bp, Unknown
  misc_feature (1)..( 14): Result.001 file - promoters75/1022324
agatcctccgccat

SEQ ID NO: 76422 - DNA, 14 bp, Unknown
  misc_feature (1)..( 14): Result.001 file - promoters75/1022324
ttaacaaaacaatt

SEQ ID NO: 76423 - DNA, 14 bp, Unknown
  misc_feature (1)..( 14): Result.001 file - promoters75/1022662
ccaacgaaacgatt

SEQ ID NO: 76424 - DNA, 11 bp, Unknown
  misc_feature (1)..( 11): Result.001 file - promoters75/1022662
ccatttgtaaa

SEQ ID NO: 76425 - DNA, 11 bp, Unknown
  misc_feature (1)..( 11): Result.001 file - promoters75/1022662
atctttataaa

SEQ ID NO: 76426 - DNA, 11 bp, Unknown
  misc_feature (1)..( 11): Result.001 file - promoters75/1022662
attcttgtaac

SEQ ID NO: 76427 - DNA, 11 bp, Unknown
  misc_feature (1)..( 11): Result.001 file - promoters75/1022662
atctttattta

SEQ ID NO: 76428 - DNA, 10 bp, Unknown
  misc_feature (1)..( 10): Result.001 file - promoters75/1022662
cataaaaact

SEQ ID NO: 76429 - DNA, 10 bp, Unknown
  misc_feature (1)..( 10): Result.001 file - promoters75/1022662
aataaaaatc

SEQ ID NO: 76430 - DNA, 10 bp, Unknown
  misc_feature (1)..( 10): Result.001 file - promoters75/1022748
aatcaaaatc

SEQ ID NO: 76431 - DNA, 16 bp, Unknown
  misc_feature (1)..( 16): Result.001 file - promoters75/1022748
gttcgtatataataaa

SEQ ID NO: 76432 - DNA, 16 bp, Unknown
  misc_feature (1)..( 16): Result.001 file - promoters75/1022748
aagtttttgtaataat

SEQ ID NO: 76433 - DNA, 16 bp, Unknown
  misc_feature (1)..( 16): Result.001 file - promoters75/1022748
ctatttagttaaaaaa

SEQ ID NO: 76434 - DNA, 16 bp, Unknown
  misc_feature (1)..( 16): Result.001 file - promoters75/1022748
ttttacttttaacaaa

SEQ ID NO: 76435 - DNA, 16 bp, Unknown
  misc_feature (1)..( 16): Result.001 file - promoters75/1022748
ttagatttttaatata

SEQ ID NO: 76436 - DNA, 16 bp, Unknown
  misc_feature (1)..( 16): Result.001 file - promoters75/1022748
ttagttttgtaaaaca

SEQ ID NO: 76437 - DNA, 16 bp, Unknown
  misc_feature (1)..( 16): Result.001 file - promoters75/1022748
tgaagtttgaaacaaa

SEQ ID NO: 76438 - DNA, 16 bp, Unknown
  misc_feature (1)..( 16): Result.001 file - promoters75/1022748
tgctgctgaattggaa

SEQ ID NO: 76439 - DNA, 16 bp, Unknown
  misc_feature (1)..( 16): Result.001 file - promoters75/1022748
ctcttatgatttgctt

SEQ ID NO: 76440 - DNA, 16 bp, Unknown
  misc_feature (1)..( 16): Result.001 file - promoters75/1022748
acagcagtattagctt

SEQ ID NO: 76441 - DNA, 16 bp, Unknown
  misc_feature (1)..( 16): Result.001 file - promoters75/1022748
ctcgtataattctttt

SEQ ID NO: 76442 - DNA, 16 bp, Unknown
  misc_feature (1)..( 16): Result.001 file - promoters75/1022748
cttccatgtttttgct

SEQ ID NO: 76443 - DNA, 16 bp, Unknown
  misc_feature (1)..( 16): Result.001 file - promoters75/1022748
tgagtttgatttgatc

SEQ ID NO: 76444 - DNA, 11 bp, Unknown
  misc_feature (1)..( 11): Result.001 file - promoters75/1022748
agaaaagtaag

SEQ ID NO: 76445 - DNA, 11 bp, Unknown
  misc_feature (1)..( 11): Result.001 file - promoters75/1022748
aataaattaat

SEQ ID NO: 76446 - DNA, 11 bp, Unknown
  misc_feature (1)..( 11): Result.001 file - promoters75/1022748
agaaaaataac

SEQ ID NO: 76447 - DNA, 11 bp, Unknown
  misc_feature (1)..( 11): Result.001 file - promoters75/1022748
gagaaaataaa

SEQ ID NO: 76448 - DNA, 11 bp, Unknown
  misc_feature (1)..( 11): Result.001 file - promoters75/1022748
aactagataat

SEQ ID NO: 76449 - DNA, 11 bp, Unknown
  misc_feature (1)..( 11): Result.001 file - promoters75/1022748
ataaaaatttt

SEQ ID NO: 76450 - DNA, 12 bp, Unknown
  misc_feature (1)..( 12): Result.001 file - promoters75/1022748
aaaagtttttgt

SEQ ID NO: 76451 - DNA, 12 bp, Unknown
  misc_feature (1)..( 12): Result.001 file - promoters75/1022748
tttagttttgta

SEQ ID NO: 76452 - DNA, 12 bp, Unknown
  misc_feature (1)..( 12): Result.001 file - promoters75/1022748
tgaagtttgaaa

SEQ ID NO: 76453 - DNA, 12 bp, Unknown
  misc_feature (1)..( 12): Result.001 file - promoters75/1022748
aaaagtgttgag

SEQ ID NO: 76454 - DNA, 13 bp, Unknown
  misc_feature (1)..( 13): Result.001 file - promoters75/1022748
attagatttttaa

SEQ ID NO: 76455 - DNA, 13 bp, Unknown
  misc_feature (1)..( 13): Result.001 file - promoters75/1022932
tttacttttaaca

SEQ ID NO: 76456 - DNA, 8 bp, Unknown
  misc_feature (1)..( 8): Result.001 file - promoters75/1022932
aatctgct

SEQ ID NO: 76457 - DNA, 8 bp, Unknown
  misc_feature (1)..( 8): Result.001 file - promoters75/1022932
catcagct

SEQ ID NO: 76458 - DNA, 8 bp, Unknown
  misc_feature (1)..( 8): Result.001 file - promoters75/1022932
catcagtt

SEQ ID NO: 76459 - DNA, 8 bp, Unknown
  misc_feature (1)..( 8): Result.001 file - promoters75/1022932
tttatgta

SEQ ID NO: 76460 - DNA, 8 bp, Unknown
  misc_feature (1)..( 8): Result.001 file - promoters75/1022932
gttatgtt

SEQ ID NO: 76461 - DNA, 8 bp, Unknown
  misc_feature (1)..( 8): Result.001 file - promoters75/1022932
gttgtgtt

SEQ ID NO: 76462 - DNA, 8 bp, Unknown
  misc_feature (1)..( 8): Result.001 file - promoters75/1022932
aaactttt

SEQ ID NO: 76463 - DNA, 8 bp, Unknown
  misc_feature (1)..( 8): Result.001 file - promoters75/1022932
ttactttt

SEQ ID NO: 76464 - DNA, 8 bp, Unknown
  misc_feature (1)..( 8): Result.001 file - promoters75/1022932
ttacttta

SEQ ID NO: 76465 - DNA, 7 bp, Unknown
  misc_feature (1)..( 7): Result.001 file - promoters75/1022932
ttaattt

SEQ ID NO: 76466 - DNA, 7 bp, Unknown
  misc_feature (1)..( 7): Result.001 file - promoters75/1022932
ttacttt

SEQ ID NO: 76467 - DNA, 7 bp, Unknown
  misc_feature (1)..( 7): Result.001 file - promoters75/1022932
ttacttt

SEQ ID NO: 76468 - DNA, 9 bp, Unknown
  misc_feature (1)..( 9): Result.001 file - promoters75/1022932
tactatata

SEQ ID NO: 76469 - DNA, 9 bp, Unknown
  misc_feature (1)..( 9): Result.001 file - promoters75/1022932
tacaataaa

SEQ ID NO: 76470 - DNA, 9 bp, Unknown
  misc_feature (1)..( 9): Result.001 file - promoters75/1022983
gtcaagaaa

SEQ ID NO: 76471 - DNA, 8 bp, Unknown
  misc_feature (1)..( 8): Result.001 file - promoters75/1022983
atttctta

SEQ ID NO: 76472 - DNA, 8 bp, Unknown
  misc_feature (1)..( 8): Result.001 file - promoters75/1022983
atttctcc

SEQ ID NO: 76473 - DNA, 8 bp, Unknown
  misc_feature (1)..( 8): Result.001 file - promoters75/1022983
ttttatta

SEQ ID NO: 76474 - DNA, 9 bp, Unknown
  misc_feature (1)..( 9): Result.001 file - promoters75/1022983
ttcttattt

SEQ ID NO: 76475 - DNA, 9 bp, Unknown
  misc_feature (1)..( 9): Result.001 file - promoters75/1022983
attttattt

SEQ ID NO: 76476 - DNA, 9 bp, Unknown
  misc_feature (1)..( 9): Result.001 file - promoters75/1022983
attttatta

SEQ ID NO: 76477 - DNA, 10 bp, Unknown
  misc_feature (1)..( 10): Result.001 file - promoters75/1022983
aattgtataa

SEQ ID NO: 76478 - DNA, 10 bp, Unknown
  misc_feature (1)..( 10): Result.001 file - promoters75/1022983
tattttatta

SEQ ID NO: 76479 - DNA, 10 bp, Unknown
  misc_feature (1)..( 10): Result.001 file - promoters75/1023297
tatattatta

SEQ ID NO: 76480 - DNA, 11 bp, Unknown
  misc_feature (1)..( 11): Result.001 file - promoters75/1023297
ctgaagtttct

SEQ ID NO: 76481 - DNA, 11 bp, Unknown
  misc_feature (1)..( 11): Result.001 file - promoters75/1023297
cctaagtttaa

SEQ ID NO: 76482 - DNA, 11 bp, Unknown
  misc_feature (1)..( 11): Result.001 file - promoters75/1023297
gtgatgttttc

SEQ ID NO: 76483 - DNA, 11 bp, Unknown
  misc_feature (1)..( 11): Result.001 file - promoters75/1023297
ttgaggttcac

SEQ ID NO: 76484 - DNA, 11 bp, Unknown
  misc_feature (1)..( 11): Result.001 file - promoters75/1023297
aaaaagtataa

SEQ ID NO: 76485 - DNA, 11 bp, Unknown
  misc_feature (1)..( 11): Result.001 file - promoters75/1023297
aaaaaatatat

SEQ ID NO: 76486 - DNA, 9 bp, Unknown
  misc_feature (1)..( 9): Result.001 file - promoters75/1023297
cttttgtct

SEQ ID NO: 76487 - DNA, 9 bp, Unknown
  misc_feature (1)..( 9): Result.001 file - promoters75/1023297
tttttgttt

SEQ ID NO: 76488 - DNA, 9 bp, Unknown
  misc_feature (1)..( 9): Result.001 file - promoters75/1023297
tatttctct

SEQ ID NO: 76489 - DNA, 9 bp, Unknown
  misc_feature (1)..( 9): Result.001 file - promoters75/1023297
tttttctcg

SEQ ID NO: 76490 - DNA, 9 bp, Unknown
  misc_feature (1)..( 9): Result.001 file - promoters75/1023297
tttatgtaa

SEQ ID NO: 76491 - DNA, 9 bp, Unknown
  misc_feature (1)..( 9): Result.001 file - promoters75/1023453
tttatgcta

SEQ ID NO: 76492 - DNA, 7 bp, Unknown
  misc_feature (1)..( 7): Result.001 file - promoters75/1023453
ctgggaa

SEQ ID NO: 76493 - DNA, 7 bp, Unknown
  misc_feature (1)..( 7): Result.001 file - promoters75/1023453
ctgagaa

SEQ ID NO: 76494 - DNA, 7 bp, Unknown
  misc_feature (1)..( 7): Result.001 file - promoters75/1023453
ctgggaa

SEQ ID NO: 76495 - DNA, 10 bp, Unknown
  misc_feature (1)..( 10): Result.001 file - promoters75/1023453
aaaagaaaga

SEQ ID NO: 76496 - DNA, 10 bp, Unknown
  misc_feature (1)..( 10): Result.001 file - promoters75/1023453
aaaagaaaaa

SEQ ID NO: 76497 - DNA, 11 bp, Unknown
  misc_feature (1)..( 11): Result.001 file - promoters75/1023453
ataagcaaaaa

SEQ ID NO: 76498 - DNA, 12 bp, Unknown
  misc_feature (1)..( 12): Result.001 file - promoters75/1023453
atcctattggtt

SEQ ID NO: 76499 - DNA, 12 bp, Unknown
  misc_feature (1)..( 12): Result.001 file - promoters75/1023453
aatctaatggtt

SEQ ID NO: 76500 - DNA, 12 bp, Unknown
  misc_feature (1)..( 12): Result.001 file - promoters75/1023634
aatctaatctga

SEQ ID NO: 76501 - DNA, 8 bp, Unknown
  misc_feature (1)..( 8): Result.001 file - promoters75/1023634
ttttgaat

SEQ ID NO: 76502 - DNA, 8 bp, Unknown
  misc_feature (1)..( 8): Result.001 file - promoters75/1023634
atttgaat

SEQ ID NO: 76503 - DNA, 8 bp, Unknown
  misc_feature (1)..( 8): Result.001 file - promoters75/1023634
ttttgaca

SEQ ID NO: 76504 - DNA, 11 bp, Unknown
  misc_feature (1)..( 11): Result.001 file - promoters75/1023634
aaactgtgaaa

SEQ ID NO: 76505 - DNA, 11 bp, Unknown
  misc_feature (1)..( 11): Result.001 file - promoters75/1023634
aaaatgtgaaa

SEQ ID NO: 76506 - DNA, 11 bp, Unknown
  misc_feature (1)..( 11): Result.001 file - promoters75/1023634
gctttgtgaaa

SEQ ID NO: 76507 - DNA, 8 bp, Unknown
  misc_feature (1)..( 8): Result.001 file - promoters75/1023634
aacccaaa

SEQ ID NO: 76508 - DNA, 8 bp, Unknown
  misc_feature (1)..( 8): Result.001 file - promoters75/1023634
agcccaaa

SEQ ID NO: 76509 - DNA, 8 bp, Unknown
  misc_feature (1)..( 8): Result.001 file - promoters75/1024015
agcccaat

SEQ ID NO: 76510 - DNA, 14 bp, Unknown
  misc_feature (1)..( 14): Result.001 file - promoters75/1024015
tccatcgaattcaa

SEQ ID NO: 76511 - DNA, 14 bp, Unknown
  misc_feature (1)..( 14): Result.001 file - promoters75/1024015
caaatcaaatcgaa

SEQ ID NO: 76512 - DNA, 14 bp, Unknown
  misc_feature (1)..( 14): Result.001 file - promoters75/1024015
tccctcgaacccga

SEQ ID NO: 76513 - DNA, 14 bp, Unknown
  misc_feature (1)..( 14): Result.001 file - promoters75/1024015
agatgcaaaccaaa

SEQ ID NO: 76514 - DNA, 14 bp, Unknown
  misc_feature (1)..( 14): Result.001 file - promoters75/1024015
atggcaaaaccaaa

SEQ ID NO: 76515 - DNA, 14 bp, Unknown
  misc_feature (1)..( 14): Result.001 file - promoters75/1024015
gcagtcaaatatag

SEQ ID NO: 76516 - DNA, 9 bp, Unknown
  misc_feature (1)..( 9): Result.001 file - promoters75/1024015
aaatcgtta

SEQ ID NO: 76517 - DNA, 9 bp, Unknown
  misc_feature (1)..( 9): Result.001 file - promoters75/1024015
aaatcgaaa

SEQ ID NO: 76518 - DNA, 9 bp, Unknown
  misc_feature (1)..( 9): Result.001 file - promoters75/1024015
gaatcatta

SEQ ID NO: 76519 - DNA, 9 bp, Unknown
  misc_feature (1)..( 9): Result.001 file - promoters75/1024015
aaaccgtat

SEQ ID NO: 76520 - DNA, 9 bp, Unknown
  misc_feature (1)..( 9): Result.001 file - promoters75/1024015
ccatcctta

SEQ ID NO: 76521 - DNA, 9 bp, Unknown
  misc_feature (1)..( 9): Result.001 file - promoters75/1024126
caatcataa

SEQ ID NO: 76522 - DNA, 6 bp, Unknown
  misc_feature (1)..( 6): Result.001 file - promoters75/1024126
aaaaaa

SEQ ID NO: 76523 - DNA, 6 bp, Unknown
  misc_feature (1)..( 6): Result.001 file - promoters75/1024126
aaaaaa

SEQ ID NO: 76524 - DNA, 6 bp, Unknown
  misc_feature (1)..( 6): Result.001 file - promoters75/1024126
aaaaag

SEQ ID NO: 76525 - DNA, 8 bp, Unknown
  misc_feature (1)..( 8): Result.001 file - promoters75/1024126
gttgaaac

SEQ ID NO: 76526 - DNA, 8 bp, Unknown
  misc_feature (1)..( 8): Result.001 file - promoters75/1024126
attgaaaa

SEQ ID NO: 76527 - DNA, 8 bp, Unknown
  misc_feature (1)..( 8): Result.001 file - promoters75/1024126
attcaaaa

SEQ ID NO: 76528 - DNA, 15 bp, Unknown
  misc_feature (1)..( 15): Result.001 file - promoters75/1024126
tcaaatcccacagtt

SEQ ID NO: 76529 - DNA, 15 bp, Unknown
  misc_feature (1)..( 15): Result.001 file - promoters75/1024126
tcaaattccacggtt

SEQ ID NO: 76530 - DNA, 15 bp, Unknown
  misc_feature (1)..( 15): Result.001 file - promoters75/1024126
ggccagaacacggta

SEQ ID NO: 76531 - DNA, 10 bp, Unknown
  misc_feature (1)..( 10): Result.001 file - promoters75/1024126
attgaaaaat

SEQ ID NO: 76532 - DNA, 10 bp, Unknown
  misc_feature (1)..( 10): Result.001 file - promoters75/1024126
gaagaagaat

SEQ ID NO: 76533 - DNA, 10 bp, Unknown
  misc_feature (1)..( 10): Result.001 file - promoters75/1024126
attcaaaatt

SEQ ID NO: 76534 - DNA, 8 bp, Unknown
  misc_feature (1)..( 8): Result.001 file - promoters75/1024126
atgattaa

SEQ ID NO: 76535 - DNA, 8 bp, Unknown
  misc_feature (1)..( 8): Result.001 file - promoters75/1024126
atgattcc

SEQ ID NO: 76536 - DNA, 8 bp, Unknown
  misc_feature (1)..( 8): Result.001 file - promoters75/1024126
atgcttaa

SEQ ID NO: 76537 - DNA, 7 bp, Unknown
  misc_feature (1)..( 7): Result.001 file - promoters75/1024126
ataatat

SEQ ID NO: 76538 - DNA, 7 bp, Unknown
  misc_feature (1)..( 7): Result.001 file - promoters75/1024126
atattat

SEQ ID NO: 76539 - DNA, 7 bp, Unknown
  misc_feature (1)..( 7): Result.001 file - promoters75/1024126
ttattat

SEQ ID NO: 76540 - DNA, 7 bp, Unknown
  misc_feature (1)..( 7): Result.001 file - promoters75/1024126
tatttat

SEQ ID NO: 76541 - DNA, 7 bp, Unknown
  misc_feature (1)..( 7): Result.001 file - promoters75/1024126
tatttaa

SEQ ID NO: 76542 - DNA, 7 bp, Unknown
  misc_feature (1)..( 7): Result.001 file - promoters75/1024189
catttaa

SEQ ID NO: 76543 - DNA, 9 bp, Unknown
  misc_feature (1)..( 9): Result.001 file - promoters75/1024189
aaaaatgaa

SEQ ID NO: 76544 - DNA, 9 bp, Unknown
  misc_feature (1)..( 9): Result.001 file - promoters75/1024189
aaaaaagaa

SEQ ID NO: 76545 - DNA, 9 bp, Unknown
  misc_feature (1)..( 9): Result.001 file - promoters75/1024189
gaaaaaggg

SEQ ID NO: 76546 - DNA, 8 bp, Unknown
  misc_feature (1)..( 8): Result.001 file - promoters75/1024189
ttttatca

SEQ ID NO: 76547 - DNA, 8 bp, Unknown
  misc_feature (1)..( 8): Result.001 file - promoters75/1024189
ttttgtca

SEQ ID NO: 76548 - DNA, 8 bp, Unknown
  misc_feature (1)..( 8): Result.001 file - promoters75/1024189
ttttgtat

SEQ ID NO: 76549 - DNA, 8 bp, Unknown
  misc_feature (1)..( 8): Result.001 file - promoters75/1024189
atatatat

SEQ ID NO: 76550 - DNA, 8 bp, Unknown
  misc_feature (1)..( 8): Result.001 file - promoters75/1024189
atatttat

SEQ ID NO: 76551 - DNA, 8 bp, Unknown
  misc_feature (1)..( 8): Result.001 file - promoters75/1024189
taatttat

SEQ ID NO: 76552 - DNA, 7 bp, Unknown
  misc_feature (1)..( 7): Result.001 file - promoters75/1024189
aatcaaa

SEQ ID NO: 76553 - DNA, 7 bp, Unknown
  misc_feature (1)..( 7): Result.001 file - promoters75/1024189
aatcaaa

SEQ ID NO: 76554 - DNA, 8 bp, Unknown
  misc_feature (1)..( 8): Result.001 file - promoters75/1024189
gatccaaa

SEQ ID NO: 76555 - DNA, 7 bp, Unknown
  misc_feature (1)..( 7): Result.001 file - promoters75/1024189
actatac

SEQ ID NO: 76556 - DNA, 7 bp, Unknown
  misc_feature (1)..( 7): Result.001 file - promoters75/1024189
actttac

SEQ ID NO: 76557 - DNA, 7 bp, Unknown
  misc_feature (1)..( 7): Result.001 file - promoters75/1024189
tctttac

SEQ ID NO: 76558 - DNA, 7 bp, Unknown
  misc_feature (1)..( 7): Result.001 file - promoters75/1024189
tataata

SEQ ID NO: 76559 - DNA, 7 bp, Unknown
  misc_feature (1)..( 7): Result.001 file - promoters75/1024189
tattata

SEQ ID NO: 76560 - DNA, 7 bp, Unknown
  misc_feature (1)..( 7): Result.001 file - promoters75/1024199
tataata

SEQ ID NO: 76561 - DNA, 9 bp, Unknown
  misc_feature (1)..( 9): Result.001 file - promoters75/1024199
gaactaaat

SEQ ID NO: 76562 - DNA, 9 bp, Unknown
  misc_feature (1)..( 9): Result.001 file - promoters75/1024199
aaacaaaaa

SEQ ID NO: 76563 - DNA, 9 bp, Unknown
  misc_feature (1)..( 9): Result.001 file - promoters75/1024199
aaacaaagt

SEQ ID NO: 76564 - DNA, 9 bp, Unknown
  misc_feature (1)..( 9): Result.001 file - promoters75/1024199
aaacaacat

SEQ ID NO: 76565 - DNA, 9 bp, Unknown
  misc_feature (1)..( 9): Result.001 file - promoters75/1024234
caacaacaa

SEQ ID NO: 76566 - DNA, 13 bp, Unknown
  misc_feature (1)..( 13): Result.001 file - promoters75/1024234
taaatttaaaaat

SEQ ID NO: 76567 - DNA, 13 bp, Unknown
  misc_feature (1)..( 13): Result.001 file - promoters75/1024234
ttgattcaaaatt

SEQ ID NO: 76568 - DNA, 13 bp, Unknown
  misc_feature (1)..( 13): Result.001 file - promoters75/1024236
ttgaatcaatatt

SEQ ID NO: 76569 - DNA, 10 bp, Unknown
  misc_feature (1)..( 10): Result.001 file - promoters75/1024236
tatatatata

SEQ ID NO: 76570 - DNA, 10 bp, Unknown
  misc_feature (1)..( 10): Result.001 file - promoters75/1024236
tatttatata

SEQ ID NO: 76571 - DNA, 10 bp, Unknown
  misc_feature (1)..( 10): Result.001 file - promoters75/1024236
tatttaaagc

SEQ ID NO: 76572 - DNA, 10 bp, Unknown
  misc_feature (1)..( 10): Result.001 file - promoters75/1024236
tatataaaga

SEQ ID NO: 76573 - DNA, 10 bp, Unknown
  misc_feature (1)..( 10): Result.001 file - promoters75/1024236
aatataaagg

SEQ ID NO: 76574 - DNA, 10 bp, Unknown
  misc_feature (1)..( 10): Result.001 file - promoters75/1024367
actataaagg

SEQ ID NO: 76575 - DNA, 9 bp, Unknown
  misc_feature (1)..( 9): Result.001 file - promoters75/1024367
attaacttt

SEQ ID NO: 76576 - DNA, 9 bp, Unknown
  misc_feature (1)..( 9): Result.001 file - promoters75/1024367
cataagttt

SEQ ID NO: 76577 - DNA, 9 bp, Unknown
  misc_feature (1)..( 9): Result.001 file - promoters75/1024367
attaactta

SEQ ID NO: 76578 - DNA, 6 bp, Unknown
  misc_feature (1)..( 6): Result.001 file - promoters75/1024367
tatata

SEQ ID NO: 76579 - DNA, 6 bp, Unknown
  misc_feature (1)..( 6): Result.001 file - promoters75/1024367
tatata

SEQ ID NO: 76580 - DNA, 6 bp, Unknown
  misc_feature (1)..( 6): Result.001 file - promoters75/1024367
tatata

SEQ ID NO: 76581 - DNA, 10 bp, Unknown
  misc_feature (1)..( 10): Result.001 file - promoters75/1024367
ttagaaacta

SEQ ID NO: 76582 - DNA, 10 bp, Unknown
  misc_feature (1)..( 10): Result.001 file - promoters75/1024367
ttaaaaaaaa

SEQ ID NO: 76583 - DNA, 10 bp, Unknown
  misc_feature (1)..( 10): Result.001 file - promoters75/1024367
cgaaaaaaaa

SEQ ID NO: 76584 - DNA, 10 bp, Unknown
  misc_feature (1)..( 10): Result.001 file - promoters75/1024367
attgcatttt

SEQ ID NO: 76585 - DNA, 10 bp, Unknown
  misc_feature (1)..( 10): Result.001 file - promoters75/1024367
tttgaatttt

SEQ ID NO: 76586 - DNA, 10 bp, Unknown
  misc_feature (1)..( 10): Result.001 file - promoters75/1024367
ttttaatttg

SEQ ID NO: 76587 - DNA, 14 bp, Unknown
  misc_feature (1)..( 14): Result.001 file - promoters75/1024367
gatcctcgaaactc

SEQ ID NO: 76588 - DNA, 14 bp, Unknown
  misc_feature (1)..( 14): Result.001 file - promoters75/1024367
cttcctcgcaactc

SEQ ID NO: 76589 - DNA, 14 bp, Unknown
  misc_feature (1)..( 14): Result.001 file - promoters75/1024499
cttcctctctccaa

SEQ ID NO: 76590 - DNA, 10 bp, Unknown
  misc_feature (1)..( 10): Result.001 file - promoters75/1024499
ctataaatag

SEQ ID NO: 76591 - DNA, 10 bp, Unknown
  misc_feature (1)..( 10): Result.001 file - promoters75/1024499
ctataaaaaa

SEQ ID NO: 76592 - DNA, 10 bp, Unknown
  misc_feature (1)..( 10): Result.001 file - promoters75/1024853
atataaatag

SEQ ID NO: 76593 - DNA, 12 bp, Unknown
  misc_feature (1)..( 12): Result.001 file - promoters75/1024853
ccatcttcttta

SEQ ID NO: 76594 - DNA, 12 bp, Unknown
  misc_feature (1)..( 12): Result.001 file - promoters75/1024853
cacccttcttta

SEQ ID NO: 76595 - DNA, 12 bp, Unknown
  misc_feature (1)..( 12): Result.001 file - promoters75/1024853
ctaccttttttt

SEQ ID NO: 76596 - DNA, 12 bp, Unknown
  misc_feature (1)..( 12): Result.001 file - promoters75/1024853
aactcttattta

SEQ ID NO: 76597 - DNA, 12 bp, Unknown
  misc_feature (1)..( 12): Result.001 file - promoters75/1024853
tataattctttt

SEQ ID NO: 76598 - DNA, 12 bp, Unknown
  misc_feature (1)..( 12): Result.001 file - promoters75/1024853
aatccttaatca

SEQ ID NO: 76599 - DNA, 10 bp, Unknown
  misc_feature (1)..( 10): Result.001 file - promoters75/1024853
aaaactaaaa

SEQ ID NO: 76600 - DNA, 10 bp, Unknown
  misc_feature (1)..( 10): Result.001 file - promoters75/1024853
aaaaccaaag

SEQ ID NO: 76601 - DNA, 9 bp, Unknown
  misc_feature (1)..( 9): Result.001 file - promoters75/1024853
gaacaaaaa

SEQ ID NO: 76602 - DNA, 10 bp, Unknown
  misc_feature (1)..( 10): Result.001 file - promoters75/1024853
gtaactaaaa

SEQ ID NO: 76603 - DNA, 10 bp, Unknown
  misc_feature (1)..( 10): Result.001 file - promoters75/1024853
caaatcaaat

SEQ ID NO: 76604 - DNA, 11 bp, Unknown
  misc_feature (1)..( 11): Result.001 file - promoters75/1024853
tcatgtcaaat

SEQ ID NO: 76605 - DNA, 11 bp, Unknown
  misc_feature (1)..( 11): Result.001 file - promoters75/1024853
tacacacaaag

SEQ ID NO: 76606 - DNA, 19 bp, Unknown
  misc_feature (1)..( 19): Result.001 file - promoters75/1024853
tggtggaaaatgttaaacc

SEQ ID NO: 76607 - DNA, 19 bp, Unknown
  misc_feature (1)..( 19): Result.001 file - promoters75/1024853
tatacaaaaatgtaatttt

SEQ ID NO: 76608 - DNA, 19 bp, Unknown
  misc_feature (1)..( 19): Result.001 file - promoters75/1024853
ttttttctaatgaaatttt

SEQ ID NO: 76609 - DNA, 19 bp, Unknown
  misc_feature (1)..( 19): Result.001 file - promoters75/1024853
tttaataaaaaaatataga

SEQ ID NO: 76610 - DNA, 19 bp, Unknown
  misc_feature (1)..( 19): Result.001 file - promoters75/1024853
tttaataaatcaaaggggt

SEQ ID NO: 76611 - DNA, 19 bp, Unknown
  misc_feature (1)..( 19): Result.001 file - promoters75/1024889
gccgtttgaatttgatcgg

SEQ ID NO: 76612 - DNA, 11 bp, Unknown
  misc_feature (1)..( 11): Result.001 file - promoters75/1024889
ttttaaattat

SEQ ID NO: 76613 - DNA, 11 bp, Unknown
  misc_feature (1)..( 11): Result.001 file - promoters75/1024889
tttttaattat

SEQ ID NO: 76614 - DNA, 11 bp, Unknown
  misc_feature (1)..( 11): Result.001 file - promoters75/1024889
actaaaattag

SEQ ID NO: 76615 - DNA, 7 bp, Unknown
  misc_feature (1)..( 7): Result.001 file - promoters75/1024889
tcataat

SEQ ID NO: 76616 - DNA, 7 bp, Unknown
  misc_feature (1)..( 7): Result.001 file - promoters75/1024889
tcataaa

SEQ ID NO: 76617 - DNA, 7 bp, Unknown
  misc_feature (1)..( 7): Result.001 file - promoters75/1024889
tcaaaaa

SEQ ID NO: 76618 - DNA, 9 bp, Unknown
  misc_feature (1)..( 9): Result.001 file - promoters75/1024889
gaaggtttt

SEQ ID NO: 76619 - DNA, 9 bp, Unknown
  misc_feature (1)..( 9): Result.001 file - promoters75/1024889
aaagttttt

SEQ ID NO: 76620 - DNA, 9 bp, Unknown
  misc_feature (1)..( 9): Result.001 file - promoters75/1024993
aaactttag

SEQ ID NO: 76621 - DNA, 9 bp, Unknown
  misc_feature (1)..( 9): Result.001 file - promoters75/1024993
aaaaagctg

SEQ ID NO: 76622 - DNA, 9 bp, Unknown
  misc_feature (1)..( 9): Result.001 file - promoters75/1024993
aaaaaggtt

SEQ ID NO: 76623 - DNA, 9 bp, Unknown
  misc_feature (1)..( 9): Result.001 file - promoters75/1024993
aaataggtg

SEQ ID NO: 76624 - DNA, 9 bp, Unknown
  misc_feature (1)..( 9): Result.001 file - promoters75/1025471
ttttaggtg

SEQ ID NO: 76625 - DNA, 14 bp, Unknown
  misc_feature (1)..( 14): Result.001 file - promoters75/1025471
tatagtaaaaaaaa

SEQ ID NO: 76626 - DNA, 14 bp, Unknown
  misc_feature (1)..( 14): Result.001 file - promoters75/1025471
cactctaaaaaaaa

SEQ ID NO: 76627 - DNA, 14 bp, Unknown
  misc_feature (1)..( 14): Result.001 file - promoters75/1025471
aatagtgaaaattg

SEQ ID NO: 76628 - DNA, 14 bp, Unknown
  misc_feature (1)..( 14): Result.001 file - promoters75/1025471
tatagcaaaaaact

SEQ ID NO: 76629 - DNA, 14 bp, Unknown
  misc_feature (1)..( 14): Result.001 file - promoters75/1025471
aagaagaaaaaaat

SEQ ID NO: 76630 - DNA, 14 bp, Unknown
  misc_feature (1)..( 14): Result.001 file - promoters75/1025471
aatatcaaaggtct

SEQ ID NO: 76631 - DNA, 9 bp, Unknown
  misc_feature (1)..( 9): Result.001 file - promoters75/1025471
caaaaaaga

SEQ ID NO: 76632 - DNA, 9 bp, Unknown
  misc_feature (1)..( 9): Result.001 file - promoters75/1025471
taaaaaagt

SEQ ID NO: 76633 - DNA, 9 bp, Unknown
  misc_feature (1)..( 9): Result.001 file - promoters75/1025471
gaaaatagt

SEQ ID NO: 76634 - DNA, 9 bp, Unknown
  misc_feature (1)..( 9): Result.001 file - promoters75/1025471
taaaaaaaa

SEQ ID NO: 76635 - DNA, 9 bp, Unknown
  misc_feature (1)..( 9): Result.001 file - promoters75/1025471
taataaatt

SEQ ID NO: 76636 - DNA, 9 bp, Unknown
  misc_feature (1)..( 9): Result.001 file - promoters75/1025683
gaataaaaa

SEQ ID NO: 76637 - DNA, 9 bp, Unknown
  misc_feature (1)..( 9): Result.001 file - promoters75/1025683
agagaatac

SEQ ID NO: 76638 - DNA, 9 bp, Unknown
  misc_feature (1)..( 9): Result.001 file - promoters75/1025683
agaaaatta

SEQ ID NO: 76639 - DNA, 9 bp, Unknown
  misc_feature (1)..( 9): Result.001 file - promoters75/1025683
agaacattg

SEQ ID NO: 76640 - DNA, 9 bp, Unknown
  misc_feature (1)..( 9): Result.001 file - promoters75/1025683
tctacattg

SEQ ID NO: 76641 - DNA, 10 bp, Unknown
  misc_feature (1)..( 10): Result.001 file - promoters75/1025683
cctttataaa

SEQ ID NO: 76642 - DNA, 10 bp, Unknown
  misc_feature (1)..( 10): Result.001 file - promoters75/1025683
cctatatata

SEQ ID NO: 76643 - DNA, 10 bp, Unknown
  misc_feature (1)..( 10): Result.001 file - promoters75/1025683
gtcttataaa

SEQ ID NO: 76644 - DNA, 14 bp, Unknown
  misc_feature (1)..( 14): Result.001 file - promoters75/1025683
atcgaatcagctaa

SEQ ID NO: 76645 - DNA, 14 bp, Unknown
  misc_feature (1)..( 14): Result.001 file - promoters75/1025683
tatgaatctgctaa

SEQ ID NO: 76646 - DNA, 14 bp, Unknown
  misc_feature (1)..( 14): Result.001 file - promoters75/1026622
tatgaatcatgtca

SEQ ID NO: 76647 - DNA, 8 bp, Unknown
  misc_feature (1)..( 8): Result.001 file - promoters75/1026622
aaattttc

SEQ ID NO: 76648 - DNA, 8 bp, Unknown
  misc_feature (1)..( 8): Result.001 file - promoters75/1026622
aaattttt

SEQ ID NO: 76649 - DNA, 8 bp, Unknown
  misc_feature (1)..( 8): Result.001 file - promoters75/1026622
cgattttc

SEQ ID NO: 76650 - DNA, 8 bp, Unknown
  misc_feature (1)..( 8): Result.001 file - promoters75/1026622
gcacacaa

SEQ ID NO: 76651 - DNA, 8 bp, Unknown
  misc_feature (1)..( 8): Result.001 file - promoters75/1026622
agacacaa

SEQ ID NO: 76652 - DNA, 8 bp, Unknown
  misc_feature (1)..( 8): Result.001 file - promoters75/1026622
agaaacaa

SEQ ID NO: 76653 - DNA, 8 bp, Unknown
  misc_feature (1)..( 8): Result.001 file - promoters75/1026622
acaattta

SEQ ID NO: 76654 - DNA, 8 bp, Unknown
  misc_feature (1)..( 8): Result.001 file - promoters75/1026622
acattttt

SEQ ID NO: 76655 - DNA, 8 bp, Unknown
  misc_feature (1)..( 8): Result.001 file - promoters75/1026705
tcattttt

SEQ ID NO: 76656 - DNA, 11 bp, Unknown
  misc_feature (1)..( 11): Result.001 file - promoters75/1026705
gaagatgtgaa

SEQ ID NO: 76657 - DNA, 11 bp, Unknown
  misc_feature (1)..( 11): Result.001 file - promoters75/1026705
gaaaatgggga

SEQ ID NO: 76658 - DNA, 11 bp, Unknown
  misc_feature (1)..( 11): Result.001 file - promoters75/1026883
agagatatgaa

SEQ ID NO: 76659 - DNA, 7 bp, Unknown
  misc_feature (1)..( 7): Result.001 file - promoters75/1026883
tgagaac

SEQ ID NO: 76660 - DNA, 7 bp, Unknown
  misc_feature (1)..( 7): Result.001 file - promoters75/1026883
tgaaaac

SEQ ID NO: 76661 - DNA, 7 bp, Unknown
  misc_feature (1)..( 7): Result.001 file - promoters75/1026883
agaaaac

SEQ ID NO: 76662 - DNA, 9 bp, Unknown
  misc_feature (1)..( 9): Result.001 file - promoters75/1026883
attagatta

SEQ ID NO: 76663 - DNA, 9 bp, Unknown
  misc_feature (1)..( 9): Result.001 file - promoters75/1026883
catagttta

SEQ ID NO: 76664 - DNA, 9 bp, Unknown
  misc_feature (1)..( 9): Result.001 file - promoters75/1026883
attggatta

SEQ ID NO: 76665 - DNA, 9 bp, Unknown
  misc_feature (1)..( 9): Result.001 file - promoters75/1026883
tcaaataat

SEQ ID NO: 76666 - DNA, 9 bp, Unknown
  misc_feature (1)..( 9): Result.001 file - promoters75/1026883
gaaaacaat

SEQ ID NO: 76667 - DNA, 9 bp, Unknown
  misc_feature (1)..( 9): Result.001 file - promoters75/1026883
acaaattta

SEQ ID NO: 76668 - DNA, 9 bp, Unknown
  misc_feature (1)..( 9): Result.001 file - promoters75/1026883
atttgtctt

SEQ ID NO: 76669 - DNA, 9 bp, Unknown
  misc_feature (1)..( 9): Result.001 file - promoters75/1026883
atttatcta

SEQ ID NO: 76670 - DNA, 9 bp, Unknown
  misc_feature (1)..( 9): Result.001 file - promoters75/1026983
ttttgttta

SEQ ID NO: 76671 - DNA, 7 bp, Unknown
  misc_feature (1)..( 7): Result.001 file - promoters75/1026983
tttcaac

SEQ ID NO: 76672 - DNA, 7 bp, Unknown
  misc_feature (1)..( 7): Result.001 file - promoters75/1026983
tttcaat

SEQ ID NO: 76673 - DNA, 7 bp, Unknown
  misc_feature (1)..( 7): Result.001 file - promoters75/1026987
attcaac

SEQ ID NO: 76674 - DNA, 11 bp, Unknown
  misc_feature (1)..( 11): Result.001 file - promoters75/1026987
ttgttttcttt

SEQ ID NO: 76675 - DNA, 11 bp, Unknown
  misc_feature (1)..( 11): Result.001 file - promoters75/1026987
tattttacttt

SEQ ID NO: 76676 - DNA, 11 bp, Unknown
  misc_feature (1)..( 11): Result.001 file - promoters75/1026987
tatgttaattt

SEQ ID NO: 76677 - DNA, 11 bp, Unknown
  misc_feature (1)..( 11): Result.001 file - promoters75/1026987
tatgtaaacgt

SEQ ID NO: 76678 - DNA, 11 bp, Unknown
  misc_feature (1)..( 11): Result.001 file - promoters75/1026987
tatttaaaaag

SEQ ID NO: 76679 - DNA, 12 bp, Unknown
  misc_feature (1)..( 12): Result.001 file - promoters75/1026987
attttagaaaga

SEQ ID NO: 76680 - DNA, 8 bp, Unknown
  misc_feature (1)..( 8): Result.001 file - promoters75/1026987
tttgtttt

SEQ ID NO: 76681 - DNA, 8 bp, Unknown
  misc_feature (1)..( 8): Result.001 file - promoters75/1026987
tttgattt

SEQ ID NO: 76682 - DNA, 8 bp, Unknown
  misc_feature (1)..( 8): Result.001 file - promoters75/1026987
tgtatttt

SEQ ID NO: 76683 - DNA, 8 bp, Unknown
  misc_feature (1)..( 8): Result.001 file - promoters75/1026987
aaaacaaa

SEQ ID NO: 76684 - DNA, 8 bp, Unknown
  misc_feature (1)..( 8): Result.001 file - promoters75/1026987
aaaacatt

SEQ ID NO: 76685 - DNA, 8 bp, Unknown
  misc_feature (1)..( 8): Result.001 file - promoters75/1027327
gaaacatt

SEQ ID NO: 76686 - DNA, 11 bp, Unknown
  misc_feature (1)..( 11): Result.001 file - promoters75/1027327
ttggaaaagac

SEQ ID NO: 76687 - DNA, 11 bp, Unknown
  misc_feature (1)..( 11): Result.001 file - promoters75/1027327
ttgtaaatgtt

SEQ ID NO: 76688 - DNA, 11 bp, Unknown
  misc_feature (1)..( 11): Result.001 file - promoters75/1027327
ttgtaaatgtt

SEQ ID NO: 76689 - DNA, 7 bp, Unknown
  misc_feature (1)..( 7): Result.001 file - promoters75/1027327
tttcatt

SEQ ID NO: 76690 - DNA, 7 bp, Unknown
  misc_feature (1)..( 7): Result.001 file - promoters75/1027327
attcatt

SEQ ID NO: 76691 - DNA, 7 bp, Unknown
  misc_feature (1)..( 7): Result.001 file - promoters75/1027327
tttgatt

SEQ ID NO: 76692 - DNA, 12 bp, Unknown
  misc_feature (1)..( 12): Result.001 file - promoters75/1027327
attaataagggt

SEQ ID NO: 76693 - DNA, 12 bp, Unknown
  misc_feature (1)..( 12): Result.001 file - promoters75/1027327
attaatgggctt

SEQ ID NO: 76694 - DNA, 12 bp, Unknown
  misc_feature (1)..( 12): Result.001 file - promoters75/1027327
gttaatgggctt

SEQ ID NO: 76695 - DNA, 8 bp, Unknown
  misc_feature (1)..( 8): Result.001 file - promoters75/1027327
atagagaa

SEQ ID NO: 76696 - DNA, 8 bp, Unknown
  misc_feature (1)..( 8): Result.001 file - promoters75/1027327
ataaagag

SEQ ID NO: 76697 - DNA, 8 bp, Unknown
  misc_feature (1)..( 8): Result.001 file - promoters75/1027327
gcagagaa

SEQ ID NO: 76698 - DNA, 8 bp, Unknown
  misc_feature (1)..( 8): Result.001 file - promoters75/1027327
caagcaaa

SEQ ID NO: 76699 - DNA, 8 bp, Unknown
  misc_feature (1)..( 8): Result.001 file - promoters75/1027327
caatcaat

SEQ ID NO: 76700 - DNA, 8 bp, Unknown
  misc_feature (1)..( 8): Result.001 file - promoters75/1027760
gaagaaaa

SEQ ID NO: 76701 - DNA, 10 bp, Unknown
  misc_feature (1)..( 10): Result.001 file - promoters75/1027760
tataataatt

SEQ ID NO: 76702 - DNA, 10 bp, Unknown
  misc_feature (1)..( 10): Result.001 file - promoters75/1027760
tatattaaat

SEQ ID NO: 76703 - DNA, 10 bp, Unknown
  misc_feature (1)..( 10): Result.001 file - promoters75/1027760
ttaattaaat

SEQ ID NO: 76704 - DNA, 12 bp, Unknown
  misc_feature (1)..( 12): Result.001 file - promoters75/1027760
ataaatgaaatt

SEQ ID NO: 76705 - DNA, 12 bp, Unknown
  misc_feature (1)..( 12): Result.001 file - promoters75/1027760
atacatgaattt

SEQ ID NO: 76706 - DNA, 12 bp, Unknown
  misc_feature (1)..( 12): Result.001 file - promoters75/1027760
ataactgagatt

SEQ ID NO: 76707 - DNA, 12 bp, Unknown
  misc_feature (1)..( 12): Result.001 file - promoters75/1027760
aaacaagaaaaa

SEQ ID NO: 76708 - DNA, 8 bp, Unknown
  misc_feature (1)..( 8): Result.001 file - promoters75/1027760
tcactttt

SEQ ID NO: 76709 - DNA, 8 bp, Unknown
  misc_feature (1)..( 8): Result.001 file - promoters75/1027760
tcattttt

SEQ ID NO: 76710 - DNA, 8 bp, Unknown
  misc_feature (1)..( 8): Result.001 file - promoters75/1027760
ccattttg

SEQ ID NO: 76711 - DNA, 7 bp, Unknown
  misc_feature (1)..( 7): Result.001 file - promoters75/1027760
agacacg

SEQ ID NO: 76712 - DNA, 7 bp, Unknown
  misc_feature (1)..( 7): Result.001 file - promoters75/1027760
agaaacg

SEQ ID NO: 76713 - DNA, 7 bp, Unknown
  misc_feature (1)..( 7): Result.001 file - promoters75/1027760
tgaaacg

SEQ ID NO: 76714 - DNA, 14 bp, Unknown
  misc_feature (1)..( 14): Result.001 file - promoters75/1027760
atatataagatgta

SEQ ID NO: 76715 - DNA, 14 bp, Unknown
  misc_feature (1)..( 14): Result.001 file - promoters75/1027760
ataaatattgttaa

SEQ ID NO: 76716 - DNA, 14 bp, Unknown
  misc_feature (1)..( 14): Result.001 file - promoters75/1027760
ttaaattttggtaa

SEQ ID NO: 76717 - DNA, 12 bp, Unknown
  misc_feature (1)..( 12): Result.001 file - promoters75/1027760
gattattttttt

SEQ ID NO: 76718 - DNA, 12 bp, Unknown
  misc_feature (1)..( 12): Result.001 file - promoters75/1027760
ttgaattttttt

SEQ ID NO: 76719 - DNA, 12 bp, Unknown
  misc_feature (1)..( 12): Result.001 file - promoters75/1027760
aacaattttagt

SEQ ID NO: 76720 - DNA, 12 bp, Unknown
  misc_feature (1)..( 12): Result.001 file - promoters75/1027760
aaccattttatg

SEQ ID NO: 76721 - DNA, 9 bp, Unknown
  misc_feature (1)..( 9): Result.001 file - promoters75/1027760
attagtttt

SEQ ID NO: 76722 - DNA, 9 bp, Unknown
  misc_feature (1)..( 9): Result.001 file - promoters75/1027760
attactttt

SEQ ID NO: 76723 - DNA, 9 bp, Unknown
  misc_feature (1)..( 9): Result.001 file - promoters75/1027760
tttaatttt

SEQ ID NO: 76724 - DNA, 8 bp, Unknown
  misc_feature (1)..( 8): Result.001 file - promoters75/1027760
agaaaaat

SEQ ID NO: 76725 - DNA, 8 bp, Unknown
  misc_feature (1)..( 8): Result.001 file - promoters75/1027760
tgaataat

SEQ ID NO: 76726 - DNA, 8 bp, Unknown
  misc_feature (1)..( 8): Result.001 file - promoters75/1027760
agaaaatc

SEQ ID NO: 76727 - DNA, 8 bp, Unknown
  misc_feature (1)..( 8): Result.001 file - promoters75/1027760
ttttccac

SEQ ID NO: 76728 - DNA, 8 bp, Unknown
  misc_feature (1)..( 8): Result.001 file - promoters75/1027760
tttaccaa

SEQ ID NO: 76729 - DNA, 8 bp, Unknown
  misc_feature (1)..( 8): Result.001 file - promoters75/1027760
gttatcaa

SEQ ID NO: 76730 - DNA, 9 bp, Unknown
  misc_feature (1)..( 9): Result.001 file - promoters75/1027760
ataatttac

SEQ ID NO: 76731 - DNA, 9 bp, Unknown
  misc_feature (1)..( 9): Result.001 file - promoters75/1027760
atattttgt

SEQ ID NO: 76732 - DNA, 9 bp, Unknown
  misc_feature (1)..( 9): Result.001 file - promoters75/1028368
ttaagttac

SEQ ID NO: 76733 - DNA, 9 bp, Unknown
  misc_feature (1)..( 9): Result.001 file - promoters75/1028368
gcgttttct

SEQ ID NO: 76734 - DNA, 9 bp, Unknown
  misc_feature (1)..( 9): Result.001 file - promoters75/1028368
ttgttttct

SEQ ID NO: 76735 - DNA, 9 bp, Unknown
  misc_feature (1)..( 9): Result.001 file - promoters75/1029485
ttgttttga

SEQ ID NO: 76736 - DNA, 9 bp, Unknown
  misc_feature (1)..( 9): Result.001 file - promoters75/1029485
caaacaaaa

SEQ ID NO: 76737 - DNA, 9 bp, Unknown
  misc_feature (1)..( 9): Result.001 file - promoters75/1029485
taaagaaaa

SEQ ID NO: 76738 - DNA, 9 bp, Unknown
  misc_feature (1)..( 9): Result.001 file - promoters75/1029485
gaaacaaag

SEQ ID NO: 76739 - DNA, 9 bp, Unknown
  misc_feature (1)..( 9): Result.001 file - promoters75/1029485
caaagaaat

SEQ ID NO: 76740 - DNA, 9 bp, Unknown
  misc_feature (1)..( 9): Result.001 file - promoters75/1029485
tcgacaaaa

SEQ ID NO: 76741 - DNA, 9 bp, Unknown
  misc_feature (1)..( 9): Result.001 file - promoters75/1029485
gtaagaaaa

SEQ ID NO: 76742 - DNA, 11 bp, Unknown
  misc_feature (1)..( 11): Result.001 file - promoters75/1029485
tttagttttgt

SEQ ID NO: 76743 - DNA, 11 bp, Unknown
  misc_feature (1)..( 11): Result.001 file - promoters75/1029485
aaaagtgttga

SEQ ID NO: 76744 - DNA, 11 bp, Unknown
  misc_feature (1)..( 11): Result.001 file - promoters75/1029485
aaaagtttttg

SEQ ID NO: 76745 - DNA, 11 bp, Unknown
  misc_feature (1)..( 11): Result.001 file - promoters75/1029485
tttacttttaa

SEQ ID NO: 76746 - DNA, 11 bp, Unknown
  misc_feature (1)..( 11): Result.001 file - promoters75/1029485
aacgttgttga

SEQ ID NO: 76747 - DNA, 11 bp, Unknown
  misc_feature (1)..( 11): Result.001 file - promoters75/1029485
gaaaggtttct

SEQ ID NO: 76748 - DNA, 12 bp, Unknown
  misc_feature (1)..( 12): Result.001 file - promoters75/1029485
ttggattattat

SEQ ID NO: 76749 - DNA, 12 bp, Unknown
  misc_feature (1)..( 12): Result.001 file - promoters75/1029485
ctccatttttat

SEQ ID NO: 76750 - DNA, 12 bp, Unknown
  misc_feature (1)..( 12): Result.001 file - promoters75/1029485
aaagtttagtat

SEQ ID NO: 76751 - DNA, 12 bp, Unknown
  misc_feature (1)..( 12): Result.001 file - promoters75/1029485
aatcattttctt

SEQ ID NO: 76752 - DNA, 12 bp, Unknown
  misc_feature (1)..( 12): Result.001 file - promoters75/1029485
cccaatttgtaa

SEQ ID NO: 76753 - DNA, 12 bp, Unknown
  misc_feature (1)..( 12): Result.001 file - promoters75/1029952
cccaataactga

SEQ ID NO: 76754 - DNA, 11 bp, Unknown
  misc_feature (1)..( 11): Result.001 file - promoters75/1029952
aataggcccaa

SEQ ID NO: 76755 - DNA, 11 bp, Unknown
  misc_feature (1)..( 11): Result.001 file - promoters75/1029952
aatgggccttt

SEQ ID NO: 76756 - DNA, 11 bp, Unknown
  misc_feature (1)..( 11): Result.001 file - promoters75/1029952
aatgggctggg

SEQ ID NO: 76757 - DNA, 11 bp, Unknown
  misc_feature (1)..( 11): Result.001 file - promoters75/1029952
aaaaggcccat

SEQ ID NO: 76758 - DNA, 11 bp, Unknown
  misc_feature (1)..( 11): Result.001 file - promoters75/1029952
tatgggcctta

SEQ ID NO: 76759 - DNA, 11 bp, Unknown
  misc_feature (1)..( 11): Result.001 file - promoters75/1029952
ccctggcccat

SEQ ID NO: 76760 - DNA, 9 bp, Unknown
  misc_feature (1)..( 9): Result.001 file - promoters75/1029952
aagaagaag

SEQ ID NO: 76761 - DNA, 9 bp, Unknown
  misc_feature (1)..( 9): Result.001 file - promoters75/1029952
aagaaaaag

SEQ ID NO: 76762 - DNA, 9 bp, Unknown
  misc_feature (1)..( 9): Result.001 file - promoters75/1029952
aaggaaaga

SEQ ID NO: 76763 - DNA, 9 bp, Unknown
  misc_feature (1)..( 9): Result.001 file - promoters75/1029952
gagaaaaaa

SEQ ID NO: 76764 - DNA, 9 bp, Unknown
  misc_feature (1)..( 9): Result.001 file - promoters75/1029952
gagaaaaaa

SEQ ID NO: 76765 - DNA, 9 bp, Unknown
  misc_feature (1)..( 9): Result.001 file - promoters75/1030324
gagaaaaga

SEQ ID NO: 76766 - DNA, 13 bp, Unknown
  misc_feature (1)..( 13): Result.001 file - promoters75/1030324
aattataatattt

SEQ ID NO: 76767 - DNA, 13 bp, Unknown
  misc_feature (1)..( 13): Result.001 file - promoters75/1030324
gattataaatcat

SEQ ID NO: 76768 - DNA, 13 bp, Unknown
  misc_feature (1)..( 13): Result.001 file - promoters75/1030324
gattatccctaac

SEQ ID NO: 76769 - DNA, 13 bp, Unknown
  misc_feature (1)..( 13): Result.001 file - promoters75/1030324
ctctatgaatcat

SEQ ID NO: 76770 - DNA, 13 bp, Unknown
  misc_feature (1)..( 13): Result.001 file - promoters75/1030324
gtctttgaatatt

SEQ ID NO: 76771 - DNA, 13 bp, Unknown
  misc_feature (1)..( 13): Result.001 file - promoters75/1030324
ttctttggattaa

SEQ ID NO: 76772 - DNA, 13 bp, Unknown
  misc_feature (1)..( 13): Result.001 file - promoters75/1030528
tctcttgcataga

SEQ ID NO: 76773 - DNA, 9 bp, Unknown
  misc_feature (1)..( 9): Result.001 file - promoters75/1030528
atactaatt

SEQ ID NO: 76774 - DNA, 9 bp, Unknown
  misc_feature (1)..( 9): Result.001 file - promoters75/1030528
ataataatt

SEQ ID NO: 76775 - DNA, 9 bp, Unknown
  misc_feature (1)..( 9): Result.001 file - promoters75/1030528
agaataatg

SEQ ID NO: 76776 - DNA, 13 bp, Unknown
  misc_feature (1)..( 13): Result.001 file - promoters75/1030528
ttatttttttaaa

SEQ ID NO: 76777 - DNA, 13 bp, Unknown
  misc_feature (1)..( 13): Result.001 file - promoters75/1030528
ttatatttttaat

SEQ ID NO: 76778 - DNA, 13 bp, Unknown
  misc_feature (1)..( 13): Result.001 file - promoters75/1030528
caatgcatttaaa

SEQ ID NO: 76779 - DNA, 7 bp, Unknown
  misc_feature (1)..( 7): Result.001 file - promoters75/1030528
ttaaaaa

SEQ ID NO: 76780 - DNA, 7 bp, Unknown
  misc_feature (1)..( 7): Result.001 file - promoters75/1030528
ctaaaaa

SEQ ID NO: 76781 - DNA, 7 bp, Unknown
  misc_feature (1)..( 7): Result.001 file - promoters75/1030547
ttaaaat

SEQ ID NO: 76782 - DNA, 10 bp, Unknown
  misc_feature (1)..( 10): Result.001 file - promoters75/1030547
catattatac

SEQ ID NO: 76783 - DNA, 10 bp, Unknown
  misc_feature (1)..( 10): Result.001 file - promoters75/1030547
atctttatac

SEQ ID NO: 76784 - DNA, 10 bp, Unknown
  misc_feature (1)..( 10): Result.001 file - promoters75/1030547
atctttataa

SEQ ID NO: 76785 - DNA, 10 bp, Unknown
  misc_feature (1)..( 10): Result.001 file - promoters75/1030547
aaatatgttt

SEQ ID NO: 76786 - DNA, 10 bp, Unknown
  misc_feature (1)..( 10): Result.001 file - promoters75/1030547
taatatattt

SEQ ID NO: 76787 - DNA, 10 bp, Unknown
  misc_feature (1)..( 10): Result.001 file - promoters75/1030547
taacatataa

SEQ ID NO: 76788 - DNA, 9 bp, Unknown
  misc_feature (1)..( 9): Result.001 file - promoters75/1030547
atatataat

SEQ ID NO: 76789 - DNA, 9 bp, Unknown
  misc_feature (1)..( 9): Result.001 file - promoters75/1030547
ataaatatc

SEQ ID NO: 76790 - DNA, 9 bp, Unknown
  misc_feature (1)..( 9): Result.001 file - promoters75/1030547
ataaatatc

SEQ ID NO: 76791 - DNA, 13 bp, Unknown
  misc_feature (1)..( 13): Result.001 file - promoters75/1030547
cgttttaaaagta

SEQ ID NO: 76792 - DNA, 13 bp, Unknown
  misc_feature (1)..( 13): Result.001 file - promoters75/1030547
atctttataagta

SEQ ID NO: 76793 - DNA, 13 bp, Unknown
  misc_feature (1)..( 13): Result.001 file - promoters75/1030821
atctttatacaaa

SEQ ID NO: 76794 - DNA, 8 bp, Unknown
  misc_feature (1)..( 8): Result.001 file - promoters75/1030821
tattttta

SEQ ID NO: 76795 - DNA, 8 bp, Unknown
  misc_feature (1)..( 8): Result.001 file - promoters75/1030821
tattctta

SEQ ID NO: 76796 - DNA, 8 bp, Unknown
  misc_feature (1)..( 8): Result.001 file - promoters75/1030821
tatgtttg

SEQ ID NO: 76797 - DNA, 9 bp, Unknown
  misc_feature (1)..( 9): Result.001 file - promoters75/1030821
tttgataca

SEQ ID NO: 76798 - DNA, 9 bp, Unknown
  misc_feature (1)..( 9): Result.001 file - promoters75/1030821
tttgattcg

SEQ ID NO: 76799 - DNA, 9 bp, Unknown
  misc_feature (1)..( 9): Result.001 file - promoters75/1030821
cttgacaca

SEQ ID NO: 76800 - DNA, 8 bp, Unknown
  misc_feature (1)..( 8): Result.001 file - promoters75/1030821
aaaacata

SEQ ID NO: 76801 - DNA, 8 bp, Unknown
  misc_feature (1)..( 8): Result.001 file - promoters75/1030821
aaatcata

SEQ ID NO: 76802 - DNA, 8 bp, Unknown
  misc_feature (1)..( 8): Result.001 file - promoters75/1030821
aaaatata

SEQ ID NO: 76803 - DNA, 8 bp, Unknown
  misc_feature (1)..( 8): Result.001 file - promoters75/1030821
ataacaaa

SEQ ID NO: 76804 - DNA, 8 bp, Unknown
  misc_feature (1)..( 8): Result.001 file - promoters75/1030821
caaacaaa

SEQ ID NO: 76805 - DNA, 8 bp, Unknown
  misc_feature (1)..( 8): Result.001 file - promoters75/1030821
ataaaaaa

SEQ ID NO: 76806 - DNA, 7 bp, Unknown
  misc_feature (1)..( 7): Result.001 file - promoters75/1030821
acaaact

SEQ ID NO: 76807 - DNA, 7 bp, Unknown
  misc_feature (1)..( 7): Result.001 file - promoters75/1030821
acaaaca

SEQ ID NO: 76808 - DNA, 7 bp, Unknown
  misc_feature (1)..( 7): Result.001 file - promoters75/1030821
ataaaaa

SEQ ID NO: 76809 - DNA, 14 bp, Unknown
  misc_feature (1)..( 14): Result.001 file - promoters75/1030821
aaacaatgtactta

SEQ ID NO: 76810 - DNA, 14 bp, Unknown
  misc_feature (1)..( 14): Result.001 file - promoters75/1030821
aaaaaataatcaga

SEQ ID NO: 76811 - DNA, 14 bp, Unknown
  misc_feature (1)..( 14): Result.001 file - promoters75/1030821
gtacaatctactta

SEQ ID NO: 76812 - DNA, 8 bp, Unknown
  misc_feature (1)..( 8): Result.001 file - promoters75/1030821
acaactta

SEQ ID NO: 76813 - DNA, 8 bp, Unknown
  misc_feature (1)..( 8): Result.001 file - promoters75/1030821
acaccttt

SEQ ID NO: 76814 - DNA, 8 bp, Unknown
  misc_feature (1)..( 8): Result.001 file - promoters75/1030940
aaaccttt

SEQ ID NO: 76815 - DNA, 13 bp, Unknown
  misc_feature (1)..( 13): Result.001 file - promoters75/1030940
gatataaacagta

SEQ ID NO: 76816 - DNA, 13 bp, Unknown
  misc_feature (1)..( 13): Result.001 file - promoters75/1030940
tataaaaagaaat

SEQ ID NO: 76817 - DNA, 13 bp, Unknown
  misc_feature (1)..( 13): Result.001 file - promoters75/1030940
tatataaaaattt

SEQ ID NO: 76818 - DNA, 13 bp, Unknown
  misc_feature (1)..( 13): Result.001 file - promoters75/1030940
tattaaaatagaa

SEQ ID NO: 76819 - DNA, 13 bp, Unknown
  misc_feature (1)..( 13): Result.001 file - promoters75/1030940
aaagaaaagagaa

SEQ ID NO: 76820 - DNA, 10 bp, Unknown
  misc_feature (1)..( 10): Result.001 file - promoters75/1030940
aaacagaaca

SEQ ID NO: 76821 - DNA, 10 bp, Unknown
  misc_feature (1)..( 10): Result.001 file - promoters75/1030940
aaatagaaat

SEQ ID NO: 76822 - DNA, 10 bp, Unknown
  misc_feature (1)..( 10): Result.001 file - promoters75/1030940
aaaaagaaat

SEQ ID NO: 76823 - DNA, 10 bp, Unknown
  misc_feature (1)..( 10): Result.001 file - promoters75/1030940
aaagagaaga

SEQ ID NO: 76824 - DNA, 10 bp, Unknown
  misc_feature (1)..( 10): Result.001 file - promoters75/1030940
atatataaaa

SEQ ID NO: 76825 - DNA, 11 bp, Unknown
  misc_feature (1)..( 11): Result.001 file - promoters75/1030940
caagatatttt

SEQ ID NO: 76826 - DNA, 11 bp, Unknown
  misc_feature (1)..( 11): Result.001 file - promoters75/1030940
caaaatatctt

SEQ ID NO: 76827 - DNA, 11 bp, Unknown
  misc_feature (1)..( 11): Result.001 file - promoters75/1030940
aaagatcctca

SEQ ID NO: 76828 - DNA, 11 bp, Unknown
  misc_feature (1)..( 11): Result.001 file - promoters75/1030940
taaattatgtt

SEQ ID NO: 76829 - DNA, 11 bp, Unknown
  misc_feature (1)..( 11): Result.001 file - promoters75/1030940
tgaattttgtt

SEQ ID NO: 76830 - DNA, 14 bp, Unknown
  misc_feature (1)..( 14): Result.001 file - promoters75/1030940
aaaggcccataaaa

SEQ ID NO: 76831 - DNA, 14 bp, Unknown
  misc_feature (1)..( 14): Result.001 file - promoters75/1030940
atgggcccataaag

SEQ ID NO: 76832 - DNA, 14 bp, Unknown
  misc_feature (1)..( 14): Result.001 file - promoters75/1030940
taaggcccaaagtc

SEQ ID NO: 76833 - DNA, 14 bp, Unknown
  misc_feature (1)..( 14): Result.001 file - promoters75/1030940
cataagatataaaa

SEQ ID NO: 76834 - DNA, 14 bp, Unknown
  misc_feature (1)..( 14): Result.001 file - promoters75/1030940
taaagcccaatcat

SEQ ID NO: 76835 - DNA, 15 bp, Unknown
  misc_feature (1)..( 15): Result.001 file - promoters75/1030940
caaacttttattttt

SEQ ID NO: 76836 - DNA, 15 bp, Unknown
  misc_feature (1)..( 15): Result.001 file - promoters75/1030940
caaatttttactttt

SEQ ID NO: 76837 - DNA, 15 bp, Unknown
  misc_feature (1)..( 15): Result.001 file - promoters75/1030940
atgcttttgatttca

SEQ ID NO: 76838 - DNA, 15 bp, Unknown
  misc_feature (1)..( 15): Result.001 file - promoters75/1030940
tattattatatttga

SEQ ID NO: 76839 - DNA, 15 bp, Unknown
  misc_feature (1)..( 15): Result.001 file - promoters75/1031052
gggttttagattatg

SEQ ID NO: 76840 - DNA, 9 bp, Unknown
  misc_feature (1)..( 9): Result.001 file - promoters75/1031052
gaaaaaaaa

SEQ ID NO: 76841 - DNA, 9 bp, Unknown
  misc_feature (1)..( 9): Result.001 file - promoters75/1031052
gaataaaaa

SEQ ID NO: 76842 - DNA, 9 bp, Unknown
  misc_feature (1)..( 9): Result.001 file - promoters75/1031267
gaaaaaaat

SEQ ID NO: 76843 - DNA, 11 bp, Unknown
  misc_feature (1)..( 11): Result.001 file - promoters75/1031267
tttattgttac

SEQ ID NO: 76844 - DNA, 11 bp, Unknown
  misc_feature (1)..( 11): Result.001 file - promoters75/1031267
gtctttgttag

SEQ ID NO: 76845 - DNA, 11 bp, Unknown
  misc_feature (1)..( 11): Result.001 file - promoters75/1031267
caaatttttac

SEQ ID NO: 76846 - DNA, 11 bp, Unknown
  misc_feature (1)..( 11): Result.001 file - promoters75/1031267
catattcttaa

SEQ ID NO: 76847 - DNA, 11 bp, Unknown
  misc_feature (1)..( 11): Result.001 file - promoters75/1031267
tttagttttgt

SEQ ID NO: 76848 - DNA, 11 bp, Unknown
  misc_feature (1)..( 11): Result.001 file - promoters75/1031267
tttatttttgt

SEQ ID NO: 76849 - DNA, 11 bp, Unknown
  misc_feature (1)..( 11): Result.001 file - promoters75/1031291
tatctttttgt

SEQ ID NO: 76850 - DNA, 13 bp, Unknown
  misc_feature (1)..( 13): Result.001 file - promoters75/1031291
gaataaaaattca

SEQ ID NO: 76851 - DNA, 13 bp, Unknown
  misc_feature (1)..( 13): Result.001 file - promoters75/1031291
taataaaatttca

SEQ ID NO: 76852 - DNA, 13 bp, Unknown
  misc_feature (1)..( 13): Result.001 file - promoters75/1031291
aaatacaatctcc

SEQ ID NO: 76853 - DNA, 13 bp, Unknown
  misc_feature (1)..( 13): Result.001 file - promoters75/1031291
gaacacaaagtca

SEQ ID NO: 76854 - DNA, 7 bp, Unknown
  misc_feature (1)..( 7): Result.001 file - promoters75/1031291
aaacgac

SEQ ID NO: 76855 - DNA, 7 bp, Unknown
  misc_feature (1)..( 7): Result.001 file - promoters75/1031291
aaaggac

SEQ ID NO: 76856 - DNA, 8 bp, Unknown
  misc_feature (1)..( 8): Result.001 file - promoters75/1031799
aaagggac

SEQ ID NO: 76857 - DNA, 19 bp, Unknown
  misc_feature (1)..( 19): Result.001 file - promoters75/1031799
gctctctcgtataattctt

SEQ ID NO: 76858 - DNA, 19 bp, Unknown
  misc_feature (1)..( 19): Result.001 file - promoters75/1031799
ctccactcttatgatttgc

SEQ ID NO: 76859 - DNA, 19 bp, Unknown
  misc_feature (1)..( 19): Result.001 file - promoters75/1031799
tctacttcttattggaaga

SEQ ID NO: 76860 - DNA, 19 bp, Unknown
  misc_feature (1)..( 19): Result.001 file - promoters75/1031799
aagaacttccatgtttttg

SEQ ID NO: 76861 - DNA, 19 bp, Unknown
  misc_feature (1)..( 19): Result.001 file - promoters75/1031799
ctctactcttggaatatcc

SEQ ID NO: 76862 - DNA, 19 bp, Unknown
  misc_feature (1)..( 19): Result.001 file - promoters75/1031799
acgatttctgacgtttttg

SEQ ID NO: 76863 - DNA, 11 bp, Unknown
  misc_feature (1)..( 11): Result.001 file - promoters75/1031799
aagaaaaaaaa

SEQ ID NO: 76864 - DNA, 11 bp, Unknown
  misc_feature (1)..( 11): Result.001 file - promoters75/1031799
aagaaacaaag

SEQ ID NO: 76865 - DNA, 11 bp, Unknown
  misc_feature (1)..( 11): Result.001 file - promoters75/1031799
atcaaaaaatt

SEQ ID NO: 76866 - DNA, 11 bp, Unknown
  misc_feature (1)..( 11): Result.001 file - promoters75/1031799
tccaaacaaaa

SEQ ID NO: 76867 - DNA, 11 bp, Unknown
  misc_feature (1)..( 11): Result.001 file - promoters75/1031799
atgaaatattt

SEQ ID NO: 76868 - DNA, 11 bp, Unknown
  misc_feature (1)..( 11): Result.001 file - promoters75/1032381
ataaaaccaag

SEQ ID NO: 76869 - DNA, 11 bp, Unknown
  misc_feature (1)..( 11): Result.001 file - promoters75/1032381
agagttggata

SEQ ID NO: 76870 - DNA, 11 bp, Unknown
  misc_feature (1)..( 11): Result.001 file - promoters75/1032381
ttctttggatt

SEQ ID NO: 76871 - DNA, 11 bp, Unknown
  misc_feature (1)..( 11): Result.001 file - promoters75/1032381
ttttttgaata

SEQ ID NO: 76872 - DNA, 11 bp, Unknown
  misc_feature (1)..( 11): Result.001 file - promoters75/1032381
tactttggaat

SEQ ID NO: 76873 - DNA, 11 bp, Unknown
  misc_feature (1)..( 11): Result.001 file - promoters75/1032381
tactttgtttt

SEQ ID NO: 76874 - DNA, 14 bp, Unknown
  misc_feature (1)..( 14): Result.001 file - promoters75/1032381
agcccaaattaaaa

SEQ ID NO: 76875 - DNA, 14 bp, Unknown
  misc_feature (1)..( 14): Result.001 file - promoters75/1032381
aagccatatttggg

SEQ ID NO: 76876 - DNA, 14 bp, Unknown
  misc_feature (1)..( 14): Result.001 file - promoters75/1032381
ctttaaaatcaaaa

SEQ ID NO: 76877 - DNA, 14 bp, Unknown
  misc_feature (1)..( 14): Result.001 file - promoters75/1032381
aatccaaagcttac

SEQ ID NO: 76878 - DNA, 9 bp, Unknown
  misc_feature (1)..( 9): Result.001 file - promoters75/1032381
tttactttg

SEQ ID NO: 76879 - DNA, 9 bp, Unknown
  misc_feature (1)..( 9): Result.001 file - promoters75/1032381
tttgcttct

SEQ ID NO: 76880 - DNA, 9 bp, Unknown
  misc_feature (1)..( 9): Result.001 file - promoters75/1032381
attaatttt

SEQ ID NO: 76881 - DNA, 7 bp, Unknown
  misc_feature (1)..( 7): Result.001 file - promoters75/1032498
tactttg

SEQ ID NO: 76882 - DNA, 10 bp, Unknown
  misc_feature (1)..( 10): Result.001 file - promoters75/1032498
ttttctaccc

SEQ ID NO: 76883 - DNA, 10 bp, Unknown
  misc_feature (1)..( 10): Result.001 file - promoters75/1032498
ctttttacag

SEQ ID NO: 76884 - DNA, 10 bp, Unknown
  misc_feature (1)..( 10): Result.001 file - promoters75/1032498
ttttctactt

SEQ ID NO: 76885 - DNA, 10 bp, Unknown
  misc_feature (1)..( 10): Result.001 file - promoters75/1032498
ctttctattt

SEQ ID NO: 76886 - DNA, 10 bp, Unknown
  misc_feature (1)..( 10): Result.001 file - promoters75/1032498
ttttttaaaa

SEQ ID NO: 76887 - DNA, 10 bp, Unknown
  misc_feature (1)..( 10): Result.001 file - promoters75/1032498
acttttatta

SEQ ID NO: 76888 - DNA, 11 bp, Unknown
  misc_feature (1)..( 11): Result.001 file - promoters75/1032498
ataataaactc

SEQ ID NO: 76889 - DNA, 11 bp, Unknown
  misc_feature (1)..( 11): Result.001 file - promoters75/1032498
gtaataataac

SEQ ID NO: 76890 - DNA, 11 bp, Unknown
  misc_feature (1)..( 11): Result.001 file - promoters75/1032498
atactaaaagc

SEQ ID NO: 76891 - DNA, 11 bp, Unknown
  misc_feature (1)..( 11): Result.001 file - promoters75/1032498
ttaacaaaaca

SEQ ID NO: 76892 - DNA, 11 bp, Unknown
  misc_feature (1)..( 11): Result.001 file - promoters75/1032498
ataataatgtt

SEQ ID NO: 76893 - DNA, 11 bp, Unknown
  misc_feature (1)..( 11): Result.001 file - promoters75/1032498
aaaataatcag

SEQ ID NO: 76894 - DNA, 11 bp, Unknown
  misc_feature (1)..( 11): Result.001 file - promoters75/1032498
aaaagaatcag

SEQ ID NO: 76895 - DNA, 11 bp, Unknown
  misc_feature (1)..( 11): Result.001 file - promoters75/1032498
aaaagaatcac

SEQ ID NO: 76896 - DNA, 12 bp, Unknown
  misc_feature (1)..( 12): Result.001 file - promoters75/1032498
tggttttgagaa

SEQ ID NO: 76897 - DNA, 12 bp, Unknown
  misc_feature (1)..( 12): Result.001 file - promoters75/1032498
tctttttgatat

SEQ ID NO: 76898 - DNA, 12 bp, Unknown
  misc_feature (1)..( 12): Result.001 file - promoters75/1032498
taattttatata

SEQ ID NO: 76899 - DNA, 12 bp, Unknown
  misc_feature (1)..( 12): Result.001 file - promoters75/1032498
caaaattatatc

SEQ ID NO: 76900 - DNA, 12 bp, Unknown
  misc_feature (1)..( 12): Result.001 file - promoters75/1032498
acattatatata

SEQ ID NO: 76901 - DNA, 12 bp, Unknown
  misc_feature (1)..( 12): Result.001 file - promoters75/1032498
tctttttgccaa

SEQ ID NO: 76902 - DNA, 12 bp, Unknown
  misc_feature (1)..( 12): Result.001 file - promoters75/1032498
tcatcatatgaa

SEQ ID NO: 76903 - DNA, 11 bp, Unknown
  misc_feature (1)..( 11): Result.001 file - promoters75/1032498
aaaaaaagttt

SEQ ID NO: 76904 - DNA, 11 bp, Unknown
  misc_feature (1)..( 11): Result.001 file - promoters75/1032498
gaaaatagttt

SEQ ID NO: 76905 - DNA, 12 bp, Unknown
  misc_feature (1)..( 12): Result.001 file - promoters75/1032498
caaacaaaaaat

SEQ ID NO: 76906 - DNA, 12 bp, Unknown
  misc_feature (1)..( 12): Result.001 file - promoters75/1032498
caaccaaaagaa

SEQ ID NO: 76907 - DNA, 12 bp, Unknown
  misc_feature (1)..( 12): Result.001 file - promoters75/1032498
caaaacaattca

SEQ ID NO: 76908 - DNA, 12 bp, Unknown
  misc_feature (1)..( 12): Result.001 file - promoters75/1032676
taaaagaatcac

SEQ ID NO: 76909 - DNA, 10 bp, Unknown
  misc_feature (1)..( 10): Result.001 file - promoters75/1032676
aaacttaaga

SEQ ID NO: 76910 - DNA, 10 bp, Unknown
  misc_feature (1)..( 10): Result.001 file - promoters75/1032676
gaacgtaaga

SEQ ID NO: 76911 - DNA, 10 bp, Unknown
  misc_feature (1)..( 10): Result.001 file - promoters75/1032676
aaaattaaat

SEQ ID NO: 76912 - DNA, 8 bp, Unknown
  misc_feature (1)..( 8): Result.001 file - promoters75/1032676
atttttct

SEQ ID NO: 76913 - DNA, 8 bp, Unknown
  misc_feature (1)..( 8): Result.001 file - promoters75/1032676
attttttt

SEQ ID NO: 76914 - DNA, 8 bp, Unknown
  misc_feature (1)..( 8): Result.001 file - promoters75/1032676
cttttttt

SEQ ID NO: 76915 - DNA, 8 bp, Unknown
  misc_feature (1)..( 8): Result.001 file - promoters75/1032676
gatattac

SEQ ID NO: 76916 - DNA, 8 bp, Unknown
  misc_feature (1)..( 8): Result.001 file - promoters75/1032676
gatattaa

SEQ ID NO: 76917 - DNA, 8 bp, Unknown
  misc_feature (1)..( 8): Result.001 file - promoters75/1032897
aataataa

SEQ ID NO: 76918 - DNA, 12 bp, Unknown
  misc_feature (1)..( 12): Result.001 file - promoters75/1032897
tagaaaattata

SEQ ID NO: 76919 - DNA, 12 bp, Unknown
  misc_feature (1)..( 12): Result.001 file - promoters75/1032897
ataaaaattttt

SEQ ID NO: 76920 - DNA, 12 bp, Unknown
  misc_feature (1)..( 12): Result.001 file - promoters75/1032897
gaagaaatttat

SEQ ID NO: 76921 - DNA, 12 bp, Unknown
  misc_feature (1)..( 12): Result.001 file - promoters75/1032897
caagaaatcatt

SEQ ID NO: 76922 - DNA, 12 bp, Unknown
  misc_feature (1)..( 12): Result.001 file - promoters75/1032897
ataaaagtttgt

SEQ ID NO: 76923 - DNA, 12 bp, Unknown
  misc_feature (1)..( 12): Result.001 file - promoters75/1032897
ttcaaactttca

SEQ ID NO: 76924 - DNA, 9 bp, Unknown
  misc_feature (1)..( 9): Result.001 file - promoters75/1032897
gaatcaaac

SEQ ID NO: 76925 - DNA, 9 bp, Unknown
  misc_feature (1)..( 9): Result.001 file - promoters75/1032897
ttatcaaat

SEQ ID NO: 76926 - DNA, 9 bp, Unknown
  misc_feature (1)..( 9): Result.001 file - promoters75/1032897
gaaacaaac

SEQ ID NO: 76927 - DNA, 9 bp, Unknown
  misc_feature (1)..( 9): Result.001 file - promoters75/1032897
gtatcaaga

SEQ ID NO: 76928 - DNA, 9 bp, Unknown
  misc_feature (1)..( 9): Result.001 file - promoters75/1032897
atataaaaa

SEQ ID NO: 76929 - DNA, 9 bp, Unknown
  misc_feature (1)..( 9): Result.001 file - promoters75/1032897
ttacgaaac

SEQ ID NO: 76930 - DNA, 9 bp, Unknown
  misc_feature (1)..( 9): Result.001 file - promoters75/1032897
tatatattc

SEQ ID NO: 76931 - DNA, 9 bp, Unknown
  misc_feature (1)..( 9): Result.001 file - promoters75/1032897
cataaattt

SEQ ID NO: 76932 - DNA, 9 bp, Unknown
  misc_feature (1)..( 9): Result.001 file - promoters75/1032897
tatgtatag

SEQ ID NO: 76933 - DNA, 10 bp, Unknown
  misc_feature (1)..( 10): Result.001 file - promoters75/1032897
ttcaaacttt

SEQ ID NO: 76934 - DNA, 10 bp, Unknown
  misc_feature (1)..( 10): Result.001 file - promoters75/1032897
tctcaacttt

SEQ ID NO: 76935 - DNA, 10 bp, Unknown
  misc_feature (1)..( 10): Result.001 file - promoters75/1032897
ataaaagttt

SEQ ID NO: 76936 - DNA, 9 bp, Unknown
  misc_feature (1)..( 9): Result.001 file - promoters75/1032897
aaaaccaag

SEQ ID NO: 76937 - DNA, 9 bp, Unknown
  misc_feature (1)..( 9): Result.001 file - promoters75/1032897
gaaacaaag

SEQ ID NO: 76938 - DNA, 9 bp, Unknown
  misc_feature (1)..( 9): Result.001 file - promoters75/1032897
caaaccaat

SEQ ID NO: 76939 - DNA, 9 bp, Unknown
  misc_feature (1)..( 9): Result.001 file - promoters75/1032897
aaaatcaaa

SEQ ID NO: 76940 - DNA, 9 bp, Unknown
  misc_feature (1)..( 9): Result.001 file - promoters75/1032897
aaaaacaaa

SEQ ID NO: 76941 - DNA, 9 bp, Unknown
  misc_feature (1)..( 9): Result.001 file - promoters75/1033781
ccaaacaac

SEQ ID NO: 76942 - DNA, 8 bp, Unknown
  misc_feature (1)..( 8): Result.001 file - promoters75/1033781
tcttatta

SEQ ID NO: 76943 - DNA, 8 bp, Unknown
  misc_feature (1)..( 8): Result.001 file - promoters75/1033781
tcttatta

SEQ ID NO: 76944 - DNA, 8 bp, Unknown
  misc_feature (1)..( 8): Result.001 file - promoters75/1033781
agttatta

SEQ ID NO: 76945 - DNA, 10 bp, Unknown
  misc_feature (1)..( 10): Result.001 file - promoters75/1033781
accatttcgt

SEQ ID NO: 76946 - DNA, 10 bp, Unknown
  misc_feature (1)..( 10): Result.001 file - promoters75/1033781
accctttgtt

SEQ ID NO: 76947 - DNA, 10 bp, Unknown
  misc_feature (1)..( 10): Result.001 file - promoters75/1033781
cccattttct

SEQ ID NO: 76948 - DNA, 11 bp, Unknown
  misc_feature (1)..( 11): Result.001 file - promoters75/1033781
gtcatcttcta

SEQ ID NO: 76949 - DNA, 10 bp, Unknown
  misc_feature (1)..( 10): Result.001 file - promoters75/1033781
gcccatttaa

SEQ ID NO: 76950 - DNA, 10 bp, Unknown
  misc_feature (1)..( 10): Result.001 file - promoters75/1033781
ctccatataa

SEQ ID NO: 76951 - DNA, 10 bp, Unknown
  misc_feature (1)..( 10): Result.001 file - promoters75/1033781
gcccatttga

SEQ ID NO: 76952 - DNA, 7 bp, Unknown
  misc_feature (1)..( 7): Result.001 file - promoters75/1033781
taacaaa

SEQ ID NO: 76953 - DNA, 7 bp, Unknown
  misc_feature (1)..( 7): Result.001 file - promoters75/1033781
taaaaaa

SEQ ID NO: 76954 - DNA, 7 bp, Unknown
  misc_feature (1)..( 7): Result.001 file - promoters75/1033781
gaaaaaa

SEQ ID NO: 76955 - DNA, 12 bp, Unknown
  misc_feature (1)..( 12): Result.001 file - promoters75/1033781
tccatataaatt

SEQ ID NO: 76956 - DNA, 12 bp, Unknown
  misc_feature (1)..( 12): Result.001 file - promoters75/1033781
tccatataaatt

SEQ ID NO: 76957 - DNA, 12 bp, Unknown
  misc_feature (1)..( 12): Result.001 file - promoters75/1033781
ttactataaagg

SEQ ID NO: 76958 - DNA, 9 bp, Unknown
  misc_feature (1)..( 9): Result.001 file - promoters75/1033781
catgtattt

SEQ ID NO: 76959 - DNA, 9 bp, Unknown
  misc_feature (1)..( 9): Result.001 file - promoters75/1033781
catgaattg

SEQ ID NO: 76960 - DNA, 9 bp, Unknown
  misc_feature (1)..( 9): Result.001 file - promoters75/1033781
gtggaattg

SEQ ID NO: 76961 - DNA, 9 bp, Unknown
  misc_feature (1)..( 9): Result.001 file - promoters75/1033781
tatgatttg

SEQ ID NO: 76962 - DNA, 8 bp, Unknown
  misc_feature (1)..( 8): Result.001 file - promoters75/1033781
aaacaaat

SEQ ID NO: 76963 - DNA, 8 bp, Unknown
  misc_feature (1)..( 8): Result.001 file - promoters75/1033781
caacaaat

SEQ ID NO: 76964 - DNA, 8 bp, Unknown
  misc_feature (1)..( 8): Result.001 file - promoters75/1033841
aaacgaat

SEQ ID NO: 76965 - DNA, 7 bp, Unknown
  misc_feature (1)..( 7): Result.001 file - promoters75/1033841
tccttcc

SEQ ID NO: 76966 - DNA, 7 bp, Unknown
  misc_feature (1)..( 7): Result.001 file - promoters75/1033841
tccttct

SEQ ID NO: 76967 - DNA, 7 bp, Unknown
  misc_feature (1)..( 7): Result.001 file - promoters75/1033841
tccatcc

SEQ ID NO: 76968 - DNA, 8 bp, Unknown
  misc_feature (1)..( 8): Result.001 file - promoters75/1033841
attagctt

SEQ ID NO: 76969 - DNA, 8 bp, Unknown
  misc_feature (1)..( 8): Result.001 file - promoters75/1033841
atttgctt

SEQ ID NO: 76970 - DNA, 8 bp, Unknown
  misc_feature (1)..( 8): Result.001 file - promoters75/1034137
atttgcgt

SEQ ID NO: 76971 - DNA, 10 bp, Unknown
  misc_feature (1)..( 10): Result.001 file - promoters75/1034137
attatatatg

SEQ ID NO: 76972 - DNA, 10 bp, Unknown
  misc_feature (1)..( 10): Result.001 file - promoters75/1034137
tcaataaatg

SEQ ID NO: 76973 - DNA, 10 bp, Unknown
  misc_feature (1)..( 10): Result.001 file - promoters75/1034137
tcattaaaaa

SEQ ID NO: 76974 - DNA, 10 bp, Unknown
  misc_feature (1)..( 10): Result.001 file - promoters75/1034137
ttaaaaaaaa

SEQ ID NO: 76975 - DNA, 10 bp, Unknown
  misc_feature (1)..( 10): Result.001 file - promoters75/1034137
acaaaaaaaa

SEQ ID NO: 76976 - DNA, 10 bp, Unknown
  misc_feature (1)..( 10): Result.001 file - promoters75/1034137
ttaaaaaagg

SEQ ID NO: 76977 - DNA, 34 bp, Unknown
  misc_feature (1)..( 34): Result.001 file - promoters75/1034137
tagcctatataaaggcataagcatgagtggcact

SEQ ID NO: 76978 - DNA, 34 bp, Unknown
  misc_feature (1)..( 34): Result.001 file - promoters75/1034137
agttttataaaaaaggcttcaaggccgagagttc

SEQ ID NO: 76979 - DNA, 34 bp, Unknown
  misc_feature (1)..( 34): Result.001 file - promoters75/1034137
tagcctatataaatgcataaccatgagtgacact

SEQ ID NO: 76980 - DNA, 34 bp, Unknown; identical to SEQ ID NO: 76977
  misc_feature (1)..( 34): Result.001 file - promoters75/1034137

SEQ ID NO: 76981 - DNA, 34 bp, Unknown
  misc_feature (1)..( 34): Result.001 file - promoters75/1034137
gttttataaaaaaggcttcaaggccgagagttcg

SEQ ID NO: 76982 - DNA, 34 bp, Unknown; identical to SEQ ID NO: 76979
  misc_feature (1)..( 34): Result.001 file - promoters75/1034137

SEQ ID NO: 76983 - DNA, 15 bp, Unknown
  misc_feature (1)..( 15): Result.001 file - promoters75/1034137
attgaagacttttca

SEQ ID NO: 76984 - DNA, 15 bp, Unknown
  misc_feature (1)..( 15): Result.001 file - promoters75/1034137
attgaagacttttca

SEQ ID NO: 76985 - DNA, 15 bp, Unknown
  misc_feature (1)..( 15): Result.001 file - promoters75/1034137
gtagaagaccatata

SEQ ID NO: 76986 - DNA, 13 bp, Unknown
  misc_feature (1)..( 13): Result.001 file - promoters75/1034137
ctataagctttaa

SEQ ID NO: 76987 - DNA, 13 bp, Unknown
  misc_feature (1)..( 13): Result.001 file - promoters75/1034137
ctataagctttta

SEQ ID NO: 76988 - DNA, 14 bp, Unknown
  misc_feature (1)..( 14): Result.001 file - promoters75/1034137
aagacagcatttaa

SEQ ID NO: 76989 - DNA, 29 bp, Unknown
  misc_feature (1)..( 29): Result.001 file - promoters75/1034137
aagctttaagtctatcgctagactgtcca

SEQ ID NO: 76990 - DNA, 29 bp, Unknown
  misc_feature (1)..( 29): Result.001 file - promoters75/1034137
agcttttaagtctctcgctagactgtcca

SEQ ID NO: 76991 - DNA, 29 bp, Unknown
  misc_feature (1)..( 29): Result.001 file - promoters75/1034322
agcatttaatgatgataacgatttggaag

SEQ ID NO: 76992 - DNA, 8 bp, Unknown
  misc_feature (1)..( 8): Result.001 file - promoters75/1034322
atttgaat

SEQ ID NO: 76993 - DNA, 8 bp, Unknown
  misc_feature (1)..( 8): Result.001 file - promoters75/1034322
attttaat

SEQ ID NO: 76994 - DNA, 8 bp, Unknown
  misc_feature (1)..( 8): Result.001 file - promoters75/1034322
aatttaat

SEQ ID NO: 76995 - DNA, 11 bp, Unknown
  misc_feature (1)..( 11): Result.001 file - promoters75/1034322
gtaactaatta

SEQ ID NO: 76996 - DNA, 11 bp, Unknown
  misc_feature (1)..( 11): Result.001 file - promoters75/1034322
ttaacgaataa

SEQ ID NO: 76997 - DNA, 11 bp, Unknown
  misc_feature (1)..( 11): Result.001 file - promoters75/1034322
ttaacgaataa

SEQ ID NO: 76998 - DNA, 9 bp, Unknown
  misc_feature (1)..( 9): Result.001 file - promoters75/1034322
aatttaatt

SEQ ID NO: 76999 - DNA, 9 bp, Unknown
  misc_feature (1)..( 9): Result.001 file - promoters75/1034322
aatttaatt

SEQ ID NO: 77000 - DNA, 9 bp, Unknown
  misc_feature (1)..( 9): Result.001 file - promoters75/1035267
attttaata

SEQ ID NO: 77001 - DNA, 7 bp, Unknown
  misc_feature (1)..( 7): Result.001 file - promoters75/1035267
ccacaga

SEQ ID NO: 77002 - DNA, 7 bp, Unknown
  misc_feature (1)..( 7): Result.001 file - promoters75/1035267
ccacagc

SEQ ID NO: 77003 - DNA, 7 bp, Unknown
  misc_feature (1)..( 7): Result.001 file - promoters75/1375471
tcacaga

SEQ ID NO: 77004 - DNA, 8 bp, Unknown
  misc_feature (1)..( 8): Result.001 file - promoters75/1375471
aaaataaa

SEQ ID NO: 77005 - DNA, 8 bp, Unknown
  misc_feature (1)..( 8): Result.001 file - promoters75/1375471
aaaataat

SEQ ID NO: 77006 - DNA, 8 bp, Unknown
  misc_feature (1)..( 8): Result.001 file - promoters75/1375615
aaaaaaat

SEQ ID NO: 77007 - DNA, 8 bp, Unknown
  misc_feature (1)..( 8): Result.001 file - promoters75/1375615
atcatatt

SEQ ID NO: 77008 - DNA, 8 bp, Unknown
  misc_feature (1)..( 8): Result.001 file - promoters75/1375615
atcatatt

SEQ ID NO: 77009 - DNA, 8 bp, Unknown
  misc_feature (1)..( 8): Result.001 file - promoters75/1375615
atcatatt

SEQ ID NO: 77010 - DNA, 9 bp, Unknown
  misc_feature (1)..( 9): Result.001 file - promoters75/1375615
tttgtagtg

SEQ ID NO: 77011 - DNA, 9 bp, Unknown
  misc_feature (1)..( 9): Result.001 file - promoters75/1375615
attgtagct

SEQ ID NO: 77012 - DNA, 9 bp, Unknown
  misc_feature (1)..( 9): Result.001 file - promoters75/1375615
tttgttgtg

SEQ ID NO: 77013 - DNA, 8 bp, Unknown
  misc_feature (1)..( 8): Result.001 file - promoters75/1375615
tgatttgt

SEQ ID NO: 77014 - DNA, 8 bp, Unknown
  misc_feature (1)..( 8): Result.001 file - promoters75/1375615
agatatgt

SEQ ID NO: 77015 - DNA, 8 bp, Unknown
  misc_feature (1)..( 8): Result.001 file - promoters75/1375615
tgatttgg

SEQ ID NO: 77016 - DNA, 7 bp, Unknown
  misc_feature (1)..( 7): Result.001 file - promoters75/1375615
gtttgtt

SEQ ID NO: 77017 - DNA, 7 bp, Unknown
  misc_feature (1)..( 7): Result.001 file - promoters75/1375615
gtttgtg

SEQ ID NO: 77018 - DNA, 7 bp, Unknown
  misc_feature (1)..( 7): Result.001 file - promoters75/1375615
ttttgtt

SEQ ID NO: 77019 - DNA, 8 bp, Unknown
  misc_feature (1)..( 8): Result.001 file - promoters75/1375615
tgtttgtt

SEQ ID NO: 77020 - DNA, 8 bp, Unknown
  misc_feature (1)..( 8): Result.001 file - promoters75/1375615
gatttgtt

SEQ ID NO: 77021 - DNA, 8 bp, Unknown
  misc_feature (1)..( 8): Result.001 file - promoters75/1376650
gatatgta

SEQ ID NO: 77022 - DNA, 8 bp, Unknown
  misc_feature (1)..( 8): Result.001 file - promoters75/1376650
caaaccaa

SEQ ID NO: 77023 - DNA, 8 bp, Unknown
  misc_feature (1)..( 8): Result.001 file - promoters75/1376650
gaaatcaa

SEQ ID NO: 77024 - DNA, 8 bp, Unknown
  misc_feature (1)..( 8): Result.001 file - promoters75/1376650
gaactcag

SEQ ID NO: 77025 - DNA, 8 bp, Unknown
  misc_feature (1)..( 8): Result.001 file - promoters75/1376650
taacacag

SEQ ID NO: 77026 - DNA, 8 bp, Unknown
  misc_feature (1)..( 8): Result.001 file - promoters75/1376650
gaactcag

SEQ ID NO: 77027 - DNA, 8 bp, Unknown
  misc_feature (1)..( 8): Result.001 file - promoters75/1376650
gaaatcaa

SEQ ID NO: 77028 - DNA, 9 bp, Unknown
  misc_feature (1)..( 9): Result.001 file - promoters75/1376650
ccgaaaaaa

SEQ ID NO: 77029 - DNA, 9 bp, Unknown
  misc_feature (1)..( 9): Result.001 file - promoters75/1376650
aagaaaaaa

SEQ ID NO: 77030 - DNA, 9 bp, Unknown
  misc_feature (1)..( 9): Result.001 file - promoters75/1376881
aagacaaaa

SEQ ID NO: 77031 - DNA, 6 bp, Unknown
  misc_feature (1)..( 6): Result.001 file - promoters75/1376881
agtaaa

SEQ ID NO: 77032 - DNA, 6 bp, Unknown
  misc_feature (1)..( 6): Result.001 file - promoters75/1376881
agtaaa

SEQ ID NO: 77033 - DNA, 6 bp, Unknown
  misc_feature (1)..( 6): Result.001 file - promoters75/1376881
agtaaa

SEQ ID NO: 77034 - DNA, 10 bp, Unknown
  misc_feature (1)..( 10): Result.001 file - promoters75/1376881
tcaacaaaaa

SEQ ID NO: 77035 - DNA, 10 bp, Unknown
  misc_feature (1)..( 10): Result.001 file - promoters75/1376881
gaaacaaaaa

SEQ ID NO: 77036 - DNA, 10 bp, Unknown
  misc_feature (1)..( 10): Result.001 file - promoters75/1377564
gaaagaaagc

SEQ ID NO: 77037 - DNA, 7 bp, Unknown
  misc_feature (1)..( 7): Result.001 file - promoters75/1377564
attttac

SEQ ID NO: 77038 - DNA, 7 bp, Unknown
  misc_feature (1)..( 7): Result.001 file - promoters75/1377564
tttttac

SEQ ID NO: 77039 - DNA, 7 bp, Unknown
  misc_feature (1)..( 7): Result.001 file - promoters75/1377564
attttaa

SEQ ID NO: 77040 - DNA, 7 bp, Unknown
  misc_feature (1)..( 7): Result.001 file - promoters75/1377564
caaaatt

SEQ ID NO: 77041 - DNA, 7 bp, Unknown
  misc_feature (1)..( 7): Result.001 file - promoters75/1377564
caaaatc

SEQ ID NO: 77042 - DNA, 7 bp, Unknown
  misc_feature (1)..( 7): Result.001 file - promoters75/1377642
taaaatc

SEQ ID NO: 77043 - DNA, 7 bp, Unknown
  misc_feature (1)..( 7): Result.001 file - promoters75/1377642
taaaaat

SEQ ID NO: 77044 - DNA, 7 bp, Unknown
  misc_feature (1)..( 7): Result.001 file - promoters75/1377642
taaaaag

SEQ ID NO: 77045 - DNA, 7 bp, Unknown
  misc_feature (1)..( 7): Result.001 file - promoters75/1377642
gaaaaag

SEQ ID NO: 77046 - DNA, 13 bp, Unknown
  misc_feature (1)..( 13): Result.001 file - promoters75/1377642
aatgaatattaga

SEQ ID NO: 77047 - DNA, 13 bp, Unknown
  misc_feature (1)..( 13): Result.001 file - promoters75/1377642
aattaatgacgat

SEQ ID NO: 77048 - DNA, 13 bp, Unknown
  misc_feature (1)..( 13): Result.001 file - promoters75/1377642
tctgaatattaga

SEQ ID NO: 77049 - DNA, 6 bp, Unknown
  misc_feature (1)..( 6): Result.001 file - promoters75/1377642
ataata

SEQ ID NO: 77050 - DNA, 6 bp, Unknown
  misc_feature (1)..( 6): Result.001 file - promoters75/1377642
ataata

SEQ ID NO: 77051 - DNA, 6 bp, Unknown
  misc_feature (1)..( 6): Result.001 file - promoters75/1377642
ataata

SEQ ID NO: 77052 - DNA, 12 bp, Unknown
  misc_feature (1)..( 12): Result.001 file - promoters75/1377642
atataataaata

SEQ ID NO: 77053 - DNA, 12 bp, Unknown
  misc_feature (1)..( 12): Result.001 file - promoters75/1377642
gcataaaaaata

SEQ ID NO: 77054 - DNA, 12 bp, Unknown
  misc_feature (1)..( 12): Result.001 file - promoters75/1377642
ttattatacttc

SEQ ID NO: 77055 - DNA, 12 bp, Unknown
  misc_feature (1)..( 12): Result.001 file - promoters75/1377642
atataattatct

SEQ ID NO: 77056 - DNA, 10 bp, Unknown
  misc_feature (1)..( 10): Result.001 file - promoters75/1377642
gtatatatat

SEQ ID NO: 77057 - DNA, 10 bp, Unknown
  misc_feature (1)..( 10): Result.001 file - promoters75/1377642
aaataaatag

SEQ ID NO: 77058 - DNA, 10 bp, Unknown
  misc_feature (1)..( 10): Result.001 file - promoters75/1377642
aaatatataa

SEQ ID NO: 77059 - DNA, 9 bp, Unknown
  misc_feature (1)..( 9): Result.001 file - promoters75/1377642
aaattaata

SEQ ID NO: 77060 - DNA, 9 bp, Unknown
  misc_feature (1)..( 9): Result.001 file - promoters75/1377642
taattaagt

SEQ ID NO: 77061 - DNA, 9 bp, Unknown
  misc_feature (1)..( 9): Result.001 file - promoters75/1377642
aaatcaata

SEQ ID NO: 77062 - DNA, 9 bp, Unknown
  misc_feature (1)..( 9): Result.001 file - promoters75/1377642
taattatta

SEQ ID NO: 77063 - DNA, 6 bp, Unknown
  misc_feature (1)..( 6): Result.001 file - promoters75/1377642
aaatat

SEQ ID NO: 77064 - DNA, 6 bp, Unknown
  misc_feature (1)..( 6): Result.001 file - promoters75/1377642
aaatat

SEQ ID NO: 77065 - DNA, 6 bp, Unknown
  misc_feature (1)..( 6): Result.001 file - promoters75/1377642
aaatat

SEQ ID NO: 77066 - DNA, 7 bp, Unknown
  misc_feature (1)..( 7): Result.001 file - promoters75/1377642
ttatata

SEQ ID NO: 77067 - DNA, 7 bp, Unknown
  misc_feature (1)..( 7): Result.001 file - promoters75/1377642
ttatata

SEQ ID NO: 77068 - DNA, 7 bp, Unknown
  misc_feature (1)..( 7): Result.001 file - promoters75/1377642
ttatata

SEQ ID NO: 77069 - DNA, 8 bp, Unknown
  misc_feature (1)..( 8): Result.001 file - promoters75/1377642
cgtatctt

SEQ ID NO: 77070 - DNA, 8 bp, Unknown
  misc_feature (1)..( 8): Result.001 file - promoters75/1377642
tgtatcta

SEQ ID NO: 77071 - DNA, 8 bp, Unknown
  misc_feature (1)..( 8): Result.001 file - promoters75/1377642
tgtgtcta

SEQ ID NO: 77072 - DNA, 8 bp, Unknown
  misc_feature (1)..( 8): Result.001 file - promoters75/1377642
atcaaaag

SEQ ID NO: 77073 - DNA, 8 bp, Unknown
  misc_feature (1)..( 8): Result.001 file - promoters75/1377642
atccaaac

SEQ ID NO: 77074 - DNA, 8 bp, Unknown
  misc_feature (1)..( 8): Result.001 file - promoters75/1377642
atcctaac

SEQ ID NO: 77075 - DNA, 9 bp, Unknown
  misc_feature (1)..( 9): Result.001 file - promoters75/1377642
tttgttggt

SEQ ID NO: 77076 - DNA, 9 bp, Unknown
  misc_feature (1)..( 9): Result.001 file - promoters75/1377642
tttattgat

SEQ ID NO: 77077 - DNA, 9 bp, Unknown
  misc_feature (1)..( 9): Result.001 file - promoters75/1377642
gttactgat

SEQ ID NO: 77078 - DNA, 9 bp, Unknown
  misc_feature (1)..( 9): Result.001 file - promoters75/1377642
aatatatat

SEQ ID NO: 77079 - DNA, 9 bp, Unknown
  misc_feature (1)..( 9): Result.001 file - promoters75/1377642
aatttattt

SEQ ID NO: 77080 - DNA, 9 bp, Unknown
  misc_feature (1)..( 9): Result.001 file - promoters75/1377642
gctttgttt

SEQ ID NO: 77081 - DNA, 11 bp, Unknown
  misc_feature (1)..( 11): Result.001 file - promoters75/1377642
aactagacacg

SEQ ID NO: 77082 - DNA, 11 bp, Unknown
  misc_feature (1)..( 11): Result.001 file - promoters75/1377642
aaaaagagacg

SEQ ID NO: 77083 - DNA, 11 bp, Unknown
  misc_feature (1)..( 11): Result.001 file - promoters75/1377642
aaaaagaatac

SEQ ID NO: 77084 - DNA, 9 bp, Unknown
  misc_feature (1)..( 9): Result.001 file - promoters75/1377642
gggattttt

SEQ ID NO: 77085 - DNA, 9 bp, Unknown
  misc_feature (1)..( 9): Result.001 file - promoters75/1377642
gggttttta

SEQ ID NO: 77086 - DNA, 9 bp, Unknown
  misc_feature (1)..( 9): Result.001 file - promoters75/1377680
ttgattttt

SEQ ID NO: 77087 - DNA, 11 bp, Unknown
  misc_feature (1)..( 11): Result.001 file - promoters75/1377680
tgtttgaccat

SEQ ID NO: 77088 - DNA, 11 bp, Unknown
  misc_feature (1)..( 11): Result.001 file - promoters75/1377680
tatttgaacat

SEQ ID NO: 77089 - DNA, 11 bp, Unknown
  misc_feature (1)..( 11): Result.001 file - promoters75/1377680
tgtgtgagttc

SEQ ID NO: 77090 - DNA, 8 bp, Unknown
  misc_feature (1)..( 8): Result.001 file - promoters75/1377680
taacgaac

SEQ ID NO: 77091 - DNA, 8 bp, Unknown
  misc_feature (1)..( 8): Result.001 file - promoters75/1377680
caacgaaa

SEQ ID NO: 77092 - DNA, 8 bp, Unknown
  misc_feature (1)..( 8): Result.001 file - promoters75/1378049
caactaaa

SEQ ID NO: 77093 - DNA, 8 bp, Unknown
  misc_feature (1)..( 8): Result.001 file - promoters75/1378049
tatatata

SEQ ID NO: 77094 - DNA, 8 bp, Unknown
  misc_feature (1)..( 8): Result.001 file - promoters75/1378049
tatatata

SEQ ID NO: 77095 - DNA, 8 bp, Unknown
  misc_feature (1)..( 8): Result.001 file - promoters75/1378393
gatataat

SEQ ID NO: 77096 - DNA, 12 bp, Unknown
  misc_feature (1)..( 12): Result.001 file - promoters75/1378393
gtttgtttatct

SEQ ID NO: 77097 - DNA, 12 bp, Unknown
  misc_feature (1)..( 12): Result.001 file - promoters75/1378393
ttttctttggtg

SEQ ID NO: 77098 - DNA, 12 bp, Unknown
  misc_feature (1)..( 12): Result.001 file - promoters75/1378393
gtttttttttct

SEQ ID NO: 77099 - DNA, 7 bp, Unknown
  misc_feature (1)..( 7): Result.001 file - promoters75/1378393
tttaacc

SEQ ID NO: 77100 - DNA, 7 bp, Unknown
  misc_feature (1)..( 7): Result.001 file - promoters75/1378393
tttaaca

SEQ ID NO: 77101 - DNA, 7 bp, Unknown
  misc_feature (1)..( 7): Result.001 file - promoters75/1380389
ttttaca

SEQ ID NO: 77102 - DNA, 8 bp, Unknown
  misc_feature (1)..( 8): Result.001 file - promoters75/1380389
cttgcttt

SEQ ID NO: 77103 - DNA, 8 bp, Unknown
  misc_feature (1)..( 8): Result.001 file - promoters75/1380389
tttggttt

SEQ ID NO: 77104 - DNA, 9 bp, Unknown
  misc_feature (1)..( 9): Result.001 file - promoters75/1380708
tttaggtct

SEQ ID NO: 77105 - DNA, 11 bp, Unknown
  misc_feature (1)..( 11): Result.001 file - promoters75/1380708
taacatttttt

SEQ ID NO: 77106 - DNA, 11 bp, Unknown
  misc_feature (1)..( 11): Result.001 file - promoters75/1380708
taagatttttg

SEQ ID NO: 77107 - DNA, 11 bp, Unknown
  misc_feature (1)..( 11): Result.001 file - promoters75/1380708
tagaatttttt

SEQ ID NO: 77108 - DNA, 9 bp, Unknown
  misc_feature (1)..( 9): Result.001 file - promoters75/1380708
tttaatcag

SEQ ID NO: 77109 - DNA, 9 bp, Unknown
  misc_feature (1)..( 9): Result.001 file - promoters75/1380708
tttattcag

SEQ ID NO: 77110 - DNA, 9 bp, Unknown
  misc_feature (1)..( 9): Result.001 file - promoters75/1381704
gttattcga

SEQ ID NO: 77111 - DNA, 9 bp, Unknown
  misc_feature (1)..( 9): Result.001 file - promoters75/1381704
gtttccttt

SEQ ID NO: 77112 - DNA, 9 bp, Unknown
  misc_feature (1)..( 9): Result.001 file - promoters75/1381704
gttaccttt

SEQ ID NO: 77113 - DNA, 9 bp, Unknown
  misc_feature (1)..( 9): Result.001 file - promoters75/1383485
gcttcgttt

SEQ ID NO: 77114 - DNA, 11 bp, Unknown
  misc_feature (1)..( 11): Result.001 file - promoters75/1383485
ccagaattaag

SEQ ID NO: 77115 - DNA, 11 bp, Unknown
  misc_feature (1)..( 11): Result.001 file - promoters75/1383485
ccataattagt

SEQ ID NO: 77116 - DNA, 11 bp, Unknown
  misc_feature (1)..( 11): Result.001 file - promoters75/1383552
atgtaattaag

SEQ ID NO: 77117 - DNA, 11 bp, Unknown
  misc_feature (1)..( 11): Result.001 file - promoters75/1383552
ttaaaaataaa

SEQ ID NO: 77118 - DNA, 11 bp, Unknown
  misc_feature (1)..( 11): Result.001 file - promoters75/1383552
gtaaaaattat

SEQ ID NO: 77119 - DNA, 11 bp, Unknown
  misc_feature (1)..( 11): Result.001 file - promoters75/1383552
gcaaaagtaaa

SEQ ID NO: 77120 - DNA, 11 bp, Unknown
  misc_feature (1)..( 11): Result.001 file - promoters75/1383552
ttaaaaacttc

SEQ ID NO: 77121 - DNA, 7 bp, Unknown
  misc_feature (1)..( 7): Result.001 file - promoters75/1383552
ggcccat

SEQ ID NO: 77122 - DNA, 7 bp, Unknown
  misc_feature (1)..( 7): Result.001 file - promoters75/1383552
ggcccat

SEQ ID NO: 77123 - DNA, 7 bp, Unknown
  misc_feature (1)..( 7): Result.001 file - promoters75/1383552
ggcccat

SEQ ID NO: 77124 - DNA, 7 bp, Unknown
  misc_feature (1)..( 7): Result.001 file - promoters75/1383552
ggcccac

SEQ ID NO: 77125 - DNA, 7 bp, Unknown
  misc_feature (1)..( 7): Result.001 file - promoters75/1383552
aaaattt

SEQ ID NO: 77126 - DNA, 7 bp, Unknown
  misc_feature (1)..( 7): Result.001 file - promoters75/1383552
aaaattg

SEQ ID NO: 77127 - DNA, 7 bp, Unknown
  misc_feature (1)..( 7): Result.001 file - promoters75/1383552
gaaattt

SEQ ID NO: 77128 - DNA, 8 bp, Unknown
  misc_feature (1)..( 8): Result.001 file - promoters75/1384016
aaagatta

SEQ ID NO: 77129 - DNA, 12 bp, Unknown
  misc_feature (1)..( 12): Result.001 file - promoters75/1384016
ttgtaataataa

SEQ ID NO: 77130 - DNA, 12 bp, Unknown
  misc_feature (1)..( 12): Result.001 file - promoters75/1384016
acataataatgt

SEQ ID NO: 77131 - DNA, 12 bp, Unknown
  misc_feature (1)..( 12): Result.001 file - promoters75/1384016
ttgtgatattat

SEQ ID NO: 77132 - DNA, 12 bp, Unknown
  misc_feature (1)..( 12): Result.001 file - promoters75/1384016
tattaataaatt

SEQ ID NO: 77133 - DNA, 12 bp, Unknown
  misc_feature (1)..( 12): Result.001 file - promoters75/1384016
cataaattgtgg

SEQ ID NO: 77134 - DNA, 12 bp, Unknown
  misc_feature (1)..( 12): Result.001 file - promoters75/1384016
attttataaata

SEQ ID NO: 77135 - DNA, 15 bp, Unknown
  misc_feature (1)..( 15): Result.001 file - promoters75/1384016
gttttgtattatcaa

SEQ ID NO: 77136 - DNA, 15 bp, Unknown
  misc_feature (1)..( 15): Result.001 file - promoters75/1384016
taaagatattatcaa

SEQ ID NO: 77137 - DNA, 15 bp, Unknown
  misc_feature (1)..( 15): Result.001 file - promoters75/1384016
tacttttattatttc

SEQ ID NO: 77138 - DNA, 15 bp, Unknown
  misc_feature (1)..( 15): Result.001 file - promoters75/1384016
ctattttattatata

SEQ ID NO: 77139 - DNA, 15 bp, Unknown
  misc_feature (1)..( 15): Result.001 file - promoters75/1384016
tacttttaatatttt

SEQ ID NO: 77140 - DNA, 15 bp, Unknown
  misc_feature (1)..( 15): Result.001 file - promoters75/1384016
aacttttaaatagaa

SEQ ID NO: 77141 - DNA, 12 bp, Unknown
  misc_feature (1)..( 12): Result.001 file - promoters75/1384016
aaaaaaaaagga

SEQ ID NO: 77142 - DNA, 12 bp, Unknown
  misc_feature (1)..( 12): Result.001 file - promoters75/1384016
aaacaaacgaca

SEQ ID NO: 77143 - DNA, 12 bp, Unknown
  misc_feature (1)..( 12): Result.001 file - promoters75/1384016
aaagaaataata

SEQ ID NO: 77144 - DNA, 12 bp, Unknown
  misc_feature (1)..( 12): Result.001 file - promoters75/1384016
aaacaaagtaaa

SEQ ID NO: 77145 - DNA, 12 bp, Unknown
  misc_feature (1)..( 12): Result.001 file - promoters75/1384016
aaaaaatttttt

SEQ ID NO: 77146 - DNA, 12 bp, Unknown
  misc_feature (1)..( 12): Result.001 file - promoters75/1384016
aaatattttttt

SEQ ID NO: 77147 - DNA, 12 bp, Unknown
  misc_feature (1)..( 12): Result.001 file - promoters75/1384016
tttcaaaaatac

SEQ ID NO: 77148 - DNA, 12 bp, Unknown
  misc_feature (1)..( 12): Result.001 file - promoters75/1384016
ttttaaaattta

SEQ ID NO: 77149 - DNA, 12 bp, Unknown
  misc_feature (1)..( 12): Result.001 file - promoters75/1384016
cttcaaacaaaa

SEQ ID NO: 77150 - DNA, 12 bp, Unknown
  misc_feature (1)..( 12): Result.001 file - promoters75/1384016
taacaaaaaaga

SEQ ID NO: 77151 - DNA, 12 bp, Unknown
  misc_feature (1)..( 12): Result.001 file - promoters75/1384016
tatgaaaaaaaa

SEQ ID NO: 77152 - DNA, 12 bp, Unknown
  misc_feature (1)..( 12): Result.001 file - promoters75/1384016
atgtaaaaatta

SEQ ID NO: 77153 - DNA, 10 bp, Unknown
  misc_feature (1)..( 10): Result.001 file - promoters75/1384016
ttcaaaaata

SEQ ID NO: 77154 - DNA, 10 bp, Unknown
  misc_feature (1)..( 10): Result.001 file - promoters75/1384016
tgtaaaaatt

SEQ ID NO: 77155 - DNA, 10 bp, Unknown
  misc_feature (1)..( 10): Result.001 file - promoters75/1384016
aacaaaaaag

SEQ ID NO: 77156 - DNA, 10 bp, Unknown
  misc_feature (1)..( 10): Result.001 file - promoters75/1384016
gttaataata

SEQ ID NO: 77157 - DNA, 10 bp, Unknown
  misc_feature (1)..( 10): Result.001 file - promoters75/1384016
atgaaaaaaa

SEQ ID NO: 77158 - DNA, 11 bp, Unknown
  misc_feature (1)..( 11): Result.001 file - promoters75/1384016
ttcaaacaaaa

SEQ ID NO: 77159 - DNA, 11 bp, Unknown
  misc_feature (1)..( 11): Result.001 file - promoters75/1384016
tttaaaattta

SEQ ID NO: 77160 - DNA, 17 bp, Unknown
  misc_feature (1)..( 17): Result.001 file - promoters75/1384016
gtaagaaaaaaaaaaaa

SEQ ID NO: 77161 - DNA, 17 bp, Unknown
  misc_feature (1)..( 17): Result.001 file - promoters75/1384016
agaagaaacaaagtaaa

SEQ ID NO: 77162 - DNA, 17 bp, Unknown
  misc_feature (1)..( 17): Result.001 file - promoters75/1384016
tctataaaaaatttttt

SEQ ID NO: 77163 - DNA, 17 bp, Unknown
  misc_feature (1)..( 17): Result.001 file - promoters75/1384016
tgatgaaatattttttt

SEQ ID NO: 77164 - DNA, 17 bp, Unknown
  misc_feature (1)..( 17): Result.001 file - promoters75/1384016
agatgaaaattgggaaa

SEQ ID NO: 77165 - DNA, 17 bp, Unknown
  misc_feature (1)..( 17): Result.001 file - promoters75/1384016
tgattaaattcaatcaa

SEQ ID NO: 77166 - DNA, 17 bp, Unknown
  misc_feature (1)..( 17): Result.001 file - promoters75/1384016
tttttaattatttaatc

SEQ ID NO: 77167 - DNA, 11 bp, Unknown
  misc_feature (1)..( 11): Result.001 file - promoters75/1384016
ttttttgcatc

SEQ ID NO: 77168 - DNA, 11 bp, Unknown
  misc_feature (1)..( 11): Result.001 file - promoters75/1384016
gttttagcaaa

SEQ ID NO: 77169 - DNA, 12 bp, Unknown
  misc_feature (1)..( 12): Result.001 file - promoters75/1384016
tttttcatcata

SEQ ID NO: 77170 - DNA, 12 bp, Unknown
  misc_feature (1)..( 12): Result.001 file - promoters75/1384016
ttttgttgttac

SEQ ID NO: 77171 - DNA, 12 bp, Unknown
  misc_feature (1)..( 12): Result.001 file - promoters75/1384016
atttttagtaaa

SEQ ID NO: 77172 - DNA, 12 bp, Unknown
  misc_feature (1)..( 12): Result.001 file - promoters75/1384016
ttatatagcaaa

SEQ ID NO: 77173 - DNA, 11 bp, Unknown
  misc_feature (1)..( 11): Result.001 file - promoters75/1384016
ctctaaaaaaa

SEQ ID NO: 77174 - DNA, 11 bp, Unknown
  misc_feature (1)..( 11): Result.001 file - promoters75/1384016
aattaaataaa

SEQ ID NO: 77175 - DNA, 11 bp, Unknown
  misc_feature (1)..( 11): Result.001 file - promoters75/1384016
tcttaaagata

SEQ ID NO: 77176 - DNA, 11 bp, Unknown
  misc_feature (1)..( 11): Result.001 file - promoters75/1384016
tagcaaaaaac

SEQ ID NO: 77177 - DNA, 11 bp, Unknown
  misc_feature (1)..( 11): Result.001 file - promoters75/1384016
acataaatttt

SEQ ID NO: 77178 - DNA, 11 bp, Unknown
  misc_feature (1)..( 11): Result.001 file - promoters75/1384016
ttttaaataga

SEQ ID NO: 77179 - DNA, 12 bp, Unknown
  misc_feature (1)..( 12): Result.001 file - promoters75/1384016
cgtttttgtcta

SEQ ID NO: 77180 - DNA, 12 bp, Unknown
  misc_feature (1)..( 12): Result.001 file - promoters75/1384016
ggtttttcggtt

SEQ ID NO: 77181 - DNA, 12 bp, Unknown
  misc_feature (1)..( 12): Result.001 file - promoters75/1384016
tgtttttgctga

SEQ ID NO: 77182 - DNA, 12 bp, Unknown
  misc_feature (1)..( 12): Result.001 file - promoters75/1384016
tttttttgtttc

SEQ ID NO: 77183 - DNA, 12 bp, Unknown
  misc_feature (1)..( 12): Result.001 file - promoters75/1384016
tgtgtttaatca

SEQ ID NO: 77184 - DNA, 12 bp, Unknown
  misc_feature (1)..( 12): Result.001 file - promoters75/1384016
tgattttggttt

SEQ ID NO: 77185 - DNA, 10 bp, Unknown
  misc_feature (1)..( 10): Result.001 file - promoters75/1384016
tttatacata

SEQ ID NO: 77186 - DNA, 10 bp, Unknown
  misc_feature (1)..( 10): Result.001 file - promoters75/1384016
tttataaata

SEQ ID NO: 77187 - DNA, 10 bp, Unknown
  misc_feature (1)..( 10): Result.001 file - promoters75/1384016
gttattaata

SEQ ID NO: 77188 - DNA, 10 bp, Unknown
  misc_feature (1)..( 10): Result.001 file - promoters75/1384016
ttttttaatt

SEQ ID NO: 77189 - DNA, 10 bp, Unknown
  misc_feature (1)..( 10): Result.001 file - promoters75/1384016
acttttaaca

SEQ ID NO: 77190 - DNA, 10 bp, Unknown
  misc_feature (1)..( 10): Result.001 file - promoters75/1384016
tttaaacatt

SEQ ID NO: 77191 - DNA, 12 bp, Unknown
  misc_feature (1)..( 12): Result.001 file - promoters75/1384016
aataatgttttt

SEQ ID NO: 77192 - DNA, 12 bp, Unknown
  misc_feature (1)..( 12): Result.001 file - promoters75/1384016
ataaatattttc

SEQ ID NO: 77193 - DNA, 12 bp, Unknown
  misc_feature (1)..( 12): Result.001 file - promoters75/1384016
tcacatatatat

SEQ ID NO: 77194 - DNA, 12 bp, Unknown
  misc_feature (1)..( 12): Result.001 file - promoters75/1384016
acaaatagaaga

SEQ ID NO: 77195 - DNA, 12 bp, Unknown
  misc_feature (1)..( 12): Result.001 file - promoters75/1384016
ttaaacattaaa

SEQ ID NO: 77196 - DNA, 12 bp, Unknown
  misc_feature (1)..( 12): Result.001 file - promoters75/1387123
gatattattttt

SEQ ID NO: 77197 - DNA, 11 bp, Unknown
  misc_feature (1)..( 11): Result.001 file - promoters75/1387123
tgtttgaccat

SEQ ID NO: 77198 - DNA, 11 bp, Unknown
  misc_feature (1)..( 11): Result.001 file - promoters75/1387123
tatttgaacat

SEQ ID NO: 77199 - DNA, 11 bp, Unknown
  misc_feature (1)..( 11): Result.001 file - promoters75/1387123
tgtgtgagttc

SEQ ID NO: 77200 - DNA, 8 bp, Unknown
  misc_feature (1)..( 8): Result.001 file - promoters75/1387123
taacgaac

SEQ ID NO: 77201 - DNA, 8 bp, Unknown
  misc_feature (1)..( 8): Result.001 file - promoters75/1387123
caacgaaa

SEQ ID NO: 77202 - DNA, 8 bp, Unknown
  misc_feature (1)..( 8): Result.001 file - promoters75/1387349
caactaaa

SEQ ID NO: 77203 - DNA, 9 bp, Unknown
  misc_feature (1)..( 9): Result.001 file - promoters75/1387349
atagataca

SEQ ID NO: 77204 - DNA, 9 bp, Unknown
  misc_feature (1)..( 9): Result.001 file - promoters75/1387349
tttgataca

SEQ ID NO: 77205 - DNA, 9 bp, Unknown
  misc_feature (1)..( 9): Result.001 file - promoters75/1387671
tttcataca

SEQ ID NO: 77206 - DNA, 12 bp, Unknown
  misc_feature (1)..( 12): Result.001 file - promoters75/1387671
cactatataaag

SEQ ID NO: 77207 - DNA, 12 bp, Unknown
  misc_feature (1)..( 12): Result.001 file - promoters75/1387671
cactatttaaag

SEQ ID NO: 77208 - DNA, 12 bp, Unknown
  misc_feature (1)..( 12): Result.001 file - promoters75/1387671
tactattaaagc

SEQ ID NO: 77209 - DNA, 12 bp, Unknown
  misc_feature (1)..( 12): Result.001 file - promoters75/1387671
tttaattaaaac

SEQ ID NO: 77210 - DNA, 12 bp, Unknown
  misc_feature (1)..( 12): Result.001 file - promoters75/1387671
gcttatttatga

SEQ ID NO: 77211 - DNA, 12 bp, Unknown
  misc_feature (1)..( 12): Result.001 file - promoters75/1387671
tactataaattc

SEQ ID NO: 77212 - DNA, 12 bp, Unknown
  misc_feature (1)..( 12): Result.001 file - promoters75/1387671
ctcttatgattt

SEQ ID NO: 77213 - DNA, 12 bp, Unknown
  misc_feature (1)..( 12): Result.001 file - promoters75/1387671
ctcgtataattc

SEQ ID NO: 77214 - DNA, 12 bp, Unknown
  misc_feature (1)..( 12): Result.001 file - promoters75/1387671
ttcttattggaa

SEQ ID NO: 77215 - DNA, 12 bp, Unknown
  misc_feature (1)..( 12): Result.001 file - promoters75/1387671
cttccatgtttt

SEQ ID NO: 77216 - DNA, 12 bp, Unknown
  misc_feature (1)..( 12): Result.001 file - promoters75/1387671
ttcttaggattc

SEQ ID NO: 77217 - DNA, 12 bp, Unknown
  misc_feature (1)..( 12): Result.001 file - promoters75/1387906
ttcgtttaacag

SEQ ID NO: 77218 - DNA, 11 bp, Unknown
  misc_feature (1)..( 11): Result.001 file - promoters75/1387906
atataacaaca

SEQ ID NO: 77219 - DNA, 11 bp, Unknown
  misc_feature (1)..( 11): Result.001 file - promoters75/1387906
ttttaataaca

SEQ ID NO: 77220 - DNA, 11 bp, Unknown
  misc_feature (1)..( 11): Result.001 file - promoters75/1387906
ttttactaact

SEQ ID NO: 77221 - DNA, 10 bp, Unknown
  misc_feature (1)..( 10): Result.001 file - promoters75/1387906
taaatttgtt

SEQ ID NO: 77222 - DNA, 10 bp, Unknown
  misc_feature (1)..( 10): Result.001 file - promoters75/1387906
aaaatctgtt

SEQ ID NO: 77223 - DNA, 10 bp, Unknown
  misc_feature (1)..( 10): Result.001 file - promoters75/1388973
aaaatcgaac

SEQ ID NO: 77224 - DNA, 9 bp, Unknown
  misc_feature (1)..( 9): Result.001 file - promoters75/1388973
ttttgcata

SEQ ID NO: 77225 - DNA, 9 bp, Unknown
  misc_feature (1)..( 9): Result.001 file - promoters75/1388973
gattgaata

SEQ ID NO: 77226 - DNA, 9 bp, Unknown
  misc_feature (1)..( 9): Result.001 file - promoters75/1390146
ttttccatc

SEQ ID NO: 77227 - DNA, 9 bp, Unknown
  misc_feature (1)..( 9): Result.001 file - promoters75/1390146
aatttcaac

SEQ ID NO: 77228 - DNA, 9 bp, Unknown
  misc_feature (1)..( 9): Result.001 file - promoters75/1390146
aatttgaac

SEQ ID NO: 77229 - DNA, 9 bp, Unknown
  misc_feature (1)..( 9): Result.001 file - promoters75/1390146
aatgtgaaa

SEQ ID NO: 77230 - DNA, 9 bp, Unknown
  misc_feature (1)..( 9): Result.001 file - promoters75/1390240
aatatgatt

SEQ ID NO: 77231 - DNA, 9 bp, Unknown
  misc_feature (1)..( 9): Result.001 file - promoters75/1390240
acttgctga

SEQ ID NO: 77232 - DNA, 9 bp, Unknown
  misc_feature (1)..( 9): Result.001 file - promoters75/1390240
gcttgctta

SEQ ID NO: 77233 - DNA, 9 bp, Unknown
  misc_feature (1)..( 9): Result.001 file - promoters75/1390240
acttgttga

SEQ ID NO: 77234 - DNA, 8 bp, Unknown
  misc_feature (1)..( 8): Result.001 file - promoters75/1390240
aaaataaa

SEQ ID NO: 77235 - DNA, 8 bp, Unknown
  misc_feature (1)..( 8): Result.001 file - promoters75/1390240
aaagtaaa

SEQ ID NO: 77236 - DNA, 8 bp, Unknown
  misc_feature (1)..( 8): Result.001 file - promoters75/1390240
aaaagaaa

SEQ ID NO: 77237 - DNA, 7 bp, Unknown
  misc_feature (1)..( 7): Result.001 file - promoters75/1390240
cggatgg

SEQ ID NO: 77238 - DNA, 7 bp, Unknown
  misc_feature (1)..( 7): Result.001 file - promoters75/1390240
gggatgg

SEQ ID NO: 77239 - DNA, 7 bp, Unknown
  misc_feature (1)..( 7): Result.001 file - promoters75/1393787
gggatgt

SEQ ID NO: 77240 - DNA, 16 bp, Unknown
  misc_feature (1)..( 16): Result.001 file - promoters75/1393787
gattaatttctctact

SEQ ID NO: 77241 - DNA, 16 bp, Unknown
  misc_feature (1)..( 16): Result.001 file - promoters75/1393787
gattaatgtctcttgc

SEQ ID NO: 77242 - DNA, 16 bp, Unknown
  misc_feature (1)..( 16): Result.001 file - promoters75/1393787
aagttagttctcttgc

SEQ ID NO: 77243 - DNA, 16 bp, Unknown
  misc_feature (1)..( 16): Result.001 file - promoters75/1393787
tgctaatgtgaactta

SEQ ID NO: 77244 - DNA, 10 bp, Unknown
  misc_feature (1)..( 10): Result.001 file - promoters75/1393787
ttatgttttt

SEQ ID NO: 77245 - DNA, 10 bp, Unknown
  misc_feature (1)..( 10): Result.001 file - promoters75/1393787
ccatgttttt

SEQ ID NO: 77246 - DNA, 10 bp, Unknown
  misc_feature (1)..( 10): Result.001 file - promoters75/1393787
ttatgttatg

SEQ ID NO: 77247 - DNA, 10 bp, Unknown
  misc_feature (1)..( 10): Result.001 file - promoters75/1393787
ctatgctttg

SEQ ID NO: 77248 - DNA, 11 bp, Unknown
  misc_feature (1)..( 11): Result.001 file - promoters75/1393787
atttaaatttt

SEQ ID NO: 77249 - DNA, 11 bp, Unknown
  misc_feature (1)..( 11): Result.001 file - promoters75/1393787
attaaaatgtc

SEQ ID NO: 77250 - DNA, 11 bp, Unknown
  misc_feature (1)..( 11): Result.001 file - promoters75/1393787
ttttgaatttt

SEQ ID NO: 77251 - DNA, 7 bp, Unknown
  misc_feature (1)..( 7): Result.001 file - promoters75/1393787
taaaaaa

SEQ ID NO: 77252 - DNA, 7 bp, Unknown
  misc_feature (1)..( 7): Result.001 file - promoters75/1393787
taaaaat

SEQ ID NO: 77253 - DNA, 8 bp, Unknown
  misc_feature (1)..( 8): Result.001 file - promoters75/1393787
caaataat

SEQ ID NO: 77254 - DNA, 7 bp, Unknown
  misc_feature (1)..( 7): Result.001 file - promoters75/1393787
ttattct

SEQ ID NO: 77255 - DNA, 7 bp, Unknown
  misc_feature (1)..( 7): Result.001 file - promoters75/1393787
atattct

SEQ ID NO: 77256 - DNA, 7 bp, Unknown
  misc_feature (1)..( 7): Result.001 file - promoters75/1393787
ttattca

SEQ ID NO: 77257 - DNA, 11 bp, Unknown
  misc_feature (1)..( 11): Result.001 file - promoters75/1393787
attttttttaa

SEQ ID NO: 77258 - DNA, 11 bp, Unknown
  misc_feature (1)..( 11): Result.001 file - promoters75/1393787
cattttcttat

SEQ ID NO: 77259 - DNA, 11 bp, Unknown
  misc_feature (1)..( 11): Result.001 file - promoters75/1393787
cccatttataa

SEQ ID NO: 77260 - DNA, 11 bp, Unknown
  misc_feature (1)..( 11): Result.001 file - promoters75/1393787
cattttcaagt

SEQ ID NO: 77261 - DNA, 11 bp, Unknown
  misc_feature (1)..( 11): Result.001 file - promoters75/1393787
taattatttgt

SEQ ID NO: 77262 - DNA, 11 bp, Unknown
  misc_feature (1)..( 11): Result.001 file - promoters75/1393787
taatcattttc

SEQ ID NO: 77263 - DNA, 11 bp, Unknown
  misc_feature (1)..( 11): Result.001 file - promoters75/1393787
tctccattttc

SEQ ID NO: 77264 - DNA, 11 bp, Unknown
  misc_feature (1)..( 11): Result.001 file - promoters75/1393787
ggcccatttat

SEQ ID NO: 77265 - DNA, 9 bp, Unknown
  misc_feature (1)..( 9): Result.001 file - promoters75/1393787
ttatgtttt

SEQ ID NO: 77266 - DNA, 9 bp, Unknown
  misc_feature (1)..( 9): Result.001 file - promoters75/1393787
ttatgtcgt

SEQ ID NO: 77267 - DNA, 9 bp, Unknown
  misc_feature (1)..( 9): Result.001 file - promoters75/1393787
ctatgcttt

SEQ ID NO: 77268 - DNA, 10 bp, Unknown
  misc_feature (1)..( 10): Result.001 file - promoters75/1393787
caagaacttc

SEQ ID NO: 77269 - DNA, 10 bp, Unknown
  misc_feature (1)..( 10): Result.001 file - promoters75/1393787
caagaaattc

SEQ ID NO: 77270 - DNA, 10 bp, Unknown
  misc_feature (1)..( 10): Result.001 file - promoters75/1393787
ttcaaaattc

SEQ ID NO: 77271 - DNA, 6 bp, Unknown
  misc_feature (1)..( 6): Result.001 file - promoters75/1393787
aaatga

SEQ ID NO: 77272 - DNA, 6 bp, Unknown
  misc_feature (1)..( 6): Result.001 file - promoters75/1393787
aaatga

SEQ ID NO: 77273 - DNA, 7 bp, Unknown
  misc_feature (1)..( 7): Result.001 file - promoters75/1394510
aaagtga

SEQ ID NO: 77274 - DNA, 11 bp, Unknown
  misc_feature (1)..( 11): Result.001 file - promoters75/1394510
taacatttttt

SEQ ID NO: 77275 - DNA, 11 bp, Unknown
  misc_feature (1)..( 11): Result.001 file - promoters75/1394510
taagatttttg

SEQ ID NO: 77276 - DNA, 11 bp, Unknown
  misc_feature (1)..( 11): Result.001 file - promoters75/1394510
tagaatttttt

SEQ ID NO: 77277 - DNA, 9 bp, Unknown
  misc_feature (1)..( 9): Result.001 file - promoters75/1394510
tttaatcag

SEQ ID NO: 77278 - DNA, 9 bp, Unknown
  misc_feature (1)..( 9): Result.001 file - promoters75/1394510
tttattcag

SEQ ID NO: 77279 - DNA, 9 bp, Unknown
  misc_feature (1)..( 9): Result.001 file - promoters75/1394592
gttattcga

SEQ ID NO: 77280 - DNA, 9 bp, Unknown
  misc_feature (1)..( 9): Result.001 file - promoters75/1394592
ataattata

SEQ ID NO: 77281 - DNA, 9 bp, Unknown
  misc_feature (1)..( 9): Result.001 file - promoters75/1394592
ccaatcata

SEQ ID NO: 77282 - DNA, 9 bp, Unknown
  misc_feature (1)..( 9): Result.001 file - promoters75/1395095
atatttaat

SEQ ID NO: 77283 - DNA, 9 bp, Unknown
  misc_feature (1)..( 9): Result.001 file - promoters75/1395095
aaaataaga

SEQ ID NO: 77284 - DNA, 9 bp, Unknown
  misc_feature (1)..( 9): Result.001 file - promoters75/1395095
aaaataatc

SEQ ID NO: 77285 - DNA, 9 bp, Unknown
  misc_feature (1)..( 9): Result.001 file - promoters75/1395095
aaaatgatc

SEQ ID NO: 77286 - DNA, 7 bp, Unknown
  misc_feature (1)..( 7): Result.001 file - promoters75/1395095
catagat

SEQ ID NO: 77287 - DNA, 7 bp, Unknown
  misc_feature (1)..( 7): Result.001 file - promoters75/1395095
aatagat

SEQ ID NO: 77288 - DNA, 7 bp, Unknown
  misc_feature (1)..( 7): Result.001 file - promoters75/1395095
aatcgat

SEQ ID NO: 77289 - DNA, 8 bp, Unknown
  misc_feature (1)..( 8): Result.001 file - promoters75/1395095
tttatttc

SEQ ID NO: 77290 - DNA, 8 bp, Unknown
  misc_feature (1)..( 8): Result.001 file - promoters75/1395095
tttctttc

SEQ ID NO: 77291 - DNA, 8 bp, Unknown
  misc_feature (1)..( 8): Result.001 file - promoters75/1395095
tttgtttt

SEQ ID NO: 77292 - DNA, 8 bp, Unknown
  misc_feature (1)..( 8): Result.001 file - promoters75/1395095
aaaaaaag

SEQ ID NO: 77293 - DNA, 8 bp, Unknown
  misc_feature (1)..( 8): Result.001 file - promoters75/1395095
caaagaag

SEQ ID NO: 77294 - DNA, 8 bp, Unknown
  misc_feature (1)..( 8): Result.001 file - promoters75/1395095
gaaaaaaa

SEQ ID NO: 77295 - DNA, 11 bp, Unknown
  misc_feature (1)..( 11): Result.001 file - promoters75/1395095
caacttttttt

SEQ ID NO: 77296 - DNA, 11 bp, Unknown
  misc_feature (1)..( 11): Result.001 file - promoters75/1395095
caaattttttt

SEQ ID NO: 77297 - DNA, 11 bp, Unknown
  misc_feature (1)..( 11): Result.001 file - promoters75/1395095
tacatttttta

SEQ ID NO: 77298 - DNA, 8 bp, Unknown
  misc_feature (1)..( 8): Result.001 file - promoters75/1395095
caagtctt

SEQ ID NO: 77299 - DNA, 8 bp, Unknown
  misc_feature (1)..( 8): Result.001 file - promoters75/1395095
aaagtctt

SEQ ID NO: 77300 - DNA, 8 bp, Unknown
  misc_feature (1)..( 8): Result.001 file - promoters75/1395095
aaattctg

SEQ ID NO: 77301 - DNA, 8 bp, Unknown
  misc_feature (1)..( 8): Result.001 file - promoters75/1395095
catatttt

SEQ ID NO: 77302 - DNA, 8 bp, Unknown
  misc_feature (1)..( 8): Result.001 file - promoters75/1395095
catttttt

SEQ ID NO: 77303 - DNA, 8 bp, Unknown
  misc_feature (1)..( 8): Result.001 file - promoters75/1395095
aatttttt

SEQ ID NO: 77304 - DNA, 8 bp, Unknown
  misc_feature (1)..( 8): Result.001 file - promoters75/1395095
aaaattca

SEQ ID NO: 77305 - DNA, 8 bp, Unknown
  misc_feature (1)..( 8): Result.001 file - promoters75/1395095
aaaattct

SEQ ID NO: 77306 - DNA, 8 bp, Unknown
  misc_feature (1)..( 8): Result.001 file - promoters75/1395095
taaagtct

SEQ ID NO: 77307 - DNA, 8 bp, Unknown
  misc_feature (1)..( 8): Result.001 file - promoters75/1395095
tataaatt

SEQ ID NO: 77308 - DNA, 8 bp, Unknown
  misc_feature (1)..( 8): Result.001 file - promoters75/1395095
tataaacc

SEQ ID NO: 77309 - DNA, 8 bp, Unknown
  misc_feature (1)..( 8): Result.001 file - promoters75/1396182
aataaaaa

SEQ ID NO: 77310 - DNA, 9 bp, Unknown
  misc_feature (1)..( 9): Result.001 file - promoters75/1396182
aagaataag

SEQ ID NO: 77311 - DNA, 9 bp, Unknown
  misc_feature (1)..( 9): Result.001 file - promoters75/1396182
gttaataag

SEQ ID NO: 77312 - DNA, 9 bp, Unknown
  misc_feature (1)..( 9): Result.001 file - promoters75/1396182
aagagtaaa

SEQ ID NO: 77313 - DNA, 7 bp, Unknown
  misc_feature (1)..( 7): Result.001 file - promoters75/1396182
aaaacaa

SEQ ID NO: 77314 - DNA, 7 bp, Unknown
  misc_feature (1)..( 7): Result.001 file - promoters75/1396182
aaagcaa

SEQ ID NO: 77315 - DNA, 7 bp, Unknown
  misc_feature (1)..( 7): Result.001 file - promoters75/1396182
gaaacaa

SEQ ID NO: 77316 - DNA, 11 bp, Unknown
  misc_feature (1)..( 11): Result.001 file - promoters75/1396182
tagtatgcaat

SEQ ID NO: 77317 - DNA, 11 bp, Unknown
  misc_feature (1)..( 11): Result.001 file - promoters75/1396182
ggaaatgaaat

SEQ ID NO: 77318 - DNA, 11 bp, Unknown
  misc_feature (1)..( 11): Result.001 file - promoters75/1396182
ggaaaagaaaa

SEQ ID NO: 77319 - DNA, 7 bp, Unknown
  misc_feature (1)..( 7): Result.001 file - promoters75/1396182
ctatata

SEQ ID NO: 77320 - DNA, 7 bp, Unknown
  misc_feature (1)..( 7): Result.001 file - promoters75/1396182
gtatata

SEQ ID NO: 77321 - DNA, 7 bp, Unknown
  misc_feature (1)..( 7): Result.001 file - promoters75/1396308
gtatata

SEQ ID NO: 77322 - DNA, 9 bp, Unknown
  misc_feature (1)..( 9): Result.001 file - promoters75/1396308
gggattttt

SEQ ID NO: 77323 - DNA, 9 bp, Unknown
  misc_feature (1)..( 9): Result.001 file - promoters75/1396308
gggttttta

SEQ ID NO: 77324 - DNA, 9 bp, Unknown
  misc_feature (1)..( 9): Result.001 file - promoters75/1396308
ttgattttt

SEQ ID NO: 77325 - DNA, 7 bp, Unknown
  misc_feature (1)..( 7): Result.001 file - promoters75/1396308
taattaa

SEQ ID NO: 77326 - DNA, 7 bp, Unknown
  misc_feature (1)..( 7): Result.001 file - promoters75/1396308
taattat

SEQ ID NO: 77327 - DNA, 7 bp, Unknown
  misc_feature (1)..( 7): Result.001 file - promoters75/1396354
taattat

SEQ ID NO: 77328 - DNA, 6 bp, Unknown
  misc_feature (1)..( 6): Result.001 file - promoters75/1396354
tacatt

SEQ ID NO: 77329 - DNA, 6 bp, Unknown
  misc_feature (1)..( 6): Result.001 file - promoters75/1396354
tacatt

SEQ ID NO: 77330 - DNA, 6 bp, Unknown
  misc_feature (1)..( 6): Result.001 file - promoters75/1396354
tacatt

SEQ ID NO: 77331 - DNA, 7 bp, Unknown
  misc_feature (1)..( 7): Result.001 file - promoters75/1396354
cttgatt

SEQ ID NO: 77332 - DNA, 7 bp, Unknown
  misc_feature (1)..( 7): Result.001 file - promoters75/1396354
tttgatt

SEQ ID NO: 77333 - DNA, 7 bp, Unknown
  misc_feature (1)..( 7): Result.001 file - promoters75/1397231
tttgatt

SEQ ID NO: 77334 - DNA, 7 bp, Unknown
  misc_feature (1)..( 7): Result.001 file - promoters75/1397231
ttttctt

SEQ ID NO: 77335 - DNA, 7 bp, Unknown
  misc_feature (1)..( 7): Result.001 file - promoters75/1397231
tttgctt

SEQ ID NO: 77336 - DNA, 7 bp, Unknown
  misc_feature (1)..( 7): Result.001 file - promoters75/1397231
tttgcta

SEQ ID NO: 77337 - DNA, 6 bp, Unknown
  misc_feature (1)..( 6): Result.001 file - promoters75/1397231
ttcttt

SEQ ID NO: 77338 - DNA, 6 bp, Unknown
  misc_feature (1)..( 6): Result.001 file - promoters75/1397231
ttcttt

SEQ ID NO: 77339 - DNA, 7 bp, Unknown
  misc_feature (1)..( 7): Result.001 file - promoters75/1397231
ttcgttt

SEQ ID NO: 77340 - DNA, 9 bp, Unknown
  misc_feature (1)..( 9): Result.001 file - promoters75/1397231
aacaaaatt

SEQ ID NO: 77341 - DNA, 9 bp, Unknown
  misc_feature (1)..( 9): Result.001 file - promoters75/1397231
aacaaaaca

SEQ ID NO: 77342 - DNA, 9 bp, Unknown
  misc_feature (1)..( 9): Result.001 file - promoters75/1397231
cccaagaca

SEQ ID NO: 77343 - DNA, 9 bp, Unknown
  misc_feature (1)..( 9): Result.001 file - promoters75/1397231
aaagttaaa

SEQ ID NO: 77344 - DNA, 9 bp, Unknown
  misc_feature (1)..( 9): Result.001 file - promoters75/1397231
aaaattata

SEQ ID NO: 77345 - DNA, 9 bp, Unknown
  misc_feature (1)..( 9): Result.001 file - promoters75/1397263
aaaattata

SEQ ID NO: 77346 - DNA, 8 bp, Unknown
  misc_feature (1)..( 8): Result.001 file - promoters75/1397263
tttgtaat

SEQ ID NO: 77347 - DNA, 8 bp, Unknown
  misc_feature (1)..( 8): Result.001 file - promoters75/1397263
tttttaaa

SEQ ID NO: 77348 - DNA, 8 bp, Unknown
  misc_feature (1)..( 8): Result.001 file - promoters75/1397263
atttcaaa

SEQ ID NO: 77349 - DNA, 8 bp, Unknown
  misc_feature (1)..( 8): Result.001 file - promoters75/1397263
atttcagt

SEQ ID NO: 77350 - DNA, 8 bp, Unknown
  misc_feature (1)..( 8): Result.001 file - promoters75/1397753
tttacaag

SEQ ID NO: 77351 - DNA, 12 bp, Unknown
  misc_feature (1)..( 12): Result.001 file - promoters75/1397753
ttctcaaattgt

SEQ ID NO: 77352 - DNA, 12 bp, Unknown
  misc_feature (1)..( 12): Result.001 file - promoters75/1397753
ttctaaaataat

SEQ ID NO: 77353 - DNA, 12 bp, Unknown
  misc_feature (1)..( 12): Result.001 file - promoters75/1398337
gaagaaaaaaat

SEQ ID NO: 77354 - DNA, 11 bp, Unknown
  misc_feature (1)..( 11): Result.001 file - promoters75/1398337
taaacacaaac

SEQ ID NO: 77355 - DNA, 11 bp, Unknown
  misc_feature (1)..( 11): Result.001 file - promoters75/1398337
gaaacaaaaac

SEQ ID NO: 77356 - DNA, 11 bp, Unknown
  misc_feature (1)..( 11): Result.001 file - promoters75/1399325
gaaagaaagct

SEQ ID NO: 77357 - DNA, 8 bp, Unknown
  misc_feature (1)..( 8): Result.001 file - promoters75/1399325
ctattttt

SEQ ID NO: 77358 - DNA, 8 bp, Unknown
  misc_feature (1)..( 8): Result.001 file - promoters75/1399325
aaattttt

SEQ ID NO: 77359 - DNA, 8 bp, Unknown
  misc_feature (1)..( 8): Result.001 file - promoters75/1399325
aaacttta

SEQ ID NO: 77360 - DNA, 8 bp, Unknown
  misc_feature (1)..( 8): Result.001 file - promoters75/1399325
aaagtaat

SEQ ID NO: 77361 - DNA, 8 bp, Unknown
  misc_feature (1)..( 8): Result.001 file - promoters75/1399325
aaaataaa

SEQ ID NO: 77362 - DNA, 8 bp, Unknown
  misc_feature (1)..( 8): Result.001 file - promoters75/1441657
caaataaa

SEQ ID NO: 77363 - DNA, 11 bp, Unknown
  misc_feature (1)..( 11): Result.001 file - promoters75/1441657
atcttctgtct

SEQ ID NO: 77364 - DNA, 11 bp, Unknown
  misc_feature (1)..( 11): Result.001 file - promoters75/1441657
cacttgtgttt

SEQ ID NO: 77365 - DNA, 11 bp, Unknown
  misc_feature (1)..( 11): Result.001 file - promoters75/1441657
atcttctaaaa

SEQ ID NO: 77366 - DNA, 11 bp, Unknown
  misc_feature (1)..( 11): Result.001 file - promoters75/1441657
taattgtattt

SEQ ID NO: 77367 - DNA, 7 bp, Unknown
  misc_feature (1)..( 7): Result.001 file - promoters75/1441657
ccaaaca

SEQ ID NO: 77368 - DNA, 7 bp, Unknown
  misc_feature (1)..( 7): Result.001 file - promoters75/1441657
ccaaacc

SEQ ID NO: 77369 - DNA, 7 bp, Unknown
  misc_feature (1)..( 7): Result.001 file - promoters75/1441657
tcaaacc

SEQ ID NO: 77370 - DNA, 9 bp, Unknown
  misc_feature (1)..( 9): Result.001 file - promoters75/1441657
aaattttca

SEQ ID NO: 77371 - DNA, 9 bp, Unknown
  misc_feature (1)..( 9): Result.001 file - promoters75/1441657
taatttttg

SEQ ID NO: 77372 - DNA, 9 bp, Unknown
  misc_feature (1)..( 9): Result.001 file - promoters75/1441657
aaatattca

SEQ ID NO: 77373 - DNA, 7 bp, Unknown
  misc_feature (1)..( 7): Result.001 file - promoters75/1441657
caaaatt

SEQ ID NO: 77374 - DNA, 7 bp, Unknown
  misc_feature (1)..( 7): Result.001 file - promoters75/1441657
caatatt

SEQ ID NO: 77375 - DNA, 7 bp, Unknown
  misc_feature (1)..( 7): Result.001 file - promoters75/1441665
caatatg

SEQ ID NO: 77376 - DNA, 12 bp, Unknown
  misc_feature (1)..( 12): Result.001 file - promoters75/1441665
catataaaacga

SEQ ID NO: 77377 - DNA, 12 bp, Unknown
  misc_feature (1)..( 12): Result.001 file - promoters75/1441665
gatacaaaaccc

SEQ ID NO: 77378 - DNA, 12 bp, Unknown
  misc_feature (1)..( 12): Result.001 file - promoters75/1441665
gagacaaataga

SEQ ID NO: 77379 - DNA, 12 bp, Unknown
  misc_feature (1)..( 12): Result.001 file - promoters75/1441665
tatataaaacca

SEQ ID NO: 77380 - DNA, 12 bp, Unknown
  misc_feature (1)..( 12): Result.001 file - promoters75/1441665
tatgcaaagcca

SEQ ID NO: 77381 - DNA, 12 bp, Unknown
  misc_feature (1)..( 12): Result.001 file - promoters75/1441665
gagtcaaagaaa

SEQ ID NO: 77382 - DNA, 10 bp, Unknown
  misc_feature (1)..( 10): Result.001 file - promoters75/1441665
ccaaacaaaa

SEQ ID NO: 77383 - DNA, 10 bp, Unknown
  misc_feature (1)..( 10): Result.001 file - promoters75/1441665
agaaacaaag

SEQ ID NO: 77384 - DNA, 10 bp, Unknown
  misc_feature (1)..( 10): Result.001 file - promoters75/1441665
tcaaagaaat

SEQ ID NO: 77385 - DNA, 10 bp, Unknown
  misc_feature (1)..( 10): Result.001 file - promoters75/1441665
ccaaacaaca

SEQ ID NO: 77386 - DNA, 10 bp, Unknown
  misc_feature (1)..( 10): Result.001 file - promoters75/1441665
taaaaccaag

SEQ ID NO: 77387 - DNA, 11 bp, Unknown
  misc_feature (1)..( 11): Result.001 file - promoters75/1441835
gcaaagccata

SEQ ID NO: 77388 - DNA, 14 bp, Unknown
  misc_feature (1)..( 14): Result.001 file - promoters75/1441835
tagcattaatgaac

SEQ ID NO: 77389 - DNA, 14 bp, Unknown
  misc_feature (1)..( 14): Result.001 file - promoters75/1441835
atacataaataaat

SEQ ID NO: 77390 - DNA, 14 bp, Unknown
  misc_feature (1)..( 14): Result.001 file - promoters75/1441835
atatataaaaattt

SEQ ID NO: 77391 - DNA, 14 bp, Unknown
  misc_feature (1)..( 14): Result.001 file - promoters75/1441835
atctataaaaagaa

SEQ ID NO: 77392 - DNA, 14 bp, Unknown
  misc_feature (1)..( 14): Result.001 file - promoters75/1441835
tggtattaaaatag

SEQ ID NO: 77393 - DNA, 14 bp, Unknown
  misc_feature (1)..( 14): Result.001 file - promoters75/1441835
agagacaaatagaa

SEQ ID NO: 77394 - DNA, 14 bp, Unknown
  misc_feature (1)..( 14): Result.001 file - promoters75/1441835
ggagtttaaaattt

SEQ ID NO: 77395 - DNA, 11 bp, Unknown
  misc_feature (1)..( 11): Result.001 file - promoters75/1441835
ttcgttttatt

SEQ ID NO: 77396 - DNA, 11 bp, Unknown
  misc_feature (1)..( 11): Result.001 file - promoters75/1441835
ttctttttttt

SEQ ID NO: 77397 - DNA, 11 bp, Unknown
  misc_feature (1)..( 11): Result.001 file - promoters75/1441835
ccagttttaca

SEQ ID NO: 77398 - DNA, 11 bp, Unknown
  misc_feature (1)..( 11): Result.001 file - promoters75/1441835
atcattttctt

SEQ ID NO: 77399 - DNA, 11 bp, Unknown
  misc_feature (1)..( 11): Result.001 file - promoters75/1441835
ttcatatgagc

SEQ ID NO: 77400 - DNA, 11 bp, Unknown
  misc_feature (1)..( 11): Result.001 file - promoters75/1441835
cacatataagc

SEQ ID NO: 77401 - DNA, 12 bp, Unknown
  misc_feature (1)..( 12): Result.001 file - promoters75/1441835
taggctataaat

SEQ ID NO: 77402 - DNA, 12 bp, Unknown
  misc_feature (1)..( 12): Result.001 file - promoters75/1441835
agggccatatta

SEQ ID NO: 77403 - DNA, 12 bp, Unknown
  misc_feature (1)..( 12): Result.001 file - promoters75/1441835
aaagccatattg

SEQ ID NO: 77404 - DNA, 12 bp, Unknown
  misc_feature (1)..( 12): Result.001 file - promoters75/1441835
attcctatattg

SEQ ID NO: 77405 - DNA, 12 bp, Unknown
  misc_feature (1)..( 12): Result.001 file - promoters75/1441835
aaggcccaaaaa

SEQ ID NO: 77406 - DNA, 12 bp, Unknown
  misc_feature (1)..( 12): Result.001 file - promoters75/1441835
tgggccaacttg

SEQ ID NO: 77407 - DNA, 12 bp, Unknown
  misc_feature (1)..( 12): Result.001 file - promoters75/1441835
tagttaaaaaag

SEQ ID NO: 77408 - DNA, 12 bp, Unknown
  misc_feature (1)..( 12): Result.001 file - promoters75/1441835
tagttcaaaaac

SEQ ID NO: 77409 - DNA, 12 bp, Unknown
  misc_feature (1)..( 12): Result.001 file - promoters75/1441835
tgattaagaaaa

SEQ ID NO: 77410 - DNA, 12 bp, Unknown
  misc_feature (1)..( 12): Result.001 file - promoters75/1441835
cttttaacaaaa

SEQ ID NO: 77411 - DNA, 12 bp, Unknown
  misc_feature (1)..( 12): Result.001 file - promoters75/1441835
ttattaataaat

SEQ ID NO: 77412 - DNA, 12 bp, Unknown
  misc_feature (1)..( 12): Result.001 file - promoters75/1442476
tgtttccaaaat

SEQ ID NO: 77413 - DNA, 12 bp, Unknown
  misc_feature (1)..( 12): Result.001 file - promoters75/1442476
cttttttttttt

SEQ ID NO: 77414 - DNA, 12 bp, Unknown
  misc_feature (1)..( 12): Result.001 file - promoters75/1442476
ctttttgttgtt

SEQ ID NO: 77415 - DNA, 12 bp, Unknown
  misc_feature (1)..( 12): Result.001 file - promoters75/1442476
ctttttttgttt

SEQ ID NO: 77416 - DNA, 12 bp, Unknown
  misc_feature (1)..( 12): Result.001 file - promoters75/1442476
gtttttgtctat

SEQ ID NO: 77417 - DNA, 12 bp, Unknown
  misc_feature (1)..( 12): Result.001 file - promoters75/1442476
atttttgttcca

SEQ ID NO: 77418 - DNA, 13 bp, Unknown
  misc_feature (1)..( 13): Result.001 file - promoters75/1442476
attgtttcgaaac

SEQ ID NO: 77419 - DNA, 10 bp, Unknown
  misc_feature (1)..( 10): Result.001 file - promoters75/1442476
gtaagaaaaa

SEQ ID NO: 77420 - DNA, 10 bp, Unknown
  misc_feature (1)..( 10): Result.001 file - promoters75/1442476
taaagaaaag

SEQ ID NO: 77421 - DNA, 10 bp, Unknown
  misc_feature (1)..( 10): Result.001 file - promoters75/1442476
agaataaaaa

SEQ ID NO: 77422 - DNA, 10 bp, Unknown
  misc_feature (1)..( 10): Result.001 file - promoters75/1442476
caaacaaaac

SEQ ID NO: 77423 - DNA, 10 bp, Unknown
  misc_feature (1)..( 10): Result.001 file - promoters75/1442476
tcaatcaaat

SEQ ID NO: 77424 - DNA, 10 bp, Unknown
  misc_feature (1)..( 10): Result.001 file - promoters75/1442880
tttgtcaaat

SEQ ID NO: 77425 - DNA, 9 bp, Unknown
  misc_feature (1)..( 9): Result.001 file - promoters75/1442880
ttctctttt

SEQ ID NO: 77426 - DNA, 9 bp, Unknown
  misc_feature (1)..( 9): Result.001 file - promoters75/1442880
acctctttt

SEQ ID NO: 77427 - DNA, 9 bp, Unknown
  misc_feature (1)..( 9): Result.001 file - promoters75/1442880
accccttag

SEQ ID NO: 77428 - DNA, 7 bp, Unknown
  misc_feature (1)..( 7): Result.001 file - promoters75/1442880
aatttac

SEQ ID NO: 77429 - DNA, 7 bp, Unknown
  misc_feature (1)..( 7): Result.001 file - promoters75/1442880
aatctac

SEQ ID NO: 77430 - DNA, 7 bp, Unknown
  misc_feature (1)..( 7): Result.001 file - promoters75/1442880
aatttat

SEQ ID NO: 77431 - DNA, 11 bp, Unknown
  misc_feature (1)..( 11): Result.001 file - promoters75/1442880
ctaaaatagta

SEQ ID NO: 77432 - DNA, 11 bp, Unknown
  misc_feature (1)..( 11): Result.001 file - promoters75/1442880
aaataattgta

SEQ ID NO: 77433 - DNA, 11 bp, Unknown
  misc_feature (1)..( 11): Result.001 file - promoters75/1442880
aaagaattgaa

SEQ ID NO: 77434 - DNA, 8 bp, Unknown
  misc_feature (1)..( 8): Result.001 file - promoters75/1442880
aaggtata

SEQ ID NO: 77435 - DNA, 8 bp, Unknown
  misc_feature (1)..( 8): Result.001 file - promoters75/1442880
aagctata

SEQ ID NO: 77436 - DNA, 8 bp, Unknown
  misc_feature (1)..( 8): Result.001 file - promoters75/1442880
cagcaata

SEQ ID NO: 77437 - DNA, 10 bp, Unknown
  misc_feature (1)..( 10): Result.001 file - promoters75/1442880
ttactaaaat

SEQ ID NO: 77438 - DNA, 10 bp, Unknown
  misc_feature (1)..( 10): Result.001 file - promoters75/1442880
ttattaattt

SEQ ID NO: 77439 - DNA, 11 bp, Unknown
  misc_feature (1)..( 11): Result.001 file - promoters75/1442880
gaactgaaaga

SEQ ID NO: 77440 - DNA, 11 bp, Unknown
  misc_feature (1)..( 11): Result.001 file - promoters75/1442880
ttgtataaatt

SEQ ID NO: 77441 - DNA, 9 bp, Unknown
  misc_feature (1)..( 9): Result.001 file - promoters75/1442880
aaagaagaa

SEQ ID NO: 77442 - DNA, 9 bp, Unknown
  misc_feature (1)..( 9): Result.001 file - promoters75/1442880
aaagaattg

SEQ ID NO: 77443 - DNA, 9 bp, Unknown
  misc_feature (1)..( 9): Result.001 file - promoters75/1442880
aaataattg

SEQ ID NO: 77444 - DNA, 13 bp, Unknown
  misc_feature (1)..( 13): Result.001 file - promoters75/1442880
aatatcaccgacg

SEQ ID NO: 77445 - DNA, 13 bp, Unknown
  misc_feature (1)..( 13): Result.001 file - promoters75/1442880
aatatcttgtaag

SEQ ID NO: 77446 - DNA, 13 bp, Unknown
  misc_feature (1)..( 13): Result.001 file - promoters75/1442880
aatctcaacgacg

SEQ ID NO: 77447 - DNA, 8 bp, Unknown
  misc_feature (1)..( 8): Result.001 file - promoters75/1442880
taatcata

SEQ ID NO: 77448 - DNA, 8 bp, Unknown
  misc_feature (1)..( 8): Result.001 file - promoters75/1442880
aaataata

SEQ ID NO: 77449 - DNA, 8 bp, Unknown
  misc_feature (1)..( 8): Result.001 file - promoters75/1442975
aaacaatc

SEQ ID NO: 77450 - DNA, 12 bp, Unknown
  misc_feature (1)..( 12): Result.001 file - promoters75/1442975
ctttttgtttat

SEQ ID NO: 77451 - DNA, 12 bp, Unknown
  misc_feature (1)..( 12): Result.001 file - promoters75/1442975
tgatttgtatat

SEQ ID NO: 77452 - DNA, 12 bp, Unknown
  misc_feature (1)..( 12): Result.001 file - promoters75/1442975
cttattgtataa

SEQ ID NO: 77453 - DNA, 8 bp, Unknown
  misc_feature (1)..( 8): Result.001 file - promoters75/1442975
gctggatt

SEQ ID NO: 77454 - DNA, 8 bp, Unknown
  misc_feature (1)..( 8): Result.001 file - promoters75/1442975
tctgaatt

SEQ ID NO: 77455 - DNA, 8 bp, Unknown
  misc_feature (1)..( 8): Result.001 file - promoters75/1442993
tctgaaca

SEQ ID NO: 77456 - DNA, 11 bp, Unknown
  misc_feature (1)..( 11): Result.001 file - promoters75/1442993
aaaatagtaaa

SEQ ID NO: 77457 - DNA, 11 bp, Unknown
  misc_feature (1)..( 11): Result.001 file - promoters75/1442993
ataattgtata

SEQ ID NO: 77458 - DNA, 11 bp, Unknown
  misc_feature (1)..( 11): Result.001 file - promoters75/1442993
atatttgtata

SEQ ID NO: 77459 - DNA, 10 bp, Unknown
  misc_feature (1)..( 10): Result.001 file - promoters75/1442993
gaaaaagata

SEQ ID NO: 77460 - DNA, 10 bp, Unknown
  misc_feature (1)..( 10): Result.001 file - promoters75/1442993
gaaatagatt

SEQ ID NO: 77461 - DNA, 10 bp, Unknown
  misc_feature (1)..( 10): Result.001 file - promoters75/1443306
ttagtagatt

SEQ ID NO: 77462 - DNA, 10 bp, Unknown
  misc_feature (1)..( 10): Result.001 file - promoters75/1443306
ctataaatag

SEQ ID NO: 77463 - DNA, 10 bp, Unknown
  misc_feature (1)..( 10): Result.001 file - promoters75/1443306
ctataaaaaa

SEQ ID NO: 77464 - DNA, 10 bp, Unknown
  misc_feature (1)..( 10): Result.001 file - promoters75/1443683
atataaatag

SEQ ID NO: 77465 - DNA, 9 bp, Unknown
  misc_feature (1)..( 9): Result.001 file - promoters75/1443683
tattagctt

SEQ ID NO: 77466 - DNA, 9 bp, Unknown
  misc_feature (1)..( 9): Result.001 file - promoters75/1443683
gatttgctt

SEQ ID NO: 77467 - DNA, 9 bp, Unknown
  misc_feature (1)..( 9): Result.001 file - promoters75/1444441
tattagaga

SEQ ID NO: 77468 - DNA, 11 bp, Unknown
  misc_feature (1)..( 11): Result.001 file - promoters75/1444441
actcttttgaa

SEQ ID NO: 77469 - DNA, 11 bp, Unknown
  misc_feature (1)..( 11): Result.001 file - promoters75/1444441
actatttatac

SEQ ID NO: 77470 - DNA, 11 bp, Unknown
  misc_feature (1)..( 11): Result.001 file - promoters75/1444441
tttcttttcac

SEQ ID NO: 77471 - DNA, 11 bp, Unknown
  misc_feature (1)..( 11): Result.001 file - promoters75/1444441
aatcttttggg

SEQ ID NO: 77472 - DNA, 11 bp, Unknown
  misc_feature (1)..( 11): Result.001 file - promoters75/1444441
gttattaataa

SEQ ID NO: 77473 - DNA, 11 bp, Unknown
  misc_feature (1)..( 11): Result.001 file - promoters75/1444441
ttgattagtaa

SEQ ID NO: 77474 - DNA, 11 bp, Unknown
  misc_feature (1)..( 11): Result.001 file - promoters75/1444441
aatattttata

SEQ ID NO: 77475 - DNA, 11 bp, Unknown
  misc_feature (1)..( 11): Result.001 file - promoters75/1444441
attattttttg

SEQ ID NO: 77476 - DNA, 12 bp, Unknown
  misc_feature (1)..( 12): Result.001 file - promoters75/1444441
ttgtaataataa

SEQ ID NO: 77477 - DNA, 12 bp, Unknown
  misc_feature (1)..( 12): Result.001 file - promoters75/1444441
acataataatgt

SEQ ID NO: 77478 - DNA, 12 bp, Unknown
  misc_feature (1)..( 12): Result.001 file - promoters75/1444441
ttgtgatattat

SEQ ID NO: 77479 - DNA, 12 bp, Unknown
  misc_feature (1)..( 12): Result.001 file - promoters75/1444441
tattaataaatt

SEQ ID NO: 77480 - DNA, 12 bp, Unknown
  misc_feature (1)..( 12): Result.001 file - promoters75/1444441
attttataaata

SEQ ID NO: 77481 - DNA, 13 bp, Unknown
  misc_feature (1)..( 13): Result.001 file - promoters75/1444441
tttcaattaatct

SEQ ID NO: 77482 - DNA, 12 bp, Unknown
  misc_feature (1)..( 12): Result.001 file - promoters75/1444441
aagtttttgtaa

SEQ ID NO: 77483 - DNA, 12 bp, Unknown
  misc_feature (1)..( 12): Result.001 file - promoters75/1444441
ttgttttttaat

SEQ ID NO: 77484 - DNA, 12 bp, Unknown
  misc_feature (1)..( 12): Result.001 file - promoters75/1444441
ttgtgtttgatt

SEQ ID NO: 77485 - DNA, 12 bp, Unknown
  misc_feature (1)..( 12): Result.001 file - promoters75/1444441
atattttataaa

SEQ ID NO: 77486 - DNA, 12 bp, Unknown
  misc_feature (1)..( 12): Result.001 file - promoters75/1444441
tcgttattaata

SEQ ID NO: 77487 - DNA, 12 bp, Unknown
  misc_feature (1)..( 12): Result.001 file - promoters75/1444441
tttcaattaatc

SEQ ID NO: 77488 - DNA, 14 bp, Unknown
  misc_feature (1)..( 14): Result.001 file - promoters75/1444441
agaaaaaaaaaaaa

SEQ ID NO: 77489 - DNA, 14 bp, Unknown
  misc_feature (1)..( 14): Result.001 file - promoters75/1444441
agaataaaaacagt

SEQ ID NO: 77490 - DNA, 14 bp, Unknown
  misc_feature (1)..( 14): Result.001 file - promoters75/1444441
agaaagaaataata

SEQ ID NO: 77491 - DNA, 14 bp, Unknown
  misc_feature (1)..( 14): Result.001 file - promoters75/1444441
ataaaaaatttttt

SEQ ID NO: 77492 - DNA, 14 bp, Unknown
  misc_feature (1)..( 14): Result.001 file - promoters75/1444441
tgaaatattttttt

SEQ ID NO: 77493 - DNA, 14 bp, Unknown
  misc_feature (1)..( 14): Result.001 file - promoters75/1444441
ataaatattcaact

SEQ ID NO: 77494 - DNA, 10 bp, Unknown
  misc_feature (1)..( 10): Result.001 file - promoters75/1444441
tttatacata

SEQ ID NO: 77495 - DNA, 10 bp, Unknown
  misc_feature (1)..( 10): Result.001 file - promoters75/1444441
tttataaata

SEQ ID NO: 77496 - DNA, 10 bp, Unknown
  misc_feature (1)..( 10): Result.001 file - promoters75/1444441
gttattaata

SEQ ID NO: 77497 - DNA, 10 bp, Unknown
  misc_feature (1)..( 10): Result.001 file - promoters75/1444441
ttttttaatt

SEQ ID NO: 77498 - DNA, 10 bp, Unknown
  misc_feature (1)..( 10): Result.001 file - promoters75/1444441
cttttcaatt

SEQ ID NO: 77499 - DNA, 10 bp, Unknown
  misc_feature (1)..( 10): Result.001 file - promoters75/1444441
attagtaaaa

SEQ ID NO: 77500 - DNA, 11 bp, Unknown
  misc_feature (1)..( 11): Result.001 file - promoters75/1444441
tttctaatttt

SEQ ID NO: 77501 - DNA, 11 bp, Unknown
  misc_feature (1)..( 11): Result.001 file - promoters75/1444441
tttttaattat

SEQ ID NO: 77502 - DNA, 11 bp, Unknown
  misc_feature (1)..( 11): Result.001 file - promoters75/1444441
gttctattttt

SEQ ID NO: 77503 - DNA, 11 bp, Unknown
  misc_feature (1)..( 11): Result.001 file - promoters75/1444441
tttataatcga

SEQ ID NO: 77504 - DNA, 11 bp, Unknown
  misc_feature (1)..( 11): Result.001 file - promoters75/1444441
taaatattcaa

SEQ ID NO: 77505 - DNA, 11 bp, Unknown
  misc_feature (1)..( 11): Result.001 file - promoters75/1444460
ttttgattaaa

SEQ ID NO: 77506 - DNA, 7 bp, Unknown
  misc_feature (1)..( 7): Result.001 file - promoters75/1444460
cgaaaca

SEQ ID NO: 77507 - DNA, 7 bp, Unknown
  misc_feature (1)..( 7): Result.001 file - promoters75/1444460
tgaaaca

SEQ ID NO: 77508 - DNA, 7 bp, Unknown
  misc_feature (1)..( 7): Result.001 file - promoters75/1446636
tgaaacg

SEQ ID NO: 77509 - DNA, 8 bp, Unknown
  misc_feature (1)..( 8): Result.001 file - promoters75/1446636
taaggata

SEQ ID NO: 77510 - DNA, 8 bp, Unknown
  misc_feature (1)..( 8): Result.001 file - promoters75/1446636
aaaggata

SEQ ID NO: 77511 - DNA, 9 bp, Unknown
  misc_feature (1)..( 9): Result.001 file - promoters75/1446636
aaatggaac

SEQ ID NO: 77512 - DNA, 9 bp, Unknown
  misc_feature (1)..( 9): Result.001 file - promoters75/1446636
aagggtaaa

SEQ ID NO: 77513 - DNA, 9 bp, Unknown
  misc_feature (1)..( 9): Result.001 file - promoters75/1446636
gaggttaaa

SEQ ID NO: 77514 - DNA, 9 bp, Unknown
  misc_feature (1)..( 9): Result.001 file - promoters75/1447646
gaggtgaaa

SEQ ID NO: 77515 - DNA, 10 bp, Unknown
  misc_feature (1)..( 10): Result.001 file - promoters75/1447646
ggaaggagag

SEQ ID NO: 77516 - DNA, 10 bp, Unknown
  misc_feature (1)..( 10): Result.001 file - promoters75/1447646
ggaagtagag

SEQ ID NO: 77517 - DNA, 10 bp, Unknown
  misc_feature (1)..( 10): Result.001 file - promoters75/1447646
ggaagtagag

SEQ ID NO: 77518 - DNA, 9 bp, Unknown
  misc_feature (1)..( 9): Result.001 file - promoters75/1447646
gagatgaga

SEQ ID NO: 77519 - DNA, 9 bp, Unknown
  misc_feature (1)..( 9): Result.001 file - promoters75/1447646
aagatgatg

SEQ ID NO: 77520 - DNA, 9 bp, Unknown
  misc_feature (1)..( 9): Result.001 file - promoters75/1447953
aagttgatg

SEQ ID NO: 77521 - DNA, 6 bp, Unknown
  misc_feature (1)..( 6): Result.001 file - promoters75/1447953
cttctt

SEQ ID NO: 77522 - DNA, 6 bp, Unknown
  misc_feature (1)..( 6): Result.001 file - promoters75/1447953
cttctt

SEQ ID NO: 77523 - DNA, 6 bp, Unknown
  misc_feature (1)..( 6): Result.001 file - promoters75/1448231
cttctt

SEQ ID NO: 77524 - DNA, 7 bp, Unknown
  misc_feature (1)..( 7): Result.001 file - promoters75/1448231
cttaact

SEQ ID NO: 77525 - DNA, 7 bp, Unknown
  misc_feature (1)..( 7): Result.001 file - promoters75/1448231
cttaacc

SEQ ID NO: 77526 - DNA, 7 bp, Unknown
  misc_feature (1)..( 7): Result.001 file - promoters75/1450625
tttaacc

SEQ ID NO: 77527 - DNA, 8 bp, Unknown
  misc_feature (1)..( 8): Result.001 file - promoters75/1450625
aattttga

SEQ ID NO: 77528 - DNA, 8 bp, Unknown
  misc_feature (1)..( 8): Result.001 file - promoters75/1450625
aattttaa

SEQ ID NO: 77529 - DNA, 8 bp, Unknown
  misc_feature (1)..( 8): Result.001 file - promoters75/1450625
cattgtaa

SEQ ID NO: 77530 - DNA, 6 bp, Unknown
  misc_feature (1)..( 6): Result.001 file - promoters75/1450625
ttattc

SEQ ID NO: 77531 - DNA, 6 bp, Unknown
  misc_feature (1)..( 6): Result.001 file - promoters75/1450625
ttattc

SEQ ID NO: 77532 - DNA, 6 bp, Unknown
  misc_feature (1)..( 6): Result.001 file - promoters75/1459039
ttattc

SEQ ID NO: 77533 - DNA, 6 bp, Unknown
  misc_feature (1)..( 6): Result.001 file - promoters75/1459039
tataaa

SEQ ID NO: 77534 - DNA, 6 bp, Unknown
  misc_feature (1)..( 6): Result.001 file - promoters75/1459039
tataaa

SEQ ID NO: 77535 - DNA, 6 bp, Unknown
  misc_feature (1)..( 6): Result.001 file - promoters75/1459039
tataaa

SEQ ID NO: 77536 - DNA, 9 bp, Unknown
  misc_feature (1)..( 9): Result.001 file - promoters75/1459039
ggtcaattt

SEQ ID NO: 77537 - DNA, 9 bp, Unknown
  misc_feature (1)..( 9): Result.001 file - promoters75/1459039
catcaattt

SEQ ID NO: 77538 - DNA, 9 bp, Unknown
  misc_feature (1)..( 9): Result.001 file - promoters75/1459039
ggtcaatgc

SEQ ID NO: 77539 - DNA, 7 bp, Unknown
  misc_feature (1)..( 7): Result.001 file - promoters75/1459039
gccaaac

SEQ ID NO: 77540 - DNA, 7 bp, Unknown
  misc_feature (1)..( 7): Result.001 file - promoters75/1459039
tccaaac

SEQ ID NO: 77541 - DNA, 7 bp, Unknown
  misc_feature (1)..( 7): Result.001 file - promoters75/1459223
gccgaac

SEQ ID NO: 77542 - DNA, 10 bp, Unknown
  misc_feature (1)..( 10): Result.001 file - promoters75/1459223
aaaaaaatat

SEQ ID NO: 77543 - DNA, 10 bp, Unknown
  misc_feature (1)..( 10): Result.001 file - promoters75/1459223
aaaaaaggaa

SEQ ID NO: 77544 - DNA, 11 bp, Unknown
  misc_feature (1)..( 11): Result.001 file - promoters75/1459223
aaagaaataat

SEQ ID NO: 77545 - DNA, 11 bp, Unknown
  misc_feature (1)..( 11): Result.001 file - promoters75/1459223
aaaaaaatggt

SEQ ID NO: 77546 - DNA, 11 bp, Unknown
  misc_feature (1)..( 11): Result.001 file - promoters75/1459223
gatgaaatatt

SEQ ID NO: 77547 - DNA, 11 bp, Unknown
  misc_feature (1)..( 11): Result.001 file - promoters75/1459223
tgataaatatt

SEQ ID NO: 77548 - DNA, 10 bp, Unknown
  misc_feature (1)..( 10): Result.001 file - promoters75/1459223
catataaaac

SEQ ID NO: 77549 - DNA, 10 bp, Unknown
  misc_feature (1)..( 10): Result.001 file - promoters75/1459223
tttataaata

SEQ ID NO: 77550 - DNA, 10 bp, Unknown
  misc_feature (1)..( 10): Result.001 file - promoters75/1459223
tttatacata

SEQ ID NO: 77551 - DNA, 10 bp, Unknown
  misc_feature (1)..( 10): Result.001 file - promoters75/1459223
gttattaata

SEQ ID NO: 77552 - DNA, 10 bp, Unknown
  misc_feature (1)..( 10): Result.001 file - promoters75/1459223
aataataact

SEQ ID NO: 77553 - DNA, 10 bp, Unknown
  misc_feature (1)..( 10): Result.001 file - promoters75/1459223
tcaattaatc

SEQ ID NO: 77554 - DNA, 10 bp, Unknown
  misc_feature (1)..( 10): Result.001 file - promoters75/1459223
caaacaaaac

SEQ ID NO: 77555 - DNA, 10 bp, Unknown
  misc_feature (1)..( 10): Result.001 file - promoters75/1459223
caatcaaatc

SEQ ID NO: 77556 - DNA, 10 bp, Unknown
  misc_feature (1)..( 10): Result.001 file - promoters75/1459223
caaagaaatt

SEQ ID NO: 77557 - DNA, 10 bp, Unknown
  misc_feature (1)..( 10): Result.001 file - promoters75/1459223
ttgtcaaatg

SEQ ID NO: 77558 - DNA, 10 bp, Unknown
  misc_feature (1)..( 10): Result.001 file - promoters75/1459223
gtaagaaaaa

SEQ ID NO: 77559 - DNA, 10 bp, Unknown
  misc_feature (1)..( 10): Result.001 file - promoters75/1461791
ttatttaatc

SEQ ID NO: 77560 - DNA, 7 bp, Unknown
  misc_feature (1)..( 7): Result.001 file - promoters75/1461791
gaaatcg

SEQ ID NO: 77561 - DNA, 7 bp, Unknown
  misc_feature (1)..( 7): Result.001 file - promoters75/1461791
gaattcg

SEQ ID NO: 77562 - DNA, 7 bp, Unknown
  misc_feature (1)..( 7): Result.001 file - promoters75/1461839
gaaatcg

SEQ ID NO: 77563 - DNA, 7 bp, Unknown
  misc_feature (1)..( 7): Result.001 file - promoters75/1461839
ataatcc

SEQ ID NO: 77564 - DNA, 7 bp, Unknown
  misc_feature (1)..( 7): Result.001 file - promoters75/1461839
ataatcc

SEQ ID NO: 77565 - DNA, 7 bp, Unknown
  misc_feature (1)..( 7): Result.001 file - promoters75/1461839
ataatcc

SEQ ID NO: 77566 - DNA, 7 bp, Unknown
  misc_feature (1)..( 7): Result.001 file - promoters75/1461839
acacata

SEQ ID NO: 77567 - DNA, 7 bp, Unknown
  misc_feature (1)..( 7): Result.001 file - promoters75/1461839
ccacata

SEQ ID NO: 77568 - DNA, 7 bp, Unknown
  misc_feature (1)..( 7): Result.001 file - promoters75/1461839
acacata

SEQ ID NO: 77569 - DNA, 11 bp, Unknown
  misc_feature (1)..( 11): Result.001 file - promoters75/1461839
aaaaagaaaag

SEQ ID NO: 77570 - DNA, 11 bp, Unknown
  misc_feature (1)..( 11): Result.001 file - promoters75/1461839
atttagataag

SEQ ID NO: 77571 - DNA, 11 bp, Unknown
  misc_feature (1)..( 11): Result.001 file - promoters75/1461839
aaaaagaaaaa

SEQ ID NO: 77572 - DNA, 7 bp, Unknown
  misc_feature (1)..( 7): Result.001 file - promoters75/1461839
ggacgat

SEQ ID NO: 77573 - DNA, 7 bp, Unknown
  misc_feature (1)..( 7): Result.001 file - promoters75/1461839
ggatgat

SEQ ID NO: 77574 - DNA, 7 bp, Unknown
  misc_feature (1)..( 7): Result.001 file - promoters75/1461839
ggatgat

SEQ ID NO: 77575 - DNA, 10 bp, Unknown
  misc_feature (1)..( 10): Result.001 file - promoters75/1461839
aaagaaagaa

SEQ ID NO: 77576 - DNA, 10 bp, Unknown
  misc_feature (1)..( 10): Result.001 file - promoters75/1461839
aaaaaaagaa

SEQ ID NO: 77577 - DNA, 11 bp, Unknown
  misc_feature (1)..( 11): Result.001 file - promoters75/1461839
taagtaaagta

SEQ ID NO: 77578 - DNA, 7 bp, Unknown
  misc_feature (1)..( 7): Result.001 file - promoters75/1461839
ggatgat

SEQ ID NO: 77579 - DNA, 7 bp, Unknown
  misc_feature (1)..( 7): Result.001 file - promoters75/1461839
ggatgat

SEQ ID NO: 77580 - DNA, 7 bp, Unknown
  misc_feature (1)..( 7): Result.001 file - promoters75/1461839
ggatgat

SEQ ID NO: 77581 - DNA, 7 bp, Unknown
  misc_feature (1)..( 7): Result.001 file - promoters75/1461839
ttatcag

SEQ ID NO: 77582 - DNA, 7 bp, Unknown
  misc_feature (1)..( 7): Result.001 file - promoters75/1461839
ttaacag

SEQ ID NO: 77583 - DNA, 7 bp, Unknown
  misc_feature (1)..( 7): Result.001 file - promoters75/1461839
ttatcag

SEQ ID NO: 77584 - DNA, 12 bp, Unknown
  misc_feature (1)..( 12): Result.001 file - promoters75/1461839
ttgatattgaaa

SEQ ID NO: 77585 - DNA, 12 bp, Unknown
  misc_feature (1)..( 12): Result.001 file - promoters75/1461839
ttgagattttca

SEQ ID NO: 77586 - DNA, 12 bp, Unknown
  misc_feature (1)..( 12): Result.001 file - promoters75/1472778
tctagattatca

SEQ ID NO: 77587 - DNA, 10 bp, Unknown
  misc_feature (1)..( 10): Result.001 file - promoters75/1472778
ttttagtttg

SEQ ID NO: 77588 - DNA, 10 bp, Unknown
  misc_feature (1)..( 10): Result.001 file - promoters75/1472778
ttttcgtttc

SEQ ID NO: 77589 - DNA, 10 bp, Unknown
  misc_feature (1)..( 10): Result.001 file - promoters75/1472799
ttttatttta

SEQ ID NO: 77590 - DNA, 8 bp, Unknown
  misc_feature (1)..( 8): Result.001 file - promoters75/1472799
atcatatt

SEQ ID NO: 77591 - DNA, 8 bp, Unknown
  misc_feature (1)..( 8): Result.001 file - promoters75/1472799
atcatatt

SEQ ID NO: 77592 - DNA, 8 bp, Unknown
  misc_feature (1)..( 8): Result.001 file - promoters75/1472799
atcatatt

SEQ ID NO: 77593 - DNA, 9 bp, Unknown
  misc_feature (1)..( 9): Result.001 file - promoters75/1472799
tttgtagtg

SEQ ID NO: 77594 - DNA, 9 bp, Unknown
  misc_feature (1)..( 9): Result.001 file - promoters75/1472799
attgtagct

SEQ ID NO: 77595 - DNA, 9 bp, Unknown
  misc_feature (1)..( 9): Result.001 file - promoters75/1472799
tttgttgtg

SEQ ID NO: 77596 - DNA, 8 bp, Unknown
  misc_feature (1)..( 8): Result.001 file - promoters75/1472799
tgatttgt

SEQ ID NO: 77597 - DNA, 8 bp, Unknown
  misc_feature (1)..( 8): Result.001 file - promoters75/1472799
agatatgt

SEQ ID NO: 77598 - DNA, 8 bp, Unknown
  misc_feature (1)..( 8): Result.001 file - promoters75/1472799
tgatttgg

SEQ ID NO: 77599 - DNA, 7 bp, Unknown
  misc_feature (1)..( 7): Result.001 file - promoters75/1472799
gtttgtt

SEQ ID NO: 77600 - DNA, 7 bp, Unknown
  misc_feature (1)..( 7): Result.001 file - promoters75/1472799
gtttgtg

SEQ ID NO: 77601 - DNA, 7 bp, Unknown
  misc_feature (1)..( 7): Result.001 file - promoters75/1472799
ttttgtt

SEQ ID NO: 77602 - DNA, 8 bp, Unknown
  misc_feature (1)..( 8): Result.001 file - promoters75/1472799
tgtttgtt

SEQ ID NO: 77603 - DNA, 8 bp, Unknown
  misc_feature (1)..( 8): Result.001 file - promoters75/1472799
gatttgtt

SEQ ID NO: 77604 - DNA, 8 bp, Unknown
  misc_feature (1)..( 8): Result.001 file - promoters75/1481696
gatatgta

SEQ ID NO: 77605 - DNA, 7 bp, Unknown
  misc_feature (1)..( 7): Result.001 file - promoters75/1481696
tttactt

SEQ ID NO: 77606 - DNA, 7 bp, Unknown
  misc_feature (1)..( 7): Result.001 file - promoters75/1481696
tttgctt

SEQ ID NO: 77607 - DNA, 7 bp, Unknown
  misc_feature (1)..( 7): Result.001 file - promoters75/1481696
attactt

SEQ ID NO: 77608 - DNA, 7 bp, Unknown
  misc_feature (1)..( 7): Result.001 file - promoters75/1481696
tttgctg

SEQ ID NO: 77609 - DNA, 10 bp, Unknown
  misc_feature (1)..( 10): Result.001 file - promoters75/1481696
caaaagaatc

SEQ ID NO: 77610 - DNA, 10 bp, Unknown
  misc_feature (1)..( 10): Result.001 file - promoters75/1481696
caaaacaatt

SEQ ID NO: 77611 - DNA, 10 bp, Unknown
  misc_feature (1)..( 10): Result.001 file - promoters75/1481696
acaaagaaac

SEQ ID NO: 77612 - DNA, 10 bp, Unknown
  misc_feature (1)..( 10): Result.001 file - promoters75/1481696
attaagaaaa

SEQ ID NO: 77613 - DNA, 12 bp, Unknown
  misc_feature (1)..( 12): Result.001 file - promoters75/1481696
tttattcaatcc

SEQ ID NO: 77614 - DNA, 12 bp, Unknown
  misc_feature (1)..( 12): Result.001 file - promoters75/1481696
cttatgcaaagc

SEQ ID NO: 77615 - DNA, 12 bp, Unknown
  misc_feature (1)..( 12): Result.001 file - promoters75/1481696
tatatttaattt

SEQ ID NO: 77616 - DNA, 12 bp, Unknown
  misc_feature (1)..( 12): Result.001 file - promoters75/1481696
tatatttacttt

SEQ ID NO: 77617 - DNA, 8 bp, Unknown
  misc_feature (1)..( 8): Result.001 file - promoters75/1481696
tttcttac

SEQ ID NO: 77618 - DNA, 8 bp, Unknown
  misc_feature (1)..( 8): Result.001 file - promoters75/1481696
tttattat

SEQ ID NO: 77619 - DNA, 9 bp, Unknown
  misc_feature (1)..( 9): Result.001 file - promoters75/1481696
tttgattaa

SEQ ID NO: 77620 - DNA, 9 bp, Unknown
  misc_feature (1)..( 9): Result.001 file - promoters75/1481696
tctgattaa

SEQ ID NO: 77621 - DNA, 9 bp, Unknown
  misc_feature (1)..( 9): Result.001 file - promoters75/1481696
tgatattat

SEQ ID NO: 77622 - DNA, 15 bp, Unknown
  misc_feature (1)..( 15): Result.001 file - promoters75/1481696
tttgcttctttggat

SEQ ID NO: 77623 - DNA, 15 bp, Unknown
  misc_feature (1)..( 15): Result.001 file - promoters75/1481696
gatggatctttagat

SEQ ID NO: 77624 - DNA, 15 bp, Unknown
  misc_feature (1)..( 15): Result.001 file - promoters75/1481696
tgctgatgtttgatt

SEQ ID NO: 77625 - DNA, 15 bp, Unknown
  misc_feature (1)..( 15): Result.001 file - promoters75/1532660
tgctaatgtgaactt

SEQ ID NO: 77626 - DNA, 7 bp, Unknown
  misc_feature (1)..( 7): Result.001 file - promoters75/1532660
ggagcaa

SEQ ID NO: 77627 - DNA, 7 bp, Unknown
  misc_feature (1)..( 7): Result.001 file - promoters75/1532660
cgagcaa

SEQ ID NO: 77628 - DNA, 7 bp, Unknown
  misc_feature (1)..( 7): Result.001 file - promoters75/1532660
ggatcaa

SEQ ID NO: 77629 - DNA, 7 bp, Unknown
  misc_feature (1)..( 7): Result.001 file - promoters75/1532660
aaaattt

SEQ ID NO: 77630 - DNA, 7 bp, Unknown
  misc_feature (1)..( 7): Result.001 file - promoters75/1532660
taaattt

SEQ ID NO: 77631 - DNA, 7 bp, Unknown
  misc_feature (1)..( 7): Result.001 file - promoters75/1532660
aaaattt

SEQ ID NO: 77632 - DNA, 7 bp, Unknown
  misc_feature (1)..( 7): Result.001 file - promoters75/1532660
aaaaaat

SEQ ID NO: 77633 - DNA, 7 bp, Unknown
  misc_feature (1)..( 7): Result.001 file - promoters75/1532660
aaagaat

SEQ ID NO: 77634 - DNA, 7 bp, Unknown
  misc_feature (1)..( 7): Result.001 file - promoters75/1532660
aaagaaa

SEQ ID NO: 77635 - DNA, 10 bp, Unknown
  misc_feature (1)..( 10): Result.001 file - promoters75/1532660
caaataattt

SEQ ID NO: 77636 - DNA, 10 bp, Unknown
  misc_feature (1)..( 10): Result.001 file - promoters75/1532660
gatttaattt

SEQ ID NO: 77637 - DNA, 10 bp, Unknown
  misc_feature (1)..( 10): Result.001 file - promoters75/1532660
caaaaaattg

SEQ ID NO: 77638 - DNA, 7 bp, Unknown
  misc_feature (1)..( 7): Result.001 file - promoters75/1532660
aagaagg

SEQ ID NO: 77639 - DNA, 7 bp, Unknown
  misc_feature (1)..( 7): Result.001 file - promoters75/1532660
aagaaga

SEQ ID NO: 77640 - DNA, 7 bp, Unknown
  misc_feature (1)..( 7): Result.001 file - promoters75/1532937
aagaagg

SEQ ID NO: 77641 - DNA, 7 bp, Unknown
  misc_feature (1)..( 7): Result.001 file - promoters75/1532937
cttcaaa

SEQ ID NO: 77642 - DNA, 7 bp, Unknown
  misc_feature (1)..( 7): Result.001 file - promoters75/1532937
cttcaaa

SEQ ID NO: 77643 - DNA, 7 bp, Unknown
  misc_feature (1)..( 7): Result.001 file - promoters75/1532937
ctttaaa

SEQ ID NO: 77644 - DNA, 6 bp, Unknown
  misc_feature (1)..( 6): Result.001 file - promoters75/1532937
aataaa

SEQ ID NO: 77645 - DNA, 6 bp, Unknown
  misc_feature (1)..( 6): Result.001 file - promoters75/1532937
aataaa

SEQ ID NO: 77646 - DNA, 6 bp, Unknown
  misc_feature (1)..( 6): Result.001 file - promoters75/1532937
aataaa

SEQ ID NO: 77647 - DNA, 10 bp, Unknown
  misc_feature (1)..( 10): Result.001 file - promoters75/1532937
ttcttcttct

SEQ ID NO: 77648 - DNA, 10 bp, Unknown
  misc_feature (1)..( 10): Result.001 file - promoters75/1532937
ctcttcttct

SEQ ID NO: 77649 - DNA, 10 bp, Unknown
  misc_feature (1)..( 10): Result.001 file - promoters75/1532937
ttcctcttaa

SEQ ID NO: 77650 - DNA, 12 bp, Unknown
  misc_feature (1)..( 12): Result.001 file - promoters75/1532937
aaaaaacttcca

SEQ ID NO: 77651 - DNA, 12 bp, Unknown
  misc_feature (1)..( 12): Result.001 file - promoters75/1532937
aaaaaaattcca

SEQ ID NO: 77652 - DNA, 12 bp, Unknown
  misc_feature (1)..( 12): Result.001 file - promoters75/1532937
agaaaatttcta

SEQ ID NO: 77653 - DNA, 10 bp, Unknown
  misc_feature (1)..( 10): Result.001 file - promoters75/1532937
gagtttaggt

SEQ ID NO: 77654 - DNA, 10 bp, Unknown
  misc_feature (1)..( 10): Result.001 file - promoters75/1532937
aatttttggt

SEQ ID NO: 77655 - DNA, 10 bp, Unknown
  misc_feature (1)..( 10): Result.001 file - promoters75/1532937
ttgttttgtc

SEQ ID NO: 77656 - DNA, 8 bp, Unknown
  misc_feature (1)..( 8): Result.001 file - promoters75/1532937
aatagtta

SEQ ID NO: 77657 - DNA, 8 bp, Unknown
  misc_feature (1)..( 8): Result.001 file - promoters75/1532937
aattgttt

SEQ ID NO: 77658 - DNA, 9 bp, Unknown
  misc_feature (1)..( 9): Result.001 file - promoters75/1532948
ttttggttt

SEQ ID NO: 77659 - DNA, 8 bp, Unknown
  misc_feature (1)..( 8): Result.001 file - promoters75/1532948
ttttgtaa

SEQ ID NO: 77660 - DNA, 8 bp, Unknown
  misc_feature (1)..( 8): Result.001 file - promoters75/1532948
ctttgtaa

SEQ ID NO: 77661 - DNA, 8 bp, Unknown
  misc_feature (1)..( 8): Result.001 file - promoters75/1532948
ttttgttg

SEQ ID NO: 77662 - DNA, 8 bp, Unknown
  misc_feature (1)..( 8): Result.001 file - promoters75/1532948
accaataa

SEQ ID NO: 77663 - DNA, 8 bp, Unknown
  misc_feature (1)..( 8): Result.001 file - promoters75/1532948
cccactaa

SEQ ID NO: 77664 - DNA, 8 bp, Unknown
  misc_feature (1)..( 8): Result.001 file - promoters75/1557606
cccactag

SEQ ID NO: 77665 - DNA, 9 bp, Unknown
  misc_feature (1)..( 9): Result.001 file - promoters75/1557606
ttgacgacg

SEQ ID NO: 77666 - DNA, 9 bp, Unknown
  misc_feature (1)..( 9): Result.001 file - promoters75/1557606
ttggcgaga

SEQ ID NO: 77667 - DNA, 9 bp, Unknown
  misc_feature (1)..( 9): Result.001 file - promoters75/1557769
ccggcaaga

SEQ ID NO: 77668 - DNA, 10 bp, Unknown
  misc_feature (1)..( 10): Result.001 file - promoters75/1557769
aaacttaaga

SEQ ID NO: 77669 - DNA, 10 bp, Unknown
  misc_feature (1)..( 10): Result.001 file - promoters75/1557769
gaacgtaaga

SEQ ID NO: 77670 - DNA, 10 bp, Unknown
  misc_feature (1)..( 10): Result.001 file - promoters75/1557769
aaaattaaat

SEQ ID NO: 77671 - DNA, 8 bp, Unknown
  misc_feature (1)..( 8): Result.001 file - promoters75/1557769
atttttct

SEQ ID NO: 77672 - DNA, 8 bp, Unknown
  misc_feature (1)..( 8): Result.001 file - promoters75/1557769
attttttt

SEQ ID NO: 77673 - DNA, 8 bp, Unknown
  misc_feature (1)..( 8): Result.001 file - promoters75/1557769
cttttttt

SEQ ID NO: 77674 - DNA, 8 bp, Unknown
  misc_feature (1)..( 8): Result.001 file - promoters75/1557769
gatattac

SEQ ID NO: 77675 - DNA, 8 bp, Unknown
  misc_feature (1)..( 8): Result.001 file - promoters75/1557769
gatattaa

SEQ ID NO: 77676 - DNA, 8 bp, Unknown
  misc_feature (1)..( 8): Result.001 file - promoters75/1567092
aataataa

SEQ ID NO: 77677 - DNA, 12 bp, Unknown
  misc_feature (1)..( 12): Result.001 file - promoters75/1567092
caacaatgtaca

SEQ ID NO: 77678 - DNA, 12 bp, Unknown
  misc_feature (1)..( 12): Result.001 file - promoters75/1567092
caataatttaca

SEQ ID NO: 77679 - DNA, 12 bp, Unknown
  misc_feature (1)..( 12): Result.001 file - promoters75/1567092
tgaaaatttata

SEQ ID NO: 77680 - DNA, 9 bp, Unknown
  misc_feature (1)..( 9): Result.001 file - promoters75/1567092
ttgcttaca

SEQ ID NO: 77681 - DNA, 9 bp, Unknown
  misc_feature (1)..( 9): Result.001 file - promoters75/1567092
ttgtttata

SEQ ID NO: 77682 - DNA, 9 bp, Unknown
  misc_feature (1)..( 9): Result.001 file - promoters75/1567092
atgtttaat

SEQ ID NO: 77683 - DNA, 9 bp, Unknown
  misc_feature (1)..( 9): Result.001 file - promoters75/1567092
gagttcata

SEQ ID NO: 77684 - DNA, 10 bp, Unknown
  misc_feature (1)..( 10): Result.001 file - promoters75/1567092
tatctatatg

SEQ ID NO: 77685 - DNA, 10 bp, Unknown
  misc_feature (1)..( 10): Result.001 file - promoters75/1567092
tgattatatg

SEQ ID NO: 77686 - DNA, 10 bp, Unknown
  misc_feature (1)..( 10): Result.001 file - promoters75/1567092
tgagtatatt

SEQ ID NO: 77687 - DNA, 8 bp, Unknown
  misc_feature (1)..( 8): Result.001 file - promoters75/1567092
aaactagc

SEQ ID NO: 77688 - DNA, 8 bp, Unknown
  misc_feature (1)..( 8): Result.001 file - promoters75/1567092
aaactaat

SEQ ID NO: 77689 - DNA, 8 bp, Unknown
  misc_feature (1)..( 8): Result.001 file - promoters75/1567092
caacaaat

SEQ ID NO: 77690 - DNA, 8 bp, Unknown
  misc_feature (1)..( 8): Result.001 file - promoters75/1567092
tttgtttg

SEQ ID NO: 77691 - DNA, 8 bp, Unknown
  misc_feature (1)..( 8): Result.001 file - promoters75/1567092
aatgtttg

SEQ ID NO: 77692 - DNA, 8 bp, Unknown
  misc_feature (1)..( 8): Result.001 file - promoters75/1567092
tttatttt

SEQ ID NO: 77693 - DNA, 8 bp, Unknown
  misc_feature (1)..( 8): Result.001 file - promoters75/1567092
ttttaatt

SEQ ID NO: 77694 - DNA, 8 bp, Unknown
  misc_feature (1)..( 8): Result.001 file - promoters75/1567092
tttgaatt

SEQ ID NO: 77695 - DNA, 8 bp, Unknown
  misc_feature (1)..( 8): Result.001 file - promoters75/1567092
tttggatt

SEQ ID NO: 77696 - DNA, 6 bp, Unknown
  misc_feature (1)..( 6): Result.001 file - promoters75/1567092
attttt

SEQ ID NO: 77697 - DNA, 6 bp, Unknown
  misc_feature (1)..( 6): Result.001 file - promoters75/1567092
attttt

SEQ ID NO: 77698 - DNA, 6 bp, Unknown
  misc_feature (1)..( 6): Result.001 file - promoters75/1567092
attttt

SEQ ID NO: 77699 - DNA, 8 bp, Unknown
  misc_feature (1)..( 8): Result.001 file - promoters75/1567092
atattagt

SEQ ID NO: 77700 - DNA, 8 bp, Unknown
  misc_feature (1)..( 8): Result.001 file - promoters75/1567092
atatgagt

SEQ ID NO: 77701 - DNA, 8 bp, Unknown
  misc_feature (1)..( 8): Result.001 file - promoters75/1567547
atattagt

SEQ ID NO: 77702 - DNA, 8 bp, Unknown
  misc_feature (1)..( 8): Result.001 file - promoters75/1567547
agtattag

SEQ ID NO: 77703 - DNA, 8 bp, Unknown
  misc_feature (1)..( 8): Result.001 file - promoters75/1567547
agttttac

SEQ ID NO: 77704 - DNA, 8 bp, Unknown
  misc_feature (1)..( 8): Result.001 file - promoters75/1567547
actattag

SEQ ID NO: 77705 - DNA, 8 bp, Unknown
  misc_feature (1)..( 8): Result.001 file - promoters75/1567547
actcttat

SEQ ID NO: 77706 - DNA, 8 bp, Unknown
  misc_feature (1)..( 8): Result.001 file - promoters75/1567547
cttcttat

SEQ ID NO: 77707 - DNA, 8 bp, Unknown
  misc_feature (1)..( 8): Result.001 file - promoters75/1567547
tctcttaa

SEQ ID NO: 77708 - DNA, 14 bp, Unknown
  misc_feature (1)..( 14): Result.001 file - promoters75/1567547
atttatatagataa

SEQ ID NO: 77709 - DNA, 14 bp, Unknown
  misc_feature (1)..( 14): Result.001 file - promoters75/1567547
taatatataaagga

SEQ ID NO: 77710 - DNA, 14 bp, Unknown
  misc_feature (1)..( 14): Result.001 file - promoters75/1567547
cactatatattaaa

SEQ ID NO: 77711 - DNA, 14 bp, Unknown
  misc_feature (1)..( 14): Result.001 file - promoters75/1567547
gtatataaagacgc

SEQ ID NO: 77712 - DNA, 14 bp, Unknown
  misc_feature (1)..( 14): Result.001 file - promoters75/1567547
actattaaagccgc

SEQ ID NO: 77713 - DNA, 14 bp, Unknown
  misc_feature (1)..( 14): Result.001 file - promoters75/1570116
cactataaattcaa

SEQ ID NO: 77714 - DNA, 9 bp, Unknown
  misc_feature (1)..( 9): Result.001 file - promoters75/1570116
ttagaaatt

SEQ ID NO: 77715 - DNA, 9 bp, Unknown
  misc_feature (1)..( 9): Result.001 file - promoters75/1570116
ttataaaag

SEQ ID NO: 77716 - DNA, 9 bp, Unknown
  misc_feature (1)..( 9): Result.001 file - promoters75/1570116
cgagacatt

SEQ ID NO: 77717 - DNA, 9 bp, Unknown
  misc_feature (1)..( 9): Result.001 file - promoters75/1570116
aaataaaac

SEQ ID NO: 77718 - DNA, 8 bp, Unknown
  misc_feature (1)..( 8): Result.001 file - promoters75/1570116
tattaaaa

SEQ ID NO: 77719 - DNA, 8 bp, Unknown
  misc_feature (1)..( 8): Result.001 file - promoters75/1570116
tatcaaaa

SEQ ID NO: 77720 - DNA, 8 bp, Unknown
  misc_feature (1)..( 8): Result.001 file - promoters75/1570116
aattaaaa

SEQ ID NO: 77721 - DNA, 8 bp, Unknown
  misc_feature (1)..( 8): Result.001 file - promoters75/1570116
taagaaaa

SEQ ID NO: 77722 - DNA, 7 bp, Unknown
  misc_feature (1)..( 7): Result.001 file - promoters75/1570116
aaatata

SEQ ID NO: 77723 - DNA, 7 bp, Unknown
  misc_feature (1)..( 7): Result.001 file - promoters75/1570116
aaaaata

SEQ ID NO: 77724 - DNA, 7 bp, Unknown
  misc_feature (1)..( 7): Result.001 file - promoters75/1570116
gaaaata

SEQ ID NO: 77725 - DNA, 7 bp, Unknown
  misc_feature (1)..( 7): Result.001 file - promoters75/1570116
caaaata

SEQ ID NO: 77726 - DNA, 7 bp, Unknown
  misc_feature (1)..( 7): Result.001 file - promoters75/1570116
aaaataa

SEQ ID NO: 77727 - DNA, 7 bp, Unknown
  misc_feature (1)..( 7): Result.001 file - promoters75/1570116
aaaataa

SEQ ID NO: 77728 - DNA, 7 bp, Unknown
  misc_feature (1)..( 7): Result.001 file - promoters75/1570116
aaaataa

SEQ ID NO: 77729 - DNA, 7 bp, Unknown
  misc_feature (1)..( 7): Result.001 file - promoters75/1570474
aaaatac

SEQ ID NO: 77730 - DNA, 10 bp, Unknown
  misc_feature (1)..( 10): Result.001 file - promoters75/1570474
aaatctttgt

SEQ ID NO: 77731 - DNA, 10 bp, Unknown
  misc_feature (1)..( 10): Result.001 file - promoters75/1570474
cgttctttgg

SEQ ID NO: 77732 - DNA, 10 bp, Unknown
  misc_feature (1)..( 10): Result.001 file - promoters75/1570474
cattctctgg

SEQ ID NO: 77733 - DNA, 10 bp, Unknown
  misc_feature (1)..( 10): Result.001 file - promoters75/1570474
cattccctga

SEQ ID NO: 77734 - DNA, 10 bp, Unknown
  misc_feature (1)..( 10): Result.001 file - promoters75/1570606
agttccatga

SEQ ID NO: 77735 - DNA, 14 bp, Unknown
  misc_feature (1)..( 14): Result.001 file - promoters75/1570606
gtttcattaacgtt

SEQ ID NO: 77736 - DNA, 14 bp, Unknown
  misc_feature (1)..( 14): Result.001 file - promoters75/1570606
gttacatttaagtt

SEQ ID NO: 77737 - DNA, 14 bp, Unknown
  misc_feature (1)..( 14): Result.001 file - promoters75/1570606
cttttattatttca

SEQ ID NO: 77738 - DNA, 14 bp, Unknown
  misc_feature (1)..( 14): Result.001 file - promoters75/1570606
caaacatttgaacc

SEQ ID NO: 77739 - DNA, 14 bp, Unknown
  misc_feature (1)..( 14): Result.001 file - promoters75/1570606
taaacttttaaata

SEQ ID NO: 77740 - DNA, 15 bp, Unknown
  misc_feature (1)..( 15): Result.001 file - promoters75/1570606
actatgatttaaaat

SEQ ID NO: 77741 - DNA, 15 bp, Unknown
  misc_feature (1)..( 15): Result.001 file - promoters75/1570606
agtgaaattgaaatt

SEQ ID NO: 77742 - DNA, 11 bp, Unknown
  misc_feature (1)..( 11): Result.001 file - promoters75/1570606
gagaaaagtaa

SEQ ID NO: 77743 - DNA, 11 bp, Unknown
  misc_feature (1)..( 11): Result.001 file - promoters75/1570606
aagaaaaataa

SEQ ID NO: 77744 - DNA, 11 bp, Unknown
  misc_feature (1)..( 11): Result.001 file - promoters75/1570606
aataaaagttt

SEQ ID NO: 77745 - DNA, 11 bp, Unknown
  misc_feature (1)..( 11): Result.001 file - promoters75/1570606
gagaaaataaa

SEQ ID NO: 77746 - DNA, 11 bp, Unknown
  misc_feature (1)..( 11): Result.001 file - promoters75/1570606
cttaaagatat

SEQ ID NO: 77747 - DNA, 11 bp, Unknown
  misc_feature (1)..( 11): Result.001 file - promoters75/1570606
tataaaaattt

SEQ ID NO: 77748 - DNA, 8 bp, Unknown
  misc_feature (1)..( 8): Result.001 file - promoters75/1570606
tatatttg

SEQ ID NO: 77749 - DNA, 8 bp, Unknown
  misc_feature (1)..( 8): Result.001 file - promoters75/1570606
tatacttg

SEQ ID NO: 77750 - DNA, 8 bp, Unknown
  misc_feature (1)..( 8): Result.001 file - promoters75/1570606
catatttg

SEQ ID NO: 77751 - DNA, 8 bp, Unknown
  misc_feature (1)..( 8): Result.001 file - promoters75/1570606
aatatttt

SEQ ID NO: 77752 - DNA, 8 bp, Unknown
  misc_feature (1)..( 8): Result.001 file - promoters75/1570606
tatattta

SEQ ID NO: 77753 - DNA, 8 bp, Unknown
  misc_feature (1)..( 8): Result.001 file - promoters75/1570606
aatatttt

SEQ ID NO: 77754 - DNA, 10 bp, Unknown
  misc_feature (1)..( 10): Result.001 file - promoters75/1570606
tttaaagata

SEQ ID NO: 77755 - DNA, 10 bp, Unknown
  misc_feature (1)..( 10): Result.001 file - promoters75/1570606
agtaaaaata

SEQ ID NO: 77756 - DNA, 10 bp, Unknown
  misc_feature (1)..( 10): Result.001 file - promoters75/1570606
tagaaaaatg

SEQ ID NO: 77757 - DNA, 10 bp, Unknown
  misc_feature (1)..( 10): Result.001 file - promoters75/1570606
ttaaaatata

SEQ ID NO: 77758 - DNA, 10 bp, Unknown
  misc_feature (1)..( 10): Result.001 file - promoters75/1570606
ctgaaaaatt

SEQ ID NO: 77759 - DNA, 10 bp, Unknown
  misc_feature (1)..( 10): Result.001 file - promoters75/1570606
agtgaaattg

SEQ ID NO: 77760 - DNA, 9 bp, Unknown
  misc_feature (1)..( 9): Result.001 file - promoters75/1570606
ttaatttat

SEQ ID NO: 77761 - DNA, 9 bp, Unknown
  misc_feature (1)..( 9): Result.001 file - promoters75/1570606
ttactttta

SEQ ID NO: 77762 - DNA, 9 bp, Unknown
  misc_feature (1)..( 9): Result.001 file - promoters75/1570606
aaaatatat

SEQ ID NO: 77763 - DNA, 9 bp, Unknown
  misc_feature (1)..( 9): Result.001 file - promoters75/1570606
taaaaatac

SEQ ID NO: 77764 - DNA, 9 bp, Unknown
  misc_feature (1)..( 9): Result.001 file - promoters75/1570606
gaaaaattc

SEQ ID NO: 77765 - DNA, 9 bp, Unknown
  misc_feature (1)..( 9): Result.001 file - promoters75/1570622
aaactttta

SEQ ID NO: 77766 - DNA, 9 bp, Unknown
  misc_feature (1)..( 9): Result.001 file - promoters75/1570622
tcgtatcat

SEQ ID NO: 77767 - DNA, 9 bp, Unknown
  misc_feature (1)..( 9): Result.001 file - promoters75/1570622
tcgtttcaa

SEQ ID NO: 77768 - DNA, 9 bp, Unknown
  misc_feature (1)..( 9): Result.001 file - promoters75/1570622
ctatttcaa

SEQ ID NO: 77769 - DNA, 8 bp, Unknown
  misc_feature (1)..( 8): Result.001 file - promoters75/1570622
aaacataa

SEQ ID NO: 77770 - DNA, 8 bp, Unknown
  misc_feature (1)..( 8): Result.001 file - promoters75/1570622
aaaaatac

SEQ ID NO: 77771 - DNA, 8 bp, Unknown
  misc_feature (1)..( 8): Result.001 file - promoters75/1570622
caacttaa

SEQ ID NO: 77772 - DNA, 19 bp, Unknown
  misc_feature (1)..( 19): Result.001 file - promoters75/1570622
taatacaattgagagataa

SEQ ID NO: 77773 - DNA, 19 bp, Unknown
  misc_feature (1)..( 19): Result.001 file - promoters75/1570622
taaaacaaaacacaccctt

SEQ ID NO: 77774 - DNA, 19 bp, Unknown
  misc_feature (1)..( 19): Result.001 file - promoters75/1570622
aaaaaaaaaaaaggaaaac

SEQ ID NO: 77775 - DNA, 9 bp, Unknown
  misc_feature (1)..( 9): Result.001 file - promoters75/1570622
tacttttta

SEQ ID NO: 77776 - DNA, 9 bp, Unknown
  misc_feature (1)..( 9): Result.001 file - promoters75/1570622
tactttttt

SEQ ID NO: 77777 - DNA, 10 bp, Unknown
  misc_feature (1)..( 10): Result.001 file - promoters75/1570622
gacttctttt

SEQ ID NO: 77778 - DNA, 9 bp, Unknown
  misc_feature (1)..( 9): Result.001 file - promoters75/1570622
cgggattaa

SEQ ID NO: 77779 - DNA, 9 bp, Unknown
  misc_feature (1)..( 9): Result.001 file - promoters75/1570622
tatgattaa

SEQ ID NO: 77780 - DNA, 9 bp, Unknown
  misc_feature (1)..( 9): Result.001 file - promoters75/1570622
tatgagtaa

SEQ ID NO: 77781 - DNA, 9 bp, Unknown
  misc_feature (1)..( 9): Result.001 file - promoters75/1570622
acttcatat

SEQ ID NO: 77782 - DNA, 9 bp, Unknown
  misc_feature (1)..( 9): Result.001 file - promoters75/1570622
tcttcttat

SEQ ID NO: 77783 - DNA, 9 bp, Unknown
  misc_feature (1)..( 9): Result.001 file - promoters75/1570622
tcttcttca

SEQ ID NO: 77784 - DNA, 9 bp, Unknown
  misc_feature (1)..( 9): Result.001 file - promoters75/1570622
tttgacaac

SEQ ID NO: 77785 - DNA, 9 bp, Unknown
  misc_feature (1)..( 9): Result.001 file - promoters75/1570622
tttaacaat

SEQ ID NO: 77786 - DNA, 9 bp, Unknown
  misc_feature (1)..( 9): Result.001 file - promoters75/1570966
gataagaat

SEQ ID NO: 77787 - DNA, 7 bp, Unknown
  misc_feature (1)..( 7): Result.001 file - promoters75/1570966
attttta

SEQ ID NO: 77788 - DNA, 7 bp, Unknown
  misc_feature (1)..( 7): Result.001 file - promoters75/1570966
atttttt

SEQ ID NO: 77789 - DNA, 7 bp, Unknown
  misc_feature (1)..( 7): Result.001 file - promoters75/1570966
attttta

SEQ ID NO: 77790 - DNA, 9 bp, Unknown
  misc_feature (1)..( 9): Result.001 file - promoters75/1570966
agtcaactt

SEQ ID NO: 77791 - DNA, 9 bp, Unknown
  misc_feature (1)..( 9): Result.001 file - promoters75/1570966
agttaactt

SEQ ID NO: 77792 - DNA, 9 bp, Unknown
  misc_feature (1)..( 9): Result.001 file - promoters75/1580932
aattaactt

SEQ ID NO: 77793 - DNA, 8 bp, Unknown
  misc_feature (1)..( 8): Result.001 file - promoters75/1580932
aataaacg

SEQ ID NO: 77794 - DNA, 8 bp, Unknown
  misc_feature (1)..( 8): Result.001 file - promoters75/1580932
aataaagg

SEQ ID NO: 77795 - DNA, 8 bp, Unknown
  misc_feature (1)..( 8): Result.001 file - promoters75/1580932
aaaaaaaa

SEQ ID NO: 77796 - DNA, 8 bp, Unknown
  misc_feature (1)..( 8): Result.001 file - promoters75/1580932
tcatttaa

SEQ ID NO: 77797 - DNA, 8 bp, Unknown
  misc_feature (1)..( 8): Result.001 file - promoters75/1580932
caatttaa

SEQ ID NO: 77798 - DNA, 8 bp, Unknown
  misc_feature (1)..( 8): Result.001 file - promoters75/1580932
tcatttat

SEQ ID NO: 77799 - DNA, 8 bp, Unknown
  misc_feature (1)..( 8): Result.001 file - promoters75/1580932
gaaaaccc

SEQ ID NO: 77800 - DNA, 8 bp, Unknown
  misc_feature (1)..( 8): Result.001 file - promoters75/1580932
aaaaacca

SEQ ID NO: 77801 - DNA, 8 bp, Unknown
  misc_feature (1)..( 8): Result.001 file - promoters75/1595794
aaaaacct

SEQ ID NO: 77802 - DNA, 8 bp, Unknown
  misc_feature (1)..( 8): Result.001 file - promoters75/1595794
taatgtct

SEQ ID NO: 77803 - DNA, 8 bp, Unknown
  misc_feature (1)..( 8): Result.001 file - promoters75/1595794
aaatgtct

SEQ ID NO: 77804 - DNA, 8 bp, Unknown
  misc_feature (1)..( 8): Result.001 file - promoters75/1595794
aaatgtat

SEQ ID NO: 77805 - DNA, 8 bp, Unknown
  misc_feature (1)..( 8): Result.001 file - promoters75/1595794
aaaagtaa

SEQ ID NO: 77806 - DNA, 10 bp, Unknown
  misc_feature (1)..( 10): Result.001 file - promoters75/1595794
ctaaaataat

SEQ ID NO: 77807 - DNA, 10 bp, Unknown
  misc_feature (1)..( 10): Result.001 file - promoters75/1595794
acaaagtaaa

SEQ ID NO: 77808 - DNA, 10 bp, Unknown
  misc_feature (1)..( 10): Result.001 file - promoters75/1595794
tggtaataat

SEQ ID NO: 77809 - DNA, 10 bp, Unknown
  misc_feature (1)..( 10): Result.001 file - promoters75/1595794
aaaaaataac

SEQ ID NO: 77810 - DNA, 11 bp, Unknown
  misc_feature (1)..( 11): Result.001 file - promoters75/1595794
cagctaaactt

SEQ ID NO: 77811 - DNA, 11 bp, Unknown
  misc_feature (1)..( 11): Result.001 file - promoters75/1595794
taattaatctt

SEQ ID NO: 77812 - DNA, 11 bp, Unknown
  misc_feature (1)..( 11): Result.001 file - promoters75/1595794
aatttattctg

SEQ ID NO: 77813 - DNA, 11 bp, Unknown
  misc_feature (1)..( 11): Result.001 file - promoters75/1595794
aatttatttct

SEQ ID NO: 77814 - DNA, 8 bp, Unknown
  misc_feature (1)..( 8): Result.001 file - promoters75/1595794
agtctttc

SEQ ID NO: 77815 - DNA, 8 bp, Unknown
  misc_feature (1)..( 8): Result.001 file - promoters75/1595794
tgtctttt

SEQ ID NO: 77816 - DNA, 9 bp, Unknown
  misc_feature (1)..( 9): Result.001 file - promoters75/1595794
tgtctcttg

SEQ ID NO: 77817 - DNA, 9 bp, Unknown
  misc_feature (1)..( 9): Result.001 file - promoters75/1595794
agtctttga

SEQ ID NO: 77818 - DNA, 11 bp, Unknown
  misc_feature (1)..( 11): Result.001 file - promoters75/1595794
catttgtttca

SEQ ID NO: 77819 - DNA, 11 bp, Unknown
  misc_feature (1)..( 11): Result.001 file - promoters75/1595794
tctttgtatca

SEQ ID NO: 77820 - DNA, 11 bp, Unknown
  misc_feature (1)..( 11): Result.001 file - promoters75/1595794
tctctgtggac

SEQ ID NO: 77821 - DNA, 11 bp, Unknown
  misc_feature (1)..( 11): Result.001 file - promoters75/1595794
catttctatag

SEQ ID NO: 77822 - DNA, 11 bp, Unknown
  misc_feature (1)..( 11): Result.001 file - promoters75/1595794
catctctgtgg

SEQ ID NO: 77823 - DNA, 11 bp, Unknown
  misc_feature (1)..( 11): Result.001 file - promoters75/1595794
catttctatag

SEQ ID NO: 77824 - DNA, 11 bp, Unknown
  misc_feature (1)..( 11): Result.001 file - promoters75/1595794
tatgtctttgt

SEQ ID NO: 77825 - DNA, 11 bp, Unknown
  misc_feature (1)..( 11): Result.001 file - promoters75/1595794
aatttctctac

SEQ ID NO: 77826 - DNA, 11 bp, Unknown
  misc_feature (1)..( 11): Result.001 file - promoters75/1595794
aaacaattcaa

SEQ ID NO: 77827 - DNA, 11 bp, Unknown
  misc_feature (1)..( 11): Result.001 file - promoters75/1595794
aagtaattcaa

SEQ ID NO: 77828 - DNA, 11 bp, Unknown
  misc_feature (1)..( 11): Result.001 file - promoters75/1595794
aaataattctc

SEQ ID NO: 77829 - DNA, 11 bp, Unknown
  misc_feature (1)..( 11): Result.001 file - promoters75/1595794
aaaaaatcaaa

SEQ ID NO: 77830 - DNA, 9 bp, Unknown
  misc_feature (1)..( 9): Result.001 file - promoters75/1595794
attttctta

SEQ ID NO: 77831 - DNA, 9 bp, Unknown
  misc_feature (1)..( 9): Result.001 file - promoters75/1595794
actttttta

SEQ ID NO: 77832 - DNA, 9 bp, Unknown
  misc_feature (1)..( 9): Result.001 file - promoters75/1595794
attttcttg

SEQ ID NO: 77833 - DNA, 9 bp, Unknown
  misc_feature (1)..( 9): Result.001 file - promoters75/1595794
tggttttta

SEQ ID NO: 77834 - DNA, 9 bp, Unknown
  misc_feature (1)..( 9): Result.001 file - promoters75/1595794
gaaacaaag

SEQ ID NO: 77835 - DNA, 9 bp, Unknown
  misc_feature (1)..( 9): Result.001 file - promoters75/1595794
aaaacaaaa

SEQ ID NO: 77836 - DNA, 9 bp, Unknown
  misc_feature (1)..( 9): Result.001 file - promoters75/1595794
aaaataaaa

SEQ ID NO: 77837 - DNA, 9 bp, Unknown
  misc_feature (1)..( 9): Result.001 file - promoters75/1662827
tcgacaaaa

SEQ ID NO: 77838 - DNA, 10 bp, Unknown
  misc_feature (1)..( 10): Result.001 file - promoters75/1662827
ttttcttaat

SEQ ID NO: 77839 - DNA, 10 bp, Unknown
  misc_feature (1)..( 10): Result.001 file - promoters75/1662827
ttttcataat

SEQ ID NO: 77840 - DNA, 10 bp, Unknown
  misc_feature (1)..( 10): Result.001 file - promoters75/1662827
ctttcattca

SEQ ID NO: 77841 - DNA, 10 bp, Unknown
  misc_feature (1)..( 10): Result.001 file - promoters75/1662827
agttaataaa

SEQ ID NO: 77842 - DNA, 10 bp, Unknown
  misc_feature (1)..( 10): Result.001 file - promoters75/1662827
agttaatatt

SEQ ID NO: 77843 - DNA, 10 bp, Unknown
  misc_feature (1)..( 10): Result.001 file - promoters75/1662827
ttgtaacaaa

SEQ ID NO: 77844 - DNA, 6 bp, Unknown
  misc_feature (1)..( 6): Result.001 file - promoters75/1662827
tacatt

SEQ ID NO: 77845 - DNA, 6 bp, Unknown
  misc_feature (1)..( 6): Result.001 file - promoters75/1662827
tacatt

SEQ ID NO: 77846 - DNA, 6 bp, Unknown
  misc_feature (1)..( 6): Result.001 file - promoters75/1662827
tacatt

SEQ ID NO: 77847 - DNA, 7 bp, Unknown
  misc_feature (1)..( 7): Result.001 file - promoters75/1662827
tttttaa

SEQ ID NO: 77848 - DNA, 7 bp, Unknown
  misc_feature (1)..( 7): Result.001 file - promoters75/1662827
tttttac

SEQ ID NO: 77849 - DNA, 7 bp, Unknown
  misc_feature (1)..( 7): Result.001 file - promoters75/1662827
attttac

SEQ ID NO: 77850 - DNA, 8 bp, Unknown
  misc_feature (1)..( 8): Result.001 file - promoters75/1662827
agacaaaa

SEQ ID NO: 77851 - DNA, 8 bp, Unknown
  misc_feature (1)..( 8): Result.001 file - promoters75/1662827
agaaaaaa

SEQ ID NO: 77852 - DNA, 8 bp, Unknown
  misc_feature (1)..( 8): Result.001 file - promoters75/1662917
aaacgaaa

SEQ ID NO: 77853 - DNA, 8 bp, Unknown
  misc_feature (1)..( 8): Result.001 file - promoters75/1662917
attagttc

SEQ ID NO: 77854 - DNA, 8 bp, Unknown
  misc_feature (1)..( 8): Result.001 file - promoters75/1662917
atttgtta

SEQ ID NO: 77855 - DNA, 8 bp, Unknown
  misc_feature (1)..( 8): Result.001 file - promoters75/1662917
aattgtta

SEQ ID NO: 77856 - DNA, 7 bp, Unknown
  misc_feature (1)..( 7): Result.001 file - promoters75/1662917
tttcaat

SEQ ID NO: 77857 - DNA, 7 bp, Unknown
  misc_feature (1)..( 7): Result.001 file - promoters75/1662917
ttttaat

SEQ ID NO: 77858 - DNA, 7 bp, Unknown
  misc_feature (1)..( 7): Result.001 file - promoters75/1662917
ttttaaa

SEQ ID NO: 77859 - DNA, 8 bp, Unknown
  misc_feature (1)..( 8): Result.001 file - promoters75/1662917
aaattcaa

SEQ ID NO: 77860 - DNA, 8 bp, Unknown
  misc_feature (1)..( 8): Result.001 file - promoters75/1662917
aaattctc

SEQ ID NO: 77861 - DNA, 8 bp, Unknown
  misc_feature (1)..( 8): Result.001 file - promoters75/1662917
aaatcctc

SEQ ID NO: 77862 - DNA, 11 bp, Unknown
  misc_feature (1)..( 11): Result.001 file - promoters75/1662917
cttataattat

SEQ ID NO: 77863 - DNA, 11 bp, Unknown
  misc_feature (1)..( 11): Result.001 file - promoters75/1662917
tttataagtat

SEQ ID NO: 77864 - DNA, 11 bp, Unknown
  misc_feature (1)..( 11): Result.001 file - promoters75/1663221
tttgtaacttc

SEQ ID NO: 77865 - DNA, 8 bp, Unknown
  misc_feature (1)..( 8): Result.001 file - promoters75/1663221
gataattt

SEQ ID NO: 77866 - DNA, 8 bp, Unknown
  misc_feature (1)..( 8): Result.001 file - promoters75/1663221
actaattt

SEQ ID NO: 77867 - DNA, 8 bp, Unknown
  misc_feature (1)..( 8): Result.001 file - promoters75/1663221
gattattt

SEQ ID NO: 77868 - DNA, 8 bp, Unknown
  misc_feature (1)..( 8): Result.001 file - promoters75/1663221
agagaagg

SEQ ID NO: 77869 - DNA, 8 bp, Unknown
  misc_feature (1)..( 8): Result.001 file - promoters75/1663221
tgagaagg

SEQ ID NO: 77870 - DNA, 8 bp, Unknown
  misc_feature (1)..( 8): Result.001 file - promoters75/1663221
agagaatt

SEQ ID NO: 77871 - DNA, 11 bp, Unknown
  misc_feature (1)..( 11): Result.001 file - promoters75/1663221
agtatctcaaa

SEQ ID NO: 77872 - DNA, 11 bp, Unknown
  misc_feature (1)..( 11): Result.001 file - promoters75/1663221
agtatatcatt

SEQ ID NO: 77873 - DNA, 11 bp, Unknown
  misc_feature (1)..( 11): Result.001 file - promoters75/1664931
aacataacatt

SEQ ID NO: 77874 - DNA, 8 bp, Unknown
  misc_feature (1)..( 8): Result.001 file - promoters75/1664931
taagttta

SEQ ID NO: 77875 - DNA, 8 bp, Unknown
  misc_feature (1)..( 8): Result.001 file - promoters75/1664931
gaagtttc

SEQ ID NO: 77876 - DNA, 8 bp, Unknown
  misc_feature (1)..( 8): Result.001 file - promoters75/1664931
taatttta

SEQ ID NO: 77877 - DNA, 8 bp, Unknown
  misc_feature (1)..( 8): Result.001 file - promoters75/1664931
gaattttt

SEQ ID NO: 77878 - DNA, 8 bp, Unknown
  misc_feature (1)..( 8): Result.001 file - promoters75/1664931
gaactttt

SEQ ID NO: 77879 - DNA, 9 bp, Unknown
  misc_feature (1)..( 9): Result.001 file - promoters75/1664981
taacgtttg

SEQ ID NO: 77880 - DNA, 15 bp, Unknown
  misc_feature (1)..( 15): Result.001 file - promoters75/1664981
tatttatatagataa

SEQ ID NO: 77881 - DNA, 15 bp, Unknown
  misc_feature (1)..( 15): Result.001 file - promoters75/1664981
cctatataaagataa

SEQ ID NO: 77882 - DNA, 15 bp, Unknown
  misc_feature (1)..( 15): Result.001 file - promoters75/1664981
ttaatatataaagga

SEQ ID NO: 77883 - DNA, 15 bp, Unknown
  misc_feature (1)..( 15): Result.001 file - promoters75/1664981
gacatatatacttag

SEQ ID NO: 77884 - DNA, 15 bp, Unknown
  misc_feature (1)..( 15): Result.001 file - promoters75/1664981
agagaataaaaggtc

SEQ ID NO: 77885 - DNA, 15 bp, Unknown
  misc_feature (1)..( 15): Result.001 file - promoters75/1664981
gtactataaattctt

SEQ ID NO: 77886 - DNA, 15 bp, Unknown
  misc_feature (1)..( 15): Result.001 file - promoters75/1664981
tatttatgaatccat

SEQ ID NO: 77887 - DNA, 20 bp, Unknown
  misc_feature (1)..( 20): Result.001 file - promoters75/1664981
acatgaacacaaatcttctt

SEQ ID NO: 77888 - DNA, 20 bp, Unknown
  misc_feature (1)..( 20): Result.001 file - promoters75/1664981
aatcgaaaacaaataatcaa

SEQ ID NO: 77889 - DNA, 20 bp, Unknown
  misc_feature (1)..( 20): Result.001 file - promoters75/1664981
tgttcaacacaaatttttac

SEQ ID NO: 77890 - DNA, 20 bp, Unknown
  misc_feature (1)..( 20): Result.001 file - promoters75/1664981
tgtacaaaacatagatggag

SEQ ID NO: 77891 - DNA, 20 bp, Unknown
  misc_feature (1)..( 20): Result.001 file - promoters75/1664981
ttattgttacaaatctatcc

SEQ ID NO: 77892 - DNA, 20 bp, Unknown
  misc_feature (1)..( 20): Result.001 file - promoters75/1665272
agtaaatcatttttttctac

SEQ ID NO: 77893 - DNA, 9 bp, Unknown
  misc_feature (1)..( 9): Result.001 file - promoters75/1665272
gttcaaaat

SEQ ID NO: 77894 - DNA, 9 bp, Unknown
  misc_feature (1)..( 9): Result.001 file - promoters75/1665272
ttccaaaat

SEQ ID NO: 77895 - DNA, 9 bp, Unknown
  misc_feature (1)..( 9): Result.001 file - promoters75/1665272
ttccaaatg

SEQ ID NO: 77896 - DNA, 11 bp, Unknown
  misc_feature (1)..( 11): Result.001 file - promoters75/1665272
tttttgttcgt

SEQ ID NO: 77897 - DNA, 11 bp, Unknown
  misc_feature (1)..( 11): Result.001 file - promoters75/1665272
gtgttgttcgt

SEQ ID NO: 77898 - DNA, 11 bp, Unknown
  misc_feature (1)..( 11): Result.001 file - promoters75/1665272
ttcttgtaaca

SEQ ID NO: 77899 - DNA, 9 bp, Unknown
  misc_feature (1)..( 9): Result.001 file - promoters75/1665272
agatatagt

SEQ ID NO: 77900 - DNA, 9 bp, Unknown
  misc_feature (1)..( 9): Result.001 file - promoters75/1665272
agaaataga

SEQ ID NO: 77901 - DNA, 9 bp, Unknown
  misc_feature (1)..( 9): Result.001 file - promoters75/1711228
agaaaaaga

SEQ ID NO: 77902 - DNA, 7 bp, Unknown
  misc_feature (1)..( 7): Result.001 file - promoters75/1711228
aagattt

SEQ ID NO: 77903 - DNA, 7 bp, Unknown
  misc_feature (1)..( 7): Result.001 file - promoters75/1711228
aagattc

SEQ ID NO: 77904 - DNA, 7 bp, Unknown
  misc_feature (1)..( 7): Result.001 file - promoters75/1711228
aagattt

SEQ ID NO: 77905 - DNA, 12 bp, Unknown
  misc_feature (1)..( 12): Result.001 file - promoters75/1711228
tgtattttatgt

SEQ ID NO: 77906 - DNA, 12 bp, Unknown
  misc_feature (1)..( 12): Result.001 file - promoters75/1711228
tgtgtttgttgt

SEQ ID NO: 77907 - DNA, 12 bp, Unknown
  misc_feature (1)..( 12): Result.001 file - promoters75/1714831
attattatatgt

SEQ ID NO: 77908 - DNA, 9 bp, Unknown
  misc_feature (1)..( 9): Result.001 file - promoters75/1714831
tcaaaatgc

SEQ ID NO: 77909 - DNA, 9 bp, Unknown
  misc_feature (1)..( 9): Result.001 file - promoters75/1714831
agaaattgc

SEQ ID NO: 77910 - DNA, 9 bp, Unknown
  misc_feature (1)..( 9): Result.001 file - promoters75/1714831
tcaaaattc

SEQ ID NO: 77911 - DNA, 10 bp, Unknown
  misc_feature (1)..( 10): Result.001 file - promoters75/1714831
catgtgaaga

SEQ ID NO: 77912 - DNA, 10 bp, Unknown
  misc_feature (1)..( 10): Result.001 file - promoters75/1714831
catttgattt

SEQ ID NO: 77913 - DNA, 10 bp, Unknown
  misc_feature (1)..( 10): Result.001 file - promoters75/1714989
tatttaattt

SEQ ID NO: 77914 - DNA, 9 bp, Unknown
  misc_feature (1)..( 9): Result.001 file - promoters75/1714989
gaaaatatt

SEQ ID NO: 77915 - DNA, 9 bp, Unknown
  misc_feature (1)..( 9): Result.001 file - promoters75/1714989
aaaaataag

SEQ ID NO: 77916 - DNA, 9 bp, Unknown
  misc_feature (1)..( 9): Result.001 file - promoters75/1714989
aaaaattaa

SEQ ID NO: 77917 - DNA, 9 bp, Unknown
  misc_feature (1)..( 9): Result.001 file - promoters75/1714989
aaagattta

SEQ ID NO: 77918 - DNA, 8 bp, Unknown
  misc_feature (1)..( 8): Result.001 file - promoters75/1714989
aaaataaa

SEQ ID NO: 77919 - DNA, 8 bp, Unknown
  misc_feature (1)..( 8): Result.001 file - promoters75/1714989
ttaataaa

SEQ ID NO: 77920 - DNA, 8 bp, Unknown
  misc_feature (1)..( 8): Result.001 file - promoters75/1714989
aaaattaa

SEQ ID NO: 77921 - DNA, 8 bp, Unknown
  misc_feature (1)..( 8): Result.001 file - promoters75/1714989
aaaacaaa

SEQ ID NO: 77922 - DNA, 8 bp, Unknown
  misc_feature (1)..( 8): Result.001 file - promoters75/1714989
aaaaaaaa

SEQ ID NO: 77923 - DNA, 8 bp, Unknown
  misc_feature (1)..( 8): Result.001 file - promoters75/1714989
taaataaa

SEQ ID NO: 77924 - DNA, 8 bp, Unknown
  misc_feature (1)..( 8): Result.001 file - promoters75/1714989
gaaacaaa

SEQ ID NO: 77925 - DNA, 10 bp, Unknown
  misc_feature (1)..( 10): Result.001 file - promoters75/1714989
cacaccaaat

SEQ ID NO: 77926 - DNA, 10 bp, Unknown
  misc_feature (1)..( 10): Result.001 file - promoters75/1714989
aaaaccaaag

SEQ ID NO: 77927 - DNA, 10 bp, Unknown
  misc_feature (1)..( 10): Result.001 file - promoters75/1714989
ccaactaaag

SEQ ID NO: 77928 - DNA, 10 bp, Unknown
  misc_feature (1)..( 10): Result.001 file - promoters75/1714989
taaactatga

SEQ ID NO: 77929 - DNA, 12 bp, Unknown
  misc_feature (1)..( 12): Result.001 file - promoters75/1714989
attgggactaaa

SEQ ID NO: 77930 - DNA, 12 bp, Unknown
  misc_feature (1)..( 12): Result.001 file - promoters75/1714989
atttggataaaa

SEQ ID NO: 77931 - DNA, 12 bp, Unknown
  misc_feature (1)..( 12): Result.001 file - promoters75/1714989
ctttgaataaaa

SEQ ID NO: 77932 - DNA, 12 bp, Unknown
  misc_feature (1)..( 12): Result.001 file - promoters75/1714989
cttcgaaggtaa

SEQ ID NO: 77933 - DNA, 9 bp, Unknown
  misc_feature (1)..( 9): Result.001 file - promoters75/1714989
cctctttcc

SEQ ID NO: 77934 - DNA, 9 bp, Unknown
  misc_feature (1)..( 9): Result.001 file - promoters75/1714989
cctttttat

SEQ ID NO: 77935 - DNA, 9 bp, Unknown
  misc_feature (1)..( 9): Result.001 file - promoters75/1714989
tctctttcc

SEQ ID NO: 77936 - DNA, 10 bp, Unknown
  misc_feature (1)..( 10): Result.001 file - promoters75/1714989
attacaaaac

SEQ ID NO: 77937 - DNA, 10 bp, Unknown
  misc_feature (1)..( 10): Result.001 file - promoters75/1714989
tatacaaaaa

SEQ ID NO: 77938 - DNA, 10 bp, Unknown
  misc_feature (1)..( 10): Result.001 file - promoters75/1714989
ctcccaaaaa

SEQ ID NO: 77939 - DNA, 10 bp, Unknown
  misc_feature (1)..( 10): Result.001 file - promoters75/1714989
tatacaagaa

SEQ ID NO: 77940 - DNA, 11 bp, Unknown
  misc_feature (1)..( 11): Result.001 file - promoters75/1714989
aataaataaaa

SEQ ID NO: 77941 - DNA, 11 bp, Unknown
  misc_feature (1)..( 11): Result.001 file - promoters75/1714989
aaacaataaaa

SEQ ID NO: 77942 - DNA, 11 bp, Unknown
  misc_feature (1)..( 11): Result.001 file - promoters75/1714989
aaacagtaaaa

SEQ ID NO: 77943 - DNA, 10 bp, Unknown
  misc_feature (1)..( 10): Result.001 file - promoters75/1714989
atattattag

SEQ ID NO: 77944 - DNA, 10 bp, Unknown
  misc_feature (1)..( 10): Result.001 file - promoters75/1714989
atattattag

SEQ ID NO: 77945 - DNA, 10 bp, Unknown
  misc_feature (1)..( 10): Result.001 file - promoters75/1714989
aaattattta

SEQ ID NO: 77946 - DNA, 7 bp, Unknown
  misc_feature (1)..( 7): Result.001 file - promoters75/1714989
tttgttt

SEQ ID NO: 77947 - DNA, 7 bp, Unknown
  misc_feature (1)..( 7): Result.001 file - promoters75/1714989
tttattt

SEQ ID NO: 77948 - DNA, 7 bp, Unknown
  misc_feature (1)..( 7): Result.001 file - promoters75/1714989
attattt

SEQ ID NO: 77949 - DNA, 7 bp, Unknown
  misc_feature (1)..( 7): Result.001 file - promoters75/1714989
aaccaac

SEQ ID NO: 77950 - DNA, 7 bp, Unknown
  misc_feature (1)..( 7): Result.001 file - promoters75/1714989
aaccaat

SEQ ID NO: 77951 - DNA, 7 bp, Unknown
  misc_feature (1)..( 7): Result.001 file - promoters75/1714989
gaccaat

SEQ ID NO: 77952 - DNA, 8 bp, Unknown
  misc_feature (1)..( 8): Result.001 file - promoters75/1714989
aacaaaaa

SEQ ID NO: 77953 - DNA, 8 bp, Unknown
  misc_feature (1)..( 8): Result.001 file - promoters75/1714989
aactaaag

SEQ ID NO: 77954 - DNA, 8 bp, Unknown
  misc_feature (1)..( 8): Result.001 file - promoters75/1714989
aaccaaag

SEQ ID NO: 77955 - DNA, 8 bp, Unknown
  misc_feature (1)..( 8): Result.001 file - promoters75/1714989
agacaaac

SEQ ID NO: 77956 - DNA, 8 bp, Unknown
  misc_feature (1)..( 8): Result.001 file - promoters75/1714989
ttacaaac

SEQ ID NO: 77957 - DNA, 8 bp, Unknown
  misc_feature (1)..( 8): Result.001 file - promoters75/1715347
ttaaaaaa

SEQ ID NO: 77958 - DNA, 8 bp, Unknown
  misc_feature (1)..( 8): Result.001 file - promoters75/1715347
tttttgta

SEQ ID NO: 77959 - DNA, 8 bp, Unknown
  misc_feature (1)..( 8): Result.001 file - promoters75/1715347
tttttgtt

SEQ ID NO: 77960 - DNA, 8 bp, Unknown
  misc_feature (1)..( 8): Result.001 file - promoters75/1807771
tatttgtt

SEQ ID NO: 77961 - DNA, 8 bp, Unknown
  misc_feature (1)..( 8): Result.001 file - promoters75/1807771
acttatat

SEQ ID NO: 77962 - DNA, 8 bp, Unknown
  misc_feature (1)..( 8): Result.001 file - promoters75/1807771
acttatcc

SEQ ID NO: 77963 - DNA, 8 bp, Unknown
  misc_feature (1)..( 8): Result.001 file - promoters75/1807771
tcttatat

SEQ ID NO: 77964 - DNA, 12 bp, Unknown
  misc_feature (1)..( 12): Result.001 file - promoters75/1807771
tttgtttgtttt

SEQ ID NO: 77965 - DNA, 12 bp, Unknown
  misc_feature (1)..( 12): Result.001 file - promoters75/1807771
tttgtttttttt

SEQ ID NO: 77966 - DNA, 12 bp, Unknown
  misc_feature (1)..( 12): Result.001 file - promoters75/1808172
atccttttttta

SEQ ID NO: 77967 - DNA, 12 bp, Unknown
  misc_feature (1)..( 12): Result.001 file - promoters75/1808172
tattaaccttga

SEQ ID NO: 77968 - DNA, 12 bp, Unknown
  misc_feature (1)..( 12): Result.001 file - promoters75/1808172
aattgaccctga

SEQ ID NO: 77969 - DNA, 12 bp, Unknown
  misc_feature (1)..( 12): Result.001 file - promoters75/1808172
aaataataaagt

SEQ ID NO: 77970 - DNA, 7 bp, Unknown
  misc_feature (1)..( 7): Result.001 file - promoters75/1808172
tctctct

SEQ ID NO: 77971 - DNA, 7 bp, Unknown
  misc_feature (1)..( 7): Result.001 file - promoters75/1808172
tctttct

SEQ ID NO: 77972 - DNA, 7 bp, Unknown
  misc_feature (1)..( 7): Result.001 file - promoters75/1808172
tctttca

SEQ ID NO: 77973 - DNA, 8 bp, Unknown
  misc_feature (1)..( 8): Result.001 file - promoters75/1808172
acaaaatc

SEQ ID NO: 77974 - DNA, 8 bp, Unknown
  misc_feature (1)..( 8): Result.001 file - promoters75/1808172
acaaaaca

SEQ ID NO: 77975 - DNA, 8 bp, Unknown
  misc_feature (1)..( 8): Result.001 file - promoters75/1808172
acaaaaca

SEQ ID NO: 77976 - DNA, 8 bp, Unknown
  misc_feature (1)..( 8): Result.001 file - promoters75/1808172
caactatc

SEQ ID NO: 77977 - DNA, 8 bp, Unknown
  misc_feature (1)..( 8): Result.001 file - promoters75/1808172
caattata

SEQ ID NO: 77978 - DNA, 8 bp, Unknown
  misc_feature (1)..( 8): Result.001 file - promoters75/1808172
aaatcata

SEQ ID NO: 77979 - DNA, 7 bp, Unknown
  misc_feature (1)..( 7): Result.001 file - promoters75/1808172
ctctttc

SEQ ID NO: 77980 - DNA, 7 bp, Unknown
  misc_feature (1)..( 7): Result.001 file - promoters75/1808172
ctctttc

SEQ ID NO: 77981 - DNA, 7 bp, Unknown
  misc_feature (1)..( 7): Result.001 file - promoters75/1808172
ttctttc

SEQ ID NO: 77982 - DNA, 10 bp, Unknown
  misc_feature (1)..( 10): Result.001 file - promoters75/1808172
tatatataga

SEQ ID NO: 77983 - DNA, 10 bp, Unknown
  misc_feature (1)..( 10): Result.001 file - promoters75/1808172
tatatataac

SEQ ID NO: 77984 - DNA, 11 bp, Unknown
  misc_feature (1)..( 11): Result.001 file - promoters75/1808172
gatataataca

SEQ ID NO: 77985 - DNA, 9 bp, Unknown
  misc_feature (1)..( 9): Result.001 file - promoters75/1808172
atattctga

SEQ ID NO: 77986 - DNA, 9 bp, Unknown
  misc_feature (1)..( 9): Result.001 file - promoters75/1808172
aaattttga

SEQ ID NO: 77987 - DNA, 9 bp, Unknown
  misc_feature (1)..( 9): Result.001 file - promoters75/1808172
aaagtttat

SEQ ID NO: 77988 - DNA, 9 bp, Unknown
  misc_feature (1)..( 9): Result.001 file - promoters75/1808172
aatgaaaaa

SEQ ID NO: 77989 - DNA, 9 bp, Unknown
  misc_feature (1)..( 9): Result.001 file - promoters75/1808172
tatgagaaa

SEQ ID NO: 77990 - DNA, 9 bp, Unknown
  misc_feature (1)..( 9): Result.001 file - promoters75/1808172
tataagaaa

SEQ ID NO: 77991 - DNA, 7 bp, Unknown
  misc_feature (1)..( 7): Result.001 file - promoters75/1808172
atgtttt

SEQ ID NO: 77992 - DNA, 7 bp, Unknown
  misc_feature (1)..( 7): Result.001 file - promoters75/1808172
ttgtttt

SEQ ID NO: 77993 - DNA, 7 bp, Unknown
  misc_feature (1)..( 7): Result.001 file - promoters75/1808172
ttgttta

SEQ ID NO: 77994 - DNA, 7 bp, Unknown
  misc_feature (1)..( 7): Result.001 file - promoters75/1808172
attttta

SEQ ID NO: 77995 - DNA, 7 bp, Unknown
  misc_feature (1)..( 7): Result.001 file - promoters75/1808172
atttttt

SEQ ID NO: 77996 - DNA, 7 bp, Unknown
  misc_feature (1)..( 7): Result.001 file - promoters75/1808172
attttta

SEQ ID NO: 77997 - DNA, 9 bp, Unknown
  misc_feature (1)..( 9): Result.001 file - promoters75/1808172
agtcaactt

SEQ ID NO: 77998 - DNA, 9 bp, Unknown
  misc_feature (1)..( 9): Result.001 file - promoters75/1808172
agttaactt

SEQ ID NO: 77999 - DNA, 9 bp, Unknown
  misc_feature (1)..( 9): Result.001 file - promoters75/1809157
aattaactt

SEQ ID NO: 78000 - DNA, 9 bp, Unknown
  misc_feature (1)..( 9): Result.001 file - promoters75/1809157
caaaacatc

SEQ ID NO: 78001 - DNA, 9 bp, Unknown
  misc_feature (1)..( 9): Result.001 file - promoters75/1809157
taaaacaaa

SEQ ID NO: 78002 - DNA, 9 bp, Unknown
  misc_feature (1)..( 9): Result.001 file - promoters75/1809157
acaaatatc

SEQ ID NO: 78003 - DNA, 9 bp, Unknown
  misc_feature (1)..( 9): Result.001 file - promoters75/1809157
aaaaacata

SEQ ID NO: 78004 - DNA, 9 bp, Unknown
  misc_feature (1)..( 9): Result.001 file - promoters75/1809157
caaaaccgt

SEQ ID NO: 78005 - DNA, 9 bp, Unknown
  misc_feature (1)..( 9): Result.001 file - promoters75/1809157
aaaaactca

SEQ ID NO: 78006 - DNA, 11 bp, Unknown
  misc_feature (1)..( 11): Result.001 file - promoters75/1809157
ctccacaaaac

SEQ ID NO: 78007 - DNA, 11 bp, Unknown
  misc_feature (1)..( 11): Result.001 file - promoters75/1809157
taaaacaaaaa

SEQ ID NO: 78008 - DNA, 11 bp, Unknown
  misc_feature (1)..( 11): Result.001 file - promoters75/1809157
tttatcaaaac

SEQ ID NO: 78009 - DNA, 11 bp, Unknown
  misc_feature (1)..( 11): Result.001 file - promoters75/1809157
tgccacaaagg

SEQ ID NO: 78010 - DNA, 11 bp, Unknown
  misc_feature (1)..( 11): Result.001 file - promoters75/1809157
cgaaacaaaga

SEQ ID NO: 78011 - DNA, 11 bp, Unknown
  misc_feature (1)..( 11): Result.001 file - promoters75/1957212
cgaatcaatct

SEQ ID NO: 78012 - DNA, 9 bp, Unknown
  misc_feature (1)..( 9): Result.001 file - promoters75/1957212
gattcttac

SEQ ID NO: 78013 - DNA, 9 bp, Unknown
  misc_feature (1)..( 9): Result.001 file - promoters75/1957212
gattctttg

SEQ ID NO: 78014 - DNA, 9 bp, Unknown
  misc_feature (1)..( 9): Result.001 file - promoters75/1957212
cattcgtac

SEQ ID NO: 78015 - DNA, 9 bp, Unknown
  misc_feature (1)..( 9): Result.001 file - promoters75/1957212
tatttaaac

SEQ ID NO: 78016 - DNA, 9 bp, Unknown
  misc_feature (1)..( 9): Result.001 file - promoters75/1957212
tatttaaaa

SEQ ID NO: 78017 - DNA, 9 bp, Unknown
  misc_feature (1)..( 9): Result.001 file - promoters75/1957212
aattgaaac

SEQ ID NO: 78018 - DNA, 8 bp, Unknown
  misc_feature (1)..( 8): Result.001 file - promoters75/1957212
cgagaaac

SEQ ID NO: 78019 - DNA, 8 bp, Unknown
  misc_feature (1)..( 8): Result.001 file - promoters75/1957212
ggagaaag

SEQ ID NO: 78020 - DNA, 8 bp, Unknown
  misc_feature (1)..( 8): Result.001 file - promoters75/1975923
agagagat

SEQ ID NO: 78021 - DNA, 10 bp, Unknown
  misc_feature (1)..( 10): Result.001 file - promoters75/1975923
atcaaagtta

SEQ ID NO: 78022 - DNA, 10 bp, Unknown
  misc_feature (1)..( 10): Result.001 file - promoters75/1975923
gataaaatta

SEQ ID NO: 78023 - DNA, 10 bp, Unknown
  misc_feature (1)..( 10): Result.001 file - promoters75/1975923
gatataatct

SEQ ID NO: 78024 - DNA, 8 bp, Unknown
  misc_feature (1)..( 8): Result.001 file - promoters75/1975923
atataaag

SEQ ID NO: 78025 - DNA, 8 bp, Unknown
  misc_feature (1)..( 8): Result.001 file - promoters75/1975923
atataaag

SEQ ID NO: 78026 - DNA, 8 bp, Unknown
  misc_feature (1)..( 8): Result.001 file - promoters75/1975923
ctataaat

SEQ ID NO: 78027 - DNA, 10 bp, Unknown
  misc_feature (1)..( 10): Result.001 file - promoters75/1975923
taaatataaa

SEQ ID NO: 78028 - DNA, 10 bp, Unknown
  misc_feature (1)..( 10): Result.001 file - promoters75/1975923
taaaaataat

SEQ ID NO: 78029 - DNA, 10 bp, Unknown
  misc_feature (1)..( 10): Result.001 file - promoters75/1976019
acataataat

SEQ ID NO: 78030 - DNA, 10 bp, Unknown
  misc_feature (1)..( 10): Result.001 file - promoters75/1976019
gagtttaggt

SEQ ID NO: 78031 - DNA, 10 bp, Unknown
  misc_feature (1)..( 10): Result.001 file - promoters75/1976019
aatttttggt

SEQ ID NO: 78032 - DNA, 10 bp, Unknown
  misc_feature (1)..( 10): Result.001 file - promoters75/1976019
ttgttttgtc

SEQ ID NO: 78033 - DNA, 8 bp, Unknown
  misc_feature (1)..( 8): Result.001 file - promoters75/1976019
aatagtta

SEQ ID NO: 78034 - DNA, 8 bp, Unknown
  misc_feature (1)..( 8): Result.001 file - promoters75/1976019
aattgttt

SEQ ID NO: 78035 - DNA, 9 bp, Unknown
  misc_feature (1)..( 9): Result.001 file - promoters75/1976078
ttttggttt

SEQ ID NO: 78036 - DNA, 10 bp, Unknown
  misc_feature (1)..( 10): Result.001 file - promoters75/1976078
ctagatacaa

SEQ ID NO: 78037 - DNA, 10 bp, Unknown
  misc_feature (1)..( 10): Result.001 file - promoters75/1976078
acagagacat

SEQ ID NO: 78038 - DNA, 10 bp, Unknown
  misc_feature (1)..( 10): Result.001 file - promoters75/1976078
ctagatacag

SEQ ID NO: 78039 - DNA, 10 bp, Unknown
  misc_feature (1)..( 10): Result.001 file - promoters75/1976078
tccgatccag

SEQ ID NO: 78040 - DNA, 13 bp, Unknown
  misc_feature (1)..( 13): Result.001 file - promoters75/1976078
aaatcgaaacaga

SEQ ID NO: 78041 - DNA, 13 bp, Unknown
  misc_feature (1)..( 13): Result.001 file - promoters75/1976078
aaatccaaaccca

SEQ ID NO: 78042 - DNA, 13 bp, Unknown
  misc_feature (1)..( 13): Result.001 file - promoters75/1976078
aaagtcaaacctg

SEQ ID NO: 78043 - DNA, 13 bp, Unknown
  misc_feature (1)..( 13): Result.001 file - promoters75/1976078
attgagaaagctg

SEQ ID NO: 78044 - DNA, 8 bp, Unknown
  misc_feature (1)..( 8): Result.001 file - promoters75/1976078
actttttt

SEQ ID NO: 78045 - DNA, 8 bp, Unknown
  misc_feature (1)..( 8): Result.001 file - promoters75/1976078
actattta

SEQ ID NO: 78046 - DNA, 9 bp, Unknown
  misc_feature (1)..( 9): Result.001 file - promoters75/1976078
gttttgttg

SEQ ID NO: 78047 - DNA, 9 bp, Unknown
  misc_feature (1)..( 9): Result.001 file - promoters75/1976078
attgatttg

SEQ ID NO: 78048 - DNA, 9 bp, Unknown
  misc_feature (1)..( 9): Result.001 file - promoters75/1976078
catgaattg

SEQ ID NO: 78049 - DNA, 9 bp, Unknown
  misc_feature (1)..( 9): Result.001 file - promoters75/1976078
attgattca

SEQ ID NO: 78050 - DNA, 9 bp, Unknown
  misc_feature (1)..( 9): Result.001 file - promoters75/1976078
tttaaagct

SEQ ID NO: 78051 - DNA, 9 bp, Unknown
  misc_feature (1)..( 9): Result.001 file - promoters75/1976078
tttcaagtt

SEQ ID NO: 78052 - DNA, 9 bp, Unknown
  misc_feature (1)..( 9): Result.001 file - promoters75/1976236
tctcacgtt

SEQ ID NO: 78053 - DNA, 8 bp, Unknown
  misc_feature (1)..( 8): Result.001 file - promoters75/1976236
ttcaaaaa

SEQ ID NO: 78054 - DNA, 8 bp, Unknown
  misc_feature (1)..( 8): Result.001 file - promoters75/1976236
ttcaaaat

SEQ ID NO: 78055 - DNA, 9 bp, Unknown
  misc_feature (1)..( 9): Result.001 file - promoters75/1976236
ttctaaaat

SEQ ID NO: 78056 - DNA, 7 bp, Unknown
  misc_feature (1)..( 7): Result.001 file - promoters75/1976236
ttttgaa

SEQ ID NO: 78057 - DNA, 7 bp, Unknown
  misc_feature (1)..( 7): Result.001 file - promoters75/1976236
ttttgac

SEQ ID NO: 78058 - DNA, 7 bp, Unknown
  misc_feature (1)..( 7): Result.001 file - promoters75/1976236
ctttgac

SEQ ID NO: 78059 - DNA, 8 bp, Unknown
  misc_feature (1)..( 8): Result.001 file - promoters75/1976236
caaaccca

SEQ ID NO: 78060 - DNA, 8 bp, Unknown
  misc_feature (1)..( 8): Result.001 file - promoters75/1976236
caaacctg

SEQ ID NO: 78061 - DNA, 8 bp, Unknown
  misc_feature (1)..( 8): Result.001 file - promoters75/1976236
gaaagctg

SEQ ID NO: 78062 - DNA, 8 bp, Unknown
  misc_feature (1)..( 8): Result.001 file - promoters75/1976236
agagacat

SEQ ID NO: 78063 - DNA, 8 bp, Unknown
  misc_feature (1)..( 8): Result.001 file - promoters75/1976236
agatacag

SEQ ID NO: 78064 - DNA, 8 bp, Unknown
  misc_feature (1)..( 8): Result.001 file - promoters75/1976236
cgatccag

SEQ ID NO: 78065 - DNA, 9 bp, Unknown
  misc_feature (1)..( 9): Result.001 file - promoters75/1976236
tttaaagct

SEQ ID NO: 78066 - DNA, 9 bp, Unknown
  misc_feature (1)..( 9): Result.001 file - promoters75/1976236
tttcaagtt

SEQ ID NO: 78067 - DNA, 9 bp, Unknown
  misc_feature (1)..( 9): Result.001 file - promoters75/1976354
tctcacgtt

SEQ ID NO: 78068 - DNA, 9 bp, Unknown
  misc_feature (1)..( 9): Result.001 file - promoters75/1976354
aatataaat

SEQ ID NO: 78069 - DNA, 9 bp, Unknown
  misc_feature (1)..( 9): Result.001 file - promoters75/1976354
gatacaaaa

SEQ ID NO: 78070 - DNA, 9 bp, Unknown
  misc_feature (1)..( 9): Result.001 file - promoters75/1976354
aataaaaat

SEQ ID NO: 78071 - DNA, 9 bp, Unknown
  misc_feature (1)..( 9): Result.001 file - promoters75/1976354
aataaacta

SEQ ID NO: 78072 - DNA, 11 bp, Unknown
  misc_feature (1)..( 11): Result.001 file - promoters75/1976354
tatatgttaat

SEQ ID NO: 78073 - DNA, 11 bp, Unknown
  misc_feature (1)..( 11): Result.001 file - promoters75/1976354
gatatgataat

SEQ ID NO: 78074 - DNA, 11 bp, Unknown
  misc_feature (1)..( 11): Result.001 file - promoters75/1976354
aatatgtgcaa

SEQ ID NO: 78075 - DNA, 11 bp, Unknown
  misc_feature (1)..( 11): Result.001 file - promoters75/1976354
aatatttgtaa

SEQ ID NO: 78076 - DNA, 9 bp, Unknown
  misc_feature (1)..( 9): Result.001 file - promoters75/1976354
atagttatc

SEQ ID NO: 78077 - DNA, 9 bp, Unknown
  misc_feature (1)..( 9): Result.001 file - promoters75/1976354
atagttaaa

SEQ ID NO: 78078 - DNA, 9 bp, Unknown
  misc_feature (1)..( 9): Result.001 file - promoters75/1976354
tcagttatc

SEQ ID NO: 78079 - DNA, 9 bp, Unknown
  misc_feature (1)..( 9): Result.001 file - promoters75/1976354
acagtgatc

SEQ ID NO: 78080 - DNA, 11 bp, Unknown
  misc_feature (1)..( 11): Result.001 file - promoters75/1976354
atcattttgag

SEQ ID NO: 78081 - DNA, 11 bp, Unknown
  misc_feature (1)..( 11): Result.001 file - promoters75/1976354
ttcagtttggg

SEQ ID NO: 78082 - DNA, 11 bp, Unknown
  misc_feature (1)..( 11): Result.001 file - promoters75/1976354
ataatttcgag

SEQ ID NO: 78083 - DNA, 11 bp, Unknown
  misc_feature (1)..( 11): Result.001 file - promoters75/2104991
ttcagtctaga

SEQ ID NO: 78084 - DNA, 8 bp, Unknown
  misc_feature (1)..( 8): Result.001 file - promoters75/2104991
tcatttca

SEQ ID NO: 78085 - DNA, 8 bp, Unknown
  misc_feature (1)..( 8): Result.001 file - promoters75/2104991
aaatttca

SEQ ID NO: 78086 - DNA, 8 bp, Unknown
  misc_feature (1)..( 8): Result.001 file - promoters75/2104991
aaatttcc

SEQ ID NO: 78087 - DNA, 8 bp, Unknown
  misc_feature (1)..( 8): Result.001 file - promoters75/2104991
taaatctc

SEQ ID NO: 78088 - DNA, 8 bp, Unknown
  misc_feature (1)..( 8): Result.001 file - promoters75/2104991
taaatcag

SEQ ID NO: 78089 - DNA, 8 bp, Unknown
  misc_feature (1)..( 8): Result.001 file - promoters75/2104991
caaaacag

SEQ ID NO: 78090 - DNA, 14 bp, Unknown
  misc_feature (1)..( 14): Result.001 file - promoters75/2104991
aaaaagcttggatt

SEQ ID NO: 78091 - DNA, 14 bp, Unknown
  misc_feature (1)..( 14): Result.001 file - promoters75/2104991
taaaagtttgatat

SEQ ID NO: 78092 - DNA, 14 bp, Unknown
  misc_feature (1)..( 14): Result.001 file - promoters75/2104991
taaaagtttgttat

SEQ ID NO: 78093 - DNA, 14 bp, Unknown
  misc_feature (1)..( 14): Result.001 file - promoters75/2104991
ttggattttgattt

SEQ ID NO: 78094 - DNA, 14 bp, Unknown
  misc_feature (1)..( 14): Result.001 file - promoters75/2104991
taaaagtttgatat

SEQ ID NO: 78095 - DNA, 14 bp, Unknown
  misc_feature (1)..( 14): Result.001 file - promoters75/2105514
taaaagtttgttat

SEQ ID NO: 78096 - DNA, 11 bp, Unknown
  misc_feature (1)..( 11): Result.001 file - promoters75/2105514
actattaaagc

SEQ ID NO: 78097 - DNA, 11 bp, Unknown
  misc_feature (1)..( 11): Result.001 file - promoters75/2105514
tatataaaagc

SEQ ID NO: 78098 - DNA, 11 bp, Unknown
  misc_feature (1)..( 11): Result.001 file - promoters75/2105514
tatataaatcc

SEQ ID NO: 78099 - DNA, 11 bp, Unknown
  misc_feature (1)..( 11): Result.001 file - promoters75/2106017
actataaaggc

SEQ ID NO: 78100 - DNA, 9 bp, Unknown
  misc_feature (1)..( 9): Result.001 file - promoters75/2106017
gattaaaaa

SEQ ID NO: 78101 - DNA, 9 bp, Unknown
  misc_feature (1)..( 9): Result.001 file - promoters75/2106017
aaataaaaa

SEQ ID NO: 78102 - DNA, 10 bp, Unknown
  misc_feature (1)..( 10): Result.001 file - promoters75/2106017
aaataataaa

SEQ ID NO: 78103 - DNA, 10 bp, Unknown
  misc_feature (1)..( 10): Result.001 file - promoters75/2106017
ctttaaaaat

SEQ ID NO: 78104 - DNA, 9 bp, Unknown
  misc_feature (1)..( 9): Result.001 file - promoters75/2106017
acataaaca

SEQ ID NO: 78105 - DNA, 9 bp, Unknown
  misc_feature (1)..( 9): Result.001 file - promoters75/2106017
gcattaaca

SEQ ID NO: 78106 - DNA, 9 bp, Unknown
  misc_feature (1)..( 9): Result.001 file - promoters75/2106017
gcagtaacg

SEQ ID NO: 78107 - DNA, 9 bp, Unknown
  misc_feature (1)..( 9): Result.001 file - promoters75/2106017
tcagtaaaa

SEQ ID NO: 78108 - DNA, 12 bp, Unknown
  misc_feature (1)..( 12): Result.001 file - promoters75/2106017
gttttaaagttt

SEQ ID NO: 78109 - DNA, 12 bp, Unknown
  misc_feature (1)..( 12): Result.001 file - promoters75/2106017
gttttagatctg

SEQ ID NO: 78110 - DNA, 12 bp, Unknown
  misc_feature (1)..( 12): Result.001 file - promoters75/2106017
gtttgaaatttt

SEQ ID NO: 78111 - DNA, 12 bp, Unknown
  misc_feature (1)..( 12): Result.001 file - promoters75/2107065
gcttgaaatcag

SEQ ID NO: 78112 - DNA, 9 bp, Unknown
  misc_feature (1)..( 9): Result.001 file - promoters75/2107065
tgaagaaaa

SEQ ID NO: 78113 - DNA, 9 bp, Unknown
  misc_feature (1)..( 9): Result.001 file - promoters75/2107065
tgaataaaa

SEQ ID NO: 78114 - DNA, 9 bp, Unknown
  misc_feature (1)..( 9): Result.001 file - promoters75/2113502
ataagaaat

SEQ ID NO: 78115 - DNA, 12 bp, Unknown
  misc_feature (1)..( 12): Result.001 file - promoters75/2113502
acgttaaaaata

SEQ ID NO: 78116 - DNA, 12 bp, Unknown
  misc_feature (1)..( 12): Result.001 file - promoters75/2113502
atttcaaaaata

SEQ ID NO: 78117 - DNA, 12 bp, Unknown
  misc_feature (1)..( 12): Result.001 file - promoters75/2113502
gatgtaaaaatt

SEQ ID NO: 78118 - DNA, 12 bp, Unknown
  misc_feature (1)..( 12): Result.001 file - promoters75/2113502
acattaaaaatg

SEQ ID NO: 78119 - DNA, 12 bp, Unknown
  misc_feature (1)..( 12): Result.001 file - promoters75/2113502
tctcaaaacatt

SEQ ID NO: 78120 - DNA, 12 bp, Unknown
  misc_feature (1)..( 12): Result.001 file - promoters75/2113502
acaataaaagtt

SEQ ID NO: 78121 - DNA, 16 bp, Unknown
  misc_feature (1)..( 16): Result.001 file - promoters75/2113502
tttccactataaaact

SEQ ID NO: 78122 - DNA, 16 bp, Unknown
  misc_feature (1)..( 16): Result.001 file - promoters75/2113502
gcattactattaaagc

SEQ ID NO: 78123 - DNA, 16 bp, Unknown
  misc_feature (1)..( 16): Result.001 file - promoters75/2113502
gccgttatataaatcc

SEQ ID NO: 78124 - DNA, 16 bp, Unknown
  misc_feature (1)..( 16): Result.001 file - promoters75/2113502
tttgcactataaacaa

SEQ ID NO: 78125 - DNA, 16 bp, Unknown
  misc_feature (1)..( 16): Result.001 file - promoters75/2113502
ctctaactataaatac

SEQ ID NO: 78126 - DNA, 16 bp, Unknown
  misc_feature (1)..( 16): Result.001 file - promoters75/2113502
gcttatttatgaatcc

SEQ ID NO: 78127 - DNA, 15 bp, Unknown
  misc_feature (1)..( 15): Result.001 file - promoters75/2113502
caaaagaatcagtga

SEQ ID NO: 78128 - DNA, 15 bp, Unknown
  misc_feature (1)..( 15): Result.001 file - promoters75/2113502
caaaacaattcaaga

SEQ ID NO: 78129 - DNA, 15 bp, Unknown
  misc_feature (1)..( 15): Result.001 file - promoters75/2113502
tggaagaaacagtga

SEQ ID NO: 78130 - DNA, 15 bp, Unknown
  misc_feature (1)..( 15): Result.001 file - promoters75/2113502
agaacgaaatatctt

SEQ ID NO: 78131 - DNA, 15 bp, Unknown
  misc_feature (1)..( 15): Result.001 file - promoters75/2113502
aaaaagtttttgtaa

SEQ ID NO: 78132 - DNA, 15 bp, Unknown
  misc_feature (1)..( 15): Result.001 file - promoters75/2113846
ccaacgaaacgatta

SEQ ID NO: 78133 - DNA, 8 bp, Unknown
  misc_feature (1)..( 8): Result.001 file - promoters75/2113846
tataattt

SEQ ID NO: 78134 - DNA, 8 bp, Unknown
  misc_feature (1)..( 8): Result.001 file - promoters75/2113846
tatcattt

SEQ ID NO: 78135 - DNA, 8 bp, Unknown
  misc_feature (1)..( 8): Result.001 file - promoters75/2113846
tatgatta

SEQ ID NO: 78136 - DNA, 9 bp, Unknown
  misc_feature (1)..( 9): Result.001 file - promoters75/2113846
aatttaacg

SEQ ID NO: 78137 - DNA, 9 bp, Unknown
  misc_feature (1)..( 9): Result.001 file - promoters75/2113846
tttttgacg

SEQ ID NO: 78138 - DNA, 9 bp, Unknown
  misc_feature (1)..( 9): Result.001 file - promoters75/2113889
aatttaatg

SEQ ID NO: 78139 - DNA, 8 bp, Unknown
  misc_feature (1)..( 8): Result.001 file - promoters75/2113889
gttaactt

SEQ ID NO: 78140 - DNA, 8 bp, Unknown
  misc_feature (1)..( 8): Result.001 file - promoters75/2113889
gttgactg

SEQ ID NO: 78141 - DNA, 8 bp, Unknown
  misc_feature (1)..( 8): Result.001 file - promoters75/2114200
catgactg

SEQ ID NO: 78142 - DNA, 7 bp, Unknown
  misc_feature (1)..( 7): Result.001 file - promoters75/2114200
aattctt

SEQ ID NO: 78143 - DNA, 7 bp, Unknown
  misc_feature (1)..( 7): Result.001 file - promoters75/2114200
aatcctt

SEQ ID NO: 78144 - DNA, 7 bp, Unknown
  misc_feature (1)..( 7): Result.001 file - promoters75/2114200
catcctt

SEQ ID NO: 78145 - DNA, 8 bp, Unknown
  misc_feature (1)..( 8): Result.001 file - promoters75/2114200
gaatgaaa

SEQ ID NO: 78146 - DNA, 8 bp, Unknown
  misc_feature (1)..( 8): Result.001 file - promoters75/2114200
gaataaaa

SEQ ID NO: 78147 - DNA, 8 bp, Unknown
  misc_feature (1)..( 8): Result.001 file - promoters75/2187156
ggataaaa

SEQ ID NO: 78148 - DNA, 11 bp, Unknown
  misc_feature (1)..( 11): Result.001 file - promoters75/2187156
ccagaattaag

SEQ ID NO: 78149 - DNA, 11 bp, Unknown
  misc_feature (1)..( 11): Result.001 file - promoters75/2187156
ccataattagt

SEQ ID NO: 78150 - DNA, 11 bp, Unknown
  misc_feature (1)..( 11): Result.001 file - promoters75/2217732
atgtaattaag

SEQ ID NO: 78151 - DNA, 8 bp, Unknown
  misc_feature (1)..( 8): Result.001 file - promoters75/2217732
aaaaaaaa

SEQ ID NO: 78152 - DNA, 8 bp, Unknown
  misc_feature (1)..( 8): Result.001 file - promoters75/2217732
gaaagaaa

SEQ ID NO: 78153 - DNA, 8 bp, Unknown
  misc_feature (1)..( 8): Result.001 file - promoters75/2217732
gaaagatg

SEQ ID NO: 78154 - DNA, 8 bp, Unknown
  misc_feature (1)..( 8): Result.001 file - promoters75/2217817
gaaagaga

SEQ ID NO: 78155 - DNA, 7 bp, Unknown
  misc_feature (1)..( 7): Result.001 file - promoters75/2217817
gtagatt

SEQ ID NO: 78156 - DNA, 7 bp, Unknown
  misc_feature (1)..( 7): Result.001 file - promoters75/2217817
atagatt

SEQ ID NO: 78157 - DNA, 7 bp, Unknown
  misc_feature (1)..( 7): Result.001 file - promoters75/2218207
ataaatt

SEQ ID NO: 78158 - DNA, 9 bp, Unknown
  misc_feature (1)..( 9): Result.001 file - promoters75/2218207
gcagaaaaa

SEQ ID NO: 78159 - DNA, 9 bp, Unknown
  misc_feature (1)..( 9): Result.001 file - promoters75/2218207
gcagaaaat

SEQ ID NO: 78160 - DNA, 9 bp, Unknown
  misc_feature (1)..( 9): Result.001 file - promoters75/2218207
agagaaaaa

SEQ ID NO: 78161 - DNA, 9 bp, Unknown
  misc_feature (1)..( 9): Result.001 file - promoters75/2218207
gcacaaagt

SEQ ID NO: 78162 - DNA, 10 bp, Unknown
  misc_feature (1)..( 10): Result.001 file - promoters75/2218207
aataaaaagc

SEQ ID NO: 78163 - DNA, 10 bp, Unknown
  misc_feature (1)..( 10): Result.001 file - promoters75/2218207
aatataaagg

SEQ ID NO: 78164 - DNA, 10 bp, Unknown
  misc_feature (1)..( 10): Result.001 file - promoters75/2218207
actataaata

SEQ ID NO: 78165 - DNA, 10 bp, Unknown
  misc_feature (1)..( 10): Result.001 file - promoters75/2218271
actataaagg

SEQ ID NO: 78166 - DNA, 11 bp, Unknown
  misc_feature (1)..( 11): Result.001 file - promoters75/2218271
agaaaaactgg

SEQ ID NO: 78167 - DNA, 11 bp, Unknown
  misc_feature (1)..( 11): Result.001 file - promoters75/2218271
ataaaaattgg

SEQ ID NO: 78168 - DNA, 11 bp, Unknown
  misc_feature (1)..( 11): Result.001 file - promoters75/2218271
agaaaaaaaag

SEQ ID NO: 78169 - DNA, 11 bp, Unknown
  misc_feature (1)..( 11): Result.001 file - promoters75/2218271
gtcaaacctga

SEQ ID NO: 78170 - DNA, 11 bp, Unknown
  misc_feature (1)..( 11): Result.001 file - promoters75/2724699
tccaaacccaa

SEQ ID NO: 78171 - DNA, 7 bp, Unknown
  misc_feature (1)..( 7): Result.001 file - promoters75/2724699
aattatc

SEQ ID NO: 78172 - DNA, 7 bp, Unknown
  misc_feature (1)..( 7): Result.001 file - promoters75/2724699
cattatc

SEQ ID NO: 78173 - DNA, 7 bp, Unknown
  misc_feature (1)..( 7): Result.001 file - promoters75/2724699
cattata

SEQ ID NO: 78174 - DNA, 9 bp, Unknown
  misc_feature (1)..( 9): Result.001 file - promoters75/2724699
aaaagttta

SEQ ID NO: 78175 - DNA, 9 bp, Unknown
  misc_feature (1)..( 9): Result.001 file - promoters75/2724699
aaatgtttt

SEQ ID NO: 78176 - DNA, 9 bp, Unknown
  misc_feature (1)..( 9): Result.001 file - promoters75/2781251
caatatttt

SEQ ID NO: 78177 - DNA, 8 bp, Unknown
  misc_feature (1)..( 8): Result.001 file - promoters75/2781251
ctcttcgc

SEQ ID NO: 78178 - DNA, 8 bp, Unknown
  misc_feature (1)..( 8): Result.001 file - promoters75/2781251
ttctccgc

SEQ ID NO: 78179 - DNA, 8 bp, Unknown
  misc_feature (1)..( 8): Result.001 file - promoters75/2781251
ttctccca

SEQ ID NO: 78180 - DNA, 9 bp, Unknown
  misc_feature (1)..( 9): Result.001 file - promoters75/2781251
aaaacatat

SEQ ID NO: 78181 - DNA, 9 bp, Unknown
  misc_feature (1)..( 9): Result.001 file - promoters75/2781251
taaacatat

SEQ ID NO: 78182 - DNA, 9 bp, Unknown
  misc_feature (1)..( 9): Result.001 file - promoters75/2781341
aaaaaatat

SEQ ID NO: 78183 - DNA, 9 bp, Unknown
  misc_feature (1)..( 9): Result.001 file - promoters75/2781341
aaatcgtta

SEQ ID NO: 78184 - DNA, 9 bp, Unknown
  misc_feature (1)..( 9): Result.001 file - promoters75/2781341
aaatcgaaa

SEQ ID NO: 78185 - DNA, 9 bp, Unknown
  misc_feature (1)..( 9): Result.001 file - promoters75/2781341
gaatcatta

SEQ ID NO: 78186 - DNA, 9 bp, Unknown
  misc_feature (1)..( 9): Result.001 file - promoters75/2781341
aaaccgtat

SEQ ID NO: 78187 - DNA, 9 bp, Unknown
  misc_feature (1)..( 9): Result.001 file - promoters75/2781341
ccatcctta

SEQ ID NO: 78188 - DNA, 9 bp, Unknown
  misc_feature (1)..( 9): Result.001 file - promoters75/2781341
caatcataa

SEQ ID NO: 78189 - DNA, 10 bp, Unknown
  misc_feature (1)..( 10): Result.001 file - promoters75/2781341
aaaactaaaa

SEQ ID NO: 78190 - DNA, 10 bp, Unknown
  misc_feature (1)..( 10): Result.001 file - promoters75/2781341
caaaccaaac

SEQ ID NO: 78191 - DNA, 10 bp, Unknown
  misc_feature (1)..( 10): Result.001 file - promoters75/2781341
gtaactaaaa

SEQ ID NO: 78192 - DNA, 10 bp, Unknown
  misc_feature (1)..( 10): Result.001 file - promoters75/2781341
caaatcaaat

SEQ ID NO: 78193 - DNA, 10 bp, Unknown
  misc_feature (1)..( 10): Result.001 file - promoters75/2781341
aaaaccaaag

SEQ ID NO: 78194 - DNA, 10 bp, Unknown
  misc_feature (1)..( 10): Result.001 file - promoters75/2990611
gaaaacaatg

SEQ ID NO: 78195 - DNA, 7 bp, Unknown
  misc_feature (1)..( 7): Result.001 file - promoters75/2990611
attgttt

SEQ ID NO: 78196 - DNA, 7 bp, Unknown
  misc_feature (1)..( 7): Result.001 file - promoters75/2990611
tttgttt

SEQ ID NO: 78197 - DNA, 7 bp, Unknown
  misc_feature (1)..( 7): Result.001 file - promoters75/2991239
tttattt

SEQ ID NO: 78198 - DNA, 10 bp, Unknown
  misc_feature (1)..( 10): Result.001 file - promoters75/2991239
attatatatg

SEQ ID NO: 78199 - DNA, 10 bp, Unknown
  misc_feature (1)..( 10): Result.001 file - promoters75/2991239
tcaataaatg

SEQ ID NO: 78200 - DNA, 10 bp, Unknown
  misc_feature (1)..( 10): Result.001 file - promoters75/2991239
tcattaaaaa

SEQ ID NO: 78201 - DNA, 10 bp, Unknown
  misc_feature (1)..( 10): Result.001 file - promoters75/2991239
ttaaaaaaaa

SEQ ID NO: 78202 - DNA, 10 bp, Unknown
  misc_feature (1)..( 10): Result.001 file - promoters75/2991239
acaaaaaaaa

SEQ ID NO: 78203 - DNA, 10 bp, Unknown
  misc_feature (1)..( 10): Result.001 file - promoters75/2991239
ttaaaaaagg

SEQ ID NO: 78204 - DNA, 34 bp, Unknown; identical to SEQ ID NO: 76977
  misc_feature (1)..( 34): Result.001 file - promoters75/2991239

SEQ ID NO: 78205 - DNA, 34 bp, Unknown; identical to SEQ ID NO: 76978
  misc_feature (1)..( 34): Result.001 file - promoters75/2991239

SEQ ID NO: 78206 - DNA, 34 bp, Unknown; identical to SEQ ID NO: 76979
  misc_feature (1)..( 34): Result.001 file - promoters75/2991239

SEQ ID NO: 78207 - DNA, 34 bp, Unknown; identical to SEQ ID NO: 76977
  misc_feature (1)..( 34): Result.001 file - promoters75/2991239

SEQ ID NO: 78208 - DNA, 34 bp, Unknown; identical to SEQ ID NO: 76981
  misc_feature (1)..( 34): Result.001 file - promoters75/2991239

SEQ ID NO: 78209 - DNA, 34 bp, Unknown; identical to SEQ ID NO: 76979
  misc_feature (1)..( 34): Result.001 file - promoters75/2991239

SEQ ID NO: 78210 - DNA, 15 bp, Unknown
  misc_feature (1)..( 15): Result.001 file - promoters75/2991239
attgaagacttttca

SEQ ID NO: 78211 - DNA, 15 bp, Unknown
  misc_feature (1)..( 15): Result.001 file - promoters75/2991239
attgaagacttttca

SEQ ID NO: 78212 - DNA, 15 bp, Unknown
  misc_feature (1)..( 15): Result.001 file - promoters75/2991239
gtagaagaccatata

SEQ ID NO: 78213 - DNA, 13 bp, Unknown
  misc_feature (1)..( 13): Result.001 file - promoters75/2991239
ctataagctttaa

SEQ ID NO: 78214 - DNA, 13 bp, Unknown
  misc_feature (1)..( 13): Result.001 file - promoters75/2991239
ctataagctttta

SEQ ID NO: 78215 - DNA, 14 bp, Unknown
  misc_feature (1)..( 14): Result.001 file - promoters75/2991239
aagacagcatttaa

SEQ ID NO: 78216 - DNA, 29 bp, Unknown
  misc_feature (1)..( 29): Result.001 file - promoters75/2991239
aagctttaagtctatcgctagactgtcca

SEQ ID NO: 78217 - DNA, 29 bp, Unknown
  misc_feature (1)..( 29): Result.001 file - promoters75/2991239
agcttttaagtctctcgctagactgtcca

SEQ ID NO: 78218 - DNA, 29 bp, Unknown
  misc_feature (1)..( 29): Result.001 file - promoters75/2991281
agcatttaatgatgataacgatttggaag

SEQ ID NO: 78219 - DNA, 8 bp, Unknown
  misc_feature (1)..( 8): Result.001 file - promoters75/2991281
ttttgaat

SEQ ID NO: 78220 - DNA, 8 bp, Unknown
  misc_feature (1)..( 8): Result.001 file - promoters75/2991281
atttgaat

SEQ ID NO: 78221 - DNA, 8 bp, Unknown
  misc_feature (1)..( 8): Result.001 file - promoters75/2991281
ttttgaca

SEQ ID NO: 78222 - DNA, 11 bp, Unknown
  misc_feature (1)..( 11): Result.001 file - promoters75/2991281
aaactgtgaaa

SEQ ID NO: 78223 - DNA, 11 bp, Unknown
  misc_feature (1)..( 11): Result.001 file - promoters75/2991281
aaaatgtgaaa

SEQ ID NO: 78224 - DNA, 11 bp, Unknown
  misc_feature (1)..( 11): Result.001 file - promoters75/2991281
gctttgtgaaa

SEQ ID NO: 78225 - DNA, 8 bp, Unknown
  misc_feature (1)..( 8): Result.001 file - promoters75/2991281
aacccaaa

SEQ ID NO: 78226 - DNA, 8 bp, Unknown
  misc_feature (1)..( 8): Result.001 file - promoters75/2991281
agcccaaa

SEQ ID NO: 78227 - DNA, 8 bp, Unknown
  misc_feature (1)..( 8): Result.001 file - promoters75/2991281
agcccaat

SEQ ID NO: 78228 - DNA, 8 bp, Unknown
  misc_feature (1)..( 8): Result.001 file - promoters75/2991281
cttttaga

SEQ ID NO: 78229 - DNA, 8 bp, Unknown
  misc_feature (1)..( 8): Result.001 file - promoters75/2991281
tgtttaga

SEQ ID NO: 78230 - DNA, 8 bp, Unknown
  misc_feature (1)..( 8): Result.001 file - promoters75/2991300
tgttgaga

SEQ ID NO: 78231 - DNA, 10 bp, Unknown
  misc_feature (1)..( 10): Result.001 file - promoters75/2991300
ttatattatt

SEQ ID NO: 78232 - DNA, 10 bp, Unknown
  misc_feature (1)..( 10): Result.001 file - promoters75/2991300
tgatactatt

SEQ ID NO: 78233 - DNA, 10 bp, Unknown
  misc_feature (1)..( 10): Result.001 file - promoters75/2991300
ttagattagc

SEQ ID NO: 78234 - DNA, 10 bp, Unknown
  misc_feature (1)..( 10): Result.001 file - promoters75/2991300
attaatatat

SEQ ID NO: 78235 - DNA, 10 bp, Unknown
  misc_feature (1)..( 10): Result.001 file - promoters75/2991300
attgatactt

SEQ ID NO: 78236 - DNA, 10 bp, Unknown
  misc_feature (1)..( 10): Result.001 file - promoters75/2991300
tctaatatat

SEQ ID NO: 78237 - DNA, 11 bp, Unknown
  misc_feature (1)..( 11): Result.001 file - promoters75/2991300
taagtatgtat

SEQ ID NO: 78238 - DNA, 11 bp, Unknown
  misc_feature (1)..( 11): Result.001 file - promoters75/2991300
taattatatat

SEQ ID NO: 78239 - DNA, 11 bp, Unknown
  misc_feature (1)..( 11): Result.001 file - promoters75/2991489
ctaatatatag

SEQ ID NO: 78240 - DNA, 15 bp, Unknown
  misc_feature (1)..( 15): Result.001 file - promoters75/2991489
tttttgtgcaaccaa

SEQ ID NO: 78241 - DNA, 15 bp, Unknown
  misc_feature (1)..( 15): Result.001 file - promoters75/2991489
tttttgtaataataa

SEQ ID NO: 78242 - DNA, 15 bp, Unknown
  misc_feature (1)..( 15): Result.001 file - promoters75/2991489
tttctgttcaacaca

SEQ ID NO: 78243 - DNA, 15 bp, Unknown
  misc_feature (1)..( 15): Result.001 file - promoters75/2991489
attttgtttttgatg

SEQ ID NO: 78244 - DNA, 15 bp, Unknown
  misc_feature (1)..( 15): Result.001 file - promoters75/2991489
catttgtacaaaaca

SEQ ID NO: 78245 - DNA, 15 bp, Unknown
  misc_feature (1)..( 15): Result.001 file - promoters75/2991489
tattgttacaaatct

SEQ ID NO: 78246 - DNA, 12 bp, Unknown
  misc_feature (1)..( 12): Result.001 file - promoters75/2991489
taattttatata

SEQ ID NO: 78247 - DNA, 12 bp, Unknown
  misc_feature (1)..( 12): Result.001 file - promoters75/2991489
aaattttttata

SEQ ID NO: 78248 - DNA, 12 bp, Unknown
  misc_feature (1)..( 12): Result.001 file - promoters75/2991489
cctttttgtatc

SEQ ID NO: 78249 - DNA, 12 bp, Unknown
  misc_feature (1)..( 12): Result.001 file - promoters75/2991489
taagtttaagtt

SEQ ID NO: 78250 - DNA, 12 bp, Unknown
  misc_feature (1)..( 12): Result.001 file - promoters75/2991489
aaactttcatct

SEQ ID NO: 78251 - DNA, 12 bp, Unknown
  misc_feature (1)..( 12): Result.001 file - promoters75/2992722
aaacttaaaagt

SEQ ID NO: 78252 - DNA, 7 bp, Unknown
  misc_feature (1)..( 7): Result.001 file - promoters75/2992722
aatttac

SEQ ID NO: 78253 - DNA, 7 bp, Unknown
  misc_feature (1)..( 7): Result.001 file - promoters75/2992722
aatctac

SEQ ID NO: 78254 - DNA, 7 bp, Unknown
  misc_feature (1)..( 7): Result.001 file - promoters75/2992722
aatttat

SEQ ID NO: 78255 - DNA, 11 bp, Unknown
  misc_feature (1)..( 11): Result.001 file - promoters75/2992722
aaaatagtaaa

SEQ ID NO: 78256 - DNA, 11 bp, Unknown
  misc_feature (1)..( 11): Result.001 file - promoters75/2992722
ataattgtata

SEQ ID NO: 78257 - DNA, 11 bp, Unknown
  misc_feature (1)..( 11): Result.001 file - promoters75/2992722
atatttgtata

SEQ ID NO: 78258 - DNA, 10 bp, Unknown
  misc_feature (1)..( 10): Result.001 file - promoters75/2992722
gaaaaagata

SEQ ID NO: 78259 - DNA, 10 bp, Unknown
  misc_feature (1)..( 10): Result.001 file - promoters75/2992722
gaaatagatt

SEQ ID NO: 78260 - DNA, 10 bp, Unknown
  misc_feature (1)..( 10): Result.001 file - promoters75/2992722
ttagtagatt

SEQ ID NO: 78261 - DNA, 10 bp, Unknown
  misc_feature (1)..( 10): Result.001 file - promoters75/2992722
tatataaatt

SEQ ID NO: 78262 - DNA, 8 bp, Unknown
  misc_feature (1)..( 8): Result.001 file - promoters75/2992722
aaggtata

SEQ ID NO: 78263 - DNA, 8 bp, Unknown
  misc_feature (1)..( 8): Result.001 file - promoters75/2992722
aagctata

SEQ ID NO: 78264 - DNA, 8 bp, Unknown
  misc_feature (1)..( 8): Result.001 file - promoters75/2992722
cagcaata

SEQ ID NO: 78265 - DNA, 9 bp, Unknown
  misc_feature (1)..( 9): Result.001 file - promoters75/2992722
ttactaaaa

SEQ ID NO: 78266 - DNA, 9 bp, Unknown
  misc_feature (1)..( 9): Result.001 file - promoters75/2992722
ttattaatt

SEQ ID NO: 78267 - DNA, 9 bp, Unknown
  misc_feature (1)..( 9): Result.001 file - promoters75/2993642
gtataaatt

SEQ ID NO: 78268 - DNA, 14 bp, Unknown
  misc_feature (1)..( 14): Result.001 file - promoters75/2993642
tttatatattttta

SEQ ID NO: 78269 - DNA, 14 bp, Unknown
  misc_feature (1)..( 14): Result.001 file - promoters75/2993642
aactaggattctta

SEQ ID NO: 78270 - DNA, 14 bp, Unknown
  misc_feature (1)..( 14): Result.001 file - promoters75/2993642
tttatatattttgt

SEQ ID NO: 78271 - DNA, 8 bp, Unknown
  misc_feature (1)..( 8): Result.001 file - promoters75/2993642
aaatgtaa

SEQ ID NO: 78272 - DNA, 8 bp, Unknown
  misc_feature (1)..( 8): Result.001 file - promoters75/2993642
aaatgttt

SEQ ID NO: 78273 - DNA, 8 bp, Unknown
  misc_feature (1)..( 8): Result.001 file - promoters75/3043962
aaatattt

SEQ ID NO: 78274 - DNA, 12 bp, Unknown
  misc_feature (1)..( 12): Result.001 file - promoters75/3043962
atttgaattttt

SEQ ID NO: 78275 - DNA, 12 bp, Unknown
  misc_feature (1)..( 12): Result.001 file - promoters75/3043962
atttgatatgct

SEQ ID NO: 78276 - DNA, 12 bp, Unknown
  misc_feature (1)..( 12): Result.001 file - promoters75/3043962
atttgagttttt

SEQ ID NO: 78277 - DNA, 9 bp, Unknown
  misc_feature (1)..( 9): Result.001 file - promoters75/3043962
actatttaa

SEQ ID NO: 78278 - DNA, 9 bp, Unknown
  misc_feature (1)..( 9): Result.001 file - promoters75/3043962
tctatataa

SEQ ID NO: 78279 - DNA, 9 bp, Unknown
  misc_feature (1)..( 9): Result.001 file - promoters75/3043962
actattatc

SEQ ID NO: 78280 - DNA, 8 bp, Unknown
  misc_feature (1)..( 8): Result.001 file - promoters75/3043962
ttataaaa

SEQ ID NO: 78281 - DNA, 8 bp, Unknown
  misc_feature (1)..( 8): Result.001 file - promoters75/3043962
ttattaaa

SEQ ID NO: 78282 - DNA, 8 bp, Unknown
  misc_feature (1)..( 8): Result.001 file - promoters75/3409165
atataaat

SEQ ID NO: 78283 - DNA, 7 bp, Unknown
  misc_feature (1)..( 7): Result.001 file - promoters75/3409165
ttcatat

SEQ ID NO: 78284 - DNA, 7 bp, Unknown
  misc_feature (1)..( 7): Result.001 file - promoters75/3409165
ttcataa

SEQ ID NO: 78285 - DNA, 7 bp, Unknown
  misc_feature (1)..( 7): Result.001 file - promoters75/3409489
ttcttaa

SEQ ID NO: 78286 - DNA, 7 bp, Unknown
  misc_feature (1)..( 7): Result.001 file - promoters75/3409489
cgaagaa

SEQ ID NO: 78287 - DNA, 7 bp, Unknown
  misc_feature (1)..( 7): Result.001 file - promoters75/3409489
cgatgaa

SEQ ID NO: 78288 - DNA, 7 bp, Unknown
  misc_feature (1)..( 7): Result.001 file - promoters75/3409489
agaagaa

SEQ ID NO: 78289 - DNA, 8 bp, Unknown
  misc_feature (1)..( 8): Result.001 file - promoters75/3409489
acttcctt

SEQ ID NO: 78290 - DNA, 8 bp, Unknown
  misc_feature (1)..( 8): Result.001 file - promoters75/3409489
gcttactt

SEQ ID NO: 78291 - DNA, 8 bp, Unknown
  misc_feature (1)..( 8): Result.001 file - promoters75/3409489
acttccgc

SEQ ID NO: 78292 - DNA, 9 bp, Unknown
  misc_feature (1)..( 9): Result.001 file - promoters75/3409489
ctatggtta

SEQ ID NO: 78293 - DNA, 9 bp, Unknown
  misc_feature (1)..( 9): Result.001 file - promoters75/3409489
aaatgatta

SEQ ID NO: 78294 - DNA, 9 bp, Unknown
  misc_feature (1)..( 9): Result.001 file - promoters75/3433904
aaaggatta

SEQ ID NO: 78295 - DNA, 9 bp, Unknown
  misc_feature (1)..( 9): Result.001 file - promoters75/3433904
ctcttaaaa

SEQ ID NO: 78296 - DNA, 9 bp, Unknown
  misc_feature (1)..( 9): Result.001 file - promoters75/3433904
aaattaaaa

SEQ ID NO: 78297 - DNA, 9 bp, Unknown
  misc_feature (1)..( 9): Result.001 file - promoters75/3433904
gtattaaag

SEQ ID NO: 78298 - DNA, 9 bp, Unknown
  misc_feature (1)..( 9): Result.001 file - promoters75/3433904
atatgaaag

SEQ ID NO: 78299 - DNA, 9 bp, Unknown
  misc_feature (1)..( 9): Result.001 file - promoters75/3433904
atatgattt

SEQ ID NO: 78300 - DNA, 8 bp, Unknown
  misc_feature (1)..( 8): Result.001 file - promoters75/3433904
ggtaaatt

SEQ ID NO: 78301 - DNA, 8 bp, Unknown
  misc_feature (1)..( 8): Result.001 file - promoters75/3433904
tataaatt

SEQ ID NO: 78302 - DNA, 8 bp, Unknown
  misc_feature (1)..( 8): Result.001 file - promoters75/3433904
tatgaatc

SEQ ID NO: 78303 - DNA, 8 bp, Unknown
  misc_feature (1)..( 8): Result.001 file - promoters75/3433904
tataaatg

SEQ ID NO: 78304 - DNA, 8 bp, Unknown
  misc_feature (1)..( 8): Result.001 file - promoters75/3433904
gttggata

SEQ ID NO: 78305 - DNA, 8 bp, Unknown
  misc_feature (1)..( 8): Result.001 file - promoters75/3433904
tttggatt

SEQ ID NO: 78306 - DNA, 8 bp, Unknown
  misc_feature (1)..( 8): Result.001 file - promoters75/3433904
gttggaag

SEQ ID NO: 78307 - DNA, 8 bp, Unknown
  misc_feature (1)..( 8): Result.001 file - promoters75/3433904
tttgtata

SEQ ID NO: 78308 - DNA, 11 bp, Unknown
  misc_feature (1)..( 11): Result.001 file - promoters75/3433904
ttaattctttt

SEQ ID NO: 78309 - DNA, 11 bp, Unknown
  misc_feature (1)..( 11): Result.001 file - promoters75/3433904
gtaatcctttt

SEQ ID NO: 78310 - DNA, 11 bp, Unknown
  misc_feature (1)..( 11): Result.001 file - promoters75/3433904
ttaattgccgt

SEQ ID NO: 78311 - DNA, 11 bp, Unknown
  misc_feature (1)..( 11): Result.001 file - promoters75/3433944
cttcttcttta

SEQ ID NO: 78312 - DNA, 10 bp, Unknown
  misc_feature (1)..( 10): Result.001 file - promoters75/3433944
aaacttaaga

SEQ ID NO: 78313 - DNA, 10 bp, Unknown
  misc_feature (1)..( 10): Result.001 file - promoters75/3433944
gaacgtaaga

SEQ ID NO: 78314 - DNA, 10 bp, Unknown
  misc_feature (1)..( 10): Result.001 file - promoters75/3433944
aaaattaaat

SEQ ID NO: 78315 - DNA, 8 bp, Unknown
  misc_feature (1)..( 8): Result.001 file - promoters75/3433944
atttttct

SEQ ID NO: 78316 - DNA, 8 bp, Unknown
  misc_feature (1)..( 8): Result.001 file - promoters75/3433944
attttttt

SEQ ID NO: 78317 - DNA, 8 bp, Unknown
  misc_feature (1)..( 8): Result.001 file - promoters75/3433944
cttttttt

SEQ ID NO: 78318 - DNA, 8 bp, Unknown
  misc_feature (1)..( 8): Result.001 file - promoters75/3433944
gatattac

SEQ ID NO: 78319 - DNA, 8 bp, Unknown
  misc_feature (1)..( 8): Result.001 file - promoters75/3433944
gatattaa

SEQ ID NO: 78320 - DNA, 8 bp, Unknown
  misc_feature (1)..( 8): Result.001 file - promoters75/3434108
aataataa

SEQ ID NO: 78321 - DNA, 13 bp, Unknown
  misc_feature (1)..( 13): Result.001 file - promoters75/3434108
gattaatttctct

SEQ ID NO: 78322 - DNA, 13 bp, Unknown
  misc_feature (1)..( 13): Result.001 file - promoters75/3434108
gattaatgtctct

SEQ ID NO: 78323 - DNA, 13 bp, Unknown
  misc_feature (1)..( 13): Result.001 file - promoters75/3434108
gatgaatttattt

SEQ ID NO: 78324 - DNA, 9 bp, Unknown
  misc_feature (1)..( 9): Result.001 file - promoters75/3434108
tgttgttac

SEQ ID NO: 78325 - DNA, 9 bp, Unknown
  misc_feature (1)..( 9): Result.001 file - promoters75/3434108
cattgttaa

SEQ ID NO: 78326 - DNA, 9 bp, Unknown
  misc_feature (1)..( 9): Result.001 file - promoters75/3434108
tgtttttac

SEQ ID NO: 78327 - DNA, 10 bp, Unknown
  misc_feature (1)..( 10): Result.001 file - promoters75/3434108
aaataaattg

SEQ ID NO: 78328 - DNA, 10 bp, Unknown
  misc_feature (1)..( 10): Result.001 file - promoters75/3434108
aaaaaaattg

SEQ ID NO: 78329 - DNA, 10 bp, Unknown
  misc_feature (1)..( 10): Result.001 file - promoters75/3434108
atttaaattt

SEQ ID NO: 78330 - DNA, 9 bp, Unknown
  misc_feature (1)..( 9): Result.001 file - promoters75/3434108
tcttaaaaa

SEQ ID NO: 78331 - DNA, 9 bp, Unknown
  misc_feature (1)..( 9): Result.001 file - promoters75/3434108
atataaaaa

SEQ ID NO: 78332 - DNA, 9 bp, Unknown
  misc_feature (1)..( 9): Result.001 file - promoters75/3434108
ttctgaaaa

SEQ ID NO: 78333 - DNA, 8 bp, Unknown
  misc_feature (1)..( 8): Result.001 file - promoters75/3434108
ttttttta

SEQ ID NO: 78334 - DNA, 8 bp, Unknown
  misc_feature (1)..( 8): Result.001 file - promoters75/3434108
ttttctta

SEQ ID NO: 78335 - DNA, 8 bp, Unknown
  misc_feature (1)..( 8): Result.001 file - promoters75/3434108
ttttttag

SEQ ID NO: 78336 - DNA, 7 bp, Unknown
  misc_feature (1)..( 7): Result.001 file - promoters75/3434108
aattttg

SEQ ID NO: 78337 - DNA, 7 bp, Unknown
  misc_feature (1)..( 7): Result.001 file - promoters75/3434108
tattttg

SEQ ID NO: 78338 - DNA, 7 bp, Unknown
  misc_feature (1)..( 7): Result.001 file - promoters75/3434108
aatattg

SEQ ID NO: 78339 - DNA, 9 bp, Unknown
  misc_feature (1)..( 9): Result.001 file - promoters75/3434108
ctaattaat

SEQ ID NO: 78340 - DNA, 9 bp, Unknown
  misc_feature (1)..( 9): Result.001 file - promoters75/3434108
aaaataaat

SEQ ID NO: 78341 - DNA, 9 bp, Unknown
  misc_feature (1)..( 9): Result.001 file - promoters75/3434108
ctaattaga

SEQ ID NO: 78342 - DNA, 7 bp, Unknown
  misc_feature (1)..( 7): Result.001 file - promoters75/3434108
gtataat

SEQ ID NO: 78343 - DNA, 7 bp, Unknown
  misc_feature (1)..( 7): Result.001 file - promoters75/3434108
ttataat

SEQ ID NO: 78344 - DNA, 7 bp, Unknown
  misc_feature (1)..( 7): Result.001 file - promoters75/3434108
ttataac

SEQ ID NO: 78345 - DNA, 11 bp, Unknown
  misc_feature (1)..( 11): Result.001 file - promoters75/3434108
caacatacaaa

SEQ ID NO: 78346 - DNA, 11 bp, Unknown
  misc_feature (1)..( 11): Result.001 file - promoters75/3434108
caaaataaaaa

SEQ ID NO: 78347 - DNA, 11 bp, Unknown
  misc_feature (1)..( 11): Result.001 file - promoters75/3434108
tcaaataattc

SEQ ID NO: 78348 - DNA, 12 bp, Unknown
  misc_feature (1)..( 12): Result.001 file - promoters75/3434108
ttaacaaaacaa

SEQ ID NO: 78349 - DNA, 12 bp, Unknown
  misc_feature (1)..( 12): Result.001 file - promoters75/3434108
ttaaaaaatcaa

SEQ ID NO: 78350 - DNA, 12 bp, Unknown
  misc_feature (1)..( 12): Result.001 file - promoters75/3434108
atttgaaatcaa

SEQ ID NO: 78351 - DNA, 8 bp, Unknown
  misc_feature (1)..( 8): Result.001 file - promoters75/3434108
aattttta

SEQ ID NO: 78352 - DNA, 8 bp, Unknown
  misc_feature (1)..( 8): Result.001 file - promoters75/3434108
tattatta

SEQ ID NO: 78353 - DNA, 8 bp, Unknown
  misc_feature (1)..( 8): Result.001 file - promoters75/3434108
tataattt

SEQ ID NO: 78354 - DNA, 8 bp, Unknown
  misc_feature (1)..( 8): Result.001 file - promoters75/3434108
gaaacaaa

SEQ ID NO: 78355 - DNA, 8 bp, Unknown
  misc_feature (1)..( 8): Result.001 file - promoters75/3434108
aaaacaaa

SEQ ID NO: 78356 - DNA, 8 bp, Unknown
  misc_feature (1)..( 8): Result.001 file - promoters75/3434233
aaaataaa

SEQ ID NO: 78357 - DNA, 8 bp, Unknown
  misc_feature (1)..( 8): Result.001 file - promoters75/3434233
acatatag

SEQ ID NO: 78358 - DNA, 8 bp, Unknown
  misc_feature (1)..( 8): Result.001 file - promoters75/3434233
acacatat

SEQ ID NO: 78359 - DNA, 8 bp, Unknown
  misc_feature (1)..( 8): Result.001 file - promoters75/3434233
agatatag

SEQ ID NO: 78360 - DNA, 13 bp, Unknown
  misc_feature (1)..( 13): Result.001 file - promoters75/3434233
agaaaaagaaaaa

SEQ ID NO: 78361 - DNA, 13 bp, Unknown
  misc_feature (1)..( 13): Result.001 file - promoters75/3434233
tgaaaaagaaaaa

SEQ ID NO: 78362 - DNA, 13 bp, Unknown
  misc_feature (1)..( 13): Result.001 file - promoters75/3434233
agaaaaagattgt

SEQ ID NO: 78363 - DNA, 8 bp, Unknown
  misc_feature (1)..( 8): Result.001 file - promoters75/3434233
aaaagaaa

SEQ ID NO: 78364 - DNA, 8 bp, Unknown
  misc_feature (1)..( 8): Result.001 file - promoters75/3434233
aaaagaaa

SEQ ID NO: 78365 - DNA, 8 bp, Unknown
  misc_feature (1)..( 8): Result.001 file - promoters75/3434233
gaaagaga

SEQ ID NO: 78366 - DNA, 7 bp, Unknown
  misc_feature (1)..( 7): Result.001 file - promoters75/3434233
gaaagaa

SEQ ID NO: 78367 - DNA, 7 bp, Unknown
  misc_feature (1)..( 7): Result.001 file - promoters75/3434233
aaaagaa

SEQ ID NO: 78368 - DNA, 7 bp, Unknown
  misc_feature (1)..( 7): Result.001 file - promoters75/3434233
gaaagag

SEQ ID NO: 78369 - DNA, 7 bp, Unknown
  misc_feature (1)..( 7): Result.001 file - promoters75/3434233
tcaaagc

SEQ ID NO: 78370 - DNA, 7 bp, Unknown
  misc_feature (1)..( 7): Result.001 file - promoters75/3434233
tcacagc

SEQ ID NO: 78371 - DNA, 7 bp, Unknown
  misc_feature (1)..( 7): Result.001 file - promoters75/3434233
tcaaagc

SEQ ID NO: 78372 - DNA, 8 bp, Unknown
  misc_feature (1)..( 8): Result.001 file - promoters75/3434233
aaaaaaga

SEQ ID NO: 78373 - DNA, 8 bp, Unknown
  misc_feature (1)..( 8): Result.001 file - promoters75/3434233
gaaagaga

SEQ ID NO: 78374 - DNA, 8 bp, Unknown
  misc_feature (1)..( 8): Result.001 file - promoters75/3434279
gaaaaaga

SEQ ID NO: 78375 - DNA, 15 bp, Unknown
  misc_feature (1)..( 15): Result.001 file - promoters75/3434279
ttctgaagtttctgg

SEQ ID NO: 78376 - DNA, 15 bp, Unknown
  misc_feature (1)..( 15): Result.001 file - promoters75/3434279
gacctaagtttaagt

SEQ ID NO: 78377 - DNA, 15 bp, Unknown
  misc_feature (1)..( 15): Result.001 file - promoters75/3434279
gacataaatttttta

SEQ ID NO: 78378 - DNA, 16 bp, Unknown
  misc_feature (1)..( 16): Result.001 file - promoters75/3434279
aatgatgaataacata

SEQ ID NO: 78379 - DNA, 15 bp, Unknown
  misc_feature (1)..( 15): Result.001 file - promoters75/3434279
tgtataattttatat

SEQ ID NO: 78380 - DNA, 16 bp, Unknown
  misc_feature (1)..( 16): Result.001 file - promoters75/3434279
ccactaatatatattc

SEQ ID NO: 78381 - DNA, 12 bp, Unknown
  misc_feature (1)..( 12): Result.001 file - promoters75/3434279
ccaaacaaaaca

SEQ ID NO: 78382 - DNA, 12 bp, Unknown
  misc_feature (1)..( 12): Result.001 file - promoters75/3434279
agaaacaaagta

SEQ ID NO: 78383 - DNA, 12 bp, Unknown
  misc_feature (1)..( 12): Result.001 file - promoters75/3434279
tcaaagaaattc

SEQ ID NO: 78384 - DNA, 12 bp, Unknown
  misc_feature (1)..( 12): Result.001 file - promoters75/3434279
agaaaaaaaaaa

SEQ ID NO: 78385 - DNA, 12 bp, Unknown
  misc_feature (1)..( 12): Result.001 file - promoters75/3434279
taaaaccaagac

SEQ ID NO: 78386 - DNA, 12 bp, Unknown
  misc_feature (1)..( 12): Result.001 file - promoters75/3434279
ataaaaaatttt

SEQ ID NO: 78387 - DNA, 12 bp, Unknown
  misc_feature (1)..( 12): Result.001 file - promoters75/3434279
ataaatattcaa

SEQ ID NO: 78388 - DNA, 16 bp, Unknown
  misc_feature (1)..( 16): Result.001 file - promoters75/3434279
acataaattttttata

SEQ ID NO: 78389 - DNA, 16 bp, Unknown
  misc_feature (1)..( 16): Result.001 file - promoters75/3434279
tgtataattttatata

SEQ ID NO: 78390 - DNA, 16 bp, Unknown
  misc_feature (1)..( 16): Result.001 file - promoters75/3434279
cattcctttttgtatc

SEQ ID NO: 78391 - DNA, 16 bp, Unknown
  misc_feature (1)..( 16): Result.001 file - promoters75/3434279
gacctaagtttaagtt

SEQ ID NO: 78392 - DNA, 16 bp, Unknown
  misc_feature (1)..( 16): Result.001 file - promoters75/3434279
caaagaattttttttc

SEQ ID NO: 78393 - DNA, 16 bp, Unknown
  misc_feature (1)..( 16): Result.001 file - promoters75/3434563
tcgtccatttttctga

SEQ ID NO: 78394 - DNA, 10 bp, Unknown
  misc_feature (1)..( 10): Result.001 file - promoters75/3434563
ttaaaaataa

SEQ ID NO: 78395 - DNA, 10 bp, Unknown
  misc_feature (1)..( 10): Result.001 file - promoters75/3434563
gtaaaaatta

SEQ ID NO: 78396 - DNA, 10 bp, Unknown
  misc_feature (1)..( 10): Result.001 file - promoters75/3434563
ttaataattc

SEQ ID NO: 78397 - DNA, 10 bp, Unknown
  misc_feature (1)..( 10): Result.001 file - promoters75/3434563
ctaagaattg

SEQ ID NO: 78398 - DNA, 10 bp, Unknown
  misc_feature (1)..( 10): Result.001 file - promoters75/3434563
acaataaata

SEQ ID NO: 78399 - DNA, 10 bp, Unknown
  misc_feature (1)..( 10): Result.001 file - promoters75/3435133
ctatgaaaag

SEQ ID NO: 78400 - DNA, 7 bp, Unknown
  misc_feature (1)..( 7): Result.001 file - promoters75/3435133
gtagatt

SEQ ID NO: 78401 - DNA, 7 bp, Unknown
  misc_feature (1)..( 7): Result.001 file - promoters75/3435133
atagatt

SEQ ID NO: 78402 - DNA, 7 bp, Unknown
  misc_feature (1)..( 7): Result.001 file - promoters75/3435833
ataaatt

SEQ ID NO: 78403 - DNA, 9 bp, Unknown
  misc_feature (1)..( 9): Result.001 file - promoters75/3435833
ttaagaaaa

SEQ ID NO: 78404 - DNA, 9 bp, Unknown
  misc_feature (1)..( 9): Result.001 file - promoters75/3435833
ttacgaaac

SEQ ID NO: 78405 - DNA, 9 bp, Unknown
  misc_feature (1)..( 9): Result.001 file - promoters75/3435833
ataataaaa

SEQ ID NO: 78406 - DNA, 8 bp, Unknown
  misc_feature (1)..( 8): Result.001 file - promoters75/3435833
tatataaa

SEQ ID NO: 78407 - DNA, 8 bp, Unknown
  misc_feature (1)..( 8): Result.001 file - promoters75/3435833
tatataag

SEQ ID NO: 78408 - DNA, 8 bp, Unknown
  misc_feature (1)..( 8): Result.001 file - promoters75/3436196
actataaa

SEQ ID NO: 78409 - DNA, 7 bp, Unknown
  misc_feature (1)..( 7): Result.001 file - promoters75/3436196
tctaaaa

SEQ ID NO: 78410 - DNA, 7 bp, Unknown
  misc_feature (1)..( 7): Result.001 file - promoters75/3436196
actaaaa

SEQ ID NO: 78411 - DNA, 7 bp, Unknown
  misc_feature (1)..( 7): Result.001 file - promoters75/3436196
actaaat

SEQ ID NO: 78412 - DNA, 10 bp, Unknown
  misc_feature (1)..( 10): Result.001 file - promoters75/3436196
cacataaaat

SEQ ID NO: 78413 - DNA, 10 bp, Unknown
  misc_feature (1)..( 10): Result.001 file - promoters75/3436196
atcataaaat

SEQ ID NO: 78414 - DNA, 10 bp, Unknown
  misc_feature (1)..( 10): Result.001 file - promoters75/3437244
atcgtaacct

SEQ ID NO: 78415 - DNA, 8 bp, Unknown
  misc_feature (1)..( 8): Result.001 file - promoters75/3437244
aaatcaag

SEQ ID NO: 78416 - DNA, 8 bp, Unknown
  misc_feature (1)..( 8): Result.001 file - promoters75/3437244
gaatcaac

SEQ ID NO: 78417 - DNA, 8 bp, Unknown
  misc_feature (1)..( 8): Result.001 file - promoters75/3437244
ccatcaac

SEQ ID NO: 78418 - DNA, 8 bp, Unknown
  misc_feature (1)..( 8): Result.001 file - promoters75/3437244
gaatcaca

SEQ ID NO: 78419 - DNA, 10 bp, Unknown
  misc_feature (1)..( 10): Result.001 file - promoters75/3437244
cacggcgctt

SEQ ID NO: 78420 - DNA, 10 bp, Unknown
  misc_feature (1)..( 10): Result.001 file - promoters75/3437244
cactgcgtgt

SEQ ID NO: 78421 - DNA, 10 bp, Unknown
  misc_feature (1)..( 10): Result.001 file - promoters75/3437710
agctgcgtgt

SEQ ID NO: 78422 - DNA, 8 bp, Unknown
  misc_feature (1)..( 8): Result.001 file - promoters75/3437710
acaaaaaa

SEQ ID NO: 78423 - DNA, 8 bp, Unknown
  misc_feature (1)..( 8): Result.001 file - promoters75/3437710
acacaaaa

SEQ ID NO: 78424 - DNA, 8 bp, Unknown
  misc_feature (1)..( 8): Result.001 file - promoters75/3437710
ataaaaaa

SEQ ID NO: 78425 - DNA, 10 bp, Unknown
  misc_feature (1)..( 10): Result.001 file - promoters75/3437710
aataaaaatc

SEQ ID NO: 78426 - DNA, 10 bp, Unknown
  misc_feature (1)..( 10): Result.001 file - promoters75/3437710
aatcaaaatc

SEQ ID NO: 78427 - DNA, 10 bp, Unknown
  misc_feature (1)..( 10): Result.001 file - promoters75/3437710
cataaaagtc

SEQ ID NO: 78428 - DNA, 8 bp, Unknown
  misc_feature (1)..( 8): Result.001 file - promoters75/3437710
tatccaag

SEQ ID NO: 78429 - DNA, 8 bp, Unknown
  misc_feature (1)..( 8): Result.001 file - promoters75/3437710
aatccaaa

SEQ ID NO: 78430 - DNA, 8 bp, Unknown
  misc_feature (1)..( 8): Result.001 file - promoters75/3437710
tatccaag

SEQ ID NO: 78431 - DNA, 8 bp, Unknown
  misc_feature (1)..( 8): Result.001 file - promoters75/3438077
tatccaac

SEQ ID NO: 78432 - DNA, 11 bp, Unknown
  misc_feature (1)..( 11): Result.001 file - promoters75/3438077
ttgaaccacga

SEQ ID NO: 78433 - DNA, 11 bp, Unknown
  misc_feature (1)..( 11): Result.001 file - promoters75/3438077
ttgaaacacaa

SEQ ID NO: 78434 - DNA, 11 bp, Unknown
  misc_feature (1)..( 11): Result.001 file - promoters75/3438077
aataaaaacag

SEQ ID NO: 78435 - DNA, 11 bp, Unknown
  misc_feature (1)..( 11): Result.001 file - promoters75/3438077
aagaaaaaaaa

SEQ ID NO: 78436 - DNA, 11 bp, Unknown
  misc_feature (1)..( 11): Result.001 file - promoters75/3438077
atcaaaaaatt

SEQ ID NO: 78437 - DNA, 11 bp, Unknown
  misc_feature (1)..( 11): Result.001 file - promoters75/3438194
tccaaacagaa

SEQ ID NO: 78438 - DNA, 11 bp, Unknown
  misc_feature (1)..( 11): Result.001 file - promoters75/3438194
gaagaacaggt

SEQ ID NO: 78439 - DNA, 11 bp, Unknown
  misc_feature (1)..( 11): Result.001 file - promoters75/3438194
atagaacaaac

SEQ ID NO: 78440 - DNA, 11 bp, Unknown
  misc_feature (1)..( 11): Result.001 file - promoters75/3438236
atataacaaac

SEQ ID NO: 78441 - DNA, 14 bp, Unknown
  misc_feature (1)..( 14): Result.001 file - promoters75/3438236
tcaattaatctttt

SEQ ID NO: 78442 - DNA, 14 bp, Unknown
  misc_feature (1)..( 14): Result.001 file - promoters75/3438236
tcaaataattctcc

SEQ ID NO: 78443 - DNA, 14 bp, Unknown
  misc_feature (1)..( 14): Result.001 file - promoters75/3438236
caaaagaatcagtg

SEQ ID NO: 78444 - DNA, 14 bp, Unknown
  misc_feature (1)..( 14): Result.001 file - promoters75/3438236
gattatatttcttg

SEQ ID NO: 78445 - DNA, 14 bp, Unknown
  misc_feature (1)..( 14): Result.001 file - promoters75/3438236
acttgtttttcttg

SEQ ID NO: 78446 - DNA, 14 bp, Unknown
  misc_feature (1)..( 14): Result.001 file - promoters75/3438512
caaaacaattcaag

SEQ ID NO: 78447 - DNA, 12 bp, Unknown
  misc_feature (1)..( 12): Result.001 file - promoters75/3438512
caacaatgtaca

SEQ ID NO: 78448 - DNA, 12 bp, Unknown
  misc_feature (1)..( 12): Result.001 file - promoters75/3438512
caataatttaca

SEQ ID NO: 78449 - DNA, 12 bp, Unknown
  misc_feature (1)..( 12): Result.001 file - promoters75/3438512
tgaaaatttata

SEQ ID NO: 78450 - DNA, 12 bp, Unknown
  misc_feature (1)..( 12): Result.001 file - promoters75/3438512
gtataattttat

SEQ ID NO: 78451 - DNA, 6 bp, Unknown
  misc_feature (1)..( 6): Result.001 file - promoters75/3438512
ataact

SEQ ID NO: 78452 - DNA, 6 bp, Unknown
  misc_feature (1)..( 6): Result.001 file - promoters75/3438512
ataact

SEQ ID NO: 78453 - DNA, 6 bp, Unknown
  misc_feature (1)..( 6): Result.001 file - promoters75/3438512
ataact

SEQ ID NO: 78454 - DNA, 12 bp, Unknown
  misc_feature (1)..( 12): Result.001 file - promoters75/3438512
tacacaagattt

SEQ ID NO: 78455 - DNA, 12 bp, Unknown
  misc_feature (1)..( 12): Result.001 file - promoters75/3438512
tacataagtttt

SEQ ID NO: 78456 - DNA, 12 bp, Unknown
  misc_feature (1)..( 12): Result.001 file - promoters75/3438512
ttttgaagtttg

SEQ ID NO: 78457 - DNA, 7 bp, Unknown
  misc_feature (1)..( 7): Result.001 file - promoters75/3438512
aaactta

SEQ ID NO: 78458 - DNA, 7 bp, Unknown
  misc_feature (1)..( 7): Result.001 file - promoters75/3438512
aaacttt

SEQ ID NO: 78459 - DNA, 7 bp, Unknown
  misc_feature (1)..( 7): Result.001 file - promoters75/3438512
aaagttt

SEQ ID NO: 78460 - DNA, 11 bp, Unknown
  misc_feature (1)..( 11): Result.001 file - promoters75/3438512
ctttgcttaca

SEQ ID NO: 78461 - DNA, 11 bp, Unknown
  misc_feature (1)..( 11): Result.001 file - promoters75/3438512
ttttacttttt

SEQ ID NO: 78462 - DNA, 11 bp, Unknown
  misc_feature (1)..( 11): Result.001 file - promoters75/3438512
ttttaccagtg

SEQ ID NO: 78463 - DNA, 11 bp, Unknown
  misc_feature (1)..( 11): Result.001 file - promoters75/3438512
atatacttttt

SEQ ID NO: 78464 - DNA, 9 bp, Unknown
  misc_feature (1)..( 9): Result.001 file - promoters75/3438512
tcaataaac

SEQ ID NO: 78465 - DNA, 9 bp, Unknown
  misc_feature (1)..( 9): Result.001 file - promoters75/3438512
tcaaaaaaa

SEQ ID NO: 78466 - DNA, 9 bp, Unknown
  misc_feature (1)..( 9): Result.001 file - promoters75/3438632
ggaaaaaaa

SEQ ID NO: 78467 - DNA, 8 bp, Unknown
  misc_feature (1)..( 8): Result.001 file - promoters75/3438632
agatatta

SEQ ID NO: 78468 - DNA, 8 bp, Unknown
  misc_feature (1)..( 8): Result.001 file - promoters75/3438632
cgatatta

SEQ ID NO: 78469 - DNA, 8 bp, Unknown
  misc_feature (1)..( 8): Result.001 file - promoters75/3438632
agacattt

SEQ ID NO: 78470 - DNA, 11 bp, Unknown
  misc_feature (1)..( 11): Result.001 file - promoters75/3438632
gtctgaacgaa

SEQ ID NO: 78471 - DNA, 11 bp, Unknown
  misc_feature (1)..( 11): Result.001 file - promoters75/3438632
aaaagaaagaa

SEQ ID NO: 78472 - DNA, 11 bp, Unknown
  misc_feature (1)..( 11): Result.001 file - promoters75/3439213
aaaaaaaagac

SEQ ID NO: 78473 - DNA, 9 bp, Unknown
  misc_feature (1)..( 9): Result.001 file - promoters75/3439213
attttgatt

SEQ ID NO: 78474 - DNA, 9 bp, Unknown
  misc_feature (1)..( 9): Result.001 file - promoters75/3439213
attttgatt

SEQ ID NO: 78475 - DNA, 9 bp, Unknown
  misc_feature (1)..( 9): Result.001 file - promoters75/3439213
atttttatt

SEQ ID NO: 78476 - DNA, 9 bp, Unknown
  misc_feature (1)..( 9): Result.001 file - promoters75/3439472
cttttgaag

SEQ ID NO: 78477 - DNA, 9 bp, Unknown
  misc_feature (1)..( 9): Result.001 file - promoters75/3439472
gaaacaaag

SEQ ID NO: 78478 - DNA, 9 bp, Unknown
  misc_feature (1)..( 9): Result.001 file - promoters75/3439472
gaaccaatc

SEQ ID NO: 78479 - DNA, 9 bp, Unknown
  misc_feature (1)..( 9): Result.001 file - promoters75/3439472
caaagaaat

SEQ ID NO: 78480 - DNA, 9 bp, Unknown
  misc_feature (1)..( 9): Result.001 file - promoters75/3439472
aaaacaaaa

SEQ ID NO: 78481 - DNA, 9 bp, Unknown
  misc_feature (1)..( 9): Result.001 file - promoters75/3439472
tcgacaaaa

SEQ ID NO: 78482 - DNA, 12 bp, Unknown
  misc_feature (1)..( 12): Result.001 file - promoters75/3439472
gaaaaaaattgt

SEQ ID NO: 78483 - DNA, 12 bp, Unknown
  misc_feature (1)..( 12): Result.001 file - promoters75/3439472
gttgaaacttga

SEQ ID NO: 78484 - DNA, 12 bp, Unknown
  misc_feature (1)..( 12): Result.001 file - promoters75/3439472
gacataacctga

SEQ ID NO: 78485 - DNA, 12 bp, Unknown
  misc_feature (1)..( 12): Result.001 file - promoters75/3439472
accaaaacttct

SEQ ID NO: 78486 - DNA, 12 bp, Unknown
  misc_feature (1)..( 12): Result.001 file - promoters75/3439614
gttggaactata

SEQ ID NO: 78487 - DNA, 10 bp, Unknown
  misc_feature (1)..( 10): Result.001 file - promoters75/3439614
tattagctta

SEQ ID NO: 78488 - DNA, 10 bp, Unknown
  misc_feature (1)..( 10): Result.001 file - promoters75/3439614
gatttgcttc

SEQ ID NO: 78489 - DNA, 10 bp, Unknown
  misc_feature (1)..( 10): Result.001 file - promoters75/3439614
tattagagag

SEQ ID NO: 78490 - DNA, 10 bp, Unknown
  misc_feature (1)..( 10): Result.001 file - promoters75/3439614
tacgtgcttc

SEQ ID NO: 78491 - DNA, 7 bp, Unknown
  misc_feature (1)..( 7): Result.001 file - promoters75/3439614
ttagagt

SEQ ID NO: 78492 - DNA, 7 bp, Unknown
  misc_feature (1)..( 7): Result.001 file - promoters75/3439614
ttagagc

SEQ ID NO: 78493 - DNA, 7 bp, Unknown
  misc_feature (1)..( 7): Result.001 file - promoters75/3439614
ttagaga

SEQ ID NO: 78494 - DNA, 7 bp, Unknown
  misc_feature (1)..( 7): Result.001 file - promoters75/3593205
ttaaaga

SEQ ID NO: 78495 - DNA, 13 bp, Unknown
  misc_feature (1)..( 13): Result.001 file - promoters75/3593205
aattggatccgaa

SEQ ID NO: 78496 - DNA, 13 bp, Unknown
  misc_feature (1)..( 13): Result.001 file - promoters75/3593205
aattagatttttt

SEQ ID NO: 78497 - DNA, 13 bp, Unknown
  misc_feature (1)..( 13): Result.001 file - promoters75/3593205
tattcgatctttt

SEQ ID NO: 78498 - DNA, 8 bp, Unknown
  misc_feature (1)..( 8): Result.001 file - promoters75/3593205
ttatccga

SEQ ID NO: 78499 - DNA, 8 bp, Unknown
  misc_feature (1)..( 8): Result.001 file - promoters75/3593205
ttatcctt

SEQ ID NO: 78500 - DNA, 8 bp, Unknown
  misc_feature (1)..( 8): Result.001 file - promoters75/3593230
ttattctt

SEQ ID NO: 78501 - DNA, 8 bp, Unknown
  misc_feature (1)..( 8): Result.001 file - promoters75/3593230
cacattca

SEQ ID NO: 78502 - DNA, 8 bp, Unknown
  misc_feature (1)..( 8): Result.001 file - promoters75/3593230
gtcattca

SEQ ID NO: 78503 - DNA, 8 bp, Unknown
  misc_feature (1)..( 8): Result.001 file - promoters75/3593230
cacgttct

SEQ ID NO: 78504 - DNA, 8 bp, Unknown
  misc_feature (1)..( 8): Result.001 file - promoters75/3593230
ctttcttg

SEQ ID NO: 78505 - DNA, 8 bp, Unknown
  misc_feature (1)..( 8): Result.001 file - promoters75/3593230
tcttcttg

SEQ ID NO: 78506 - DNA, 8 bp, Unknown
  misc_feature (1)..( 8): Result.001 file - promoters75/4254434
tcttcttt

SEQ ID NO: 78507 - DNA, 8 bp, Unknown
  misc_feature (1)..( 8): Result.001 file - promoters75/4254434
tttagatt

SEQ ID NO: 78508 - DNA, 8 bp, Unknown
  misc_feature (1)..( 8): Result.001 file - promoters75/4254434
tttagaga

SEQ ID NO: 78509 - DNA, 8 bp, Unknown
  misc_feature (1)..( 8): Result.001 file - promoters75/4254434
attaaatt

SEQ ID NO: 78510 - DNA, 11 bp, Unknown
  misc_feature (1)..( 11): Result.001 file - promoters75/4254434
agatttagata

SEQ ID NO: 78511 - DNA, 11 bp, Unknown
  misc_feature (1)..( 11): Result.001 file - promoters75/4254434
agattttgatt

SEQ ID NO: 78512 - DNA, 11 bp, Unknown
  misc_feature (1)..( 11): Result.001 file - promoters75/4262420
ttcattaaatt

SEQ ID NO: 78513 - DNA, 10 bp, Unknown
  misc_feature (1)..( 10): Result.001 file - promoters75/4262420
cctattggtt

SEQ ID NO: 78514 - DNA, 10 bp, Unknown
  misc_feature (1)..( 10): Result.001 file - promoters75/4262420
tctaatggtt

SEQ ID NO: 78515 - DNA, 10 bp, Unknown
  misc_feature (1)..( 10): Result.001 file - promoters75/4262420
cctattgaca

SEQ ID NO: 78516 - DNA, 6 bp, Unknown
  misc_feature (1)..( 6): Result.001 file - promoters75/4262420
tgggat

SEQ ID NO: 78517 - DNA, 6 bp, Unknown
  misc_feature (1)..( 6): Result.001 file - promoters75/4262420
tgggat

SEQ ID NO: 78518 - DNA, 6 bp, Unknown
  misc_feature (1)..( 6): Result.001 file - promoters75/4262428
tgggat

SEQ ID NO: 78519 - DNA, 7 bp, Unknown
  misc_feature (1)..( 7): Result.001 file - promoters75/4262428
attaaat

SEQ ID NO: 78520 - DNA, 7 bp, Unknown
  misc_feature (1)..( 7): Result.001 file - promoters75/4262428
attaaat

SEQ ID NO: 78521 - DNA, 7 bp, Unknown
  misc_feature (1)..( 7): Result.001 file - promoters75/4262428
attaaat

SEQ ID NO: 78522 - DNA, 7 bp, Unknown
  misc_feature (1)..( 7): Result.001 file - promoters75/4262428
tatttaa

SEQ ID NO: 78523 - DNA, 7 bp, Unknown
  misc_feature (1)..( 7): Result.001 file - promoters75/4262428
tatataa

SEQ ID NO: 78524 - DNA, 7 bp, Unknown
  misc_feature (1)..( 7): Result.001 file - promoters75/4262428
aatataa

SEQ ID NO: 78525 - DNA, 9 bp, Unknown
  misc_feature (1)..( 9): Result.001 file - promoters75/4262428
cataaatag

SEQ ID NO: 78526 - DNA, 9 bp, Unknown
  misc_feature (1)..( 9): Result.001 file - promoters75/4262428
tataaatgt

SEQ ID NO: 78527 - DNA, 9 bp, Unknown
  misc_feature (1)..( 9): Result.001 file - promoters75/4281773
aataaaaat

SEQ ID NO: 78528 - DNA, 7 bp, Unknown
  misc_feature (1)..( 7): Result.001 file - promoters75/4281773
ttagggc

SEQ ID NO: 78529 - DNA, 7 bp, Unknown
  misc_feature (1)..( 7): Result.001 file - promoters75/4281773
ttagggt

SEQ ID NO: 78530 - DNA, 7 bp, Unknown
  misc_feature (1)..( 7): Result.001 file - promoters75/4281773
ctagggc

SEQ ID NO: 78531 - DNA, 7 bp, Unknown
  misc_feature (1)..( 7): Result.001 file - promoters75/4281773
cagtatt

SEQ ID NO: 78532 - DNA, 7 bp, Unknown
  misc_feature (1)..( 7): Result.001 file - promoters75/4281773
cagtata

SEQ ID NO: 78533 - DNA, 7 bp, Unknown
  misc_feature (1)..( 7): Result.001 file - promoters75/4281773
aagtatt

SEQ ID NO: 78534 - DNA, 15 bp, Unknown
  misc_feature (1)..( 15): Result.001 file - promoters75/4281773
ttctgaagtttctgg

SEQ ID NO: 78535 - DNA, 15 bp, Unknown
  misc_feature (1)..( 15): Result.001 file - promoters75/4281773
atgcatagtttatgg

SEQ ID NO: 78536 - DNA, 15 bp, Unknown
  misc_feature (1)..( 15): Result.001 file - promoters75/4281773
atgtatagttttgtg

SEQ ID NO: 78537 - DNA, 7 bp, Unknown
  misc_feature (1)..( 7): Result.001 file - promoters75/4281773
aaacaca

SEQ ID NO: 78538 - DNA, 7 bp, Unknown
  misc_feature (1)..( 7): Result.001 file - promoters75/4281773
aaagaca

SEQ ID NO: 78539 - DNA, 7 bp, Unknown
  misc_feature (1)..( 7): Result.001 file - promoters75/4281773
aaagact

SEQ ID NO: 78540 - DNA, 9 bp, Unknown
  misc_feature (1)..( 9): Result.001 file - promoters75/4281773
aagaagaag

SEQ ID NO: 78541 - DNA, 9 bp, Unknown
  misc_feature (1)..( 9): Result.001 file - promoters75/4281773
aagaaaaag

SEQ ID NO: 78542 - DNA, 9 bp, Unknown
  misc_feature (1)..( 9): Result.001 file - promoters75/4281925
aaggaaaga

SEQ ID NO: 78543 - DNA, 11 bp, Unknown
  misc_feature (1)..( 11): Result.001 file - promoters75/4281925
aaattaaaaca

SEQ ID NO: 78544 - DNA, 11 bp, Unknown
  misc_feature (1)..( 11): Result.001 file - promoters75/4281925
aaaataacaca

SEQ ID NO: 78545 - DNA, 11 bp, Unknown
  misc_feature (1)..( 11): Result.001 file - promoters75/4281925
gcaataaaaat

SEQ ID NO: 78546 - DNA, 8 bp, Unknown
  misc_feature (1)..( 8): Result.001 file - promoters75/4281925
taattttt

SEQ ID NO: 78547 - DNA, 8 bp, Unknown
  misc_feature (1)..( 8): Result.001 file - promoters75/4281925
taaatttt

SEQ ID NO: 78548 - DNA, 8 bp, Unknown
  misc_feature (1)..( 8): Result.001 file - promoters75/4281925
aaattttg

SEQ ID NO: 78549 - DNA, 14 bp, Unknown
  misc_feature (1)..( 14): Result.001 file - promoters75/4281925
aatttataaatgta

SEQ ID NO: 78550 - DNA, 14 bp, Unknown
  misc_feature (1)..( 14): Result.001 file - promoters75/4281925
aatttacatatcta

SEQ ID NO: 78551 - DNA, 14 bp, Unknown
  misc_feature (1)..( 14): Result.001 file - promoters75/4282316
attttacttttcat

SEQ ID NO: 78552 - DNA, 7 bp, Unknown
  misc_feature (1)..( 7): Result.001 file - promoters75/4282316
aattatc

SEQ ID NO: 78553 - DNA, 7 bp, Unknown
  misc_feature (1)..( 7): Result.001 file - promoters75/4282316
cattatc

SEQ ID NO: 78554 - DNA, 7 bp, Unknown
  misc_feature (1)..( 7): Result.001 file - promoters75/4282316
cattata

SEQ ID NO: 78555 - DNA, 9 bp, Unknown
  misc_feature (1)..( 9): Result.001 file - promoters75/4282316
aaaagttta

SEQ ID NO: 78556 - DNA, 9 bp, Unknown
  misc_feature (1)..( 9): Result.001 file - promoters75/4282316
aaatgtttt

SEQ ID NO: 78557 - DNA, 9 bp, Unknown
  misc_feature (1)..( 9): Result.001 file - promoters75/4282418
caatatttt

SEQ ID NO: 78558 - DNA, 9 bp, Unknown
  misc_feature (1)..( 9): Result.001 file - promoters75/4282418
aaactaaaa

SEQ ID NO: 78559 - DNA, 9 bp, Unknown
  misc_feature (1)..( 9): Result.001 file - promoters75/4282418
aaaataaaa

SEQ ID NO: 78560 - DNA, 9 bp, Unknown
  misc_feature (1)..( 9): Result.001 file - promoters75/4282503
aaagtaaac

SEQ ID NO: 78561 - DNA, 7 bp, Unknown
  misc_feature (1)..( 7): Result.001 file - promoters75/4282503
taaaatt

SEQ ID NO: 78562 - DNA, 7 bp, Unknown
  misc_feature (1)..( 7): Result.001 file - promoters75/4282503
taaaatc

SEQ ID NO: 78563 - DNA, 7 bp, Unknown
  misc_feature (1)..( 7): Result.001 file - promoters75/4282503
caaaatc

SEQ ID NO: 78564 - DNA, 10 bp, Unknown
  misc_feature (1)..( 10): Result.001 file - promoters75/4282503
tttgaatgcc

SEQ ID NO: 78565 - DNA, 10 bp, Unknown
  misc_feature (1)..( 10): Result.001 file - promoters75/4282503
ttttaataac

SEQ ID NO: 78566 - DNA, 10 bp, Unknown
  misc_feature (1)..( 10): Result.001 file - promoters75/4282503
ttttactaac

SEQ ID NO: 78567 - DNA, 11 bp, Unknown
  misc_feature (1)..( 11): Result.001 file - promoters75/4282503
ccaattatatg

SEQ ID NO: 78568 - DNA, 11 bp, Unknown
  misc_feature (1)..( 11): Result.001 file - promoters75/4282503
tttattaaatg

SEQ ID NO: 78569 - DNA, 11 bp, Unknown
  misc_feature (1)..( 11): Result.001 file - promoters75/4282667
tttactaactt

SEQ ID NO: 78570 - DNA, 8 bp, Unknown
  misc_feature (1)..( 8): Result.001 file - promoters75/4282667
aatgggct

SEQ ID NO: 78571 - DNA, 8 bp, Unknown
  misc_feature (1)..( 8): Result.001 file - promoters75/4282667
aataggcc

SEQ ID NO: 78572 - DNA, 8 bp, Unknown
  misc_feature (1)..( 8): Result.001 file - promoters75/4282667
tatgggcc

SEQ ID NO: 78573 - DNA, 8 bp, Unknown
  misc_feature (1)..( 8): Result.001 file - promoters75/4282667
aatgggcc

SEQ ID NO: 78574 - DNA, 8 bp, Unknown
  misc_feature (1)..( 8): Result.001 file - promoters75/4282667
aatgggtc

SEQ ID NO: 78575 - DNA, 8 bp, Unknown
  misc_feature (1)..( 8): Result.001 file - promoters75/4282667
tttgggcc

SEQ ID NO: 78576 - DNA, 12 bp, Unknown
  misc_feature (1)..( 12): Result.001 file - promoters75/4282667
attgttacaaat

SEQ ID NO: 78577 - DNA, 12 bp, Unknown
  misc_feature (1)..( 12): Result.001 file - promoters75/4282667
atttttactttt

SEQ ID NO: 78578 - DNA, 12 bp, Unknown
  misc_feature (1)..( 12): Result.001 file - promoters75/4282667
tttgttagttca

SEQ ID NO: 78579 - DNA, 12 bp, Unknown
  misc_feature (1)..( 12): Result.001 file - promoters75/4282667
attgataggtgc

SEQ ID NO: 78580 - DNA, 12 bp, Unknown
  misc_feature (1)..( 12): Result.001 file - promoters75/4282667
gactttagtttt

SEQ ID NO: 78581 - DNA, 12 bp, Unknown
  misc_feature (1)..( 12): Result.001 file - promoters75/4282667
tttgtttttgat

SEQ ID NO: 78582 - DNA, 11 bp, Unknown
  misc_feature (1)..( 11): Result.001 file - promoters75/4282667
tattcaactat

SEQ ID NO: 78583 - DNA, 11 bp, Unknown
  misc_feature (1)..( 11): Result.001 file - promoters75/4282667
aattcaaaaag

SEQ ID NO: 78584 - DNA, 11 bp, Unknown
  misc_feature (1)..( 11): Result.001 file - promoters75/4282667
tgttcaaaaaa

SEQ ID NO: 78585 - DNA, 11 bp, Unknown
  misc_feature (1)..( 11): Result.001 file - promoters75/4282667
aaaaaaaaaaa

SEQ ID NO: 78586 - DNA, 11 bp, Unknown
  misc_feature (1)..( 11): Result.001 file - promoters75/4282667
gaaacaaagta

SEQ ID NO: 78587 - DNA, 11 bp, Unknown
  misc_feature (1)..( 11): Result.001 file - promoters75/4282667
aaaccaagacg

SEQ ID NO: 78588 - DNA, 11 bp, Unknown
  misc_feature (1)..( 11): Result.001 file - promoters75/4282667
gatacaaaacc

SEQ ID NO: 78589 - DNA, 12 bp, Unknown
  misc_feature (1)..( 12): Result.001 file - promoters75/4282667
ctcttatgattt

SEQ ID NO: 78590 - DNA, 12 bp, Unknown
  misc_feature (1)..( 12): Result.001 file - promoters75/4282667
cttccatgtttt

SEQ ID NO: 78591 - DNA, 12 bp, Unknown
  misc_feature (1)..( 12): Result.001 file - promoters75/4282667
ttcttaggattc

SEQ ID NO: 78592 - DNA, 12 bp, Unknown
  misc_feature (1)..( 12): Result.001 file - promoters75/4282667
ctcgtataattc

SEQ ID NO: 78593 - DNA, 12 bp, Unknown
  misc_feature (1)..( 12): Result.001 file - promoters75/4282667
ttcgtttaacag

SEQ ID NO: 78594 - DNA, 12 bp, Unknown
  misc_feature (1)..( 12): Result.001 file - promoters75/4282788
ttcttattggaa

SEQ ID NO: 78595 - DNA, 8 bp, Unknown
  misc_feature (1)..( 8): Result.001 file - promoters75/4282788
gttgcttt

SEQ ID NO: 78596 - DNA, 8 bp, Unknown
  misc_feature (1)..( 8): Result.001 file - promoters75/4282788
tttgattt

SEQ ID NO: 78597 - DNA, 8 bp, Unknown
  misc_feature (1)..( 8): Result.001 file - promoters75/4283355
tttgattg

SEQ ID NO: 78598 - DNA, 10 bp, Unknown
  misc_feature (1)..( 10): Result.001 file - promoters75/4283355
gaaagaaaat

SEQ ID NO: 78599 - DNA, 10 bp, Unknown
  misc_feature (1)..( 10): Result.001 file - promoters75/4283355
caaacaaaac

SEQ ID NO: 78600 - DNA, 10 bp, Unknown
  misc_feature (1)..( 10): Result.001 file - promoters75/4283355
gtaagaaaaa

SEQ ID NO: 78601 - DNA, 10 bp, Unknown
  misc_feature (1)..( 10): Result.001 file - promoters75/4283355
gaaacaaagt

SEQ ID NO: 78602 - DNA, 10 bp, Unknown
  misc_feature (1)..( 10): Result.001 file - promoters75/4283355
tatacaaaaa

SEQ ID NO: 78603 - DNA, 10 bp, Unknown
  misc_feature (1)..( 10): Result.001 file - promoters75/4283355
tatataaaac

SEQ ID NO: 78604 - DNA, 10 bp, Unknown
  misc_feature (1)..( 10): Result.001 file - promoters75/4283355
aaatcaaaaa

SEQ ID NO: 78605 - DNA, 17 bp, Unknown
  misc_feature (1)..( 17): Result.001 file - promoters75/4283355
ctccactcttatgattt

SEQ ID NO: 78606 - DNA, 17 bp, Unknown
  misc_feature (1)..( 17): Result.001 file - promoters75/4283355
gctctctcgtataattc

SEQ ID NO: 78607 - DNA, 17 bp, Unknown
  misc_feature (1)..( 17): Result.001 file - promoters75/4283355
tctacttcttattggaa

SEQ ID NO: 78608 - DNA, 17 bp, Unknown
  misc_feature (1)..( 17): Result.001 file - promoters75/4283355
aagaacttccatgtttt

SEQ ID NO: 78609 - DNA, 17 bp, Unknown
  misc_feature (1)..( 17): Result.001 file - promoters75/4283355
ctctactcttggaatat

SEQ ID NO: 78610 - DNA, 17 bp, Unknown
  misc_feature (1)..( 17): Result.001 file - promoters75/4283355
tgacgttcttgccctct

SEQ ID NO: 78611 - DNA, 10 bp, Unknown
  misc_feature (1)..( 10): Result.001 file - promoters75/4283355
tttagttttg

SEQ ID NO: 78612 - DNA, 10 bp, Unknown
  misc_feature (1)..( 10): Result.001 file - promoters75/4283355
aaaagttttt

SEQ ID NO: 78613 - DNA, 10 bp, Unknown
  misc_feature (1)..( 10): Result.001 file - promoters75/4283355
tttactttta

SEQ ID NO: 78614 - DNA, 10 bp, Unknown
  misc_feature (1)..( 10): Result.001 file - promoters75/4283355
tagggttttt

SEQ ID NO: 78615 - DNA, 10 bp, Unknown
  misc_feature (1)..( 10): Result.001 file - promoters75/4283355
ggatgttttt

SEQ ID NO: 78616 - DNA, 10 bp, Unknown
  misc_feature (1)..( 10): Result.001 file - promoters75/4283378
acaagtttcc

SEQ ID NO: 78617 - DNA, 9 bp, Unknown
  misc_feature (1)..( 9): Result.001 file - promoters75/4283378
aatatatac

SEQ ID NO: 78618 - DNA, 9 bp, Unknown
  misc_feature (1)..( 9): Result.001 file - promoters75/4283378
agtatatac

SEQ ID NO: 78619 - DNA, 9 bp, Unknown
  misc_feature (1)..( 9): Result.001 file - promoters75/4283378
aatatgtac

SEQ ID NO: 78620 - DNA, 9 bp, Unknown
  misc_feature (1)..( 9): Result.001 file - promoters75/4283378
tatataata

SEQ ID NO: 78621 - DNA, 9 bp, Unknown
  misc_feature (1)..( 9): Result.001 file - promoters75/4283378
tatataaat

SEQ ID NO: 78622 - DNA, 9 bp, Unknown
  misc_feature (1)..( 9): Result.001 file - promoters75/4283378
cctataaat

SEQ ID NO: 78623 - DNA, 15 bp, Unknown
  misc_feature (1)..( 15): Result.001 file - promoters75/4283378
tacgttttaaaagta

SEQ ID NO: 78624 - DNA, 15 bp, Unknown
  misc_feature (1)..( 15): Result.001 file - promoters75/4283378
atatctttataagta

SEQ ID NO: 78625 - DNA, 15 bp, Unknown
  misc_feature (1)..( 15): Result.001 file - promoters75/4283378
ataactttatgttat

SEQ ID NO: 78626 - DNA, 8 bp, Unknown
  misc_feature (1)..( 8): Result.001 file - promoters75/4283378
aaatatca

SEQ ID NO: 78627 - DNA, 8 bp, Unknown
  misc_feature (1)..( 8): Result.001 file - promoters75/4283378
aaatgtca

SEQ ID NO: 78628 - DNA, 8 bp, Unknown
  misc_feature (1)..( 8): Result.001 file - promoters75/4577400
aaatgtta

SEQ ID NO: 78629 - DNA, 11 bp, Unknown
  misc_feature (1)..( 11): Result.001 file - promoters75/4577400
ccagaattaag

SEQ ID NO: 78630 - DNA, 11 bp, Unknown
  misc_feature (1)..( 11): Result.001 file - promoters75/4577400
ccataattagt

SEQ ID NO: 78631 - DNA, 11 bp, Unknown
  misc_feature (1)..( 11): Result.001 file - promoters75/4608096
atgtaattaag

SEQ ID NO: 78632 - DNA, 11 bp, Unknown
  misc_feature (1)..( 11): Result.001 file - promoters75/4608096
ttgattgatag

SEQ ID NO: 78633 - DNA, 11 bp, Unknown
  misc_feature (1)..( 11): Result.001 file - promoters75/4608096
gtctttgttag

SEQ ID NO: 78634 - DNA, 11 bp, Unknown
  misc_feature (1)..( 11): Result.001 file - promoters75/4608096
ctttttgttct

SEQ ID NO: 78635 - DNA, 11 bp, Unknown
  misc_feature (1)..( 11): Result.001 file - promoters75/4608096
ctttttgtatc

SEQ ID NO: 78636 - DNA, 11 bp, Unknown
  misc_feature (1)..( 11): Result.001 file - promoters75/4608096
ttttctgttca

SEQ ID NO: 78637 - DNA, 11 bp, Unknown
  misc_feature (1)..( 11): Result.001 file - promoters75/4608096
gggtttgttgt

SEQ ID NO: 78638 - DNA, 11 bp, Unknown
  misc_feature (1)..( 11): Result.001 file - promoters75/4608096
tttataaaacc

SEQ ID NO: 78639 - DNA, 11 bp, Unknown
  misc_feature (1)..( 11): Result.001 file - promoters75/4608096
actattaaagc

SEQ ID NO: 78640 - DNA, 11 bp, Unknown
  misc_feature (1)..( 11): Result.001 file - promoters75/4608096
tatataaatcc

SEQ ID NO: 78641 - DNA, 11 bp, Unknown
  misc_feature (1)..( 11): Result.001 file - promoters75/4608096
actataaaact

SEQ ID NO: 78642 - DNA, 11 bp, Unknown
  misc_feature (1)..( 11): Result.001 file - promoters75/4608096
taattaaaacc

SEQ ID NO: 78643 - DNA, 11 bp, Unknown
  misc_feature (1)..( 11): Result.001 file - promoters75/4608965
tttatgaatcc

SEQ ID NO: 78644 - DNA, 12 bp, Unknown
  misc_feature (1)..( 12): Result.001 file - promoters75/4608965
atttactttgga

SEQ ID NO: 78645 - DNA, 12 bp, Unknown
  misc_feature (1)..( 12): Result.001 file - promoters75/4608965
cattagtttcct

SEQ ID NO: 78646 - DNA, 12 bp, Unknown
  misc_feature (1)..( 12): Result.001 file - promoters75/4608965
gtttgcttcttt

SEQ ID NO: 78647 - DNA, 10 bp, Unknown
  misc_feature (1)..( 10): Result.001 file - promoters75/4608965
ttaatttcct

SEQ ID NO: 78648 - DNA, 12 bp, Unknown
  misc_feature (1)..( 12): Result.001 file - promoters75/4608965
cccaagtgtcct

SEQ ID NO: 78649 - DNA, 12 bp, Unknown
  misc_feature (1)..( 12): Result.001 file - promoters75/4608965
cattcgtttagt

SEQ ID NO: 78650 - DNA, 14 bp, Unknown
  misc_feature (1)..( 14): Result.001 file - promoters75/4608965
caaaagaatcagtg

SEQ ID NO: 78651 - DNA, 14 bp, Unknown
  misc_feature (1)..( 14): Result.001 file - promoters75/4608965
caaaacaattcaag

SEQ ID NO: 78652 - DNA, 14 bp, Unknown
  misc_feature (1)..( 14): Result.001 file - promoters75/4608965
agaacgaaatatct

SEQ ID NO: 78653 - DNA, 14 bp, Unknown
  misc_feature (1)..( 14): Result.001 file - promoters75/4608965
tttacgaaattgtg

SEQ ID NO: 78654 - DNA, 14 bp, Unknown
  misc_feature (1)..( 14): Result.001 file - promoters75/4608965
ccaacgaaacgatt

SEQ ID NO: 78655 - DNA, 14 bp, Unknown
  misc_feature (1)..( 14): Result.001 file - promoters75/4608985
ttccacagttctgt

SEQ ID NO: 78656 - DNA, 8 bp, Unknown
  misc_feature (1)..( 8): Result.001 file - promoters75/4608985
taaaaatt

SEQ ID NO: 78657 - DNA, 8 bp, Unknown
  misc_feature (1)..( 8): Result.001 file - promoters75/4608985
gtaaaatt

SEQ ID NO: 78658 - DNA, 8 bp, Unknown
  misc_feature (1)..( 8): Result.001 file - promoters75/4608985
taaaaatc

SEQ ID NO: 78659 - DNA, 9 bp, Unknown
  misc_feature (1)..( 9): Result.001 file - promoters75/4608985
aataaaatt

SEQ ID NO: 78660 - DNA, 9 bp, Unknown
  misc_feature (1)..( 9): Result.001 file - promoters75/4608985
gataatatt

SEQ ID NO: 78661 - DNA, 9 bp, Unknown
  misc_feature (1)..( 9): Result.001 file - promoters75/4608985
caaaaaact

SEQ ID NO: 78662 - DNA, 14 bp, Unknown
  misc_feature (1)..( 14): Result.001 file - promoters75/4608985
taaataaatttttg

SEQ ID NO: 78663 - DNA, 14 bp, Unknown
  misc_feature (1)..( 14): Result.001 file - promoters75/4608985
caaacaaatgtttg

SEQ ID NO: 78664 - DNA, 14 bp, Unknown
  misc_feature (1)..( 14): Result.001 file - promoters75/4608985
taactaatttctta

SEQ ID NO: 78665 - DNA, 15 bp, Unknown
  misc_feature (1)..( 15): Result.001 file - promoters75/4608985
taatataactcttgg

SEQ ID NO: 78666 - DNA, 10 bp, Unknown
  misc_feature (1)..( 10): Result.001 file - promoters75/4608985
aatattatta

SEQ ID NO: 78667 - DNA, 10 bp, Unknown
  misc_feature (1)..( 10): Result.001 file - promoters75/4608985
gttattatat

SEQ ID NO: 78668 - DNA, 10 bp, Unknown
  misc_feature (1)..( 10): Result.001 file - promoters75/4608985
gttaatatat

SEQ ID NO: 78669 - DNA, 10 bp, Unknown
  misc_feature (1)..( 10): Result.001 file - promoters75/4608985
aaaaactaat

SEQ ID NO: 78670 - DNA, 10 bp, Unknown
  misc_feature (1)..( 10): Result.001 file - promoters75/4608985
gaaaactcat

SEQ ID NO: 78671 - DNA, 11 bp, Unknown
  misc_feature (1)..( 11): Result.001 file - promoters75/4608985
aaataactaat

SEQ ID NO: 78672 - DNA, 11 bp, Unknown
  misc_feature (1)..( 11): Result.001 file - promoters75/4608985
agttaaaaaat

SEQ ID NO: 78673 - DNA, 11 bp, Unknown
  misc_feature (1)..( 11): Result.001 file - promoters75/4608985
agttaatatat

SEQ ID NO: 78674 - DNA, 11 bp, Unknown
  misc_feature (1)..( 11): Result.001 file - promoters75/4608985
tgttattatat

SEQ ID NO: 78675 - DNA, 11 bp, Unknown
  misc_feature (1)..( 11): Result.001 file - promoters75/4608985
agttatttaaa

SEQ ID NO: 78676 - DNA, 10 bp, Unknown
  misc_feature (1)..( 10): Result.001 file - promoters75/4608985
caaacaaaaa

SEQ ID NO: 78677 - DNA, 10 bp, Unknown
  misc_feature (1)..( 10): Result.001 file - promoters75/4608985
caaccaagtg

SEQ ID NO: 78678 - DNA, 10 bp, Unknown
  misc_feature (1)..( 10): Result.001 file - promoters75/4608985
caaacaaaaa

SEQ ID NO: 78679 - DNA, 8 bp, Unknown
  misc_feature (1)..( 8): Result.001 file - promoters75/4608985
attaatat

SEQ ID NO: 78680 - DNA, 8 bp, Unknown
  misc_feature (1)..( 8): Result.001 file - promoters75/4608985
tttattat

SEQ ID NO: 78681 - DNA, 8 bp, Unknown
  misc_feature (1)..( 8): Result.001 file - promoters75/4608985
tttatttt

SEQ ID NO: 78682 - DNA, 9 bp, Unknown
  misc_feature (1)..( 9): Result.001 file - promoters75/4608985
aaaaatgac

SEQ ID NO: 78683 - DNA, 9 bp, Unknown
  misc_feature (1)..( 9): Result.001 file - promoters75/4608985
aaaaaagac

SEQ ID NO: 78684 - DNA, 9 bp, Unknown
  misc_feature (1)..( 9): Result.001 file - promoters75/4608985
aaatacaag

SEQ ID NO: 78685 - DNA, 9 bp, Unknown
  misc_feature (1)..( 9): Result.001 file - promoters75/4608985
cttctattt

SEQ ID NO: 78686 - DNA, 9 bp, Unknown
  misc_feature (1)..( 9): Result.001 file - promoters75/4608985
cttttattt

SEQ ID NO: 78687 - DNA, 9 bp, Unknown
  misc_feature (1)..( 9): Result.001 file - promoters75/4608985
actttatta

SEQ ID NO: 78688 - DNA, 9 bp, Unknown
  misc_feature (1)..( 9): Result.001 file - promoters75/4608985
aatgatatt

SEQ ID NO: 78689 - DNA, 9 bp, Unknown
  misc_feature (1)..( 9): Result.001 file - promoters75/4608985
aataatata

SEQ ID NO: 78690 - DNA, 9 bp, Unknown
  misc_feature (1)..( 9): Result.001 file - promoters75/4608985
aatttaact

SEQ ID NO: 78691 - DNA, 8 bp, Unknown
  misc_feature (1)..( 8): Result.001 file - promoters75/4608985
aagtgaag

SEQ ID NO: 78692 - DNA, 8 bp, Unknown
  misc_feature (1)..( 8): Result.001 file - promoters75/4608985
cagtcaag

SEQ ID NO: 78693 - DNA, 8 bp, Unknown
  misc_feature (1)..( 8): Result.001 file - promoters75/4608985
cagccaac

SEQ ID NO: 78694 - DNA, 8 bp, Unknown
  misc_feature (1)..( 8): Result.001 file - promoters75/4608985
cctatata

SEQ ID NO: 78695 - DNA, 8 bp, Unknown
  misc_feature (1)..( 8): Result.001 file - promoters75/4608985
tatatata

SEQ ID NO: 78696 - DNA, 8 bp, Unknown
  misc_feature (1)..( 8): Result.001 file - promoters75/4610551
cctttata

SEQ ID NO: 78697 - DNA, 16 bp, Unknown
  misc_feature (1)..( 16): Result.001 file - promoters75/4610551
atttcacaaattctga

SEQ ID NO: 78698 - DNA, 16 bp, Unknown
  misc_feature (1)..( 16): Result.001 file - promoters75/4610551
atttcaaaaatactta

SEQ ID NO: 78699 - DNA, 16 bp, Unknown
  misc_feature (1)..( 16): Result.001 file - promoters75/4610551
ttccaacaaatgcatg

SEQ ID NO: 78700 - DNA, 16 bp, Unknown
  misc_feature (1)..( 16): Result.001 file - promoters75/4610551
aaaaaaaaaatcattt

SEQ ID NO: 78701 - DNA, 16 bp, Unknown
  misc_feature (1)..( 16): Result.001 file - promoters75/4610551
aaaacaaaaagaagac

SEQ ID NO: 78702 - DNA, 16 bp, Unknown
  misc_feature (1)..( 16): Result.001 file - promoters75/4610551
ttttgacaaataaatc

SEQ ID NO: 78703 - DNA, 10 bp, Unknown
  misc_feature (1)..( 10): Result.001 file - promoters75/4610551
gaaagaaacc

SEQ ID NO: 78704 - DNA, 10 bp, Unknown
  misc_feature (1)..( 10): Result.001 file - promoters75/4610551
caaataaatc

SEQ ID NO: 78705 - DNA, 10 bp, Unknown
  misc_feature (1)..( 10): Result.001 file - promoters75/4610551
caaagaactt

SEQ ID NO: 78706 - DNA, 10 bp, Unknown
  misc_feature (1)..( 10): Result.001 file - promoters75/4610551
gaaagagtga

SEQ ID NO: 78707 - DNA, 10 bp, Unknown
  misc_feature (1)..( 10): Result.001 file - promoters75/4610551
gaaaaaaaaa

SEQ ID NO: 78708 - DNA, 10 bp, Unknown
  misc_feature (1)..( 10): Result.001 file - promoters75/4610551
aaaacaaaaa

SEQ ID NO: 78709 - DNA, 13 bp, Unknown
  misc_feature (1)..( 13): Result.001 file - promoters75/4610551
tcggtgtttttgt

SEQ ID NO: 78710 - DNA, 13 bp, Unknown
  misc_feature (1)..( 13): Result.001 file - promoters75/4610551
gtggtcttttaat

SEQ ID NO: 78711 - DNA, 13 bp, Unknown
  misc_feature (1)..( 13): Result.001 file - promoters75/4610551
tcgctgtgtacca

SEQ ID NO: 78712 - DNA, 13 bp, Unknown
  misc_feature (1)..( 13): Result.001 file - promoters75/4610551
ggctagtttttgt

SEQ ID NO: 78713 - DNA, 13 bp, Unknown
  misc_feature (1)..( 13): Result.001 file - promoters75/4610551
tagctttcactat

SEQ ID NO: 78714 - DNA, 13 bp, Unknown
  misc_feature (1)..( 13): Result.001 file - promoters75/4610551
caaaaatttatgt

SEQ ID NO: 78715 - DNA, 11 bp, Unknown
  misc_feature (1)..( 11): Result.001 file - promoters75/4610551
aaagtctaaag

SEQ ID NO: 78716 - DNA, 11 bp, Unknown
  misc_feature (1)..( 11): Result.001 file - promoters75/4610551
gatatctaaaa

SEQ ID NO: 78717 - DNA, 12 bp, Unknown
  misc_feature (1)..( 12): Result.001 file - promoters75/4610551
gaaaactagaat

SEQ ID NO: 78718 - DNA, 12 bp, Unknown
  misc_feature (1)..( 12): Result.001 file - promoters75/4610551
tttatgtaatta

SEQ ID NO: 78719 - DNA, 12 bp, Unknown
  misc_feature (1)..( 12): Result.001 file - promoters75/4610551
tctatgtacttt

SEQ ID NO: 78720 - DNA, 12 bp, Unknown
  misc_feature (1)..( 12): Result.001 file - promoters75/4610551
tttttgtccacg

SEQ ID NO: 78721 - DNA, 13 bp, Unknown
  misc_feature (1)..( 13): Result.001 file - promoters75/4610551
ggtgtttttgtta

SEQ ID NO: 78722 - DNA, 13 bp, Unknown
  misc_feature (1)..( 13): Result.001 file - promoters75/4610551
aaaatttatgtaa

SEQ ID NO: 78723 - DNA, 13 bp, Unknown
  misc_feature (1)..( 13): Result.001 file - promoters75/4610551
ctagtttttgtcc

SEQ ID NO: 78724 - DNA, 13 bp, Unknown
  misc_feature (1)..( 13): Result.001 file - promoters75/4610551
tagctttcactat

SEQ ID NO: 78725 - DNA, 13 bp, Unknown
  misc_feature (1)..( 13): Result.001 file - promoters75/4610551
gagagatatctaa

SEQ ID NO: 78726 - DNA, 13 bp, Unknown
  misc_feature (1)..( 13): Result.001 file - promoters75/4766490
cacatctatgtac

SEQ ID NO: 78727 - DNA, 10 bp, Unknown
  misc_feature (1)..( 10): Result.001 file - promoters75/4766490
tttgaaaaga

SEQ ID NO: 78728 - DNA, 10 bp, Unknown
  misc_feature (1)..( 10): Result.001 file - promoters75/4766490
aaaaaaaaga

SEQ ID NO: 78729 - DNA, 11 bp, Unknown
  misc_feature (1)..( 11): Result.001 file - promoters75/4766490
gaagaaacaga

SEQ ID NO: 78730 - DNA, 12 bp, Unknown
  misc_feature (1)..( 12): Result.001 file - promoters75/4766490
tgaaaagatgaa

SEQ ID NO: 78731 - DNA, 12 bp, Unknown
  misc_feature (1)..( 12): Result.001 file - promoters75/4766490
acacaagaagaa

SEQ ID NO: 78732 - DNA, 12 bp, Unknown
  misc_feature (1)..( 12): Result.001 file - promoters75/4766977
gaaaaaaaagaa

SEQ ID NO: 78733 - DNA, 10 bp, Unknown
  misc_feature (1)..( 10): Result.001 file - promoters75/4766977
ctataaatag

SEQ ID NO: 78734 - DNA, 10 bp, Unknown
  misc_feature (1)..( 10): Result.001 file - promoters75/4766977
ctataaaaaa

SEQ ID NO: 78735 - DNA, 10 bp, Unknown
  misc_feature (1)..( 10): Result.001 file - promoters75/4767487
atataaatag

SEQ ID NO: 78736 - DNA, 15 bp, Unknown
  misc_feature (1)..( 15): Result.001 file - promoters75/4767487
gtacatctttaaaaa

SEQ ID NO: 78737 - DNA, 15 bp, Unknown
  misc_feature (1)..( 15): Result.001 file - promoters75/4767487
ttaattttttcaaaa

SEQ ID NO: 78738 - DNA, 15 bp, Unknown
  misc_feature (1)..( 15): Result.001 file - promoters75/4767487
ttaattttttcaagt

SEQ ID NO: 78739 - DNA, 10 bp, Unknown
  misc_feature (1)..( 10): Result.001 file - promoters75/4767487
ttatgaatga

SEQ ID NO: 78740 - DNA, 10 bp, Unknown
  misc_feature (1)..( 10): Result.001 file - promoters75/4767487
ttatgattaa

SEQ ID NO: 78741 - DNA, 10 bp, Unknown
  misc_feature (1)..( 10): Result.001 file - promoters75/4767487
atatcattaa

SEQ ID NO: 78742 - DNA, 9 bp, Unknown
  misc_feature (1)..( 9): Result.001 file - promoters75/4767487
tatttaaac

SEQ ID NO: 78743 - DNA, 9 bp, Unknown
  misc_feature (1)..( 9): Result.001 file - promoters75/4767487
tatataaac

SEQ ID NO: 78744 - DNA, 9 bp, Unknown
  misc_feature (1)..( 9): Result.001 file - promoters75/4767701
cctataaac

SEQ ID NO: 78745 - DNA, 12 bp, Unknown
  misc_feature (1)..( 12): Result.001 file - promoters75/4767701
gttataaatcgt

SEQ ID NO: 78746 - DNA, 12 bp, Unknown
  misc_feature (1)..( 12): Result.001 file - promoters75/4767701
tctatgaatcat

SEQ ID NO: 78747 - DNA, 12 bp, Unknown
  misc_feature (1)..( 12): Result.001 file - promoters75/4767701
attataaatcat

SEQ ID NO: 78748 - DNA, 12 bp, Unknown
  misc_feature (1)..( 12): Result.001 file - promoters75/4767701
tctttgaatatt

SEQ ID NO: 78749 - DNA, 12 bp, Unknown
  misc_feature (1)..( 12): Result.001 file - promoters75/4767701
tctttggattaa

SEQ ID NO: 78750 - DNA, 12 bp, Unknown
  misc_feature (1)..( 12): Result.001 file - promoters75/4767701
ctcttgcataga

SEQ ID NO: 78751 - DNA, 12 bp, Unknown
  misc_feature (1)..( 12): Result.001 file - promoters75/4767701
taataaactctt

SEQ ID NO: 78752 - DNA, 12 bp, Unknown
  misc_feature (1)..( 12): Result.001 file - promoters75/4767701
aaataaaaattg

SEQ ID NO: 78753 - DNA, 12 bp, Unknown
  misc_feature (1)..( 12): Result.001 file - promoters75/4767701
taacaaaacaat

SEQ ID NO: 78754 - DNA, 12 bp, Unknown
  misc_feature (1)..( 12): Result.001 file - promoters75/4767701
aaataatgtaat

SEQ ID NO: 78755 - DNA, 13 bp, Unknown
  misc_feature (1)..( 13): Result.001 file - promoters75/4767701
caacgaaacgatt

SEQ ID NO: 78756 - DNA, 13 bp, Unknown
  misc_feature (1)..( 13): Result.001 file - promoters75/4767982
aaattatgttatt

SEQ ID NO: 78757 - DNA, 10 bp, Unknown
  misc_feature (1)..( 10): Result.001 file - promoters75/4767982
ttaaacttgt

SEQ ID NO: 78758 - DNA, 10 bp, Unknown
  misc_feature (1)..( 10): Result.001 file - promoters75/4767982
ttaaacttgc

SEQ ID NO: 78759 - DNA, 10 bp, Unknown
  misc_feature (1)..( 10): Result.001 file - promoters75/4768285
acaaacatgt

SEQ ID NO: 78760 - DNA, 6 bp, Unknown
  misc_feature (1)..( 6): Result.001 file - promoters75/4768285
atgatc

SEQ ID NO: 78761 - DNA, 6 bp, Unknown
  misc_feature (1)..( 6): Result.001 file - promoters75/4768285
atgatc

SEQ ID NO: 78762 - DNA, 6 bp, Unknown
  misc_feature (1)..( 6): Result.001 file - promoters75/4768285
atgatc

SEQ ID NO: 78763 - DNA, 7 bp, Unknown
  misc_feature (1)..( 7): Result.001 file - promoters75/4768285
tttcatt

SEQ ID NO: 78764 - DNA, 7 bp, Unknown
  misc_feature (1)..( 7): Result.001 file - promoters75/4768285
tttgatt

SEQ ID NO: 78765 - DNA, 7 bp, Unknown
  misc_feature (1)..( 7): Result.001 file - promoters75/4768289
tttaatt

SEQ ID NO: 78766 - DNA, 9 bp, Unknown
  misc_feature (1)..( 9): Result.001 file - promoters75/4768289
gtttattaa

SEQ ID NO: 78767 - DNA, 9 bp, Unknown
  misc_feature (1)..( 9): Result.001 file - promoters75/4768289
atttattaa

SEQ ID NO: 78768 - DNA, 9 bp, Unknown
  misc_feature (1)..( 9): Result.001 file - promoters75/4768354
gtttatgaa

SEQ ID NO: 78769 - DNA, 11 bp, Unknown
  misc_feature (1)..( 11): Result.001 file - promoters75/4768354
taacatttttt

SEQ ID NO: 78770 - DNA, 11 bp, Unknown
  misc_feature (1)..( 11): Result.001 file - promoters75/4768354
taagatttttg

SEQ ID NO: 78771 - DNA, 11 bp, Unknown
  misc_feature (1)..( 11): Result.001 file - promoters75/4768354
tagaatttttt

SEQ ID NO: 78772 - DNA, 9 bp, Unknown
  misc_feature (1)..( 9): Result.001 file - promoters75/4768354
tttaatcag

SEQ ID NO: 78773 - DNA, 9 bp, Unknown
  misc_feature (1)..( 9): Result.001 file - promoters75/4768354
tttattcag

SEQ ID NO: 78774 - DNA, 9 bp, Unknown
  misc_feature (1)..( 9): Result.001 file - promoters75/4768615
gttattcga

SEQ ID NO: 78775 - DNA, 8 bp, Unknown
  misc_feature (1)..( 8): Result.001 file - promoters75/4768615
taaaaatt

SEQ ID NO: 78776 - DNA, 8 bp, Unknown
  misc_feature (1)..( 8): Result.001 file - promoters75/4768615
gtaaaatt

SEQ ID NO: 78777 - DNA, 8 bp, Unknown
  misc_feature (1)..( 8): Result.001 file - promoters75/4768615
taaaaatc

SEQ ID NO: 78778 - DNA, 9 bp, Unknown
  misc_feature (1)..( 9): Result.001 file - promoters75/4768615
aataaaatt

SEQ ID NO: 78779 - DNA, 9 bp, Unknown
  misc_feature (1)..( 9): Result.001 file - promoters75/4768615
gataatatt

SEQ ID NO: 78780 - DNA, 9 bp, Unknown
  misc_feature (1)..( 9): Result.001 file - promoters75/4768615
caaaaaact

SEQ ID NO: 78781 - DNA, 14 bp, Unknown
  misc_feature (1)..( 14): Result.001 file - promoters75/4768615
taaataaatttttg

SEQ ID NO: 78782 - DNA, 14 bp, Unknown
  misc_feature (1)..( 14): Result.001 file - promoters75/4768615
caaacaaatgtttg

SEQ ID NO: 78783 - DNA, 14 bp, Unknown
  misc_feature (1)..( 14): Result.001 file - promoters75/4768615
taactaatttctta

SEQ ID NO: 78784 - DNA, 15 bp, Unknown
  misc_feature (1)..( 15): Result.001 file - promoters75/4768615
taatataactcttgg

SEQ ID NO: 78785 - DNA, 10 bp, Unknown
  misc_feature (1)..( 10): Result.001 file - promoters75/4768615
aatattatta

SEQ ID NO: 78786 - DNA, 10 bp, Unknown
  misc_feature (1)..( 10): Result.001 file - promoters75/4768615
gttattatat

SEQ ID NO: 78787 - DNA, 10 bp, Unknown
  misc_feature (1)..( 10): Result.001 file - promoters75/4768615
gttaatatat

SEQ ID NO: 78788 - DNA, 10 bp, Unknown
  misc_feature (1)..( 10): Result.001 file - promoters75/4768615
aaaaactaat

SEQ ID NO: 78789 - DNA, 10 bp, Unknown
  misc_feature (1)..( 10): Result.001 file - promoters75/4768615
gaaaactcat

SEQ ID NO: 78790 - DNA, 11 bp, Unknown
  misc_feature (1)..( 11): Result.001 file - promoters75/4768615
aaataactaat

SEQ ID NO: 78791 - DNA, 11 bp, Unknown
  misc_feature (1)..( 11): Result.001 file - promoters75/4768615
agttaaaaaat

SEQ ID NO: 78792 - DNA, 11 bp, Unknown
  misc_feature (1)..( 11): Result.001 file - promoters75/4768615
agttaatatat

SEQ ID NO: 78793 - DNA, 11 bp, Unknown
  misc_feature (1)..( 11): Result.001 file - promoters75/4768615
tgttattatat

SEQ ID NO: 78794 - DNA, 11 bp, Unknown
  misc_feature (1)..( 11): Result.001 file - promoters75/4768615
agttatttaaa

SEQ ID NO: 78795 - DNA, 10 bp, Unknown
  misc_feature (1)..( 10): Result.001 file - promoters75/4768615
caaacaaaaa

SEQ ID NO: 78796 - DNA, 10 bp, Unknown
  misc_feature (1)..( 10): Result.001 file - promoters75/4768615
caaccaagtg

SEQ ID NO: 78797 - DNA, 10 bp, Unknown
  misc_feature (1)..( 10): Result.001 file - promoters75/4768615
caaacaaaaa

SEQ ID NO: 78798 - DNA, 8 bp, Unknown
  misc_feature (1)..( 8): Result.001 file - promoters75/4768615
attaatat

SEQ ID NO: 78799 - DNA, 8 bp, Unknown
  misc_feature (1)..( 8): Result.001 file - promoters75/4768615
tttattat

SEQ ID NO: 78800 - DNA, 8 bp, Unknown
  misc_feature (1)..( 8): Result.001 file - promoters75/4768615
tttatttt

SEQ ID NO: 78801 - DNA, 9 bp, Unknown
  misc_feature (1)..( 9): Result.001 file - promoters75/4768615
aaaaatgac

SEQ ID NO: 78802 - DNA, 9 bp, Unknown
  misc_feature (1)..( 9): Result.001 file - promoters75/4768615
aaaaaagac

SEQ ID NO: 78803 - DNA, 9 bp, Unknown
  misc_feature (1)..( 9): Result.001 file - promoters75/4768615
aaatacaag

SEQ ID NO: 78804 - DNA, 9 bp, Unknown
  misc_feature (1)..( 9): Result.001 file - promoters75/4768615
cttctattt

SEQ ID NO: 78805 - DNA, 9 bp, Unknown
  misc_feature (1)..( 9): Result.001 file - promoters75/4768615
cttttattt

SEQ ID NO: 78806 - DNA, 9 bp, Unknown
  misc_feature (1)..( 9): Result.001 file - promoters75/4768615
actttatta

SEQ ID NO: 78807 - DNA, 9 bp, Unknown
  misc_feature (1)..( 9): Result.001 file - promoters75/4768615
aatgatatt

SEQ ID NO: 78808 - DNA, 9 bp, Unknown
  misc_feature (1)..( 9): Result.001 file - promoters75/4768615
aataatata

SEQ ID NO: 78809 - DNA, 9 bp, Unknown
  misc_feature (1)..( 9): Result.001 file - promoters75/4768615
aatttaact

SEQ ID NO: 78810 - DNA, 8 bp, Unknown
  misc_feature (1)..( 8): Result.001 file - promoters75/4768615
aagtgaag

SEQ ID NO: 78811 - DNA, 8 bp, Unknown
  misc_feature (1)..( 8): Result.001 file - promoters75/4768615
cagtcaag

SEQ ID NO: 78812 - DNA, 8 bp, Unknown
  misc_feature (1)..( 8): Result.001 file - promoters75/4768615
cagccaac

SEQ ID NO: 78813 - DNA, 8 bp, Unknown
  misc_feature (1)..( 8): Result.001 file - promoters75/4768615
cctatata

SEQ ID NO: 78814 - DNA, 8 bp, Unknown
  misc_feature (1)..( 8): Result.001 file - promoters75/4768615
tatatata

SEQ ID NO: 78815 - DNA, 8 bp, Unknown
  misc_feature (1)..( 8): Result.001 file - promoters75/4768635
cctttata

SEQ ID NO: 78816 - DNA, 18 bp, Unknown
  misc_feature (1)..( 18): Result.001 file - promoters75/4768635
aacttaattctttttaca

SEQ ID NO: 78817 - DNA, 18 bp, Unknown
  misc_feature (1)..( 18): Result.001 file - promoters75/4768635
attgtaatccttttgttg

SEQ ID NO: 78818 - DNA, 18 bp, Unknown
  misc_feature (1)..( 18): Result.001 file - promoters75/4768635
aaatttttacttttaaca

SEQ ID NO: 78819 - DNA, 18 bp, Unknown
  misc_feature (1)..( 18): Result.001 file - promoters75/4768635
aacttaatttttttttgt

SEQ ID NO: 78820 - DNA, 18 bp, Unknown
  misc_feature (1)..( 18): Result.001 file - promoters75/4768635
tataataggtttttattt

SEQ ID NO: 78821 - DNA, 18 bp, Unknown
  misc_feature (1)..( 18): Result.001 file - promoters75/4768635
gatttgattttttctgga

SEQ ID NO: 78822 - DNA, 8 bp, Unknown
  misc_feature (1)..( 8): Result.001 file - promoters75/4768635
gttttgta

SEQ ID NO: 78823 - DNA, 8 bp, Unknown
  misc_feature (1)..( 8): Result.001 file - promoters75/4768635
cttttgtt

SEQ ID NO: 78824 - DNA, 8 bp, Unknown
  misc_feature (1)..( 8): Result.001 file - promoters75/4768635
tttttatt

SEQ ID NO: 78825 - DNA, 8 bp, Unknown
  misc_feature (1)..( 8): Result.001 file - promoters75/4768635
tttttgtt

SEQ ID NO: 78826 - DNA, 8 bp, Unknown
  misc_feature (1)..( 8): Result.001 file - promoters75/4768635
tttttact

SEQ ID NO: 78827 - DNA, 15 bp, Unknown
  misc_feature (1)..( 15): Result.001 file - promoters75/4768635
ttaattctttttaca

SEQ ID NO: 78828 - DNA, 15 bp, Unknown
  misc_feature (1)..( 15): Result.001 file - promoters75/4768635
taataggtttttatt

SEQ ID NO: 78829 - DNA, 15 bp, Unknown
  misc_feature (1)..( 15): Result.001 file - promoters75/4768635
acacaaatttttact

SEQ ID NO: 78830 - DNA, 15 bp, Unknown
  misc_feature (1)..( 15): Result.001 file - promoters75/4768635
aacttaatttttttt

SEQ ID NO: 78831 - DNA, 15 bp, Unknown
  misc_feature (1)..( 15): Result.001 file - promoters75/4768635
ccttttgttgttact

SEQ ID NO: 78832 - DNA, 15 bp, Unknown
  misc_feature (1)..( 15): Result.001 file - promoters75/4768635
gatttgattttttct

SEQ ID NO: 78833 - DNA, 8 bp, Unknown
  misc_feature (1)..( 8): Result.001 file - promoters75/4768635
tttgttag

SEQ ID NO: 78834 - DNA, 8 bp, Unknown
  misc_feature (1)..( 8): Result.001 file - promoters75/4768635
tttgtttt

SEQ ID NO: 78835 - DNA, 8 bp, Unknown
  misc_feature (1)..( 8): Result.001 file - promoters75/4768635
ttttttag

SEQ ID NO: 78836 - DNA, 8 bp, Unknown
  misc_feature (1)..( 8): Result.001 file - promoters75/4768635
tttttggt

SEQ ID NO: 78837 - DNA, 9 bp, Unknown
  misc_feature (1)..( 9): Result.001 file - promoters75/4768635
attgattaa

SEQ ID NO: 78838 - DNA, 9 bp, Unknown
  misc_feature (1)..( 9): Result.001 file - promoters75/4768635
gtttttgta

SEQ ID NO: 78839 - DNA, 9 bp, Unknown
  misc_feature (1)..( 9): Result.001 file - promoters75/4768635
atttttggt

SEQ ID NO: 78840 - DNA, 9 bp, Unknown
  misc_feature (1)..( 9): Result.001 file - promoters75/4768635
atttttctg

SEQ ID NO: 78841 - DNA, 9 bp, Unknown
  misc_feature (1)..( 9): Result.001 file - promoters75/4768635
gtttttgat

SEQ ID NO: 78842 - DNA, 9 bp, Unknown
  misc_feature (1)..( 9): Result.001 file - promoters75/4768635
tttttaggt

SEQ ID NO: 78843 - DNA, 9 bp, Unknown
  misc_feature (1)..( 9): Result.001 file - promoters75/4768635
tatttcaaa

SEQ ID NO: 78844 - DNA, 9 bp, Unknown
  misc_feature (1)..( 9): Result.001 file - promoters75/4768635
tggttcaaa

SEQ ID NO: 78845 - DNA, 9 bp, Unknown
  misc_feature (1)..( 9): Result.001 file - promoters75/4768635
ttgttcaaa

SEQ ID NO: 78846 - DNA, 9 bp, Unknown
  misc_feature (1)..( 9): Result.001 file - promoters75/4768635
aattttaaa

SEQ ID NO: 78847 - DNA, 9 bp, Unknown
  misc_feature (1)..( 9): Result.001 file - promoters75/4769059
aatttttac

SEQ ID NO: 78848 - DNA, 12 bp, Unknown
  misc_feature (1)..( 12): Result.001 file - promoters75/4769059
ctatctctttat

SEQ ID NO: 78849 - DNA, 12 bp, Unknown
  misc_feature (1)..( 12): Result.001 file - promoters75/4769059
ttatatctgtat

SEQ ID NO: 78850 - DNA, 12 bp, Unknown
  misc_feature (1)..( 12): Result.001 file - promoters75/4770305
ttagatcgtacc

SEQ ID NO: 78851 - DNA, 8 bp, Unknown
  misc_feature (1)..( 8): Result.001 file - promoters75/4770305
cttttaga

SEQ ID NO: 78852 - DNA, 8 bp, Unknown
  misc_feature (1)..( 8): Result.001 file - promoters75/4770305
tgtttaga

SEQ ID NO: 78853 - DNA, 8 bp, Unknown
  misc_feature (1)..( 8): Result.001 file - promoters75/4770443
tgttgaga

SEQ ID NO: 78854 - DNA, 10 bp, Unknown
  misc_feature (1)..( 10): Result.001 file - promoters75/4770443
aaaatagttt

SEQ ID NO: 78855 - DNA, 10 bp, Unknown
  misc_feature (1)..( 10): Result.001 file - promoters75/4770443
aaaatagtac

SEQ ID NO: 78856 - DNA, 10 bp, Unknown
  misc_feature (1)..( 10): Result.001 file - promoters75/4770443
caaagaattt

SEQ ID NO: 78857 - DNA, 11 bp, Unknown
  misc_feature (1)..( 11): Result.001 file - promoters75/4770443
tggagaagttt

SEQ ID NO: 78858 - DNA, 13 bp, Unknown
  misc_feature (1)..( 13): Result.001 file - promoters75/4770443
tctaattttgtca

SEQ ID NO: 78859 - DNA, 13 bp, Unknown
  misc_feature (1)..( 13): Result.001 file - promoters75/4770443
ataaattttatca

SEQ ID NO: 78860 - DNA, 13 bp, Unknown
  misc_feature (1)..( 13): Result.001 file - promoters75/4770443
ttctattttttta

SEQ ID NO: 78861 - DNA, 9 bp, Unknown
  misc_feature (1)..( 9): Result.001 file - promoters75/4770443
gtagtcaaa

SEQ ID NO: 78862 - DNA, 9 bp, Unknown
  misc_feature (1)..( 9): Result.001 file - promoters75/4770443
atagacaaa

SEQ ID NO: 78863 - DNA, 9 bp, Unknown
  misc_feature (1)..( 9): Result.001 file - promoters75/4770443
atatacaca

SEQ ID NO: 78864 - DNA, 9 bp, Unknown
  misc_feature (1)..( 9): Result.001 file - promoters75/4770443
aaaaaggat

SEQ ID NO: 78865 - DNA, 9 bp, Unknown
  misc_feature (1)..( 9): Result.001 file - promoters75/4770443
aaaaatgat

SEQ ID NO: 78866 - DNA, 9 bp, Unknown
  misc_feature (1)..( 9): Result.001 file - promoters75/4770443
aaaaatatt

SEQ ID NO: 78867 - DNA, 12 bp, Unknown
  misc_feature (1)..( 12): Result.001 file - promoters75/4770443
aaatattttttt

SEQ ID NO: 78868 - DNA, 12 bp, Unknown
  misc_feature (1)..( 12): Result.001 file - promoters75/4770443
aaaaattttttt

SEQ ID NO: 78869 - DNA, 12 bp, Unknown
  misc_feature (1)..( 12): Result.001 file - promoters75/4770477
atttgtttattt

SEQ ID NO: 78870 - DNA, 11 bp, Unknown
  misc_feature (1)..( 11): Result.001 file - promoters75/4770477
tatagttcagc

SEQ ID NO: 78871 - DNA, 11 bp, Unknown
  misc_feature (1)..( 11): Result.001 file - promoters75/4770477
tatacttcagt

SEQ ID NO: 78872 - DNA, 11 bp, Unknown
  misc_feature (1)..( 11): Result.001 file - promoters75/4771239
ttgatttcagt

SEQ ID NO: 78873 - DNA, 9 bp, Unknown
  misc_feature (1)..( 9): Result.001 file - promoters75/4771239
ttgacgacg

SEQ ID NO: 78874 - DNA, 9 bp, Unknown
  misc_feature (1)..( 9): Result.001 file - promoters75/4771239
ttggcgaga

SEQ ID NO: 78875 - DNA, 9 bp, Unknown
  misc_feature (1)..( 9): Result.001 file - promoters75/4771271
ccggcaaga

SEQ ID NO: 78876 - DNA, 7 bp, Unknown
  misc_feature (1)..( 7): Result.001 file - promoters75/4771271
ttttgct

SEQ ID NO: 78877 - DNA, 7 bp, Unknown
  misc_feature (1)..( 7): Result.001 file - promoters75/4771271
ttttgcc

SEQ ID NO: 78878 - DNA, 7 bp, Unknown
  misc_feature (1)..( 7): Result.001 file - promoters75/4771271
ttttgct

SEQ ID NO: 78879 - DNA, 9 bp, Unknown
  misc_feature (1)..( 9): Result.001 file - promoters75/4771271
aaattaaac

SEQ ID NO: 78880 - DNA, 9 bp, Unknown
  misc_feature (1)..( 9): Result.001 file - promoters75/4771271
aaaataaat

SEQ ID NO: 78881 - DNA, 9 bp, Unknown
  misc_feature (1)..( 9): Result.001 file - promoters75/4771271
attttaaac

SEQ ID NO: 78882 - DNA, 8 bp, Unknown
  misc_feature (1)..( 8): Result.001 file - promoters75/4771271
tattatta

SEQ ID NO: 78883 - DNA, 8 bp, Unknown
  misc_feature (1)..( 8): Result.001 file - promoters75/4771271
tatgattt

SEQ ID NO: 78884 - DNA, 8 bp, Unknown
  misc_feature (1)..( 8): Result.001 file - promoters75/4771271
ttggatta

SEQ ID NO: 78885 - DNA, 10 bp, Unknown
  misc_feature (1)..( 10): Result.001 file - promoters75/4771271
aaccaaattg

SEQ ID NO: 78886 - DNA, 10 bp, Unknown
  misc_feature (1)..( 10): Result.001 file - promoters75/4771271
ataaaaattg

SEQ ID NO: 78887 - DNA, 10 bp, Unknown
  misc_feature (1)..( 10): Result.001 file - promoters75/4771271
aacaaaattt

SEQ ID NO: 78888 - DNA, 13 bp, Unknown
  misc_feature (1)..( 13): Result.001 file - promoters75/4771271
gtttttcatggaa

SEQ ID NO: 78889 - DNA, 13 bp, Unknown
  misc_feature (1)..( 13): Result.001 file - promoters75/4771271
gtttttttaaagc

SEQ ID NO: 78890 - DNA, 13 bp, Unknown
  misc_feature (1)..( 13): Result.001 file - promoters75/4771271
attttgcatagaa

SEQ ID NO: 78891 - DNA, 8 bp, Unknown
  misc_feature (1)..( 8): Result.001 file - promoters75/4771271
gttatata

SEQ ID NO: 78892 - DNA, 8 bp, Unknown
  misc_feature (1)..( 8): Result.001 file - promoters75/4771271
gttaaata

SEQ ID NO: 78893 - DNA, 8 bp, Unknown
  misc_feature (1)..( 8): Result.001 file - promoters75/4771271
tttaaatt

SEQ ID NO: 78894 - DNA, 12 bp, Unknown
  misc_feature (1)..( 12): Result.001 file - promoters75/4771271
aattaaacaagt

SEQ ID NO: 78895 - DNA, 12 bp, Unknown
  misc_feature (1)..( 12): Result.001 file - promoters75/4771271
tgataaaaaagt

SEQ ID NO: 78896 - DNA, 12 bp, Unknown
  misc_feature (1)..( 12): Result.001 file - promoters75/4771271
tgataaaataaa

SEQ ID NO: 78897 - DNA, 9 bp, Unknown
  misc_feature (1)..( 9): Result.001 file - promoters75/4771271
ataaccaaa

SEQ ID NO: 78898 - DNA, 9 bp, Unknown
  misc_feature (1)..( 9): Result.001 file - promoters75/4771271
tgaacaaaa

SEQ ID NO: 78899 - DNA, 9 bp, Unknown
  misc_feature (1)..( 9): Result.001 file - promoters75/4771271
taaacaaga

SEQ ID NO: 78900 - DNA, 9 bp, Unknown
  misc_feature (1)..( 9): Result.001 file - promoters75/4771271
aatgtttta

SEQ ID NO: 78901 - DNA, 9 bp, Unknown
  misc_feature (1)..( 9): Result.001 file - promoters75/4771271
aatattttg

SEQ ID NO: 78902 - DNA, 9 bp, Unknown
  misc_feature (1)..( 9): Result.001 file - promoters75/4771271
aatatgttg

SEQ ID NO: 78903 - DNA, 10 bp, Unknown
  misc_feature (1)..( 10): Result.001 file - promoters75/4771271
gtagggtttt

SEQ ID NO: 78904 - DNA, 10 bp, Unknown
  misc_feature (1)..( 10): Result.001 file - promoters75/4771271
ttaggttttt

SEQ ID NO: 78905 - DNA, 10 bp, Unknown
  misc_feature (1)..( 10): Result.001 file - promoters75/4771271
ttaggtttgg

SEQ ID NO: 78906 - DNA, 8 bp, Unknown
  misc_feature (1)..( 8): Result.001 file - promoters75/4771271
tttatttt

SEQ ID NO: 78907 - DNA, 8 bp, Unknown
  misc_feature (1)..( 8): Result.001 file - promoters75/4771271
attatttt

SEQ ID NO: 78908 - DNA, 8 bp, Unknown
  misc_feature (1)..( 8): Result.001 file - promoters75/4771321
attctttt

SEQ ID NO: 78909 - DNA, 10 bp, Unknown
  misc_feature (1)..( 10): Result.001 file - promoters75/4771321
tgtgacatgg

SEQ ID NO: 78910 - DNA, 10 bp, Unknown
  misc_feature (1)..( 10): Result.001 file - promoters75/4771321
tgtgacgggt

SEQ ID NO: 78911 - DNA, 10 bp, Unknown
  misc_feature (1)..( 10): Result.001 file - promoters75/4771321
agtgtcgggt

SEQ ID NO: 78912 - DNA, 9 bp, Unknown
  misc_feature (1)..( 9): Result.001 file - promoters75/4771321
gaacacata

SEQ ID NO: 78913 - DNA, 9 bp, Unknown
  misc_feature (1)..( 9): Result.001 file - promoters75/4771321
gaaaacaga

SEQ ID NO: 78914 - DNA, 9 bp, Unknown
  misc_feature (1)..( 9): Result.001 file - promoters75/4771334
gaaaccaga

SEQ ID NO: 78915 - DNA, 10 bp, Unknown
  misc_feature (1)..( 10): Result.001 file - promoters75/4771334
taaaacaaaa

SEQ ID NO: 78916 - DNA, 10 bp, Unknown
  misc_feature (1)..( 10): Result.001 file - promoters75/4771334
gaaaataaat

SEQ ID NO: 78917 - DNA, 10 bp, Unknown
  misc_feature (1)..( 10): Result.001 file - promoters75/4771334
taaaacttct

SEQ ID NO: 78918 - DNA, 10 bp, Unknown
  misc_feature (1)..( 10): Result.001 file - promoters75/4771334
attaataaat

SEQ ID NO: 78919 - DNA, 10 bp, Unknown
  misc_feature (1)..( 10): Result.001 file - promoters75/4771334
aagaataaaa

SEQ ID NO: 78920 - DNA, 14 bp, Unknown
  misc_feature (1)..( 14): Result.001 file - promoters75/4771334
ttgcttctcccaag

SEQ ID NO: 78921 - DNA, 14 bp, Unknown
  misc_feature (1)..( 14): Result.001 file - promoters75/4771334
gtgcttccaacaaa

SEQ ID NO: 78922 - DNA, 14 bp, Unknown
  misc_feature (1)..( 14): Result.001 file - promoters75/4771334
gtgcttcaaacaaa

SEQ ID NO: 78923 - DNA, 14 bp, Unknown
  misc_feature (1)..( 14): Result.001 file - promoters75/4771334
catcttcaaaatta

SEQ ID NO: 78924 - DNA, 14 bp, Unknown
  misc_feature (1)..( 14): Result.001 file - promoters75/4771334
ttatttcaaatgac

SEQ ID NO: 78925 - DNA, 10 bp, Unknown
  misc_feature (1)..( 10): Result.001 file - promoters75/4771334
caaaacatat

SEQ ID NO: 78926 - DNA, 10 bp, Unknown
  misc_feature (1)..( 10): Result.001 file - promoters75/4771334
taaaaaatat

SEQ ID NO: 78927 - DNA, 10 bp, Unknown
  misc_feature (1)..( 10): Result.001 file - promoters75/4771334
caagacattt

SEQ ID NO: 78928 - DNA, 10 bp, Unknown
  misc_feature (1)..( 10): Result.001 file - promoters75/4771334
taaaaaagtg

SEQ ID NO: 78929 - DNA, 10 bp, Unknown
  misc_feature (1)..( 10): Result.001 file - promoters75/4771334
taataaattt

SEQ ID NO: 78930 - DNA, 10 bp, Unknown
  misc_feature (1)..( 10): Result.001 file - promoters75/4771334
aagaaaataa

SEQ ID NO: 78931 - DNA, 9 bp, Unknown
  misc_feature (1)..( 9): Result.001 file - promoters75/4771334
gttaaaaaa

SEQ ID NO: 78932 - DNA, 9 bp, Unknown
  misc_feature (1)..( 9): Result.001 file - promoters75/4771334
attaagaaa

SEQ ID NO: 78933 - DNA, 9 bp, Unknown
  misc_feature (1)..( 9): Result.001 file - promoters75/4771334
tctaaaaaa

SEQ ID NO: 78934 - DNA, 9 bp, Unknown
  misc_feature (1)..( 9): Result.001 file - promoters75/4771334
attaataaa

SEQ ID NO: 78935 - DNA, 9 bp, Unknown
  misc_feature (1)..( 9): Result.001 file - promoters75/4771495
aagaataaa

SEQ ID NO: 78936 - DNA, 8 bp, Unknown
  misc_feature (1)..( 8): Result.001 file - promoters75/4771495
aattgtag

SEQ ID NO: 78937 - DNA, 8 bp, Unknown
  misc_feature (1)..( 8): Result.001 file - promoters75/4771495
aattctag

SEQ ID NO: 78938 - DNA, 8 bp, Unknown
  misc_feature (1)..( 8): Result.001 file - promoters75/4771495
aattgttc

SEQ ID NO: 78939 - DNA, 9 bp, Unknown
  misc_feature (1)..( 9): Result.001 file - promoters75/4771495
gcaaaacta

SEQ ID NO: 78940 - DNA, 9 bp, Unknown
  misc_feature (1)..( 9): Result.001 file - promoters75/4771495
gcaaaacat

SEQ ID NO: 78941 - DNA, 9 bp, Unknown
  misc_feature (1)..( 9): Result.001 file - promoters75/4771495
aaaaaacta

SEQ ID NO: 78942 - DNA, 7 bp, Unknown
  misc_feature (1)..( 7): Result.001 file - promoters75/4771495
atgattc

SEQ ID NO: 78943 - DNA, 7 bp, Unknown
  misc_feature (1)..( 7): Result.001 file - promoters75/4771495
atgtttc

SEQ ID NO: 78944 - DNA, 7 bp, Unknown
  misc_feature (1)..( 7): Result.001 file - promoters75/4771495
atgtttc

SEQ ID NO: 78945 - DNA, 8 bp, Unknown
  misc_feature (1)..( 8): Result.001 file - promoters75/4771495
aacaaatt

SEQ ID NO: 78946 - DNA, 8 bp, Unknown
  misc_feature (1)..( 8): Result.001 file - promoters75/4771495
aacatatt

SEQ ID NO: 78947 - DNA, 8 bp, Unknown
  misc_feature (1)..( 8): Result.001 file - promoters75/4771677
tacatata

SEQ ID NO: 78948 - DNA, 9 bp, Unknown
  misc_feature (1)..( 9): Result.001 file - promoters75/4771677
aaagcaaac

SEQ ID NO: 78949 - DNA, 9 bp, Unknown
  misc_feature (1)..( 9): Result.001 file - promoters75/4771677
aaatcaaaa

SEQ ID NO: 78950 - DNA, 10 bp, Unknown
  misc_feature (1)..( 10): Result.001 file - promoters75/4771769
aaactcaaaa

SEQ ID NO: 78951 - DNA, 10 bp, Unknown
  misc_feature (1)..( 10): Result.001 file - promoters75/4771769
tttttgttta

SEQ ID NO: 78952 - DNA, 10 bp, Unknown
  misc_feature (1)..( 10): Result.001 file - promoters75/4771769
attttgtttt

SEQ ID NO: 78953 - DNA, 10 bp, Unknown
  misc_feature (1)..( 10): Result.001 file - promoters75/4771769
tttttggttt

SEQ ID NO: 78954 - DNA, 10 bp, Unknown
  misc_feature (1)..( 10): Result.001 file - promoters75/4771769
tttttattta

SEQ ID NO: 78955 - DNA, 9 bp, Unknown
  misc_feature (1)..( 9): Result.001 file - promoters75/4771769
gttttttag

SEQ ID NO: 78956 - DNA, 9 bp, Unknown
  misc_feature (1)..( 9): Result.001 file - promoters75/4771769
gttttttca

SEQ ID NO: 78957 - DNA, 9 bp, Unknown
  misc_feature (1)..( 9): Result.001 file - promoters75/4771769
gtttttcaa

SEQ ID NO: 78958 - DNA, 9 bp, Unknown
  misc_feature (1)..( 9): Result.001 file - promoters75/4771769
attttttat

SEQ ID NO: 78959 - DNA, 9 bp, Unknown
  misc_feature (1)..( 9): Result.001 file - promoters75/4771769
atttctcaa

SEQ ID NO: 78960 - DNA, 12 bp, Unknown
  misc_feature (1)..( 12): Result.001 file - promoters75/4771769
gacctaagttta

SEQ ID NO: 78961 - DNA, 12 bp, Unknown
  misc_feature (1)..( 12): Result.001 file - promoters75/4771769
atgcatagttta

SEQ ID NO: 78962 - DNA, 12 bp, Unknown
  misc_feature (1)..( 12): Result.001 file - promoters75/4771769
acacattgtttt

SEQ ID NO: 78963 - DNA, 12 bp, Unknown
  misc_feature (1)..( 12): Result.001 file - promoters75/4771853
atgtatagtttt

SEQ ID NO: 78964 - DNA, 9 bp, Unknown
  misc_feature (1)..( 9): Result.001 file - promoters75/4771853
gtttccttt

SEQ ID NO: 78965 - DNA, 9 bp, Unknown
  misc_feature (1)..( 9): Result.001 file - promoters75/4771853
gttaccttt

SEQ ID NO: 78966 - DNA, 9 bp, Unknown
  misc_feature (1)..( 9): Result.001 file - promoters75/4772336
gcttcgttt

SEQ ID NO: 78967 - DNA, 11 bp, Unknown
  misc_feature (1)..( 11): Result.001 file - promoters75/4772336
attaaccttga

SEQ ID NO: 78968 - DNA, 11 bp, Unknown
  misc_feature (1)..( 11): Result.001 file - promoters75/4772336
attgaccctga

SEQ ID NO: 78969 - DNA, 11 bp, Unknown
  misc_feature (1)..( 11): Result.001 file - promoters75/4772336
attgacgacta

SEQ ID NO: 78970 - DNA, 9 bp, Unknown
  misc_feature (1)..( 9): Result.001 file - promoters75/4772336
tgtcttgaa

SEQ ID NO: 78971 - DNA, 9 bp, Unknown
  misc_feature (1)..( 9): Result.001 file - promoters75/4772336
tgtattgac

SEQ ID NO: 78972 - DNA, 9 bp, Unknown
  misc_feature (1)..( 9): Result.001 file - promoters75/4772336
aaaattgac

SEQ ID NO: 78973 - DNA, 9 bp, Unknown
  misc_feature (1)..( 9): Result.001 file - promoters75/4772336
aaaatgaaa

SEQ ID NO: 78974 - DNA, 9 bp, Unknown
  misc_feature (1)..( 9): Result.001 file - promoters75/4772336
aaattgaca

SEQ ID NO: 78975 - DNA, 9 bp, Unknown
  misc_feature (1)..( 9): Result.001 file - promoters75/4772336
tcattaaca

SEQ ID NO: 78976 - DNA, 7 bp, Unknown
  misc_feature (1)..( 7): Result.001 file - promoters75/4772336
tatatat

SEQ ID NO: 78977 - DNA, 7 bp, Unknown
  misc_feature (1)..( 7): Result.001 file - promoters75/4772336
tatataa

SEQ ID NO: 78978 - DNA, 7 bp, Unknown
  misc_feature (1)..( 7): Result.001 file - promoters75/4772346
gatataa

SEQ ID NO: 78979 - DNA, 8 bp, Unknown
  misc_feature (1)..( 8): Result.001 file - promoters75/4772346
agatactt

SEQ ID NO: 78980 - DNA, 8 bp, Unknown
  misc_feature (1)..( 8): Result.001 file - promoters75/4772346
agatacag

SEQ ID NO: 78981 - DNA, 8 bp, Unknown
  misc_feature (1)..( 8): Result.001 file - promoters75/4772346
agagacat

SEQ ID NO: 78982 - DNA, 8 bp, Unknown
  misc_feature (1)..( 8): Result.001 file - promoters75/4772346
cgatccag

SEQ ID NO: 78983 - DNA, 7 bp, Unknown
  misc_feature (1)..( 7): Result.001 file - promoters75/4772346
tttcaat

SEQ ID NO: 78984 - DNA, 7 bp, Unknown
  misc_feature (1)..( 7): Result.001 file - promoters75/4772346
tttcaag

SEQ ID NO: 78985 - DNA, 7 bp, Unknown
  misc_feature (1)..( 7): Result.001 file - promoters75/4772346
tttaaag

SEQ ID NO: 78986 - DNA, 8 bp, Unknown
  misc_feature (1)..( 8): Result.001 file - promoters75/4772346
caaaccca

SEQ ID NO: 78987 - DNA, 8 bp, Unknown
  misc_feature (1)..( 8): Result.001 file - promoters75/4772346
caaacctg

SEQ ID NO: 78988 - DNA, 8 bp, Unknown
  misc_feature (1)..( 8): Result.001 file - promoters75/4772398
gaaagctg

SEQ ID NO: 78989 - DNA, 11 bp, Unknown
  misc_feature (1)..( 11): Result.001 file - promoters75/4772398
cactaatgtga

SEQ ID NO: 78990 - DNA, 11 bp, Unknown
  misc_feature (1)..( 11): Result.001 file - promoters75/4772398
aggcaatttga

SEQ ID NO: 78991 - DNA, 11 bp, Unknown
  misc_feature (1)..( 11): Result.001 file - promoters75/4772398
tttaaatagaa

SEQ ID NO: 78992 - DNA, 11 bp, Unknown
  misc_feature (1)..( 11): Result.001 file - promoters75/4772398
tgatgatttga

SEQ ID NO: 78993 - DNA, 11 bp, Unknown
  misc_feature (1)..( 11): Result.001 file - promoters75/4772398
attaaataaat

SEQ ID NO: 78994 - DNA, 11 bp, Unknown
  misc_feature (1)..( 11): Result.001 file - promoters75/4772398
attatatagca

SEQ ID NO: 78995 - DNA, 12 bp, Unknown
  misc_feature (1)..( 12): Result.001 file - promoters75/4772398
gacctaagttta

SEQ ID NO: 78996 - DNA, 12 bp, Unknown
  misc_feature (1)..( 12): Result.001 file - promoters75/4772398
ttctgaagtttc

SEQ ID NO: 78997 - DNA, 12 bp, Unknown
  misc_feature (1)..( 12): Result.001 file - promoters75/4772398
gacataaatttt

SEQ ID NO: 78998 - DNA, 12 bp, Unknown
  misc_feature (1)..( 12): Result.001 file - promoters75/4772398
tgtataatttta

SEQ ID NO: 78999 - DNA, 12 bp, Unknown
  misc_feature (1)..( 12): Result.001 file - promoters75/4772398
gccttgaggttc

SEQ ID NO: 79000 - DNA, 12 bp, Unknown
  misc_feature (1)..( 12): Result.001 file - promoters75/4772398
ttcataaaatac

SEQ ID NO: 79001 - DNA, 12 bp, Unknown
  misc_feature (1)..( 12): Result.001 file - promoters75/4772398
tgaataacatat

SEQ ID NO: 79002 - DNA, 13 bp, Unknown
  misc_feature (1)..( 13): Result.001 file - promoters75/4772398
tacaatgggctgg

SEQ ID NO: 79003 - DNA, 13 bp, Unknown
  misc_feature (1)..( 13): Result.001 file - promoters75/4772398
ggaaataggccca

SEQ ID NO: 79004 - DNA, 13 bp, Unknown
  misc_feature (1)..( 13): Result.001 file - promoters75/4772398
tgtcataggccca

SEQ ID NO: 79005 - DNA, 13 bp, Unknown
  misc_feature (1)..( 13): Result.001 file - promoters75/4772398
atttgaaggccca

SEQ ID NO: 79006 - DNA, 13 bp, Unknown
  misc_feature (1)..( 13): Result.001 file - promoters75/4772398
acctaaaggccca

SEQ ID NO: 79007 - DNA, 13 bp, Unknown
  misc_feature (1)..( 13): Result.001 file - promoters75/4772398
tgttataggttct

SEQ ID NO: 79008 - DNA, 11 bp, Unknown
  misc_feature (1)..( 11): Result.001 file - promoters75/4772398
attgttacaaa

SEQ ID NO: 79009 - DNA, 11 bp, Unknown
  misc_feature (1)..( 11): Result.001 file - promoters75/4772398
atttttacttt

SEQ ID NO: 79010 - DNA, 11 bp, Unknown
  misc_feature (1)..( 11): Result.001 file - promoters75/4772398
tttgttagttc

SEQ ID NO: 79011 - DNA, 11 bp, Unknown
  misc_feature (1)..( 11): Result.001 file - promoters75/4772398
attgataggtg

SEQ ID NO: 79012 - DNA, 11 bp, Unknown
  misc_feature (1)..( 11): Result.001 file - promoters75/4772398
ttttttaattt

SEQ ID NO: 79013 - DNA, 11 bp, Unknown
  misc_feature (1)..( 11): Result.001 file - promoters75/4772398
aacaataattt

SEQ ID NO: 79014 - DNA, 16 bp, Unknown
  misc_feature (1)..( 16): Result.001 file - promoters75/4772398
ttaatcttttggggtt

SEQ ID NO: 79015 - DNA, 16 bp, Unknown
  misc_feature (1)..( 16): Result.001 file - promoters75/4772398
aatttcttttcacata

SEQ ID NO: 79016 - DNA, 16 bp, Unknown
  misc_feature (1)..( 16): Result.001 file - promoters75/4772398
taactcttttgaagtt

SEQ ID NO: 79017 - DNA, 16 bp, Unknown
  misc_feature (1)..( 16): Result.001 file - promoters75/4772398
ttaacctttgaccagc

SEQ ID NO: 79018 - DNA, 16 bp, Unknown
  misc_feature (1)..( 16): Result.001 file - promoters75/4772398
ttttacttttaacaaa

SEQ ID NO: 79019 - DNA, 16 bp, Unknown
  misc_feature (1)..( 16): Result.001 file - promoters75/4772398
tatcgttattaataaa

SEQ ID NO: 79020 - DNA, 14 bp, Unknown
  misc_feature (1)..( 14): Result.001 file - promoters75/4772398
ggaaataggcccaa

SEQ ID NO: 79021 - DNA, 14 bp, Unknown
  misc_feature (1)..( 14): Result.001 file - promoters75/4772398
acctaaaggcccaa

SEQ ID NO: 79022 - DNA, 14 bp, Unknown
  misc_feature (1)..( 14): Result.001 file - promoters75/4772398
tgtcataggcccat

SEQ ID NO: 79023 - DNA, 14 bp, Unknown
  misc_feature (1)..( 14): Result.001 file - promoters75/4772398
atttgaaggcccaa

SEQ ID NO: 79024 - DNA, 14 bp, Unknown
  misc_feature (1)..( 14): Result.001 file - promoters75/4772398
atttgatggcccat

SEQ ID NO: 79025 - DNA, 14 bp, Unknown
  misc_feature (1)..( 14): Result.001 file - promoters75/4772398
tgttataggttctt

SEQ ID NO: 79026 - DNA, 9 bp, Unknown
  misc_feature (1)..( 9): Result.001 file - promoters75/4772398
aaatttgaa

SEQ ID NO: 79027 - DNA, 9 bp, Unknown
  misc_feature (1)..( 9): Result.001 file - promoters75/4772398
aaatttact

SEQ ID NO: 79028 - DNA, 9 bp, Unknown
  misc_feature (1)..( 9): Result.001 file - promoters75/4772398
aaattttgg

SEQ ID NO: 79029 - DNA, 9 bp, Unknown
  misc_feature (1)..( 9): Result.001 file - promoters75/4772398
taatgtgaa

SEQ ID NO: 79030 - DNA, 9 bp, Unknown
  misc_feature (1)..( 9): Result.001 file - promoters75/4772398
taatgtctc

SEQ ID NO: 79031 - DNA, 9 bp, Unknown
  misc_feature (1)..( 9): Result.001 file - promoters75/4772776
taatttttt

SEQ ID NO: 79032 - DNA, 7 bp, Unknown
  misc_feature (1)..( 7): Result.001 file - promoters75/4772776
ctataaa

SEQ ID NO: 79033 - DNA, 7 bp, Unknown
  misc_feature (1)..( 7): Result.001 file - promoters75/4772776
atataaa

SEQ ID NO: 79034 - DNA, 7 bp, Unknown
  misc_feature (1)..( 7): Result.001 file - promoters75/4772776
atataac

SEQ ID NO: 79035 - DNA, 11 bp, Unknown
  misc_feature (1)..( 11): Result.001 file - promoters75/4772776
tgtctttttac

SEQ ID NO: 79036 - DNA, 11 bp, Unknown
  misc_feature (1)..( 11): Result.001 file - promoters75/4772776
cttcttgttac

SEQ ID NO: 79037 - DNA, 11 bp, Unknown
  misc_feature (1)..( 11): Result.001 file - promoters75/4772776
cttcatgtaca

SEQ ID NO: 79038 - DNA, 11 bp, Unknown
  misc_feature (1)..( 11): Result.001 file - promoters75/4772776
atttgtttttt

SEQ ID NO: 79039 - DNA, 11 bp, Unknown
  misc_feature (1)..( 11): Result.001 file - promoters75/4772776
aagtgtctttt

SEQ ID NO: 79040 - DNA, 11 bp, Unknown
  misc_feature (1)..( 11): Result.001 file - promoters75/4772776
aagtatcttac

SEQ ID NO: 79041 - DNA, 8 bp, Unknown
  misc_feature (1)..( 8): Result.001 file - promoters75/4772776
aatccaaa

SEQ ID NO: 79042 - DNA, 8 bp, Unknown
  misc_feature (1)..( 8): Result.001 file - promoters75/4772776
aatcaaaa

SEQ ID NO: 79043 - DNA, 8 bp, Unknown
  misc_feature (1)..( 8): Result.001 file - promoters75/4772879
tatcaaac

SEQ ID NO: 79044 - DNA, 7 bp, Unknown
  misc_feature (1)..( 7): Result.001 file - promoters75/4772879
taaaaat

SEQ ID NO: 79045 - DNA, 7 bp, Unknown
  misc_feature (1)..( 7): Result.001 file - promoters75/4772879
taaaaag

SEQ ID NO: 79046 - DNA, 7 bp, Unknown
  misc_feature (1)..( 7): Result.001 file - promoters75/4772879
gaaaaag

SEQ ID NO: 79047 - DNA, 13 bp, Unknown
  misc_feature (1)..( 13): Result.001 file - promoters75/4772879
aatgaatattaga

SEQ ID NO: 79048 - DNA, 13 bp, Unknown
  misc_feature (1)..( 13): Result.001 file - promoters75/4772879
aattaatgacgat

SEQ ID NO: 79049 - DNA, 13 bp, Unknown
  misc_feature (1)..( 13): Result.001 file - promoters75/4772879
tctgaatattaga

SEQ ID NO: 79050 - DNA, 6 bp, Unknown
  misc_feature (1)..( 6): Result.001 file - promoters75/4772879
ataata

SEQ ID NO: 79051 - DNA, 6 bp, Unknown
  misc_feature (1)..( 6): Result.001 file - promoters75/4772879
ataata

SEQ ID NO: 79052 - DNA, 6 bp, Unknown
  misc_feature (1)..( 6): Result.001 file - promoters75/4772879
ataata

SEQ ID NO: 79053 - DNA, 12 bp, Unknown
  misc_feature (1)..( 12): Result.001 file - promoters75/4772879
atataataaata

SEQ ID NO: 79054 - DNA, 12 bp, Unknown
  misc_feature (1)..( 12): Result.001 file - promoters75/4772879
gcataaaaaata

SEQ ID NO: 79055 - DNA, 12 bp, Unknown
  misc_feature (1)..( 12): Result.001 file - promoters75/4772879
ttattatacttc

SEQ ID NO: 79056 - DNA, 12 bp, Unknown
  misc_feature (1)..( 12): Result.001 file - promoters75/4772879
atataattatct

SEQ ID NO: 79057 - DNA, 10 bp, Unknown
  misc_feature (1)..( 10): Result.001 file - promoters75/4772879
gtatatatat

SEQ ID NO: 79058 - DNA, 10 bp, Unknown
  misc_feature (1)..( 10): Result.001 file - promoters75/4772879
aaataaatag

SEQ ID NO: 79059 - DNA, 10 bp, Unknown
  misc_feature (1)..( 10): Result.001 file - promoters75/4772879
aaatatataa

SEQ ID NO: 79060 - DNA, 9 bp, Unknown
  misc_feature (1)..( 9): Result.001 file - promoters75/4772879
aaattaata

SEQ ID NO: 79061 - DNA, 9 bp, Unknown
  misc_feature (1)..( 9): Result.001 file - promoters75/4772879
taattaagt

SEQ ID NO: 79062 - DNA, 9 bp, Unknown
  misc_feature (1)..( 9): Result.001 file - promoters75/4772879
aaatcaata

SEQ ID NO: 79063 - DNA, 9 bp, Unknown
  misc_feature (1)..( 9): Result.001 file - promoters75/4772879
taattatta

SEQ ID NO: 79064 - DNA, 6 bp, Unknown
  misc_feature (1)..( 6): Result.001 file - promoters75/4772879
aaatat

SEQ ID NO: 79065 - DNA, 6 bp, Unknown
  misc_feature (1)..( 6): Result.001 file - promoters75/4772879
aaatat

SEQ ID NO: 79066 - DNA, 6 bp, Unknown
  misc_feature (1)..( 6): Result.001 file - promoters75/4772879
aaatat

SEQ ID NO: 79067 - DNA, 7 bp, Unknown
  misc_feature (1)..( 7): Result.001 file - promoters75/4772879
ttatata

SEQ ID NO: 79068 - DNA, 7 bp, Unknown
  misc_feature (1)..( 7): Result.001 file - promoters75/4772879
ttatata

SEQ ID NO: 79069 - DNA, 7 bp, Unknown
  misc_feature (1)..( 7): Result.001 file - promoters75/4772879
ttatata

SEQ ID NO: 79070 - DNA, 8 bp, Unknown
  misc_feature (1)..( 8): Result.001 file - promoters75/4772879
cgtatctt

SEQ ID NO: 79071 - DNA, 8 bp, Unknown
  misc_feature (1)..( 8): Result.001 file - promoters75/4772879
tgtatcta

SEQ ID NO: 79072 - DNA, 8 bp, Unknown
  misc_feature (1)..( 8): Result.001 file - promoters75/4772879
tgtgtcta

SEQ ID NO: 79073 - DNA, 8 bp, Unknown
  misc_feature (1)..( 8): Result.001 file - promoters75/4772879
atcaaaag

SEQ ID NO: 79074 - DNA, 8 bp, Unknown
  misc_feature (1)..( 8): Result.001 file - promoters75/4772879
atccaaac

SEQ ID NO: 79075 - DNA, 8 bp, Unknown
  misc_feature (1)..( 8): Result.001 file - promoters75/4772879
atcctaac

SEQ ID NO: 79076 - DNA, 9 bp, Unknown
  misc_feature (1)..( 9): Result.001 file - promoters75/4772879
tttgttggt

SEQ ID NO: 79077 - DNA, 9 bp, Unknown
  misc_feature (1)..( 9): Result.001 file - promoters75/4772879
tttattgat

SEQ ID NO: 79078 - DNA, 9 bp, Unknown
  misc_feature (1)..( 9): Result.001 file - promoters75/4772879
gttactgat

SEQ ID NO: 79079 - DNA, 9 bp, Unknown
  misc_feature (1)..( 9): Result.001 file - promoters75/4772879
aatatatat

SEQ ID NO: 79080 - DNA, 9 bp, Unknown
  misc_feature (1)..( 9): Result.001 file - promoters75/4772879
aatttattt

SEQ ID NO: 79081 - DNA, 9 bp, Unknown
  misc_feature (1)..( 9): Result.001 file - promoters75/4772879
gctttgttt

SEQ ID NO: 79082 - DNA, 11 bp, Unknown
  misc_feature (1)..( 11): Result.001 file - promoters75/4772879
aactagacacg

SEQ ID NO: 79083 - DNA, 11 bp, Unknown
  misc_feature (1)..( 11): Result.001 file - promoters75/4772879
aaaaagagacg

SEQ ID NO: 79084 - DNA, 11 bp, Unknown
  misc_feature (1)..( 11): Result.001 file - promoters75/4772879
aaaaagaatac

SEQ ID NO: 79085 - DNA, 9 bp, Unknown
  misc_feature (1)..( 9): Result.001 file - promoters75/4772879
gggattttt

SEQ ID NO: 79086 - DNA, 9 bp, Unknown
  misc_feature (1)..( 9): Result.001 file - promoters75/4772879
gggttttta

SEQ ID NO: 79087 - DNA, 9 bp, Unknown
  misc_feature (1)..( 9): Result.001 file - promoters75/4773074
ttgattttt

SEQ ID NO: 79088 - DNA, 19 bp, Unknown
  misc_feature (1)..( 19): Result.001 file - promoters75/4773074
tatataaatcccttaaacc

SEQ ID NO: 79089 - DNA, 19 bp, Unknown
  misc_feature (1)..( 19): Result.001 file - promoters75/4773074
ataaataatctcttaaaac

SEQ ID NO: 79090 - DNA, 19 bp, Unknown
  misc_feature (1)..( 19): Result.001 file - promoters75/4773074
tatataaatccttcactcg

SEQ ID NO: 79091 - DNA, 19 bp, Unknown
  misc_feature (1)..( 19): Result.001 file - promoters75/4773074
tataaacaaaccttaaacc

SEQ ID NO: 79092 - DNA, 19 bp, Unknown
  misc_feature (1)..( 19): Result.001 file - promoters75/4773074
tgtataaaaacacttgcga

SEQ ID NO: 79093 - DNA, 19 bp, Unknown
  misc_feature (1)..( 19): Result.001 file - promoters75/4773074
actataaatactctcggtt

SEQ ID NO: 79094 - DNA, 12 bp, Unknown
  misc_feature (1)..( 12): Result.001 file - promoters75/4773074
gtatataaatcc

SEQ ID NO: 79095 - DNA, 12 bp, Unknown
  misc_feature (1)..( 12): Result.001 file - promoters75/4773074
gtataaaaacac

SEQ ID NO: 79096 - DNA, 12 bp, Unknown
  misc_feature (1)..( 12): Result.001 file - promoters75/4773074
ttatataaatcc

SEQ ID NO: 79097 - DNA, 12 bp, Unknown
  misc_feature (1)..( 12): Result.001 file - promoters75/4773074
cactataaacaa

SEQ ID NO: 79098 - DNA, 12 bp, Unknown
  misc_feature (1)..( 12): Result.001 file - promoters75/4773074
aactataaatac

SEQ ID NO: 79099 - DNA, 12 bp, Unknown
  misc_feature (1)..( 12): Result.001 file - promoters75/4773823
tcttataaataa

SEQ ID NO: 79100 - DNA, 9 bp, Unknown
  misc_feature (1)..( 9): Result.001 file - promoters75/4773823
agataataa

SEQ ID NO: 79101 - DNA, 9 bp, Unknown
  misc_feature (1)..( 9): Result.001 file - promoters75/4773823
agaaaattc

SEQ ID NO: 79102 - DNA, 9 bp, Unknown
  misc_feature (1)..( 9): Result.001 file - promoters75/4899830
tcaaacttc

SEQ ID NO: 79103 - DNA, 13 bp, Unknown
  misc_feature (1)..( 13): Result.001 file - promoters75/4899830
gaaaaaaagttat

SEQ ID NO: 79104 - DNA, 13 bp, Unknown
  misc_feature (1)..( 13): Result.001 file - promoters75/4899830
acgccttagttat

SEQ ID NO: 79105 - DNA, 13 bp, Unknown
  misc_feature (1)..( 13): Result.001 file - promoters75/4899830
gaagaaaaattac

SEQ ID NO: 79106 - DNA, 13 bp, Unknown
  misc_feature (1)..( 13): Result.001 file - promoters75/4899830
aaaccaaagaaag

SEQ ID NO: 79107 - DNA, 13 bp, Unknown
  misc_feature (1)..( 13): Result.001 file - promoters75/4899830
aatgttaaattaa

SEQ ID NO: 79108 - DNA, 10 bp, Unknown
  misc_feature (1)..( 10): Result.001 file - promoters75/4899830
catatatact

SEQ ID NO: 79109 - DNA, 10 bp, Unknown
  misc_feature (1)..( 10): Result.001 file - promoters75/4899830
tatatatata

SEQ ID NO: 79110 - DNA, 10 bp, Unknown
  misc_feature (1)..( 10): Result.001 file - promoters75/4899830
actatataac

SEQ ID NO: 79111 - DNA, 10 bp, Unknown
  misc_feature (1)..( 10): Result.001 file - promoters75/4899830
cttatttatg

SEQ ID NO: 79112 - DNA, 10 bp, Unknown
  misc_feature (1)..( 10): Result.001 file - promoters75/4900353
actataaaac

SEQ ID NO: 79113 - DNA, 11 bp, Unknown
  misc_feature (1)..( 11): Result.001 file - promoters75/4900353
taatatatatt

SEQ ID NO: 79114 - DNA, 11 bp, Unknown
  misc_feature (1)..( 11): Result.001 file - promoters75/4900353
taagataggaa

SEQ ID NO: 79115 - DNA, 11 bp, Unknown
  misc_feature (1)..( 11): Result.001 file - promoters75/4900353
tgatataaatt

SEQ ID NO: 79116 - DNA, 8 bp, Unknown
  misc_feature (1)..( 8): Result.001 file - promoters75/4900353
gggcctaa

SEQ ID NO: 79117 - DNA, 8 bp, Unknown
  misc_feature (1)..( 8): Result.001 file - promoters75/4900353
cggcgtaa

SEQ ID NO: 79118 - DNA, 8 bp, Unknown
  misc_feature (1)..( 8): Result.001 file - promoters75/4901171
gggcctat

SEQ ID NO: 79119 - DNA, 13 bp, Unknown
  misc_feature (1)..( 13): Result.001 file - promoters75/4901171
caaaactattgac

SEQ ID NO: 79120 - DNA, 13 bp, Unknown
  misc_feature (1)..( 13): Result.001 file - promoters75/4901171
aaaaacttccaaa

SEQ ID NO: 79121 - DNA, 13 bp, Unknown
  misc_feature (1)..( 13): Result.001 file - promoters75/4901171
caaaaccctaaca

SEQ ID NO: 79122 - DNA, 13 bp, Unknown
  misc_feature (1)..( 13): Result.001 file - promoters75/4901171
gaaaaaaattcca

SEQ ID NO: 79123 - DNA, 13 bp, Unknown
  misc_feature (1)..( 13): Result.001 file - promoters75/4901171
acacgagattcca

SEQ ID NO: 79124 - DNA, 11 bp, Unknown
  misc_feature (1)..( 11): Result.001 file - promoters75/4901171
acaaatttcag

SEQ ID NO: 79125 - DNA, 11 bp, Unknown
  misc_feature (1)..( 11): Result.001 file - promoters75/4901171
caaaatttctc

SEQ ID NO: 79126 - DNA, 11 bp, Unknown
  misc_feature (1)..( 11): Result.001 file - promoters75/4901171
cgagattccag

SEQ ID NO: 79127 - DNA, 11 bp, Unknown
  misc_feature (1)..( 11): Result.001 file - promoters75/4901171
aaaaattccat

SEQ ID NO: 79128 - DNA, 11 bp, Unknown
  misc_feature (1)..( 11): Result.001 file - promoters75/4901736
gatgataccat

SEQ ID NO: 79129 - DNA, 11 bp, Unknown
  misc_feature (1)..( 11): Result.001 file - promoters75/4901736
aaatattcaac

SEQ ID NO: 79130 - DNA, 11 bp, Unknown
  misc_feature (1)..( 11): Result.001 file - promoters75/4901736
aaagattaaac

SEQ ID NO: 79131 - DNA, 11 bp, Unknown
  misc_feature (1)..( 11): Result.001 file - promoters75/4901736
aaaaatttttt

SEQ ID NO: 79132 - DNA, 15 bp, Unknown
  misc_feature (1)..( 15): Result.001 file - promoters75/4901736
cgttttttagttttc

SEQ ID NO: 79133 - DNA, 15 bp, Unknown
  misc_feature (1)..( 15): Result.001 file - promoters75/4901736
cgttttttaaaagga

SEQ ID NO: 79134 - DNA, 15 bp, Unknown
  misc_feature (1)..( 15): Result.001 file - promoters75/4901736
cttgttttaattttc

SEQ ID NO: 79135 - DNA, 7 bp, Unknown
  misc_feature (1)..( 7): Result.001 file - promoters75/4901736
ttgttta

SEQ ID NO: 79136 - DNA, 7 bp, Unknown
  misc_feature (1)..( 7): Result.001 file - promoters75/4901736
ttgtttt

SEQ ID NO: 79137 - DNA, 7 bp, Unknown
  misc_feature (1)..( 7): Result.001 file - promoters75/4909449
ttggtta

SEQ ID NO: 79138 - DNA, 12 bp, Unknown
  misc_feature (1)..( 12): Result.001 file - promoters75/4909449
atataaagtcat

SEQ ID NO: 79139 - DNA, 12 bp, Unknown
  misc_feature (1)..( 12): Result.001 file - promoters75/4909449
atataaaggtcc

SEQ ID NO: 79140 - DNA, 12 bp, Unknown
  misc_feature (1)..( 12): Result.001 file - promoters75/4909449
ctataaattcaa

SEQ ID NO: 79141 - DNA, 12 bp, Unknown
  misc_feature (1)..( 12): Result.001 file - promoters75/4909449
atataaagacgc

SEQ ID NO: 79142 - DNA, 12 bp, Unknown
  misc_feature (1)..( 12): Result.001 file - promoters75/4909449
tattaaagccgc

SEQ ID NO: 79143 - DNA, 12 bp, Unknown
  misc_feature (1)..( 12): Result.001 file - promoters75/4909449
aaaaaagagagg

SEQ ID NO: 79144 - DNA, 12 bp, Unknown
  misc_feature (1)..( 12): Result.001 file - promoters75/4909449
gtaaaagaatca

SEQ ID NO: 79145 - DNA, 12 bp, Unknown
  misc_feature (1)..( 12): Result.001 file - promoters75/4909449
aaaaaagttttt

SEQ ID NO: 79146 - DNA, 12 bp, Unknown
  misc_feature (1)..( 12): Result.001 file - promoters75/4909449
agaaaatagttt

SEQ ID NO: 79147 - DNA, 12 bp, Unknown
  misc_feature (1)..( 12): Result.001 file - promoters75/4909449
cagaaaggtttc

SEQ ID NO: 79148 - DNA, 9 bp, Unknown
  misc_feature (1)..( 9): Result.001 file - promoters75/4909449
atataaata

SEQ ID NO: 79149 - DNA, 9 bp, Unknown
  misc_feature (1)..( 9): Result.001 file - promoters75/4909449
atacaaaac

SEQ ID NO: 79150 - DNA, 9 bp, Unknown
  misc_feature (1)..( 9): Result.001 file - promoters75/4909449
ttattaata

SEQ ID NO: 79151 - DNA, 9 bp, Unknown
  misc_feature (1)..( 9): Result.001 file - promoters75/4909449
ctatttata

SEQ ID NO: 79152 - DNA, 9 bp, Unknown
  misc_feature (1)..( 9): Result.001 file - promoters75/4911485
ataataact

SEQ ID NO: 79153 - DNA, 7 bp, Unknown
  misc_feature (1)..( 7): Result.001 file - promoters75/4911485
ttgtttg

SEQ ID NO: 79154 - DNA, 7 bp, Unknown
  misc_feature (1)..( 7): Result.001 file - promoters75/4911485
atgtttg

SEQ ID NO: 79155 - DNA, 7 bp, Unknown
  misc_feature (1)..( 7): Result.001 file - promoters75/4911485
atgattg

SEQ ID NO: 79156 - DNA, 12 bp, Unknown
  misc_feature (1)..( 12): Result.001 file - promoters75/4911485
tgagtatatttt

SEQ ID NO: 79157 - DNA, 12 bp, Unknown
  misc_feature (1)..( 12): Result.001 file - promoters75/4911485
tgattatatgta

SEQ ID NO: 79158 - DNA, 12 bp, Unknown
  misc_feature (1)..( 12): Result.001 file - promoters75/4911485
tttgtaaatttt

SEQ ID NO: 79159 - DNA, 8 bp, Unknown
  misc_feature (1)..( 8): Result.001 file - promoters75/4911485
ttttaatt

SEQ ID NO: 79160 - DNA, 8 bp, Unknown
  misc_feature (1)..( 8): Result.001 file - promoters75/4911485
tttgaatt

SEQ ID NO: 79161 - DNA, 8 bp, Unknown
  misc_feature (1)..( 8): Result.001 file - promoters75/4911485
atttaatt

SEQ ID NO: 79162 - DNA, 9 bp, Unknown
  misc_feature (1)..( 9): Result.001 file - promoters75/4911485
aaagcccaa

SEQ ID NO: 79163 - DNA, 9 bp, Unknown
  misc_feature (1)..( 9): Result.001 file - promoters75/4911485
taagcccat

SEQ ID NO: 79164 - DNA, 10 bp, Unknown
  misc_feature (1)..( 10): Result.001 file - promoters75/4911485
taaggcccaa

SEQ ID NO: 79165 - DNA, 7 bp, Unknown
  misc_feature (1)..( 7): Result.001 file - promoters75/4911485
ttgcata

SEQ ID NO: 79166 - DNA, 7 bp, Unknown
  misc_feature (1)..( 7): Result.001 file - promoters75/4911485
ttggata

SEQ ID NO: 79167 - DNA, 7 bp, Unknown
  misc_feature (1)..( 7): Result.001 file - promoters75/4911485
gtggata

SEQ ID NO: 79168 - DNA, 10 bp, Unknown
  misc_feature (1)..( 10): Result.001 file - promoters75/4911485
aaaggtttta

SEQ ID NO: 79169 - DNA, 10 bp, Unknown
  misc_feature (1)..( 10): Result.001 file - promoters75/4911485
aaaagtttta

SEQ ID NO: 79170 - DNA, 10 bp, Unknown
  misc_feature (1)..( 10): Result.001 file - promoters75/4911485
aaaactttgg

SEQ ID NO: 79171 - DNA, 8 bp, Unknown
  misc_feature (1)..( 8): Result.001 file - promoters75/4911485
aataattt

SEQ ID NO: 79172 - DNA, 8 bp, Unknown
  misc_feature (1)..( 8): Result.001 file - promoters75/4911485
tataattt

SEQ ID NO: 79173 - DNA, 8 bp, Unknown
  misc_feature (1)..( 8): Result.001 file - promoters75/4911485
aatcattt

SEQ ID NO: 79174 - DNA, 12 bp, Unknown
  misc_feature (1)..( 12): Result.001 file - promoters75/4911485
aaagaagaaaaa

SEQ ID NO: 79175 - DNA, 12 bp, Unknown
  misc_feature (1)..( 12): Result.001 file - promoters75/4911485
aaaaaaggaaaa

SEQ ID NO: 79176 - DNA, 12 bp, Unknown
  misc_feature (1)..( 12): Result.001 file - promoters75/4911485
caaaaagcaaaa

SEQ ID NO: 79177 - DNA, 8 bp, Unknown
  misc_feature (1)..( 8): Result.001 file - promoters75/4911485
attttgtt

SEQ ID NO: 79178 - DNA, 8 bp, Unknown
  misc_feature (1)..( 8): Result.001 file - promoters75/4911485
attttgtt

SEQ ID NO: 79179 - DNA, 8 bp, Unknown
  misc_feature (1)..( 8): Result.001 file - promoters75/4911485
tctttgtt

SEQ ID NO: 79180 - DNA, 13 bp, Unknown
  misc_feature (1)..( 13): Result.001 file - promoters75/4911485
tataaatgggcct

SEQ ID NO: 79181 - DNA, 13 bp, Unknown
  misc_feature (1)..( 13): Result.001 file - promoters75/4911485
taaaaatgggtct

SEQ ID NO: 79182 - DNA, 13 bp, Unknown
  misc_feature (1)..( 13): Result.001 file - promoters75/4915127
tatatatgggcct

SEQ ID NO: 79183 - DNA, 16 bp, Unknown
  misc_feature (1)..( 16): Result.001 file - promoters75/4915127
tgctgctgaattggaa

SEQ ID NO: 79184 - DNA, 16 bp, Unknown
  misc_feature (1)..( 16): Result.001 file - promoters75/4915127
ctcttatgatttgctt

SEQ ID NO: 79185 - DNA, 16 bp, Unknown
  misc_feature (1)..( 16): Result.001 file - promoters75/4915127
acagcagtattagctt

SEQ ID NO: 79186 - DNA, 16 bp, Unknown
  misc_feature (1)..( 16): Result.001 file - promoters75/4915127
caaaactgatttttaa

SEQ ID NO: 79187 - DNA, 16 bp, Unknown
  misc_feature (1)..( 16): Result.001 file - promoters75/4915127
ctcgtataattctttt

SEQ ID NO: 79188 - DNA, 16 bp, Unknown
  misc_feature (1)..( 16): Result.001 file - promoters75/4915606
ctcttatttattctgt

SEQ ID NO: 79189 - DNA, 13 bp, Unknown
  misc_feature (1)..( 13): Result.001 file - promoters75/4915606
aattatatatata

SEQ ID NO: 79190 - DNA, 13 bp, Unknown
  misc_feature (1)..( 13): Result.001 file - promoters75/4915606
aatcataatagag

SEQ ID NO: 79191 - DNA, 13 bp, Unknown
  misc_feature (1)..( 13): Result.001 file - promoters75/4978201
acttattccatta

SEQ ID NO: 79192 - DNA, 11 bp, Unknown
  misc_feature (1)..( 11): Result.001 file - promoters75/4978201
tttattgttac

SEQ ID NO: 79193 - DNA, 11 bp, Unknown
  misc_feature (1)..( 11): Result.001 file - promoters75/4978201
caaatttttac

SEQ ID NO: 79194 - DNA, 11 bp, Unknown
  misc_feature (1)..( 11): Result.001 file - promoters75/4978201
catattcttaa

SEQ ID NO: 79195 - DNA, 11 bp, Unknown
  misc_feature (1)..( 11): Result.001 file - promoters75/4978201
gtctttgttag

SEQ ID NO: 79196 - DNA, 11 bp, Unknown
  misc_feature (1)..( 11): Result.001 file - promoters75/4978201
tttagttttgt

SEQ ID NO: 79197 - DNA, 11 bp, Unknown
  misc_feature (1)..( 11): Result.001 file - promoters75/4978201
aattttgtttt

SEQ ID NO: 79198 - DNA, 17 bp, Unknown
  misc_feature (1)..( 17): Result.001 file - promoters75/4978201
taaatattcaactatac

SEQ ID NO: 79199 - DNA, 17 bp, Unknown
  misc_feature (1)..( 17): Result.001 file - promoters75/4978201
atttaattcaaaaagca

SEQ ID NO: 79200 - DNA, 17 bp, Unknown
  misc_feature (1)..( 17): Result.001 file - promoters75/4978201
ttcttatgcaaagccat

SEQ ID NO: 79201 - DNA, 17 bp, Unknown
  misc_feature (1)..( 17): Result.001 file - promoters75/4978201
atggtgttcaaaaaaat

SEQ ID NO: 79202 - DNA, 17 bp, Unknown
  misc_feature (1)..( 17): Result.001 file - promoters75/4978201
caaattttgaaaaaaat

SEQ ID NO: 79203 - DNA, 17 bp, Unknown
  misc_feature (1)..( 17): Result.001 file - promoters75/4978201
acgtaagaaaaaaaaaa

SEQ ID NO: 79204 - DNA, 17 bp, Unknown
  misc_feature (1)..( 17): Result.001 file - promoters75/4978201
agaagaaacaaagtaaa

SEQ ID NO: 79205 - DNA, 12 bp, Unknown
  misc_feature (1)..( 12): Result.001 file - promoters75/4978201
ccaaacaaaaca

SEQ ID NO: 79206 - DNA, 12 bp, Unknown
  misc_feature (1)..( 12): Result.001 file - promoters75/4978201
agaaacaaagta

SEQ ID NO: 79207 - DNA, 12 bp, Unknown
  misc_feature (1)..( 12): Result.001 file - promoters75/4978201
tcaaagaaattc

SEQ ID NO: 79208 - DNA, 12 bp, Unknown
  misc_feature (1)..( 12): Result.001 file - promoters75/4978201
taaaaccaagac

SEQ ID NO: 79209 - DNA, 12 bp, Unknown
  misc_feature (1)..( 12): Result.001 file - promoters75/4978201
agaaaaaaaaaa

SEQ ID NO: 79210 - DNA, 12 bp, Unknown
  misc_feature (1)..( 12): Result.001 file - promoters75/5662799
gcaaagccatat

SEQ ID NO: 79211 - DNA, 8 bp, Unknown
  misc_feature (1)..( 8): Result.001 file - promoters75/5662799
gttgtcca

SEQ ID NO: 79212 - DNA, 8 bp, Unknown
  misc_feature (1)..( 8): Result.001 file - promoters75/5662799
tttgacca

SEQ ID NO: 79213 - DNA, 8 bp, Unknown
  misc_feature (1)..( 8): Result.001 file - promoters75/5662893
tttgacta

SEQ ID NO: 79214 - DNA, 8 bp, Unknown
  misc_feature (1)..( 8): Result.001 file - promoters75/5662893
tttgtatt

SEQ ID NO: 79215 - DNA, 8 bp, Unknown
  misc_feature (1)..( 8): Result.001 file - promoters75/5662893
tttttatt

SEQ ID NO: 79216 - DNA, 8 bp, Unknown
  misc_feature (1)..( 8): Result.001 file - promoters75/5662914
tttggatt

SEQ ID NO: 79217 - DNA, 10 bp, Unknown
  misc_feature (1)..( 10): Result.001 file - promoters75/5662914
ggaaggagag

SEQ ID NO: 79218 - DNA, 10 bp, Unknown
  misc_feature (1)..( 10): Result.001 file - promoters75/5662914
ggaagtagag

SEQ ID NO: 79219 - DNA, 10 bp, Unknown
  misc_feature (1)..( 10): Result.001 file - promoters75/5662914
ggaagtagag

SEQ ID NO: 79220 - DNA, 9 bp, Unknown
  misc_feature (1)..( 9): Result.001 file - promoters75/5662914
gagatgaga

SEQ ID NO: 79221 - DNA, 9 bp, Unknown
  misc_feature (1)..( 9): Result.001 file - promoters75/5662914
aagatgatg

SEQ ID NO: 79222 - DNA, 9 bp, Unknown
  misc_feature (1)..( 9): Result.001 file - promoters75/5663003
aagttgatg

SEQ ID NO: 79223 - DNA, 9 bp, Unknown
  misc_feature (1)..( 9): Result.001 file - promoters75/5663003
ttctctttt

SEQ ID NO: 79224 - DNA, 9 bp, Unknown
  misc_feature (1)..( 9): Result.001 file - promoters75/5663003
acctctttt

SEQ ID NO: 79225 - DNA, 9 bp, Unknown
  misc_feature (1)..( 9): Result.001 file - promoters75/5663003
accccttag

SEQ ID NO: 79226 - DNA, 7 bp, Unknown
  misc_feature (1)..( 7): Result.001 file - promoters75/5663003
aatttac

SEQ ID NO: 79227 - DNA, 7 bp, Unknown
  misc_feature (1)..( 7): Result.001 file - promoters75/5663003
aatctac

SEQ ID NO: 79228 - DNA, 7 bp, Unknown
  misc_feature (1)..( 7): Result.001 file - promoters75/5663003
aatttat

SEQ ID NO: 79229 - DNA, 11 bp, Unknown
  misc_feature (1)..( 11): Result.001 file - promoters75/5663003
ctaaaatagta

SEQ ID NO: 79230 - DNA, 11 bp, Unknown
  misc_feature (1)..( 11): Result.001 file - promoters75/5663003
aaataattgta

SEQ ID NO: 79231 - DNA, 11 bp, Unknown
  misc_feature (1)..( 11): Result.001 file - promoters75/5663003
aaagaattgaa

SEQ ID NO: 79232 - DNA, 8 bp, Unknown
  misc_feature (1)..( 8): Result.001 file - promoters75/5663003
aaggtata

SEQ ID NO: 79233 - DNA, 8 bp, Unknown
  misc_feature (1)..( 8): Result.001 file - promoters75/5663003
aagctata

SEQ ID NO: 79234 - DNA, 8 bp, Unknown
  misc_feature (1)..( 8): Result.001 file - promoters75/5663003
cagcaata

SEQ ID NO: 79235 - DNA, 10 bp, Unknown
  misc_feature (1)..( 10): Result.001 file - promoters75/5663003
ttactaaaat

SEQ ID NO: 79236 - DNA, 10 bp, Unknown
  misc_feature (1)..( 10): Result.001 file - promoters75/5663003
ttattaattt

SEQ ID NO: 79237 - DNA, 11 bp, Unknown
  misc_feature (1)..( 11): Result.001 file - promoters75/5663003
gaactgaaaga

SEQ ID NO: 79238 - DNA, 11 bp, Unknown
  misc_feature (1)..( 11): Result.001 file - promoters75/5663003
ttgtataaatt

SEQ ID NO: 79239 - DNA, 9 bp, Unknown
  misc_feature (1)..( 9): Result.001 file - promoters75/5663003
aaagaagaa

SEQ ID NO: 79240 - DNA, 9 bp, Unknown
  misc_feature (1)..( 9): Result.001 file - promoters75/5663003
aaagaattg

SEQ ID NO: 79241 - DNA, 9 bp, Unknown
  misc_feature (1)..( 9): Result.001 file - promoters75/5663003
aaataattg

SEQ ID NO: 79242 - DNA, 13 bp, Unknown
  misc_feature (1)..( 13): Result.001 file - promoters75/5663003
aatatcaccgacg

SEQ ID NO: 79243 - DNA, 13 bp, Unknown
  misc_feature (1)..( 13): Result.001 file - promoters75/5663003
aatatcttgtaag

SEQ ID NO: 79244 - DNA, 13 bp, Unknown
  misc_feature (1)..( 13): Result.001 file - promoters75/5663003
aatctcaacgacg

SEQ ID NO: 79245 - DNA, 8 bp, Unknown
  misc_feature (1)..( 8): Result.001 file - promoters75/5663003
taatcata

SEQ ID NO: 79246 - DNA, 8 bp, Unknown
  misc_feature (1)..( 8): Result.001 file - promoters75/5663003
aaataata

SEQ ID NO: 79247 - DNA, 8 bp, Unknown
  misc_feature (1)..( 8): Result.001 file - promoters75/5663116
aaacaatc

SEQ ID NO: 79248 - DNA, 9 bp, Unknown
  misc_feature (1)..( 9): Result.001 file - promoters75/5663116
cattagttt

SEQ ID NO: 79249 - DNA, 9 bp, Unknown
  misc_feature (1)..( 9): Result.001 file - promoters75/5663116
cattcgttt

SEQ ID NO: 79250 - DNA, 9 bp, Unknown
  misc_feature (1)..( 9): Result.001 file - promoters75/5663862
ttttcattt

SEQ ID NO: 79251 - DNA, 9 bp, Unknown
  misc_feature (1)..( 9): Result.001 file - promoters75/5663862
taactttat

SEQ ID NO: 79252 - DNA, 9 bp, Unknown
  misc_feature (1)..( 9): Result.001 file - promoters75/5663862
caactttag

SEQ ID NO: 79253 - DNA, 9 bp, Unknown
  misc_feature (1)..( 9): Result.001 file - promoters75/5663862
taagtttga

SEQ ID NO: 79254 - DNA, 9 bp, Unknown
  misc_feature (1)..( 9): Result.001 file - promoters75/5663934
cgtctttat

SEQ ID NO: 79255 - DNA, 14 bp, Unknown
  misc_feature (1)..( 14): Result.001 file - promoters75/5663934
tttagttttgtaaa

SEQ ID NO: 79256 - DNA, 14 bp, Unknown
  misc_feature (1)..( 14): Result.001 file - promoters75/5663934
tttacttttaacaa

SEQ ID NO: 79257 - DNA, 14 bp, Unknown
  misc_feature (1)..( 14): Result.001 file - promoters75/5663934
aaaagtttttgtaa

SEQ ID NO: 79258 - DNA, 14 bp, Unknown
  misc_feature (1)..( 14): Result.001 file - promoters75/5663934
tagggttttttctt

SEQ ID NO: 79259 - DNA, 14 bp, Unknown
  misc_feature (1)..( 14): Result.001 file - promoters75/5663934
tttattgttacaaa

SEQ ID NO: 79260 - DNA, 15 bp, Unknown
  misc_feature (1)..( 15): Result.001 file - promoters75/5663970
gtttgttgttgggtc

SEQ ID NO: 79261 - DNA, 9 bp, Unknown
  misc_feature (1)..( 9): Result.001 file - promoters75/5663970
gagtttctc

SEQ ID NO: 79262 - DNA, 9 bp, Unknown
  misc_feature (1)..( 9): Result.001 file - promoters75/5663970
tagtctctt

SEQ ID NO: 79263 - DNA, 9 bp, Unknown
  misc_feature (1)..( 9): Result.001 file - promoters75/5663970
gagattctg

SEQ ID NO: 79264 - DNA, 9 bp, Unknown
  misc_feature (1)..( 9): Result.001 file - promoters75/5664294
tagtttctt

SEQ ID NO: 79265 - DNA, 8 bp, Unknown
  misc_feature (1)..( 8): Result.001 file - promoters75/5664294
caaaccga

SEQ ID NO: 79266 - DNA, 8 bp, Unknown
  misc_feature (1)..( 8): Result.001 file - promoters75/5664294
aaaatcga

SEQ ID NO: 79267 - DNA, 8 bp, Unknown
  misc_feature (1)..( 8): Result.001 file - promoters75/5664294
aaaatctg

SEQ ID NO: 79268 - DNA, 8 bp, Unknown
  misc_feature (1)..( 8): Result.001 file - promoters75/5664294
gataaaaa

SEQ ID NO: 79269 - DNA, 8 bp, Unknown
  misc_feature (1)..( 8): Result.001 file - promoters75/5664294
tatataaa

SEQ ID NO: 79270 - DNA, 8 bp, Unknown
  misc_feature (1)..( 8): Result.001 file - promoters75/5664311
gataaatg

SEQ ID NO: 79271 - DNA, 7 bp, Unknown
  misc_feature (1)..( 7): Result.001 file - promoters75/5664311
tttctca

SEQ ID NO: 79272 - DNA, 7 bp, Unknown
  misc_feature (1)..( 7): Result.001 file - promoters75/5664311
tttgtca

SEQ ID NO: 79273 - DNA, 7 bp, Unknown
  misc_feature (1)..( 7): Result.001 file - promoters75/5664311
tttctct

SEQ ID NO: 79274 - DNA, 10 bp, Unknown
  misc_feature (1)..( 10): Result.001 file - promoters75/5664311
aataaatttt

SEQ ID NO: 79275 - DNA, 10 bp, Unknown
  misc_feature (1)..( 10): Result.001 file - promoters75/5664311
aatatatttt

SEQ ID NO: 79276 - DNA, 10 bp, Unknown
  misc_feature (1)..( 10): Result.001 file - promoters75/5664362
atcaaatttt

SEQ ID NO: 79277 - DNA, 9 bp, Unknown
  misc_feature (1)..( 9): Result.001 file - promoters75/5664362
gcgttttct

SEQ ID NO: 79278 - DNA, 9 bp, Unknown
  misc_feature (1)..( 9): Result.001 file - promoters75/5664362
ttgttttct

SEQ ID NO: 79279 - DNA, 9 bp, Unknown
  misc_feature (1)..( 9): Result.001 file - promoters75/5664465
ttgttttaa

SEQ ID NO: 79280 - DNA, 7 bp, Unknown
  misc_feature (1)..( 7): Result.001 file - promoters75/5664465
ttcacaa

SEQ ID NO: 79281 - DNA, 7 bp, Unknown
  misc_feature (1)..( 7): Result.001 file - promoters75/5664465
gtcacaa

SEQ ID NO: 79282 - DNA, 7 bp, Unknown
  misc_feature (1)..( 7): Result.001 file - promoters75/5664703
ttcacag

SEQ ID NO: 79283 - DNA, 12 bp, Unknown
  misc_feature (1)..( 12): Result.001 file - promoters75/5664703
ctttttgtttat

SEQ ID NO: 79284 - DNA, 12 bp, Unknown
  misc_feature (1)..( 12): Result.001 file - promoters75/5664703
tgatttgtatat

SEQ ID NO: 79285 - DNA, 12 bp, Unknown
  misc_feature (1)..( 12): Result.001 file - promoters75/5664703
cttattgtataa

SEQ ID NO: 79286 - DNA, 8 bp, Unknown
  misc_feature (1)..( 8): Result.001 file - promoters75/5664703
gctggatt

SEQ ID NO: 79287 - DNA, 8 bp, Unknown
  misc_feature (1)..( 8): Result.001 file - promoters75/5664703
tctgaatt

SEQ ID NO: 79288 - DNA, 8 bp, Unknown
  misc_feature (1)..( 8): Result.001 file - promoters75/5664873
tctgaaca

SEQ ID NO: 79289 - DNA, 12 bp, Unknown
  misc_feature (1)..( 12): Result.001 file - promoters75/5664873
aaaataaaataa

SEQ ID NO: 79290 - DNA, 12 bp, Unknown
  misc_feature (1)..( 12): Result.001 file - promoters75/5664873
caaagaaagaca

SEQ ID NO: 79291 - DNA, 12 bp, Unknown
  misc_feature (1)..( 12): Result.001 file - promoters75/5664885
aaaataaactaa

SEQ ID NO: 79292 - DNA, 9 bp, Unknown
  misc_feature (1)..( 9): Result.001 file - promoters75/5664885
aatttaacc

SEQ ID NO: 79293 - DNA, 9 bp, Unknown
  misc_feature (1)..( 9): Result.001 file - promoters75/5664885
attttgacc

SEQ ID NO: 79294 - DNA, 9 bp, Unknown
  misc_feature (1)..( 9): Result.001 file - promoters75/5664885
attttgatt

SEQ ID NO: 79295 - DNA, 8 bp, Unknown
  misc_feature (1)..( 8): Result.001 file - promoters75/5664885
acttcata

SEQ ID NO: 79296 - DNA, 8 bp, Unknown
  misc_feature (1)..( 8): Result.001 file - promoters75/5664885
cattcata

SEQ ID NO: 79297 - DNA, 8 bp, Unknown
  misc_feature (1)..( 8): Result.001 file - promoters75/5665347
cattcatc

SEQ ID NO: 79298 - DNA, 11 bp, Unknown
  misc_feature (1)..( 11): Result.001 file - promoters75/5665347
agttataaatc

SEQ ID NO: 79299 - DNA, 11 bp, Unknown
  misc_feature (1)..( 11): Result.001 file - promoters75/5665347
agttatgaatc

SEQ ID NO: 79300 - DNA, 11 bp, Unknown
  misc_feature (1)..( 11): Result.001 file - promoters75/5665347
tgttatttatt

SEQ ID NO: 79301 - DNA, 11 bp, Unknown
  misc_feature (1)..( 11): Result.001 file - promoters75/5665347
gaaaatgaatt

SEQ ID NO: 79302 - DNA, 11 bp, Unknown
  misc_feature (1)..( 11): Result.001 file - promoters75/5665347
tttaatcaatc

SEQ ID NO: 79303 - DNA, 11 bp, Unknown
  misc_feature (1)..( 11): Result.001 file - promoters75/5667720
gattataaatc

SEQ ID NO: 79304 - DNA, 9 bp, Unknown
  misc_feature (1)..( 9): Result.001 file - promoters75/5667720
taaccaaaa

SEQ ID NO: 79305 - DNA, 9 bp, Unknown
  misc_feature (1)..( 9): Result.001 file - promoters75/5667720
taaccaaaa

SEQ ID NO: 79306 - DNA, 9 bp, Unknown
  misc_feature (1)..( 9): Result.001 file - promoters75/5667720
aaactaaac

SEQ ID NO: 79307 - DNA, 12 bp, Unknown
  misc_feature (1)..( 12): Result.001 file - promoters75/5667720
aaaataaaataa

SEQ ID NO: 79308 - DNA, 12 bp, Unknown
  misc_feature (1)..( 12): Result.001 file - promoters75/5667720
aaaataatagta

SEQ ID NO: 79309 - DNA, 12 bp, Unknown
  misc_feature (1)..( 12): Result.001 file - promoters75/5667812
aaaataaactaa

SEQ ID NO: 79310 - DNA, 10 bp, Unknown
  misc_feature (1)..( 10): Result.001 file - promoters75/5667812
gagttggata

SEQ ID NO: 79311 - DNA, 10 bp, Unknown
  misc_feature (1)..( 10): Result.001 file - promoters75/5667812
tctttggatt

SEQ ID NO: 79312 - DNA, 10 bp, Unknown
  misc_feature (1)..( 10): Result.001 file - promoters75/5667812
ggtttgtata

SEQ ID NO: 79313 - DNA, 10 bp, Unknown
  misc_feature (1)..( 10): Result.001 file - promoters75/5667812
tctttgaata

SEQ ID NO: 79314 - DNA, 10 bp, Unknown
  misc_feature (1)..( 10): Result.001 file - promoters75/5667812
gagatggatc

SEQ ID NO: 79315 - DNA, 10 bp, Unknown
  misc_feature (1)..( 10): Result.001 file - promoters75/5667812
gagctgggtt

SEQ ID NO: 79316 - DNA, 15 bp, Unknown
  misc_feature (1)..( 15): Result.001 file - promoters75/5667812
aaaagtttttgtaat

SEQ ID NO: 79317 - DNA, 15 bp, Unknown
  misc_feature (1)..( 15): Result.001 file - promoters75/5667812
caaacttttattttt

SEQ ID NO: 79318 - DNA, 15 bp, Unknown
  misc_feature (1)..( 15): Result.001 file - promoters75/5667812
gaaaggtttcttctc

SEQ ID NO: 79319 - DNA, 15 bp, Unknown
  misc_feature (1)..( 15): Result.001 file - promoters75/5667812
tgaagtttgaaacaa

SEQ ID NO: 79320 - DNA, 15 bp, Unknown
  misc_feature (1)..( 15): Result.001 file - promoters75/5667812
caaatttttactttt

SEQ ID NO: 79321 - DNA, 15 bp, Unknown
  misc_feature (1)..( 15): Result.001 file - promoters75/5667849
gttattattatattt

SEQ ID NO: 79322 - DNA, 9 bp, Unknown
  misc_feature (1)..( 9): Result.001 file - promoters75/5667849
gtgaaggat

SEQ ID NO: 79323 - DNA, 9 bp, Unknown
  misc_feature (1)..( 9): Result.001 file - promoters75/5667849
gtgaatgat

SEQ ID NO: 79324 - DNA, 9 bp, Unknown
  misc_feature (1)..( 9): Result.001 file - promoters75/5667849
gtgaatgat

SEQ ID NO: 79325 - DNA, 8 bp, Unknown
  misc_feature (1)..( 8): Result.001 file - promoters75/5667849
cattgtgt

SEQ ID NO: 79326 - DNA, 8 bp, Unknown
  misc_feature (1)..( 8): Result.001 file - promoters75/5667849
cattttgt

SEQ ID NO: 79327 - DNA, 8 bp, Unknown
  misc_feature (1)..( 8): Result.001 file - promoters75/5668065
cattttgt

SEQ ID NO: 79328 - DNA, 9 bp, Unknown
  misc_feature (1)..( 9): Result.001 file - promoters75/5668065
aaagaaaat

SEQ ID NO: 79329 - DNA, 9 bp, Unknown
  misc_feature (1)..( 9): Result.001 file - promoters75/5668065
gtggaaaat

SEQ ID NO: 79330 - DNA, 9 bp, Unknown
  misc_feature (1)..( 9): Result.001 file - promoters75/5668065
aaacaaaac

SEQ ID NO: 79331 - DNA, 9 bp, Unknown
  misc_feature (1)..( 9): Result.001 file - promoters75/5668065
aaagaaaag

SEQ ID NO: 79332 - DNA, 9 bp, Unknown
  misc_feature (1)..( 9): Result.001 file - promoters75/5668065
taagaaaaa

SEQ ID NO: 79333 - DNA, 9 bp, Unknown
  misc_feature (1)..( 9): Result.001 file - promoters75/5668065
aaacaaagt

SEQ ID NO: 79334 - DNA, 16 bp, Unknown
  misc_feature (1)..( 16): Result.001 file - promoters75/5668065
tgctgctgaattggaa

SEQ ID NO: 79335 - DNA, 16 bp, Unknown
  misc_feature (1)..( 16): Result.001 file - promoters75/5668065
ctcttatgatttgctt

SEQ ID NO: 79336 - DNA, 16 bp, Unknown
  misc_feature (1)..( 16): Result.001 file - promoters75/5668065
acagcagtattagctt

SEQ ID NO: 79337 - DNA, 16 bp, Unknown
  misc_feature (1)..( 16): Result.001 file - promoters75/5668065
caaaactgatttttaa

SEQ ID NO: 79338 - DNA, 16 bp, Unknown
  misc_feature (1)..( 16): Result.001 file - promoters75/5668065
ctcgtataattctttt

SEQ ID NO: 79339 - DNA, 16 bp, Unknown
  misc_feature (1)..( 16): Result.001 file - promoters75/5668065
cttccatgtttttgct

SEQ ID NO: 79340 - DNA, 17 bp, Unknown
  misc_feature (1)..( 17): Result.001 file - promoters75/5668292
tctttttgttgttgttc

SEQ ID NO: 79341 - DNA, 13 bp, Unknown
  misc_feature (1)..( 13): Result.001 file - promoters75/5668292
ctcgtataattct

SEQ ID NO: 79342 - DNA, 13 bp, Unknown
  misc_feature (1)..( 13): Result.001 file - promoters75/5668292
ctcttatgatttg

SEQ ID NO: 79343 - DNA, 13 bp, Unknown
  misc_feature (1)..( 13): Result.001 file - promoters75/5668292
cttccatgttttt

SEQ ID NO: 79344 - DNA, 13 bp, Unknown
  misc_feature (1)..( 13): Result.001 file - promoters75/5668292
ctctactcttgga

SEQ ID NO: 79345 - DNA, 13 bp, Unknown
  misc_feature (1)..( 13): Result.001 file - promoters75/5668292
ctcttaaaagtct

SEQ ID NO: 79346 - DNA, 13 bp, Unknown
  misc_feature (1)..( 13): Result.001 file - promoters75/5668292
tgagtttgatttg

SEQ ID NO: 79347 - DNA, 10 bp, Unknown
  misc_feature (1)..( 10): Result.001 file - promoters75/5668292
aaaagttttt

SEQ ID NO: 79348 - DNA, 10 bp, Unknown
  misc_feature (1)..( 10): Result.001 file - promoters75/5668292
tttagttttg

SEQ ID NO: 79349 - DNA, 10 bp, Unknown
  misc_feature (1)..( 10): Result.001 file - promoters75/5668292
acaagtttcc

SEQ ID NO: 79350 - DNA, 10 bp, Unknown
  misc_feature (1)..( 10): Result.001 file - promoters75/5668292
tgaagtttga

SEQ ID NO: 79351 - DNA, 10 bp, Unknown
  misc_feature (1)..( 10): Result.001 file - promoters75/5668292
aaaagtgttg

SEQ ID NO: 79352 - DNA, 10 bp, Unknown
  misc_feature (1)..( 10): Result.001 file - promoters75/5668292
tttactttta

SEQ ID NO: 79353 - DNA, 10 bp, Unknown
  misc_feature (1)..( 10): Result.001 file - promoters75/5668292
cggagtttct

SEQ ID NO: 79354 - DNA, 16 bp, Unknown
  misc_feature (1)..( 16): Result.001 file - promoters75/5668292
attaaaaatgggtcta

SEQ ID NO: 79355 - DNA, 16 bp, Unknown
  misc_feature (1)..( 16): Result.001 file - promoters75/5668292
attaaagtttgggcca

SEQ ID NO: 79356 - DNA, 16 bp, Unknown
  misc_feature (1)..( 16): Result.001 file - promoters75/5668292
tttaaaaaagggaagt

SEQ ID NO: 79357 - DNA, 16 bp, Unknown
  misc_feature (1)..( 16): Result.001 file - promoters75/5668292
cttaaagtgtgggcca

SEQ ID NO: 79358 - DNA, 16 bp, Unknown
  misc_feature (1)..( 16): Result.001 file - promoters75/5668292
tttaatgttgggcctt

SEQ ID NO: 79359 - DNA, 16 bp, Unknown
  misc_feature (1)..( 16): Result.001 file - promoters75/5668292
ttgatttgatggccca

SEQ ID NO: 79360 - DNA, 8 bp, Unknown
  misc_feature (1)..( 8): Result.001 file - promoters75/5668292
atgggccg

SEQ ID NO: 79361 - DNA, 8 bp, Unknown
  misc_feature (1)..( 8): Result.001 file - promoters75/5668292
ttgggcca

SEQ ID NO: 79362 - DNA, 8 bp, Unknown
  misc_feature (1)..( 8): Result.001 file - promoters75/5668292
gtgggcca

SEQ ID NO: 79363 - DNA, 8 bp, Unknown
  misc_feature (1)..( 8): Result.001 file - promoters75/5668292
ttgggcct

SEQ ID NO: 79364 - DNA, 8 bp, Unknown
  misc_feature (1)..( 8): Result.001 file - promoters75/5668292
atgggcct

SEQ ID NO: 79365 - DNA, 8 bp, Unknown
  misc_feature (1)..( 8): Result.001 file - promoters75/5668435
atggccca

SEQ ID NO: 79366 - DNA, 13 bp, Unknown
  misc_feature (1)..( 13): Result.001 file - promoters75/5668435
catataaaacgat

SEQ ID NO: 79367 - DNA, 13 bp, Unknown
  misc_feature (1)..( 13): Result.001 file - promoters75/5668435
gatacaaaaccct

SEQ ID NO: 79368 - DNA, 13 bp, Unknown
  misc_feature (1)..( 13): Result.001 file - promoters75/5668435
gagacaaatagaa

SEQ ID NO: 79369 - DNA, 13 bp, Unknown
  misc_feature (1)..( 13): Result.001 file - promoters75/5668435
tatataaaaccaa

SEQ ID NO: 79370 - DNA, 13 bp, Unknown
  misc_feature (1)..( 13): Result.001 file - promoters75/5668435
gggaaaaaatcaa

SEQ ID NO: 79371 - DNA, 13 bp, Unknown
  misc_feature (1)..( 13): Result.001 file - promoters75/5668435
gagtcaaagaaat

SEQ ID NO: 79372 - DNA, 12 bp, Unknown
  misc_feature (1)..( 12): Result.001 file - promoters75/5668435
cactatataaag

SEQ ID NO: 79373 - DNA, 12 bp, Unknown
  misc_feature (1)..( 12): Result.001 file - promoters75/5668435
cactatttaaag

SEQ ID NO: 79374 - DNA, 12 bp, Unknown
  misc_feature (1)..( 12): Result.001 file - promoters75/5668435
tcttatatataa

SEQ ID NO: 79375 - DNA, 12 bp, Unknown
  misc_feature (1)..( 12): Result.001 file - promoters75/5668435
tttaattaaaac

SEQ ID NO: 79376 - DNA, 12 bp, Unknown
  misc_feature (1)..( 12): Result.001 file - promoters75/5668435
gcttatttatga

SEQ ID NO: 79377 - DNA, 12 bp, Unknown
  misc_feature (1)..( 12): Result.001 file - promoters75/5668435
ggtcatttaaag

SEQ ID NO: 79378 - DNA, 8 bp, Unknown
  misc_feature (1)..( 8): Result.001 file - promoters75/5668435
aatgggcc

SEQ ID NO: 79379 - DNA, 8 bp, Unknown
  misc_feature (1)..( 8): Result.001 file - promoters75/5668435
tttgggcc

SEQ ID NO: 79380 - DNA, 8 bp, Unknown
  misc_feature (1)..( 8): Result.001 file - promoters75/5668435
tgtgggcc

SEQ ID NO: 79381 - DNA, 8 bp, Unknown
  misc_feature (1)..( 8): Result.001 file - promoters75/5668435
tatgggcc

SEQ ID NO: 79382 - DNA, 8 bp, Unknown
  misc_feature (1)..( 8): Result.001 file - promoters75/5668435
tttcggcc

SEQ ID NO: 79383 - DNA, 8 bp, Unknown
  misc_feature (1)..( 8): Result.001 file - promoters75/5668493
aatgggct

SEQ ID NO: 79384 - DNA, 9 bp, Unknown
  misc_feature (1)..( 9): Result.001 file - promoters75/5668493
aatcaatca

SEQ ID NO: 79385 - DNA, 9 bp, Unknown
  misc_feature (1)..( 9): Result.001 file - promoters75/5668493
aataaatgt

SEQ ID NO: 79386 - DNA, 9 bp, Unknown
  misc_feature (1)..( 9): Result.001 file - promoters75/5668493
catcaattt

SEQ ID NO: 79387 - DNA, 9 bp, Unknown
  misc_feature (1)..( 9): Result.001 file - promoters75/5668493
attaaatgt

SEQ ID NO: 79388 - DNA, 9 bp, Unknown
  misc_feature (1)..( 9): Result.001 file - promoters75/5668493
gtttgttta

SEQ ID NO: 79389 - DNA, 9 bp, Unknown
  misc_feature (1)..( 9): Result.001 file - promoters75/5668493
ttttatttg

SEQ ID NO: 79390 - DNA, 9 bp, Unknown
  misc_feature (1)..( 9): Result.001 file - promoters75/5668493
gtttgatta

SEQ ID NO: 79391 - DNA, 9 bp, Unknown
  misc_feature (1)..( 9): Result.001 file - promoters75/5668493
atttattta

SEQ ID NO: 79392 - DNA, 9 bp, Unknown
  misc_feature (1)..( 9): Result.001 file - promoters75/5668493
tacaataaa

SEQ ID NO: 79393 - DNA, 9 bp, Unknown
  misc_feature (1)..( 9): Result.001 file - promoters75/5668493
tacaatatt

SEQ ID NO: 79394 - DNA, 9 bp, Unknown
  misc_feature (1)..( 9): Result.001 file - promoters75/5668493
ttcaaaatt

SEQ ID NO: 79395 - DNA, 9 bp, Unknown
  misc_feature (1)..( 9): Result.001 file - promoters75/5668509
atcaatatg

SEQ ID NO: 79396 - DNA, 7 bp, Unknown
  misc_feature (1)..( 7): Result.001 file - promoters75/5668509
agaggag

SEQ ID NO: 79397 - DNA, 7 bp, Unknown
  misc_feature (1)..( 7): Result.001 file - promoters75/5668509
tgaggag

SEQ ID NO: 79398 - DNA, 7 bp, Unknown
  misc_feature (1)..( 7): Result.001 file - promoters75/5668720
agaggat

SEQ ID NO: 79399 - DNA, 13 bp, Unknown
  misc_feature (1)..( 13): Result.001 file - promoters75/5668720
ctaaaggcccaat

SEQ ID NO: 79400 - DNA, 13 bp, Unknown
  misc_feature (1)..( 13): Result.001 file - promoters75/5668720
gtgaaagcccaaa

SEQ ID NO: 79401 - DNA, 13 bp, Unknown
  misc_feature (1)..( 13): Result.001 file - promoters75/5668720
ctaaaggcccaat

SEQ ID NO: 79402 - DNA, 13 bp, Unknown
  misc_feature (1)..( 13): Result.001 file - promoters75/5668720
aattcggcccatc

SEQ ID NO: 79403 - DNA, 11 bp, Unknown
  misc_feature (1)..( 11): Result.001 file - promoters75/5668720
ttcaaaaatac

SEQ ID NO: 79404 - DNA, 11 bp, Unknown
  misc_feature (1)..( 11): Result.001 file - promoters75/5668720
tacaataatac

SEQ ID NO: 79405 - DNA, 11 bp, Unknown
  misc_feature (1)..( 11): Result.001 file - promoters75/5668720
ttctaaaatct

SEQ ID NO: 79406 - DNA, 11 bp, Unknown
  misc_feature (1)..( 11): Result.001 file - promoters75/5668720
tttaaaaactt

SEQ ID NO: 79407 - DNA, 8 bp, Unknown
  misc_feature (1)..( 8): Result.001 file - promoters75/5668720
gaatttga

SEQ ID NO: 79408 - DNA, 8 bp, Unknown
  misc_feature (1)..( 8): Result.001 file - promoters75/5668720
taatttga

SEQ ID NO: 79409 - DNA, 8 bp, Unknown
  misc_feature (1)..( 8): Result.001 file - promoters75/5668720
gaaattgc

SEQ ID NO: 79410 - DNA, 8 bp, Unknown
  misc_feature (1)..( 8): Result.001 file - promoters75/5668720
caatttgt

SEQ ID NO: 79411 - DNA, 8 bp, Unknown
  misc_feature (1)..( 8): Result.001 file - promoters75/5668720
tgaatttg

SEQ ID NO: 79412 - DNA, 8 bp, Unknown
  misc_feature (1)..( 8): Result.001 file - promoters75/5668720
tgaattgg

SEQ ID NO: 79413 - DNA, 8 bp, Unknown
  misc_feature (1)..( 8): Result.001 file - promoters75/5668720
tgatttgt

SEQ ID NO: 79414 - DNA, 8 bp, Unknown
  misc_feature (1)..( 8): Result.001 file - promoters75/5669025
caatttgt

SEQ ID NO: 79415 - DNA, 9 bp, Unknown
  misc_feature (1)..( 9): Result.001 file - promoters75/5669025
tggttttat

SEQ ID NO: 79416 - DNA, 9 bp, Unknown
  misc_feature (1)..( 9): Result.001 file - promoters75/5669025
ttgttctat

SEQ ID NO: 79417 - DNA, 9 bp, Unknown
  misc_feature (1)..( 9): Result.001 file - promoters75/5669025
tggtttttc

SEQ ID NO: 79418 - DNA, 8 bp, Unknown
  misc_feature (1)..( 8): Result.001 file - promoters75/5669025
aaatcatg

SEQ ID NO: 79419 - DNA, 8 bp, Unknown
  misc_feature (1)..( 8): Result.001 file - promoters75/5669025
atatcatg

SEQ ID NO: 79420 - DNA, 8 bp, Unknown
  misc_feature (1)..( 8): Result.001 file - promoters75/5669250
atatcatt

SEQ ID NO: 79421 - DNA, 8 bp, Unknown
  misc_feature (1)..( 8): Result.001 file - promoters75/5669250
agtataaa

SEQ ID NO: 79422 - DNA, 8 bp, Unknown
  misc_feature (1)..( 8): Result.001 file - promoters75/5669250
actataaa

SEQ ID NO: 79423 - DNA, 8 bp, Unknown
  misc_feature (1)..( 8): Result.001 file - promoters75/5670592
tatataaa

SEQ ID NO: 79424 - DNA, 8 bp, Unknown
  misc_feature (1)..( 8): Result.001 file - promoters75/5670592
aaataatt

SEQ ID NO: 79425 - DNA, 8 bp, Unknown
  misc_feature (1)..( 8): Result.001 file - promoters75/5670592
aaacaatt

SEQ ID NO: 79426 - DNA, 8 bp, Unknown
  misc_feature (1)..( 8): Result.001 file - promoters75/5674194
taataatt

SEQ ID NO: 79427 - DNA, 14 bp, Unknown
  misc_feature (1)..( 14): Result.001 file - promoters75/5674194
aatcattaatcctt

SEQ ID NO: 79428 - DNA, 14 bp, Unknown
  misc_feature (1)..( 14): Result.001 file - promoters75/5674194
catccttatacttc

SEQ ID NO: 79429 - DNA, 14 bp, Unknown
  misc_feature (1)..( 14): Result.001 file - promoters75/5674194
aataattaaagttt

SEQ ID NO: 79430 - DNA, 14 bp, Unknown
  misc_feature (1)..( 14): Result.001 file - promoters75/5674194
aatcataaaagttt

SEQ ID NO: 79431 - DNA, 14 bp, Unknown
  misc_feature (1)..( 14): Result.001 file - promoters75/5674194
aatgaaagggattc

SEQ ID NO: 79432 - DNA, 14 bp, Unknown
  misc_feature (1)..( 14): Result.001 file - promoters75/5674194
cttgagagggtttc

SEQ ID NO: 79433 - DNA, 11 bp, Unknown
  misc_feature (1)..( 11): Result.001 file - promoters75/5674194
catataaaatg

SEQ ID NO: 79434 - DNA, 11 bp, Unknown
  misc_feature (1)..( 11): Result.001 file - promoters75/5674194
cataaaaaatt

SEQ ID NO: 79435 - DNA, 11 bp, Unknown
  misc_feature (1)..( 11): Result.001 file - promoters75/5674194
aataaaaacag

SEQ ID NO: 79436 - DNA, 11 bp, Unknown
  misc_feature (1)..( 11): Result.001 file - promoters75/5674194
gatgaaatatt

SEQ ID NO: 79437 - DNA, 11 bp, Unknown
  misc_feature (1)..( 11): Result.001 file - promoters75/5674194
aagaaaaaaaa

SEQ ID NO: 79438 - DNA, 11 bp, Unknown
  misc_feature (1)..( 11): Result.001 file - promoters75/5674634
aattaaagaaa

SEQ ID NO: 79439 - DNA, 15 bp, Unknown
  misc_feature (1)..( 15): Result.001 file - promoters75/5674634
aaaatgaattctttc

SEQ ID NO: 79440 - DNA, 15 bp, Unknown
  misc_feature (1)..( 15): Result.001 file - promoters75/5674634
aaaacgaatggcaag

SEQ ID NO: 79441 - DNA, 15 bp, Unknown
  misc_feature (1)..( 15): Result.001 file - promoters75/5674634
ttattgatttcgtga

SEQ ID NO: 79442 - DNA, 15 bp, Unknown
  misc_feature (1)..( 15): Result.001 file - promoters75/5674634
caaacaaatcaaatc

SEQ ID NO: 79443 - DNA, 15 bp, Unknown
  misc_feature (1)..( 15): Result.001 file - promoters75/5674634
gaaaaaaagttatgc

SEQ ID NO: 79444 - DNA, 12 bp, Unknown
  misc_feature (1)..( 12): Result.001 file - promoters75/5674666
ttaatttcctga

SEQ ID NO: 79445 - DNA, 7 bp, Unknown
  misc_feature (1)..( 7): Result.001 file - promoters75/5674666
taatgaa

SEQ ID NO: 79446 - DNA, 7 bp, Unknown
  misc_feature (1)..( 7): Result.001 file - promoters75/5674666
taacgaa

SEQ ID NO: 79447 - DNA, 7 bp, Unknown
  misc_feature (1)..( 7): Result.001 file - promoters75/5674666
aaatgaa

SEQ ID NO: 79448 - DNA, 6 bp, Unknown
  misc_feature (1)..( 6): Result.001 file - promoters75/5674666
atttgt

SEQ ID NO: 79449 - DNA, 6 bp, Unknown
  misc_feature (1)..( 6): Result.001 file - promoters75/5674666
atttgt

SEQ ID NO: 79450 - DNA, 6 bp, Unknown
  misc_feature (1)..( 6): Result.001 file - promoters75/5674666
atttgt

SEQ ID NO: 79451 - DNA, 7 bp, Unknown
  misc_feature (1)..( 7): Result.001 file - promoters75/5674666
ttttttt

SEQ ID NO: 79452 - DNA, 7 bp, Unknown
  misc_feature (1)..( 7): Result.001 file - promoters75/5674666
tttattt

SEQ ID NO: 79453 - DNA, 7 bp, Unknown
  misc_feature (1)..( 7): Result.001 file - promoters75/5674666
tttattt

SEQ ID NO: 79454 - DNA, 10 bp, Unknown
  misc_feature (1)..( 10): Result.001 file - promoters75/5674666
gtttgtattt

SEQ ID NO: 79455 - DNA, 10 bp, Unknown
  misc_feature (1)..( 10): Result.001 file - promoters75/5674666
gtttgtaaac

SEQ ID NO: 79456 - DNA, 10 bp, Unknown
  misc_feature (1)..( 10): Result.001 file - promoters75/5674666
ttttgtcttt

SEQ ID NO: 79457 - DNA, 9 bp, Unknown
  misc_feature (1)..( 9): Result.001 file - promoters75/5674666
tgtattttt

SEQ ID NO: 79458 - DNA, 9 bp, Unknown
  misc_feature (1)..( 9): Result.001 file - promoters75/5674666
actatgttt

SEQ ID NO: 79459 - DNA, 9 bp, Unknown
  misc_feature (1)..( 9): Result.001 file - promoters75/5675661
tttgtcttt

SEQ ID NO: 79460 - DNA, 7 bp, Unknown
  misc_feature (1)..( 7): Result.001 file - promoters75/5675661
aatttct

SEQ ID NO: 79461 - DNA, 7 bp, Unknown
  misc_feature (1)..( 7): Result.001 file - promoters75/5675661
aatttct

SEQ ID NO: 79462 - DNA, 7 bp, Unknown
  misc_feature (1)..( 7): Result.001 file - promoters75/5675661
tatttct

SEQ ID NO: 79463 - DNA, 8 bp, Unknown
  misc_feature (1)..( 8): Result.001 file - promoters75/5675661
gtggttgg

SEQ ID NO: 79464 - DNA, 8 bp, Unknown
  misc_feature (1)..( 8): Result.001 file - promoters75/5675661
ttggttgg

SEQ ID NO: 79465 - DNA, 8 bp, Unknown
  misc_feature (1)..( 8): Result.001 file - promoters75/5677230
ttggtttt

SEQ ID NO: 79466 - DNA, 7 bp, Unknown
  misc_feature (1)..( 7): Result.001 file - promoters75/5677230
aaggaaa

SEQ ID NO: 79467 - DNA, 7 bp, Unknown
  misc_feature (1)..( 7): Result.001 file - promoters75/5677230
aagtaaa

SEQ ID NO: 79468 - DNA, 7 bp, Unknown
  misc_feature (1)..( 7): Result.001 file - promoters75/5677230
gagtaaa

SEQ ID NO: 79469 - DNA, 7 bp, Unknown
  misc_feature (1)..( 7): Result.001 file - promoters75/5677230
aaaatat

SEQ ID NO: 79470 - DNA, 7 bp, Unknown
  misc_feature (1)..( 7): Result.001 file - promoters75/5677230
aaaataa

SEQ ID NO: 79471 - DNA, 7 bp, Unknown
  misc_feature (1)..( 7): Result.001 file - promoters75/5677309
gaaatat

SEQ ID NO: 79472 - DNA, 10 bp, Unknown
  misc_feature (1)..( 10): Result.001 file - promoters75/5677309
aacaaaaact

SEQ ID NO: 79473 - DNA, 10 bp, Unknown
  misc_feature (1)..( 10): Result.001 file - promoters75/5677309
cacaaagact

SEQ ID NO: 79474 - DNA, 10 bp, Unknown
  misc_feature (1)..( 10): Result.001 file - promoters75/5677309
cacaaacggt

SEQ ID NO: 79475 - DNA, 11 bp, Unknown
  misc_feature (1)..( 11): Result.001 file - promoters75/5677309
taatttagtgg

SEQ ID NO: 79476 - DNA, 11 bp, Unknown
  misc_feature (1)..( 11): Result.001 file - promoters75/5677309
taatttgacaa

SEQ ID NO: 79477 - DNA, 11 bp, Unknown
  misc_feature (1)..( 11): Result.001 file - promoters75/5677309
taattggacaa

SEQ ID NO: 79478 - DNA, 7 bp, Unknown
  misc_feature (1)..( 7): Result.001 file - promoters75/5677309
aaaagtt

SEQ ID NO: 79479 - DNA, 7 bp, Unknown
  misc_feature (1)..( 7): Result.001 file - promoters75/5677309
aaaagtc

SEQ ID NO: 79480 - DNA, 7 bp, Unknown
  misc_feature (1)..( 7): Result.001 file - promoters75/5677344
aaaatca

SEQ ID NO: 79481 - DNA, 7 bp, Unknown
  misc_feature (1)..( 7): Result.001 file - promoters75/5677344
aaaattg

SEQ ID NO: 79482 - DNA, 7 bp, Unknown
  misc_feature (1)..( 7): Result.001 file - promoters75/5677344
aaaattt

SEQ ID NO: 79483 - DNA, 7 bp, Unknown
  misc_feature (1)..( 7): Result.001 file - promoters75/5753942
aaacttt

SEQ ID NO: 79484 - DNA, 9 bp, Unknown
  misc_feature (1)..( 9): Result.001 file - promoters75/5753942
acaattgta

SEQ ID NO: 79485 - DNA, 9 bp, Unknown
  misc_feature (1)..( 9): Result.001 file - promoters75/5753942
tacattgta

SEQ ID NO: 79486 - DNA, 9 bp, Unknown
  misc_feature (1)..( 9): Result.001 file - promoters75/5753942
taccttgtt

SEQ ID NO: 79487 - DNA, 9 bp, Unknown
  misc_feature (1)..( 9): Result.001 file - promoters75/5753942
caaacaaaa

SEQ ID NO: 79488 - DNA, 9 bp, Unknown
  misc_feature (1)..( 9): Result.001 file - promoters75/5753942
gaaacaaag

SEQ ID NO: 79489 - DNA, 9 bp, Unknown
  misc_feature (1)..( 9): Result.001 file - promoters75/5753942
taaagaaaa

SEQ ID NO: 79490 - DNA, 9 bp, Unknown
  misc_feature (1)..( 9): Result.001 file - promoters75/5753942
caatcaaat

SEQ ID NO: 79491 - DNA, 8 bp, Unknown
  misc_feature (1)..( 8): Result.001 file - promoters75/5753942
tgttcaaa

SEQ ID NO: 79492 - DNA, 8 bp, Unknown
  misc_feature (1)..( 8): Result.001 file - promoters75/5753942
tgtccaat

SEQ ID NO: 79493 - DNA, 9 bp, Unknown
  misc_feature (1)..( 9): Result.001 file - promoters75/5753942
cgttcgaaa

SEQ ID NO: 79494 - DNA, 13 bp, Unknown
  misc_feature (1)..( 13): Result.001 file - promoters75/5753942
aaacaaattaggg

SEQ ID NO: 79495 - DNA, 13 bp, Unknown
  misc_feature (1)..( 13): Result.001 file - promoters75/5753942
gcccaaattaaaa

SEQ ID NO: 79496 - DNA, 13 bp, Unknown
  misc_feature (1)..( 13): Result.001 file - promoters75/5753942
gcccatattaaaa

SEQ ID NO: 79497 - DNA, 11 bp, Unknown
  misc_feature (1)..( 11): Result.001 file - promoters75/5753942
tttgtgttttt

SEQ ID NO: 79498 - DNA, 11 bp, Unknown
  misc_feature (1)..( 11): Result.001 file - promoters75/5753942
gatgtcttttt

SEQ ID NO: 79499 - DNA, 11 bp, Unknown
  misc_feature (1)..( 11): Result.001 file - promoters75/5753942
tttgggttcct

SEQ ID NO: 79500 - DNA, 7 bp, Unknown
  misc_feature (1)..( 7): Result.001 file - promoters75/5753942
aatattt

SEQ ID NO: 79501 - DNA, 7 bp, Unknown
  misc_feature (1)..( 7): Result.001 file - promoters75/5753942
catattt

SEQ ID NO: 79502 - DNA, 7 bp, Unknown
  misc_feature (1)..( 7): Result.001 file - promoters75/5753942
catatta

SEQ ID NO: 79503 - DNA, 10 bp, Unknown
  misc_feature (1)..( 10): Result.001 file - promoters75/5753942
attcgtagca

SEQ ID NO: 79504 - DNA, 10 bp, Unknown
  misc_feature (1)..( 10): Result.001 file - promoters75/5753942
tttcgtacat

SEQ ID NO: 79505 - DNA, 10 bp, Unknown
  misc_feature (1)..( 10): Result.001 file - promoters75/5753942
tttggtacat

SEQ ID NO: 79506 - DNA, 8 bp, Unknown
  misc_feature (1)..( 8): Result.001 file - promoters75/5753942
aggctata

SEQ ID NO: 79507 - DNA, 8 bp, Unknown
  misc_feature (1)..( 8): Result.001 file - promoters75/5753942
gggccata

SEQ ID NO: 79508 - DNA, 8 bp, Unknown
  misc_feature (1)..( 8): Result.001 file - promoters75/5754280
gggccaag

SEQ ID NO: 79509 - DNA, 7 bp, Unknown
  misc_feature (1)..( 7): Result.001 file - promoters75/5754280
ggcccag

SEQ ID NO: 79510 - DNA, 7 bp, Unknown
  misc_feature (1)..( 7): Result.001 file - promoters75/5754280
ggcccac

SEQ ID NO: 79511 - DNA, 7 bp, Unknown
  misc_feature (1)..( 7): Result.001 file - promoters75/5754280
ggcccat

SEQ ID NO: 79512 - DNA, 7 bp, Unknown
  misc_feature (1)..( 7): Result.001 file - promoters75/5754280
ggcccaa

SEQ ID NO: 79513 - DNA, 7 bp, Unknown
  misc_feature (1)..( 7): Result.001 file - promoters75/5754280
agcccaa

SEQ ID NO: 79514 - DNA, 11 bp, Unknown
  misc_feature (1)..( 11): Result.001 file - promoters75/5754280
aagcccattaa

SEQ ID NO: 79515 - DNA, 11 bp, Unknown
  misc_feature (1)..( 11): Result.001 file - promoters75/5754280
cggcccaataa

SEQ ID NO: 79516 - DNA, 11 bp, Unknown
  misc_feature (1)..( 11): Result.001 file - promoters75/5754280
aagcccaaata

SEQ ID NO: 79517 - DNA, 11 bp, Unknown
  misc_feature (1)..( 11): Result.001 file - promoters75/5754280
aagcccaaata

SEQ ID NO: 79518 - DNA, 11 bp, Unknown
  misc_feature (1)..( 11): Result.001 file - promoters75/5756166
aggcccaattt

SEQ ID NO: 79519 - DNA, 8 bp, Unknown
  misc_feature (1)..( 8): Result.001 file - promoters75/5756166
ttacaatg

SEQ ID NO: 79520 - DNA, 8 bp, Unknown
  misc_feature (1)..( 8): Result.001 file - promoters75/5756166
atacaatg

SEQ ID NO: 79521 - DNA, 8 bp, Unknown
  misc_feature (1)..( 8): Result.001 file - promoters75/5756166
ttaaaatt

SEQ ID NO: 79522 - DNA, 7 bp, Unknown
  misc_feature (1)..( 7): Result.001 file - promoters75/5756166
tctaaaa

SEQ ID NO: 79523 - DNA, 7 bp, Unknown
  misc_feature (1)..( 7): Result.001 file - promoters75/5756166
tcttaaa

SEQ ID NO: 79524 - DNA, 7 bp, Unknown
  misc_feature (1)..( 7): Result.001 file - promoters75/5758021
tcttaat

SEQ ID NO: 79525 - DNA, 12 bp, Unknown
  misc_feature (1)..( 12): Result.001 file - promoters75/5758021
tcttatgatttg

SEQ ID NO: 79526 - DNA, 12 bp, Unknown
  misc_feature (1)..( 12): Result.001 file - promoters75/5758021
tcttaggattca

SEQ ID NO: 79527 - DNA, 12 bp, Unknown
  misc_feature (1)..( 12): Result.001 file - promoters75/5758021
ttccatgttttt

SEQ ID NO: 79528 - DNA, 12 bp, Unknown
  misc_feature (1)..( 12): Result.001 file - promoters75/5776417
gtctatgctttg

SEQ ID NO: 79529 - DNA, 8 bp, Unknown
  misc_feature (1)..( 8): Result.001 file - promoters75/5776417
caaggaaa

SEQ ID NO: 79530 - DNA, 8 bp, Unknown
  misc_feature (1)..( 8): Result.001 file - promoters75/5776417
caagtaaa

SEQ ID NO: 79531 - DNA, 9 bp, Unknown
  misc_feature (1)..( 9): Result.001 file - promoters75/5776417
gcagtcaaa

SEQ ID NO: 79532 - DNA, 9 bp, Unknown
  misc_feature (1)..( 9): Result.001 file - promoters75/5776417
cgaatcaat

SEQ ID NO: 79533 - DNA, 9 bp, Unknown
  misc_feature (1)..( 9): Result.001 file - promoters75/5776417
cgattcaat

SEQ ID NO: 79534 - DNA, 9 bp, Unknown
  misc_feature (1)..( 9): Result.001 file - promoters75/5776417
tgattcaaa

SEQ ID NO: 79535 - DNA, 7 bp, Unknown
  misc_feature (1)..( 7): Result.001 file - promoters75/5776417
agttttg

SEQ ID NO: 79536 - DNA, 7 bp, Unknown
  misc_feature (1)..( 7): Result.001 file - promoters75/5776417
agttttt

SEQ ID NO: 79537 - DNA, 7 bp, Unknown
  misc_feature (1)..( 7): Result.001 file - promoters70/1007030
ggttttt

SEQ ID NO: 79538 - DNA, 8 bp, Unknown
  misc_feature (1)..( 8): Result.001 file - promoters70/1007030
aaatgaaa

SEQ ID NO: 79539 - DNA, 8 bp, Unknown
  misc_feature (1)..( 8): Result.001 file - promoters70/1007030
aaacgaat

SEQ ID NO: 79540 - DNA, 8 bp, Unknown
  misc_feature (1)..( 8): Result.001 file - promoters70/1007030
gaaccaat

SEQ ID NO: 79541 - DNA, 11 bp, Unknown
  misc_feature (1)..( 11): Result.001 file - promoters70/1007030
gaagataaaca

SEQ ID NO: 79542 - DNA, 11 bp, Unknown
  misc_feature (1)..( 11): Result.001 file - promoters70/1007030
gaaaatataca

SEQ ID NO: 79543 - DNA, 11 bp, Unknown
  misc_feature (1)..( 11): Result.001 file - promoters70/1007030
taaagtattta

SEQ ID NO: 79544 - DNA, 12 bp, Unknown
  misc_feature (1)..( 12): Result.001 file - promoters70/1007030
atccaattcttt

SEQ ID NO: 79545 - DNA, 12 bp, Unknown
  misc_feature (1)..( 12): Result.001 file - promoters70/1007030
atccaaatctaa

SEQ ID NO: 79546 - DNA, 12 bp, Unknown
  misc_feature (1)..( 12): Result.001 file - promoters70/1007030
atgaaaatctaa

SEQ ID NO: 79547 - DNA, 7 bp, Unknown
  misc_feature (1)..( 7): Result.001 file - promoters70/1007030
aatctgc

SEQ ID NO: 79548 - DNA, 7 bp, Unknown
  misc_feature (1)..( 7): Result.001 file - promoters70/1007030
aatctga

SEQ ID NO: 79549 - DNA, 7 bp, Unknown
  misc_feature (1)..( 7): Result.001 file - promoters70/1007030
aatttga

SEQ ID NO: 79550 - DNA, 12 bp, Unknown
  misc_feature (1)..( 12): Result.001 file - promoters70/1007030
tattcacattta

SEQ ID NO: 79551 - DNA, 12 bp, Unknown
  misc_feature (1)..( 12): Result.001 file - promoters70/1007030
ttatcaaattta

SEQ ID NO: 79552 - DNA, 12 bp, Unknown
  misc_feature (1)..( 12): Result.001 file - promoters70/1007030
ttatgaaacaga

SEQ ID NO: 79553 - DNA, 9 bp, Unknown
  misc_feature (1)..( 9): Result.001 file - promoters70/1007030
taaccatgg

SEQ ID NO: 79554 - DNA, 9 bp, Unknown
  misc_feature (1)..( 9): Result.001 file - promoters70/1007030
taaacatat

SEQ ID NO: 79555 - DNA, 9 bp, Unknown
  misc_feature (1)..( 9): Result.001 file - promoters70/1007273
caaacttat

SEQ ID NO: 79556 - DNA, 9 bp, Unknown
  misc_feature (1)..( 9): Result.001 file - promoters70/1007273
aaagaacct

SEQ ID NO: 79557 - DNA, 9 bp, Unknown
  misc_feature (1)..( 9): Result.001 file - promoters70/1007273
ctagatcct

SEQ ID NO: 79558 - DNA, 9 bp, Unknown
  misc_feature (1)..( 9): Result.001 file - promoters70/1007273
aaagaacga

SEQ ID NO: 79559 - DNA, 9 bp, Unknown
  misc_feature (1)..( 9): Result.001 file - promoters70/1007273
aaaaaaccg

SEQ ID NO: 79560 - DNA, 8 bp, Unknown
  misc_feature (1)..( 8): Result.001 file - promoters70/1007273
cttccaaa

SEQ ID NO: 79561 - DNA, 8 bp, Unknown
  misc_feature (1)..( 8): Result.001 file - promoters70/1007273
attctaaa

SEQ ID NO: 79562 - DNA, 8 bp, Unknown
  misc_feature (1)..( 8): Result.001 file - promoters70/1007273
attttaac

SEQ ID NO: 79563 - DNA, 8 bp, Unknown
  misc_feature (1)..( 8): Result.001 file - promoters70/1007273
ctttcacc

SEQ ID NO: 79564 - DNA, 9 bp, Unknown
  misc_feature (1)..( 9): Result.001 file - promoters70/1007273
gaaagaacc

SEQ ID NO: 79565 - DNA, 9 bp, Unknown
  misc_feature (1)..( 9): Result.001 file - promoters70/1007273
gaacgaaat

SEQ ID NO: 79566 - DNA, 9 bp, Unknown
  misc_feature (1)..( 9): Result.001 file - promoters70/1007273
taaaaaacc

SEQ ID NO: 79567 - DNA, 7 bp, Unknown
  misc_feature (1)..( 7): Result.001 file - promoters70/1007273
cgattac

SEQ ID NO: 79568 - DNA, 7 bp, Unknown
  misc_feature (1)..( 7): Result.001 file - promoters70/1007273
agattac

SEQ ID NO: 79569 - DNA, 7 bp, Unknown
  misc_feature (1)..( 7): Result.001 file - promoters70/1007273
agattaa

SEQ ID NO: 79570 - DNA, 8 bp, Unknown
  misc_feature (1)..( 8): Result.001 file - promoters70/1007273
atgaatca

SEQ ID NO: 79571 - DNA, 8 bp, Unknown
  misc_feature (1)..( 8): Result.001 file - promoters70/1007273
atgaatca

SEQ ID NO: 79572 - DNA, 8 bp, Unknown
  misc_feature (1)..( 8): Result.001 file - promoters70/1007273
aggaatca

SEQ ID NO: 79573 - DNA, 10 bp, Unknown
  misc_feature (1)..( 10): Result.001 file - promoters70/1007273
tcggaacaaa

SEQ ID NO: 79574 - DNA, 10 bp, Unknown
  misc_feature (1)..( 10): Result.001 file - promoters70/1007273
agagaagaaa

SEQ ID NO: 79575 - DNA, 10 bp, Unknown
  misc_feature (1)..( 10): Result.001 file - promoters70/1007273
agagaagagc

SEQ ID NO: 79576 - DNA, 8 bp, Unknown
  misc_feature (1)..( 8): Result.001 file - promoters70/1007273
caaacaaa

SEQ ID NO: 79577 - DNA, 8 bp, Unknown
  misc_feature (1)..( 8): Result.001 file - promoters70/1007273
aaaagaaa

SEQ ID NO: 79578 - DNA, 8 bp, Unknown
  misc_feature (1)..( 8): Result.001 file - promoters70/1007273
aaaagatt

SEQ ID NO: 79579 - DNA, 7 bp, Unknown
  misc_feature (1)..( 7): Result.001 file - promoters70/1007273
cttaaaa

SEQ ID NO: 79580 - DNA, 7 bp, Unknown
  misc_feature (1)..( 7): Result.001 file - promoters70/1007273
cttaaat

SEQ ID NO: 79581 - DNA, 7 bp, Unknown
  misc_feature (1)..( 7): Result.001 file - promoters70/1007273
cttgaat

SEQ ID NO: 79582 - DNA, 6 bp, Unknown
  misc_feature (1)..( 6): Result.001 file - promoters70/1007273
caaaac

SEQ ID NO: 79583 - DNA, 6 bp, Unknown
  misc_feature (1)..( 6): Result.001 file - promoters70/1007273
caaaac

SEQ ID NO: 79584 - DNA, 6 bp, Unknown
  misc_feature (1)..( 6): Result.001 file - promoters70/1007639
caaaac

SEQ ID NO: 79585 - DNA, 10 bp, Unknown
  misc_feature (1)..( 10): Result.001 file - promoters70/1007639
atacagactt

SEQ ID NO: 79586 - DNA, 10 bp, Unknown
  misc_feature (1)..( 10): Result.001 file - promoters70/1007639
atacaaactt

SEQ ID NO: 79587 - DNA, 10 bp, Unknown
  misc_feature (1)..( 10): Result.001 file - promoters70/1007639
ataaaaacac

SEQ ID NO: 79588 - DNA, 10 bp, Unknown
  misc_feature (1)..( 10): Result.001 file - promoters70/1007639
ataaaaaagc

SEQ ID NO: 79589 - DNA, 10 bp, Unknown
  misc_feature (1)..( 10): Result.001 file - promoters70/1007639
ctgaaaacaa

SEQ ID NO: 79590 - DNA, 10 bp, Unknown
  misc_feature (1)..( 10): Result.001 file - promoters70/1007639
agaaaaacaa

SEQ ID NO: 79591 - DNA, 13 bp, Unknown
  misc_feature (1)..( 13): Result.001 file - promoters70/1007639
tagaaatataaat

SEQ ID NO: 79592 - DNA, 13 bp, Unknown
  misc_feature (1)..( 13): Result.001 file - promoters70/1007639
aataaatatcttt

SEQ ID NO: 79593 - DNA, 13 bp, Unknown
  misc_feature (1)..( 13): Result.001 file - promoters70/1007639
cagagatataaat

SEQ ID NO: 79594 - DNA, 13 bp, Unknown
  misc_feature (1)..( 13): Result.001 file - promoters70/1007639
cagagaatgtata

SEQ ID NO: 79595 - DNA, 13 bp, Unknown
  misc_feature (1)..( 13): Result.001 file - promoters70/1007639
ggttcatataagt

SEQ ID NO: 79596 - DNA, 13 bp, Unknown
  misc_feature (1)..( 13): Result.001 file - promoters70/1007639
gttttctgtttgg

SEQ ID NO: 79597 - DNA, 13 bp, Unknown
  misc_feature (1)..( 13): Result.001 file - promoters70/1007639
aatttttgtagac

SEQ ID NO: 79598 - DNA, 13 bp, Unknown
  misc_feature (1)..( 13): Result.001 file - promoters70/1007639
gttttctaactag

SEQ ID NO: 79599 - DNA, 13 bp, Unknown
  misc_feature (1)..( 13): Result.001 file - promoters70/1007639
aatatttgagcgg

SEQ ID NO: 79600 - DNA, 13 bp, Unknown
  misc_feature (1)..( 13): Result.001 file - promoters70/1007639
agagtttgtattc

SEQ ID NO: 79601 - DNA, 13 bp, Unknown
  misc_feature (1)..( 13): Result.001 file - promoters70/1007639
aacgagttgtggg

SEQ ID NO: 79602 - DNA, 13 bp, Unknown
  misc_feature (1)..( 13): Result.001 file - promoters70/1007639
gattatttgtggg

SEQ ID NO: 79603 - DNA, 13 bp, Unknown
  misc_feature (1)..( 13): Result.001 file - promoters70/1007639
gattatttttgga

SEQ ID NO: 79604 - DNA, 13 bp, Unknown
  misc_feature (1)..( 13): Result.001 file - promoters70/1007639
acgcccttttgat

SEQ ID NO: 79605 - DNA, 13 bp, Unknown
  misc_feature (1)..( 13): Result.001 file - promoters70/1007639
taatattttatac

SEQ ID NO: 79606 - DNA, 9 bp, Unknown
  misc_feature (1)..( 9): Result.001 file - promoters70/1007639
ataacattg

SEQ ID NO: 79607 - DNA, 9 bp, Unknown
  misc_feature (1)..( 9): Result.001 file - promoters70/1007639
atatcattc

SEQ ID NO: 79608 - DNA, 9 bp, Unknown
  misc_feature (1)..( 9): Result.001 file - promoters70/1007639
gagtcattc

SEQ ID NO: 79609 - DNA, 9 bp, Unknown
  misc_feature (1)..( 9): Result.001 file - promoters70/1007639
ctatgattt

SEQ ID NO: 79610 - DNA, 9 bp, Unknown
  misc_feature (1)..( 9): Result.001 file - promoters70/1007759
tgatgattt

SEQ ID NO: 79611 - DNA, 8 bp, Unknown
  misc_feature (1)..( 8): Result.001 file - promoters70/1007759
aagatgaa

SEQ ID NO: 79612 - DNA, 8 bp, Unknown
  misc_feature (1)..( 8): Result.001 file - promoters70/1007759
tagaagaa

SEQ ID NO: 79613 - DNA, 8 bp, Unknown
  misc_feature (1)..( 8): Result.001 file - promoters70/1007759
aagttgaa

SEQ ID NO: 79614 - DNA, 8 bp, Unknown
  misc_feature (1)..( 8): Result.001 file - promoters70/1007759
gagtagaa

SEQ ID NO: 79615 - DNA, 9 bp, Unknown
  misc_feature (1)..( 9): Result.001 file - promoters70/1007759
agccaaact

SEQ ID NO: 79616 - DNA, 9 bp, Unknown
  misc_feature (1)..( 9): Result.001 file - promoters70/1007759
agctaaaca

SEQ ID NO: 79617 - DNA, 9 bp, Unknown
  misc_feature (1)..( 9): Result.001 file - promoters70/1007759
aactacaca

SEQ ID NO: 79618 - DNA, 14 bp, Unknown
  misc_feature (1)..( 14): Result.001 file - promoters70/1007759
aattctgaggagag

SEQ ID NO: 79619 - DNA, 14 bp, Unknown
  misc_feature (1)..( 14): Result.001 file - promoters70/1007759
gagttggagtagaa

SEQ ID NO: 79620 - DNA, 14 bp, Unknown
  misc_feature (1)..( 14): Result.001 file - promoters70/1007759
gagtttgagtggaa

SEQ ID NO: 79621 - DNA, 13 bp, Unknown
  misc_feature (1)..( 13): Result.001 file - promoters70/1007759
gaggggaggacaa

SEQ ID NO: 79622 - DNA, 13 bp, Unknown
  misc_feature (1)..( 13): Result.001 file - promoters70/1007759
gagtggaaagaag

SEQ ID NO: 79623 - DNA, 14 bp, Unknown
  misc_feature (1)..( 14): Result.001 file - promoters70/1007967
gagttggagtagaa

SEQ ID NO: 79624 - DNA, 8 bp, Unknown
  misc_feature (1)..( 8): Result.001 file - promoters70/1007967
attcttaa

SEQ ID NO: 79625 - DNA, 8 bp, Unknown
  misc_feature (1)..( 8): Result.001 file - promoters70/1007967
attgttat

SEQ ID NO: 79626 - DNA, 8 bp, Unknown
  misc_feature (1)..( 8): Result.001 file - promoters70/1007967
gttcataa

SEQ ID NO: 79627 - DNA, 9 bp, Unknown
  misc_feature (1)..( 9): Result.001 file - promoters70/1007967
aatttcaac

SEQ ID NO: 79628 - DNA, 9 bp, Unknown
  misc_feature (1)..( 9): Result.001 file - promoters70/1007967
aatttgaac

SEQ ID NO: 79629 - DNA, 9 bp, Unknown
  misc_feature (1)..( 9): Result.001 file - promoters70/1008070
aatgtgaaa

SEQ ID NO: 79630 - DNA, 9 bp, Unknown
  misc_feature (1)..( 9): Result.001 file - promoters70/1008070
acaacaaag

SEQ ID NO: 79631 - DNA, 9 bp, Unknown
  misc_feature (1)..( 9): Result.001 file - promoters70/1008070
aaaacaaac

SEQ ID NO: 79632 - DNA, 9 bp, Unknown
  misc_feature (1)..( 9): Result.001 file - promoters70/1008070
aaaacaaac

SEQ ID NO: 79633 - DNA, 9 bp, Unknown
  misc_feature (1)..( 9): Result.001 file - promoters70/1008070
taaacaaac

SEQ ID NO: 79634 - DNA, 9 bp, Unknown
  misc_feature (1)..( 9): Result.001 file - promoters70/1008070
attgcattt

SEQ ID NO: 79635 - DNA, 9 bp, Unknown
  misc_feature (1)..( 9): Result.001 file - promoters70/1008070
atttcatat

SEQ ID NO: 79636 - DNA, 9 bp, Unknown
  misc_feature (1)..( 9): Result.001 file - promoters70/1008070
ccttcataa

SEQ ID NO: 79637 - DNA, 9 bp, Unknown
  misc_feature (1)..( 9): Result.001 file - promoters70/1008070
atttcttaa

SEQ ID NO: 79638 - DNA, 12 bp, Unknown
  misc_feature (1)..( 12): Result.001 file - promoters70/1008070
accactatataa

SEQ ID NO: 79639 - DNA, 12 bp, Unknown
  misc_feature (1)..( 12): Result.001 file - promoters70/1008070
tccattatatat

SEQ ID NO: 79640 - DNA, 12 bp, Unknown
  misc_feature (1)..( 12): Result.001 file - promoters70/1008070
agtgagatataa

SEQ ID NO: 79641 - DNA, 12 bp, Unknown
  misc_feature (1)..( 12): Result.001 file - promoters70/1008070
ttgtttatatca

SEQ ID NO: 79642 - DNA, 12 bp, Unknown
  misc_feature (1)..( 12): Result.001 file - promoters70/1008070
tcctttatattc

SEQ ID NO: 79643 - DNA, 9 bp, Unknown
  misc_feature (1)..( 9): Result.001 file - promoters70/1008070
aaaatgaaa

SEQ ID NO: 79644 - DNA, 9 bp, Unknown
  misc_feature (1)..( 9): Result.001 file - promoters70/1008070
aaactgaac

SEQ ID NO: 79645 - DNA, 9 bp, Unknown
  misc_feature (1)..( 9): Result.001 file - promoters70/1008070
tcaatcaaa

SEQ ID NO: 79646 - DNA, 9 bp, Unknown
  misc_feature (1)..( 9): Result.001 file - promoters70/1008148
taactgatt

SEQ ID NO: 79647 - DNA, 13 bp, Unknown
  misc_feature (1)..( 13): Result.001 file - promoters70/1008148
aaaatatataaag

SEQ ID NO: 79648 - DNA, 13 bp, Unknown
  misc_feature (1)..( 13): Result.001 file - promoters70/1008148
gtttaatacaaaa

SEQ ID NO: 79649 - DNA, 13 bp, Unknown
  misc_feature (1)..( 13): Result.001 file - promoters70/1008148
atttgttataaag

SEQ ID NO: 79650 - DNA, 13 bp, Unknown
  misc_feature (1)..( 13): Result.001 file - promoters70/1008148
caataatacatat

SEQ ID NO: 79651 - DNA, 13 bp, Unknown
  misc_feature (1)..( 13): Result.001 file - promoters70/1008148
caaaaatacttac

SEQ ID NO: 79652 - DNA, 13 bp, Unknown
  misc_feature (1)..( 13): Result.001 file - promoters70/1008148
ttcatcttcaaaa

SEQ ID NO: 79653 - DNA, 11 bp, Unknown
  misc_feature (1)..( 11): Result.001 file - promoters70/1008148
aaatacattta

SEQ ID NO: 79654 - DNA, 11 bp, Unknown
  misc_feature (1)..( 11): Result.001 file - promoters70/1008148
gtatagattag

SEQ ID NO: 79655 - DNA, 11 bp, Unknown
  misc_feature (1)..( 11): Result.001 file - promoters70/1008148
ttatagattta

SEQ ID NO: 79656 - DNA, 11 bp, Unknown
  misc_feature (1)..( 11): Result.001 file - promoters70/1008148
atatagagttg

SEQ ID NO: 79657 - DNA, 11 bp, Unknown
  misc_feature (1)..( 11): Result.001 file - promoters70/1008148
cttgagattac

SEQ ID NO: 79658 - DNA, 11 bp, Unknown
  misc_feature (1)..( 11): Result.001 file - promoters70/1008148
ttagagaaatt

SEQ ID NO: 79659 - DNA, 9 bp, Unknown
  misc_feature (1)..( 9): Result.001 file - promoters70/1008148
ctcaaagat

SEQ ID NO: 79660 - DNA, 9 bp, Unknown
  misc_feature (1)..( 9): Result.001 file - promoters70/1008148
atcatagat

SEQ ID NO: 79661 - DNA, 9 bp, Unknown
  misc_feature (1)..( 9): Result.001 file - promoters70/1008148
gttatagat

SEQ ID NO: 79662 - DNA, 9 bp, Unknown
  misc_feature (1)..( 9): Result.001 file - promoters70/1008148
aacatagaa

SEQ ID NO: 79663 - DNA, 9 bp, Unknown
  misc_feature (1)..( 9): Result.001 file - promoters70/1008148
attagagaa

SEQ ID NO: 79664 - DNA, 9 bp, Unknown
  misc_feature (1)..( 9): Result.001 file - promoters70/1008148
aacagagac

SEQ ID NO: 79665 - DNA, 14 bp, Unknown
  misc_feature (1)..( 14): Result.001 file - promoters70/1008148
gcatataaagtcat

SEQ ID NO: 79666 - DNA, 14 bp, Unknown
  misc_feature (1)..( 14): Result.001 file - promoters70/1008148
ctatataaagataa

SEQ ID NO: 79667 - DNA, 14 bp, Unknown
  misc_feature (1)..( 14): Result.001 file - promoters70/1008148
gtatataaagacgc

SEQ ID NO: 79668 - DNA, 14 bp, Unknown
  misc_feature (1)..( 14): Result.001 file - promoters70/1008148
ctatatattaaacc

SEQ ID NO: 79669 - DNA, 14 bp, Unknown
  misc_feature (1)..( 14): Result.001 file - promoters70/1008148
ccaaataaagagag

SEQ ID NO: 79670 - DNA, 14 bp, Unknown
  misc_feature (1)..( 14): Result.001 file - promoters70/1008148
actattaaagccgc

SEQ ID NO: 79671 - DNA, 13 bp, Unknown
  misc_feature (1)..( 13): Result.001 file - promoters70/1008148
aatataaatacaa

SEQ ID NO: 79672 - DNA, 13 bp, Unknown
  misc_feature (1)..( 13): Result.001 file - promoters70/1008148
gttattaataaat

SEQ ID NO: 79673 - DNA, 13 bp, Unknown
  misc_feature (1)..( 13): Result.001 file - promoters70/1008148
aataaaaattgat

SEQ ID NO: 79674 - DNA, 13 bp, Unknown
  misc_feature (1)..( 13): Result.001 file - promoters70/1008148
tataaaaaaaagt

SEQ ID NO: 79675 - DNA, 13 bp, Unknown
  misc_feature (1)..( 13): Result.001 file - promoters70/1008148
cataaaatgttat

SEQ ID NO: 79676 - DNA, 13 bp, Unknown
  misc_feature (1)..( 13): Result.001 file - promoters70/1008148
ctgattaatgaat

SEQ ID NO: 79677 - DNA, 13 bp, Unknown
  misc_feature (1)..( 13): Result.001 file - promoters70/1008148
aataataactctt

SEQ ID NO: 79678 - DNA, 10 bp, Unknown
  misc_feature (1)..( 10): Result.001 file - promoters70/1008148
tgatgagagt

SEQ ID NO: 79679 - DNA, 10 bp, Unknown
  misc_feature (1)..( 10): Result.001 file - promoters70/1008148
agattagatc

SEQ ID NO: 79680 - DNA, 10 bp, Unknown
  misc_feature (1)..( 10): Result.001 file - promoters70/1008148
atattagaga

SEQ ID NO: 79681 - DNA, 10 bp, Unknown
  misc_feature (1)..( 10): Result.001 file - promoters70/1008148
agattactaa

SEQ ID NO: 79682 - DNA, 10 bp, Unknown
  misc_feature (1)..( 10): Result.001 file - promoters70/1008148
gggttataga

SEQ ID NO: 79683 - DNA, 10 bp, Unknown
  misc_feature (1)..( 10): Result.001 file - promoters70/1008148
aagttataag

SEQ ID NO: 79684 - DNA, 10 bp, Unknown
  misc_feature (1)..( 10): Result.001 file - promoters70/1008148
agtaatgaag

SEQ ID NO: 79685 - DNA, 10 bp, Unknown
  misc_feature (1)..( 10): Result.001 file - promoters70/1008148
attaatgaat

SEQ ID NO: 79686 - DNA, 10 bp, Unknown
  misc_feature (1)..( 10): Result.001 file - promoters70/1008148
attaataaat

SEQ ID NO: 79687 - DNA, 10 bp, Unknown
  misc_feature (1)..( 10): Result.001 file - promoters70/1008148
ccaaatcaat

SEQ ID NO: 79688 - DNA, 10 bp, Unknown
  misc_feature (1)..( 10): Result.001 file - promoters70/1008148
aataataact

SEQ ID NO: 79689 - DNA, 10 bp, Unknown
  misc_feature (1)..( 10): Result.001 file - promoters70/1008218
aagaataaaa

SEQ ID NO: 79690 - DNA, 9 bp, Unknown
  misc_feature (1)..( 9): Result.001 file - promoters70/1008218
tatttgatt

SEQ ID NO: 79691 - DNA, 9 bp, Unknown
  misc_feature (1)..( 9): Result.001 file - promoters70/1008218
catttgagc

SEQ ID NO: 79692 - DNA, 9 bp, Unknown
  misc_feature (1)..( 9): Result.001 file - promoters70/1008218
catttaatt

SEQ ID NO: 79693 - DNA, 9 bp, Unknown
  misc_feature (1)..( 9): Result.001 file - promoters70/1008218
catttatgt

SEQ ID NO: 79694 - DNA, 13 bp, Unknown
  misc_feature (1)..( 13): Result.001 file - promoters70/1008218
gtattttatgtgg

SEQ ID NO: 79695 - DNA, 13 bp, Unknown
  misc_feature (1)..( 13): Result.001 file - promoters70/1008218
ttattatatgtaa

SEQ ID NO: 79696 - DNA, 13 bp, Unknown
  misc_feature (1)..( 13): Result.001 file - promoters70/1008218
catttatgtcttt

SEQ ID NO: 79697 - DNA, 13 bp, Unknown
  misc_feature (1)..( 13): Result.001 file - promoters70/1008218
atatttaatagta

SEQ ID NO: 79698 - DNA, 13 bp, Unknown
  misc_feature (1)..( 13): Result.001 file - promoters70/1008218
aatttattttcca

SEQ ID NO: 79699 - DNA, 7 bp, Unknown
  misc_feature (1)..( 7): Result.001 file - promoters70/1008218
gagtatt

SEQ ID NO: 79700 - DNA, 7 bp, Unknown
  misc_feature (1)..( 7): Result.001 file - promoters70/1008218
tagtatt

SEQ ID NO: 79701 - DNA, 7 bp, Unknown
  misc_feature (1)..( 7): Result.001 file - promoters70/1008218
tagtatt

SEQ ID NO: 79702 - DNA, 7 bp, Unknown
  misc_feature (1)..( 7): Result.001 file - promoters70/1008425
tagcatt

SEQ ID NO: 79703 - DNA, 10 bp, Unknown
  misc_feature (1)..( 10): Result.001 file - promoters70/1008425
caaatacatt

SEQ ID NO: 79704 - DNA, 10 bp, Unknown
  misc_feature (1)..( 10): Result.001 file - promoters70/1008425
caaaaacaac

SEQ ID NO: 79705 - DNA, 10 bp, Unknown
  misc_feature (1)..( 10): Result.001 file - promoters70/1008425
taaatacatt

SEQ ID NO: 79706 - DNA, 8 bp, Unknown
  misc_feature (1)..( 8): Result.001 file - promoters70/1008425
cttctgaa

SEQ ID NO: 79707 - DNA, 8 bp, Unknown
  misc_feature (1)..( 8): Result.001 file - promoters70/1008425
cttttgaa

SEQ ID NO: 79708 - DNA, 8 bp, Unknown
  misc_feature (1)..( 8): Result.001 file - promoters70/1008443
attttgag

SEQ ID NO: 79709 - DNA, 9 bp, Unknown
  misc_feature (1)..( 9): Result.001 file - promoters70/1008443
agaattgac

SEQ ID NO: 79710 - DNA, 9 bp, Unknown
  misc_feature (1)..( 9): Result.001 file - promoters70/1008443
tgaattgga

SEQ ID NO: 79711 - DNA, 9 bp, Unknown
  misc_feature (1)..( 9): Result.001 file - promoters70/1008443
ggaaatgac

SEQ ID NO: 79712 - DNA, 9 bp, Unknown
  misc_feature (1)..( 9): Result.001 file - promoters70/1008443
tgatttgct

SEQ ID NO: 79713 - DNA, 9 bp, Unknown
  misc_feature (1)..( 9): Result.001 file - promoters70/1008443
acaaacgac

SEQ ID NO: 79714 - DNA, 9 bp, Unknown
  misc_feature (1)..( 9): Result.001 file - promoters70/1008443
acaaaagac

SEQ ID NO: 79715 - DNA, 9 bp, Unknown
  misc_feature (1)..( 9): Result.001 file - promoters70/1008443
aaaaaagat

SEQ ID NO: 79716 - DNA, 9 bp, Unknown
  misc_feature (1)..( 9): Result.001 file - promoters70/1008443
tgattttta

SEQ ID NO: 79717 - DNA, 9 bp, Unknown
  misc_feature (1)..( 9): Result.001 file - promoters70/1008443
gaaaaaaag

SEQ ID NO: 79718 - DNA, 9 bp, Unknown
  misc_feature (1)..( 9): Result.001 file - promoters70/1008443
caaagaaag

SEQ ID NO: 79719 - DNA, 9 bp, Unknown
  misc_feature (1)..( 9): Result.001 file - promoters70/1008443
caaaaaaaa

SEQ ID NO: 79720 - DNA, 9 bp, Unknown
  misc_feature (1)..( 9): Result.001 file - promoters70/1008443
aaactaaaa

SEQ ID NO: 79721 - DNA, 9 bp, Unknown
  misc_feature (1)..( 9): Result.001 file - promoters70/1008443
caaggaaag

SEQ ID NO: 79722 - DNA, 9 bp, Unknown
  misc_feature (1)..( 9): Result.001 file - promoters70/1008443
cacacaaag

SEQ ID NO: 79723 - DNA, 14 bp, Unknown
  misc_feature (1)..( 14): Result.001 file - promoters70/1008443
tttggaaaagacca

SEQ ID NO: 79724 - DNA, 14 bp, Unknown
  misc_feature (1)..( 14): Result.001 file - promoters70/1008443
aagacaaaagacac

SEQ ID NO: 79725 - DNA, 14 bp, Unknown
  misc_feature (1)..( 14): Result.001 file - promoters70/1008443
catacaaacgacac

SEQ ID NO: 79726 - DNA, 14 bp, Unknown
  misc_feature (1)..( 14): Result.001 file - promoters70/1008443
actacaaatatcga

SEQ ID NO: 79727 - DNA, 14 bp, Unknown
  misc_feature (1)..( 14): Result.001 file - promoters70/1008443
tgtggaaatgacgt

SEQ ID NO: 79728 - DNA, 14 bp, Unknown
  misc_feature (1)..( 14): Result.001 file - promoters70/1008443
catagaaaaattaa

SEQ ID NO: 79729 - DNA, 14 bp, Unknown
  misc_feature (1)..( 14): Result.001 file - promoters70/1008443
tttacaaaaaaaaa

SEQ ID NO: 79730 - DNA, 17 bp, Unknown
  misc_feature (1)..( 17): Result.001 file - promoters70/1008443
gtggaaaatgttaaacc

SEQ ID NO: 79731 - DNA, 17 bp, Unknown
  misc_feature (1)..( 17): Result.001 file - promoters70/1008443
tacaaaaatgtaatttt

SEQ ID NO: 79732 - DNA, 17 bp, Unknown
  misc_feature (1)..( 17): Result.001 file - promoters70/1008443
ttttctaatgaaatttt

SEQ ID NO: 79733 - DNA, 17 bp, Unknown
  misc_feature (1)..( 17): Result.001 file - promoters70/1008443
taataaaaaaatataga

SEQ ID NO: 79734 - DNA, 17 bp, Unknown
  misc_feature (1)..( 17): Result.001 file - promoters70/1008443
atataaaatggtgttca

SEQ ID NO: 79735 - DNA, 17 bp, Unknown
  misc_feature (1)..( 17): Result.001 file - promoters70/1008732
attctatatttgataca

SEQ ID NO: 79736 - DNA, 11 bp, Unknown
  misc_feature (1)..( 11): Result.001 file - promoters70/1008732
aaagtaattta

SEQ ID NO: 79737 - DNA, 11 bp, Unknown
  misc_feature (1)..( 11): Result.001 file - promoters70/1008732
acagtagtttc

SEQ ID NO: 79738 - DNA, 11 bp, Unknown
  misc_feature (1)..( 11): Result.001 file - promoters70/1008732
aaaataaacta

SEQ ID NO: 79739 - DNA, 11 bp, Unknown
  misc_feature (1)..( 11): Result.001 file - promoters70/1008732
tgttgagtttc

SEQ ID NO: 79740 - DNA, 11 bp, Unknown
  misc_feature (1)..( 11): Result.001 file - promoters70/1008808
ataataaataa

SEQ ID NO: 79741 - DNA, 7 bp, Unknown
  misc_feature (1)..( 7): Result.001 file - promoters70/1008808
cgaagaa

SEQ ID NO: 79742 - DNA, 7 bp, Unknown
  misc_feature (1)..( 7): Result.001 file - promoters70/1008808
cgatgaa

SEQ ID NO: 79743 - DNA, 7 bp, Unknown
  misc_feature (1)..( 7): Result.001 file - promoters70/1008808
agaagaa

SEQ ID NO: 79744 - DNA, 8 bp, Unknown
  misc_feature (1)..( 8): Result.001 file - promoters70/1008808
acttcctt

SEQ ID NO: 79745 - DNA, 8 bp, Unknown
  misc_feature (1)..( 8): Result.001 file - promoters70/1008808
gcttactt

SEQ ID NO: 79746 - DNA, 8 bp, Unknown
  misc_feature (1)..( 8): Result.001 file - promoters70/1008808
acttccgc

SEQ ID NO: 79747 - DNA, 7 bp, Unknown
  misc_feature (1)..( 7): Result.001 file - promoters70/1008808
ctttgaa

SEQ ID NO: 79748 - DNA, 7 bp, Unknown
  misc_feature (1)..( 7): Result.001 file - promoters70/1008808
gtttgaa

SEQ ID NO: 79749 - DNA, 7 bp, Unknown
  misc_feature (1)..( 7): Result.001 file - promoters70/1008808
gttagaa

SEQ ID NO: 79750 - DNA, 9 bp, Unknown
  misc_feature (1)..( 9): Result.001 file - promoters70/1008808
ctatggtta

SEQ ID NO: 79751 - DNA, 9 bp, Unknown
  misc_feature (1)..( 9): Result.001 file - promoters70/1008808
aaatgatta

SEQ ID NO: 79752 - DNA, 9 bp, Unknown
  misc_feature (1)..( 9): Result.001 file - promoters70/1008808
aaaggatta

SEQ ID NO: 79753 - DNA, 7 bp, Unknown
  misc_feature (1)..( 7): Result.001 file - promoters70/1008808
aatattg

SEQ ID NO: 79754 - DNA, 7 bp, Unknown
  misc_feature (1)..( 7): Result.001 file - promoters70/1008808
aatgttg

SEQ ID NO: 79755 - DNA, 7 bp, Unknown
  misc_feature (1)..( 7): Result.001 file - promoters70/1008836
aatattg

SEQ ID NO: 79756 - DNA, 12 bp, Unknown
  misc_feature (1)..( 12): Result.001 file - promoters70/1008836
gaaaatacaaat

SEQ ID NO: 79757 - DNA, 12 bp, Unknown
  misc_feature (1)..( 12): Result.001 file - promoters70/1008836
taaaatataaat

SEQ ID NO: 79758 - DNA, 12 bp, Unknown
  misc_feature (1)..( 12): Result.001 file - promoters70/1008836
taaaatgcacgt

SEQ ID NO: 79759 - DNA, 11 bp, Unknown
  misc_feature (1)..( 11): Result.001 file - promoters70/1008836
atatttttatg

SEQ ID NO: 79760 - DNA, 11 bp, Unknown
  misc_feature (1)..( 11): Result.001 file - promoters70/1008836
gaaattttatg

SEQ ID NO: 79761 - DNA, 11 bp, Unknown
  misc_feature (1)..( 11): Result.001 file - promoters70/1008836
atatttttata

SEQ ID NO: 79762 - DNA, 8 bp, Unknown
  misc_feature (1)..( 8): Result.001 file - promoters70/1008836
tcaaaaga

SEQ ID NO: 79763 - DNA, 8 bp, Unknown
  misc_feature (1)..( 8): Result.001 file - promoters70/1008836
acaaaaga

SEQ ID NO: 79764 - DNA, 8 bp, Unknown
  misc_feature (1)..( 8): Result.001 file - promoters70/1008836
tcaaaaaa

SEQ ID NO: 79765 - DNA, 9 bp, Unknown
  misc_feature (1)..( 9): Result.001 file - promoters70/1008836
taaaatttg

SEQ ID NO: 79766 - DNA, 9 bp, Unknown
  misc_feature (1)..( 9): Result.001 file - promoters70/1008836
aaaacttta

SEQ ID NO: 79767 - DNA, 9 bp, Unknown
  misc_feature (1)..( 9): Result.001 file - promoters70/1008836
aaaacgtta

SEQ ID NO: 79768 - DNA, 9 bp, Unknown
  misc_feature (1)..( 9): Result.001 file - promoters70/1008836
aattaaatg

SEQ ID NO: 79769 - DNA, 9 bp, Unknown
  misc_feature (1)..( 9): Result.001 file - promoters70/1008836
aattaataa

SEQ ID NO: 79770 - DNA, 9 bp, Unknown
  misc_feature (1)..( 9): Result.001 file - promoters70/1008836
gattaaatg

SEQ ID NO: 79771 - DNA, 11 bp, Unknown
  misc_feature (1)..( 11): Result.001 file - promoters70/1008836
aaaagatttat

SEQ ID NO: 79772 - DNA, 11 bp, Unknown
  misc_feature (1)..( 11): Result.001 file - promoters70/1008836
aaagaatttat

SEQ ID NO: 79773 - DNA, 11 bp, Unknown
  misc_feature (1)..( 11): Result.001 file - promoters70/1008836
aaagactttag

SEQ ID NO: 79774 - DNA, 10 bp, Unknown
  misc_feature (1)..( 10): Result.001 file - promoters70/1008836
acattgtcca

SEQ ID NO: 79775 - DNA, 10 bp, Unknown
  misc_feature (1)..( 10): Result.001 file - promoters70/1008836
taattatcca

SEQ ID NO: 79776 - DNA, 10 bp, Unknown
  misc_feature (1)..( 10): Result.001 file - promoters70/1008836
taaatatttt

SEQ ID NO: 79777 - DNA, 8 bp, Unknown
  misc_feature (1)..( 8): Result.001 file - promoters70/1008836
tccaaatt

SEQ ID NO: 79778 - DNA, 8 bp, Unknown
  misc_feature (1)..( 8): Result.001 file - promoters70/1008836
tccaaata

SEQ ID NO: 79779 - DNA, 8 bp, Unknown
  misc_feature (1)..( 8): Result.001 file - promoters70/1009030
gacaaata

SEQ ID NO: 79780 - DNA, 8 bp, Unknown
  misc_feature (1)..( 8): Result.001 file - promoters70/1009030
ctttttaa

SEQ ID NO: 79781 - DNA, 8 bp, Unknown
  misc_feature (1)..( 8): Result.001 file - promoters70/1009030
atttataa

SEQ ID NO: 79782 - DNA, 8 bp, Unknown
  misc_feature (1)..( 8): Result.001 file - promoters70/1009030
ttttttag

SEQ ID NO: 79783 - DNA, 8 bp, Unknown
  misc_feature (1)..( 8): Result.001 file - promoters70/1009030
attgatag

SEQ ID NO: 79784 - DNA, 8 bp, Unknown
  misc_feature (1)..( 8): Result.001 file - promoters70/1009030
tttgttag

SEQ ID NO: 79785 - DNA, 8 bp, Unknown
  misc_feature (1)..( 8): Result.001 file - promoters70/1009030
atttttac

SEQ ID NO: 79786 - DNA, 11 bp, Unknown
  misc_feature (1)..( 11): Result.001 file - promoters70/1009030
tctcgtttcac

SEQ ID NO: 79787 - DNA, 11 bp, Unknown
  misc_feature (1)..( 11): Result.001 file - promoters70/1009030
actcttttctt

SEQ ID NO: 79788 - DNA, 11 bp, Unknown
  misc_feature (1)..( 11): Result.001 file - promoters70/1009030
tctcttttgat

SEQ ID NO: 79789 - DNA, 11 bp, Unknown
  misc_feature (1)..( 11): Result.001 file - promoters70/1009030
ttttttttctc

SEQ ID NO: 79790 - DNA, 11 bp, Unknown
  misc_feature (1)..( 11): Result.001 file - promoters70/1009030
gcgtttttctt

SEQ ID NO: 79791 - DNA, 11 bp, Unknown
  misc_feature (1)..( 11): Result.001 file - promoters70/1009234
actatttcaaa

SEQ ID NO: 79792 - DNA, 11 bp, Unknown
  misc_feature (1)..( 11): Result.001 file - promoters70/1009234
cgatacttgtc

SEQ ID NO: 79793 - DNA, 11 bp, Unknown
  misc_feature (1)..( 11): Result.001 file - promoters70/1009234
tgattcttcga

SEQ ID NO: 79794 - DNA, 11 bp, Unknown
  misc_feature (1)..( 11): Result.001 file - promoters70/1009234
cgaaactggtc

SEQ ID NO: 79795 - DNA, 10 bp, Unknown
  misc_feature (1)..( 10): Result.001 file - promoters70/1009234
aagaactcat

SEQ ID NO: 79796 - DNA, 10 bp, Unknown
  misc_feature (1)..( 10): Result.001 file - promoters70/1009234
aagaactaga

SEQ ID NO: 79797 - DNA, 10 bp, Unknown
  misc_feature (1)..( 10): Result.001 file - promoters70/1009234
atgaagtcat

SEQ ID NO: 79798 - DNA, 12 bp, Unknown
  misc_feature (1)..( 12): Result.001 file - promoters70/1009234
ttaaatgaagat

SEQ ID NO: 79799 - DNA, 12 bp, Unknown
  misc_feature (1)..( 12): Result.001 file - promoters70/1009234
aataatgatgat

SEQ ID NO: 79800 - DNA, 12 bp, Unknown
  misc_feature (1)..( 12): Result.001 file - promoters70/1009234
ttacatgaacag

SEQ ID NO: 79801 - DNA, 10 bp, Unknown
  misc_feature (1)..( 10): Result.001 file - promoters70/1009234
agtgatccaa

SEQ ID NO: 79802 - DNA, 10 bp, Unknown
  misc_feature (1)..( 10): Result.001 file - promoters70/1009234
tgtggtccat

SEQ ID NO: 79803 - DNA, 10 bp, Unknown
  misc_feature (1)..( 10): Result.001 file - promoters70/1009387
tgtggttcat

SEQ ID NO: 79804 - DNA, 8 bp, Unknown
  misc_feature (1)..( 8): Result.001 file - promoters70/1009387
tctttgtc

SEQ ID NO: 79805 - DNA, 8 bp, Unknown
  misc_feature (1)..( 8): Result.001 file - promoters70/1009387
tgtttgtc

SEQ ID NO: 79806 - DNA, 8 bp, Unknown
  misc_feature (1)..( 8): Result.001 file - promoters70/1009387
tctttgtt

SEQ ID NO: 79807 - DNA, 8 bp, Unknown
  misc_feature (1)..( 8): Result.001 file - promoters70/1009387
cttcttca

SEQ ID NO: 79808 - DNA, 8 bp, Unknown
  misc_feature (1)..( 8): Result.001 file - promoters70/1009387
cttcatca

SEQ ID NO: 79809 - DNA, 8 bp, Unknown
  misc_feature (1)..( 8): Result.001 file - promoters70/1009387
ctttttcg

SEQ ID NO: 79810 - DNA, 8 bp, Unknown
  misc_feature (1)..( 8): Result.001 file - promoters70/1009387
ttaaatgg

SEQ ID NO: 79811 - DNA, 8 bp, Unknown
  misc_feature (1)..( 8): Result.001 file - promoters70/1009387
ttatatgg

SEQ ID NO: 79812 - DNA, 8 bp, Unknown
  misc_feature (1)..( 8): Result.001 file - promoters70/1009520
ccatatgg

SEQ ID NO: 79813 - DNA, 7 bp, Unknown
  misc_feature (1)..( 7): Result.001 file - promoters70/1009520
aatatat

SEQ ID NO: 79814 - DNA, 7 bp, Unknown
  misc_feature (1)..( 7): Result.001 file - promoters70/1009520
aatataa

SEQ ID NO: 79815 - DNA, 7 bp, Unknown
  misc_feature (1)..( 7): Result.001 file - promoters70/1009520
catatat

SEQ ID NO: 79816 - DNA, 9 bp, Unknown
  misc_feature (1)..( 9): Result.001 file - promoters70/1009520
ttgtatatt

SEQ ID NO: 79817 - DNA, 9 bp, Unknown
  misc_feature (1)..( 9): Result.001 file - promoters70/1009520
tcgtacatt

SEQ ID NO: 79818 - DNA, 9 bp, Unknown
  misc_feature (1)..( 9): Result.001 file - promoters70/1009520
ttgtatacc

SEQ ID NO: 79819 - DNA, 9 bp, Unknown
  misc_feature (1)..( 9): Result.001 file - promoters70/1009520
taagataaa

SEQ ID NO: 79820 - DNA, 9 bp, Unknown
  misc_feature (1)..( 9): Result.001 file - promoters70/1009520
aaagaaaaa

SEQ ID NO: 79821 - DNA, 9 bp, Unknown
  misc_feature (1)..( 9): Result.001 file - promoters70/1009520
aaagcaaat

SEQ ID NO: 79822 - DNA, 9 bp, Unknown
  misc_feature (1)..( 9): Result.001 file - promoters70/1009520
tttgtctat

SEQ ID NO: 79823 - DNA, 9 bp, Unknown
  misc_feature (1)..( 9): Result.001 file - promoters70/1009520
tttttcttt

SEQ ID NO: 79824 - DNA, 9 bp, Unknown
  misc_feature (1)..( 9): Result.001 file - promoters70/1009520
aatgtctat

SEQ ID NO: 79825 - DNA, 9 bp, Unknown
  misc_feature (1)..( 9): Result.001 file - promoters70/1009520
tcttctttg

SEQ ID NO: 79826 - DNA, 9 bp, Unknown
  misc_feature (1)..( 9): Result.001 file - promoters70/1009520
ttttctttg

SEQ ID NO: 79827 - DNA, 9 bp, Unknown
  misc_feature (1)..( 9): Result.001 file - promoters70/1009941
tcttcttat

SEQ ID NO: 79828 - DNA, 11 bp, Unknown
  misc_feature (1)..( 11): Result.001 file - promoters70/1009941
agtatttatat

SEQ ID NO: 79829 - DNA, 11 bp, Unknown
  misc_feature (1)..( 11): Result.001 file - promoters70/1009941
ggtatatatat

SEQ ID NO: 79830 - DNA, 11 bp, Unknown
  misc_feature (1)..( 11): Result.001 file - promoters70/1009941
tcgatttataa

SEQ ID NO: 79831 - DNA, 11 bp, Unknown
  misc_feature (1)..( 11): Result.001 file - promoters70/1009941
agtatataaat

SEQ ID NO: 79832 - DNA, 11 bp, Unknown
  misc_feature (1)..( 11): Result.001 file - promoters70/1009941
gttatataaat

SEQ ID NO: 79833 - DNA, 11 bp, Unknown
  misc_feature (1)..( 11): Result.001 file - promoters70/1009941
actataaatac

SEQ ID NO: 79834 - DNA, 11 bp, Unknown
  misc_feature (1)..( 11): Result.001 file - promoters70/1009941
actataaacaa

SEQ ID NO: 79835 - DNA, 11 bp, Unknown
  misc_feature (1)..( 11): Result.001 file - promoters70/1009941
gaattggaatt

SEQ ID NO: 79836 - DNA, 11 bp, Unknown
  misc_feature (1)..( 11): Result.001 file - promoters70/1009941
acattggattt

SEQ ID NO: 79837 - DNA, 11 bp, Unknown
  misc_feature (1)..( 11): Result.001 file - promoters70/1009941
ctcttgtaatg

SEQ ID NO: 79838 - DNA, 11 bp, Unknown
  misc_feature (1)..( 11): Result.001 file - promoters70/1009941
gaattgggtaa

SEQ ID NO: 79839 - DNA, 11 bp, Unknown
  misc_feature (1)..( 11): Result.001 file - promoters70/1009941
gttgtgttatg

SEQ ID NO: 79840 - DNA, 11 bp, Unknown
  misc_feature (1)..( 11): Result.001 file - promoters70/1010025
aagttgtgttc

SEQ ID NO: 79841 - DNA, 9 bp, Unknown
  misc_feature (1)..( 9): Result.001 file - promoters70/1010025
agattttct

SEQ ID NO: 79842 - DNA, 9 bp, Unknown
  misc_feature (1)..( 9): Result.001 file - promoters70/1010025
tcattatct

SEQ ID NO: 79843 - DNA, 9 bp, Unknown
  misc_feature (1)..( 9): Result.001 file - promoters70/1010025
agattttaa

SEQ ID NO: 79844 - DNA, 11 bp, Unknown
  misc_feature (1)..( 11): Result.001 file - promoters70/1010025
gtttacttgct

SEQ ID NO: 79845 - DNA, 11 bp, Unknown
  misc_feature (1)..( 11): Result.001 file - promoters70/1010025
atttatttgtg

SEQ ID NO: 79846 - DNA, 11 bp, Unknown
  misc_feature (1)..( 11): Result.001 file - promoters70/1010025
atttattagtg

SEQ ID NO: 79847 - DNA, 8 bp, Unknown
  misc_feature (1)..( 8): Result.001 file - promoters70/1010025
tagtacta

SEQ ID NO: 79848 - DNA, 8 bp, Unknown
  misc_feature (1)..( 8): Result.001 file - promoters70/1010025
atgtacta

SEQ ID NO: 79849 - DNA, 8 bp, Unknown
  misc_feature (1)..( 8): Result.001 file - promoters70/1010055
atgaactc

SEQ ID NO: 79850 - DNA, 6 bp, Unknown
  misc_feature (1)..( 6): Result.001 file - promoters70/1010055
aaaata

SEQ ID NO: 79851 - DNA, 6 bp, Unknown
  misc_feature (1)..( 6): Result.001 file - promoters70/1010055
aaaata

SEQ ID NO: 79852 - DNA, 7 bp, Unknown
  misc_feature (1)..( 7): Result.001 file - promoters70/1010055
aaagatt

SEQ ID NO: 79853 - DNA, 7 bp, Unknown
  misc_feature (1)..( 7): Result.001 file - promoters70/1010055
aaacata

SEQ ID NO: 79854 - DNA, 7 bp, Unknown
  misc_feature (1)..( 7): Result.001 file - promoters70/1010055
aaaaaag

SEQ ID NO: 79855 - DNA, 9 bp, Unknown
  misc_feature (1)..( 9): Result.001 file - promoters70/1010055
aaaacaaac

SEQ ID NO: 79856 - DNA, 9 bp, Unknown
  misc_feature (1)..( 9): Result.001 file - promoters70/1010055
aaaaaaaag

SEQ ID NO: 79857 - DNA, 9 bp, Unknown
  misc_feature (1)..( 9): Result.001 file - promoters70/1010055
caaacaaat

SEQ ID NO: 79858 - DNA, 9 bp, Unknown
  misc_feature (1)..( 9): Result.001 file - promoters70/1010055
taaaaaaag

SEQ ID NO: 79859 - DNA, 9 bp, Unknown
  misc_feature (1)..( 9): Result.001 file - promoters70/1010055
gaaacaaat

SEQ ID NO: 79860 - DNA, 9 bp, Unknown
  misc_feature (1)..( 9): Result.001 file - promoters70/1010055
ttaactaat

SEQ ID NO: 79861 - DNA, 9 bp, Unknown
  misc_feature (1)..( 9): Result.001 file - promoters70/1010055
atattatta

SEQ ID NO: 79862 - DNA, 9 bp, Unknown
  misc_feature (1)..( 9): Result.001 file - promoters70/1010055
ttattatat

SEQ ID NO: 79863 - DNA, 9 bp, Unknown
  misc_feature (1)..( 9): Result.001 file - promoters70/1010055
atataatta

SEQ ID NO: 79864 - DNA, 9 bp, Unknown
  misc_feature (1)..( 9): Result.001 file - promoters70/1010055
aaattattt

SEQ ID NO: 79865 - DNA, 9 bp, Unknown
  misc_feature (1)..( 9): Result.001 file - promoters70/1010055
ttatcattt

SEQ ID NO: 79866 - DNA, 10 bp, Unknown
  misc_feature (1)..( 10): Result.001 file - promoters70/1010055
actacatatt

SEQ ID NO: 79867 - DNA, 10 bp, Unknown
  misc_feature (1)..( 10): Result.001 file - promoters70/1010055
taaacatatt

SEQ ID NO: 79868 - DNA, 10 bp, Unknown
  misc_feature (1)..( 10): Result.001 file - promoters70/1010055
tcaacatata

SEQ ID NO: 79869 - DNA, 10 bp, Unknown
  misc_feature (1)..( 10): Result.001 file - promoters70/1010055
caaaaataag

SEQ ID NO: 79870 - DNA, 10 bp, Unknown
  misc_feature (1)..( 10): Result.001 file - promoters70/1010115
caaaaaaggt

SEQ ID NO: 79871 - DNA, 8 bp, Unknown
  misc_feature (1)..( 8): Result.001 file - promoters70/1010115
caaaccca

SEQ ID NO: 79872 - DNA, 8 bp, Unknown
  misc_feature (1)..( 8): Result.001 file - promoters70/1010115
caaacctg

SEQ ID NO: 79873 - DNA, 8 bp, Unknown
  misc_feature (1)..( 8): Result.001 file - promoters70/1010115
gaaagctg

SEQ ID NO: 79874 - DNA, 8 bp, Unknown
  misc_feature (1)..( 8): Result.001 file - promoters70/1010115
agagacat

SEQ ID NO: 79875 - DNA, 8 bp, Unknown
  misc_feature (1)..( 8): Result.001 file - promoters70/1010115
agatacag

SEQ ID NO: 79876 - DNA, 8 bp, Unknown
  misc_feature (1)..( 8): Result.001 file - promoters70/1010115
cgatccag

SEQ ID NO: 79877 - DNA, 9 bp, Unknown
  misc_feature (1)..( 9): Result.001 file - promoters70/1010115
tttaaagct

SEQ ID NO: 79878 - DNA, 9 bp, Unknown
  misc_feature (1)..( 9): Result.001 file - promoters70/1010115
tttcaagtt

SEQ ID NO: 79879 - DNA, 9 bp, Unknown
  misc_feature (1)..( 9): Result.001 file - promoters70/1010367
tctcacgtt

SEQ ID NO: 79880 - DNA, 9 bp, Unknown
  misc_feature (1)..( 9): Result.001 file - promoters70/1010367
gaaaatatt

SEQ ID NO: 79881 - DNA, 9 bp, Unknown
  misc_feature (1)..( 9): Result.001 file - promoters70/1010367
aaaaataag

SEQ ID NO: 79882 - DNA, 9 bp, Unknown
  misc_feature (1)..( 9): Result.001 file - promoters70/1010367
aaaaattaa

SEQ ID NO: 79883 - DNA, 9 bp, Unknown
  misc_feature (1)..( 9): Result.001 file - promoters70/1010367
taaagtata

SEQ ID NO: 79884 - DNA, 8 bp, Unknown
  misc_feature (1)..( 8): Result.001 file - promoters70/1010367
aaaataaa

SEQ ID NO: 79885 - DNA, 8 bp, Unknown
  misc_feature (1)..( 8): Result.001 file - promoters70/1010367
ttaataaa

SEQ ID NO: 79886 - DNA, 8 bp, Unknown
  misc_feature (1)..( 8): Result.001 file - promoters70/1010367
aaaattaa

SEQ ID NO: 79887 - DNA, 9 bp, Unknown
  misc_feature (1)..( 9): Result.001 file - promoters70/1010367
gaaatataa

SEQ ID NO: 79888 - DNA, 10 bp, Unknown
  misc_feature (1)..( 10): Result.001 file - promoters70/1010367
aaaacaaacg

SEQ ID NO: 79889 - DNA, 10 bp, Unknown
  misc_feature (1)..( 10): Result.001 file - promoters70/1010367
aaaaaaaaga

SEQ ID NO: 79890 - DNA, 10 bp, Unknown
  misc_feature (1)..( 10): Result.001 file - promoters70/1010367
taaataaatt

SEQ ID NO: 79891 - DNA, 10 bp, Unknown
  misc_feature (1)..( 10): Result.001 file - promoters70/1010367
ataatgaatt

SEQ ID NO: 79892 - DNA, 12 bp, Unknown
  misc_feature (1)..( 12): Result.001 file - promoters70/1010367
attgggactaaa

SEQ ID NO: 79893 - DNA, 12 bp, Unknown
  misc_feature (1)..( 12): Result.001 file - promoters70/1010367
atttggataaaa

SEQ ID NO: 79894 - DNA, 12 bp, Unknown
  misc_feature (1)..( 12): Result.001 file - promoters70/1010367
ctttgaataaaa

SEQ ID NO: 79895 - DNA, 9 bp, Unknown
  misc_feature (1)..( 9): Result.001 file - promoters70/1010367
cctctttcc

SEQ ID NO: 79896 - DNA, 9 bp, Unknown
  misc_feature (1)..( 9): Result.001 file - promoters70/1010367
cctttttat

SEQ ID NO: 79897 - DNA, 9 bp, Unknown
  misc_feature (1)..( 9): Result.001 file - promoters70/1010367
tctctttcc

SEQ ID NO: 79898 - DNA, 9 bp, Unknown
  misc_feature (1)..( 9): Result.001 file - promoters70/1010367
tcttttttt

SEQ ID NO: 79899 - DNA, 11 bp, Unknown
  misc_feature (1)..( 11): Result.001 file - promoters70/1010367
aattacaaaac

SEQ ID NO: 79900 - DNA, 11 bp, Unknown
  misc_feature (1)..( 11): Result.001 file - promoters70/1010367
gtatacaaaaa

SEQ ID NO: 79901 - DNA, 11 bp, Unknown
  misc_feature (1)..( 11): Result.001 file - promoters70/1010367
caatactatct

SEQ ID NO: 79902 - DNA, 11 bp, Unknown
  misc_feature (1)..( 11): Result.001 file - promoters70/1010367
actcccaaaaa

SEQ ID NO: 79903 - DNA, 8 bp, Unknown
  misc_feature (1)..( 8): Result.001 file - promoters70/1010367
caaaacta

SEQ ID NO: 79904 - DNA, 8 bp, Unknown
  misc_feature (1)..( 8): Result.001 file - promoters70/1010367
aaaagcta

SEQ ID NO: 79905 - DNA, 8 bp, Unknown
  misc_feature (1)..( 8): Result.001 file - promoters70/1010367
caatacta

SEQ ID NO: 79906 - DNA, 12 bp, Unknown
  misc_feature (1)..( 12): Result.001 file - promoters70/1010367
aataaataaaag

SEQ ID NO: 79907 - DNA, 12 bp, Unknown
  misc_feature (1)..( 12): Result.001 file - promoters70/1010367
aaacaataaaat

SEQ ID NO: 79908 - DNA, 12 bp, Unknown
  misc_feature (1)..( 12): Result.001 file - promoters70/1010367
atgaaatataag

SEQ ID NO: 79909 - DNA, 12 bp, Unknown
  misc_feature (1)..( 12): Result.001 file - promoters70/1010367
aaacagtaaaac

SEQ ID NO: 79910 - DNA, 8 bp, Unknown
  misc_feature (1)..( 8): Result.001 file - promoters70/1010367
caaccaac

SEQ ID NO: 79911 - DNA, 8 bp, Unknown
  misc_feature (1)..( 8): Result.001 file - promoters70/1010367
aaaccaat

SEQ ID NO: 79912 - DNA, 8 bp, Unknown
  misc_feature (1)..( 8): Result.001 file - promoters70/1010367
agaccaat

SEQ ID NO: 79913 - DNA, 8 bp, Unknown
  misc_feature (1)..( 8): Result.001 file - promoters70/1010367
aaaacaag

SEQ ID NO: 79914 - DNA, 8 bp, Unknown
  misc_feature (1)..( 8): Result.001 file - promoters70/1010367
aatgaaaa

SEQ ID NO: 79915 - DNA, 8 bp, Unknown
  misc_feature (1)..( 8): Result.001 file - promoters70/1010367
aatgaatt

SEQ ID NO: 79916 - DNA, 8 bp, Unknown
  misc_feature (1)..( 8): Result.001 file - promoters70/1010367
aataaatt

SEQ ID NO: 79917 - DNA, 8 bp, Unknown
  misc_feature (1)..( 8): Result.001 file - promoters70/1010367
agacaaac

SEQ ID NO: 79918 - DNA, 8 bp, Unknown
  misc_feature (1)..( 8): Result.001 file - promoters70/1010367
taacaaac

SEQ ID NO: 79919 - DNA, 8 bp, Unknown
  misc_feature (1)..( 8): Result.001 file - promoters70/1010385
ttaaaaaa

SEQ ID NO: 79920 - DNA, 8 bp, Unknown
  misc_feature (1)..( 8): Result.001 file - promoters70/1010385
actttttg

SEQ ID NO: 79921 - DNA, 8 bp, Unknown
  misc_feature (1)..( 8): Result.001 file - promoters70/1010385
gctttttg

SEQ ID NO: 79922 - DNA, 8 bp, Unknown
  misc_feature (1)..( 8): Result.001 file - promoters70/1010429
gcttttcc

SEQ ID NO: 79923 - DNA, 7 bp, Unknown
  misc_feature (1)..( 7): Result.001 file - promoters70/1010429
taataat

SEQ ID NO: 79924 - DNA, 7 bp, Unknown
  misc_feature (1)..( 7): Result.001 file - promoters70/1010429
taataat

SEQ ID NO: 79925 - DNA, 7 bp, Unknown
  misc_feature (1)..( 7): Result.001 file - promoters70/1010429
taataag

SEQ ID NO: 79926 - DNA, 7 bp, Unknown
  misc_feature (1)..( 7): Result.001 file - promoters70/1010429
atgatct

SEQ ID NO: 79927 - DNA, 7 bp, Unknown
  misc_feature (1)..( 7): Result.001 file - promoters70/1010429
atgttct

SEQ ID NO: 79928 - DNA, 7 bp, Unknown
  misc_feature (1)..( 7): Result.001 file - promoters70/1010429
ttgttct

SEQ ID NO: 79929 - DNA, 10 bp, Unknown
  misc_feature (1)..( 10): Result.001 file - promoters70/1010429
gcttatacaa

SEQ ID NO: 79930 - DNA, 10 bp, Unknown
  misc_feature (1)..( 10): Result.001 file - promoters70/1010429
aattatacaa

SEQ ID NO: 79931 - DNA, 10 bp, Unknown
  misc_feature (1)..( 10): Result.001 file - promoters70/1010429
aatgatagca

SEQ ID NO: 79932 - DNA, 10 bp, Unknown
  misc_feature (1)..( 10): Result.001 file - promoters70/1010429
gttatttatt

SEQ ID NO: 79933 - DNA, 10 bp, Unknown
  misc_feature (1)..( 10): Result.001 file - promoters70/1010429
gttattaatt

SEQ ID NO: 79934 - DNA, 10 bp, Unknown
  misc_feature (1)..( 10): Result.001 file - promoters70/1010435
tgcattaatg

SEQ ID NO: 79935 - DNA, 8 bp, Unknown
  misc_feature (1)..( 8): Result.001 file - promoters70/1010435
tcttcttc

SEQ ID NO: 79936 - DNA, 8 bp, Unknown
  misc_feature (1)..( 8): Result.001 file - promoters70/1010435
cctttttc

SEQ ID NO: 79937 - DNA, 8 bp, Unknown
  misc_feature (1)..( 8): Result.001 file - promoters70/1010435
tcttctta

SEQ ID NO: 79938 - DNA, 10 bp, Unknown
  misc_feature (1)..( 10): Result.001 file - promoters70/1010435
attttcaaag

SEQ ID NO: 79939 - DNA, 10 bp, Unknown
  misc_feature (1)..( 10): Result.001 file - promoters70/1010435
attatcaaag

SEQ ID NO: 79940 - DNA, 10 bp, Unknown
  misc_feature (1)..( 10): Result.001 file - promoters70/1010435
attatccttg

SEQ ID NO: 79941 - DNA, 10 bp, Unknown
  misc_feature (1)..( 10): Result.001 file - promoters70/1010435
aatctgaatc

SEQ ID NO: 79942 - DNA, 10 bp, Unknown
  misc_feature (1)..( 10): Result.001 file - promoters70/1010435
actctgcatc

SEQ ID NO: 79943 - DNA, 10 bp, Unknown
  misc_feature (1)..( 10): Result.001 file - promoters70/1010449
aatttgattt

SEQ ID NO: 79944 - DNA, 8 bp, Unknown
  misc_feature (1)..( 8): Result.001 file - promoters70/1010449
gagtttat

SEQ ID NO: 79945 - DNA, 8 bp, Unknown
  misc_feature (1)..( 8): Result.001 file - promoters70/1010449
gagcttag

SEQ ID NO: 79946 - DNA, 8 bp, Unknown
  misc_feature (1)..( 8): Result.001 file - promoters70/1010449
aagtatat

SEQ ID NO: 79947 - DNA, 7 bp, Unknown
  misc_feature (1)..( 7): Result.001 file - promoters70/1010449
tgtgttt

SEQ ID NO: 79948 - DNA, 7 bp, Unknown
  misc_feature (1)..( 7): Result.001 file - promoters70/1010449
tgtgttt

SEQ ID NO: 79949 - DNA, 7 bp, Unknown
  misc_feature (1)..( 7): Result.001 file - promoters70/1010636
tgtattt

SEQ ID NO: 79950 - DNA, 8 bp, Unknown
  misc_feature (1)..( 8): Result.001 file - promoters70/1010636
gctttgat

SEQ ID NO: 79951 - DNA, 8 bp, Unknown
  misc_feature (1)..( 8): Result.001 file - promoters70/1010636
gcttggat

SEQ ID NO: 79952 - DNA, 8 bp, Unknown
  misc_feature (1)..( 8): Result.001 file - promoters70/1010636
cattggat

SEQ ID NO: 79953 - DNA, 8 bp, Unknown
  misc_feature (1)..( 8): Result.001 file - promoters70/1010636
tcaaagtt

SEQ ID NO: 79954 - DNA, 8 bp, Unknown
  misc_feature (1)..( 8): Result.001 file - promoters70/1010636
cgaaagtt

SEQ ID NO: 79955 - DNA, 8 bp, Unknown
  misc_feature (1)..( 8): Result.001 file - promoters70/1010636
cgagagta

SEQ ID NO: 79956 - DNA, 10 bp, Unknown
  misc_feature (1)..( 10): Result.001 file - promoters70/1010636
cctaaaccct

SEQ ID NO: 79957 - DNA, 10 bp, Unknown
  misc_feature (1)..( 10): Result.001 file - promoters70/1010636
ttaaaaccct

SEQ ID NO: 79958 - DNA, 10 bp, Unknown
  misc_feature (1)..( 10): Result.001 file - promoters70/1010636
tttaaaccct

SEQ ID NO: 79959 - DNA, 10 bp, Unknown
  misc_feature (1)..( 10): Result.001 file - promoters70/1010636
ttttaacggc

SEQ ID NO: 79960 - DNA, 8 bp, Unknown
  misc_feature (1)..( 8): Result.001 file - promoters70/1010636
atggaatt

SEQ ID NO: 79961 - DNA, 8 bp, Unknown
  misc_feature (1)..( 8): Result.001 file - promoters70/1010636
gtggcatt

SEQ ID NO: 79962 - DNA, 8 bp, Unknown
  misc_feature (1)..( 8): Result.001 file - promoters70/1010636
gtgtcatc

SEQ ID NO: 79963 - DNA, 7 bp, Unknown
  misc_feature (1)..( 7): Result.001 file - promoters70/1010636
ttttctt

SEQ ID NO: 79964 - DNA, 7 bp, Unknown
  misc_feature (1)..( 7): Result.001 file - promoters70/1010636
ttttcta

SEQ ID NO: 79965 - DNA, 7 bp, Unknown
  misc_feature (1)..( 7): Result.001 file - promoters70/1010815
atttcta

SEQ ID NO: 79966 - DNA, 12 bp, Unknown
  misc_feature (1)..( 12): Result.001 file - promoters70/1010815
acattgttagcc

SEQ ID NO: 79967 - DNA, 12 bp, Unknown
  misc_feature (1)..( 12): Result.001 file - promoters70/1010815
aaattgtttcga

SEQ ID NO: 79968 - DNA, 12 bp, Unknown
  misc_feature (1)..( 12): Result.001 file - promoters70/1010815
agattgttggag

SEQ ID NO: 79969 - DNA, 12 bp, Unknown
  misc_feature (1)..( 12): Result.001 file - promoters70/1010815
gaattgttcccc

SEQ ID NO: 79970 - DNA, 12 bp, Unknown
  misc_feature (1)..( 12): Result.001 file - promoters70/1010815
tttttgtttctc

SEQ ID NO: 79971 - DNA, 12 bp, Unknown
  misc_feature (1)..( 12): Result.001 file - promoters70/1010815
acattgatggag

SEQ ID NO: 79972 - DNA, 12 bp, Unknown
  misc_feature (1)..( 12): Result.001 file - promoters70/1010815
agagtgtccata

SEQ ID NO: 79973 - DNA, 12 bp, Unknown
  misc_feature (1)..( 12): Result.001 file - promoters70/1010819
aatttgatttgt

SEQ ID NO: 79974 - DNA, 9 bp, Unknown
  misc_feature (1)..( 9): Result.001 file - promoters70/1010819
attgttgct

SEQ ID NO: 79975 - DNA, 9 bp, Unknown
  misc_feature (1)..( 9): Result.001 file - promoters70/1010819
atttttggt

SEQ ID NO: 79976 - DNA, 9 bp, Unknown
  misc_feature (1)..( 9): Result.001 file - promoters70/1010993
agtttaggt

SEQ ID NO: 79977 - DNA, 11 bp, Unknown
  misc_feature (1)..( 11): Result.001 file - promoters70/1010993
aaactaatttg

SEQ ID NO: 79978 - DNA, 11 bp, Unknown
  misc_feature (1)..( 11): Result.001 file - promoters70/1010993
aaaataaaaaa

SEQ ID NO: 79979 - DNA, 11 bp, Unknown
  misc_feature (1)..( 11): Result.001 file - promoters70/1010993
taaataataaa

SEQ ID NO: 79980 - DNA, 10 bp, Unknown
  misc_feature (1)..( 10): Result.001 file - promoters70/1010993
aaaaaactaa

SEQ ID NO: 79981 - DNA, 10 bp, Unknown
  misc_feature (1)..( 10): Result.001 file - promoters70/1010993
aaaaaaactg

SEQ ID NO: 79982 - DNA, 10 bp, Unknown
  misc_feature (1)..( 10): Result.001 file - promoters70/1010993
aaataataaa

SEQ ID NO: 79983 - DNA, 7 bp, Unknown
  misc_feature (1)..( 7): Result.001 file - promoters70/1010993
taaaaag

SEQ ID NO: 79984 - DNA, 7 bp, Unknown
  misc_feature (1)..( 7): Result.001 file - promoters70/1010993
taaaaaa

SEQ ID NO: 79985 - DNA, 8 bp, Unknown
  misc_feature (1)..( 8): Result.001 file - promoters70/1010993
gaaacaac

SEQ ID NO: 79986 - DNA, 11 bp, Unknown
  misc_feature (1)..( 11): Result.001 file - promoters70/1010993
tatagatttta

SEQ ID NO: 79987 - DNA, 11 bp, Unknown
  misc_feature (1)..( 11): Result.001 file - promoters70/1010993
tatagaatttg

SEQ ID NO: 79988 - DNA, 11 bp, Unknown
  misc_feature (1)..( 11): Result.001 file - promoters70/1011337
atgacaatttg

SEQ ID NO: 79989 - DNA, 9 bp, Unknown
  misc_feature (1)..( 9): Result.001 file - promoters70/1011337
aaaaaaatt

SEQ ID NO: 79990 - DNA, 9 bp, Unknown
  misc_feature (1)..( 9): Result.001 file - promoters70/1011337
aaaacaatt

SEQ ID NO: 79991 - DNA, 9 bp, Unknown
  misc_feature (1)..( 9): Result.001 file - promoters70/1011358
gtaaaaata

SEQ ID NO: 79992 - DNA, 11 bp, Unknown
  misc_feature (1)..( 11): Result.001 file - promoters70/1011358
cgatacttgtc

SEQ ID NO: 79993 - DNA, 11 bp, Unknown
  misc_feature (1)..( 11): Result.001 file - promoters70/1011358
tgattcttcga

SEQ ID NO: 79994 - DNA, 11 bp, Unknown
  misc_feature (1)..( 11): Result.001 file - promoters70/1011358
cgaaactggtc

SEQ ID NO: 79995 - DNA, 10 bp, Unknown
  misc_feature (1)..( 10): Result.001 file - promoters70/1011358
aagaactcat

SEQ ID NO: 79996 - DNA, 10 bp, Unknown
  misc_feature (1)..( 10): Result.001 file - promoters70/1011358
aagaactaga

SEQ ID NO: 79997 - DNA, 10 bp, Unknown
  misc_feature (1)..( 10): Result.001 file - promoters70/1011358
atgaagtcat

SEQ ID NO: 79998 - DNA, 12 bp, Unknown
  misc_feature (1)..( 12): Result.001 file - promoters70/1011358
ttaaatgaagat

SEQ ID NO: 79999 - DNA, 12 bp, Unknown
  misc_feature (1)..( 12): Result.001 file - promoters70/1011358
aataatgatgat

SEQ ID NO: 80000 - DNA, 12 bp, Unknown
  misc_feature (1)..( 12): Result.001 file - promoters70/1011358
ttacatgaacag

SEQ ID NO: 80001 - DNA, 10 bp, Unknown
  misc_feature (1)..( 10): Result.001 file - promoters70/1011358
agtgatccaa

SEQ ID NO: 80002 - DNA, 10 bp, Unknown
  misc_feature (1)..( 10): Result.001 file - promoters70/1011358
tgtggtccat

SEQ ID NO: 80003 - DNA, 10 bp, Unknown
  misc_feature (1)..( 10): Result.001 file - promoters70/1011780
tgtggttcat

SEQ ID NO: 80004 - DNA, 12 bp, Unknown
  misc_feature (1)..( 12): Result.001 file - promoters70/1011780
tgtaaattttgc

SEQ ID NO: 80005 - DNA, 12 bp, Unknown
  misc_feature (1)..( 12): Result.001 file - promoters70/1011780
tttaaatttttt

SEQ ID NO: 80006 - DNA, 12 bp, Unknown
  misc_feature (1)..( 12): Result.001 file - promoters70/1011780
tttgaattttgc

SEQ ID NO: 80007 - DNA, 12 bp, Unknown
  misc_feature (1)..( 12): Result.001 file - promoters70/1011780
ggtgacttttga

SEQ ID NO: 80008 - DNA, 7 bp, Unknown
  misc_feature (1)..( 7): Result.001 file - promoters70/1011780
aaaaata

SEQ ID NO: 80009 - DNA, 7 bp, Unknown
  misc_feature (1)..( 7): Result.001 file - promoters70/1011780
taaaata

SEQ ID NO: 80010 - DNA, 7 bp, Unknown
  misc_feature (1)..( 7): Result.001 file - promoters70/1011780
aaaaatt

SEQ ID NO: 80011 - DNA, 7 bp, Unknown
  misc_feature (1)..( 7): Result.001 file - promoters70/1011780
tttgtta

SEQ ID NO: 80012 - DNA, 7 bp, Unknown
  misc_feature (1)..( 7): Result.001 file - promoters70/1011780
tttctta

SEQ ID NO: 80013 - DNA, 7 bp, Unknown
  misc_feature (1)..( 7): Result.001 file - promoters70/1011780
tttgtta

SEQ ID NO: 80014 - DNA, 8 bp, Unknown
  misc_feature (1)..( 8): Result.001 file - promoters70/1011780
gtaataat

SEQ ID NO: 80015 - DNA, 8 bp, Unknown
  misc_feature (1)..( 8): Result.001 file - promoters70/1011780
gtaataat

SEQ ID NO: 80016 - DNA, 8 bp, Unknown
  misc_feature (1)..( 8): Result.001 file - promoters70/1011780
ttaataat

SEQ ID NO: 80017 - DNA, 12 bp, Unknown
  misc_feature (1)..( 12): Result.001 file - promoters70/1011780
aaaggcccaata

SEQ ID NO: 80018 - DNA, 12 bp, Unknown
  misc_feature (1)..( 12): Result.001 file - promoters70/1011780
aaaggcccatat

SEQ ID NO: 80019 - DNA, 12 bp, Unknown
  misc_feature (1)..( 12): Result.001 file - promoters70/1011780
tgaagcccaata

SEQ ID NO: 80020 - DNA, 7 bp, Unknown
  misc_feature (1)..( 7): Result.001 file - promoters70/1011780
caaaaat

SEQ ID NO: 80021 - DNA, 7 bp, Unknown
  misc_feature (1)..( 7): Result.001 file - promoters70/1011780
caaaaaa

SEQ ID NO: 80022 - DNA, 8 bp, Unknown
  misc_feature (1)..( 8): Result.001 file - promoters70/1011780
aaaataaa

SEQ ID NO: 80023 - DNA, 6 bp, Unknown
  misc_feature (1)..( 6): Result.001 file - promoters70/1011780
tcaaaa

SEQ ID NO: 80024 - DNA, 6 bp, Unknown
  misc_feature (1)..( 6): Result.001 file - promoters70/1011780
tcaaaa

SEQ ID NO: 80025 - DNA, 6 bp, Unknown
  misc_feature (1)..( 6): Result.001 file - promoters70/1011780
tcaaaa

SEQ ID NO: 80026 - DNA, 11 bp, Unknown
  misc_feature (1)..( 11): Result.001 file - promoters70/1011780
catgaatttaa

SEQ ID NO: 80027 - DNA, 11 bp, Unknown
  misc_feature (1)..( 11): Result.001 file - promoters70/1011780
catttatttaa

SEQ ID NO: 80028 - DNA, 11 bp, Unknown
  misc_feature (1)..( 11): Result.001 file - promoters70/1011923
tttgaattttg

SEQ ID NO: 80029 - DNA, 9 bp, Unknown
  misc_feature (1)..( 9): Result.001 file - promoters70/1011923
ttgttgttt

SEQ ID NO: 80030 - DNA, 9 bp, Unknown
  misc_feature (1)..( 9): Result.001 file - promoters70/1011923
ttgttgttt

SEQ ID NO: 80031 - DNA, 9 bp, Unknown
  misc_feature (1)..( 9): Result.001 file - promoters70/1011923
tttttgttt

SEQ ID NO: 80032 - DNA, 11 bp, Unknown
  misc_feature (1)..( 11): Result.001 file - promoters70/1011923
atcttcatgtt

SEQ ID NO: 80033 - DNA, 11 bp, Unknown
  misc_feature (1)..( 11): Result.001 file - promoters70/1011923
atgttcatgtt

SEQ ID NO: 80034 - DNA, 11 bp, Unknown
  misc_feature (1)..( 11): Result.001 file - promoters70/1011972
atcttcatgac

SEQ ID NO: 80035 - DNA, 10 bp, Unknown
  misc_feature (1)..( 10): Result.001 file - promoters70/1011972
aaactttttc

SEQ ID NO: 80036 - DNA, 10 bp, Unknown
  misc_feature (1)..( 10): Result.001 file - promoters70/1011972
aaactttttt

SEQ ID NO: 80037 - DNA, 10 bp, Unknown
  misc_feature (1)..( 10): Result.001 file - promoters70/1011972
catttttttc

SEQ ID NO: 80038 - DNA, 10 bp, Unknown
  misc_feature (1)..( 10): Result.001 file - promoters70/1011972
atataaaaaa

SEQ ID NO: 80039 - DNA, 10 bp, Unknown
  misc_feature (1)..( 10): Result.001 file - promoters70/1011972
ttttaacaaa

SEQ ID NO: 80040 - DNA, 10 bp, Unknown
  misc_feature (1)..( 10): Result.001 file - promoters70/1011972
ttttaacatc

SEQ ID NO: 80041 - DNA, 8 bp, Unknown
  misc_feature (1)..( 8): Result.001 file - promoters70/1011972
tgcataat

SEQ ID NO: 80042 - DNA, 8 bp, Unknown
  misc_feature (1)..( 8): Result.001 file - promoters70/1011972
agcataag

SEQ ID NO: 80043 - DNA, 8 bp, Unknown
  misc_feature (1)..( 8): Result.001 file - promoters70/1011972
tgcatatg

SEQ ID NO: 80044 - DNA, 8 bp, Unknown
  misc_feature (1)..( 8): Result.001 file - promoters70/1011972
tccataat

SEQ ID NO: 80045 - DNA, 9 bp, Unknown
  misc_feature (1)..( 9): Result.001 file - promoters70/1011972
gaatctctt

SEQ ID NO: 80046 - DNA, 9 bp, Unknown
  misc_feature (1)..( 9): Result.001 file - promoters70/1011972
gaatctctt

SEQ ID NO: 80047 - DNA, 9 bp, Unknown
  misc_feature (1)..( 9): Result.001 file - promoters70/1011972
gaatctaag

SEQ ID NO: 80048 - DNA, 7 bp, Unknown
  misc_feature (1)..( 7): Result.001 file - promoters70/1011972
tttaaaa

SEQ ID NO: 80049 - DNA, 7 bp, Unknown
  misc_feature (1)..( 7): Result.001 file - promoters70/1011972
tttaaag

SEQ ID NO: 80050 - DNA, 7 bp, Unknown
  misc_feature (1)..( 7): Result.001 file - promoters70/1011972
attaaag

SEQ ID NO: 80051 - DNA, 11 bp, Unknown
  misc_feature (1)..( 11): Result.001 file - promoters70/1011972
atgtattttat

SEQ ID NO: 80052 - DNA, 11 bp, Unknown
  misc_feature (1)..( 11): Result.001 file - promoters70/1011972
aatctttttat

SEQ ID NO: 80053 - DNA, 11 bp, Unknown
  misc_feature (1)..( 11): Result.001 file - promoters70/1011972
aatctttttac

SEQ ID NO: 80054 - DNA, 9 bp, Unknown
  misc_feature (1)..( 9): Result.001 file - promoters70/1011972
ttctgctaa

SEQ ID NO: 80055 - DNA, 9 bp, Unknown
  misc_feature (1)..( 9): Result.001 file - promoters70/1011972
ttctgcgaa

SEQ ID NO: 80056 - DNA, 9 bp, Unknown
  misc_feature (1)..( 9): Result.001 file - promoters70/1011972
atctcctaa

SEQ ID NO: 80057 - DNA, 9 bp, Unknown
  misc_feature (1)..( 9): Result.001 file - promoters70/1011972
tcatataaa

SEQ ID NO: 80058 - DNA, 9 bp, Unknown
  misc_feature (1)..( 9): Result.001 file - promoters70/1011972
ctatataaa

SEQ ID NO: 80059 - DNA, 9 bp, Unknown
  misc_feature (1)..( 9): Result.001 file - promoters70/1011972
ctacatatc

SEQ ID NO: 80060 - DNA, 12 bp, Unknown
  misc_feature (1)..( 12): Result.001 file - promoters70/1011972
agtgtttcatat

SEQ ID NO: 80061 - DNA, 12 bp, Unknown
  misc_feature (1)..( 12): Result.001 file - promoters70/1011972
agtttttgatat

SEQ ID NO: 80062 - DNA, 12 bp, Unknown
  misc_feature (1)..( 12): Result.001 file - promoters70/1011972
gccgtttgataa

SEQ ID NO: 80063 - DNA, 12 bp, Unknown
  misc_feature (1)..( 12): Result.001 file - promoters70/1011972
tcattttgacat

SEQ ID NO: 80064 - DNA, 7 bp, Unknown
  misc_feature (1)..( 7): Result.001 file - promoters70/1011972
ttttcaa

SEQ ID NO: 80065 - DNA, 7 bp, Unknown
  misc_feature (1)..( 7): Result.001 file - promoters70/1011972
gtttcaa

SEQ ID NO: 80066 - DNA, 8 bp, Unknown
  misc_feature (1)..( 8): Result.001 file - promoters70/1011972
attgtcaa

SEQ ID NO: 80067 - DNA, 9 bp, Unknown
  misc_feature (1)..( 9): Result.001 file - promoters70/1011972
ctaattaac

SEQ ID NO: 80068 - DNA, 9 bp, Unknown
  misc_feature (1)..( 9): Result.001 file - promoters70/1011972
ctaatcaac

SEQ ID NO: 80069 - DNA, 9 bp, Unknown
  misc_feature (1)..( 9): Result.001 file - promoters70/1011972
gtcatcaat

SEQ ID NO: 80070 - DNA, 10 bp, Unknown
  misc_feature (1)..( 10): Result.001 file - promoters70/1011972
atcttcatat

SEQ ID NO: 80071 - DNA, 10 bp, Unknown
  misc_feature (1)..( 10): Result.001 file - promoters70/1011972
atctacatat

SEQ ID NO: 80072 - DNA, 10 bp, Unknown
  misc_feature (1)..( 10): Result.001 file - promoters70/1011972
tactatataa

SEQ ID NO: 80073 - DNA, 8 bp, Unknown
  misc_feature (1)..( 8): Result.001 file - promoters70/1011972
atccatat

SEQ ID NO: 80074 - DNA, 8 bp, Unknown
  misc_feature (1)..( 8): Result.001 file - promoters70/1011972
atcaatat

SEQ ID NO: 80075 - DNA, 8 bp, Unknown
  misc_feature (1)..( 8): Result.001 file - promoters70/1011972
atcaacaa

SEQ ID NO: 80076 - DNA, 7 bp, Unknown
  misc_feature (1)..( 7): Result.001 file - promoters70/1011972
tgacatc

SEQ ID NO: 80077 - DNA, 7 bp, Unknown
  misc_feature (1)..( 7): Result.001 file - promoters70/1011972
tgacatt

SEQ ID NO: 80078 - DNA, 7 bp, Unknown
  misc_feature (1)..( 7): Result.001 file - promoters70/1011972
tgatatt

SEQ ID NO: 80079 - DNA, 6 bp, Unknown
  misc_feature (1)..( 6): Result.001 file - promoters70/1011972
tttgga

SEQ ID NO: 80080 - DNA, 6 bp, Unknown
  misc_feature (1)..( 6): Result.001 file - promoters70/1011972
tttgga

SEQ ID NO: 80081 - DNA, 7 bp, Unknown
  misc_feature (1)..( 7): Result.001 file - promoters70/1012003
tttcgga

SEQ ID NO: 80082 - DNA, 10 bp, Unknown
  misc_feature (1)..( 10): Result.001 file - promoters70/1012003
tagattcttc

SEQ ID NO: 80083 - DNA, 10 bp, Unknown
  misc_feature (1)..( 10): Result.001 file - promoters70/1012003
tagtttctta

SEQ ID NO: 80084 - DNA, 10 bp, Unknown
  misc_feature (1)..( 10): Result.001 file - promoters70/1012003
gaagttctta

SEQ ID NO: 80085 - DNA, 10 bp, Unknown
  misc_feature (1)..( 10): Result.001 file - promoters70/1012003
agttttctta

SEQ ID NO: 80086 - DNA, 10 bp, Unknown
  misc_feature (1)..( 10): Result.001 file - promoters70/1012003
caagtgcttc

SEQ ID NO: 80087 - DNA, 10 bp, Unknown
  misc_feature (1)..( 10): Result.001 file - promoters70/1012003
gaagagctcc

SEQ ID NO: 80088 - DNA, 15 bp, Unknown
  misc_feature (1)..( 15): Result.001 file - promoters70/1012003
gccaaaaatggcaga

SEQ ID NO: 80089 - DNA, 15 bp, Unknown
  misc_feature (1)..( 15): Result.001 file - promoters70/1012003
cccaaaatctcatct

SEQ ID NO: 80090 - DNA, 15 bp, Unknown
  misc_feature (1)..( 15): Result.001 file - promoters70/1012003
agcaaaaaacttcca

SEQ ID NO: 80091 - DNA, 15 bp, Unknown
  misc_feature (1)..( 15): Result.001 file - promoters70/1012003
aggaaacaacactag

SEQ ID NO: 80092 - DNA, 15 bp, Unknown
  misc_feature (1)..( 15): Result.001 file - promoters70/1012003
cgcaaaactattgac

SEQ ID NO: 80093 - DNA, 15 bp, Unknown
  misc_feature (1)..( 15): Result.001 file - promoters70/1012003
aagaaaaaaattcca

SEQ ID NO: 80094 - DNA, 11 bp, Unknown
  misc_feature (1)..( 11): Result.001 file - promoters70/1012003
cgtatatataa

SEQ ID NO: 80095 - DNA, 11 bp, Unknown
  misc_feature (1)..( 11): Result.001 file - promoters70/1012003
catatataaag

SEQ ID NO: 80096 - DNA, 11 bp, Unknown
  misc_feature (1)..( 11): Result.001 file - promoters70/1012003
cgtatataaag

SEQ ID NO: 80097 - DNA, 11 bp, Unknown
  misc_feature (1)..( 11): Result.001 file - promoters70/1012003
actatttaaag

SEQ ID NO: 80098 - DNA, 11 bp, Unknown
  misc_feature (1)..( 11): Result.001 file - promoters70/1012003
tccatataaat

SEQ ID NO: 80099 - DNA, 11 bp, Unknown
  misc_feature (1)..( 11): Result.001 file - promoters70/1012003
ttactataaag

SEQ ID NO: 80100 - DNA, 11 bp, Unknown
  misc_feature (1)..( 11): Result.001 file - promoters70/1012003
gaagaggaaga

SEQ ID NO: 80101 - DNA, 11 bp, Unknown
  misc_feature (1)..( 11): Result.001 file - promoters70/1012003
gaagaagaatt

SEQ ID NO: 80102 - DNA, 11 bp, Unknown
  misc_feature (1)..( 11): Result.001 file - promoters70/1012003
tcagaagaaaa

SEQ ID NO: 80103 - DNA, 11 bp, Unknown
  misc_feature (1)..( 11): Result.001 file - promoters70/1012003
gaagacgaaca

SEQ ID NO: 80104 - DNA, 11 bp, Unknown
  misc_feature (1)..( 11): Result.001 file - promoters70/1012003
taagcagaaat

SEQ ID NO: 80105 - DNA, 11 bp, Unknown
  misc_feature (1)..( 11): Result.001 file - promoters70/1012003
taggaaaaaaa

SEQ ID NO: 80106 - DNA, 11 bp, Unknown
  misc_feature (1)..( 11): Result.001 file - promoters70/1012003
gaataaacgcc

SEQ ID NO: 80107 - DNA, 11 bp, Unknown
  misc_feature (1)..( 11): Result.001 file - promoters70/1012003
gaaaaaacata

SEQ ID NO: 80108 - DNA, 11 bp, Unknown
  misc_feature (1)..( 11): Result.001 file - promoters70/1012003
taaaaaaatcc

SEQ ID NO: 80109 - DNA, 11 bp, Unknown
  misc_feature (1)..( 11): Result.001 file - promoters70/1012003
aatgaaatcat

SEQ ID NO: 80110 - DNA, 11 bp, Unknown
  misc_feature (1)..( 11): Result.001 file - promoters70/1012003
gagcaaacctc

SEQ ID NO: 80111 - DNA, 11 bp, Unknown
  misc_feature (1)..( 11): Result.001 file - promoters70/1012003
aaaaaaatgga

SEQ ID NO: 80112 - DNA, 15 bp, Unknown
  misc_feature (1)..( 15): Result.001 file - promoters70/1012003
ttcggcccaaattta

SEQ ID NO: 80113 - DNA, 15 bp, Unknown
  misc_feature (1)..( 15): Result.001 file - promoters70/1012003
aaaggcccaataaat

SEQ ID NO: 80114 - DNA, 15 bp, Unknown
  misc_feature (1)..( 15): Result.001 file - promoters70/1012003
ttcggcccaccggcc

SEQ ID NO: 80115 - DNA, 15 bp, Unknown
  misc_feature (1)..( 15): Result.001 file - promoters70/1012003
aaaggcccatattaa

SEQ ID NO: 80116 - DNA, 15 bp, Unknown
  misc_feature (1)..( 15): Result.001 file - promoters70/1012003
aaaggcccaatttca

SEQ ID NO: 80117 - DNA, 15 bp, Unknown
  misc_feature (1)..( 15): Result.001 file - promoters70/1012074
taaaacccattttca

SEQ ID NO: 80118 - DNA, 8 bp, Unknown
  misc_feature (1)..( 8): Result.001 file - promoters70/1012074
agtgttca

SEQ ID NO: 80119 - DNA, 8 bp, Unknown
  misc_feature (1)..( 8): Result.001 file - promoters70/1012074
agtcttcc

SEQ ID NO: 80120 - DNA, 8 bp, Unknown
  misc_feature (1)..( 8): Result.001 file - promoters70/1012074
agtgatca

SEQ ID NO: 80121 - DNA, 10 bp, Unknown
  misc_feature (1)..( 10): Result.001 file - promoters70/1012074
ttttaataag

SEQ ID NO: 80122 - DNA, 10 bp, Unknown
  misc_feature (1)..( 10): Result.001 file - promoters70/1012074
tttcaataac

SEQ ID NO: 80123 - DNA, 10 bp, Unknown
  misc_feature (1)..( 10): Result.001 file - promoters70/1012110
gtctaaaaag

SEQ ID NO: 80124 - DNA, 11 bp, Unknown
  misc_feature (1)..( 11): Result.001 file - promoters70/1012110
ccagaattaag

SEQ ID NO: 80125 - DNA, 11 bp, Unknown
  misc_feature (1)..( 11): Result.001 file - promoters70/1012110
ccataattagt

SEQ ID NO: 80126 - DNA, 11 bp, Unknown
  misc_feature (1)..( 11): Result.001 file - promoters70/1012334
atgtaattaag

SEQ ID NO: 80127 - DNA, 11 bp, Unknown
  misc_feature (1)..( 11): Result.001 file - promoters70/1012334
gttgtttagac

SEQ ID NO: 80128 - DNA, 11 bp, Unknown
  misc_feature (1)..( 11): Result.001 file - promoters70/1012334
gttttttctct

SEQ ID NO: 80129 - DNA, 11 bp, Unknown
  misc_feature (1)..( 11): Result.001 file - promoters70/1012334
attgtttcgaa

SEQ ID NO: 80130 - DNA, 11 bp, Unknown
  misc_feature (1)..( 11): Result.001 file - promoters70/1012334
tttttttgttt

SEQ ID NO: 80131 - DNA, 11 bp, Unknown
  misc_feature (1)..( 11): Result.001 file - promoters70/1012334
gtttttctttt

SEQ ID NO: 80132 - DNA, 11 bp, Unknown
  misc_feature (1)..( 11): Result.001 file - promoters70/1012334
tttgttccatt

SEQ ID NO: 80133 - DNA, 11 bp, Unknown
  misc_feature (1)..( 11): Result.001 file - promoters70/1012349
ctttttttttt

SEQ ID NO: 80134 - DNA, 14 bp, Unknown
  misc_feature (1)..( 14): Result.001 file - promoters70/1012349
caaacgtttaggag

SEQ ID NO: 80135 - DNA, 14 bp, Unknown
  misc_feature (1)..( 14): Result.001 file - promoters70/1012349
catacgtttttttt

SEQ ID NO: 80136 - DNA, 14 bp, Unknown
  misc_feature (1)..( 14): Result.001 file - promoters70/1012349
taaaagtttgttat

SEQ ID NO: 80137 - DNA, 14 bp, Unknown
  misc_feature (1)..( 14): Result.001 file - promoters70/1012349
aacacgcttacgaa

SEQ ID NO: 80138 - DNA, 14 bp, Unknown
  misc_feature (1)..( 14): Result.001 file - promoters70/1012349
tttacatttgtctg

SEQ ID NO: 80139 - DNA, 14 bp, Unknown
  misc_feature (1)..( 14): Result.001 file - promoters70/1012349
taaaagtttgatat

SEQ ID NO: 80140 - DNA, 12 bp, Unknown
  misc_feature (1)..( 12): Result.001 file - promoters70/1012349
tttattaaaaaa

SEQ ID NO: 80141 - DNA, 12 bp, Unknown
  misc_feature (1)..( 12): Result.001 file - promoters70/1012349
tttcttaaaagc

SEQ ID NO: 80142 - DNA, 12 bp, Unknown
  misc_feature (1)..( 12): Result.001 file - promoters70/1012349
ggttctaaaaaa

SEQ ID NO: 80143 - DNA, 12 bp, Unknown
  misc_feature (1)..( 12): Result.001 file - promoters70/1012349
tttattgctctt

SEQ ID NO: 80144 - DNA, 12 bp, Unknown
  misc_feature (1)..( 12): Result.001 file - promoters70/1012349
aatctgaaaata

SEQ ID NO: 80145 - DNA, 12 bp, Unknown
  misc_feature (1)..( 12): Result.001 file - promoters70/1012407
gggcttaaacca

SEQ ID NO: 80146 - DNA, 8 bp, Unknown
  misc_feature (1)..( 8): Result.001 file - promoters70/1012407
ccatctga

SEQ ID NO: 80147 - DNA, 8 bp, Unknown
  misc_feature (1)..( 8): Result.001 file - promoters70/1012407
aaatctga

SEQ ID NO: 80148 - DNA, 8 bp, Unknown
  misc_feature (1)..( 8): Result.001 file - promoters70/1012407
ccatttga

SEQ ID NO: 80149 - DNA, 8 bp, Unknown
  misc_feature (1)..( 8): Result.001 file - promoters70/1012407
aattttga

SEQ ID NO: 80150 - DNA, 8 bp, Unknown
  misc_feature (1)..( 8): Result.001 file - promoters70/1012407
aattttaa

SEQ ID NO: 80151 - DNA, 8 bp, Unknown
  misc_feature (1)..( 8): Result.001 file - promoters70/1012407
cattgtaa

SEQ ID NO: 80152 - DNA, 6 bp, Unknown
  misc_feature (1)..( 6): Result.001 file - promoters70/1012407
ttattc

SEQ ID NO: 80153 - DNA, 6 bp, Unknown
  misc_feature (1)..( 6): Result.001 file - promoters70/1012407
ttattc

SEQ ID NO: 80154 - DNA, 6 bp, Unknown
  misc_feature (1)..( 6): Result.001 file - promoters70/1012407
ttattc

SEQ ID NO: 80155 - DNA, 10 bp, Unknown
  misc_feature (1)..( 10): Result.001 file - promoters70/1012407
ccaaataatt

SEQ ID NO: 80156 - DNA, 10 bp, Unknown
  misc_feature (1)..( 10): Result.001 file - promoters70/1012407
tcaagtaatt

SEQ ID NO: 80157 - DNA, 10 bp, Unknown
  misc_feature (1)..( 10): Result.001 file - promoters70/1012580
ccaaatattc

SEQ ID NO: 80158 - DNA, 9 bp, Unknown
  misc_feature (1)..( 9): Result.001 file - promoters70/1012580
aattacaat

SEQ ID NO: 80159 - DNA, 9 bp, Unknown
  misc_feature (1)..( 9): Result.001 file - promoters70/1012580
tcttataat

SEQ ID NO: 80160 - DNA, 9 bp, Unknown
  misc_feature (1)..( 9): Result.001 file - promoters70/1012580
tcttataaa

SEQ ID NO: 80161 - DNA, 8 bp, Unknown
  misc_feature (1)..( 8): Result.001 file - promoters70/1012580
acttatat

SEQ ID NO: 80162 - DNA, 8 bp, Unknown
  misc_feature (1)..( 8): Result.001 file - promoters70/1012580
tcttataa

SEQ ID NO: 80163 - DNA, 8 bp, Unknown
  misc_feature (1)..( 8): Result.001 file - promoters70/1012673
tcttataa

SEQ ID NO: 80164 - DNA, 9 bp, Unknown
  misc_feature (1)..( 9): Result.001 file - promoters70/1012673
tatcatttt

SEQ ID NO: 80165 - DNA, 9 bp, Unknown
  misc_feature (1)..( 9): Result.001 file - promoters70/1012673
tatcatttt

SEQ ID NO: 80166 - DNA, 9 bp, Unknown
  misc_feature (1)..( 9): Result.001 file - promoters70/1012757
tatgattaa

SEQ ID NO: 80167 - DNA, 11 bp, Unknown
  misc_feature (1)..( 11): Result.001 file - promoters70/1012757
tgtttgaccat

SEQ ID NO: 80168 - DNA, 11 bp, Unknown
  misc_feature (1)..( 11): Result.001 file - promoters70/1012757
tatttgaacat

SEQ ID NO: 80169 - DNA, 11 bp, Unknown
  misc_feature (1)..( 11): Result.001 file - promoters70/1012757
tgtgtgagttc

SEQ ID NO: 80170 - DNA, 8 bp, Unknown
  misc_feature (1)..( 8): Result.001 file - promoters70/1012757
taacgaac

SEQ ID NO: 80171 - DNA, 8 bp, Unknown
  misc_feature (1)..( 8): Result.001 file - promoters70/1012757
caacgaaa

SEQ ID NO: 80172 - DNA, 8 bp, Unknown
  misc_feature (1)..( 8): Result.001 file - promoters70/1012883
caactaaa

SEQ ID NO: 80173 - DNA, 8 bp, Unknown
  misc_feature (1)..( 8): Result.001 file - promoters70/1012883
aaagattg

SEQ ID NO: 80174 - DNA, 8 bp, Unknown
  misc_feature (1)..( 8): Result.001 file - promoters70/1012883
aaagcttg

SEQ ID NO: 80175 - DNA, 8 bp, Unknown
  misc_feature (1)..( 8): Result.001 file - promoters70/1012883
aaaaattt

SEQ ID NO: 80176 - DNA, 7 bp, Unknown
  misc_feature (1)..( 7): Result.001 file - promoters70/1012883
ccactaa

SEQ ID NO: 80177 - DNA, 7 bp, Unknown
  misc_feature (1)..( 7): Result.001 file - promoters70/1012883
ccattaa

SEQ ID NO: 80178 - DNA, 7 bp, Unknown
  misc_feature (1)..( 7): Result.001 file - promoters70/1012883
ccattag

SEQ ID NO: 80179 - DNA, 9 bp, Unknown
  misc_feature (1)..( 9): Result.001 file - promoters70/1012883
cttaattta

SEQ ID NO: 80180 - DNA, 9 bp, Unknown
  misc_feature (1)..( 9): Result.001 file - promoters70/1012883
actaaatta

SEQ ID NO: 80181 - DNA, 9 bp, Unknown
  misc_feature (1)..( 9): Result.001 file - promoters70/1013128
actgaattc

SEQ ID NO: 80182 - DNA, 9 bp, Unknown
  misc_feature (1)..( 9): Result.001 file - promoters70/1013128
gtagtgaaa

SEQ ID NO: 80183 - DNA, 9 bp, Unknown
  misc_feature (1)..( 9): Result.001 file - promoters70/1013128
gtagtcaaa

SEQ ID NO: 80184 - DNA, 9 bp, Unknown
  misc_feature (1)..( 9): Result.001 file - promoters70/1013128
ctagagaaa

SEQ ID NO: 80185 - DNA, 13 bp, Unknown
  misc_feature (1)..( 13): Result.001 file - promoters70/1013128
gactaaaataaag

SEQ ID NO: 80186 - DNA, 13 bp, Unknown
  misc_feature (1)..( 13): Result.001 file - promoters70/1013128
tgaaaaaatagtt

SEQ ID NO: 80187 - DNA, 13 bp, Unknown
  misc_feature (1)..( 13): Result.001 file - promoters70/1013128
agagaaaaaaaag

SEQ ID NO: 80188 - DNA, 13 bp, Unknown
  misc_feature (1)..( 13): Result.001 file - promoters70/1013128
agagaaaggaaga

SEQ ID NO: 80189 - DNA, 13 bp, Unknown
  misc_feature (1)..( 13): Result.001 file - promoters70/1013128
attttctcatttt

SEQ ID NO: 80190 - DNA, 13 bp, Unknown
  misc_feature (1)..( 13): Result.001 file - promoters70/1013128
tttttctaatttt

SEQ ID NO: 80191 - DNA, 14 bp, Unknown
  misc_feature (1)..( 14): Result.001 file - promoters70/1013128
gttcttcttctaac

SEQ ID NO: 80192 - DNA, 7 bp, Unknown
  misc_feature (1)..( 7): Result.001 file - promoters70/1013128
taaattg

SEQ ID NO: 80193 - DNA, 7 bp, Unknown
  misc_feature (1)..( 7): Result.001 file - promoters70/1013128
gaaattg

SEQ ID NO: 80194 - DNA, 7 bp, Unknown
  misc_feature (1)..( 7): Result.001 file - promoters70/1013128
gaagttg

SEQ ID NO: 80195 - DNA, 7 bp, Unknown
  misc_feature (1)..( 7): Result.001 file - promoters70/1013128
atataaa

SEQ ID NO: 80196 - DNA, 7 bp, Unknown
  misc_feature (1)..( 7): Result.001 file - promoters70/1013128
atataaa

SEQ ID NO: 80197 - DNA, 7 bp, Unknown
  misc_feature (1)..( 7): Result.001 file - promoters70/1013208
ctataaa

SEQ ID NO: 80198 - DNA, 11 bp, Unknown
  misc_feature (1)..( 11): Result.001 file - promoters70/1013208
attttaatctc

SEQ ID NO: 80199 - DNA, 11 bp, Unknown
  misc_feature (1)..( 11): Result.001 file - promoters70/1013208
tttttattcta

SEQ ID NO: 80200 - DNA, 11 bp, Unknown
  misc_feature (1)..( 11): Result.001 file - promoters70/1013208
attttagaaaa

SEQ ID NO: 80201 - DNA, 11 bp, Unknown
  misc_feature (1)..( 11): Result.001 file - promoters70/1013208
gttgtattcta

SEQ ID NO: 80202 - DNA, 11 bp, Unknown
  misc_feature (1)..( 11): Result.001 file - promoters70/1013208
tttttacggcg

SEQ ID NO: 80203 - DNA, 13 bp, Unknown
  misc_feature (1)..( 13): Result.001 file - promoters70/1013208
cttcttattgaat

SEQ ID NO: 80204 - DNA, 13 bp, Unknown
  misc_feature (1)..( 13): Result.001 file - promoters70/1013208
ttctatatagaac

SEQ ID NO: 80205 - DNA, 13 bp, Unknown
  misc_feature (1)..( 13): Result.001 file - promoters70/1013208
ccccctatgtagt

SEQ ID NO: 80206 - DNA, 13 bp, Unknown
  misc_feature (1)..( 13): Result.001 file - promoters70/1013208
cttcttttgtagt

SEQ ID NO: 80207 - DNA, 13 bp, Unknown
  misc_feature (1)..( 13): Result.001 file - promoters70/1013242
ctttttttttagt

SEQ ID NO: 80208 - DNA, 9 bp, Unknown
  misc_feature (1)..( 9): Result.001 file - promoters70/1013242
tctttgtaa

SEQ ID NO: 80209 - DNA, 9 bp, Unknown
  misc_feature (1)..( 9): Result.001 file - promoters70/1013242
tctttataa

SEQ ID NO: 80210 - DNA, 9 bp, Unknown
  misc_feature (1)..( 9): Result.001 file - promoters70/1013242
acattataa

SEQ ID NO: 80211 - DNA, 9 bp, Unknown
  misc_feature (1)..( 9): Result.001 file - promoters70/1013242
atgcttttt

SEQ ID NO: 80212 - DNA, 9 bp, Unknown
  misc_feature (1)..( 9): Result.001 file - promoters70/1013242
atgatttag

SEQ ID NO: 80213 - DNA, 9 bp, Unknown
  misc_feature (1)..( 9): Result.001 file - promoters70/1013242
tggatatag

SEQ ID NO: 80214 - DNA, 8 bp, Unknown
  misc_feature (1)..( 8): Result.001 file - promoters70/1013242
tctttctc

SEQ ID NO: 80215 - DNA, 8 bp, Unknown
  misc_feature (1)..( 8): Result.001 file - promoters70/1013242
tcttgctc

SEQ ID NO: 80216 - DNA, 8 bp, Unknown
  misc_feature (1)..( 8): Result.001 file - promoters70/1013242
tctgtctc

SEQ ID NO: 80217 - DNA, 9 bp, Unknown
  misc_feature (1)..( 9): Result.001 file - promoters70/1013242
aaaaacata

SEQ ID NO: 80218 - DNA, 9 bp, Unknown
  misc_feature (1)..( 9): Result.001 file - promoters70/1013242
aaaaaaata

SEQ ID NO: 80219 - DNA, 9 bp, Unknown
  misc_feature (1)..( 9): Result.001 file - promoters70/1013314
taaaacatt

SEQ ID NO: 80220 - DNA, 12 bp, Unknown
  misc_feature (1)..( 12): Result.001 file - promoters70/1013314
gaaaatacaaat

SEQ ID NO: 80221 - DNA, 12 bp, Unknown
  misc_feature (1)..( 12): Result.001 file - promoters70/1013314
taaaatataaat

SEQ ID NO: 80222 - DNA, 12 bp, Unknown
  misc_feature (1)..( 12): Result.001 file - promoters70/1013314
taaaatgcacgt

SEQ ID NO: 80223 - DNA, 11 bp, Unknown
  misc_feature (1)..( 11): Result.001 file - promoters70/1013314
atatttttatg

SEQ ID NO: 80224 - DNA, 11 bp, Unknown
  misc_feature (1)..( 11): Result.001 file - promoters70/1013314
gaaattttatg

SEQ ID NO: 80225 - DNA, 11 bp, Unknown
  misc_feature (1)..( 11): Result.001 file - promoters70/1013314
atatttttata

SEQ ID NO: 80226 - DNA, 8 bp, Unknown
  misc_feature (1)..( 8): Result.001 file - promoters70/1013314
tcaaaaga

SEQ ID NO: 80227 - DNA, 8 bp, Unknown
  misc_feature (1)..( 8): Result.001 file - promoters70/1013314
acaaaaga

SEQ ID NO: 80228 - DNA, 8 bp, Unknown
  misc_feature (1)..( 8): Result.001 file - promoters70/1013314
tcaaaaaa

SEQ ID NO: 80229 - DNA, 9 bp, Unknown
  misc_feature (1)..( 9): Result.001 file - promoters70/1013314
taaaatttg

SEQ ID NO: 80230 - DNA, 9 bp, Unknown
  misc_feature (1)..( 9): Result.001 file - promoters70/1013314
aaaacttta

SEQ ID NO: 80231 - DNA, 9 bp, Unknown
  misc_feature (1)..( 9): Result.001 file - promoters70/1013314
aaaacgtta

SEQ ID NO: 80232 - DNA, 9 bp, Unknown
  misc_feature (1)..( 9): Result.001 file - promoters70/1013314
aattaaatg

SEQ ID NO: 80233 - DNA, 9 bp, Unknown
  misc_feature (1)..( 9): Result.001 file - promoters70/1013314
aattaataa

SEQ ID NO: 80234 - DNA, 9 bp, Unknown
  misc_feature (1)..( 9): Result.001 file - promoters70/1013314
gattaaatg

SEQ ID NO: 80235 - DNA, 11 bp, Unknown
  misc_feature (1)..( 11): Result.001 file - promoters70/1013314
aaaagatttat

SEQ ID NO: 80236 - DNA, 11 bp, Unknown
  misc_feature (1)..( 11): Result.001 file - promoters70/1013314
aaagaatttat

SEQ ID NO: 80237 - DNA, 11 bp, Unknown
  misc_feature (1)..( 11): Result.001 file - promoters70/1013314
aaagactttag

SEQ ID NO: 80238 - DNA, 10 bp, Unknown
  misc_feature (1)..( 10): Result.001 file - promoters70/1013314
acattgtcca

SEQ ID NO: 80239 - DNA, 10 bp, Unknown
  misc_feature (1)..( 10): Result.001 file - promoters70/1013314
taattatcca

SEQ ID NO: 80240 - DNA, 10 bp, Unknown
  misc_feature (1)..( 10): Result.001 file - promoters70/1013314
taaatatttt

SEQ ID NO: 80241 - DNA, 8 bp, Unknown
  misc_feature (1)..( 8): Result.001 file - promoters70/1013314
tccaaatt

SEQ ID NO: 80242 - DNA, 8 bp, Unknown
  misc_feature (1)..( 8): Result.001 file - promoters70/1013314
tccaaata

SEQ ID NO: 80243 - DNA, 8 bp, Unknown
  misc_feature (1)..( 8): Result.001 file - promoters70/1013384
gacaaata

SEQ ID NO: 80244 - DNA, 8 bp, Unknown
  misc_feature (1)..( 8): Result.001 file - promoters70/1013384
aaaacaga

SEQ ID NO: 80245 - DNA, 8 bp, Unknown
  misc_feature (1)..( 8): Result.001 file - promoters70/1013384
aaaacagt

SEQ ID NO: 80246 - DNA, 8 bp, Unknown
  misc_feature (1)..( 8): Result.001 file - promoters70/1013540
aacacaaa

SEQ ID NO: 80247 - DNA, 14 bp, Unknown
  misc_feature (1)..( 14): Result.001 file - promoters70/1013540
aatctcgaaaccag

SEQ ID NO: 80248 - DNA, 14 bp, Unknown
  misc_feature (1)..( 14): Result.001 file - promoters70/1013540
aatctcaaaacatt

SEQ ID NO: 80249 - DNA, 14 bp, Unknown
  misc_feature (1)..( 14): Result.001 file - promoters70/1013540
atcttcaaaattat

SEQ ID NO: 80250 - DNA, 14 bp, Unknown
  misc_feature (1)..( 14): Result.001 file - promoters70/1013540
ctccacaaacttat

SEQ ID NO: 80251 - DNA, 8 bp, Unknown
  misc_feature (1)..( 8): Result.001 file - promoters70/1013540
tatcacac

SEQ ID NO: 80252 - DNA, 8 bp, Unknown
  misc_feature (1)..( 8): Result.001 file - promoters70/1013540
gctcacac

SEQ ID NO: 80253 - DNA, 8 bp, Unknown
  misc_feature (1)..( 8): Result.001 file - promoters70/1013540
cctcacac

SEQ ID NO: 80254 - DNA, 8 bp, Unknown
  misc_feature (1)..( 8): Result.001 file - promoters70/1013690
cctaacag

SEQ ID NO: 80255 - DNA, 11 bp, Unknown
  misc_feature (1)..( 11): Result.001 file - promoters70/1013690
taagaggtata

SEQ ID NO: 80256 - DNA, 11 bp, Unknown
  misc_feature (1)..( 11): Result.001 file - promoters70/1013690
taacaggtacg

SEQ ID NO: 80257 - DNA, 11 bp, Unknown
  misc_feature (1)..( 11): Result.001 file - promoters70/1013786
gtggaggtata

SEQ ID NO: 80258 - DNA, 11 bp, Unknown
  misc_feature (1)..( 11): Result.001 file - promoters70/1013786
agtttaggccg

SEQ ID NO: 80259 - DNA, 11 bp, Unknown
  misc_feature (1)..( 11): Result.001 file - promoters70/1013786
agtctagtaac

SEQ ID NO: 80260 - DNA, 11 bp, Unknown
  misc_feature (1)..( 11): Result.001 file - promoters70/1013786
agtttaacgaa

SEQ ID NO: 80261 - DNA, 11 bp, Unknown
  misc_feature (1)..( 11): Result.001 file - promoters70/1013786
tttctaggaac

SEQ ID NO: 80262 - DNA, 8 bp, Unknown
  misc_feature (1)..( 8): Result.001 file - promoters70/1013786
caaaatta

SEQ ID NO: 80263 - DNA, 8 bp, Unknown
  misc_feature (1)..( 8): Result.001 file - promoters70/1013786
aaaaattt

SEQ ID NO: 80264 - DNA, 9 bp, Unknown
  misc_feature (1)..( 9): Result.001 file - promoters70/1013786
aaaaactta

SEQ ID NO: 80265 - DNA, 9 bp, Unknown
  misc_feature (1)..( 9): Result.001 file - promoters70/1013786
ctaaacttc

SEQ ID NO: 80266 - DNA, 9 bp, Unknown
  misc_feature (1)..( 9): Result.001 file - promoters70/1013786
tatatatag

SEQ ID NO: 80267 - DNA, 9 bp, Unknown
  misc_feature (1)..( 9): Result.001 file - promoters70/1013786
tatataaat

SEQ ID NO: 80268 - DNA, 9 bp, Unknown
  misc_feature (1)..( 9): Result.001 file - promoters70/1013786
tataaatat

SEQ ID NO: 80269 - DNA, 9 bp, Unknown
  misc_feature (1)..( 9): Result.001 file - promoters70/1013786
tatacaaat

SEQ ID NO: 80270 - DNA, 12 bp, Unknown
  misc_feature (1)..( 12): Result.001 file - promoters70/1013786
aaaaatttaatt

SEQ ID NO: 80271 - DNA, 12 bp, Unknown
  misc_feature (1)..( 12): Result.001 file - promoters70/1013786
actaatttaatt

SEQ ID NO: 80272 - DNA, 12 bp, Unknown
  misc_feature (1)..( 12): Result.001 file - promoters70/1013786
aaaaacttacca

SEQ ID NO: 80273 - DNA, 12 bp, Unknown
  misc_feature (1)..( 12): Result.001 file - promoters70/1013904
cagattttaata

SEQ ID NO: 80274 - DNA, 9 bp, Unknown
  misc_feature (1)..( 9): Result.001 file - promoters70/1013904
ttagtaatt

SEQ ID NO: 80275 - DNA, 9 bp, Unknown
  misc_feature (1)..( 9): Result.001 file - promoters70/1013904
ttactaaca

SEQ ID NO: 80276 - DNA, 9 bp, Unknown
  misc_feature (1)..( 9): Result.001 file - promoters70/1013904
ttagtgatt

SEQ ID NO: 80277 - DNA, 8 bp, Unknown
  misc_feature (1)..( 8): Result.001 file - promoters70/1013904
atttatat

SEQ ID NO: 80278 - DNA, 8 bp, Unknown
  misc_feature (1)..( 8): Result.001 file - promoters70/1013904
aattatat

SEQ ID NO: 80279 - DNA, 8 bp, Unknown
  misc_feature (1)..( 8): Result.001 file - promoters70/1013904
aattgtat

SEQ ID NO: 80280 - DNA, 10 bp, Unknown
  misc_feature (1)..( 10): Result.001 file - promoters70/1013904
tgataaaatt

SEQ ID NO: 80281 - DNA, 10 bp, Unknown
  misc_feature (1)..( 10): Result.001 file - promoters70/1013904
tgatcaaatc

SEQ ID NO: 80282 - DNA, 10 bp, Unknown
  misc_feature (1)..( 10): Result.001 file - promoters70/1013904
ttataatatt

SEQ ID NO: 80283 - DNA, 7 bp, Unknown
  misc_feature (1)..( 7): Result.001 file - promoters70/1013904
gataaaa

SEQ ID NO: 80284 - DNA, 7 bp, Unknown
  misc_feature (1)..( 7): Result.001 file - promoters70/1013904
aataaaa

SEQ ID NO: 80285 - DNA, 7 bp, Unknown
  misc_feature (1)..( 7): Result.001 file - promoters70/1013904
aataaac

SEQ ID NO: 80286 - DNA, 8 bp, Unknown
  misc_feature (1)..( 8): Result.001 file - promoters70/1013904
gtttaggc

SEQ ID NO: 80287 - DNA, 8 bp, Unknown
  misc_feature (1)..( 8): Result.001 file - promoters70/1013904
gtttaggt

SEQ ID NO: 80288 - DNA, 8 bp, Unknown
  misc_feature (1)..( 8): Result.001 file - promoters70/1013904
tttttggt

SEQ ID NO: 80289 - DNA, 11 bp, Unknown
  misc_feature (1)..( 11): Result.001 file - promoters70/1013904
aagaaataaat

SEQ ID NO: 80290 - DNA, 11 bp, Unknown
  misc_feature (1)..( 11): Result.001 file - promoters70/1013904
aagaaaaaaat

SEQ ID NO: 80291 - DNA, 11 bp, Unknown
  misc_feature (1)..( 11): Result.001 file - promoters70/1013904
ctaaaataata

SEQ ID NO: 80292 - DNA, 8 bp, Unknown
  misc_feature (1)..( 8): Result.001 file - promoters70/1013904
ttaatata

SEQ ID NO: 80293 - DNA, 8 bp, Unknown
  misc_feature (1)..( 8): Result.001 file - promoters70/1013904
ttaataat

SEQ ID NO: 80294 - DNA, 8 bp, Unknown
  misc_feature (1)..( 8): Result.001 file - promoters70/1013904
ctaaaaat

SEQ ID NO: 80295 - DNA, 7 bp, Unknown
  misc_feature (1)..( 7): Result.001 file - promoters70/1013904
aaataat

SEQ ID NO: 80296 - DNA, 7 bp, Unknown
  misc_feature (1)..( 7): Result.001 file - promoters70/1013904
taataat

SEQ ID NO: 80297 - DNA, 7 bp, Unknown
  misc_feature (1)..( 7): Result.001 file - promoters70/1013904
taaaaat

SEQ ID NO: 80298 - DNA, 8 bp, Unknown
  misc_feature (1)..( 8): Result.001 file - promoters70/1013904
ttatattt

SEQ ID NO: 80299 - DNA, 8 bp, Unknown
  misc_feature (1)..( 8): Result.001 file - promoters70/1013904
caatattt

SEQ ID NO: 80300 - DNA, 8 bp, Unknown
  misc_feature (1)..( 8): Result.001 file - promoters70/1013904
caaaatta

SEQ ID NO: 80301 - DNA, 7 bp, Unknown
  misc_feature (1)..( 7): Result.001 file - promoters70/1013904
tttatat

SEQ ID NO: 80302 - DNA, 7 bp, Unknown
  misc_feature (1)..( 7): Result.001 file - promoters70/1013904
tttatat

SEQ ID NO: 80303 - DNA, 7 bp, Unknown
  misc_feature (1)..( 7): Result.001 file - promoters70/1014010
attatat

SEQ ID NO: 80304 - DNA, 7 bp, Unknown
  misc_feature (1)..( 7): Result.001 file - promoters70/1014010
aattaaa

SEQ ID NO: 80305 - DNA, 7 bp, Unknown
  misc_feature (1)..( 7): Result.001 file - promoters70/1014010
tattaaa

SEQ ID NO: 80306 - DNA, 7 bp, Unknown
  misc_feature (1)..( 7): Result.001 file - promoters70/1014050
tataaaa

SEQ ID NO: 80307 - DNA, 12 bp, Unknown
  misc_feature (1)..( 12): Result.001 file - promoters70/1014050
aaaaaagttttt

SEQ ID NO: 80308 - DNA, 12 bp, Unknown
  misc_feature (1)..( 12): Result.001 file - promoters70/1014050
actttagttttg

SEQ ID NO: 80309 - DNA, 12 bp, Unknown
  misc_feature (1)..( 12): Result.001 file - promoters70/1014050
actagggttttt

SEQ ID NO: 80310 - DNA, 12 bp, Unknown
  misc_feature (1)..( 12): Result.001 file - promoters70/1014050
aaaatagtttac

SEQ ID NO: 80311 - DNA, 13 bp, Unknown
  misc_feature (1)..( 13): Result.001 file - promoters70/1014050
ttgaacgttgttg

SEQ ID NO: 80312 - DNA, 13 bp, Unknown
  misc_feature (1)..( 13): Result.001 file - promoters70/1014125
aaaaaagtgttga

SEQ ID NO: 80313 - DNA, 11 bp, Unknown
  misc_feature (1)..( 11): Result.001 file - promoters70/1014125
aaactgtgaaa

SEQ ID NO: 80314 - DNA, 11 bp, Unknown
  misc_feature (1)..( 11): Result.001 file - promoters70/1014125
aaaatgtgaaa

SEQ ID NO: 80315 - DNA, 11 bp, Unknown
  misc_feature (1)..( 11): Result.001 file - promoters70/1014125
aaaataatttt

SEQ ID NO: 80316 - DNA, 11 bp, Unknown
  misc_feature (1)..( 11): Result.001 file - promoters70/1014125
ccaaatttggt

SEQ ID NO: 80317 - DNA, 11 bp, Unknown
  misc_feature (1)..( 11): Result.001 file - promoters70/1014125
ccaattttaag

SEQ ID NO: 80318 - DNA, 11 bp, Unknown
  misc_feature (1)..( 11): Result.001 file - promoters70/1014176
attattctaag

SEQ ID NO: 80319 - DNA, 11 bp, Unknown
  misc_feature (1)..( 11): Result.001 file - promoters70/1014176
attctattttt

SEQ ID NO: 80320 - DNA, 11 bp, Unknown
  misc_feature (1)..( 11): Result.001 file - promoters70/1014176
attctaatttt

SEQ ID NO: 80321 - DNA, 11 bp, Unknown
  misc_feature (1)..( 11): Result.001 file - promoters70/1014180
attctacataa

SEQ ID NO: 80322 - DNA, 8 bp, Unknown
  misc_feature (1)..( 8): Result.001 file - promoters70/1014180
tcagtttc

SEQ ID NO: 80323 - DNA, 8 bp, Unknown
  misc_feature (1)..( 8): Result.001 file - promoters70/1014180
tcaatttt

SEQ ID NO: 80324 - DNA, 8 bp, Unknown
  misc_feature (1)..( 8): Result.001 file - promoters70/1014180
ctaatttt

SEQ ID NO: 80325 - DNA, 7 bp, Unknown
  misc_feature (1)..( 7): Result.001 file - promoters70/1014180
caaaatt

SEQ ID NO: 80326 - DNA, 7 bp, Unknown
  misc_feature (1)..( 7): Result.001 file - promoters70/1014180
caatatt

SEQ ID NO: 80327 - DNA, 7 bp, Unknown
  misc_feature (1)..( 7): Result.001 file - promoters70/1014452
caatatg

SEQ ID NO: 80328 - DNA, 10 bp, Unknown
  misc_feature (1)..( 10): Result.001 file - promoters70/1014452
aacatttcat

SEQ ID NO: 80329 - DNA, 10 bp, Unknown
  misc_feature (1)..( 10): Result.001 file - promoters70/1014452
aacattaata

SEQ ID NO: 80330 - DNA, 10 bp, Unknown
  misc_feature (1)..( 10): Result.001 file - promoters70/1014452
gacaataata

SEQ ID NO: 80331 - DNA, 8 bp, Unknown
  misc_feature (1)..( 8): Result.001 file - promoters70/1014452
tataaata

SEQ ID NO: 80332 - DNA, 8 bp, Unknown
  misc_feature (1)..( 8): Result.001 file - promoters70/1014452
tataaata

SEQ ID NO: 80333 - DNA, 8 bp, Unknown
  misc_feature (1)..( 8): Result.001 file - promoters70/1014525
tataaaaa

SEQ ID NO: 80334 - DNA, 7 bp, Unknown
  misc_feature (1)..( 7): Result.001 file - promoters70/1014525
aaaaata

SEQ ID NO: 80335 - DNA, 7 bp, Unknown
  misc_feature (1)..( 7): Result.001 file - promoters70/1014525
aaacata

SEQ ID NO: 80336 - DNA, 7 bp, Unknown
  misc_feature (1)..( 7): Result.001 file - promoters70/1014525
aaaaatt

SEQ ID NO: 80337 - DNA, 8 bp, Unknown
  misc_feature (1)..( 8): Result.001 file - promoters70/1014525
aattaaaa

SEQ ID NO: 80338 - DNA, 8 bp, Unknown
  misc_feature (1)..( 8): Result.001 file - promoters70/1014525
aatgaaaa

SEQ ID NO: 80339 - DNA, 8 bp, Unknown
  misc_feature (1)..( 8): Result.001 file - promoters70/1014525
aatcaaat

SEQ ID NO: 80340 - DNA, 9 bp, Unknown
  misc_feature (1)..( 9): Result.001 file - promoters70/1014525
tatatatag

SEQ ID NO: 80341 - DNA, 9 bp, Unknown
  misc_feature (1)..( 9): Result.001 file - promoters70/1014525
tatatatac

SEQ ID NO: 80342 - DNA, 9 bp, Unknown
  misc_feature (1)..( 9): Result.001 file - promoters70/1014641
tatttatac

SEQ ID NO: 80343 - DNA, 8 bp, Unknown
  misc_feature (1)..( 8): Result.001 file - promoters70/1014641
ttttgttt

SEQ ID NO: 80344 - DNA, 8 bp, Unknown
  misc_feature (1)..( 8): Result.001 file - promoters70/1014641
ttttattt

SEQ ID NO: 80345 - DNA, 8 bp, Unknown
  misc_feature (1)..( 8): Result.001 file - promoters70/1014641
ttttgtag

SEQ ID NO: 80346 - DNA, 8 bp, Unknown
  misc_feature (1)..( 8): Result.001 file - promoters70/1014641
gtttttca

SEQ ID NO: 80347 - DNA, 8 bp, Unknown
  misc_feature (1)..( 8): Result.001 file - promoters70/1014641
gttcttct

SEQ ID NO: 80348 - DNA, 8 bp, Unknown
  misc_feature (1)..( 8): Result.001 file - promoters70/1014662
tttcttct

SEQ ID NO: 80349 - DNA, 9 bp, Unknown
  misc_feature (1)..( 9): Result.001 file - promoters70/1014662
aaaaatgaa

SEQ ID NO: 80350 - DNA, 9 bp, Unknown
  misc_feature (1)..( 9): Result.001 file - promoters70/1014662
aaaaaagaa

SEQ ID NO: 80351 - DNA, 9 bp, Unknown
  misc_feature (1)..( 9): Result.001 file - promoters70/1014662
gaaaaaggg

SEQ ID NO: 80352 - DNA, 8 bp, Unknown
  misc_feature (1)..( 8): Result.001 file - promoters70/1014662
ttttatca

SEQ ID NO: 80353 - DNA, 8 bp, Unknown
  misc_feature (1)..( 8): Result.001 file - promoters70/1014662
ttttgtca

SEQ ID NO: 80354 - DNA, 8 bp, Unknown
  misc_feature (1)..( 8): Result.001 file - promoters70/1014662
ttttgtat

SEQ ID NO: 80355 - DNA, 8 bp, Unknown
  misc_feature (1)..( 8): Result.001 file - promoters70/1014662
atatatat

SEQ ID NO: 80356 - DNA, 8 bp, Unknown
  misc_feature (1)..( 8): Result.001 file - promoters70/1014662
atatttat

SEQ ID NO: 80357 - DNA, 8 bp, Unknown
  misc_feature (1)..( 8): Result.001 file - promoters70/1014662
caatttat

SEQ ID NO: 80358 - DNA, 8 bp, Unknown
  misc_feature (1)..( 8): Result.001 file - promoters70/1014662
taatttat

SEQ ID NO: 80359 - DNA, 8 bp, Unknown
  misc_feature (1)..( 8): Result.001 file - promoters70/1014662
aatcaaaa

SEQ ID NO: 80360 - DNA, 8 bp, Unknown
  misc_feature (1)..( 8): Result.001 file - promoters70/1014662
aatcaaat

SEQ ID NO: 80361 - DNA, 9 bp, Unknown
  misc_feature (1)..( 9): Result.001 file - promoters70/1014662
gatccaaac

SEQ ID NO: 80362 - DNA, 9 bp, Unknown
  misc_feature (1)..( 9): Result.001 file - promoters70/1014662
tatcctaac

SEQ ID NO: 80363 - DNA, 11 bp, Unknown
  misc_feature (1)..( 11): Result.001 file - promoters70/1014662
ctagacacgta

SEQ ID NO: 80364 - DNA, 11 bp, Unknown
  misc_feature (1)..( 11): Result.001 file - promoters70/1014662
atcaacacgta

SEQ ID NO: 80365 - DNA, 11 bp, Unknown
  misc_feature (1)..( 11): Result.001 file - promoters70/1014662
aaagagacgaa

SEQ ID NO: 80366 - DNA, 11 bp, Unknown
  misc_feature (1)..( 11): Result.001 file - promoters70/1014662
aaaaagaatac

SEQ ID NO: 80367 - DNA, 7 bp, Unknown
  misc_feature (1)..( 7): Result.001 file - promoters70/1014662
actatac

SEQ ID NO: 80368 - DNA, 7 bp, Unknown
  misc_feature (1)..( 7): Result.001 file - promoters70/1014662
actttac

SEQ ID NO: 80369 - DNA, 7 bp, Unknown
  misc_feature (1)..( 7): Result.001 file - promoters70/1014662
tctttac

SEQ ID NO: 80370 - DNA, 8 bp, Unknown
  misc_feature (1)..( 8): Result.001 file - promoters70/1014662
atataata

SEQ ID NO: 80371 - DNA, 8 bp, Unknown
  misc_feature (1)..( 8): Result.001 file - promoters70/1014662
ttattata

SEQ ID NO: 80372 - DNA, 8 bp, Unknown
  misc_feature (1)..( 8): Result.001 file - promoters70/1014662
atataatt

SEQ ID NO: 80373 - DNA, 8 bp, Unknown
  misc_feature (1)..( 8): Result.001 file - promoters70/1014662
atataata

SEQ ID NO: 80374 - DNA, 9 bp, Unknown
  misc_feature (1)..( 9): Result.001 file - promoters70/1014662
tttgttggt

SEQ ID NO: 80375 - DNA, 9 bp, Unknown
  misc_feature (1)..( 9): Result.001 file - promoters70/1014662
tttattgat

SEQ ID NO: 80376 - DNA, 9 bp, Unknown
  misc_feature (1)..( 9): Result.001 file - promoters70/1014662
gttactgat

SEQ ID NO: 80377 - DNA, 11 bp, Unknown
  misc_feature (1)..( 11): Result.001 file - promoters70/1014662
agaaattaata

SEQ ID NO: 80378 - DNA, 11 bp, Unknown
  misc_feature (1)..( 11): Result.001 file - promoters70/1014662
taaaatcaata

SEQ ID NO: 80379 - DNA, 12 bp, Unknown
  misc_feature (1)..( 12): Result.001 file - promoters70/1014662
ataacatcactt

SEQ ID NO: 80380 - DNA, 12 bp, Unknown
  misc_feature (1)..( 12): Result.001 file - promoters70/1014662
ctatcaaaactt

SEQ ID NO: 80381 - DNA, 12 bp, Unknown
  misc_feature (1)..( 12): Result.001 file - promoters70/1014662
ctaacaaacaat

SEQ ID NO: 80382 - DNA, 12 bp, Unknown
  misc_feature (1)..( 12): Result.001 file - promoters70/1014885
ggctcaaagctt

SEQ ID NO: 80383 - DNA, 6 bp, Unknown
  misc_feature (1)..( 6): Result.001 file - promoters70/1014885
ttaaaa

SEQ ID NO: 80384 - DNA, 6 bp, Unknown
  misc_feature (1)..( 6): Result.001 file - promoters70/1014885
ttaaaa

SEQ ID NO: 80385 - DNA, 6 bp, Unknown
  misc_feature (1)..( 6): Result.001 file - promoters70/1014885
ttaaaa

SEQ ID NO: 80386 - DNA, 7 bp, Unknown
  misc_feature (1)..( 7): Result.001 file - promoters70/1014885
taaaagt

SEQ ID NO: 80387 - DNA, 7 bp, Unknown
  misc_feature (1)..( 7): Result.001 file - promoters70/1014885
aaaaagt

SEQ ID NO: 80388 - DNA, 7 bp, Unknown
  misc_feature (1)..( 7): Result.001 file - promoters70/1015030
aaaaagg

SEQ ID NO: 80389 - DNA, 10 bp, Unknown
  misc_feature (1)..( 10): Result.001 file - promoters70/1015030
ttttgagcta

SEQ ID NO: 80390 - DNA, 10 bp, Unknown
  misc_feature (1)..( 10): Result.001 file - promoters70/1015030
ttttgacttg

SEQ ID NO: 80391 - DNA, 10 bp, Unknown
  misc_feature (1)..( 10): Result.001 file - promoters70/1015030
ttttgatcta

SEQ ID NO: 80392 - DNA, 7 bp, Unknown
  misc_feature (1)..( 7): Result.001 file - promoters70/1015030
tctttag

SEQ ID NO: 80393 - DNA, 7 bp, Unknown
  misc_feature (1)..( 7): Result.001 file - promoters70/1015030
tctttag

SEQ ID NO: 80394 - DNA, 7 bp, Unknown
  misc_feature (1)..( 7): Result.001 file - promoters70/1015030
ttttgag

SEQ ID NO: 80395 - DNA, 11 bp, Unknown
  misc_feature (1)..( 11): Result.001 file - promoters70/1015030
tttatatcgtg

SEQ ID NO: 80396 - DNA, 11 bp, Unknown
  misc_feature (1)..( 11): Result.001 file - promoters70/1015030
cttatctcgtg

SEQ ID NO: 80397 - DNA, 11 bp, Unknown
  misc_feature (1)..( 11): Result.001 file - promoters70/1015214
cttttctttct

SEQ ID NO: 80398 - DNA, 8 bp, Unknown
  misc_feature (1)..( 8): Result.001 file - promoters70/1015214
aaaacaaa

SEQ ID NO: 80399 - DNA, 8 bp, Unknown
  misc_feature (1)..( 8): Result.001 file - promoters70/1015214
gaaagaaa

SEQ ID NO: 80400 - DNA, 8 bp, Unknown
  misc_feature (1)..( 8): Result.001 file - promoters70/1015214
aaaacatt

SEQ ID NO: 80401 - DNA, 8 bp, Unknown
  misc_feature (1)..( 8): Result.001 file - promoters70/1015214
gaatgaaa

SEQ ID NO: 80402 - DNA, 11 bp, Unknown
  misc_feature (1)..( 11): Result.001 file - promoters70/1015214
tatgtaaacgt

SEQ ID NO: 80403 - DNA, 11 bp, Unknown
  misc_feature (1)..( 11): Result.001 file - promoters70/1015214
tatttaaaaag

SEQ ID NO: 80404 - DNA, 11 bp, Unknown
  misc_feature (1)..( 11): Result.001 file - promoters70/1015214
tatctaagacc

SEQ ID NO: 80405 - DNA, 11 bp, Unknown
  misc_feature (1)..( 11): Result.001 file - promoters70/1015214
gcattaaaata

SEQ ID NO: 80406 - DNA, 12 bp, Unknown
  misc_feature (1)..( 12): Result.001 file - promoters70/1015214
attttagaaaga

SEQ ID NO: 80407 - DNA, 10 bp, Unknown
  misc_feature (1)..( 10): Result.001 file - promoters70/1015214
cctaaaaaat

SEQ ID NO: 80408 - DNA, 10 bp, Unknown
  misc_feature (1)..( 10): Result.001 file - promoters70/1015214
tttaaaaaga

SEQ ID NO: 80409 - DNA, 10 bp, Unknown
  misc_feature (1)..( 10): Result.001 file - promoters70/1015214
attaaaatat

SEQ ID NO: 80410 - DNA, 10 bp, Unknown
  misc_feature (1)..( 10): Result.001 file - promoters70/1015337
tttagaaaga

SEQ ID NO: 80411 - DNA, 12 bp, Unknown
  misc_feature (1)..( 12): Result.001 file - promoters70/1015337
tactaaatttta

SEQ ID NO: 80412 - DNA, 12 bp, Unknown
  misc_feature (1)..( 12): Result.001 file - promoters70/1015337
cgttgaatctta

SEQ ID NO: 80413 - DNA, 12 bp, Unknown
  misc_feature (1)..( 12): Result.001 file - promoters70/1015337
taccaaatttaa

SEQ ID NO: 80414 - DNA, 8 bp, Unknown
  misc_feature (1)..( 8): Result.001 file - promoters70/1015337
atattagt

SEQ ID NO: 80415 - DNA, 8 bp, Unknown
  misc_feature (1)..( 8): Result.001 file - promoters70/1015337
atatgagt

SEQ ID NO: 80416 - DNA, 8 bp, Unknown
  misc_feature (1)..( 8): Result.001 file - promoters70/1015337
atatgatt

SEQ ID NO: 80417 - DNA, 6 bp, Unknown
  misc_feature (1)..( 6): Result.001 file - promoters70/1015337
attttt

SEQ ID NO: 80418 - DNA, 6 bp, Unknown
  misc_feature (1)..( 6): Result.001 file - promoters70/1015337
attttt

SEQ ID NO: 80419 - DNA, 6 bp, Unknown
  misc_feature (1)..( 6): Result.001 file - promoters70/1015337
attttt

SEQ ID NO: 80420 - DNA, 10 bp, Unknown
  misc_feature (1)..( 10): Result.001 file - promoters70/1015337
attaagattt

SEQ ID NO: 80421 - DNA, 10 bp, Unknown
  misc_feature (1)..( 10): Result.001 file - promoters70/1015337
agtaatattt

SEQ ID NO: 80422 - DNA, 10 bp, Unknown
  misc_feature (1)..( 10): Result.001 file - promoters70/1015475
agtgatatga

SEQ ID NO: 80423 - DNA, 9 bp, Unknown
  misc_feature (1)..( 9): Result.001 file - promoters70/1015475
gtttccttt

SEQ ID NO: 80424 - DNA, 9 bp, Unknown
  misc_feature (1)..( 9): Result.001 file - promoters70/1015475
gttaccttt

SEQ ID NO: 80425 - DNA, 9 bp, Unknown
  misc_feature (1)..( 9): Result.001 file - promoters70/1015524
gcttcgttt

SEQ ID NO: 80426 - DNA, 11 bp, Unknown
  misc_feature (1)..( 11): Result.001 file - promoters70/1015524
aaacgtgaaag

SEQ ID NO: 80427 - DNA, 11 bp, Unknown
  misc_feature (1)..( 11): Result.001 file - promoters70/1015524
tggattgaaag

SEQ ID NO: 80428 - DNA, 11 bp, Unknown
  misc_feature (1)..( 11): Result.001 file - promoters70/1015524
aaacgtaaaac

SEQ ID NO: 80429 - DNA, 8 bp, Unknown
  misc_feature (1)..( 8): Result.001 file - promoters70/1015524
agatatac

SEQ ID NO: 80430 - DNA, 8 bp, Unknown
  misc_feature (1)..( 8): Result.001 file - promoters70/1015524
ggatttac

SEQ ID NO: 80431 - DNA, 8 bp, Unknown
  misc_feature (1)..( 8): Result.001 file - promoters70/1015524
agaaatag

SEQ ID NO: 80432 - DNA, 9 bp, Unknown
  misc_feature (1)..( 9): Result.001 file - promoters70/1015524
ttgttttcg

SEQ ID NO: 80433 - DNA, 9 bp, Unknown
  misc_feature (1)..( 9): Result.001 file - promoters70/1015524
ttgtttctc

SEQ ID NO: 80434 - DNA, 9 bp, Unknown
  misc_feature (1)..( 9): Result.001 file - promoters70/1015848
atgtttctc

SEQ ID NO: 80435 - DNA, 9 bp, Unknown
  misc_feature (1)..( 9): Result.001 file - promoters70/1015848
gtttccttt

SEQ ID NO: 80436 - DNA, 9 bp, Unknown
  misc_feature (1)..( 9): Result.001 file - promoters70/1015848
gttaccttt

SEQ ID NO: 80437 - DNA, 9 bp, Unknown
  misc_feature (1)..( 9): Result.001 file - promoters70/1016056
gcttcgttt

SEQ ID NO: 80438 - DNA, 11 bp, Unknown
  misc_feature (1)..( 11): Result.001 file - promoters70/1016056
tatacaataaa

SEQ ID NO: 80439 - DNA, 11 bp, Unknown
  misc_feature (1)..( 11): Result.001 file - promoters70/1016056
aataaaataaa

SEQ ID NO: 80440 - DNA, 11 bp, Unknown
  misc_feature (1)..( 11): Result.001 file - promoters70/1016056
aatgaaatatc

SEQ ID NO: 80441 - DNA, 11 bp, Unknown
  misc_feature (1)..( 11): Result.001 file - promoters70/1016056
aataaaatctt

SEQ ID NO: 80442 - DNA, 11 bp, Unknown
  misc_feature (1)..( 11): Result.001 file - promoters70/1016056
aataaaggggt

SEQ ID NO: 80443 - DNA, 11 bp, Unknown
  misc_feature (1)..( 11): Result.001 file - promoters70/1016176
aataaaaactt

SEQ ID NO: 80444 - DNA, 13 bp, Unknown
  misc_feature (1)..( 13): Result.001 file - promoters70/1016176
ttagttataaatc

SEQ ID NO: 80445 - DNA, 13 bp, Unknown
  misc_feature (1)..( 13): Result.001 file - promoters70/1016176
aaagttatgaatc

SEQ ID NO: 80446 - DNA, 13 bp, Unknown
  misc_feature (1)..( 13): Result.001 file - promoters70/1016176
tatgttatttatt

SEQ ID NO: 80447 - DNA, 13 bp, Unknown
  misc_feature (1)..( 13): Result.001 file - promoters70/1016176
gggaaaatgaatt

SEQ ID NO: 80448 - DNA, 13 bp, Unknown
  misc_feature (1)..( 13): Result.001 file - promoters70/1016176
aaaattagcagtc

SEQ ID NO: 80449 - DNA, 13 bp, Unknown
  misc_feature (1)..( 13): Result.001 file - promoters70/1016176
aagattataaatc

SEQ ID NO: 80450 - DNA, 13 bp, Unknown
  misc_feature (1)..( 13): Result.001 file - promoters70/1016176
tacattgtaagtg

SEQ ID NO: 80451 - DNA, 13 bp, Unknown
  misc_feature (1)..( 13): Result.001 file - promoters70/1016176
gaatttattttcc

SEQ ID NO: 80452 - DNA, 14 bp, Unknown
  misc_feature (1)..( 14): Result.001 file - promoters70/1016176
gtacataaaacaaa

SEQ ID NO: 80453 - DNA, 14 bp, Unknown
  misc_feature (1)..( 14): Result.001 file - promoters70/1016176
agctataagacagt

SEQ ID NO: 80454 - DNA, 14 bp, Unknown
  misc_feature (1)..( 14): Result.001 file - promoters70/1016176
gttactaaaagttt

SEQ ID NO: 80455 - DNA, 14 bp, Unknown
  misc_feature (1)..( 14): Result.001 file - promoters70/1016176
tttcccaaaagttt

SEQ ID NO: 80456 - DNA, 14 bp, Unknown
  misc_feature (1)..( 14): Result.001 file - promoters70/1016176
agaactaaactctg

SEQ ID NO: 80457 - DNA, 14 bp, Unknown
  misc_feature (1)..( 14): Result.001 file - promoters70/1016250
agatctaagcaact

SEQ ID NO: 80458 - DNA, 9 bp, Unknown
  misc_feature (1)..( 9): Result.001 file - promoters70/1016250
gttagattt

SEQ ID NO: 80459 - DNA, 9 bp, Unknown
  misc_feature (1)..( 9): Result.001 file - promoters70/1016250
gttaaattg

SEQ ID NO: 80460 - DNA, 9 bp, Unknown
  misc_feature (1)..( 9): Result.001 file - promoters70/1016250
ccaaaattg

SEQ ID NO: 80461 - DNA, 9 bp, Unknown
  misc_feature (1)..( 9): Result.001 file - promoters70/1016250
ttttgcata

SEQ ID NO: 80462 - DNA, 9 bp, Unknown
  misc_feature (1)..( 9): Result.001 file - promoters70/1016250
ttttacata

SEQ ID NO: 80463 - DNA, 9 bp, Unknown
  misc_feature (1)..( 9): Result.001 file - promoters70/1016250
tagtacata

SEQ ID NO: 80464 - DNA, 9 bp, Unknown
  misc_feature (1)..( 9): Result.001 file - promoters70/1016250
taattttgc

SEQ ID NO: 80465 - DNA, 9 bp, Unknown
  misc_feature (1)..( 9): Result.001 file - promoters70/1016250
taattttta

SEQ ID NO: 80466 - DNA, 9 bp, Unknown
  misc_feature (1)..( 9): Result.001 file - promoters70/1016250
tcattttta

SEQ ID NO: 80467 - DNA, 9 bp, Unknown
  misc_feature (1)..( 9): Result.001 file - promoters70/1016250
aactttttt

SEQ ID NO: 80468 - DNA, 9 bp, Unknown
  misc_feature (1)..( 9): Result.001 file - promoters70/1016250
atctttttt

SEQ ID NO: 80469 - DNA, 9 bp, Unknown
  misc_feature (1)..( 9): Result.001 file - promoters70/1016250
atctcttta

SEQ ID NO: 80470 - DNA, 11 bp, Unknown
  misc_feature (1)..( 11): Result.001 file - promoters70/1016250
aacagtaaaac

SEQ ID NO: 80471 - DNA, 11 bp, Unknown
  misc_feature (1)..( 11): Result.001 file - promoters70/1016250
aacattaaaaa

SEQ ID NO: 80472 - DNA, 12 bp, Unknown
  misc_feature (1)..( 12): Result.001 file - promoters70/1016250
gtaattagaaaa

SEQ ID NO: 80473 - DNA, 12 bp, Unknown
  misc_feature (1)..( 12): Result.001 file - promoters70/1016250
cattgcttcgta

SEQ ID NO: 80474 - DNA, 12 bp, Unknown
  misc_feature (1)..( 12): Result.001 file - promoters70/1016250
catttctttgta

SEQ ID NO: 80475 - DNA, 12 bp, Unknown
  misc_feature (1)..( 12): Result.001 file - promoters70/1016250
acttttttttta

SEQ ID NO: 80476 - DNA, 10 bp, Unknown
  misc_feature (1)..( 10): Result.001 file - promoters70/1016250
ttttgtaaat

SEQ ID NO: 80477 - DNA, 10 bp, Unknown
  misc_feature (1)..( 10): Result.001 file - promoters70/1016250
ttttataatc

SEQ ID NO: 80478 - DNA, 10 bp, Unknown
  misc_feature (1)..( 10): Result.001 file - promoters70/1016278
aaatgtaaat

SEQ ID NO: 80479 - DNA, 9 bp, Unknown
  misc_feature (1)..( 9): Result.001 file - promoters70/1016278
gggattttt

SEQ ID NO: 80480 - DNA, 9 bp, Unknown
  misc_feature (1)..( 9): Result.001 file - promoters70/1016278
gggttttta

SEQ ID NO: 80481 - DNA, 9 bp, Unknown
  misc_feature (1)..( 9): Result.001 file - promoters70/1016278
ttgattttt

SEQ ID NO: 80482 - DNA, 7 bp, Unknown
  misc_feature (1)..( 7): Result.001 file - promoters70/1016278
taattaa

SEQ ID NO: 80483 - DNA, 7 bp, Unknown
  misc_feature (1)..( 7): Result.001 file - promoters70/1016278
taattat

SEQ ID NO: 80484 - DNA, 7 bp, Unknown
  misc_feature (1)..( 7): Result.001 file - promoters70/1016418
taattat

SEQ ID NO: 80485 - DNA, 8 bp, Unknown
  misc_feature (1)..( 8): Result.001 file - promoters70/1016418
taattaat

SEQ ID NO: 80486 - DNA, 8 bp, Unknown
  misc_feature (1)..( 8): Result.001 file - promoters70/1016418
taatcaat

SEQ ID NO: 80487 - DNA, 8 bp, Unknown
  misc_feature (1)..( 8): Result.001 file - promoters70/1016418
atatcaat

SEQ ID NO: 80488 - DNA, 9 bp, Unknown
  misc_feature (1)..( 9): Result.001 file - promoters70/1016418
ttatttgga

SEQ ID NO: 80489 - DNA, 9 bp, Unknown
  misc_feature (1)..( 9): Result.001 file - promoters70/1016418
atatttgtt

SEQ ID NO: 80490 - DNA, 9 bp, Unknown
  misc_feature (1)..( 9): Result.001 file - promoters70/1016418
ttatgtgga

SEQ ID NO: 80491 - DNA, 7 bp, Unknown
  misc_feature (1)..( 7): Result.001 file - promoters70/1016418
tataaat

SEQ ID NO: 80492 - DNA, 7 bp, Unknown
  misc_feature (1)..( 7): Result.001 file - promoters70/1016418
tataaat

SEQ ID NO: 80493 - DNA, 7 bp, Unknown
  misc_feature (1)..( 7): Result.001 file - promoters70/1016418
tataaaa

SEQ ID NO: 80494 - DNA, 8 bp, Unknown
  misc_feature (1)..( 8): Result.001 file - promoters70/1016418
attgatga

SEQ ID NO: 80495 - DNA, 8 bp, Unknown
  misc_feature (1)..( 8): Result.001 file - promoters70/1016418
tttgttga

SEQ ID NO: 80496 - DNA, 8 bp, Unknown
  misc_feature (1)..( 8): Result.001 file - promoters70/1016418
gtttatgt

SEQ ID NO: 80497 - DNA, 6 bp, Unknown
  misc_feature (1)..( 6): Result.001 file - promoters70/1016418
agcaat

SEQ ID NO: 80498 - DNA, 6 bp, Unknown
  misc_feature (1)..( 6): Result.001 file - promoters70/1016418
agcaat

SEQ ID NO: 80499 - DNA, 6 bp, Unknown
  misc_feature (1)..( 6): Result.001 file - promoters70/1016468
agcaat

SEQ ID NO: 80500 - DNA, 9 bp, Unknown
  misc_feature (1)..( 9): Result.001 file - promoters70/1016468
ttgagttta

SEQ ID NO: 80501 - DNA, 9 bp, Unknown
  misc_feature (1)..( 9): Result.001 file - promoters70/1016468
ttgactttt

SEQ ID NO: 80502 - DNA, 9 bp, Unknown
  misc_feature (1)..( 9): Result.001 file - promoters70/1016468
ttgaatttt

SEQ ID NO: 80503 - DNA, 9 bp, Unknown
  misc_feature (1)..( 9): Result.001 file - promoters70/1016468
tctaatttt

SEQ ID NO: 80504 - DNA, 9 bp, Unknown
  misc_feature (1)..( 9): Result.001 file - promoters70/1016468
ttaactttg

SEQ ID NO: 80505 - DNA, 10 bp, Unknown
  misc_feature (1)..( 10): Result.001 file - promoters70/1016468
aaaaacaaac

SEQ ID NO: 80506 - DNA, 10 bp, Unknown
  misc_feature (1)..( 10): Result.001 file - promoters70/1016468
cggaacaaaa

SEQ ID NO: 80507 - DNA, 10 bp, Unknown
  misc_feature (1)..( 10): Result.001 file - promoters70/1016468
tttaaaaaaa

SEQ ID NO: 80508 - DNA, 10 bp, Unknown
  misc_feature (1)..( 10): Result.001 file - promoters70/1016468
tataagaaaa

SEQ ID NO: 80509 - DNA, 10 bp, Unknown
  misc_feature (1)..( 10): Result.001 file - promoters70/1016468
tatgagaaat

SEQ ID NO: 80510 - DNA, 8 bp, Unknown
  misc_feature (1)..( 8): Result.001 file - promoters70/1016468
aaataaaa

SEQ ID NO: 80511 - DNA, 8 bp, Unknown
  misc_feature (1)..( 8): Result.001 file - promoters70/1016468
ttataaaa

SEQ ID NO: 80512 - DNA, 8 bp, Unknown
  misc_feature (1)..( 8): Result.001 file - promoters70/1016468
aaataaag

SEQ ID NO: 80513 - DNA, 8 bp, Unknown
  misc_feature (1)..( 8): Result.001 file - promoters70/1016468
ttagaaaa

SEQ ID NO: 80514 - DNA, 8 bp, Unknown
  misc_feature (1)..( 8): Result.001 file - promoters70/1016468
aatgaaaa

SEQ ID NO: 80515 - DNA, 8 bp, Unknown
  misc_feature (1)..( 8): Result.001 file - promoters70/1016468
aatgaaat

SEQ ID NO: 80516 - DNA, 9 bp, Unknown
  misc_feature (1)..( 9): Result.001 file - promoters70/1016468
tatgagaaa

SEQ ID NO: 80517 - DNA, 9 bp, Unknown
  misc_feature (1)..( 9): Result.001 file - promoters70/1016468
tataagaaa

SEQ ID NO: 80518 - DNA, 13 bp, Unknown
  misc_feature (1)..( 13): Result.001 file - promoters70/1016468
atgaaaaacaaac

SEQ ID NO: 80519 - DNA, 13 bp, Unknown
  misc_feature (1)..( 13): Result.001 file - promoters70/1016468
aagaaaaaatagt

SEQ ID NO: 80520 - DNA, 13 bp, Unknown
  misc_feature (1)..( 13): Result.001 file - promoters70/1016468
atgagaaatcata

SEQ ID NO: 80521 - DNA, 14 bp, Unknown
  misc_feature (1)..( 14): Result.001 file - promoters70/1016468
cggaacaaaaccgt

SEQ ID NO: 80522 - DNA, 14 bp, Unknown
  misc_feature (1)..( 14): Result.001 file - promoters70/1016468
tataagaaaatata

SEQ ID NO: 80523 - DNA, 14 bp, Unknown
  misc_feature (1)..( 14): Result.001 file - promoters70/1016468
atattattagtagg

SEQ ID NO: 80524 - DNA, 14 bp, Unknown
  misc_feature (1)..( 14): Result.001 file - promoters70/1016468
atataattattttg

SEQ ID NO: 80525 - DNA, 14 bp, Unknown
  misc_feature (1)..( 14): Result.001 file - promoters70/1016468
ccttaattaccgat

SEQ ID NO: 80526 - DNA, 14 bp, Unknown
  misc_feature (1)..( 14): Result.001 file - promoters70/1016468
ttttaatgattttg

SEQ ID NO: 80527 - DNA, 10 bp, Unknown
  misc_feature (1)..( 10): Result.001 file - promoters70/1016468
attaaccttg

SEQ ID NO: 80528 - DNA, 10 bp, Unknown
  misc_feature (1)..( 10): Result.001 file - promoters70/1016468
gttaactttg

SEQ ID NO: 80529 - DNA, 10 bp, Unknown
  misc_feature (1)..( 10): Result.001 file - promoters70/1016468
gttaattttt

SEQ ID NO: 80530 - DNA, 10 bp, Unknown
  misc_feature (1)..( 10): Result.001 file - promoters70/1016468
tctaattttc

SEQ ID NO: 80531 - DNA, 10 bp, Unknown
  misc_feature (1)..( 10): Result.001 file - promoters70/1016468
attaacttat

SEQ ID NO: 80532 - DNA, 10 bp, Unknown
  misc_feature (1)..( 10): Result.001 file - promoters70/1016468
gttaattttt

SEQ ID NO: 80533 - DNA, 10 bp, Unknown
  misc_feature (1)..( 10): Result.001 file - promoters70/1016468
tctaattttc

SEQ ID NO: 80534 - DNA, 10 bp, Unknown
  misc_feature (1)..( 10): Result.001 file - promoters70/1016468
ttgaattttt

SEQ ID NO: 80535 - DNA, 10 bp, Unknown
  misc_feature (1)..( 10): Result.001 file - promoters70/1016771
gttaactttg

SEQ ID NO: 80536 - DNA, 11 bp, Unknown
  misc_feature (1)..( 11): Result.001 file - promoters70/1016771
gtaatcaatcc

SEQ ID NO: 80537 - DNA, 11 bp, Unknown
  misc_feature (1)..( 11): Result.001 file - promoters70/1016771
aaaatgaattc

SEQ ID NO: 80538 - DNA, 11 bp, Unknown
  misc_feature (1)..( 11): Result.001 file - promoters70/1016771
tgcatcaatgc

SEQ ID NO: 80539 - DNA, 11 bp, Unknown
  misc_feature (1)..( 11): Result.001 file - promoters70/1016771
aaaatgcatta

SEQ ID NO: 80540 - DNA, 11 bp, Unknown
  misc_feature (1)..( 11): Result.001 file - promoters70/1016771
cgtatgacttc

SEQ ID NO: 80541 - DNA, 11 bp, Unknown
  misc_feature (1)..( 11): Result.001 file - promoters70/1016771
gccattaatgt

SEQ ID NO: 80542 - DNA, 11 bp, Unknown
  misc_feature (1)..( 11): Result.001 file - promoters70/1016771
aaaatggtatt

SEQ ID NO: 80543 - DNA, 11 bp, Unknown
  misc_feature (1)..( 11): Result.001 file - promoters70/1016771
cttaaggatat

SEQ ID NO: 80544 - DNA, 11 bp, Unknown
  misc_feature (1)..( 11): Result.001 file - promoters70/1016771
tttaaagattt

SEQ ID NO: 80545 - DNA, 11 bp, Unknown
  misc_feature (1)..( 11): Result.001 file - promoters70/1016771
gaaaaggataa

SEQ ID NO: 80546 - DNA, 11 bp, Unknown
  misc_feature (1)..( 11): Result.001 file - promoters70/1016771
aacaaaaatta

SEQ ID NO: 80547 - DNA, 11 bp, Unknown
  misc_feature (1)..( 11): Result.001 file - promoters70/1016771
tagaaaaatta

SEQ ID NO: 80548 - DNA, 11 bp, Unknown
  misc_feature (1)..( 11): Result.001 file - promoters70/1016771
tttcaagccat

SEQ ID NO: 80549 - DNA, 11 bp, Unknown
  misc_feature (1)..( 11): Result.001 file - promoters70/1016771
atgaaagggat

SEQ ID NO: 80550 - DNA, 13 bp, Unknown
  misc_feature (1)..( 13): Result.001 file - promoters70/1016771
tgagagcatcaac

SEQ ID NO: 80551 - DNA, 13 bp, Unknown
  misc_feature (1)..( 13): Result.001 file - promoters70/1016771
aaaatgcattaac

SEQ ID NO: 80552 - DNA, 13 bp, Unknown
  misc_feature (1)..( 13): Result.001 file - promoters70/1016771
aaaatgaattctt

SEQ ID NO: 80553 - DNA, 13 bp, Unknown
  misc_feature (1)..( 13): Result.001 file - promoters70/1016771
cgtatgacttcaa

SEQ ID NO: 80554 - DNA, 13 bp, Unknown
  misc_feature (1)..( 13): Result.001 file - promoters70/1016771
aaaatggtattac

SEQ ID NO: 80555 - DNA, 13 bp, Unknown
  misc_feature (1)..( 13): Result.001 file - promoters70/1016886
caatgccattaat

SEQ ID NO: 80556 - DNA, 15 bp, Unknown
  misc_feature (1)..( 15): Result.001 file - promoters70/1016886
ttcatttttaaaaac

SEQ ID NO: 80557 - DNA, 15 bp, Unknown
  misc_feature (1)..( 15): Result.001 file - promoters70/1016886
tctagatctaaaaac

SEQ ID NO: 80558 - DNA, 15 bp, Unknown
  misc_feature (1)..( 15): Result.001 file - promoters70/1017358
ttcacttttaaaaac

SEQ ID NO: 80559 - DNA, 13 bp, Unknown
  misc_feature (1)..( 13): Result.001 file - promoters70/1017358
aaaaagaagagcg

SEQ ID NO: 80560 - DNA, 13 bp, Unknown
  misc_feature (1)..( 13): Result.001 file - promoters70/1017358
agaaagaaacaag

SEQ ID NO: 80561 - DNA, 14 bp, Unknown
  misc_feature (1)..( 14): Result.001 file - promoters70/1017358
gaaatagataacgt

SEQ ID NO: 80562 - DNA, 14 bp, Unknown
  misc_feature (1)..( 14): Result.001 file - promoters70/1017358
ataccagaaatgaa

SEQ ID NO: 80563 - DNA, 14 bp, Unknown
  misc_feature (1)..( 14): Result.001 file - promoters70/1017358
tcaaaagagtttag

SEQ ID NO: 80564 - DNA, 14 bp, Unknown
  misc_feature (1)..( 14): Result.001 file - promoters70/1017358
aaaatagttaaaaa

SEQ ID NO: 80565 - DNA, 11 bp, Unknown
  misc_feature (1)..( 11): Result.001 file - promoters70/1017358
acatatataaa

SEQ ID NO: 80566 - DNA, 11 bp, Unknown
  misc_feature (1)..( 11): Result.001 file - promoters70/1017358
gcctatatata

SEQ ID NO: 80567 - DNA, 11 bp, Unknown
  misc_feature (1)..( 11): Result.001 file - promoters70/1017358
tgagatataat

SEQ ID NO: 80568 - DNA, 11 bp, Unknown
  misc_feature (1)..( 11): Result.001 file - promoters70/1017358
atctatatata

SEQ ID NO: 80569 - DNA, 11 bp, Unknown
  misc_feature (1)..( 11): Result.001 file - promoters70/1017358
ccttataaata

SEQ ID NO: 80570 - DNA, 11 bp, Unknown
  misc_feature (1)..( 11): Result.001 file - promoters70/1017358
ccttaaaaacc

SEQ ID NO: 80571 - DNA, 13 bp, Unknown
  misc_feature (1)..( 13): Result.001 file - promoters70/1017358
ccaatgatattcg

SEQ ID NO: 80572 - DNA, 13 bp, Unknown
  misc_feature (1)..( 13): Result.001 file - promoters70/1017358
ttaatgaaattca

SEQ ID NO: 80573 - DNA, 13 bp, Unknown
  misc_feature (1)..( 13): Result.001 file - promoters70/1017358
ccattgatgggct

SEQ ID NO: 80574 - DNA, 13 bp, Unknown
  misc_feature (1)..( 13): Result.001 file - promoters70/1017358
cgtttgatatata

SEQ ID NO: 80575 - DNA, 13 bp, Unknown
  misc_feature (1)..( 13): Result.001 file - promoters70/1017358
tgcatcaaactca

SEQ ID NO: 80576 - DNA, 13 bp, Unknown
  misc_feature (1)..( 13): Result.001 file - promoters70/1017434
tatttgctatcta

SEQ ID NO: 80577 - DNA, 8 bp, Unknown
  misc_feature (1)..( 8): Result.001 file - promoters70/1017434
ttgaattc

SEQ ID NO: 80578 - DNA, 8 bp, Unknown
  misc_feature (1)..( 8): Result.001 file - promoters70/1017434
ctgagttc

SEQ ID NO: 80579 - DNA, 8 bp, Unknown
  misc_feature (1)..( 8): Result.001 file - promoters70/1017434
ttgcattt

SEQ ID NO: 80580 - DNA, 8 bp, Unknown
  misc_feature (1)..( 8): Result.001 file - promoters70/1017434
ttgagttg

SEQ ID NO: 80581 - DNA, 10 bp, Unknown
  misc_feature (1)..( 10): Result.001 file - promoters70/1017434
tttctttcat

SEQ ID NO: 80582 - DNA, 10 bp, Unknown
  misc_feature (1)..( 10): Result.001 file - promoters70/1017434
tttttttttt

SEQ ID NO: 80583 - DNA, 10 bp, Unknown
  misc_feature (1)..( 10): Result.001 file - promoters70/1017434
tttattttaa

SEQ ID NO: 80584 - DNA, 10 bp, Unknown
  misc_feature (1)..( 10): Result.001 file - promoters70/1017434
tctattttaa

SEQ ID NO: 80585 - DNA, 9 bp, Unknown
  misc_feature (1)..( 9): Result.001 file - promoters70/1017434
tcttgattc

SEQ ID NO: 80586 - DNA, 9 bp, Unknown
  misc_feature (1)..( 9): Result.001 file - promoters70/1017434
aattgattt

SEQ ID NO: 80587 - DNA, 9 bp, Unknown
  misc_feature (1)..( 9): Result.001 file - promoters70/1017434
aattgatga

SEQ ID NO: 80588 - DNA, 9 bp, Unknown
  misc_feature (1)..( 9): Result.001 file - promoters70/1017618
gattgattt

SEQ ID NO: 80589 - DNA, 8 bp, Unknown
  misc_feature (1)..( 8): Result.001 file - promoters70/1017618
ttaagaag

SEQ ID NO: 80590 - DNA, 8 bp, Unknown
  misc_feature (1)..( 8): Result.001 file - promoters70/1017618
ttatgaaa

SEQ ID NO: 80591 - DNA, 9 bp, Unknown
  misc_feature (1)..( 9): Result.001 file - promoters70/1017770
ccatgcaaa

SEQ ID NO: 80592 - DNA, 7 bp, Unknown
  misc_feature (1)..( 7): Result.001 file - promoters70/1017770
ctttgaa

SEQ ID NO: 80593 - DNA, 7 bp, Unknown
  misc_feature (1)..( 7): Result.001 file - promoters70/1017770
gtttgaa

SEQ ID NO: 80594 - DNA, 7 bp, Unknown
  misc_feature (1)..( 7): Result.001 file - promoters70/1017770
gttagaa

SEQ ID NO: 80595 - DNA, 7 bp, Unknown
  misc_feature (1)..( 7): Result.001 file - promoters70/1017770
aatattg

SEQ ID NO: 80596 - DNA, 7 bp, Unknown
  misc_feature (1)..( 7): Result.001 file - promoters70/1017770
aatgttg

SEQ ID NO: 80597 - DNA, 7 bp, Unknown
  misc_feature (1)..( 7): Result.001 file - promoters70/1017770
aatattg

SEQ ID NO: 80598 - DNA, 7 bp, Unknown
  misc_feature (1)..( 7): Result.001 file - promoters70/1017770
gattatg

SEQ ID NO: 80599 - DNA, 7 bp, Unknown
  misc_feature (1)..( 7): Result.001 file - promoters70/1017770
tattatg

SEQ ID NO: 80600 - DNA, 7 bp, Unknown
  misc_feature (1)..( 7): Result.001 file - promoters70/1018052
gattatt

SEQ ID NO: 80601 - DNA, 7 bp, Unknown
  misc_feature (1)..( 7): Result.001 file - promoters70/1018052
tcagttt

SEQ ID NO: 80602 - DNA, 7 bp, Unknown
  misc_feature (1)..( 7): Result.001 file - promoters70/1018052
tcagttg

SEQ ID NO: 80603 - DNA, 7 bp, Unknown
  misc_feature (1)..( 7): Result.001 file - promoters70/1018052
tcaattt

SEQ ID NO: 80604 - DNA, 9 bp, Unknown
  misc_feature (1)..( 9): Result.001 file - promoters70/1018052
attccacat

SEQ ID NO: 80605 - DNA, 9 bp, Unknown
  misc_feature (1)..( 9): Result.001 file - promoters70/1018052
cttcaacat

SEQ ID NO: 80606 - DNA, 9 bp, Unknown
  misc_feature (1)..( 9): Result.001 file - promoters70/1018052
cttcaaaat

SEQ ID NO: 80607 - DNA, 8 bp, Unknown
  misc_feature (1)..( 8): Result.001 file - promoters70/1018052
cttgttgt

SEQ ID NO: 80608 - DNA, 8 bp, Unknown
  misc_feature (1)..( 8): Result.001 file - promoters70/1018052
attgatgt

SEQ ID NO: 80609 - DNA, 8 bp, Unknown
  misc_feature (1)..( 8): Result.001 file - promoters70/1018159
gttttttt

SEQ ID NO: 80610 - DNA, 9 bp, Unknown
  misc_feature (1)..( 9): Result.001 file - promoters70/1018159
gttaaaaaa

SEQ ID NO: 80611 - DNA, 9 bp, Unknown
  misc_feature (1)..( 9): Result.001 file - promoters70/1018159
agtaagaaa

SEQ ID NO: 80612 - DNA, 9 bp, Unknown
  misc_feature (1)..( 9): Result.001 file - promoters70/1018190
agtaagaat

SEQ ID NO: 80613 - DNA, 7 bp, Unknown
  misc_feature (1)..( 7): Result.001 file - promoters70/1018190
atttgtt

SEQ ID NO: 80614 - DNA, 7 bp, Unknown
  misc_feature (1)..( 7): Result.001 file - promoters70/1018190
atttgtt

SEQ ID NO: 80615 - DNA, 7 bp, Unknown
  misc_feature (1)..( 7): Result.001 file - promoters70/1018190
atttgta

SEQ ID NO: 80616 - DNA, 7 bp, Unknown
  misc_feature (1)..( 7): Result.001 file - promoters70/1018190
ttgattg

SEQ ID NO: 80617 - DNA, 7 bp, Unknown
  misc_feature (1)..( 7): Result.001 file - promoters70/1018190
ttgattg

SEQ ID NO: 80618 - DNA, 7 bp, Unknown
  misc_feature (1)..( 7): Result.001 file - promoters70/1018190
ttgattt

SEQ ID NO: 80619 - DNA, 9 bp, Unknown
  misc_feature (1)..( 9): Result.001 file - promoters70/1018190
attttttta

SEQ ID NO: 80620 - DNA, 9 bp, Unknown
  misc_feature (1)..( 9): Result.001 file - promoters70/1018190
cttttttta

SEQ ID NO: 80621 - DNA, 9 bp, Unknown
  misc_feature (1)..( 9): Result.001 file - promoters70/1018276
ctttgtttg

SEQ ID NO: 80622 - DNA, 9 bp, Unknown
  misc_feature (1)..( 9): Result.001 file - promoters70/1018276
acttcatat

SEQ ID NO: 80623 - DNA, 9 bp, Unknown
  misc_feature (1)..( 9): Result.001 file - promoters70/1018276
tcttcttat

SEQ ID NO: 80624 - DNA, 9 bp, Unknown
  misc_feature (1)..( 9): Result.001 file - promoters70/1018391
tcttcttca

SEQ ID NO: 80625 - DNA, 13 bp, Unknown
  misc_feature (1)..( 13): Result.001 file - promoters70/1018391
ctagtttattgtt

SEQ ID NO: 80626 - DNA, 13 bp, Unknown
  misc_feature (1)..( 13): Result.001 file - promoters70/1018391
ctagtttagaccc

SEQ ID NO: 80627 - DNA, 13 bp, Unknown
  misc_feature (1)..( 13): Result.001 file - promoters70/1018391
ggggtttgttgtt

SEQ ID NO: 80628 - DNA, 8 bp, Unknown
  misc_feature (1)..( 8): Result.001 file - promoters70/1018391
agagcata

SEQ ID NO: 80629 - DNA, 8 bp, Unknown
  misc_feature (1)..( 8): Result.001 file - promoters70/1018391
agatcatg

SEQ ID NO: 80630 - DNA, 8 bp, Unknown
  misc_feature (1)..( 8): Result.001 file - promoters70/1018523
cgattatg

SEQ ID NO: 80631 - DNA, 10 bp, Unknown
  misc_feature (1)..( 10): Result.001 file - promoters70/1018523
cccaaaaata

SEQ ID NO: 80632 - DNA, 10 bp, Unknown
  misc_feature (1)..( 10): Result.001 file - promoters70/1018523
tacaaaaaaa

SEQ ID NO: 80633 - DNA, 10 bp, Unknown
  misc_feature (1)..( 10): Result.001 file - promoters70/1018523
tcctaaaatc

SEQ ID NO: 80634 - DNA, 10 bp, Unknown
  misc_feature (1)..( 10): Result.001 file - promoters70/1018523
aataaacata

SEQ ID NO: 80635 - DNA, 10 bp, Unknown
  misc_feature (1)..( 10): Result.001 file - promoters70/1018523
aacaaaaaag

SEQ ID NO: 80636 - DNA, 12 bp, Unknown
  misc_feature (1)..( 12): Result.001 file - promoters70/1018523
aaacagtaaaac

SEQ ID NO: 80637 - DNA, 12 bp, Unknown
  misc_feature (1)..( 12): Result.001 file - promoters70/1018523
aaacaataaaat

SEQ ID NO: 80638 - DNA, 12 bp, Unknown
  misc_feature (1)..( 12): Result.001 file - promoters70/1018523
agataatatttc

SEQ ID NO: 80639 - DNA, 12 bp, Unknown
  misc_feature (1)..( 12): Result.001 file - promoters70/1018523
acattataaaat

SEQ ID NO: 80640 - DNA, 12 bp, Unknown
  misc_feature (1)..( 12): Result.001 file - promoters70/1018523
cgtcaaaaaact

SEQ ID NO: 80641 - DNA, 10 bp, Unknown
  misc_feature (1)..( 10): Result.001 file - promoters70/1018523
attaataaag

SEQ ID NO: 80642 - DNA, 10 bp, Unknown
  misc_feature (1)..( 10): Result.001 file - promoters70/1018523
attaatattt

SEQ ID NO: 80643 - DNA, 10 bp, Unknown
  misc_feature (1)..( 10): Result.001 file - promoters70/1018523
gataatattt

SEQ ID NO: 80644 - DNA, 10 bp, Unknown
  misc_feature (1)..( 10): Result.001 file - promoters70/1018523
tttattatag

SEQ ID NO: 80645 - DNA, 11 bp, Unknown
  misc_feature (1)..( 11): Result.001 file - promoters70/1018523
agtatatcaca

SEQ ID NO: 80646 - DNA, 11 bp, Unknown
  misc_feature (1)..( 11): Result.001 file - promoters70/1018523
ttttattttat

SEQ ID NO: 80647 - DNA, 14 bp, Unknown
  misc_feature (1)..( 14): Result.001 file - promoters70/1018523
aaaaaaaagacaaa

SEQ ID NO: 80648 - DNA, 14 bp, Unknown
  misc_feature (1)..( 14): Result.001 file - promoters70/1018523
aaaaaatattatta

SEQ ID NO: 80649 - DNA, 14 bp, Unknown
  misc_feature (1)..( 14): Result.001 file - promoters70/1018523
aaaaagaagaaaaa

SEQ ID NO: 80650 - DNA, 14 bp, Unknown
  misc_feature (1)..( 14): Result.001 file - promoters70/1018523
aaacaaatgtttgt

SEQ ID NO: 80651 - DNA, 14 bp, Unknown
  misc_feature (1)..( 14): Result.001 file - promoters70/1018523
taactaatttctta

SEQ ID NO: 80652 - DNA, 7 bp, Unknown
  misc_feature (1)..( 7): Result.001 file - promoters70/1018523
taagatt

SEQ ID NO: 80653 - DNA, 7 bp, Unknown
  misc_feature (1)..( 7): Result.001 file - promoters70/1018523
taaaatt

SEQ ID NO: 80654 - DNA, 7 bp, Unknown
  misc_feature (1)..( 7): Result.001 file - promoters70/1018523
taagatc

SEQ ID NO: 80655 - DNA, 7 bp, Unknown
  misc_feature (1)..( 7): Result.001 file - promoters70/1018523
aaaaatt

SEQ ID NO: 80656 - DNA, 8 bp, Unknown
  misc_feature (1)..( 8): Result.001 file - promoters70/1018523
taacaatt

SEQ ID NO: 80657 - DNA, 8 bp, Unknown
  misc_feature (1)..( 8): Result.001 file - promoters70/1018523
taaaaatc

SEQ ID NO: 80658 - DNA, 11 bp, Unknown
  misc_feature (1)..( 11): Result.001 file - promoters70/1018523
gaaaaaaaaga

SEQ ID NO: 80659 - DNA, 11 bp, Unknown
  misc_feature (1)..( 11): Result.001 file - promoters70/1018523
agttaaaaagt

SEQ ID NO: 80660 - DNA, 11 bp, Unknown
  misc_feature (1)..( 11): Result.001 file - promoters70/1018523
agttaaaaaat

SEQ ID NO: 80661 - DNA, 11 bp, Unknown
  misc_feature (1)..( 11): Result.001 file - promoters70/1018523
agttaatatat

SEQ ID NO: 80662 - DNA, 11 bp, Unknown
  misc_feature (1)..( 11): Result.001 file - promoters70/1018523
atttaaaatcg

SEQ ID NO: 80663 - DNA, 11 bp, Unknown
  misc_feature (1)..( 11): Result.001 file - promoters70/1018523
tgttattatat

SEQ ID NO: 80664 - DNA, 14 bp, Unknown
  misc_feature (1)..( 14): Result.001 file - promoters70/1018523
taaataaatttttg

SEQ ID NO: 80665 - DNA, 14 bp, Unknown
  misc_feature (1)..( 14): Result.001 file - promoters70/1018523
caaacaaatgtttg

SEQ ID NO: 80666 - DNA, 14 bp, Unknown
  misc_feature (1)..( 14): Result.001 file - promoters70/1018523
taaaaaaagaagaa

SEQ ID NO: 80667 - DNA, 14 bp, Unknown
  misc_feature (1)..( 14): Result.001 file - promoters70/1018523
taactaatttctta

SEQ ID NO: 80668 - DNA, 15 bp, Unknown
  misc_feature (1)..( 15): Result.001 file - promoters70/1018523
taatataactcttgg

SEQ ID NO: 80669 - DNA, 13 bp, Unknown
  misc_feature (1)..( 13): Result.001 file - promoters70/1018523
aaaaatattatta

SEQ ID NO: 80670 - DNA, 13 bp, Unknown
  misc_feature (1)..( 13): Result.001 file - promoters70/1018523
tttgttattatat

SEQ ID NO: 80671 - DNA, 13 bp, Unknown
  misc_feature (1)..( 13): Result.001 file - promoters70/1018523
agtgatataatta

SEQ ID NO: 80672 - DNA, 13 bp, Unknown
  misc_feature (1)..( 13): Result.001 file - promoters70/1018523
gttaatatatatt

SEQ ID NO: 80673 - DNA, 13 bp, Unknown
  misc_feature (1)..( 13): Result.001 file - promoters70/1018529
tggattatcattt

SEQ ID NO: 80674 - DNA, 12 bp, Unknown
  misc_feature (1)..( 12): Result.001 file - promoters70/1018529
tcagaattaata

SEQ ID NO: 80675 - DNA, 12 bp, Unknown
  misc_feature (1)..( 12): Result.001 file - promoters70/1018529
tcataattaata

SEQ ID NO: 80676 - DNA, 12 bp, Unknown
  misc_feature (1)..( 12): Result.001 file - promoters70/1018529
acatgatttgaa

SEQ ID NO: 80677 - DNA, 7 bp, Unknown
  misc_feature (1)..( 7): Result.001 file - promoters70/1018529
aattaaa

SEQ ID NO: 80678 - DNA, 7 bp, Unknown
  misc_feature (1)..( 7): Result.001 file - promoters70/1018529
aataaaa

SEQ ID NO: 80679 - DNA, 7 bp, Unknown
  misc_feature (1)..( 7): Result.001 file - promoters70/1018536
aataaac

SEQ ID NO: 80680 - DNA, 11 bp, Unknown
  misc_feature (1)..( 11): Result.001 file - promoters70/1018536
tagagaaattc

SEQ ID NO: 80681 - DNA, 11 bp, Unknown
  misc_feature (1)..( 11): Result.001 file - promoters70/1018536
gtaagaaatcc

SEQ ID NO: 80682 - DNA, 11 bp, Unknown
  misc_feature (1)..( 11): Result.001 file - promoters70/1018536
tttagaaaaat

SEQ ID NO: 80683 - DNA, 8 bp, Unknown
  misc_feature (1)..( 8): Result.001 file - promoters70/1018536
attagttc

SEQ ID NO: 80684 - DNA, 8 bp, Unknown
  misc_feature (1)..( 8): Result.001 file - promoters70/1018536
atttgtta

SEQ ID NO: 80685 - DNA, 8 bp, Unknown
  misc_feature (1)..( 8): Result.001 file - promoters70/1018536
aattgtta

SEQ ID NO: 80686 - DNA, 8 bp, Unknown
  misc_feature (1)..( 8): Result.001 file - promoters70/1018536
ttttcaat

SEQ ID NO: 80687 - DNA, 8 bp, Unknown
  misc_feature (1)..( 8): Result.001 file - promoters70/1018536
attttaat

SEQ ID NO: 80688 - DNA, 8 bp, Unknown
  misc_feature (1)..( 8): Result.001 file - promoters70/1018536
attctaac

SEQ ID NO: 80689 - DNA, 8 bp, Unknown
  misc_feature (1)..( 8): Result.001 file - promoters70/1018536
cttttaaa

SEQ ID NO: 80690 - DNA, 13 bp, Unknown
  misc_feature (1)..( 13): Result.001 file - promoters70/1018536
ttttgaagaattt

SEQ ID NO: 80691 - DNA, 13 bp, Unknown
  misc_feature (1)..( 13): Result.001 file - promoters70/1018536
ttttgatgaatgt

SEQ ID NO: 80692 - DNA, 13 bp, Unknown
  misc_feature (1)..( 13): Result.001 file - promoters70/1018536
atttgctgaataa

SEQ ID NO: 80693 - DNA, 13 bp, Unknown
  misc_feature (1)..( 13): Result.001 file - promoters70/1018536
cccttgtgaatgt

SEQ ID NO: 80694 - DNA, 11 bp, Unknown
  misc_feature (1)..( 11): Result.001 file - promoters70/1018536
atttccataaa

SEQ ID NO: 80695 - DNA, 11 bp, Unknown
  misc_feature (1)..( 11): Result.001 file - promoters70/1018536
attttcataaa

SEQ ID NO: 80696 - DNA, 11 bp, Unknown
  misc_feature (1)..( 11): Result.001 file - promoters70/1018536
aatttcatcct

SEQ ID NO: 80697 - DNA, 17 bp, Unknown
  misc_feature (1)..( 17): Result.001 file - promoters70/1018536
aaaatgttagataggaa

SEQ ID NO: 80698 - DNA, 17 bp, Unknown
  misc_feature (1)..( 17): Result.001 file - promoters70/1018536
taaattttaaaattatt

SEQ ID NO: 80699 - DNA, 17 bp, Unknown
  misc_feature (1)..( 17): Result.001 file - promoters70/1018536
taaattttgaaataatt

SEQ ID NO: 80700 - DNA, 17 bp, Unknown
  misc_feature (1)..( 17): Result.001 file - promoters70/1018536
taattgttaatcttttg

SEQ ID NO: 80701 - DNA, 13 bp, Unknown
  misc_feature (1)..( 13): Result.001 file - promoters70/1018536
tcatcgaacagca

SEQ ID NO: 80702 - DNA, 13 bp, Unknown
  misc_feature (1)..( 13): Result.001 file - promoters70/1018536
taatccaacggca

SEQ ID NO: 80703 - DNA, 13 bp, Unknown
  misc_feature (1)..( 13): Result.001 file - promoters70/1018536
taatccaacggac

SEQ ID NO: 80704 - DNA, 8 bp, Unknown
  misc_feature (1)..( 8): Result.001 file - promoters70/1018536
tatataaa

SEQ ID NO: 80705 - DNA, 8 bp, Unknown
  misc_feature (1)..( 8): Result.001 file - promoters70/1018536
tatataat

SEQ ID NO: 80706 - DNA, 8 bp, Unknown
  misc_feature (1)..( 8): Result.001 file - promoters70/1018536
cctataaa

SEQ ID NO: 80707 - DNA, 10 bp, Unknown
  misc_feature (1)..( 10): Result.001 file - promoters70/1018536
tataaacaaa

SEQ ID NO: 80708 - DNA, 10 bp, Unknown
  misc_feature (1)..( 10): Result.001 file - promoters70/1018536
aataaccaaa

SEQ ID NO: 80709 - DNA, 10 bp, Unknown
  misc_feature (1)..( 10): Result.001 file - promoters70/1018536
tataaatatc

SEQ ID NO: 80710 - DNA, 8 bp, Unknown
  misc_feature (1)..( 8): Result.001 file - promoters70/1018536
aaattcaa

SEQ ID NO: 80711 - DNA, 8 bp, Unknown
  misc_feature (1)..( 8): Result.001 file - promoters70/1018536
aaattctc

SEQ ID NO: 80712 - DNA, 8 bp, Unknown
  misc_feature (1)..( 8): Result.001 file - promoters70/1018536
aaatcctc

SEQ ID NO: 80713 - DNA, 11 bp, Unknown
  misc_feature (1)..( 11): Result.001 file - promoters70/1018536
cttataattat

SEQ ID NO: 80714 - DNA, 11 bp, Unknown
  misc_feature (1)..( 11): Result.001 file - promoters70/1018536
tttataagtat

SEQ ID NO: 80715 - DNA, 11 bp, Unknown
  misc_feature (1)..( 11): Result.001 file - promoters70/1018536
tttgtaacttc

SEQ ID NO: 80716 - DNA, 11 bp, Unknown
  misc_feature (1)..( 11): Result.001 file - promoters70/1018536
tttaaaagtaa

SEQ ID NO: 80717 - DNA, 8 bp, Unknown
  misc_feature (1)..( 8): Result.001 file - promoters70/1018536
gtaatgta

SEQ ID NO: 80718 - DNA, 8 bp, Unknown
  misc_feature (1)..( 8): Result.001 file - promoters70/1018536
tgaatgta

SEQ ID NO: 80719 - DNA, 8 bp, Unknown
  misc_feature (1)..( 8): Result.001 file - promoters70/1018536
tgaatgtc

SEQ ID NO: 80720 - DNA, 10 bp, Unknown
  misc_feature (1)..( 10): Result.001 file - promoters70/1018536
atttaaattg

SEQ ID NO: 80721 - DNA, 10 bp, Unknown
  misc_feature (1)..( 10): Result.001 file - promoters70/1018536
atttaaatca

SEQ ID NO: 80722 - DNA, 10 bp, Unknown
  misc_feature (1)..( 10): Result.001 file - promoters70/1018755
gtgtaagttg

SEQ ID NO: 80723 - DNA, 11 bp, Unknown
  misc_feature (1)..( 11): Result.001 file - promoters70/1018755
actacacatag

SEQ ID NO: 80724 - DNA, 11 bp, Unknown
  misc_feature (1)..( 11): Result.001 file - promoters70/1018755
gctaaacaaaa

SEQ ID NO: 80725 - DNA, 11 bp, Unknown
  misc_feature (1)..( 11): Result.001 file - promoters70/1018755
aacaaaccaaa

SEQ ID NO: 80726 - DNA, 11 bp, Unknown
  misc_feature (1)..( 11): Result.001 file - promoters70/1018755
agaaaacaatg

SEQ ID NO: 80727 - DNA, 11 bp, Unknown
  misc_feature (1)..( 11): Result.001 file - promoters70/1018755
gcttaacactc

SEQ ID NO: 80728 - DNA, 11 bp, Unknown
  misc_feature (1)..( 11): Result.001 file - promoters70/1018755
cattaacaatc

SEQ ID NO: 80729 - DNA, 12 bp, Unknown
  misc_feature (1)..( 12): Result.001 file - promoters70/1018755
acattcacgaaa

SEQ ID NO: 80730 - DNA, 12 bp, Unknown
  misc_feature (1)..( 12): Result.001 file - promoters70/1018755
atattctcgaat

SEQ ID NO: 80731 - DNA, 12 bp, Unknown
  misc_feature (1)..( 12): Result.001 file - promoters70/1018755
acatagacgaaa

SEQ ID NO: 80732 - DNA, 12 bp, Unknown
  misc_feature (1)..( 12): Result.001 file - promoters70/1018755
acaatcagtatc

SEQ ID NO: 80733 - DNA, 12 bp, Unknown
  misc_feature (1)..( 12): Result.001 file - promoters70/1018755
cgaatcagctaa

SEQ ID NO: 80734 - DNA, 12 bp, Unknown
  misc_feature (1)..( 12): Result.001 file - promoters70/1018755
cgaatcaatctc

SEQ ID NO: 80735 - DNA, 12 bp, Unknown
  misc_feature (1)..( 12): Result.001 file - promoters70/1018770
ttattctcaagg

SEQ ID NO: 80736 - DNA, 9 bp, Unknown
  misc_feature (1)..( 9): Result.001 file - promoters70/1018770
gaaaaaaag

SEQ ID NO: 80737 - DNA, 9 bp, Unknown
  misc_feature (1)..( 9): Result.001 file - promoters70/1018770
caaacaaat

SEQ ID NO: 80738 - DNA, 9 bp, Unknown
  misc_feature (1)..( 9): Result.001 file - promoters70/1018770
caaagaaag

SEQ ID NO: 80739 - DNA, 9 bp, Unknown
  misc_feature (1)..( 9): Result.001 file - promoters70/1018770
caaaaaaaa

SEQ ID NO: 80740 - DNA, 9 bp, Unknown
  misc_feature (1)..( 9): Result.001 file - promoters70/1018770
caaacacaa

SEQ ID NO: 80741 - DNA, 9 bp, Unknown
  misc_feature (1)..( 9): Result.001 file - promoters70/1018770
caaggaaag

SEQ ID NO: 80742 - DNA, 9 bp, Unknown
  misc_feature (1)..( 9): Result.001 file - promoters70/1018956
caacgaata

SEQ ID NO: 80743 - DNA, 10 bp, Unknown
  misc_feature (1)..( 10): Result.001 file - promoters70/1018956
ggaaaaagaa

SEQ ID NO: 80744 - DNA, 10 bp, Unknown
  misc_feature (1)..( 10): Result.001 file - promoters70/1018956
ggaaaagaaa

SEQ ID NO: 80745 - DNA, 10 bp, Unknown
  misc_feature (1)..( 10): Result.001 file - promoters70/1018956
ggaaatgaaa

SEQ ID NO: 80746 - DNA, 7 bp, Unknown
  misc_feature (1)..( 7): Result.001 file - promoters70/1018956
aaaagaa

SEQ ID NO: 80747 - DNA, 7 bp, Unknown
  misc_feature (1)..( 7): Result.001 file - promoters70/1018956
aaaagaa

SEQ ID NO: 80748 - DNA, 7 bp, Unknown
  misc_feature (1)..( 7): Result.001 file - promoters70/1018973
aaatgaa

SEQ ID NO: 80749 - DNA, 11 bp, Unknown
  misc_feature (1)..( 11): Result.001 file - promoters70/1018973
ttataattatg

SEQ ID NO: 80750 - DNA, 11 bp, Unknown
  misc_feature (1)..( 11): Result.001 file - promoters70/1018973
atattattatt

SEQ ID NO: 80751 - DNA, 11 bp, Unknown
  misc_feature (1)..( 11): Result.001 file - promoters70/1018973
ttataagtata

SEQ ID NO: 80752 - DNA, 11 bp, Unknown
  misc_feature (1)..( 11): Result.001 file - promoters70/1018973
atataagtaac

SEQ ID NO: 80753 - DNA, 11 bp, Unknown
  misc_feature (1)..( 11): Result.001 file - promoters70/1019257
caatctttata

SEQ ID NO: 80754 - DNA, 7 bp, Unknown
  misc_feature (1)..( 7): Result.001 file - promoters70/1019257
aaagaag

SEQ ID NO: 80755 - DNA, 7 bp, Unknown
  misc_feature (1)..( 7): Result.001 file - promoters70/1019257
aaaaaag

SEQ ID NO: 80756 - DNA, 7 bp, Unknown
  misc_feature (1)..( 7): Result.001 file - promoters70/1019257
aaataag

SEQ ID NO: 80757 - DNA, 9 bp, Unknown
  misc_feature (1)..( 9): Result.001 file - promoters70/1019257
gttataaaa

SEQ ID NO: 80758 - DNA, 9 bp, Unknown
  misc_feature (1)..( 9): Result.001 file - promoters70/1019257
atcataaaa

SEQ ID NO: 80759 - DNA, 9 bp, Unknown
  misc_feature (1)..( 9): Result.001 file - promoters70/1019508
tatataaat

SEQ ID NO: 80760 - DNA, 9 bp, Unknown
  misc_feature (1)..( 9): Result.001 file - promoters70/1019508
agattgaag

SEQ ID NO: 80761 - DNA, 9 bp, Unknown
  misc_feature (1)..( 9): Result.001 file - promoters70/1019508
agatggaaa

SEQ ID NO: 80762 - DNA, 9 bp, Unknown
  misc_feature (1)..( 9): Result.001 file - promoters70/1019537
cactggaaa

SEQ ID NO: 80763 - DNA, 10 bp, Unknown
  misc_feature (1)..( 10): Result.001 file - promoters70/1019537
aaaacaaaac

SEQ ID NO: 80764 - DNA, 10 bp, Unknown
  misc_feature (1)..( 10): Result.001 file - promoters70/1019537
agcacacaac

SEQ ID NO: 80765 - DNA, 10 bp, Unknown
  misc_feature (1)..( 10): Result.001 file - promoters70/1019537
gaaagaaaga

SEQ ID NO: 80766 - DNA, 10 bp, Unknown
  misc_feature (1)..( 10): Result.001 file - promoters70/1019537
gaatgaaaca

SEQ ID NO: 80767 - DNA, 10 bp, Unknown
  misc_feature (1)..( 10): Result.001 file - promoters70/1019537
aagtgaatgt

SEQ ID NO: 80768 - DNA, 11 bp, Unknown
  misc_feature (1)..( 11): Result.001 file - promoters70/1019537
tttgttttcta

SEQ ID NO: 80769 - DNA, 11 bp, Unknown
  misc_feature (1)..( 11): Result.001 file - promoters70/1019537
tttctttacta

SEQ ID NO: 80770 - DNA, 11 bp, Unknown
  misc_feature (1)..( 11): Result.001 file - promoters70/1019537
tttgtgttcgt

SEQ ID NO: 80771 - DNA, 11 bp, Unknown
  misc_feature (1)..( 11): Result.001 file - promoters70/1019537
cttggtttctt

SEQ ID NO: 80772 - DNA, 8 bp, Unknown
  misc_feature (1)..( 8): Result.001 file - promoters70/1019537
tctataaa

SEQ ID NO: 80773 - DNA, 8 bp, Unknown
  misc_feature (1)..( 8): Result.001 file - promoters70/1019537
tatataaa

SEQ ID NO: 80774 - DNA, 8 bp, Unknown
  misc_feature (1)..( 8): Result.001 file - promoters70/1019537
tatttaaa

SEQ ID NO: 80775 - DNA, 8 bp, Unknown
  misc_feature (1)..( 8): Result.001 file - promoters70/1019537
tatataag

SEQ ID NO: 80776 - DNA, 11 bp, Unknown
  misc_feature (1)..( 11): Result.001 file - promoters70/1019537
atatatgtaaa

SEQ ID NO: 80777 - DNA, 11 bp, Unknown
  misc_feature (1)..( 11): Result.001 file - promoters70/1019537
ctttatttaaa

SEQ ID NO: 80778 - DNA, 11 bp, Unknown
  misc_feature (1)..( 11): Result.001 file - promoters70/1019537
atagatgtttc

SEQ ID NO: 80779 - DNA, 11 bp, Unknown
  misc_feature (1)..( 11): Result.001 file - promoters70/1019537
aaagagagaga

SEQ ID NO: 80780 - DNA, 11 bp, Unknown
  misc_feature (1)..( 11): Result.001 file - promoters70/1019734
tcgtatctaag

SEQ ID NO: 80781 - DNA, 9 bp, Unknown
  misc_feature (1)..( 9): Result.001 file - promoters70/1019734
actatcata

SEQ ID NO: 80782 - DNA, 9 bp, Unknown
  misc_feature (1)..( 9): Result.001 file - promoters70/1019734
tcaatcata

SEQ ID NO: 80783 - DNA, 9 bp, Unknown
  misc_feature (1)..( 9): Result.001 file - promoters70/1019734
tcaaccata

SEQ ID NO: 80784 - DNA, 9 bp, Unknown
  misc_feature (1)..( 9): Result.001 file - promoters70/1019734
aaatttcat

SEQ ID NO: 80785 - DNA, 9 bp, Unknown
  misc_feature (1)..( 9): Result.001 file - promoters70/1019734
taatttcat

SEQ ID NO: 80786 - DNA, 9 bp, Unknown
  misc_feature (1)..( 9): Result.001 file - promoters70/1019928
taatttatt

SEQ ID NO: 80787 - DNA, 8 bp, Unknown
  misc_feature (1)..( 8): Result.001 file - promoters70/1019928
attagttc

SEQ ID NO: 80788 - DNA, 8 bp, Unknown
  misc_feature (1)..( 8): Result.001 file - promoters70/1019928
atttgtta

SEQ ID NO: 80789 - DNA, 8 bp, Unknown
  misc_feature (1)..( 8): Result.001 file - promoters70/1019928
aattgtta

SEQ ID NO: 80790 - DNA, 7 bp, Unknown
  misc_feature (1)..( 7): Result.001 file - promoters70/1019928
tttcaat

SEQ ID NO: 80791 - DNA, 7 bp, Unknown
  misc_feature (1)..( 7): Result.001 file - promoters70/1019928
ttttaat

SEQ ID NO: 80792 - DNA, 7 bp, Unknown
  misc_feature (1)..( 7): Result.001 file - promoters70/1019928
ttttaaa

SEQ ID NO: 80793 - DNA, 8 bp, Unknown
  misc_feature (1)..( 8): Result.001 file - promoters70/1019928
aaattcaa

SEQ ID NO: 80794 - DNA, 8 bp, Unknown
  misc_feature (1)..( 8): Result.001 file - promoters70/1019928
aaattctc

SEQ ID NO: 80795 - DNA, 8 bp, Unknown
  misc_feature (1)..( 8): Result.001 file - promoters70/1019928
aaatcctc

SEQ ID NO: 80796 - DNA, 11 bp, Unknown
  misc_feature (1)..( 11): Result.001 file - promoters70/1019928
cttataattat

SEQ ID NO: 80797 - DNA, 11 bp, Unknown
  misc_feature (1)..( 11): Result.001 file - promoters70/1019928
tttataagtat

SEQ ID NO: 80798 - DNA, 11 bp, Unknown
  misc_feature (1)..( 11): Result.001 file - promoters70/1020023
tttgtaacttc

SEQ ID NO: 80799 - DNA, 10 bp, Unknown
  misc_feature (1)..( 10): Result.001 file - promoters70/1020023
tcctatatat

SEQ ID NO: 80800 - DNA, 10 bp, Unknown
  misc_feature (1)..( 10): Result.001 file - promoters70/1020023
ttctatatat

SEQ ID NO: 80801 - DNA, 10 bp, Unknown
  misc_feature (1)..( 10): Result.001 file - promoters70/1020223
tcctataaat

SEQ ID NO: 80802 - DNA, 8 bp, Unknown
  misc_feature (1)..( 8): Result.001 file - promoters70/1020223
atcatatt

SEQ ID NO: 80803 - DNA, 8 bp, Unknown
  misc_feature (1)..( 8): Result.001 file - promoters70/1020223
atcatatt

SEQ ID NO: 80804 - DNA, 8 bp, Unknown
  misc_feature (1)..( 8): Result.001 file - promoters70/1020223
atcatatt

SEQ ID NO: 80805 - DNA, 9 bp, Unknown
  misc_feature (1)..( 9): Result.001 file - promoters70/1020223
tttgtagtg

SEQ ID NO: 80806 - DNA, 9 bp, Unknown
  misc_feature (1)..( 9): Result.001 file - promoters70/1020223
attgtagct

SEQ ID NO: 80807 - DNA, 9 bp, Unknown
  misc_feature (1)..( 9): Result.001 file - promoters70/1020223
tttgttgtg

SEQ ID NO: 80808 - DNA, 8 bp, Unknown
  misc_feature (1)..( 8): Result.001 file - promoters70/1020223
tgatttgt

SEQ ID NO: 80809 - DNA, 8 bp, Unknown
  misc_feature (1)..( 8): Result.001 file - promoters70/1020223
agatatgt

SEQ ID NO: 80810 - DNA, 8 bp, Unknown
  misc_feature (1)..( 8): Result.001 file - promoters70/1020223
tgatttgg

SEQ ID NO: 80811 - DNA, 7 bp, Unknown
  misc_feature (1)..( 7): Result.001 file - promoters70/1020223
gtttgtt

SEQ ID NO: 80812 - DNA, 7 bp, Unknown
  misc_feature (1)..( 7): Result.001 file - promoters70/1020223
gtttgtg

SEQ ID NO: 80813 - DNA, 7 bp, Unknown
  misc_feature (1)..( 7): Result.001 file - promoters70/1020223
ttttgtt

SEQ ID NO: 80814 - DNA, 8 bp, Unknown
  misc_feature (1)..( 8): Result.001 file - promoters70/1020223
tgtttgtt

SEQ ID NO: 80815 - DNA, 8 bp, Unknown
  misc_feature (1)..( 8): Result.001 file - promoters70/1020223
gatttgtt

SEQ ID NO: 80816 - DNA, 8 bp, Unknown
  misc_feature (1)..( 8): Result.001 file - promoters70/1020265
gatatgta

SEQ ID NO: 80817 - DNA, 8 bp, Unknown
  misc_feature (1)..( 8): Result.001 file - promoters70/1020265
atgactac

SEQ ID NO: 80818 - DNA, 8 bp, Unknown
  misc_feature (1)..( 8): Result.001 file - promoters70/1020265
atgactta

SEQ ID NO: 80819 - DNA, 8 bp, Unknown
  misc_feature (1)..( 8): Result.001 file - promoters70/1020313
ttgattta

SEQ ID NO: 80820 - DNA, 11 bp, Unknown
  misc_feature (1)..( 11): Result.001 file - promoters70/1020313
tgtgtatataa

SEQ ID NO: 80821 - DNA, 11 bp, Unknown
  misc_feature (1)..( 11): Result.001 file - promoters70/1020313
gtagtatataa

SEQ ID NO: 80822 - DNA, 11 bp, Unknown
  misc_feature (1)..( 11): Result.001 file - promoters70/1020430
tgtctatataa

SEQ ID NO: 80823 - DNA, 8 bp, Unknown
  misc_feature (1)..( 8): Result.001 file - promoters70/1020430
acaaaaaa

SEQ ID NO: 80824 - DNA, 8 bp, Unknown
  misc_feature (1)..( 8): Result.001 file - promoters70/1020430
tcaagaaa

SEQ ID NO: 80825 - DNA, 8 bp, Unknown
  misc_feature (1)..( 8): Result.001 file - promoters70/1020430
acaacaaa

SEQ ID NO: 80826 - DNA, 11 bp, Unknown
  misc_feature (1)..( 11): Result.001 file - promoters70/1020430
aatgaaaagca

SEQ ID NO: 80827 - DNA, 11 bp, Unknown
  misc_feature (1)..( 11): Result.001 file - promoters70/1020430
aattaaaataa

SEQ ID NO: 80828 - DNA, 11 bp, Unknown
  misc_feature (1)..( 11): Result.001 file - promoters70/1020430
aattataataa

SEQ ID NO: 80829 - DNA, 8 bp, Unknown
  misc_feature (1)..( 8): Result.001 file - promoters70/1020430
aataaata

SEQ ID NO: 80830 - DNA, 8 bp, Unknown
  misc_feature (1)..( 8): Result.001 file - promoters70/1020430
cttaaata

SEQ ID NO: 80831 - DNA, 8 bp, Unknown
  misc_feature (1)..( 8): Result.001 file - promoters70/1020543
cttgaatc

SEQ ID NO: 80832 - DNA, 10 bp, Unknown
  misc_feature (1)..( 10): Result.001 file - promoters70/1020543
tttgaaaaga

SEQ ID NO: 80833 - DNA, 10 bp, Unknown
  misc_feature (1)..( 10): Result.001 file - promoters70/1020543
aaaaaaaaga

SEQ ID NO: 80834 - DNA, 11 bp, Unknown
  misc_feature (1)..( 11): Result.001 file - promoters70/1020543
gaagaaacaga

SEQ ID NO: 80835 - DNA, 12 bp, Unknown
  misc_feature (1)..( 12): Result.001 file - promoters70/1020543
tgaaaagatgaa

SEQ ID NO: 80836 - DNA, 12 bp, Unknown
  misc_feature (1)..( 12): Result.001 file - promoters70/1020543
acacaagaagaa

SEQ ID NO: 80837 - DNA, 12 bp, Unknown
  misc_feature (1)..( 12): Result.001 file - promoters70/1020646
gaaaaaaaagaa

SEQ ID NO: 80838 - DNA, 11 bp, Unknown
  misc_feature (1)..( 11): Result.001 file - promoters70/1020646
aataatttgta

SEQ ID NO: 80839 - DNA, 11 bp, Unknown
  misc_feature (1)..( 11): Result.001 file - promoters70/1020646
aatattttagg

SEQ ID NO: 80840 - DNA, 11 bp, Unknown
  misc_feature (1)..( 11): Result.001 file - promoters70/1020666
aattattggta

SEQ ID NO: 80841 - DNA, 10 bp, Unknown
  misc_feature (1)..( 10): Result.001 file - promoters70/1020666
aggtagataa

SEQ ID NO: 80842 - DNA, 10 bp, Unknown
  misc_feature (1)..( 10): Result.001 file - promoters70/1020666
tggtaaataa

SEQ ID NO: 80843 - DNA, 10 bp, Unknown
  misc_feature (1)..( 10): Result.001 file - promoters70/1020666
tgggaaaaag

SEQ ID NO: 80844 - DNA, 13 bp, Unknown
  misc_feature (1)..( 13): Result.001 file - promoters70/1020666
gaaacaaacctga

SEQ ID NO: 80845 - DNA, 13 bp, Unknown
  misc_feature (1)..( 13): Result.001 file - promoters70/1020666
ttgtcaaaactga

SEQ ID NO: 80846 - DNA, 13 bp, Unknown
  misc_feature (1)..( 13): Result.001 file - promoters70/1020701
gaagcaaacattt

SEQ ID NO: 80847 - DNA, 11 bp, Unknown
  misc_feature (1)..( 11): Result.001 file - promoters70/1020701
tgtttgaccat

SEQ ID NO: 80848 - DNA, 11 bp, Unknown
  misc_feature (1)..( 11): Result.001 file - promoters70/1020701
tatttgaacat

SEQ ID NO: 80849 - DNA, 11 bp, Unknown
  misc_feature (1)..( 11): Result.001 file - promoters70/1020701
tgtgtgagttc

SEQ ID NO: 80850 - DNA, 8 bp, Unknown
  misc_feature (1)..( 8): Result.001 file - promoters70/1020701
taacgaac

SEQ ID NO: 80851 - DNA, 8 bp, Unknown
  misc_feature (1)..( 8): Result.001 file - promoters70/1020701
caacgaaa

SEQ ID NO: 80852 - DNA, 8 bp, Unknown
  misc_feature (1)..( 8): Result.001 file - promoters70/1020701
caactaaa

SEQ ID NO: 80853 - DNA, 10 bp, Unknown
  misc_feature (1)..( 10): Result.001 file - promoters70/1020701
aaatcatttt

SEQ ID NO: 80854 - DNA, 10 bp, Unknown
  misc_feature (1)..( 10): Result.001 file - promoters70/1020701
aaataatttt

SEQ ID NO: 80855 - DNA, 10 bp, Unknown
  misc_feature (1)..( 10): Result.001 file - promoters70/1020701
caatcatatt

SEQ ID NO: 80856 - DNA, 10 bp, Unknown
  misc_feature (1)..( 10): Result.001 file - promoters70/1020701
ctatcataat

SEQ ID NO: 80857 - DNA, 9 bp, Unknown
  misc_feature (1)..( 9): Result.001 file - promoters70/1020701
ataggaaat

SEQ ID NO: 80858 - DNA, 9 bp, Unknown
  misc_feature (1)..( 9): Result.001 file - promoters70/1020701
ataagaaaa

SEQ ID NO: 80859 - DNA, 9 bp, Unknown
  misc_feature (1)..( 9): Result.001 file - promoters70/1020701
ataataaaa

SEQ ID NO: 80860 - DNA, 9 bp, Unknown
  misc_feature (1)..( 9): Result.001 file - promoters70/1020701
tcaaccata

SEQ ID NO: 80861 - DNA, 9 bp, Unknown
  misc_feature (1)..( 9): Result.001 file - promoters70/1020701
tcaatcata

SEQ ID NO: 80862 - DNA, 9 bp, Unknown
  misc_feature (1)..( 9): Result.001 file - promoters70/1020701
actatcata

SEQ ID NO: 80863 - DNA, 9 bp, Unknown
  misc_feature (1)..( 9): Result.001 file - promoters70/1020701
taatttatt

SEQ ID NO: 80864 - DNA, 9 bp, Unknown
  misc_feature (1)..( 9): Result.001 file - promoters70/1020701
taatttcat

SEQ ID NO: 80865 - DNA, 9 bp, Unknown
  misc_feature (1)..( 9): Result.001 file - promoters70/1020701
aaatttcat

SEQ ID NO: 80866 - DNA, 9 bp, Unknown
  misc_feature (1)..( 9): Result.001 file - promoters70/1020701
taattttca

SEQ ID NO: 80867 - DNA, 9 bp, Unknown
  misc_feature (1)..( 9): Result.001 file - promoters70/1020701
ataatatgt

SEQ ID NO: 80868 - DNA, 9 bp, Unknown
  misc_feature (1)..( 9): Result.001 file - promoters70/1020701
ataataaaa

SEQ ID NO: 80869 - DNA, 9 bp, Unknown
  misc_feature (1)..( 9): Result.001 file - promoters70/1020701
ataagaaaa

SEQ ID NO: 80870 - DNA, 8 bp, Unknown
  misc_feature (1)..( 8): Result.001 file - promoters70/1020701
gaatttct

SEQ ID NO: 80871 - DNA, 8 bp, Unknown
  misc_feature (1)..( 8): Result.001 file - promoters70/1020701
aaatatct

SEQ ID NO: 80872 - DNA, 8 bp, Unknown
  misc_feature (1)..( 8): Result.001 file - promoters70/1020701
aaatatcc

SEQ ID NO: 80873 - DNA, 7 bp, Unknown
  misc_feature (1)..( 7): Result.001 file - promoters70/1020701
tatcata

SEQ ID NO: 80874 - DNA, 7 bp, Unknown
  misc_feature (1)..( 7): Result.001 file - promoters70/1020701
tattata

SEQ ID NO: 80875 - DNA, 7 bp, Unknown
  misc_feature (1)..( 7): Result.001 file - promoters70/1020701
aatcata

SEQ ID NO: 80876 - DNA, 8 bp, Unknown
  misc_feature (1)..( 8): Result.001 file - promoters70/1020701
taataaag

SEQ ID NO: 80877 - DNA, 8 bp, Unknown
  misc_feature (1)..( 8): Result.001 file - promoters70/1020701
taatcaag

SEQ ID NO: 80878 - DNA, 8 bp, Unknown
  misc_feature (1)..( 8): Result.001 file - promoters70/1020701
taacaaaa

SEQ ID NO: 80879 - DNA, 12 bp, Unknown
  misc_feature (1)..( 12): Result.001 file - promoters70/1020701
ataaattaatgc

SEQ ID NO: 80880 - DNA, 12 bp, Unknown
  misc_feature (1)..( 12): Result.001 file - promoters70/1020701
atatattaatgt

SEQ ID NO: 80881 - DNA, 12 bp, Unknown
  misc_feature (1)..( 12): Result.001 file - promoters70/1020786
tttggttattgt

SEQ ID NO: 80882 - DNA, 10 bp, Unknown
  misc_feature (1)..( 10): Result.001 file - promoters70/1020786
atttatttcg

SEQ ID NO: 80883 - DNA, 10 bp, Unknown
  misc_feature (1)..( 10): Result.001 file - promoters70/1020786
atttatgtcg

SEQ ID NO: 80884 - DNA, 10 bp, Unknown
  misc_feature (1)..( 10): Result.001 file - promoters70/1020786
ttttatttta

SEQ ID NO: 80885 - DNA, 10 bp, Unknown
  misc_feature (1)..( 10): Result.001 file - promoters70/1020786
acaaacggtc

SEQ ID NO: 80886 - DNA, 10 bp, Unknown
  misc_feature (1)..( 10): Result.001 file - promoters70/1020786
acaaactaat

SEQ ID NO: 80887 - DNA, 10 bp, Unknown
  misc_feature (1)..( 10): Result.001 file - promoters70/1020786
tcaaattaat

SEQ ID NO: 80888 - DNA, 6 bp, Unknown
  misc_feature (1)..( 6): Result.001 file - promoters70/1020786
tataaa

SEQ ID NO: 80889 - DNA, 6 bp, Unknown
  misc_feature (1)..( 6): Result.001 file - promoters70/1020786
tataaa

SEQ ID NO: 80890 - DNA, 6 bp, Unknown
  misc_feature (1)..( 6): Result.001 file - promoters70/1020786
tataaa

SEQ ID NO: 80891 - DNA, 6 bp, Unknown
  misc_feature (1)..( 6): Result.001 file - promoters70/1020786
tataaa

SEQ ID NO: 80892 - DNA, 10 bp, Unknown
  misc_feature (1)..( 10): Result.001 file - promoters70/1020786
ataagattag

SEQ ID NO: 80893 - DNA, 10 bp, Unknown
  misc_feature (1)..( 10): Result.001 file - promoters70/1020786
ttaagatctt

SEQ ID NO: 80894 - DNA, 10 bp, Unknown
  misc_feature (1)..( 10): Result.001 file - promoters70/1020786
ttaagaactt

SEQ ID NO: 80895 - DNA, 10 bp, Unknown
  misc_feature (1)..( 10): Result.001 file - promoters70/1020786
ccaaaaacag

SEQ ID NO: 80896 - DNA, 10 bp, Unknown
  misc_feature (1)..( 10): Result.001 file - promoters70/1020786
tcaaaaaact

SEQ ID NO: 80897 - DNA, 10 bp, Unknown
  misc_feature (1)..( 10): Result.001 file - promoters70/1020786
gcaaaaatta

SEQ ID NO: 80898 - DNA, 10 bp, Unknown
  misc_feature (1)..( 10): Result.001 file - promoters70/1020786
gcaaagatta

SEQ ID NO: 80899 - DNA, 14 bp, Unknown
  misc_feature (1)..( 14): Result.001 file - promoters70/1020786
cacaacattgcttc

SEQ ID NO: 80900 - DNA, 14 bp, Unknown
  misc_feature (1)..( 14): Result.001 file - promoters70/1020786
aacaacaaaaaaag

SEQ ID NO: 80901 - DNA, 14 bp, Unknown
  misc_feature (1)..( 14): Result.001 file - promoters70/1020786
aacgacaaaacaag

SEQ ID NO: 80902 - DNA, 14 bp, Unknown
  misc_feature (1)..( 14): Result.001 file - promoters70/1020786
atcaacaaaaattg

SEQ ID NO: 80903 - DNA, 10 bp, Unknown
  misc_feature (1)..( 10): Result.001 file - promoters70/1020786
gcttcgtaga

SEQ ID NO: 80904 - DNA, 10 bp, Unknown
  misc_feature (1)..( 10): Result.001 file - promoters70/1020786
aaatcgaaga

SEQ ID NO: 80905 - DNA, 10 bp, Unknown
  misc_feature (1)..( 10): Result.001 file - promoters70/1020786
aaattgaaaa

SEQ ID NO: 80906 - DNA, 10 bp, Unknown
  misc_feature (1)..( 10): Result.001 file - promoters70/1020786
atctactcta

SEQ ID NO: 80907 - DNA, 10 bp, Unknown
  misc_feature (1)..( 10): Result.001 file - promoters70/1020786
ttttactctc

SEQ ID NO: 80908 - DNA, 10 bp, Unknown
  misc_feature (1)..( 10): Result.001 file - promoters70/1020786
actttctctc

SEQ ID NO: 80909 - DNA, 8 bp, Unknown
  misc_feature (1)..( 8): Result.001 file - promoters70/1020786
cctctata

SEQ ID NO: 80910 - DNA, 8 bp, Unknown
  misc_feature (1)..( 8): Result.001 file - promoters70/1020786
cctttata

SEQ ID NO: 80911 - DNA, 8 bp, Unknown
  misc_feature (1)..( 8): Result.001 file - promoters70/1020786
cctatata

SEQ ID NO: 80912 - DNA, 9 bp, Unknown
  misc_feature (1)..( 9): Result.001 file - promoters70/1020786
agacaaaac

SEQ ID NO: 80913 - DNA, 9 bp, Unknown
  misc_feature (1)..( 9): Result.001 file - promoters70/1020786
caacaaaaa

SEQ ID NO: 80914 - DNA, 9 bp, Unknown
  misc_feature (1)..( 9): Result.001 file - promoters70/1020786
caacaaaaa

SEQ ID NO: 80915 - DNA, 7 bp, Unknown
  misc_feature (1)..( 7): Result.001 file - promoters70/1020786
agaaatg

SEQ ID NO: 80916 - DNA, 7 bp, Unknown
  misc_feature (1)..( 7): Result.001 file - promoters70/1020786
agaaatg

SEQ ID NO: 80917 - DNA, 7 bp, Unknown
  misc_feature (1)..( 7): Result.001 file - promoters70/1020818
aaaaaaa

SEQ ID NO: 80918 - DNA, 13 bp, Unknown
  misc_feature (1)..( 13): Result.001 file - promoters70/1020818
aactttttttctt

SEQ ID NO: 80919 - DNA, 13 bp, Unknown
  misc_feature (1)..( 13): Result.001 file - promoters70/1020818
ataatttttcctt

SEQ ID NO: 80920 - DNA, 13 bp, Unknown
  misc_feature (1)..( 13): Result.001 file - promoters70/1020818
ataatgtttgagt

SEQ ID NO: 80921 - DNA, 11 bp, Unknown
  misc_feature (1)..( 11): Result.001 file - promoters70/1020818
caaaaattaag

SEQ ID NO: 80922 - DNA, 11 bp, Unknown
  misc_feature (1)..( 11): Result.001 file - promoters70/1020818
caataattttt

SEQ ID NO: 80923 - DNA, 11 bp, Unknown
  misc_feature (1)..( 11): Result.001 file - promoters70/1020818
acataatgttt

SEQ ID NO: 80924 - DNA, 10 bp, Unknown
  misc_feature (1)..( 10): Result.001 file - promoters70/1020818
taaaaaagaa

SEQ ID NO: 80925 - DNA, 10 bp, Unknown
  misc_feature (1)..( 10): Result.001 file - promoters70/1020818
taaaaaaggg

SEQ ID NO: 80926 - DNA, 10 bp, Unknown
  misc_feature (1)..( 10): Result.001 file - promoters70/1020863
tataaaagaa

SEQ ID NO: 80927 - DNA, 11 bp, Unknown
  misc_feature (1)..( 11): Result.001 file - promoters70/1020863
gaaaatattaa

SEQ ID NO: 80928 - DNA, 11 bp, Unknown
  misc_feature (1)..( 11): Result.001 file - promoters70/1020863
ttaaaaattaa

SEQ ID NO: 80929 - DNA, 11 bp, Unknown
  misc_feature (1)..( 11): Result.001 file - promoters70/1020863
ggtaaaatttc

SEQ ID NO: 80930 - DNA, 11 bp, Unknown
  misc_feature (1)..( 11): Result.001 file - promoters70/1020863
gtaacaattct

SEQ ID NO: 80931 - DNA, 11 bp, Unknown
  misc_feature (1)..( 11): Result.001 file - promoters70/1020863
ggaacaagtct

SEQ ID NO: 80932 - DNA, 11 bp, Unknown
  misc_feature (1)..( 11): Result.001 file - promoters70/1020863
ttaacaaaaaa

SEQ ID NO: 80933 - DNA, 11 bp, Unknown
  misc_feature (1)..( 11): Result.001 file - promoters70/1020863
ggagcaataga

SEQ ID NO: 80934 - DNA, 8 bp, Unknown
  misc_feature (1)..( 8): Result.001 file - promoters70/1020863
aaaacaaa

SEQ ID NO: 80935 - DNA, 8 bp, Unknown
  misc_feature (1)..( 8): Result.001 file - promoters70/1020863
taaataaa

SEQ ID NO: 80936 - DNA, 8 bp, Unknown
  misc_feature (1)..( 8): Result.001 file - promoters70/1020863
caaacaaa

SEQ ID NO: 80937 - DNA, 8 bp, Unknown
  misc_feature (1)..( 8): Result.001 file - promoters70/1020863
taaaaaaa

SEQ ID NO: 80938 - DNA, 8 bp, Unknown
  misc_feature (1)..( 8): Result.001 file - promoters70/1020863
catacata

SEQ ID NO: 80939 - DNA, 8 bp, Unknown
  misc_feature (1)..( 8): Result.001 file - promoters70/1020863
taactaat

SEQ ID NO: 80940 - DNA, 12 bp, Unknown
  misc_feature (1)..( 12): Result.001 file - promoters70/1020863
gtttgtttaaca

SEQ ID NO: 80941 - DNA, 12 bp, Unknown
  misc_feature (1)..( 12): Result.001 file - promoters70/1020863
ttttatttcttt

SEQ ID NO: 80942 - DNA, 12 bp, Unknown
  misc_feature (1)..( 12): Result.001 file - promoters70/1020863
ttttgtttctgg

SEQ ID NO: 80943 - DNA, 12 bp, Unknown
  misc_feature (1)..( 12): Result.001 file - promoters70/1020863
ttctgtttcaca

SEQ ID NO: 80944 - DNA, 12 bp, Unknown
  misc_feature (1)..( 12): Result.001 file - promoters70/1020863
atatgtctgcgc

SEQ ID NO: 80945 - DNA, 12 bp, Unknown
  misc_feature (1)..( 12): Result.001 file - promoters70/1020940
ttttataatgat

SEQ ID NO: 80946 - DNA, 8 bp, Unknown
  misc_feature (1)..( 8): Result.001 file - promoters70/1020940
taaaatgt

SEQ ID NO: 80947 - DNA, 8 bp, Unknown
  misc_feature (1)..( 8): Result.001 file - promoters70/1020940
taaaattg

SEQ ID NO: 80948 - DNA, 8 bp, Unknown
  misc_feature (1)..( 8): Result.001 file - promoters70/1020940
taagattg

SEQ ID NO: 80949 - DNA, 8 bp, Unknown
  misc_feature (1)..( 8): Result.001 file - promoters70/1020940
aaaataga

SEQ ID NO: 80950 - DNA, 8 bp, Unknown
  misc_feature (1)..( 8): Result.001 file - promoters70/1020940
aaaaaaga

SEQ ID NO: 80951 - DNA, 8 bp, Unknown
  misc_feature (1)..( 8): Result.001 file - promoters70/1020940
taaataaa

SEQ ID NO: 80952 - DNA, 8 bp, Unknown
  misc_feature (1)..( 8): Result.001 file - promoters70/1020940
caacaaaa

SEQ ID NO: 80953 - DNA, 8 bp, Unknown
  misc_feature (1)..( 8): Result.001 file - promoters70/1020940
aaacaaag

SEQ ID NO: 80954 - DNA, 8 bp, Unknown
  misc_feature (1)..( 8): Result.001 file - promoters70/1020940
aaataaag

SEQ ID NO: 80955 - DNA, 7 bp, Unknown
  misc_feature (1)..( 7): Result.001 file - promoters70/1020940
aaattaa

SEQ ID NO: 80956 - DNA, 7 bp, Unknown
  misc_feature (1)..( 7): Result.001 file - promoters70/1020940
aaattat

SEQ ID NO: 80957 - DNA, 7 bp, Unknown
  misc_feature (1)..( 7): Result.001 file - promoters70/1020940
aaatatt

SEQ ID NO: 80958 - DNA, 10 bp, Unknown
  misc_feature (1)..( 10): Result.001 file - promoters70/1020940
tatatatacc

SEQ ID NO: 80959 - DNA, 10 bp, Unknown
  misc_feature (1)..( 10): Result.001 file - promoters70/1020940
tatataaacc

SEQ ID NO: 80960 - DNA, 10 bp, Unknown
  misc_feature (1)..( 10): Result.001 file - promoters70/1021079
tatttaaaca

SEQ ID NO: 80961 - DNA, 11 bp, Unknown
  misc_feature (1)..( 11): Result.001 file - promoters70/1021079
ttgaaacacca

SEQ ID NO: 80962 - DNA, 11 bp, Unknown
  misc_feature (1)..( 11): Result.001 file - promoters70/1021079
ttgatacacat

SEQ ID NO: 80963 - DNA, 11 bp, Unknown
  misc_feature (1)..( 11): Result.001 file - promoters70/1021079
gttttactcat

SEQ ID NO: 80964 - DNA, 12 bp, Unknown
  misc_feature (1)..( 12): Result.001 file - promoters70/1021079
agggaaacctaa

SEQ ID NO: 80965 - DNA, 12 bp, Unknown
  misc_feature (1)..( 12): Result.001 file - promoters70/1021079
aggaaaacataa

SEQ ID NO: 80966 - DNA, 12 bp, Unknown
  misc_feature (1)..( 12): Result.001 file - promoters70/1021079
aagtaaaaatac

SEQ ID NO: 80967 - DNA, 9 bp, Unknown
  misc_feature (1)..( 9): Result.001 file - promoters70/1021079
aaaattttg

SEQ ID NO: 80968 - DNA, 9 bp, Unknown
  misc_feature (1)..( 9): Result.001 file - promoters70/1021079
aaaatttat

SEQ ID NO: 80969 - DNA, 9 bp, Unknown
  misc_feature (1)..( 9): Result.001 file - promoters70/1021079
aaaattttg

SEQ ID NO: 80970 - DNA, 8 bp, Unknown
  misc_feature (1)..( 8): Result.001 file - promoters70/1021079
agtaaaat

SEQ ID NO: 80971 - DNA, 8 bp, Unknown
  misc_feature (1)..( 8): Result.001 file - promoters70/1021079
agtaaaaa

SEQ ID NO: 80972 - DNA, 8 bp, Unknown
  misc_feature (1)..( 8): Result.001 file - promoters70/1021079
aataaaat

SEQ ID NO: 80973 - DNA, 7 bp, Unknown
  misc_feature (1)..( 7): Result.001 file - promoters70/1021079
taaaata

SEQ ID NO: 80974 - DNA, 7 bp, Unknown
  misc_feature (1)..( 7): Result.001 file - promoters70/1021079
aaaaata

SEQ ID NO: 80975 - DNA, 7 bp, Unknown
  misc_feature (1)..( 7): Result.001 file - promoters70/1021079
taaaatc

SEQ ID NO: 80976 - DNA, 8 bp, Unknown
  misc_feature (1)..( 8): Result.001 file - promoters70/1021079
aaaacata

SEQ ID NO: 80977 - DNA, 9 bp, Unknown
  misc_feature (1)..( 9): Result.001 file - promoters70/1021079
cttaagata

SEQ ID NO: 80978 - DNA, 9 bp, Unknown
  misc_feature (1)..( 9): Result.001 file - promoters70/1021079
tttaatata

SEQ ID NO: 80979 - DNA, 9 bp, Unknown
  misc_feature (1)..( 9): Result.001 file - promoters70/1021079
tttaattca

SEQ ID NO: 80980 - DNA, 8 bp, Unknown
  misc_feature (1)..( 8): Result.001 file - promoters70/1021079
taaaacca

SEQ ID NO: 80981 - DNA, 8 bp, Unknown
  misc_feature (1)..( 8): Result.001 file - promoters70/1021079
taaaacaa

SEQ ID NO: 80982 - DNA, 8 bp, Unknown
  misc_feature (1)..( 8): Result.001 file - promoters70/1021079
taatacaa

SEQ ID NO: 80983 - DNA, 11 bp, Unknown
  misc_feature (1)..( 11): Result.001 file - promoters70/1021079
cttaaatatca

SEQ ID NO: 80984 - DNA, 11 bp, Unknown
  misc_feature (1)..( 11): Result.001 file - promoters70/1021079
cttcaatctca

SEQ ID NO: 80985 - DNA, 11 bp, Unknown
  misc_feature (1)..( 11): Result.001 file - promoters70/1021079
tttaaataaaa

SEQ ID NO: 80986 - DNA, 9 bp, Unknown
  misc_feature (1)..( 9): Result.001 file - promoters70/1021079
tgagtgact

SEQ ID NO: 80987 - DNA, 9 bp, Unknown
  misc_feature (1)..( 9): Result.001 file - promoters70/1021079
tgaatgatt

SEQ ID NO: 80988 - DNA, 9 bp, Unknown
  misc_feature (1)..( 9): Result.001 file - promoters70/1021079
ccaattatt

SEQ ID NO: 80989 - DNA, 7 bp, Unknown
  misc_feature (1)..( 7): Result.001 file - promoters70/1021079
attagtg

SEQ ID NO: 80990 - DNA, 7 bp, Unknown
  misc_feature (1)..( 7): Result.001 file - promoters70/1021079
tttagtg

SEQ ID NO: 80991 - DNA, 8 bp, Unknown
  misc_feature (1)..( 8): Result.001 file - promoters70/1021104
tttaagtt

SEQ ID NO: 80992 - DNA, 9 bp, Unknown
  misc_feature (1)..( 9): Result.001 file - promoters70/1021104
aatttaacc

SEQ ID NO: 80993 - DNA, 9 bp, Unknown
  misc_feature (1)..( 9): Result.001 file - promoters70/1021104
attttgacc

SEQ ID NO: 80994 - DNA, 9 bp, Unknown
  misc_feature (1)..( 9): Result.001 file - promoters70/1021104
attttgatt

SEQ ID NO: 80995 - DNA, 8 bp, Unknown
  misc_feature (1)..( 8): Result.001 file - promoters70/1021104
acttcata

SEQ ID NO: 80996 - DNA, 8 bp, Unknown
  misc_feature (1)..( 8): Result.001 file - promoters70/1021104
cattcata

SEQ ID NO: 80997 - DNA, 8 bp, Unknown
  misc_feature (1)..( 8): Result.001 file - promoters70/1021104
cattcatc

SEQ ID NO: 80998 - DNA, 7 bp, Unknown
  misc_feature (1)..( 7): Result.001 file - promoters70/1021104
ttcttcc

SEQ ID NO: 80999 - DNA, 7 bp, Unknown
  misc_feature (1)..( 7): Result.001 file - promoters70/1021104
ttcttct

SEQ ID NO: 81000 - DNA, 7 bp, Unknown
  misc_feature (1)..( 7): Result.001 file - promoters70/1021104
ttcctct

SEQ ID NO: 81001 - DNA, 10 bp, Unknown
  misc_feature (1)..( 10): Result.001 file - promoters70/1021104
tcttcattta

SEQ ID NO: 81002 - DNA, 10 bp, Unknown
  misc_feature (1)..( 10): Result.001 file - promoters70/1021104
aattcaatta

SEQ ID NO: 81003 - DNA, 10 bp, Unknown
  misc_feature (1)..( 10): Result.001 file - promoters70/1021218
tcttcattgt

SEQ ID NO: 81004 - DNA, 12 bp, Unknown
  misc_feature (1)..( 12): Result.001 file - promoters70/1021218
agagagaaagaa

SEQ ID NO: 81005 - DNA, 12 bp, Unknown
  misc_feature (1)..( 12): Result.001 file - promoters70/1021218
taagaaaaaccc

SEQ ID NO: 81006 - DNA, 12 bp, Unknown
  misc_feature (1)..( 12): Result.001 file - promoters70/1021218
aaagaaaaaatt

SEQ ID NO: 81007 - DNA, 12 bp, Unknown
  misc_feature (1)..( 12): Result.001 file - promoters70/1021218
aaataaaacatt

SEQ ID NO: 81008 - DNA, 8 bp, Unknown
  misc_feature (1)..( 8): Result.001 file - promoters70/1021218
ttgacttt

SEQ ID NO: 81009 - DNA, 8 bp, Unknown
  misc_feature (1)..( 8): Result.001 file - promoters70/1021218
ttgaattt

SEQ ID NO: 81010 - DNA, 8 bp, Unknown
  misc_feature (1)..( 8): Result.001 file - promoters70/1021218
ttgaatga

SEQ ID NO: 81011 - DNA, 10 bp, Unknown
  misc_feature (1)..( 10): Result.001 file - promoters70/1021218
gtatctaaga

SEQ ID NO: 81012 - DNA, 10 bp, Unknown
  misc_feature (1)..( 10): Result.001 file - promoters70/1021218
atttcttaga

SEQ ID NO: 81013 - DNA, 10 bp, Unknown
  misc_feature (1)..( 10): Result.001 file - promoters70/1021218
attttttata

SEQ ID NO: 81014 - DNA, 9 bp, Unknown
  misc_feature (1)..( 9): Result.001 file - promoters70/1021218
gtaagagag

SEQ ID NO: 81015 - DNA, 9 bp, Unknown
  misc_feature (1)..( 9): Result.001 file - promoters70/1021218
gtaagaaaa

SEQ ID NO: 81016 - DNA, 9 bp, Unknown
  misc_feature (1)..( 9): Result.001 file - promoters70/1021218
ttaagaaaa

SEQ ID NO: 81017 - DNA, 8 bp, Unknown
  misc_feature (1)..( 8): Result.001 file - promoters70/1021218
aaagaaag

SEQ ID NO: 81018 - DNA, 8 bp, Unknown
  misc_feature (1)..( 8): Result.001 file - promoters70/1021218
taagaaaa

SEQ ID NO: 81019 - DNA, 8 bp, Unknown
  misc_feature (1)..( 8): Result.001 file - promoters70/1021218
aaataaaa

SEQ ID NO: 81020 - DNA, 8 bp, Unknown
  misc_feature (1)..( 8): Result.001 file - promoters70/1021218
taagaaaa

SEQ ID NO: 81021 - DNA, 9 bp, Unknown
  misc_feature (1)..( 9): Result.001 file - promoters70/1021218
gtttaaacg

SEQ ID NO: 81022 - DNA, 9 bp, Unknown
  misc_feature (1)..( 9): Result.001 file - promoters70/1021218
gttcaaacg

SEQ ID NO: 81023 - DNA, 9 bp, Unknown
  misc_feature (1)..( 9): Result.001 file - promoters70/1021218
tactaaacg

SEQ ID NO: 81024 - DNA, 9 bp, Unknown
  misc_feature (1)..( 9): Result.001 file - promoters70/1021218
attagaaac

SEQ ID NO: 81025 - DNA, 9 bp, Unknown
  misc_feature (1)..( 9): Result.001 file - promoters70/1021218
attcgaaaa

SEQ ID NO: 81026 - DNA, 9 bp, Unknown
  misc_feature (1)..( 9): Result.001 file - promoters70/1021218
tttctaaaa

SEQ ID NO: 81027 - DNA, 8 bp, Unknown
  misc_feature (1)..( 8): Result.001 file - promoters70/1021218
attcttat

SEQ ID NO: 81028 - DNA, 8 bp, Unknown
  misc_feature (1)..( 8): Result.001 file - promoters70/1021218
tttcctat

SEQ ID NO: 81029 - DNA, 8 bp, Unknown
  misc_feature (1)..( 8): Result.001 file - promoters70/1021218
tttactac

SEQ ID NO: 81030 - DNA, 12 bp, Unknown
  misc_feature (1)..( 12): Result.001 file - promoters70/1021218
agtaaataaatg

SEQ ID NO: 81031 - DNA, 12 bp, Unknown
  misc_feature (1)..( 12): Result.001 file - promoters70/1021218
atataatcaatg

SEQ ID NO: 81032 - DNA, 12 bp, Unknown
  misc_feature (1)..( 12): Result.001 file - promoters70/1021218
agtaaataaaac

SEQ ID NO: 81033 - DNA, 12 bp, Unknown
  misc_feature (1)..( 12): Result.001 file - promoters70/1021218
tcaccaaacaat

SEQ ID NO: 81034 - DNA, 12 bp, Unknown
  misc_feature (1)..( 12): Result.001 file - promoters70/1021218
aaaccaaacatg

SEQ ID NO: 81035 - DNA, 12 bp, Unknown
  misc_feature (1)..( 12): Result.001 file - promoters70/1021218
aaactaaagatg

SEQ ID NO: 81036 - DNA, 13 bp, Unknown
  misc_feature (1)..( 13): Result.001 file - promoters70/1021218
taaagaattttct

SEQ ID NO: 81037 - DNA, 13 bp, Unknown
  misc_feature (1)..( 13): Result.001 file - promoters70/1021218
taaagatgacgtc

SEQ ID NO: 81038 - DNA, 13 bp, Unknown
  misc_feature (1)..( 13): Result.001 file - promoters70/1021438
caaaccaaacatg

SEQ ID NO: 81039 - DNA, 7 bp, Unknown
  misc_feature (1)..( 7): Result.001 file - promoters70/1021438
aaaagtt

SEQ ID NO: 81040 - DNA, 7 bp, Unknown
  misc_feature (1)..( 7): Result.001 file - promoters70/1021438
aaaagtc

SEQ ID NO: 81041 - DNA, 7 bp, Unknown
  misc_feature (1)..( 7): Result.001 file - promoters70/1021445
aaaatca

SEQ ID NO: 81042 - DNA, 8 bp, Unknown
  misc_feature (1)..( 8): Result.001 file - promoters70/1021445
gtttctat

SEQ ID NO: 81043 - DNA, 8 bp, Unknown
  misc_feature (1)..( 8): Result.001 file - promoters70/1021445
gttactag

SEQ ID NO: 81044 - DNA, 8 bp, Unknown
  misc_feature (1)..( 8): Result.001 file - promoters70/1021445
ctttttat

SEQ ID NO: 81045 - DNA, 9 bp, Unknown
  misc_feature (1)..( 9): Result.001 file - promoters70/1021445
ttttaaaaa

SEQ ID NO: 81046 - DNA, 9 bp, Unknown
  misc_feature (1)..( 9): Result.001 file - promoters70/1021445
aattaaaaa

SEQ ID NO: 81047 - DNA, 9 bp, Unknown
  misc_feature (1)..( 9): Result.001 file - promoters70/1021445
aatcaaact

SEQ ID NO: 81048 - DNA, 9 bp, Unknown
  misc_feature (1)..( 9): Result.001 file - promoters70/1021445
aatcaaata

SEQ ID NO: 81049 - DNA, 9 bp, Unknown
  misc_feature (1)..( 9): Result.001 file - promoters70/1021445
taaaagaaa

SEQ ID NO: 81050 - DNA, 9 bp, Unknown
  misc_feature (1)..( 9): Result.001 file - promoters70/1021445
aaaaaaaaa

SEQ ID NO: 81051 - DNA, 9 bp, Unknown
  misc_feature (1)..( 9): Result.001 file - promoters70/1021445
taataaatt

SEQ ID NO: 81052 - DNA, 12 bp, Unknown
  misc_feature (1)..( 12): Result.001 file - promoters70/1021445
ttgaaaacaaat

SEQ ID NO: 81053 - DNA, 12 bp, Unknown
  misc_feature (1)..( 12): Result.001 file - promoters70/1021445
taaaaaactaat

SEQ ID NO: 81054 - DNA, 12 bp, Unknown
  misc_feature (1)..( 12): Result.001 file - promoters70/1021445
taataaacatct

SEQ ID NO: 81055 - DNA, 8 bp, Unknown
  misc_feature (1)..( 8): Result.001 file - promoters70/1021445
tggaatat

SEQ ID NO: 81056 - DNA, 8 bp, Unknown
  misc_feature (1)..( 8): Result.001 file - promoters70/1021445
tggtataa

SEQ ID NO: 81057 - DNA, 8 bp, Unknown
  misc_feature (1)..( 8): Result.001 file - promoters70/1021445
atgaatat

SEQ ID NO: 81058 - DNA, 7 bp, Unknown
  misc_feature (1)..( 7): Result.001 file - promoters70/1021445
attaaaa

SEQ ID NO: 81059 - DNA, 7 bp, Unknown
  misc_feature (1)..( 7): Result.001 file - promoters70/1021445
attaaag

SEQ ID NO: 81060 - DNA, 7 bp, Unknown
  misc_feature (1)..( 7): Result.001 file - promoters70/1021445
attgaag

SEQ ID NO: 81061 - DNA, 7 bp, Unknown
  misc_feature (1)..( 7): Result.001 file - promoters70/1021445
agacgat

SEQ ID NO: 81062 - DNA, 7 bp, Unknown
  misc_feature (1)..( 7): Result.001 file - promoters70/1021445
agaagat

SEQ ID NO: 81063 - DNA, 7 bp, Unknown
  misc_feature (1)..( 7): Result.001 file - promoters70/1021445
tgaagat

SEQ ID NO: 81064 - DNA, 17 bp, Unknown
  misc_feature (1)..( 17): Result.001 file - promoters70/1021445
ttatcaaaacgccgcgt

SEQ ID NO: 81065 - DNA, 17 bp, Unknown
  misc_feature (1)..( 17): Result.001 file - promoters70/1021445
ctttataaacgctgcgt

SEQ ID NO: 81066 - DNA, 17 bp, Unknown
  misc_feature (1)..( 17): Result.001 file - promoters70/1021445
ctttataaactctgcat

SEQ ID NO: 81067 - DNA, 8 bp, Unknown
  misc_feature (1)..( 8): Result.001 file - promoters70/1021445
attttgtg

SEQ ID NO: 81068 - DNA, 8 bp, Unknown
  misc_feature (1)..( 8): Result.001 file - promoters70/1021445
attatgtt

SEQ ID NO: 81069 - DNA, 8 bp, Unknown
  misc_feature (1)..( 8): Result.001 file - promoters70/1021445
cttttgtg

SEQ ID NO: 81070 - DNA, 16 bp, Unknown
  misc_feature (1)..( 16): Result.001 file - promoters70/1021445
tctgcatctcccgtct

SEQ ID NO: 81071 - DNA, 16 bp, Unknown
  misc_feature (1)..( 16): Result.001 file - promoters70/1021445
tcttcatcatctcttt

SEQ ID NO: 81072 - DNA, 16 bp, Unknown
  misc_feature (1)..( 16): Result.001 file - promoters70/1021549
tctttataaacgctgc

SEQ ID NO: 81073 - DNA, 11 bp, Unknown
  misc_feature (1)..( 11): Result.001 file - promoters70/1021549
acatatatact

SEQ ID NO: 81074 - DNA, 11 bp, Unknown
  misc_feature (1)..( 11): Result.001 file - promoters70/1021549
gtatatatata

SEQ ID NO: 81075 - DNA, 11 bp, Unknown
  misc_feature (1)..( 11): Result.001 file - promoters70/1021549
tggtatataaa

SEQ ID NO: 81076 - DNA, 11 bp, Unknown
  misc_feature (1)..( 11): Result.001 file - promoters70/1021549
taatataaagg

SEQ ID NO: 81077 - DNA, 11 bp, Unknown
  misc_feature (1)..( 11): Result.001 file - promoters70/1021549
cactatttaaa

SEQ ID NO: 81078 - DNA, 11 bp, Unknown
  misc_feature (1)..( 11): Result.001 file - promoters70/1021549
ggttatttagt

SEQ ID NO: 81079 - DNA, 9 bp, Unknown
  misc_feature (1)..( 9): Result.001 file - promoters70/1021549
tctagttta

SEQ ID NO: 81080 - DNA, 9 bp, Unknown
  misc_feature (1)..( 9): Result.001 file - promoters70/1021549
aatagttta

SEQ ID NO: 81081 - DNA, 9 bp, Unknown
  misc_feature (1)..( 9): Result.001 file - promoters70/1021549
cataatttt

SEQ ID NO: 81082 - DNA, 9 bp, Unknown
  misc_feature (1)..( 9): Result.001 file - promoters70/1021549
tataatttt

SEQ ID NO: 81083 - DNA, 9 bp, Unknown
  misc_feature (1)..( 9): Result.001 file - promoters70/1021549
aatcgttga

SEQ ID NO: 81084 - DNA, 9 bp, Unknown
  misc_feature (1)..( 9): Result.001 file - promoters70/1021549
gatattttc

SEQ ID NO: 81085 - DNA, 12 bp, Unknown
  misc_feature (1)..( 12): Result.001 file - promoters70/1021549
agttgtacatat

SEQ ID NO: 81086 - DNA, 12 bp, Unknown
  misc_feature (1)..( 12): Result.001 file - promoters70/1021549
acaaatacataa

SEQ ID NO: 81087 - DNA, 12 bp, Unknown
  misc_feature (1)..( 12): Result.001 file - promoters70/1021549
agttatatatat

SEQ ID NO: 81088 - DNA, 12 bp, Unknown
  misc_feature (1)..( 12): Result.001 file - promoters70/1021549
gagcttagatat

SEQ ID NO: 81089 - DNA, 12 bp, Unknown
  misc_feature (1)..( 12): Result.001 file - promoters70/1021549
acagttgtataa

SEQ ID NO: 81090 - DNA, 12 bp, Unknown
  misc_feature (1)..( 12): Result.001 file - promoters70/1021862
atttttggatat

SEQ ID NO: 81091 - DNA, 7 bp, Unknown
  misc_feature (1)..( 7): Result.001 file - promoters70/1021862
aaatcgt

SEQ ID NO: 81092 - DNA, 7 bp, Unknown
  misc_feature (1)..( 7): Result.001 file - promoters70/1021862
taatcgt

SEQ ID NO: 81093 - DNA, 7 bp, Unknown
  misc_feature (1)..( 7): Result.001 file - promoters70/1021862
aaatcgt

SEQ ID NO: 81094 - DNA, 10 bp, Unknown
  misc_feature (1)..( 10): Result.001 file - promoters70/1021862
catttaagtt

SEQ ID NO: 81095 - DNA, 10 bp, Unknown
  misc_feature (1)..( 10): Result.001 file - promoters70/1021862
catataaaca

SEQ ID NO: 81096 - DNA, 10 bp, Unknown
  misc_feature (1)..( 10): Result.001 file - promoters70/1021862
tatttgagtt

SEQ ID NO: 81097 - DNA, 9 bp, Unknown
  misc_feature (1)..( 9): Result.001 file - promoters70/1021862
aaattttca

SEQ ID NO: 81098 - DNA, 9 bp, Unknown
  misc_feature (1)..( 9): Result.001 file - promoters70/1021862
taatattca

SEQ ID NO: 81099 - DNA, 9 bp, Unknown
  misc_feature (1)..( 9): Result.001 file - promoters70/1021862
aaatttaaa

SEQ ID NO: 81100 - DNA, 8 bp, Unknown
  misc_feature (1)..( 8): Result.001 file - promoters70/1021862
aaacttcc

SEQ ID NO: 81101 - DNA, 8 bp, Unknown
  misc_feature (1)..( 8): Result.001 file - promoters70/1021862
aaaattcc

SEQ ID NO: 81102 - DNA, 8 bp, Unknown
  misc_feature (1)..( 8): Result.001 file - promoters70/1021862
aaacttta

SEQ ID NO: 81103 - DNA, 6 bp, Unknown
  misc_feature (1)..( 6): Result.001 file - promoters70/1021862
taaaat

SEQ ID NO: 81104 - DNA, 6 bp, Unknown
  misc_feature (1)..( 6): Result.001 file - promoters70/1021862
taaaat

SEQ ID NO: 81105 - DNA, 6 bp, Unknown
  misc_feature (1)..( 6): Result.001 file - promoters70/1021870
taaaat

SEQ ID NO: 81106 - DNA, 9 bp, Unknown
  misc_feature (1)..( 9): Result.001 file - promoters70/1021870
aaaatcgta

SEQ ID NO: 81107 - DNA, 9 bp, Unknown
  misc_feature (1)..( 9): Result.001 file - promoters70/1021870
aaaatctgg

SEQ ID NO: 81108 - DNA, 9 bp, Unknown
  misc_feature (1)..( 9): Result.001 file - promoters70/1021870
taaatttgg

SEQ ID NO: 81109 - DNA, 8 bp, Unknown
  misc_feature (1)..( 8): Result.001 file - promoters70/1021870
ccaaaatc

SEQ ID NO: 81110 - DNA, 8 bp, Unknown
  misc_feature (1)..( 8): Result.001 file - promoters70/1021870
ccataatt

SEQ ID NO: 81111 - DNA, 8 bp, Unknown
  misc_feature (1)..( 8): Result.001 file - promoters70/1021952
aaataatt

SEQ ID NO: 81112 - DNA, 13 bp, Unknown
  misc_feature (1)..( 13): Result.001 file - promoters70/1021952
tcataaatcacaa

SEQ ID NO: 81113 - DNA, 13 bp, Unknown
  misc_feature (1)..( 13): Result.001 file - promoters70/1021952
tcattaatccttg

SEQ ID NO: 81114 - DNA, 13 bp, Unknown
  misc_feature (1)..( 13): Result.001 file - promoters70/1021952
aatgaaatcatgt

SEQ ID NO: 81115 - DNA, 13 bp, Unknown
  misc_feature (1)..( 13): Result.001 file - promoters70/1021952
cattccatcctta

SEQ ID NO: 81116 - DNA, 13 bp, Unknown
  misc_feature (1)..( 13): Result.001 file - promoters70/1021952
ttattaatgaatg

SEQ ID NO: 81117 - DNA, 13 bp, Unknown
  misc_feature (1)..( 13): Result.001 file - promoters70/1021968
ctaaaaatccttg

SEQ ID NO: 81118 - DNA, 13 bp, Unknown
  misc_feature (1)..( 13): Result.001 file - promoters70/1021968
tcaacaatgtaca

SEQ ID NO: 81119 - DNA, 13 bp, Unknown
  misc_feature (1)..( 13): Result.001 file - promoters70/1021968
ccaataatttaca

SEQ ID NO: 81120 - DNA, 13 bp, Unknown
  misc_feature (1)..( 13): Result.001 file - promoters70/1021968
gtaaaaataagaa

SEQ ID NO: 81121 - DNA, 13 bp, Unknown
  misc_feature (1)..( 13): Result.001 file - promoters70/1021968
ttgaaaatttata

SEQ ID NO: 81122 - DNA, 10 bp, Unknown
  misc_feature (1)..( 10): Result.001 file - promoters70/1021968
taataacatc

SEQ ID NO: 81123 - DNA, 10 bp, Unknown
  misc_feature (1)..( 10): Result.001 file - promoters70/1021968
aaataacaaa

SEQ ID NO: 81124 - DNA, 10 bp, Unknown
  misc_feature (1)..( 10): Result.001 file - promoters70/1021968
aaataagaaa

SEQ ID NO: 81125 - DNA, 9 bp, Unknown
  misc_feature (1)..( 9): Result.001 file - promoters70/1021968
aaaaaatta

SEQ ID NO: 81126 - DNA, 9 bp, Unknown
  misc_feature (1)..( 9): Result.001 file - promoters70/1021968
aaataattc

SEQ ID NO: 81127 - DNA, 9 bp, Unknown
  misc_feature (1)..( 9): Result.001 file - promoters70/1021968
acttaattc

SEQ ID NO: 81128 - DNA, 8 bp, Unknown
  misc_feature (1)..( 8): Result.001 file - promoters70/1021968
gtattttt

SEQ ID NO: 81129 - DNA, 8 bp, Unknown
  misc_feature (1)..( 8): Result.001 file - promoters70/1021968
gtatgttt

SEQ ID NO: 81130 - DNA, 8 bp, Unknown
  misc_feature (1)..( 8): Result.001 file - promoters70/1021968
atattttt

SEQ ID NO: 81131 - DNA, 9 bp, Unknown
  misc_feature (1)..( 9): Result.001 file - promoters70/1021968
cttaagtca

SEQ ID NO: 81132 - DNA, 9 bp, Unknown
  misc_feature (1)..( 9): Result.001 file - promoters70/1021968
cttaattca

SEQ ID NO: 81133 - DNA, 9 bp, Unknown
  misc_feature (1)..( 9): Result.001 file - promoters70/1021968
aataattct

SEQ ID NO: 81134 - DNA, 9 bp, Unknown
  misc_feature (1)..( 9): Result.001 file - promoters70/1021968
gaaaaaaat

SEQ ID NO: 81135 - DNA, 9 bp, Unknown
  misc_feature (1)..( 9): Result.001 file - promoters70/1021968
ataaaaaat

SEQ ID NO: 81136 - DNA, 9 bp, Unknown
  misc_feature (1)..( 9): Result.001 file - promoters70/1021987
atacaaact

SEQ ID NO: 81137 - DNA, 9 bp, Unknown
  misc_feature (1)..( 9): Result.001 file - promoters70/1021987
ttttggttt

SEQ ID NO: 81138 - DNA, 9 bp, Unknown
  misc_feature (1)..( 9): Result.001 file - promoters70/1021987
atttgattt

SEQ ID NO: 81139 - DNA, 9 bp, Unknown
  misc_feature (1)..( 9): Result.001 file - promoters70/1022245
atttaattt

SEQ ID NO: 81140 - DNA, 7 bp, Unknown
  misc_feature (1)..( 7): Result.001 file - promoters70/1022245
aaaatca

SEQ ID NO: 81141 - DNA, 7 bp, Unknown
  misc_feature (1)..( 7): Result.001 file - promoters70/1022245
aaaatcc

SEQ ID NO: 81142 - DNA, 7 bp, Unknown
  misc_feature (1)..( 7): Result.001 file - promoters70/1022296
aaagtca

SEQ ID NO: 81143 - DNA, 10 bp, Unknown
  misc_feature (1)..( 10): Result.001 file - promoters70/1022296
cagaaggaaa

SEQ ID NO: 81144 - DNA, 10 bp, Unknown
  misc_feature (1)..( 10): Result.001 file - promoters70/1022296
cagatggaat

SEQ ID NO: 81145 - DNA, 10 bp, Unknown
  misc_feature (1)..( 10): Result.001 file - promoters70/1022296
acaatggaat

SEQ ID NO: 81146 - DNA, 7 bp, Unknown
  misc_feature (1)..( 7): Result.001 file - promoters70/1022296
tatttag

SEQ ID NO: 81147 - DNA, 7 bp, Unknown
  misc_feature (1)..( 7): Result.001 file - promoters70/1022296
tatttat

SEQ ID NO: 81148 - DNA, 7 bp, Unknown
  misc_feature (1)..( 7): Result.001 file - promoters70/1022296
tatatat

SEQ ID NO: 81149 - DNA, 9 bp, Unknown
  misc_feature (1)..( 9): Result.001 file - promoters70/1022296
ttgaaatcg

SEQ ID NO: 81150 - DNA, 9 bp, Unknown
  misc_feature (1)..( 9): Result.001 file - promoters70/1022296
ttgtaattt

SEQ ID NO: 81151 - DNA, 9 bp, Unknown
  misc_feature (1)..( 9): Result.001 file - promoters70/1022324
gtgtcattt

SEQ ID NO: 81152 - DNA, 12 bp, Unknown
  misc_feature (1)..( 12): Result.001 file - promoters70/1022324
aaaaaagttatg

SEQ ID NO: 81153 - DNA, 12 bp, Unknown
  misc_feature (1)..( 12): Result.001 file - promoters70/1022324
tcaaaagttatg

SEQ ID NO: 81154 - DNA, 12 bp, Unknown
  misc_feature (1)..( 12): Result.001 file - promoters70/1022324
accaaagaaagg

SEQ ID NO: 81155 - DNA, 12 bp, Unknown
  misc_feature (1)..( 12): Result.001 file - promoters70/1022324
aaaaaagtataa

SEQ ID NO: 81156 - DNA, 12 bp, Unknown
  misc_feature (1)..( 12): Result.001 file - promoters70/1022324
atcaaacaaatc

SEQ ID NO: 81157 - DNA, 12 bp, Unknown
  misc_feature (1)..( 12): Result.001 file - promoters70/1022364
cacaacgaataa

SEQ ID NO: 81158 - DNA, 12 bp, Unknown
  misc_feature (1)..( 12): Result.001 file - promoters70/1022364
gttgattgatag

SEQ ID NO: 81159 - DNA, 12 bp, Unknown
  misc_feature (1)..( 12): Result.001 file - promoters70/1022364
tgtctttgttag

SEQ ID NO: 81160 - DNA, 12 bp, Unknown
  misc_feature (1)..( 12): Result.001 file - promoters70/1022364
aatcgttgatac

SEQ ID NO: 81161 - DNA, 12 bp, Unknown
  misc_feature (1)..( 12): Result.001 file - promoters70/1022364
tgtgagtgattc

SEQ ID NO: 81162 - DNA, 12 bp, Unknown
  misc_feature (1)..( 12): Result.001 file - promoters70/1022364
gaattttgtttt

SEQ ID NO: 81163 - DNA, 12 bp, Unknown
  misc_feature (1)..( 12): Result.001 file - promoters70/1022662
gaactttggttt

SEQ ID NO: 81164 - DNA, 11 bp, Unknown
  misc_feature (1)..( 11): Result.001 file - promoters70/1022662
ccatttgtaaa

SEQ ID NO: 81165 - DNA, 11 bp, Unknown
  misc_feature (1)..( 11): Result.001 file - promoters70/1022662
ttttttgtatc

SEQ ID NO: 81166 - DNA, 11 bp, Unknown
  misc_feature (1)..( 11): Result.001 file - promoters70/1022662
atctttataaa

SEQ ID NO: 81167 - DNA, 11 bp, Unknown
  misc_feature (1)..( 11): Result.001 file - promoters70/1022662
attcttgtaac

SEQ ID NO: 81168 - DNA, 11 bp, Unknown
  misc_feature (1)..( 11): Result.001 file - promoters70/1022662
atctttattta

SEQ ID NO: 81169 - DNA, 14 bp, Unknown
  misc_feature (1)..( 14): Result.001 file - promoters70/1022662
aaccttatctttat

SEQ ID NO: 81170 - DNA, 14 bp, Unknown
  misc_feature (1)..( 14): Result.001 file - promoters70/1022662
atatgtattttttg

SEQ ID NO: 81171 - DNA, 14 bp, Unknown
  misc_feature (1)..( 14): Result.001 file - promoters70/1022662
gtaaaaatctttat

SEQ ID NO: 81172 - DNA, 14 bp, Unknown
  misc_feature (1)..( 14): Result.001 file - promoters70/1022662
tttcatgtgtttga

SEQ ID NO: 81173 - DNA, 14 bp, Unknown
  misc_feature (1)..( 14): Result.001 file - promoters70/1022748
gtaaaaaacttaaa

SEQ ID NO: 81174 - DNA, 16 bp, Unknown
  misc_feature (1)..( 16): Result.001 file - promoters70/1022748
tcttttgagaaagttc

SEQ ID NO: 81175 - DNA, 16 bp, Unknown
  misc_feature (1)..( 16): Result.001 file - promoters70/1022748
gagatgtgcaaagttg

SEQ ID NO: 81176 - DNA, 16 bp, Unknown
  misc_feature (1)..( 16): Result.001 file - promoters70/1022748
tcaaaaaaaaaagttt

SEQ ID NO: 81177 - DNA, 17 bp, Unknown
  misc_feature (1)..( 17): Result.001 file - promoters70/1022748
tgtgcagaaaatagttt

SEQ ID NO: 81178 - DNA, 17 bp, Unknown
  misc_feature (1)..( 17): Result.001 file - promoters70/1022748
aatctcgactttagttt

SEQ ID NO: 81179 - DNA, 17 bp, Unknown
  misc_feature (1)..( 17): Result.001 file - promoters70/1022764
tgtacagaaaatattga

SEQ ID NO: 81180 - DNA, 7 bp, Unknown
  misc_feature (1)..( 7): Result.001 file - promoters70/1022764
tttatat

SEQ ID NO: 81181 - DNA, 7 bp, Unknown
  misc_feature (1)..( 7): Result.001 file - promoters70/1022764
tttatat

SEQ ID NO: 81182 - DNA, 7 bp, Unknown
  misc_feature (1)..( 7): Result.001 file - promoters70/1022932
tttgtat

SEQ ID NO: 81183 - DNA, 8 bp, Unknown
  misc_feature (1)..( 8): Result.001 file - promoters70/1022932
aatctgct

SEQ ID NO: 81184 - DNA, 8 bp, Unknown
  misc_feature (1)..( 8): Result.001 file - promoters70/1022932
catcagct

SEQ ID NO: 81185 - DNA, 8 bp, Unknown
  misc_feature (1)..( 8): Result.001 file - promoters70/1022932
catcagtt

SEQ ID NO: 81186 - DNA, 8 bp, Unknown
  misc_feature (1)..( 8): Result.001 file - promoters70/1022932
tttatgta

SEQ ID NO: 81187 - DNA, 8 bp, Unknown
  misc_feature (1)..( 8): Result.001 file - promoters70/1022932
gttatgtt

SEQ ID NO: 81188 - DNA, 8 bp, Unknown
  misc_feature (1)..( 8): Result.001 file - promoters70/1022932
gttgtgtt

SEQ ID NO: 81189 - DNA, 8 bp, Unknown
  misc_feature (1)..( 8): Result.001 file - promoters70/1022932
aaactttt

SEQ ID NO: 81190 - DNA, 8 bp, Unknown
  misc_feature (1)..( 8): Result.001 file - promoters70/1022932
ttactttt

SEQ ID NO: 81191 - DNA, 8 bp, Unknown
  misc_feature (1)..( 8): Result.001 file - promoters70/1022932
ttacttta

SEQ ID NO: 81192 - DNA, 7 bp, Unknown
  misc_feature (1)..( 7): Result.001 file - promoters70/1022932
ttaattt

SEQ ID NO: 81193 - DNA, 7 bp, Unknown
  misc_feature (1)..( 7): Result.001 file - promoters70/1022932
ttacttt

SEQ ID NO: 81194 - DNA, 7 bp, Unknown
  misc_feature (1)..( 7): Result.001 file - promoters70/1022932
ttacttt

SEQ ID NO: 81195 - DNA, 9 bp, Unknown
  misc_feature (1)..( 9): Result.001 file - promoters70/1022932
tactatata

SEQ ID NO: 81196 - DNA, 9 bp, Unknown
  misc_feature (1)..( 9): Result.001 file - promoters70/1022932
tacaataaa

SEQ ID NO: 81197 - DNA, 9 bp, Unknown
  misc_feature (1)..( 9): Result.001 file - promoters70/1022983
gtcaagaaa

SEQ ID NO: 81198 - DNA, 7 bp, Unknown
  misc_feature (1)..( 7): Result.001 file - promoters70/1022983
aaatcaa

SEQ ID NO: 81199 - DNA, 7 bp, Unknown
  misc_feature (1)..( 7): Result.001 file - promoters70/1022983
gaatcaa

SEQ ID NO: 81200 - DNA, 7 bp, Unknown
  misc_feature (1)..( 7): Result.001 file - promoters70/1022983
gaatcac

SEQ ID NO: 81201 - DNA, 8 bp, Unknown
  misc_feature (1)..( 8): Result.001 file - promoters70/1022983
atttctta

SEQ ID NO: 81202 - DNA, 8 bp, Unknown
  misc_feature (1)..( 8): Result.001 file - promoters70/1022983
atttctcc

SEQ ID NO: 81203 - DNA, 8 bp, Unknown
  misc_feature (1)..( 8): Result.001 file - promoters70/1022983
ttttatta

SEQ ID NO: 81204 - DNA, 9 bp, Unknown
  misc_feature (1)..( 9): Result.001 file - promoters70/1022983
ttcttattt

SEQ ID NO: 81205 - DNA, 9 bp, Unknown
  misc_feature (1)..( 9): Result.001 file - promoters70/1022983
attttattt

SEQ ID NO: 81206 - DNA, 9 bp, Unknown
  misc_feature (1)..( 9): Result.001 file - promoters70/1022983
attttatta

SEQ ID NO: 81207 - DNA, 10 bp, Unknown
  misc_feature (1)..( 10): Result.001 file - promoters70/1022983
aattgtataa

SEQ ID NO: 81208 - DNA, 10 bp, Unknown
  misc_feature (1)..( 10): Result.001 file - promoters70/1022983
tattttatta

SEQ ID NO: 81209 - DNA, 10 bp, Unknown
  misc_feature (1)..( 10): Result.001 file - promoters70/1023237
tatattatta

SEQ ID NO: 81210 - DNA, 9 bp, Unknown
  misc_feature (1)..( 9): Result.001 file - promoters70/1023237
ttgttgttt

SEQ ID NO: 81211 - DNA, 9 bp, Unknown
  misc_feature (1)..( 9): Result.001 file - promoters70/1023237
ttgttgttt

SEQ ID NO: 81212 - DNA, 9 bp, Unknown
  misc_feature (1)..( 9): Result.001 file - promoters70/1023237
tttttgttt

SEQ ID NO: 81213 - DNA, 11 bp, Unknown
  misc_feature (1)..( 11): Result.001 file - promoters70/1023237
atcttcatgtt

SEQ ID NO: 81214 - DNA, 11 bp, Unknown
  misc_feature (1)..( 11): Result.001 file - promoters70/1023237
atgttcatgtt

SEQ ID NO: 81215 - DNA, 11 bp, Unknown
  misc_feature (1)..( 11): Result.001 file - promoters70/1023453
atcttcatgac

SEQ ID NO: 81216 - DNA, 11 bp, Unknown
  misc_feature (1)..( 11): Result.001 file - promoters70/1023453
tgaagataacg

SEQ ID NO: 81217 - DNA, 11 bp, Unknown
  misc_feature (1)..( 11): Result.001 file - promoters70/1023453
gtcagataata

SEQ ID NO: 81218 - DNA, 11 bp, Unknown
  misc_feature (1)..( 11): Result.001 file - promoters70/1023453
gtcagataata

SEQ ID NO: 81219 - DNA, 11 bp, Unknown
  misc_feature (1)..( 11): Result.001 file - promoters70/1023453
gacagatatag

SEQ ID NO: 81220 - DNA, 11 bp, Unknown
  misc_feature (1)..( 11): Result.001 file - promoters70/1023453
ccaagaaatag

SEQ ID NO: 81221 - DNA, 11 bp, Unknown
  misc_feature (1)..( 11): Result.001 file - promoters70/1023453
aatagacactt

SEQ ID NO: 81222 - DNA, 20 bp, Unknown
  misc_feature (1)..( 20): Result.001 file - promoters70/1023453
aagaaaaaaagaaaagaaag

SEQ ID NO: 81223 - DNA, 20 bp, Unknown
  misc_feature (1)..( 20): Result.001 file - promoters70/1023453
tttagatttagataagtaaa

SEQ ID NO: 81224 - DNA, 20 bp, Unknown
  misc_feature (1)..( 20): Result.001 file - promoters70/1023453
tattgaaaaagaaaaagaaa

SEQ ID NO: 81225 - DNA, 20 bp, Unknown
  misc_feature (1)..( 20): Result.001 file - promoters70/1023453
aaacaaaaaaaataaacaaa

SEQ ID NO: 81226 - DNA, 20 bp, Unknown
  misc_feature (1)..( 20): Result.001 file - promoters70/1023453
agcccaaaatgaaaggtttt

SEQ ID NO: 81227 - DNA, 20 bp, Unknown
  misc_feature (1)..( 20): Result.001 file - promoters70/1023453
gtgtgtggcggataagcaaa

SEQ ID NO: 81228 - DNA, 16 bp, Unknown
  misc_feature (1)..( 16): Result.001 file - promoters70/1023453
aaagaaaagaaagaat

SEQ ID NO: 81229 - DNA, 16 bp, Unknown
  misc_feature (1)..( 16): Result.001 file - promoters70/1023453
aaaagaaaaaaagaaa

SEQ ID NO: 81230 - DNA, 16 bp, Unknown
  misc_feature (1)..( 16): Result.001 file - promoters70/1023453
aaacaaaaaaaataaa

SEQ ID NO: 81231 - DNA, 16 bp, Unknown
  misc_feature (1)..( 16): Result.001 file - promoters70/1023453
ttttgaaagaaaatct

SEQ ID NO: 81232 - DNA, 17 bp, Unknown
  misc_feature (1)..( 17): Result.001 file - promoters70/1023453
ttagataagtaaagtat

SEQ ID NO: 81233 - DNA, 17 bp, Unknown
  misc_feature (1)..( 17): Result.001 file - promoters70/1023490
gcggataagcaaaaaca

SEQ ID NO: 81234 - DNA, 16 bp, Unknown
  misc_feature (1)..( 16): Result.001 file - promoters70/1023490
aaaaaaagtttttgta

SEQ ID NO: 81235 - DNA, 16 bp, Unknown
  misc_feature (1)..( 16): Result.001 file - promoters70/1023490
ttgacaagtttcctct

SEQ ID NO: 81236 - DNA, 16 bp, Unknown
  misc_feature (1)..( 16): Result.001 file - promoters70/1023490
aaaaacagttttcttt

SEQ ID NO: 81237 - DNA, 16 bp, Unknown
  misc_feature (1)..( 16): Result.001 file - promoters70/1023490
ctatttagttaaaaaa

SEQ ID NO: 81238 - DNA, 16 bp, Unknown
  misc_feature (1)..( 16): Result.001 file - promoters70/1023490
catattgattaagaaa

SEQ ID NO: 81239 - DNA, 16 bp, Unknown
  misc_feature (1)..( 16): Result.001 file - promoters70/1023490
caaaacaattcaagag

SEQ ID NO: 81240 - DNA, 11 bp, Unknown
  misc_feature (1)..( 11): Result.001 file - promoters70/1023490
attctaactca

SEQ ID NO: 81241 - DNA, 11 bp, Unknown
  misc_feature (1)..( 11): Result.001 file - promoters70/1023490
gttcaaacttt

SEQ ID NO: 81242 - DNA, 11 bp, Unknown
  misc_feature (1)..( 11): Result.001 file - promoters70/1023490
agtcaaacaaa

SEQ ID NO: 81243 - DNA, 11 bp, Unknown
  misc_feature (1)..( 11): Result.001 file - promoters70/1023490
tgtcaaccaaa

SEQ ID NO: 81244 - DNA, 11 bp, Unknown
  misc_feature (1)..( 11): Result.001 file - promoters70/1023490
acataaatttt

SEQ ID NO: 81245 - DNA, 11 bp, Unknown
  misc_feature (1)..( 11): Result.001 file - promoters70/1023634
tgtcaatttga

SEQ ID NO: 81246 - DNA, 8 bp, Unknown
  misc_feature (1)..( 8): Result.001 file - promoters70/1023634
ttttgaat

SEQ ID NO: 81247 - DNA, 8 bp, Unknown
  misc_feature (1)..( 8): Result.001 file - promoters70/1023634
atttgaat

SEQ ID NO: 81248 - DNA, 8 bp, Unknown
  misc_feature (1)..( 8): Result.001 file - promoters70/1023634
ttttgaca

SEQ ID NO: 81249 - DNA, 11 bp, Unknown
  misc_feature (1)..( 11): Result.001 file - promoters70/1023634
aaactgtgaaa

SEQ ID NO: 81250 - DNA, 11 bp, Unknown
  misc_feature (1)..( 11): Result.001 file - promoters70/1023634
aaaatgtgaaa

SEQ ID NO: 81251 - DNA, 11 bp, Unknown
  misc_feature (1)..( 11): Result.001 file - promoters70/1023634
gctttgtgaaa

SEQ ID NO: 81252 - DNA, 8 bp, Unknown
  misc_feature (1)..( 8): Result.001 file - promoters70/1023634
aacccaaa

SEQ ID NO: 81253 - DNA, 8 bp, Unknown
  misc_feature (1)..( 8): Result.001 file - promoters70/1023634
agcccaaa

SEQ ID NO: 81254 - DNA, 8 bp, Unknown
  misc_feature (1)..( 8): Result.001 file - promoters70/1023634
agcccaat

SEQ ID NO: 81255 - DNA, 8 bp, Unknown
  misc_feature (1)..( 8): Result.001 file - promoters70/1023634
cttttaga

SEQ ID NO: 81256 - DNA, 8 bp, Unknown
  misc_feature (1)..( 8): Result.001 file - promoters70/1023634
tgtttaga

SEQ ID NO: 81257 - DNA, 8 bp, Unknown
  misc_feature (1)..( 8): Result.001 file - promoters70/1023698
tgttgaga

SEQ ID NO: 81258 - DNA, 9 bp, Unknown
  misc_feature (1)..( 9): Result.001 file - promoters70/1023698
aagtaaaaa

SEQ ID NO: 81259 - DNA, 9 bp, Unknown
  misc_feature (1)..( 9): Result.001 file - promoters70/1023698
aagcaaaaa

SEQ ID NO: 81260 - DNA, 9 bp, Unknown
  misc_feature (1)..( 9): Result.001 file - promoters70/1023698
aagcaaaaa

SEQ ID NO: 81261 - DNA, 8 bp, Unknown
  misc_feature (1)..( 8): Result.001 file - promoters70/1023698
ctttattt

SEQ ID NO: 81262 - DNA, 8 bp, Unknown
  misc_feature (1)..( 8): Result.001 file - promoters70/1023698
ctttatag

SEQ ID NO: 81263 - DNA, 8 bp, Unknown
  misc_feature (1)..( 8): Result.001 file - promoters70/1023698
ttttattt

SEQ ID NO: 81264 - DNA, 7 bp, Unknown
  misc_feature (1)..( 7): Result.001 file - promoters70/1023698
atttttt

SEQ ID NO: 81265 - DNA, 7 bp, Unknown
  misc_feature (1)..( 7): Result.001 file - promoters70/1023698
atttttt

SEQ ID NO: 81266 - DNA, 7 bp, Unknown
  misc_feature (1)..( 7): Result.001 file - promoters70/1023698
atttttt

SEQ ID NO: 81267 - DNA, 10 bp, Unknown
  misc_feature (1)..( 10): Result.001 file - promoters70/1023698
aaaaataaaa

SEQ ID NO: 81268 - DNA, 10 bp, Unknown
  misc_feature (1)..( 10): Result.001 file - promoters70/1023698
gaaattaatt

SEQ ID NO: 81269 - DNA, 10 bp, Unknown
  misc_feature (1)..( 10): Result.001 file - promoters70/1023698
taaaatataa

SEQ ID NO: 81270 - DNA, 9 bp, Unknown
  misc_feature (1)..( 9): Result.001 file - promoters70/1023698
tcttaatag

SEQ ID NO: 81271 - DNA, 9 bp, Unknown
  misc_feature (1)..( 9): Result.001 file - promoters70/1023698
tcttaattt

SEQ ID NO: 81272 - DNA, 9 bp, Unknown
  misc_feature (1)..( 9): Result.001 file - promoters70/1023698
ttttaattt

SEQ ID NO: 81273 - DNA, 10 bp, Unknown
  misc_feature (1)..( 10): Result.001 file - promoters70/1023698
atatttagtt

SEQ ID NO: 81274 - DNA, 10 bp, Unknown
  misc_feature (1)..( 10): Result.001 file - promoters70/1023698
taattttgtt

SEQ ID NO: 81275 - DNA, 10 bp, Unknown
  misc_feature (1)..( 10): Result.001 file - promoters70/1023782
atatttagta

SEQ ID NO: 81276 - DNA, 10 bp, Unknown
  misc_feature (1)..( 10): Result.001 file - promoters70/1023782
aaaataatct

SEQ ID NO: 81277 - DNA, 10 bp, Unknown
  misc_feature (1)..( 10): Result.001 file - promoters70/1023782
aaaataaaat

SEQ ID NO: 81278 - DNA, 11 bp, Unknown
  misc_feature (1)..( 11): Result.001 file - promoters70/1023782
gaaatgaaata

SEQ ID NO: 81279 - DNA, 10 bp, Unknown
  misc_feature (1)..( 10): Result.001 file - promoters70/1023782
ataaatcaaa

SEQ ID NO: 81280 - DNA, 10 bp, Unknown
  misc_feature (1)..( 10): Result.001 file - promoters70/1023782
ggaaatgaaa

SEQ ID NO: 81281 - DNA, 10 bp, Unknown
  misc_feature (1)..( 10): Result.001 file - promoters70/1023963
ggaaaagaaa

SEQ ID NO: 81282 - DNA, 10 bp, Unknown
  misc_feature (1)..( 10): Result.001 file - promoters70/1023963
ttctactttt

SEQ ID NO: 81283 - DNA, 10 bp, Unknown
  misc_feature (1)..( 10): Result.001 file - promoters70/1023963
ttctacaaca

SEQ ID NO: 81284 - DNA, 10 bp, Unknown
  misc_feature (1)..( 10): Result.001 file - promoters70/1023963
ttcttctttt

SEQ ID NO: 81285 - DNA, 10 bp, Unknown
  misc_feature (1)..( 10): Result.001 file - promoters70/1023963
ttctttgtaa

SEQ ID NO: 81286 - DNA, 8 bp, Unknown
  misc_feature (1)..( 8): Result.001 file - promoters70/1023963
gttttgta

SEQ ID NO: 81287 - DNA, 8 bp, Unknown
  misc_feature (1)..( 8): Result.001 file - promoters70/1023963
atttcgta

SEQ ID NO: 81288 - DNA, 8 bp, Unknown
  misc_feature (1)..( 8): Result.001 file - promoters70/1023963
attgcgtc

SEQ ID NO: 81289 - DNA, 8 bp, Unknown
  misc_feature (1)..( 8): Result.001 file - promoters70/1023963
aaatgtgt

SEQ ID NO: 81290 - DNA, 8 bp, Unknown
  misc_feature (1)..( 8): Result.001 file - promoters70/1023963
aaatgtag

SEQ ID NO: 81291 - DNA, 8 bp, Unknown
  misc_feature (1)..( 8): Result.001 file - promoters70/1023963
caatttag

SEQ ID NO: 81292 - DNA, 9 bp, Unknown
  misc_feature (1)..( 9): Result.001 file - promoters70/1023963
atgttaatg

SEQ ID NO: 81293 - DNA, 9 bp, Unknown
  misc_feature (1)..( 9): Result.001 file - promoters70/1023963
atgtaaata

SEQ ID NO: 81294 - DNA, 9 bp, Unknown
  misc_feature (1)..( 9): Result.001 file - promoters70/1023963
tgataaata

SEQ ID NO: 81295 - DNA, 7 bp, Unknown
  misc_feature (1)..( 7): Result.001 file - promoters70/1023963
tttagta

SEQ ID NO: 81296 - DNA, 7 bp, Unknown
  misc_feature (1)..( 7): Result.001 file - promoters70/1023963
ttttgta

SEQ ID NO: 81297 - DNA, 7 bp, Unknown
  misc_feature (1)..( 7): Result.001 file - promoters70/1023963
ctttgta

SEQ ID NO: 81298 - DNA, 7 bp, Unknown
  misc_feature (1)..( 7): Result.001 file - promoters70/1023963
aaataat

SEQ ID NO: 81299 - DNA, 7 bp, Unknown
  misc_feature (1)..( 7): Result.001 file - promoters70/1023963
aaaaaat

SEQ ID NO: 81300 - DNA, 7 bp, Unknown
  misc_feature (1)..( 7): Result.001 file - promoters70/1024126
aaagaaa

SEQ ID NO: 81301 - DNA, 9 bp, Unknown
  misc_feature (1)..( 9): Result.001 file - promoters70/1024126
gaagaggaa

SEQ ID NO: 81302 - DNA, 9 bp, Unknown
  misc_feature (1)..( 9): Result.001 file - promoters70/1024126
gaagaagaa

SEQ ID NO: 81303 - DNA, 9 bp, Unknown
  misc_feature (1)..( 9): Result.001 file - promoters70/1024126
gaaaaggat

SEQ ID NO: 81304 - DNA, 9 bp, Unknown
  misc_feature (1)..( 9): Result.001 file - promoters70/1024126
aaagaatac

SEQ ID NO: 81305 - DNA, 9 bp, Unknown
  misc_feature (1)..( 9): Result.001 file - promoters70/1024126
aaaaaaatg

SEQ ID NO: 81306 - DNA, 9 bp, Unknown
  misc_feature (1)..( 9): Result.001 file - promoters70/1024126
gaaaaatca

SEQ ID NO: 81307 - DNA, 12 bp, Unknown
  misc_feature (1)..( 12): Result.001 file - promoters70/1024126
aagccaaaaatg

SEQ ID NO: 81308 - DNA, 12 bp, Unknown
  misc_feature (1)..( 12): Result.001 file - promoters70/1024126
acaccacaaatt

SEQ ID NO: 81309 - DNA, 12 bp, Unknown
  misc_feature (1)..( 12): Result.001 file - promoters70/1024126
atagcaaaaaac

SEQ ID NO: 81310 - DNA, 12 bp, Unknown
  misc_feature (1)..( 12): Result.001 file - promoters70/1024126
tgaggaaacaac

SEQ ID NO: 81311 - DNA, 12 bp, Unknown
  misc_feature (1)..( 12): Result.001 file - promoters70/1024126
ttcgcaaaacta

SEQ ID NO: 81312 - DNA, 12 bp, Unknown
  misc_feature (1)..( 12): Result.001 file - promoters70/1024126
atatcaaaggtc

SEQ ID NO: 81313 - DNA, 11 bp, Unknown
  misc_feature (1)..( 11): Result.001 file - promoters70/1024126
ccattaacgga

SEQ ID NO: 81314 - DNA, 11 bp, Unknown
  misc_feature (1)..( 11): Result.001 file - promoters70/1024126
acattaattat

SEQ ID NO: 81315 - DNA, 11 bp, Unknown
  misc_feature (1)..( 11): Result.001 file - promoters70/1024126
acaataacaaa

SEQ ID NO: 81316 - DNA, 11 bp, Unknown
  misc_feature (1)..( 11): Result.001 file - promoters70/1024126
agaatatcaaa

SEQ ID NO: 81317 - DNA, 11 bp, Unknown
  misc_feature (1)..( 11): Result.001 file - promoters70/1024126
aacatatcact

SEQ ID NO: 81318 - DNA, 11 bp, Unknown
  misc_feature (1)..( 11): Result.001 file - promoters70/1024189
tatatagcaaa

SEQ ID NO: 81319 - DNA, 9 bp, Unknown
  misc_feature (1)..( 9): Result.001 file - promoters70/1024189
aaaaatgaa

SEQ ID NO: 81320 - DNA, 9 bp, Unknown
  misc_feature (1)..( 9): Result.001 file - promoters70/1024189
aaaaaagaa

SEQ ID NO: 81321 - DNA, 9 bp, Unknown
  misc_feature (1)..( 9): Result.001 file - promoters70/1024189
gaaaaaggg

SEQ ID NO: 81322 - DNA, 8 bp, Unknown
  misc_feature (1)..( 8): Result.001 file - promoters70/1024189
ttttatca

SEQ ID NO: 81323 - DNA, 8 bp, Unknown
  misc_feature (1)..( 8): Result.001 file - promoters70/1024189
ttttgtca

SEQ ID NO: 81324 - DNA, 8 bp, Unknown
  misc_feature (1)..( 8): Result.001 file - promoters70/1024189
ttttgtat

SEQ ID NO: 81325 - DNA, 8 bp, Unknown
  misc_feature (1)..( 8): Result.001 file - promoters70/1024189
atatatat

SEQ ID NO: 81326 - DNA, 8 bp, Unknown
  misc_feature (1)..( 8): Result.001 file - promoters70/1024189
atatttat

SEQ ID NO: 81327 - DNA, 8 bp, Unknown
  misc_feature (1)..( 8): Result.001 file - promoters70/1024189
caatttat

SEQ ID NO: 81328 - DNA, 8 bp, Unknown
  misc_feature (1)..( 8): Result.001 file - promoters70/1024189
taatttat

SEQ ID NO: 81329 - DNA, 8 bp, Unknown
  misc_feature (1)..( 8): Result.001 file - promoters70/1024189
aatcaaaa

SEQ ID NO: 81330 - DNA, 8 bp, Unknown
  misc_feature (1)..( 8): Result.001 file - promoters70/1024189
aatcaaat

SEQ ID NO: 81331 - DNA, 9 bp, Unknown
  misc_feature (1)..( 9): Result.001 file - promoters70/1024189
gatccaaac

SEQ ID NO: 81332 - DNA, 9 bp, Unknown
  misc_feature (1)..( 9): Result.001 file - promoters70/1024189
tatcctaac

SEQ ID NO: 81333 - DNA, 11 bp, Unknown
  misc_feature (1)..( 11): Result.001 file - promoters70/1024189
ctagacacgta

SEQ ID NO: 81334 - DNA, 11 bp, Unknown
  misc_feature (1)..( 11): Result.001 file - promoters70/1024189
atcaacacgta

SEQ ID NO: 81335 - DNA, 11 bp, Unknown
  misc_feature (1)..( 11): Result.001 file - promoters70/1024189
aaagagacgaa

SEQ ID NO: 81336 - DNA, 11 bp, Unknown
  misc_feature (1)..( 11): Result.001 file - promoters70/1024189
aaaaagaatac

SEQ ID NO: 81337 - DNA, 7 bp, Unknown
  misc_feature (1)..( 7): Result.001 file - promoters70/1024189
actatac

SEQ ID NO: 81338 - DNA, 7 bp, Unknown
  misc_feature (1)..( 7): Result.001 file - promoters70/1024189
actttac

SEQ ID NO: 81339 - DNA, 7 bp, Unknown
  misc_feature (1)..( 7): Result.001 file - promoters70/1024189
tctttac

SEQ ID NO: 81340 - DNA, 8 bp, Unknown
  misc_feature (1)..( 8): Result.001 file - promoters70/1024189
atataata

SEQ ID NO: 81341 - DNA, 8 bp, Unknown
  misc_feature (1)..( 8): Result.001 file - promoters70/1024189
ttattata

SEQ ID NO: 81342 - DNA, 8 bp, Unknown
  misc_feature (1)..( 8): Result.001 file - promoters70/1024189
atataatt

SEQ ID NO: 81343 - DNA, 8 bp, Unknown
  misc_feature (1)..( 8): Result.001 file - promoters70/1024189
atataata

SEQ ID NO: 81344 - DNA, 9 bp, Unknown
  misc_feature (1)..( 9): Result.001 file - promoters70/1024189
tttgttggt

SEQ ID NO: 81345 - DNA, 9 bp, Unknown
  misc_feature (1)..( 9): Result.001 file - promoters70/1024189
tttattgat

SEQ ID NO: 81346 - DNA, 9 bp, Unknown
  misc_feature (1)..( 9): Result.001 file - promoters70/1024189
gttactgat

SEQ ID NO: 81347 - DNA, 11 bp, Unknown
  misc_feature (1)..( 11): Result.001 file - promoters70/1024189
agaaattaata

SEQ ID NO: 81348 - DNA, 11 bp, Unknown
  misc_feature (1)..( 11): Result.001 file - promoters70/1024189
taaaatcaata

SEQ ID NO: 81349 - DNA, 12 bp, Unknown
  misc_feature (1)..( 12): Result.001 file - promoters70/1024189
ataacatcactt

SEQ ID NO: 81350 - DNA, 12 bp, Unknown
  misc_feature (1)..( 12): Result.001 file - promoters70/1024189
ctatcaaaactt

SEQ ID NO: 81351 - DNA, 12 bp, Unknown
  misc_feature (1)..( 12): Result.001 file - promoters70/1024189
ctaacaaacaat

SEQ ID NO: 81352 - DNA, 12 bp, Unknown
  misc_feature (1)..( 12): Result.001 file - promoters70/1024199
ggctcaaagctt

SEQ ID NO: 81353 - DNA, 11 bp, Unknown
  misc_feature (1)..( 11): Result.001 file - promoters70/1024199
atttgattgaa

SEQ ID NO: 81354 - DNA, 11 bp, Unknown
  misc_feature (1)..( 11): Result.001 file - promoters70/1024199
aggtgaatgat

SEQ ID NO: 81355 - DNA, 11 bp, Unknown
  misc_feature (1)..( 11): Result.001 file - promoters70/1024199
catttaattag

SEQ ID NO: 81356 - DNA, 11 bp, Unknown
  misc_feature (1)..( 11): Result.001 file - promoters70/1024199
tcgtgaaggat

SEQ ID NO: 81357 - DNA, 11 bp, Unknown
  misc_feature (1)..( 11): Result.001 file - promoters70/1024199
catataagtaa

SEQ ID NO: 81358 - DNA, 11 bp, Unknown
  misc_feature (1)..( 11): Result.001 file - promoters70/1024199
catttatgttc

SEQ ID NO: 81359 - DNA, 14 bp, Unknown
  misc_feature (1)..( 14): Result.001 file - promoters70/1024199
taagtcttaagcac

SEQ ID NO: 81360 - DNA, 14 bp, Unknown
  misc_feature (1)..( 14): Result.001 file - promoters70/1024199
aatctcttaaaacc

SEQ ID NO: 81361 - DNA, 14 bp, Unknown
  misc_feature (1)..( 14): Result.001 file - promoters70/1024199
aatcccttaaaccc

SEQ ID NO: 81362 - DNA, 14 bp, Unknown
  misc_feature (1)..( 14): Result.001 file - promoters70/1024199
cgttatataaatcc

SEQ ID NO: 81363 - DNA, 14 bp, Unknown
  misc_feature (1)..( 14): Result.001 file - promoters70/1024199
ttatttatgaatcc

SEQ ID NO: 81364 - DNA, 14 bp, Unknown
  misc_feature (1)..( 14): Result.001 file - promoters70/1024199
gtctttataaactc

SEQ ID NO: 81365 - DNA, 15 bp, Unknown
  misc_feature (1)..( 15): Result.001 file - promoters70/1024199
ggcctatttacaatg

SEQ ID NO: 81366 - DNA, 15 bp, Unknown
  misc_feature (1)..( 15): Result.001 file - promoters70/1024199
ggcctatatactatg

SEQ ID NO: 81367 - DNA, 15 bp, Unknown
  misc_feature (1)..( 15): Result.001 file - promoters70/1024199
atcttatttaatgaa

SEQ ID NO: 81368 - DNA, 15 bp, Unknown
  misc_feature (1)..( 15): Result.001 file - promoters70/1024199
acattatatataaaa

SEQ ID NO: 81369 - DNA, 15 bp, Unknown
  misc_feature (1)..( 15): Result.001 file - promoters70/1024199
gctttaattagctca

SEQ ID NO: 81370 - DNA, 15 bp, Unknown
  misc_feature (1)..( 15): Result.001 file - promoters70/1024203
gtcgaaatcagcagc

SEQ ID NO: 81371 - DNA, 9 bp, Unknown
  misc_feature (1)..( 9): Result.001 file - promoters70/1024203
agaaaagac

SEQ ID NO: 81372 - DNA, 9 bp, Unknown
  misc_feature (1)..( 9): Result.001 file - promoters70/1024203
agacaagcg

SEQ ID NO: 81373 - DNA, 9 bp, Unknown
  misc_feature (1)..( 9): Result.001 file - promoters70/1024203
gaacaggcg

SEQ ID NO: 81374 - DNA, 7 bp, Unknown
  misc_feature (1)..( 7): Result.001 file - promoters70/1024203
acaagcg

SEQ ID NO: 81375 - DNA, 7 bp, Unknown
  misc_feature (1)..( 7): Result.001 file - promoters70/1024203
acaggcg

SEQ ID NO: 81376 - DNA, 7 bp, Unknown
  misc_feature (1)..( 7): Result.001 file - promoters70/1024203
acaagcg

SEQ ID NO: 81377 - DNA, 7 bp, Unknown
  misc_feature (1)..( 7): Result.001 file - promoters70/1024203
tcgatga

SEQ ID NO: 81378 - DNA, 7 bp, Unknown
  misc_feature (1)..( 7): Result.001 file - promoters70/1024203
tcgatga

SEQ ID NO: 81379 - DNA, 7 bp, Unknown
  misc_feature (1)..( 7): Result.001 file - promoters70/1024234
tcgatga

SEQ ID NO: 81380 - DNA, 13 bp, Unknown
  misc_feature (1)..( 13): Result.001 file - promoters70/1024234
taaatttaaaaat

SEQ ID NO: 81381 - DNA, 13 bp, Unknown
  misc_feature (1)..( 13): Result.001 file - promoters70/1024234
ttgattcaaaatt

SEQ ID NO: 81382 - DNA, 13 bp, Unknown
  misc_feature (1)..( 13): Result.001 file - promoters70/1024236
ttgaatcaatatt

SEQ ID NO: 81383 - DNA, 11 bp, Unknown
  misc_feature (1)..( 11): Result.001 file - promoters70/1024236
aacacaaaaat

SEQ ID NO: 81384 - DNA, 11 bp, Unknown
  misc_feature (1)..( 11): Result.001 file - promoters70/1024236
aacacaagaag

SEQ ID NO: 81385 - DNA, 11 bp, Unknown
  misc_feature (1)..( 11): Result.001 file - promoters70/1024236
tgcacaagaat

SEQ ID NO: 81386 - DNA, 11 bp, Unknown
  misc_feature (1)..( 11): Result.001 file - promoters70/1024236
agcacgagatg

SEQ ID NO: 81387 - DNA, 11 bp, Unknown
  misc_feature (1)..( 11): Result.001 file - promoters70/1024236
agcacaattgt

SEQ ID NO: 81388 - DNA, 11 bp, Unknown
  misc_feature (1)..( 11): Result.001 file - promoters70/1024236
cagacttttgt

SEQ ID NO: 81389 - DNA, 12 bp, Unknown
  misc_feature (1)..( 12): Result.001 file - promoters70/1024236
tataaacttttc

SEQ ID NO: 81390 - DNA, 12 bp, Unknown
  misc_feature (1)..( 12): Result.001 file - promoters70/1024236
aaaaaagttttt

SEQ ID NO: 81391 - DNA, 12 bp, Unknown
  misc_feature (1)..( 12): Result.001 file - promoters70/1024236
ccacaacttttc

SEQ ID NO: 81392 - DNA, 12 bp, Unknown
  misc_feature (1)..( 12): Result.001 file - promoters70/1024236
actttagttttg

SEQ ID NO: 81393 - DNA, 12 bp, Unknown
  misc_feature (1)..( 12): Result.001 file - promoters70/1024236
aaaatagtttac

SEQ ID NO: 81394 - DNA, 12 bp, Unknown
  misc_feature (1)..( 12): Result.001 file - promoters70/1024236
gtatttgttttt

SEQ ID NO: 81395 - DNA, 13 bp, Unknown
  misc_feature (1)..( 13): Result.001 file - promoters70/1024236
gtttgctggcaat

SEQ ID NO: 81396 - DNA, 13 bp, Unknown
  misc_feature (1)..( 13): Result.001 file - promoters70/1024236
gtttactgaattg

SEQ ID NO: 81397 - DNA, 13 bp, Unknown
  misc_feature (1)..( 13): Result.001 file - promoters70/1024236
taatacagaattg

SEQ ID NO: 81398 - DNA, 13 bp, Unknown
  misc_feature (1)..( 13): Result.001 file - promoters70/1024236
cattactggtaaa

SEQ ID NO: 81399 - DNA, 13 bp, Unknown
  misc_feature (1)..( 13): Result.001 file - promoters70/1024236
ttttaatgggccg

SEQ ID NO: 81400 - DNA, 13 bp, Unknown
  misc_feature (1)..( 13): Result.001 file - promoters70/1024257
caatagtggaagt

SEQ ID NO: 81401 - DNA, 10 bp, Unknown
  misc_feature (1)..( 10): Result.001 file - promoters70/1024257
atctctcaaa

SEQ ID NO: 81402 - DNA, 10 bp, Unknown
  misc_feature (1)..( 10): Result.001 file - promoters70/1024257
atcgctcaag

SEQ ID NO: 81403 - DNA, 11 bp, Unknown
  misc_feature (1)..( 11): Result.001 file - promoters70/1024367
tatcctccaaa

SEQ ID NO: 81404 - DNA, 9 bp, Unknown
  misc_feature (1)..( 9): Result.001 file - promoters70/1024367
attaacttt

SEQ ID NO: 81405 - DNA, 9 bp, Unknown
  misc_feature (1)..( 9): Result.001 file - promoters70/1024367
cataagttt

SEQ ID NO: 81406 - DNA, 9 bp, Unknown
  misc_feature (1)..( 9): Result.001 file - promoters70/1024367
attaactta

SEQ ID NO: 81407 - DNA, 9 bp, Unknown
  misc_feature (1)..( 9): Result.001 file - promoters70/1024367
ttgaacttt

SEQ ID NO: 81408 - DNA, 8 bp, Unknown
  misc_feature (1)..( 8): Result.001 file - promoters70/1024367
actatata

SEQ ID NO: 81409 - DNA, 8 bp, Unknown
  misc_feature (1)..( 8): Result.001 file - promoters70/1024367
tttatata

SEQ ID NO: 81410 - DNA, 8 bp, Unknown
  misc_feature (1)..( 8): Result.001 file - promoters70/1024367
catatata

SEQ ID NO: 81411 - DNA, 8 bp, Unknown
  misc_feature (1)..( 8): Result.001 file - promoters70/1024367
tgtatata

SEQ ID NO: 81412 - DNA, 8 bp, Unknown
  misc_feature (1)..( 8): Result.001 file - promoters70/1024367
tttatatt

SEQ ID NO: 81413 - DNA, 11 bp, Unknown
  misc_feature (1)..( 11): Result.001 file - promoters70/1024367
ttagaaactat

SEQ ID NO: 81414 - DNA, 11 bp, Unknown
  misc_feature (1)..( 11): Result.001 file - promoters70/1024367
ttaaaaaaaaa

SEQ ID NO: 81415 - DNA, 11 bp, Unknown
  misc_feature (1)..( 11): Result.001 file - promoters70/1024367
cgaaaaaaaac

SEQ ID NO: 81416 - DNA, 11 bp, Unknown
  misc_feature (1)..( 11): Result.001 file - promoters70/1024367
ctaaaaaaaac

SEQ ID NO: 81417 - DNA, 9 bp, Unknown
  misc_feature (1)..( 9): Result.001 file - promoters70/1024367
tttccgaat

SEQ ID NO: 81418 - DNA, 9 bp, Unknown
  misc_feature (1)..( 9): Result.001 file - promoters70/1024367
cttcccaat

SEQ ID NO: 81419 - DNA, 9 bp, Unknown
  misc_feature (1)..( 9): Result.001 file - promoters70/1024367
ttttcgatc

SEQ ID NO: 81420 - DNA, 9 bp, Unknown
  misc_feature (1)..( 9): Result.001 file - promoters70/1024367
tttcccata

SEQ ID NO: 81421 - DNA, 7 bp, Unknown
  misc_feature (1)..( 7): Result.001 file - promoters70/1024367
aattttg

SEQ ID NO: 81422 - DNA, 7 bp, Unknown
  misc_feature (1)..( 7): Result.001 file - promoters70/1024367
aatttta

SEQ ID NO: 81423 - DNA, 7 bp, Unknown
  misc_feature (1)..( 7): Result.001 file - promoters70/1024367
aattttt

SEQ ID NO: 81424 - DNA, 7 bp, Unknown
  misc_feature (1)..( 7): Result.001 file - promoters70/1024367
tatttta

SEQ ID NO: 81425 - DNA, 8 bp, Unknown
  misc_feature (1)..( 8): Result.001 file - promoters70/1024367
agaaaaaa

SEQ ID NO: 81426 - DNA, 8 bp, Unknown
  misc_feature (1)..( 8): Result.001 file - promoters70/1024367
ggaacaaa

SEQ ID NO: 81427 - DNA, 8 bp, Unknown
  misc_feature (1)..( 8): Result.001 file - promoters70/1024367
agacaaaa

SEQ ID NO: 81428 - DNA, 9 bp, Unknown
  misc_feature (1)..( 9): Result.001 file - promoters70/1024499
agatacagt

SEQ ID NO: 81429 - DNA, 8 bp, Unknown
  misc_feature (1)..( 8): Result.001 file - promoters70/1024499
tttttaat

SEQ ID NO: 81430 - DNA, 8 bp, Unknown
  misc_feature (1)..( 8): Result.001 file - promoters70/1024499
tttgtaat

SEQ ID NO: 81431 - DNA, 8 bp, Unknown
  misc_feature (1)..( 8): Result.001 file - promoters70/1024499
tttgtaac

SEQ ID NO: 81432 - DNA, 12 bp, Unknown
  misc_feature (1)..( 12): Result.001 file - promoters70/1024499
taagatattttt

SEQ ID NO: 81433 - DNA, 12 bp, Unknown
  misc_feature (1)..( 12): Result.001 file - promoters70/1024499
aaaaatatattt

SEQ ID NO: 81434 - DNA, 12 bp, Unknown
  misc_feature (1)..( 12): Result.001 file - promoters70/1024499
taaaatacttta

SEQ ID NO: 81435 - DNA, 7 bp, Unknown
  misc_feature (1)..( 7): Result.001 file - promoters70/1024499
tttattt

SEQ ID NO: 81436 - DNA, 7 bp, Unknown
  misc_feature (1)..( 7): Result.001 file - promoters70/1024499
tttcttt

SEQ ID NO: 81437 - DNA, 7 bp, Unknown
  misc_feature (1)..( 7): Result.001 file - promoters70/1024499
ttcattt

SEQ ID NO: 81438 - DNA, 7 bp, Unknown
  misc_feature (1)..( 7): Result.001 file - promoters70/1024499
cataaac

SEQ ID NO: 81439 - DNA, 7 bp, Unknown
  misc_feature (1)..( 7): Result.001 file - promoters70/1024499
cataaat

SEQ ID NO: 81440 - DNA, 7 bp, Unknown
  misc_feature (1)..( 7): Result.001 file - promoters70/1024499
cataaac

SEQ ID NO: 81441 - DNA, 12 bp, Unknown
  misc_feature (1)..( 12): Result.001 file - promoters70/1024499
ttcatataaata

SEQ ID NO: 81442 - DNA, 12 bp, Unknown
  misc_feature (1)..( 12): Result.001 file - promoters70/1024499
taactataaata

SEQ ID NO: 81443 - DNA, 12 bp, Unknown
  misc_feature (1)..( 12): Result.001 file - promoters70/1024499
tatatataaata

SEQ ID NO: 81444 - DNA, 12 bp, Unknown
  misc_feature (1)..( 12): Result.001 file - promoters70/1024499
aatctataaaaa

SEQ ID NO: 81445 - DNA, 11 bp, Unknown
  misc_feature (1)..( 11): Result.001 file - promoters70/1024499
tcaattttttt

SEQ ID NO: 81446 - DNA, 11 bp, Unknown
  misc_feature (1)..( 11): Result.001 file - promoters70/1024499
ctaattttagc

SEQ ID NO: 81447 - DNA, 11 bp, Unknown
  misc_feature (1)..( 11): Result.001 file - promoters70/1024756
attatttttac

SEQ ID NO: 81448 - DNA, 9 bp, Unknown
  misc_feature (1)..( 9): Result.001 file - promoters70/1024756
gggattttt

SEQ ID NO: 81449 - DNA, 9 bp, Unknown
  misc_feature (1)..( 9): Result.001 file - promoters70/1024756
ataattttt

SEQ ID NO: 81450 - DNA, 9 bp, Unknown
  misc_feature (1)..( 9): Result.001 file - promoters70/1024756
ataatgttt

SEQ ID NO: 81451 - DNA, 11 bp, Unknown
  misc_feature (1)..( 11): Result.001 file - promoters70/1024756
taacagtcaaa

SEQ ID NO: 81452 - DNA, 11 bp, Unknown
  misc_feature (1)..( 11): Result.001 file - promoters70/1024756
gtcaggtcaaa

SEQ ID NO: 81453 - DNA, 11 bp, Unknown
  misc_feature (1)..( 11): Result.001 file - promoters70/1024756
taacagtcaaa

SEQ ID NO: 81454 - DNA, 8 bp, Unknown
  misc_feature (1)..( 8): Result.001 file - promoters70/1024756
ttatcaag

SEQ ID NO: 81455 - DNA, 8 bp, Unknown
  misc_feature (1)..( 8): Result.001 file - promoters70/1024756
ttaccaaa

SEQ ID NO: 81456 - DNA, 9 bp, Unknown
  misc_feature (1)..( 9): Result.001 file - promoters70/1024853
acacctaat

SEQ ID NO: 81457 - DNA, 11 bp, Unknown
  misc_feature (1)..( 11): Result.001 file - promoters70/1024853
agaattgacca

SEQ ID NO: 81458 - DNA, 11 bp, Unknown
  misc_feature (1)..( 11): Result.001 file - promoters70/1024853
tgaattggaat

SEQ ID NO: 81459 - DNA, 11 bp, Unknown
  misc_feature (1)..( 11): Result.001 file - promoters70/1024853
ggaaatgacgt

SEQ ID NO: 81460 - DNA, 11 bp, Unknown
  misc_feature (1)..( 11): Result.001 file - promoters70/1024853
tgatttgcttc

SEQ ID NO: 81461 - DNA, 11 bp, Unknown
  misc_feature (1)..( 11): Result.001 file - promoters70/1024853
agtattagctt

SEQ ID NO: 81462 - DNA, 11 bp, Unknown
  misc_feature (1)..( 11): Result.001 file - promoters70/1024853
acaaaagacac

SEQ ID NO: 81463 - DNA, 11 bp, Unknown
  misc_feature (1)..( 11): Result.001 file - promoters70/1024853
tgatttttaat

SEQ ID NO: 81464 - DNA, 9 bp, Unknown
  misc_feature (1)..( 9): Result.001 file - promoters70/1024853
gaaaaaaag

SEQ ID NO: 81465 - DNA, 9 bp, Unknown
  misc_feature (1)..( 9): Result.001 file - promoters70/1024853
caaacaaat

SEQ ID NO: 81466 - DNA, 9 bp, Unknown
  misc_feature (1)..( 9): Result.001 file - promoters70/1024853
caaagaaag

SEQ ID NO: 81467 - DNA, 9 bp, Unknown
  misc_feature (1)..( 9): Result.001 file - promoters70/1024853
caaaaaaaa

SEQ ID NO: 81468 - DNA, 9 bp, Unknown
  misc_feature (1)..( 9): Result.001 file - promoters70/1024853
aaactaaaa

SEQ ID NO: 81469 - DNA, 9 bp, Unknown
  misc_feature (1)..( 9): Result.001 file - promoters70/1024853
caaacacaa

SEQ ID NO: 81470 - DNA, 9 bp, Unknown
  misc_feature (1)..( 9): Result.001 file - promoters70/1024853
caaggaaag

SEQ ID NO: 81471 - DNA, 9 bp, Unknown
  misc_feature (1)..( 9): Result.001 file - promoters70/1024889
cacacaaag

SEQ ID NO: 81472 - DNA, 19 bp, Unknown
  misc_feature (1)..( 19): Result.001 file - promoters70/1024889
aaaatcaattaagggtaac

SEQ ID NO: 81473 - DNA, 19 bp, Unknown
  misc_feature (1)..( 19): Result.001 file - promoters70/1024889
tgtatcgattatgttttta

SEQ ID NO: 81474 - DNA, 19 bp, Unknown
  misc_feature (1)..( 19): Result.001 file - promoters70/1024889
caaaacaattaaataatgt

SEQ ID NO: 81475 - DNA, 19 bp, Unknown
  misc_feature (1)..( 19): Result.001 file - promoters70/1024889
tctttcgattgtgttctta

SEQ ID NO: 81476 - DNA, 19 bp, Unknown
  misc_feature (1)..( 19): Result.001 file - promoters70/1024889
aatatagatagttattcac

SEQ ID NO: 81477 - DNA, 19 bp, Unknown
  misc_feature (1)..( 19): Result.001 file - promoters70/1024889
caaaaccgttactaaaagt

SEQ ID NO: 81478 - DNA, 11 bp, Unknown
  misc_feature (1)..( 11): Result.001 file - promoters70/1024889
atagtttctct

SEQ ID NO: 81479 - DNA, 11 bp, Unknown
  misc_feature (1)..( 11): Result.001 file - promoters70/1024889
ataatttaatg

SEQ ID NO: 81480 - DNA, 11 bp, Unknown
  misc_feature (1)..( 11): Result.001 file - promoters70/1024889
ataattttata

SEQ ID NO: 81481 - DNA, 11 bp, Unknown
  misc_feature (1)..( 11): Result.001 file - promoters70/1024889
agaattttttt

SEQ ID NO: 81482 - DNA, 11 bp, Unknown
  misc_feature (1)..( 11): Result.001 file - promoters70/1024889
atcattttttt

SEQ ID NO: 81483 - DNA, 11 bp, Unknown
  misc_feature (1)..( 11): Result.001 file - promoters70/1024889
tcaatttgagt

SEQ ID NO: 81484 - DNA, 10 bp, Unknown
  misc_feature (1)..( 10): Result.001 file - promoters70/1024889
ttcttttatt

SEQ ID NO: 81485 - DNA, 10 bp, Unknown
  misc_feature (1)..( 10): Result.001 file - promoters70/1024889
atctattagt

SEQ ID NO: 81486 - DNA, 10 bp, Unknown
  misc_feature (1)..( 10): Result.001 file - promoters70/1024889
attttttttc

SEQ ID NO: 81487 - DNA, 10 bp, Unknown
  misc_feature (1)..( 10): Result.001 file - promoters70/1024889
taattttata

SEQ ID NO: 81488 - DNA, 10 bp, Unknown
  misc_feature (1)..( 10): Result.001 file - promoters70/1024889
atctatgatt

SEQ ID NO: 81489 - DNA, 10 bp, Unknown
  misc_feature (1)..( 10): Result.001 file - promoters70/1024889
atttttttct

SEQ ID NO: 81490 - DNA, 10 bp, Unknown
  misc_feature (1)..( 10): Result.001 file - promoters70/1024889
gtcaatttga

SEQ ID NO: 81491 - DNA, 16 bp, Unknown
  misc_feature (1)..( 16): Result.001 file - promoters70/1024889
aatagatttttgttaa

SEQ ID NO: 81492 - DNA, 16 bp, Unknown
  misc_feature (1)..( 16): Result.001 file - promoters70/1024889
ttttttttttttttac

SEQ ID NO: 81493 - DNA, 16 bp, Unknown
  misc_feature (1)..( 16): Result.001 file - promoters70/1024889
tcgattatgtttttac

SEQ ID NO: 81494 - DNA, 16 bp, Unknown
  misc_feature (1)..( 16): Result.001 file - promoters70/1024889
tcgattgtgttcttag

SEQ ID NO: 81495 - DNA, 16 bp, Unknown
  misc_feature (1)..( 16): Result.001 file - promoters70/1024889
ttaatatactttttag

SEQ ID NO: 81496 - DNA, 16 bp, Unknown
  misc_feature (1)..( 16): Result.001 file - promoters70/1024889
aagagtttgtattcaa

SEQ ID NO: 81497 - DNA, 18 bp, Unknown
  misc_feature (1)..( 18): Result.001 file - promoters70/1024889
tcgattatgtttttacgt

SEQ ID NO: 81498 - DNA, 18 bp, Unknown
  misc_feature (1)..( 18): Result.001 file - promoters70/1024889
ttaatatactttttagtg

SEQ ID NO: 81499 - DNA, 18 bp, Unknown
  misc_feature (1)..( 18): Result.001 file - promoters70/1024889
ttttttttttttttacag

SEQ ID NO: 81500 - DNA, 18 bp, Unknown
  misc_feature (1)..( 18): Result.001 file - promoters70/1024889
tcgattgtgttcttagga

SEQ ID NO: 81501 - DNA, 18 bp, Unknown
  misc_feature (1)..( 18): Result.001 file - promoters70/1024889
gggtactaatctttacat

SEQ ID NO: 81502 - DNA, 18 bp, Unknown
  misc_feature (1)..( 18): Result.001 file - promoters70/1024993
catgaagagtttgtattc

SEQ ID NO: 81503 - DNA, 11 bp, Unknown
  misc_feature (1)..( 11): Result.001 file - promoters70/1024993
agacatgatca

SEQ ID NO: 81504 - DNA, 11 bp, Unknown
  misc_feature (1)..( 11): Result.001 file - promoters70/1024993
tgacatgatcg

SEQ ID NO: 81505 - DNA, 11 bp, Unknown
  misc_feature (1)..( 11): Result.001 file - promoters70/1024993
tagtatgatca

SEQ ID NO: 81506 - DNA, 11 bp, Unknown
  misc_feature (1)..( 11): Result.001 file - promoters70/1024993
tgaaatgattc

SEQ ID NO: 81507 - DNA, 11 bp, Unknown
  misc_feature (1)..( 11): Result.001 file - promoters70/1024993
gacaatgattt

SEQ ID NO: 81508 - DNA, 11 bp, Unknown
  misc_feature (1)..( 11): Result.001 file - promoters70/1024993
tcttattatcg

SEQ ID NO: 81509 - DNA, 14 bp, Unknown
  misc_feature (1)..( 14): Result.001 file - promoters70/1024993
tggtctaaggcgcc

SEQ ID NO: 81510 - DNA, 14 bp, Unknown
  misc_feature (1)..( 14): Result.001 file - promoters70/1024993
atgtctaatatcgt

SEQ ID NO: 81511 - DNA, 14 bp, Unknown
  misc_feature (1)..( 14): Result.001 file - promoters70/1024993
tcgtcgaatcctcg

SEQ ID NO: 81512 - DNA, 14 bp, Unknown
  misc_feature (1)..( 14): Result.001 file - promoters70/1024993
ttttctaattttgt

SEQ ID NO: 81513 - DNA, 14 bp, Unknown
  misc_feature (1)..( 14): Result.001 file - promoters70/1024993
atttccaattttgt

SEQ ID NO: 81514 - DNA, 14 bp, Unknown
  misc_feature (1)..( 14): Result.001 file - promoters70/1024993
ttttccaatgattc

SEQ ID NO: 81515 - DNA, 18 bp, Unknown
  misc_feature (1)..( 18): Result.001 file - promoters70/1024993
tcgtcgttacaaagtggg

SEQ ID NO: 81516 - DNA, 18 bp, Unknown
  misc_feature (1)..( 18): Result.001 file - promoters70/1024993
aaattgttccaaatttca

SEQ ID NO: 81517 - DNA, 18 bp, Unknown
  misc_feature (1)..( 18): Result.001 file - promoters70/1024993
atgtccttacacaacgtc

SEQ ID NO: 81518 - DNA, 18 bp, Unknown
  misc_feature (1)..( 18): Result.001 file - promoters70/1024993
atggcctgttactgggct

SEQ ID NO: 81519 - DNA, 18 bp, Unknown
  misc_feature (1)..( 18): Result.001 file - promoters70/1024993
gccttaatccgaatttca

SEQ ID NO: 81520 - DNA, 18 bp, Unknown
  misc_feature (1)..( 18): Result.001 file - promoters70/1025211
atttaagcccaaataata

SEQ ID NO: 81521 - DNA, 7 bp, Unknown
  misc_feature (1)..( 7): Result.001 file - promoters70/1025211
aaacaaa

SEQ ID NO: 81522 - DNA, 7 bp, Unknown
  misc_feature (1)..( 7): Result.001 file - promoters70/1025211
aaacaaa

SEQ ID NO: 81523 - DNA, 7 bp, Unknown
  misc_feature (1)..( 7): Result.001 file - promoters70/1025211
aaaaaaa

SEQ ID NO: 81524 - DNA, 9 bp, Unknown
  misc_feature (1)..( 9): Result.001 file - promoters70/1025211
atattatta

SEQ ID NO: 81525 - DNA, 9 bp, Unknown
  misc_feature (1)..( 9): Result.001 file - promoters70/1025211
ttattatat

SEQ ID NO: 81526 - DNA, 9 bp, Unknown
  misc_feature (1)..( 9): Result.001 file - promoters70/1025211
atataatta

SEQ ID NO: 81527 - DNA, 10 bp, Unknown
  misc_feature (1)..( 10): Result.001 file - promoters70/1025211
gtttccaata

SEQ ID NO: 81528 - DNA, 10 bp, Unknown
  misc_feature (1)..( 10): Result.001 file - promoters70/1025211
gtttcaaata

SEQ ID NO: 81529 - DNA, 10 bp, Unknown
  misc_feature (1)..( 10): Result.001 file - promoters70/1025211
agatcaaata

SEQ ID NO: 81530 - DNA, 8 bp, Unknown
  misc_feature (1)..( 8): Result.001 file - promoters70/1025211
agtctaaa

SEQ ID NO: 81531 - DNA, 8 bp, Unknown
  misc_feature (1)..( 8): Result.001 file - promoters70/1025211
agtccaaa

SEQ ID NO: 81532 - DNA, 8 bp, Unknown
  misc_feature (1)..( 8): Result.001 file - promoters70/1025211
ggtcaaaa

SEQ ID NO: 81533 - DNA, 9 bp, Unknown
  misc_feature (1)..( 9): Result.001 file - promoters70/1025211
aagtaaaca

SEQ ID NO: 81534 - DNA, 9 bp, Unknown
  misc_feature (1)..( 9): Result.001 file - promoters70/1025211
atctaaaca

SEQ ID NO: 81535 - DNA, 9 bp, Unknown
  misc_feature (1)..( 9): Result.001 file - promoters70/1025211
aaataaaac

SEQ ID NO: 81536 - DNA, 10 bp, Unknown
  misc_feature (1)..( 10): Result.001 file - promoters70/1025211
aatgaaaaac

SEQ ID NO: 81537 - DNA, 10 bp, Unknown
  misc_feature (1)..( 10): Result.001 file - promoters70/1025211
aatgaaattc

SEQ ID NO: 81538 - DNA, 10 bp, Unknown
  misc_feature (1)..( 10): Result.001 file - promoters70/1025582
aatgatattc

SEQ ID NO: 81539 - DNA, 10 bp, Unknown
  misc_feature (1)..( 10): Result.001 file - promoters70/1025582
gagacaattg

SEQ ID NO: 81540 - DNA, 10 bp, Unknown
  misc_feature (1)..( 10): Result.001 file - promoters70/1025582
tttacatttg

SEQ ID NO: 81541 - DNA, 10 bp, Unknown
  misc_feature (1)..( 10): Result.001 file - promoters70/1025642
gagataattt

SEQ ID NO: 81542 - DNA, 12 bp, Unknown
  misc_feature (1)..( 12): Result.001 file - promoters70/1025642
tcagaattaata

SEQ ID NO: 81543 - DNA, 12 bp, Unknown
  misc_feature (1)..( 12): Result.001 file - promoters70/1025642
tcataattaata

SEQ ID NO: 81544 - DNA, 12 bp, Unknown
  misc_feature (1)..( 12): Result.001 file - promoters70/1025642
catttattaaca

SEQ ID NO: 81545 - DNA, 12 bp, Unknown
  misc_feature (1)..( 12): Result.001 file - promoters70/1025642
attttattcaaa

SEQ ID NO: 81546 - DNA, 10 bp, Unknown
  misc_feature (1)..( 10): Result.001 file - promoters70/1025642
ccaaatttgg

SEQ ID NO: 81547 - DNA, 10 bp, Unknown
  misc_feature (1)..( 10): Result.001 file - promoters70/1025642
ccaattttaa

SEQ ID NO: 81548 - DNA, 10 bp, Unknown
  misc_feature (1)..( 10): Result.001 file - promoters70/1025642
ataattttgc

SEQ ID NO: 81549 - DNA, 12 bp, Unknown
  misc_feature (1)..( 12): Result.001 file - promoters70/1025642
ctaatgatttag

SEQ ID NO: 81550 - DNA, 12 bp, Unknown
  misc_feature (1)..( 12): Result.001 file - promoters70/1025642
taggagatttag

SEQ ID NO: 81551 - DNA, 9 bp, Unknown
  misc_feature (1)..( 9): Result.001 file - promoters70/1025642
tatataata

SEQ ID NO: 81552 - DNA, 9 bp, Unknown
  misc_feature (1)..( 9): Result.001 file - promoters70/1025642
tataaaata

SEQ ID NO: 81553 - DNA, 9 bp, Unknown
  misc_feature (1)..( 9): Result.001 file - promoters70/1025642
tttataatg

SEQ ID NO: 81554 - DNA, 9 bp, Unknown
  misc_feature (1)..( 9): Result.001 file - promoters70/1025683
tttttaact

SEQ ID NO: 81555 - DNA, 9 bp, Unknown
  misc_feature (1)..( 9): Result.001 file - promoters70/1025683
agagaatac

SEQ ID NO: 81556 - DNA, 9 bp, Unknown
  misc_feature (1)..( 9): Result.001 file - promoters70/1025683
agaaaatta

SEQ ID NO: 81557 - DNA, 9 bp, Unknown
  misc_feature (1)..( 9): Result.001 file - promoters70/1025683
agaacattg

SEQ ID NO: 81558 - DNA, 9 bp, Unknown
  misc_feature (1)..( 9): Result.001 file - promoters70/1025683
tctacattg

SEQ ID NO: 81559 - DNA, 10 bp, Unknown
  misc_feature (1)..( 10): Result.001 file - promoters70/1025683
cctttataaa

SEQ ID NO: 81560 - DNA, 10 bp, Unknown
  misc_feature (1)..( 10): Result.001 file - promoters70/1025683
cctatatata

SEQ ID NO: 81561 - DNA, 10 bp, Unknown
  misc_feature (1)..( 10): Result.001 file - promoters70/1025683
gtcttataaa

SEQ ID NO: 81562 - DNA, 14 bp, Unknown
  misc_feature (1)..( 14): Result.001 file - promoters70/1025683
atcgaatcagctaa

SEQ ID NO: 81563 - DNA, 14 bp, Unknown
  misc_feature (1)..( 14): Result.001 file - promoters70/1025683
tatgaatctgctaa

SEQ ID NO: 81564 - DNA, 14 bp, Unknown
  misc_feature (1)..( 14): Result.001 file - promoters70/1025791
tatgaatcatgtca

SEQ ID NO: 81565 - DNA, 14 bp, Unknown
  misc_feature (1)..( 14): Result.001 file - promoters70/1025791
tgaaagaaccttcc

SEQ ID NO: 81566 - DNA, 14 bp, Unknown
  misc_feature (1)..( 14): Result.001 file - promoters70/1025791
caaaagaatcagtg

SEQ ID NO: 81567 - DNA, 14 bp, Unknown
  misc_feature (1)..( 14): Result.001 file - promoters70/1025791
taaaagaacgaaat

SEQ ID NO: 81568 - DNA, 14 bp, Unknown
  misc_feature (1)..( 14): Result.001 file - promoters70/1025791
caaaacaattcaag

SEQ ID NO: 81569 - DNA, 14 bp, Unknown
  misc_feature (1)..( 14): Result.001 file - promoters70/1025791
ccaacgaaacgatt

SEQ ID NO: 81570 - DNA, 14 bp, Unknown
  misc_feature (1)..( 14): Result.001 file - promoters70/1025791
ccacagttctgtct

SEQ ID NO: 81571 - DNA, 12 bp, Unknown
  misc_feature (1)..( 12): Result.001 file - promoters70/1025791
ttccaaaaatga

SEQ ID NO: 81572 - DNA, 12 bp, Unknown
  misc_feature (1)..( 12): Result.001 file - promoters70/1025791
aaccaaaagaat

SEQ ID NO: 81573 - DNA, 12 bp, Unknown
  misc_feature (1)..( 12): Result.001 file - promoters70/1025791
aacgaaatatct

SEQ ID NO: 81574 - DNA, 12 bp, Unknown
  misc_feature (1)..( 12): Result.001 file - promoters70/1025791
taacaaaacaat

SEQ ID NO: 81575 - DNA, 12 bp, Unknown
  misc_feature (1)..( 12): Result.001 file - promoters70/1025791
aacgaaacgatt

SEQ ID NO: 81576 - DNA, 12 bp, Unknown
  misc_feature (1)..( 12): Result.001 file - promoters70/1026160
ttccacagttct

SEQ ID NO: 81577 - DNA, 15 bp, Unknown
  misc_feature (1)..( 15): Result.001 file - promoters70/1026160
aggataaaccatcgt

SEQ ID NO: 81578 - DNA, 15 bp, Unknown
  misc_feature (1)..( 15): Result.001 file - promoters70/1026160
aaaacaaaacatata

SEQ ID NO: 81579 - DNA, 15 bp, Unknown
  misc_feature (1)..( 15): Result.001 file - promoters70/1026160
ttcctctaccgtcgt

SEQ ID NO: 81580 - DNA, 15 bp, Unknown
  misc_feature (1)..( 15): Result.001 file - promoters70/1026160
ttaacaaaacaattc

SEQ ID NO: 81581 - DNA, 15 bp, Unknown
  misc_feature (1)..( 15): Result.001 file - promoters70/1026160
ttaataaaatttcac

SEQ ID NO: 81582 - DNA, 15 bp, Unknown
  misc_feature (1)..( 15): Result.001 file - promoters70/1026160
ttagtaaaagaatca

SEQ ID NO: 81583 - DNA, 11 bp, Unknown
  misc_feature (1)..( 11): Result.001 file - promoters70/1026160
caccaagacca

SEQ ID NO: 81584 - DNA, 11 bp, Unknown
  misc_feature (1)..( 11): Result.001 file - promoters70/1026160
atacaaaaccc

SEQ ID NO: 81585 - DNA, 11 bp, Unknown
  misc_feature (1)..( 11): Result.001 file - promoters70/1026160
aaacaaaacat

SEQ ID NO: 81586 - DNA, 11 bp, Unknown
  misc_feature (1)..( 11): Result.001 file - promoters70/1026160
aaacaaagtaa

SEQ ID NO: 81587 - DNA, 11 bp, Unknown
  misc_feature (1)..( 11): Result.001 file - promoters70/1026160
taagaaaaaaa

SEQ ID NO: 81588 - DNA, 11 bp, Unknown
  misc_feature (1)..( 11): Result.001 file - promoters70/1026551
aatcaaaaaat

SEQ ID NO: 81589 - DNA, 8 bp, Unknown
  misc_feature (1)..( 8): Result.001 file - promoters70/1026551
aatatata

SEQ ID NO: 81590 - DNA, 8 bp, Unknown
  misc_feature (1)..( 8): Result.001 file - promoters70/1026551
aatttata

SEQ ID NO: 81591 - DNA, 8 bp, Unknown
  misc_feature (1)..( 8): Result.001 file - promoters70/1026551
catatatg

SEQ ID NO: 81592 - DNA, 11 bp, Unknown
  misc_feature (1)..( 11): Result.001 file - promoters70/1026551
gcatatacctt

SEQ ID NO: 81593 - DNA, 11 bp, Unknown
  misc_feature (1)..( 11): Result.001 file - promoters70/1026551
aagtataactt

SEQ ID NO: 81594 - DNA, 11 bp, Unknown
  misc_feature (1)..( 11): Result.001 file - promoters70/1026551
aagtttaaaat

SEQ ID NO: 81595 - DNA, 7 bp, Unknown
  misc_feature (1)..( 7): Result.001 file - promoters70/1026551
aaatatt

SEQ ID NO: 81596 - DNA, 7 bp, Unknown
  misc_feature (1)..( 7): Result.001 file - promoters70/1026551
aaatatg

SEQ ID NO: 81597 - DNA, 7 bp, Unknown
  misc_feature (1)..( 7): Result.001 file - promoters70/1026551
aaaaatg

SEQ ID NO: 81598 - DNA, 15 bp, Unknown
  misc_feature (1)..( 15): Result.001 file - promoters70/1026551
aaggatgatggacca

SEQ ID NO: 81599 - DNA, 15 bp, Unknown
  misc_feature (1)..( 15): Result.001 file - promoters70/1026551
aaggatgatggacca

SEQ ID NO: 81600 - DNA, 15 bp, Unknown
  misc_feature (1)..( 15): Result.001 file - promoters70/1026551
aaggatgctgtgcca

SEQ ID NO: 81601 - DNA, 21 bp, Unknown
  misc_feature (1)..( 21): Result.001 file - promoters70/1026551
tacacattaataacgtggtcc

SEQ ID NO: 81602 - DNA, 21 bp, Unknown
  misc_feature (1)..( 21): Result.001 file - promoters70/1026551
tacacattaataacgtggtcg

SEQ ID NO: 81603 - DNA, 21 bp, Unknown
  misc_feature (1)..( 21): Result.001 file - promoters70/1026551
cccacgtaaataacgtggtcc

SEQ ID NO: 81604 - DNA, 7 bp, Unknown
  misc_feature (1)..( 7): Result.001 file - promoters70/1026551
ttacttt

SEQ ID NO: 81605 - DNA, 7 bp, Unknown
  misc_feature (1)..( 7): Result.001 file - promoters70/1026551
ttagttt

SEQ ID NO: 81606 - DNA, 7 bp, Unknown
  misc_feature (1)..( 7): Result.001 file - promoters70/1026551
ttaattt

SEQ ID NO: 81607 - DNA, 8 bp, Unknown
  misc_feature (1)..( 8): Result.001 file - promoters70/1026551
attttacg

SEQ ID NO: 81608 - DNA, 8 bp, Unknown
  misc_feature (1)..( 8): Result.001 file - promoters70/1026551
attttata

SEQ ID NO: 81609 - DNA, 8 bp, Unknown
  misc_feature (1)..( 8): Result.001 file - promoters70/1026622
attatata

SEQ ID NO: 81610 - DNA, 16 bp, Unknown
  misc_feature (1)..( 16): Result.001 file - promoters70/1026622
ggagttatttaatggg

SEQ ID NO: 81611 - DNA, 16 bp, Unknown
  misc_feature (1)..( 16): Result.001 file - promoters70/1026622
ggagttattacaattt

SEQ ID NO: 81612 - DNA, 16 bp, Unknown
  misc_feature (1)..( 16): Result.001 file - promoters70/1026622
gggattatttttggat

SEQ ID NO: 81613 - DNA, 16 bp, Unknown
  misc_feature (1)..( 16): Result.001 file - promoters70/1026622
agcgttttttaaaagg

SEQ ID NO: 81614 - DNA, 16 bp, Unknown
  misc_feature (1)..( 16): Result.001 file - promoters70/1026622
atccgaatttcaaagc

SEQ ID NO: 81615 - DNA, 16 bp, Unknown
  misc_feature (1)..( 16): Result.001 file - promoters70/1026622
acaaatttttaaaaag

SEQ ID NO: 81616 - DNA, 13 bp, Unknown
  misc_feature (1)..( 13): Result.001 file - promoters70/1026622
gttatttaatggg

SEQ ID NO: 81617 - DNA, 13 bp, Unknown
  misc_feature (1)..( 13): Result.001 file - promoters70/1026622
acaatttaaaaac

SEQ ID NO: 81618 - DNA, 13 bp, Unknown
  misc_feature (1)..( 13): Result.001 file - promoters70/1026622
tggatttaacaaa

SEQ ID NO: 81619 - DNA, 13 bp, Unknown
  misc_feature (1)..( 13): Result.001 file - promoters70/1026622
gttttttaaaagg

SEQ ID NO: 81620 - DNA, 14 bp, Unknown
  misc_feature (1)..( 14): Result.001 file - promoters70/1026622
cgaatttcaaagcc

SEQ ID NO: 81621 - DNA, 14 bp, Unknown
  misc_feature (1)..( 14): Result.001 file - promoters70/1026705
aaatttttaaaaag

SEQ ID NO: 81622 - DNA, 11 bp, Unknown
  misc_feature (1)..( 11): Result.001 file - promoters70/1026705
gaagatgtgaa

SEQ ID NO: 81623 - DNA, 11 bp, Unknown
  misc_feature (1)..( 11): Result.001 file - promoters70/1026705
gaaaatgggga

SEQ ID NO: 81624 - DNA, 11 bp, Unknown
  misc_feature (1)..( 11): Result.001 file - promoters70/1026861
agagatatgaa

SEQ ID NO: 81625 - DNA, 7 bp, Unknown
  misc_feature (1)..( 7): Result.001 file - promoters70/1026861
tataaaa

SEQ ID NO: 81626 - DNA, 7 bp, Unknown
  misc_feature (1)..( 7): Result.001 file - promoters70/1026861
cataaaa

SEQ ID NO: 81627 - DNA, 7 bp, Unknown
  misc_feature (1)..( 7): Result.001 file - promoters70/1026883
tataaaa

SEQ ID NO: 81628 - DNA, 9 bp, Unknown
  misc_feature (1)..( 9): Result.001 file - promoters70/1026883
aaataattt

SEQ ID NO: 81629 - DNA, 9 bp, Unknown
  misc_feature (1)..( 9): Result.001 file - promoters70/1026883
aaaaaattt

SEQ ID NO: 81630 - DNA, 9 bp, Unknown
  misc_feature (1)..( 9): Result.001 file - promoters70/1026883
aaataaaat

SEQ ID NO: 81631 - DNA, 9 bp, Unknown
  misc_feature (1)..( 9): Result.001 file - promoters70/1026883
ttgtaattt

SEQ ID NO: 81632 - DNA, 7 bp, Unknown
  misc_feature (1)..( 7): Result.001 file - promoters70/1026883
tagaact

SEQ ID NO: 81633 - DNA, 7 bp, Unknown
  misc_feature (1)..( 7): Result.001 file - promoters70/1026883
tagaaca

SEQ ID NO: 81634 - DNA, 7 bp, Unknown
  misc_feature (1)..( 7): Result.001 file - promoters70/1026883
aagaaca

SEQ ID NO: 81635 - DNA, 7 bp, Unknown
  misc_feature (1)..( 7): Result.001 file - promoters70/1026883
tgagaac

SEQ ID NO: 81636 - DNA, 7 bp, Unknown
  misc_feature (1)..( 7): Result.001 file - promoters70/1026883
tgaaaac

SEQ ID NO: 81637 - DNA, 7 bp, Unknown
  misc_feature (1)..( 7): Result.001 file - promoters70/1026883
agaaaac

SEQ ID NO: 81638 - DNA, 9 bp, Unknown
  misc_feature (1)..( 9): Result.001 file - promoters70/1026883
attagatta

SEQ ID NO: 81639 - DNA, 9 bp, Unknown
  misc_feature (1)..( 9): Result.001 file - promoters70/1026883
catagttta

SEQ ID NO: 81640 - DNA, 9 bp, Unknown
  misc_feature (1)..( 9): Result.001 file - promoters70/1026883
attggatta

SEQ ID NO: 81641 - DNA, 9 bp, Unknown
  misc_feature (1)..( 9): Result.001 file - promoters70/1026883
tcaaataat

SEQ ID NO: 81642 - DNA, 9 bp, Unknown
  misc_feature (1)..( 9): Result.001 file - promoters70/1026883
gaaaacaat

SEQ ID NO: 81643 - DNA, 9 bp, Unknown
  misc_feature (1)..( 9): Result.001 file - promoters70/1026883
acaaattta

SEQ ID NO: 81644 - DNA, 9 bp, Unknown
  misc_feature (1)..( 9): Result.001 file - promoters70/1026883
atttgtctt

SEQ ID NO: 81645 - DNA, 9 bp, Unknown
  misc_feature (1)..( 9): Result.001 file - promoters70/1026883
atttatcta

SEQ ID NO: 81646 - DNA, 9 bp, Unknown
  misc_feature (1)..( 9): Result.001 file - promoters70/1026883
ttttgttta

SEQ ID NO: 81647 - DNA, 10 bp, Unknown
  misc_feature (1)..( 10): Result.001 file - promoters70/1026883
aattatttat

SEQ ID NO: 81648 - DNA, 10 bp, Unknown
  misc_feature (1)..( 10): Result.001 file - promoters70/1026883
ctttacttac

SEQ ID NO: 81649 - DNA, 10 bp, Unknown
  misc_feature (1)..( 10): Result.001 file - promoters70/1026883
aataatttat

SEQ ID NO: 81650 - DNA, 13 bp, Unknown
  misc_feature (1)..( 13): Result.001 file - promoters70/1026883
aattatttatcgt

SEQ ID NO: 81651 - DNA, 13 bp, Unknown
  misc_feature (1)..( 13): Result.001 file - promoters70/1026883
cttactttctcgt

SEQ ID NO: 81652 - DNA, 13 bp, Unknown
  misc_feature (1)..( 13): Result.001 file - promoters70/1026883
aataatttattta

SEQ ID NO: 81653 - DNA, 8 bp, Unknown
  misc_feature (1)..( 8): Result.001 file - promoters70/1026883
aattataa

SEQ ID NO: 81654 - DNA, 8 bp, Unknown
  misc_feature (1)..( 8): Result.001 file - promoters70/1026883
aatcatag

SEQ ID NO: 81655 - DNA, 8 bp, Unknown
  misc_feature (1)..( 8): Result.001 file - promoters70/1026883
gattataa

SEQ ID NO: 81656 - DNA, 9 bp, Unknown
  misc_feature (1)..( 9): Result.001 file - promoters70/1026883
ggacagcca

SEQ ID NO: 81657 - DNA, 9 bp, Unknown
  misc_feature (1)..( 9): Result.001 file - promoters70/1026883
caacaacca

SEQ ID NO: 81658 - DNA, 9 bp, Unknown
  misc_feature (1)..( 9): Result.001 file - promoters70/1026976
caacaactt

SEQ ID NO: 81659 - DNA, 13 bp, Unknown
  misc_feature (1)..( 13): Result.001 file - promoters70/1026976
ttgaatgtaatct

SEQ ID NO: 81660 - DNA, 13 bp, Unknown
  misc_feature (1)..( 13): Result.001 file - promoters70/1026976
ttgaatcaatatt

SEQ ID NO: 81661 - DNA, 13 bp, Unknown
  misc_feature (1)..( 13): Result.001 file - promoters70/1026976
ttgattcaaaatt

SEQ ID NO: 81662 - DNA, 8 bp, Unknown
  misc_feature (1)..( 8): Result.001 file - promoters70/1026976
attcctgc

SEQ ID NO: 81663 - DNA, 8 bp, Unknown
  misc_feature (1)..( 8): Result.001 file - promoters70/1026976
atttctgc

SEQ ID NO: 81664 - DNA, 8 bp, Unknown
  misc_feature (1)..( 8): Result.001 file - promoters70/1026987
atttctct

SEQ ID NO: 81665 - DNA, 8 bp, Unknown
  misc_feature (1)..( 8): Result.001 file - promoters70/1026987
aaaacaaa

SEQ ID NO: 81666 - DNA, 8 bp, Unknown
  misc_feature (1)..( 8): Result.001 file - promoters70/1026987
gaaagaaa

SEQ ID NO: 81667 - DNA, 8 bp, Unknown
  misc_feature (1)..( 8): Result.001 file - promoters70/1026987
aaaacatt

SEQ ID NO: 81668 - DNA, 8 bp, Unknown
  misc_feature (1)..( 8): Result.001 file - promoters70/1026987
gaatgaaa

SEQ ID NO: 81669 - DNA, 11 bp, Unknown
  misc_feature (1)..( 11): Result.001 file - promoters70/1026987
tatgtaaacgt

SEQ ID NO: 81670 - DNA, 11 bp, Unknown
  misc_feature (1)..( 11): Result.001 file - promoters70/1026987
tatttaaaaag

SEQ ID NO: 81671 - DNA, 11 bp, Unknown
  misc_feature (1)..( 11): Result.001 file - promoters70/1026987
tatctaagacc

SEQ ID NO: 81672 - DNA, 11 bp, Unknown
  misc_feature (1)..( 11): Result.001 file - promoters70/1026987
gcattaaaata

SEQ ID NO: 81673 - DNA, 12 bp, Unknown
  misc_feature (1)..( 12): Result.001 file - promoters70/1026987
attttagaaaga

SEQ ID NO: 81674 - DNA, 10 bp, Unknown
  misc_feature (1)..( 10): Result.001 file - promoters70/1026987
cctaaaaaat

SEQ ID NO: 81675 - DNA, 10 bp, Unknown
  misc_feature (1)..( 10): Result.001 file - promoters70/1026987
tttaaaaaga

SEQ ID NO: 81676 - DNA, 10 bp, Unknown
  misc_feature (1)..( 10): Result.001 file - promoters70/1026987
attaaaatat

SEQ ID NO: 81677 - DNA, 10 bp, Unknown
  misc_feature (1)..( 10): Result.001 file - promoters70/1027189
tttagaaaga

SEQ ID NO: 81678 - DNA, 7 bp, Unknown
  misc_feature (1)..( 7): Result.001 file - promoters70/1027189
aaaaaat

SEQ ID NO: 81679 - DNA, 7 bp, Unknown
  misc_feature (1)..( 7): Result.001 file - promoters70/1027189
aaataat

SEQ ID NO: 81680 - DNA, 7 bp, Unknown
  misc_feature (1)..( 7): Result.001 file - promoters70/1027189
gaaaaat

SEQ ID NO: 81681 - DNA, 10 bp, Unknown
  misc_feature (1)..( 10): Result.001 file - promoters70/1027189
ggtttggttt

SEQ ID NO: 81682 - DNA, 10 bp, Unknown
  misc_feature (1)..( 10): Result.001 file - promoters70/1027189
ggtttgtttt

SEQ ID NO: 81683 - DNA, 10 bp, Unknown
  misc_feature (1)..( 10): Result.001 file - promoters70/1027276
aatttatttg

SEQ ID NO: 81684 - DNA, 9 bp, Unknown
  misc_feature (1)..( 9): Result.001 file - promoters70/1027276
agtaattta

SEQ ID NO: 81685 - DNA, 9 bp, Unknown
  misc_feature (1)..( 9): Result.001 file - promoters70/1027276
agtagtttc

SEQ ID NO: 81686 - DNA, 9 bp, Unknown
  misc_feature (1)..( 9): Result.001 file - promoters70/1027276
ttgagtttc

SEQ ID NO: 81687 - DNA, 9 bp, Unknown
  misc_feature (1)..( 9): Result.001 file - promoters70/1027276
aaattttaa

SEQ ID NO: 81688 - DNA, 9 bp, Unknown
  misc_feature (1)..( 9): Result.001 file - promoters70/1027276
aaatttgtt

SEQ ID NO: 81689 - DNA, 9 bp, Unknown
  misc_feature (1)..( 9): Result.001 file - promoters70/1027276
gaattctaa

SEQ ID NO: 81690 - DNA, 9 bp, Unknown
  misc_feature (1)..( 9): Result.001 file - promoters70/1027276
aaatatgtt

SEQ ID NO: 81691 - DNA, 8 bp, Unknown
  misc_feature (1)..( 8): Result.001 file - promoters70/1027276
acatattt

SEQ ID NO: 81692 - DNA, 8 bp, Unknown
  misc_feature (1)..( 8): Result.001 file - promoters70/1027276
acatatta

SEQ ID NO: 81693 - DNA, 8 bp, Unknown
  misc_feature (1)..( 8): Result.001 file - promoters70/1027276
tcatctta

SEQ ID NO: 81694 - DNA, 10 bp, Unknown
  misc_feature (1)..( 10): Result.001 file - promoters70/1027276
aaatgaaaaa

SEQ ID NO: 81695 - DNA, 10 bp, Unknown
  misc_feature (1)..( 10): Result.001 file - promoters70/1027276
aaaagaaatt

SEQ ID NO: 81696 - DNA, 10 bp, Unknown
  misc_feature (1)..( 10): Result.001 file - promoters70/1027276
tctagaaatt

SEQ ID NO: 81697 - DNA, 7 bp, Unknown
  misc_feature (1)..( 7): Result.001 file - promoters70/1027276
gaaaaaa

SEQ ID NO: 81698 - DNA, 7 bp, Unknown
  misc_feature (1)..( 7): Result.001 file - promoters70/1027276
gaagaaa

SEQ ID NO: 81699 - DNA, 7 bp, Unknown
  misc_feature (1)..( 7): Result.001 file - promoters70/1027276
taaaaaa

SEQ ID NO: 81700 - DNA, 8 bp, Unknown
  misc_feature (1)..( 8): Result.001 file - promoters70/1027276
ttattgaa

SEQ ID NO: 81701 - DNA, 8 bp, Unknown
  misc_feature (1)..( 8): Result.001 file - promoters70/1027276
atatagaa

SEQ ID NO: 81702 - DNA, 8 bp, Unknown
  misc_feature (1)..( 8): Result.001 file - promoters70/1027276
ttattgtt

SEQ ID NO: 81703 - DNA, 8 bp, Unknown
  misc_feature (1)..( 8): Result.001 file - promoters70/1027276
ctatgtag

SEQ ID NO: 81704 - DNA, 12 bp, Unknown
  misc_feature (1)..( 12): Result.001 file - promoters70/1027276
caaaaaaggaag

SEQ ID NO: 81705 - DNA, 12 bp, Unknown
  misc_feature (1)..( 12): Result.001 file - promoters70/1027276
tgaaaaagagaa

SEQ ID NO: 81706 - DNA, 13 bp, Unknown
  misc_feature (1)..( 13): Result.001 file - promoters70/1027276
acaacaaacgaag

SEQ ID NO: 81707 - DNA, 7 bp, Unknown
  misc_feature (1)..( 7): Result.001 file - promoters70/1027276
tcaaaat

SEQ ID NO: 81708 - DNA, 7 bp, Unknown
  misc_feature (1)..( 7): Result.001 file - promoters70/1027276
acaaaat

SEQ ID NO: 81709 - DNA, 7 bp, Unknown
  misc_feature (1)..( 7): Result.001 file - promoters70/1027327
tcaaaac

SEQ ID NO: 81710 - DNA, 11 bp, Unknown
  misc_feature (1)..( 11): Result.001 file - promoters70/1027327
ttggaaaagac

SEQ ID NO: 81711 - DNA, 11 bp, Unknown
  misc_feature (1)..( 11): Result.001 file - promoters70/1027327
ttgtaaatgtt

SEQ ID NO: 81712 - DNA, 11 bp, Unknown
  misc_feature (1)..( 11): Result.001 file - promoters70/1027327
ttgtaaatgtt

SEQ ID NO: 81713 - DNA, 11 bp, Unknown
  misc_feature (1)..( 11): Result.001 file - promoters70/1027327
aagtaaattta

SEQ ID NO: 81714 - DNA, 13 bp, Unknown
  misc_feature (1)..( 13): Result.001 file - promoters70/1027327
gattaataagggt

SEQ ID NO: 81715 - DNA, 13 bp, Unknown
  misc_feature (1)..( 13): Result.001 file - promoters70/1027327
cattaatgggctt

SEQ ID NO: 81716 - DNA, 13 bp, Unknown
  misc_feature (1)..( 13): Result.001 file - promoters70/1027327
tgttaatgggctt

SEQ ID NO: 81717 - DNA, 13 bp, Unknown
  misc_feature (1)..( 13): Result.001 file - promoters70/1027399
cataaataagccc

SEQ ID NO: 81718 - DNA, 10 bp, Unknown
  misc_feature (1)..( 10): Result.001 file - promoters70/1027399
ataactctat

SEQ ID NO: 81719 - DNA, 10 bp, Unknown
  misc_feature (1)..( 10): Result.001 file - promoters70/1027399
ataactttat

SEQ ID NO: 81720 - DNA, 10 bp, Unknown
  misc_feature (1)..( 10): Result.001 file - promoters70/1027406
ataactctgc

SEQ ID NO: 81721 - DNA, 8 bp, Unknown
  misc_feature (1)..( 8): Result.001 file - promoters70/1027406
tataaaat

SEQ ID NO: 81722 - DNA, 8 bp, Unknown
  misc_feature (1)..( 8): Result.001 file - promoters70/1027406
gataaaag

SEQ ID NO: 81723 - DNA, 8 bp, Unknown
  misc_feature (1)..( 8): Result.001 file - promoters70/1027406
tatgaaat

SEQ ID NO: 81724 - DNA, 7 bp, Unknown
  misc_feature (1)..( 7): Result.001 file - promoters70/1027406
atgaaat

SEQ ID NO: 81725 - DNA, 7 bp, Unknown
  misc_feature (1)..( 7): Result.001 file - promoters70/1027406
ctgaaat

SEQ ID NO: 81726 - DNA, 7 bp, Unknown
  misc_feature (1)..( 7): Result.001 file - promoters70/1027406
atgaaat

SEQ ID NO: 81727 - DNA, 17 bp, Unknown
  misc_feature (1)..( 17): Result.001 file - promoters70/1027406
ttttaagaaagtatata

SEQ ID NO: 81728 - DNA, 17 bp, Unknown
  misc_feature (1)..( 17): Result.001 file - promoters70/1027406
ttttaaaaaactatata

SEQ ID NO: 81729 - DNA, 17 bp, Unknown
  misc_feature (1)..( 17): Result.001 file - promoters70/1027590
tcgataaaagctaatgt

SEQ ID NO: 81730 - DNA, 8 bp, Unknown
  misc_feature (1)..( 8): Result.001 file - promoters70/1027590
caatagag

SEQ ID NO: 81731 - DNA, 8 bp, Unknown
  misc_feature (1)..( 8): Result.001 file - promoters70/1027590
ttatagag

SEQ ID NO: 81732 - DNA, 8 bp, Unknown
  misc_feature (1)..( 8): Result.001 file - promoters70/1027590
ttacagat

SEQ ID NO: 81733 - DNA, 12 bp, Unknown
  misc_feature (1)..( 12): Result.001 file - promoters70/1027590
taagaaaataaa

SEQ ID NO: 81734 - DNA, 12 bp, Unknown
  misc_feature (1)..( 12): Result.001 file - promoters70/1027590
taaaaaaataaa

SEQ ID NO: 81735 - DNA, 12 bp, Unknown
  misc_feature (1)..( 12): Result.001 file - promoters70/1027760
taaaaaactatt

SEQ ID NO: 81736 - DNA, 14 bp, Unknown
  misc_feature (1)..( 14): Result.001 file - promoters70/1027760
taagtttaagttgt

SEQ ID NO: 81737 - DNA, 14 bp, Unknown
  misc_feature (1)..( 14): Result.001 file - promoters70/1027760
attgttcaagacga

SEQ ID NO: 81738 - DNA, 14 bp, Unknown
  misc_feature (1)..( 14): Result.001 file - promoters70/1027760
taattttatatatg

SEQ ID NO: 81739 - DNA, 14 bp, Unknown
  misc_feature (1)..( 14): Result.001 file - promoters70/1027760
taagtttagtaaaa

SEQ ID NO: 81740 - DNA, 14 bp, Unknown
  misc_feature (1)..( 14): Result.001 file - promoters70/1027760
aaagtttgatatat

SEQ ID NO: 81741 - DNA, 14 bp, Unknown
  misc_feature (1)..( 14): Result.001 file - promoters70/1027760
gaattttttttcgg

SEQ ID NO: 81742 - DNA, 13 bp, Unknown
  misc_feature (1)..( 13): Result.001 file - promoters70/1027760
ataaatattcaac

SEQ ID NO: 81743 - DNA, 13 bp, Unknown
  misc_feature (1)..( 13): Result.001 file - promoters70/1027760
tgaaatatttttt

SEQ ID NO: 81744 - DNA, 13 bp, Unknown
  misc_feature (1)..( 13): Result.001 file - promoters70/1027760
taaaaaattacgg

SEQ ID NO: 81745 - DNA, 13 bp, Unknown
  misc_feature (1)..( 13): Result.001 file - promoters70/1027760
taaaaaatttttt

SEQ ID NO: 81746 - DNA, 13 bp, Unknown
  misc_feature (1)..( 13): Result.001 file - promoters70/1027760
tgatataataagg

SEQ ID NO: 81747 - DNA, 13 bp, Unknown
  misc_feature (1)..( 13): Result.001 file - promoters70/1027760
ataaaaatgtgaa

SEQ ID NO: 81748 - DNA, 13 bp, Unknown
  misc_feature (1)..( 13): Result.001 file - promoters70/1027760
agaaaaaaaaaaa

SEQ ID NO: 81749 - DNA, 13 bp, Unknown
  misc_feature (1)..( 13): Result.001 file - promoters70/1027760
ccaaaaacaaaaa

SEQ ID NO: 81750 - DNA, 17 bp, Unknown
  misc_feature (1)..( 17): Result.001 file - promoters70/1027760
tatccttttcaattaat

SEQ ID NO: 81751 - DNA, 17 bp, Unknown
  misc_feature (1)..( 17): Result.001 file - promoters70/1027760
ttagatttttaatatat

SEQ ID NO: 81752 - DNA, 17 bp, Unknown
  misc_feature (1)..( 17): Result.001 file - promoters70/1027760
aatagtttactatttat

SEQ ID NO: 81753 - DNA, 17 bp, Unknown
  misc_feature (1)..( 17): Result.001 file - promoters70/1027760
aataatttacgaaattg

SEQ ID NO: 81754 - DNA, 17 bp, Unknown
  misc_feature (1)..( 17): Result.001 file - promoters70/1027760
catcatttttctcctga

SEQ ID NO: 81755 - DNA, 17 bp, Unknown
  misc_feature (1)..( 17): Result.001 file - promoters70/1027760
aagtttttgtaataata

SEQ ID NO: 81756 - DNA, 12 bp, Unknown
  misc_feature (1)..( 12): Result.001 file - promoters70/1027760
agggtttgatta

SEQ ID NO: 81757 - DNA, 12 bp, Unknown
  misc_feature (1)..( 12): Result.001 file - promoters70/1027760
tcacttttatta

SEQ ID NO: 81758 - DNA, 12 bp, Unknown
  misc_feature (1)..( 12): Result.001 file - promoters70/1027760
ttcctttcattc

SEQ ID NO: 81759 - DNA, 12 bp, Unknown
  misc_feature (1)..( 12): Result.001 file - promoters70/1027760
ttcgtttcaagt

SEQ ID NO: 81760 - DNA, 12 bp, Unknown
  misc_feature (1)..( 12): Result.001 file - promoters70/1027760
actatttcaaaa

SEQ ID NO: 81761 - DNA, 12 bp, Unknown
  misc_feature (1)..( 12): Result.001 file - promoters70/1028243
agatgtatatca

SEQ ID NO: 81762 - DNA, 13 bp, Unknown
  misc_feature (1)..( 13): Result.001 file - promoters70/1028243
aacatcaataaac

SEQ ID NO: 81763 - DNA, 13 bp, Unknown
  misc_feature (1)..( 13): Result.001 file - promoters70/1028243
aatcaaaataaaa

SEQ ID NO: 81764 - DNA, 13 bp, Unknown
  misc_feature (1)..( 13): Result.001 file - promoters70/1028243
ttatccaacaaaa

SEQ ID NO: 81765 - DNA, 13 bp, Unknown
  misc_feature (1)..( 13): Result.001 file - promoters70/1028243
aacaacaataatt

SEQ ID NO: 81766 - DNA, 14 bp, Unknown
  misc_feature (1)..( 14): Result.001 file - promoters70/1028243
ttgtgcaaccaaaa

SEQ ID NO: 81767 - DNA, 14 bp, Unknown
  misc_feature (1)..( 14): Result.001 file - promoters70/1028243
aaaaccaaacaaaa

SEQ ID NO: 81768 - DNA, 13 bp, Unknown
  misc_feature (1)..( 13): Result.001 file - promoters70/1028243
cttacaatttcac

SEQ ID NO: 81769 - DNA, 13 bp, Unknown
  misc_feature (1)..( 13): Result.001 file - promoters70/1028243
aaatcaatttaaa

SEQ ID NO: 81770 - DNA, 13 bp, Unknown
  misc_feature (1)..( 13): Result.001 file - promoters70/1028243
ccatgaatttaaa

SEQ ID NO: 81771 - DNA, 13 bp, Unknown
  misc_feature (1)..( 13): Result.001 file - promoters70/1028243
gtatcgattatgt

SEQ ID NO: 81772 - DNA, 13 bp, Unknown
  misc_feature (1)..( 13): Result.001 file - promoters70/1028243
aaaacaattttag

SEQ ID NO: 81773 - DNA, 13 bp, Unknown
  misc_feature (1)..( 13): Result.001 file - promoters70/1028368
atatctattgggc

SEQ ID NO: 81774 - DNA, 12 bp, Unknown
  misc_feature (1)..( 12): Result.001 file - promoters70/1028368
gagacaaagtat

SEQ ID NO: 81775 - DNA, 12 bp, Unknown
  misc_feature (1)..( 12): Result.001 file - promoters70/1028368
ttgacaaaaaca

SEQ ID NO: 81776 - DNA, 12 bp, Unknown
  misc_feature (1)..( 12): Result.001 file - promoters70/1028368
aagaaaaacagt

SEQ ID NO: 81777 - DNA, 12 bp, Unknown
  misc_feature (1)..( 12): Result.001 file - promoters70/1028368
agtaaaaataca

SEQ ID NO: 81778 - DNA, 12 bp, Unknown
  misc_feature (1)..( 12): Result.001 file - promoters70/1028368
aagaaaatctga

SEQ ID NO: 81779 - DNA, 12 bp, Unknown
  misc_feature (1)..( 12): Result.001 file - promoters70/1028368
atttaaaatata

SEQ ID NO: 81780 - DNA, 10 bp, Unknown
  misc_feature (1)..( 10): Result.001 file - promoters70/1028368
ttataaaacc

SEQ ID NO: 81781 - DNA, 10 bp, Unknown
  misc_feature (1)..( 10): Result.001 file - promoters70/1028368
atataaatta

SEQ ID NO: 81782 - DNA, 10 bp, Unknown
  misc_feature (1)..( 10): Result.001 file - promoters70/1028368
atataaagag

SEQ ID NO: 81783 - DNA, 10 bp, Unknown
  misc_feature (1)..( 10): Result.001 file - promoters70/1028368
ctataaatct

SEQ ID NO: 81784 - DNA, 10 bp, Unknown
  misc_feature (1)..( 10): Result.001 file - promoters70/1028368
taataaaacc

SEQ ID NO: 81785 - DNA, 10 bp, Unknown
  misc_feature (1)..( 10): Result.001 file - promoters70/1028368
atataagtaa

SEQ ID NO: 81786 - DNA, 13 bp, Unknown
  misc_feature (1)..( 13): Result.001 file - promoters70/1028368
atctcaaaatacc

SEQ ID NO: 81787 - DNA, 13 bp, Unknown
  misc_feature (1)..( 13): Result.001 file - promoters70/1028368
acttcaaaattta

SEQ ID NO: 81788 - DNA, 13 bp, Unknown
  misc_feature (1)..( 13): Result.001 file - promoters70/1028368
aagtaaaaataca

SEQ ID NO: 81789 - DNA, 13 bp, Unknown
  misc_feature (1)..( 13): Result.001 file - promoters70/1028368
gatttaaaatata

SEQ ID NO: 81790 - DNA, 13 bp, Unknown
  misc_feature (1)..( 13): Result.001 file - promoters70/1028368
atctgaaaaattc

SEQ ID NO: 81791 - DNA, 13 bp, Unknown
  misc_feature (1)..( 13): Result.001 file - promoters70/1028368
aaaacaaattttt

SEQ ID NO: 81792 - DNA, 13 bp, Unknown
  misc_feature (1)..( 13): Result.001 file - promoters70/1028368
aaaagaaaaacag

SEQ ID NO: 81793 - DNA, 13 bp, Unknown
  misc_feature (1)..( 13): Result.001 file - promoters70/1028368
tggtccaaatagt

SEQ ID NO: 81794 - DNA, 7 bp, Unknown
  misc_feature (1)..( 7): Result.001 file - promoters70/1028368
aaagtat

SEQ ID NO: 81795 - DNA, 7 bp, Unknown
  misc_feature (1)..( 7): Result.001 file - promoters70/1028368
aaaatat

SEQ ID NO: 81796 - DNA, 7 bp, Unknown
  misc_feature (1)..( 7): Result.001 file - promoters70/1028368
aaagtat

SEQ ID NO: 81797 - DNA, 8 bp, Unknown
  misc_feature (1)..( 8): Result.001 file - promoters70/1028368
aaatgtat

SEQ ID NO: 81798 - DNA, 8 bp, Unknown
  misc_feature (1)..( 8): Result.001 file - promoters70/1028368
gaaagtat

SEQ ID NO: 81799 - DNA, 8 bp, Unknown
  misc_feature (1)..( 8): Result.001 file - promoters70/1028413
caaaatat

SEQ ID NO: 81800 - DNA, 8 bp, Unknown
  misc_feature (1)..( 8): Result.001 file - promoters70/1028413
aaaagaaa

SEQ ID NO: 81801 - DNA, 8 bp, Unknown
  misc_feature (1)..( 8): Result.001 file - promoters70/1028413
aaatgaaa

SEQ ID NO: 81802 - DNA, 8 bp, Unknown
  misc_feature (1)..( 8): Result.001 file - promoters70/1028413
caaacaaa

SEQ ID NO: 81803 - DNA, 11 bp, Unknown
  misc_feature (1)..( 11): Result.001 file - promoters70/1028413
ccgaaccaaaa

SEQ ID NO: 81804 - DNA, 11 bp, Unknown
  misc_feature (1)..( 11): Result.001 file - promoters70/1028413
gtgaaccagga

SEQ ID NO: 81805 - DNA, 11 bp, Unknown
  misc_feature (1)..( 11): Result.001 file - promoters70/1028413
gtgaaacagga

SEQ ID NO: 81806 - DNA, 10 bp, Unknown
  misc_feature (1)..( 10): Result.001 file - promoters70/1028413
aaaccgaacc

SEQ ID NO: 81807 - DNA, 10 bp, Unknown
  misc_feature (1)..( 10): Result.001 file - promoters70/1028413
aaaacgaaat

SEQ ID NO: 81808 - DNA, 10 bp, Unknown
  misc_feature (1)..( 10): Result.001 file - promoters70/1028413
caaatgaaat

SEQ ID NO: 81809 - DNA, 9 bp, Unknown
  misc_feature (1)..( 9): Result.001 file - promoters70/1028413
tttgaagac

SEQ ID NO: 81810 - DNA, 9 bp, Unknown
  misc_feature (1)..( 9): Result.001 file - promoters70/1028413
tttaaaggg

SEQ ID NO: 81811 - DNA, 9 bp, Unknown
  misc_feature (1)..( 9): Result.001 file - promoters70/1028470
agtaatggg

SEQ ID NO: 81812 - DNA, 10 bp, Unknown
  misc_feature (1)..( 10): Result.001 file - promoters70/1028470
ctaaatactc

SEQ ID NO: 81813 - DNA, 10 bp, Unknown
  misc_feature (1)..( 10): Result.001 file - promoters70/1028470
ctagatatat

SEQ ID NO: 81814 - DNA, 10 bp, Unknown
  misc_feature (1)..( 10): Result.001 file - promoters70/1028470
gcaaatcctc

SEQ ID NO: 81815 - DNA, 10 bp, Unknown
  misc_feature (1)..( 10): Result.001 file - promoters70/1028470
atagatatgc

SEQ ID NO: 81816 - DNA, 9 bp, Unknown
  misc_feature (1)..( 9): Result.001 file - promoters70/1028470
tttaatgaa

SEQ ID NO: 81817 - DNA, 9 bp, Unknown
  misc_feature (1)..( 9): Result.001 file - promoters70/1028470
tttaatata

SEQ ID NO: 81818 - DNA, 9 bp, Unknown
  misc_feature (1)..( 9): Result.001 file - promoters70/1028470
tttgatata

SEQ ID NO: 81819 - DNA, 9 bp, Unknown
  misc_feature (1)..( 9): Result.001 file - promoters70/1028470
tgtgatata

SEQ ID NO: 81820 - DNA, 12 bp, Unknown
  misc_feature (1)..( 12): Result.001 file - promoters70/1028470
gacactttagaa

SEQ ID NO: 81821 - DNA, 12 bp, Unknown
  misc_feature (1)..( 12): Result.001 file - promoters70/1028470
gactctttttct

SEQ ID NO: 81822 - DNA, 12 bp, Unknown
  misc_feature (1)..( 12): Result.001 file - promoters70/1028470
ttctctttttct

SEQ ID NO: 81823 - DNA, 12 bp, Unknown
  misc_feature (1)..( 12): Result.001 file - promoters70/1028682
gtctctttttct

SEQ ID NO: 81824 - DNA, 9 bp, Unknown
  misc_feature (1)..( 9): Result.001 file - promoters70/1028682
ttttcaatt

SEQ ID NO: 81825 - DNA, 9 bp, Unknown
  misc_feature (1)..( 9): Result.001 file - promoters70/1028682
ttttcaaac

SEQ ID NO: 81826 - DNA, 9 bp, Unknown
  misc_feature (1)..( 9): Result.001 file - promoters70/1028682
gtttcaatt

SEQ ID NO: 81827 - DNA, 7 bp, Unknown
  misc_feature (1)..( 7): Result.001 file - promoters70/1028682
catatat

SEQ ID NO: 81828 - DNA, 7 bp, Unknown
  misc_feature (1)..( 7): Result.001 file - promoters70/1028682
tatatat

SEQ ID NO: 81829 - DNA, 7 bp, Unknown
  misc_feature (1)..( 7): Result.001 file - promoters70/1028863
catataa

SEQ ID NO: 81830 - DNA, 10 bp, Unknown
  misc_feature (1)..( 10): Result.001 file - promoters70/1028863
agattttttt

SEQ ID NO: 81831 - DNA, 10 bp, Unknown
  misc_feature (1)..( 10): Result.001 file - promoters70/1028863
ctcttttttt

SEQ ID NO: 81832 - DNA, 10 bp, Unknown
  misc_feature (1)..( 10): Result.001 file - promoters70/1028937
agatgtttgg

SEQ ID NO: 81833 - DNA, 7 bp, Unknown
  misc_feature (1)..( 7): Result.001 file - promoters70/1028937
tattttg

SEQ ID NO: 81834 - DNA, 7 bp, Unknown
  misc_feature (1)..( 7): Result.001 file - promoters70/1028937
tatttta

SEQ ID NO: 81835 - DNA, 7 bp, Unknown
  misc_feature (1)..( 7): Result.001 file - promoters70/1028955
aattttg

SEQ ID NO: 81836 - DNA, 8 bp, Unknown
  misc_feature (1)..( 8): Result.001 file - promoters70/1028955
attatctt

SEQ ID NO: 81837 - DNA, 8 bp, Unknown
  misc_feature (1)..( 8): Result.001 file - promoters70/1028955
attgtctc

SEQ ID NO: 81838 - DNA, 8 bp, Unknown
  misc_feature (1)..( 8): Result.001 file - promoters70/1028955
gatgtctc

SEQ ID NO: 81839 - DNA, 9 bp, Unknown
  misc_feature (1)..( 9): Result.001 file - promoters70/1028955
gatgtttca

SEQ ID NO: 81840 - DNA, 9 bp, Unknown
  misc_feature (1)..( 9): Result.001 file - promoters70/1028955
gatgtctca

SEQ ID NO: 81841 - DNA, 9 bp, Unknown
  misc_feature (1)..( 9): Result.001 file - promoters70/1028963
attgtctcc

SEQ ID NO: 81842 - DNA, 10 bp, Unknown
  misc_feature (1)..( 10): Result.001 file - promoters70/1028963
taatacaatt

SEQ ID NO: 81843 - DNA, 10 bp, Unknown
  misc_feature (1)..( 10): Result.001 file - promoters70/1028963
aaataaaata

SEQ ID NO: 81844 - DNA, 10 bp, Unknown
  misc_feature (1)..( 10): Result.001 file - promoters70/1028963
aaatgaaata

SEQ ID NO: 81845 - DNA, 8 bp, Unknown
  misc_feature (1)..( 8): Result.001 file - promoters70/1028963
tatcttct

SEQ ID NO: 81846 - DNA, 8 bp, Unknown
  misc_feature (1)..( 8): Result.001 file - promoters70/1028963
tattttct

SEQ ID NO: 81847 - DNA, 8 bp, Unknown
  misc_feature (1)..( 8): Result.001 file - promoters70/1029485
tatcttaa

SEQ ID NO: 81848 - DNA, 13 bp, Unknown
  misc_feature (1)..( 13): Result.001 file - promoters70/1029485
atactgcccaaac

SEQ ID NO: 81849 - DNA, 13 bp, Unknown
  misc_feature (1)..( 13): Result.001 file - promoters70/1029485
aataggcccaaca

SEQ ID NO: 81850 - DNA, 13 bp, Unknown
  misc_feature (1)..( 13): Result.001 file - promoters70/1029485
taaaggcccaata

SEQ ID NO: 81851 - DNA, 13 bp, Unknown
  misc_feature (1)..( 13): Result.001 file - promoters70/1029485
aatgggcctaatt

SEQ ID NO: 81852 - DNA, 13 bp, Unknown
  misc_feature (1)..( 13): Result.001 file - promoters70/1029485
aatgggccgaatt

SEQ ID NO: 81853 - DNA, 13 bp, Unknown
  misc_feature (1)..( 13): Result.001 file - promoters70/1029908
tgaaagcccaaaa

SEQ ID NO: 81854 - DNA, 7 bp, Unknown
  misc_feature (1)..( 7): Result.001 file - promoters70/1029908
aagattt

SEQ ID NO: 81855 - DNA, 7 bp, Unknown
  misc_feature (1)..( 7): Result.001 file - promoters70/1029908
aagattc

SEQ ID NO: 81856 - DNA, 7 bp, Unknown
  misc_feature (1)..( 7): Result.001 file - promoters70/1029908
aagattt

SEQ ID NO: 81857 - DNA, 12 bp, Unknown
  misc_feature (1)..( 12): Result.001 file - promoters70/1029908
tgtattttatgt

SEQ ID NO: 81858 - DNA, 12 bp, Unknown
  misc_feature (1)..( 12): Result.001 file - promoters70/1029908
tgtgtttgttgt

SEQ ID NO: 81859 - DNA, 12 bp, Unknown
  misc_feature (1)..( 12): Result.001 file - promoters70/1029952
attattatatgt

SEQ ID NO: 81860 - DNA, 12 bp, Unknown
  misc_feature (1)..( 12): Result.001 file - promoters70/1029952
aatgggctgggc

SEQ ID NO: 81861 - DNA, 12 bp, Unknown
  misc_feature (1)..( 12): Result.001 file - promoters70/1029952
aataggcccaac

SEQ ID NO: 81862 - DNA, 12 bp, Unknown
  misc_feature (1)..( 12): Result.001 file - promoters70/1029952
aatgggccttta

SEQ ID NO: 81863 - DNA, 12 bp, Unknown
  misc_feature (1)..( 12): Result.001 file - promoters70/1029952
tatgggccttat

SEQ ID NO: 81864 - DNA, 12 bp, Unknown
  misc_feature (1)..( 12): Result.001 file - promoters70/1029952
cataggcccata

SEQ ID NO: 81865 - DNA, 12 bp, Unknown
  misc_feature (1)..( 12): Result.001 file - promoters70/1029952
aatgggccgaat

SEQ ID NO: 81866 - DNA, 12 bp, Unknown
  misc_feature (1)..( 12): Result.001 file - promoters70/1029952
aaaaggcccata

SEQ ID NO: 81867 - DNA, 12 bp, Unknown
  misc_feature (1)..( 12): Result.001 file - promoters70/1030231
tttgggccaact

SEQ ID NO: 81868 - DNA, 11 bp, Unknown
  misc_feature (1)..( 11): Result.001 file - promoters70/1030231
atttgaattta

SEQ ID NO: 81869 - DNA, 11 bp, Unknown
  misc_feature (1)..( 11): Result.001 file - promoters70/1030231
atttgaatttt

SEQ ID NO: 81870 - DNA, 11 bp, Unknown
  misc_feature (1)..( 11): Result.001 file - promoters70/1030283
tagtgattttt

SEQ ID NO: 81871 - DNA, 8 bp, Unknown
  misc_feature (1)..( 8): Result.001 file - promoters70/1030283
ggaaaaga

SEQ ID NO: 81872 - DNA, 8 bp, Unknown
  misc_feature (1)..( 8): Result.001 file - promoters70/1030283
aaaaaaga

SEQ ID NO: 81873 - DNA, 8 bp, Unknown
  misc_feature (1)..( 8): Result.001 file - promoters70/1030283
aaaaaaga

SEQ ID NO: 81874 - DNA, 7 bp, Unknown
  misc_feature (1)..( 7): Result.001 file - promoters70/1030283
tcccttg

SEQ ID NO: 81875 - DNA, 7 bp, Unknown
  misc_feature (1)..( 7): Result.001 file - promoters70/1030283
tcctttg

SEQ ID NO: 81876 - DNA, 7 bp, Unknown
  misc_feature (1)..( 7): Result.001 file - promoters70/1030283
tcctttt

SEQ ID NO: 81877 - DNA, 8 bp, Unknown
  misc_feature (1)..( 8): Result.001 file - promoters70/1030283
aaagaaga

SEQ ID NO: 81878 - DNA, 8 bp, Unknown
  misc_feature (1)..( 8): Result.001 file - promoters70/1030283
aaaaaaga

SEQ ID NO: 81879 - DNA, 8 bp, Unknown
  misc_feature (1)..( 8): Result.001 file - promoters70/1030283
aaaaaaga

SEQ ID NO: 81880 - DNA, 7 bp, Unknown
  misc_feature (1)..( 7): Result.001 file - promoters70/1030283
ttccaaa

SEQ ID NO: 81881 - DNA, 7 bp, Unknown
  misc_feature (1)..( 7): Result.001 file - promoters70/1030283
ttccaaa

SEQ ID NO: 81882 - DNA, 7 bp, Unknown
  misc_feature (1)..( 7): Result.001 file - promoters70/1030283
tcccaag

SEQ ID NO: 81883 - DNA, 15 bp, Unknown
  misc_feature (1)..( 15): Result.001 file - promoters70/1030283
aatatctttcacctt

SEQ ID NO: 81884 - DNA, 15 bp, Unknown
  misc_feature (1)..( 15): Result.001 file - promoters70/1030283
tttatttttgttggt

SEQ ID NO: 81885 - DNA, 15 bp, Unknown
  misc_feature (1)..( 15): Result.001 file - promoters70/1030283
caaatttttactttt

SEQ ID NO: 81886 - DNA, 10 bp, Unknown
  misc_feature (1)..( 10): Result.001 file - promoters70/1030283
tttgaataat

SEQ ID NO: 81887 - DNA, 10 bp, Unknown
  misc_feature (1)..( 10): Result.001 file - promoters70/1030283
tttgattaaa

SEQ ID NO: 81888 - DNA, 10 bp, Unknown
  misc_feature (1)..( 10): Result.001 file - promoters70/1030283
aaaaaataat

SEQ ID NO: 81889 - DNA, 10 bp, Unknown
  misc_feature (1)..( 10): Result.001 file - promoters70/1030283
tgtaaaaatt

SEQ ID NO: 81890 - DNA, 10 bp, Unknown
  misc_feature (1)..( 10): Result.001 file - promoters70/1030283
tataaaaatt

SEQ ID NO: 81891 - DNA, 10 bp, Unknown
  misc_feature (1)..( 10): Result.001 file - promoters70/1030283
tataaaaaga

SEQ ID NO: 81892 - DNA, 7 bp, Unknown
  misc_feature (1)..( 7): Result.001 file - promoters70/1030283
aaaacaa

SEQ ID NO: 81893 - DNA, 7 bp, Unknown
  misc_feature (1)..( 7): Result.001 file - promoters70/1030283
gaaacaa

SEQ ID NO: 81894 - DNA, 7 bp, Unknown
  misc_feature (1)..( 7): Result.001 file - promoters70/1030528
gaaccaa

SEQ ID NO: 81895 - DNA, 9 bp, Unknown
  misc_feature (1)..( 9): Result.001 file - promoters70/1030528
atactaatt

SEQ ID NO: 81896 - DNA, 9 bp, Unknown
  misc_feature (1)..( 9): Result.001 file - promoters70/1030528
ataataatt

SEQ ID NO: 81897 - DNA, 9 bp, Unknown
  misc_feature (1)..( 9): Result.001 file - promoters70/1030528
agaataatg

SEQ ID NO: 81898 - DNA, 13 bp, Unknown
  misc_feature (1)..( 13): Result.001 file - promoters70/1030528
ttatttttttaaa

SEQ ID NO: 81899 - DNA, 13 bp, Unknown
  misc_feature (1)..( 13): Result.001 file - promoters70/1030528
ttatatttttaat

SEQ ID NO: 81900 - DNA, 13 bp, Unknown
  misc_feature (1)..( 13): Result.001 file - promoters70/1030528
caatgcatttaaa

SEQ ID NO: 81901 - DNA, 7 bp, Unknown
  misc_feature (1)..( 7): Result.001 file - promoters70/1030528
ttaaaaa

SEQ ID NO: 81902 - DNA, 7 bp, Unknown
  misc_feature (1)..( 7): Result.001 file - promoters70/1030528
ctaaaaa

SEQ ID NO: 81903 - DNA, 7 bp, Unknown
  misc_feature (1)..( 7): Result.001 file - promoters70/1030547
ttaaaat

SEQ ID NO: 81904 - DNA, 9 bp, Unknown
  misc_feature (1)..( 9): Result.001 file - promoters70/1030547
aatgtttgt

SEQ ID NO: 81905 - DNA, 9 bp, Unknown
  misc_feature (1)..( 9): Result.001 file - promoters70/1030547
catgtttag

SEQ ID NO: 81906 - DNA, 9 bp, Unknown
  misc_feature (1)..( 9): Result.001 file - promoters70/1030547
aatctttgt

SEQ ID NO: 81907 - DNA, 13 bp, Unknown
  misc_feature (1)..( 13): Result.001 file - promoters70/1030547
ttttgaagaattt

SEQ ID NO: 81908 - DNA, 13 bp, Unknown
  misc_feature (1)..( 13): Result.001 file - promoters70/1030547
ttttgatgaatgt

SEQ ID NO: 81909 - DNA, 13 bp, Unknown
  misc_feature (1)..( 13): Result.001 file - promoters70/1030547
aaaagatgaagtc

SEQ ID NO: 81910 - DNA, 13 bp, Unknown
  misc_feature (1)..( 13): Result.001 file - promoters70/1030547
cccttgtgaatgt

SEQ ID NO: 81911 - DNA, 14 bp, Unknown
  misc_feature (1)..( 14): Result.001 file - promoters70/1030547
ccataaaaatgtta

SEQ ID NO: 81912 - DNA, 14 bp, Unknown
  misc_feature (1)..( 14): Result.001 file - promoters70/1030547
tttcataaatttta

SEQ ID NO: 81913 - DNA, 14 bp, Unknown
  misc_feature (1)..( 14): Result.001 file - promoters70/1030547
attctaaaatattg

SEQ ID NO: 81914 - DNA, 10 bp, Unknown
  misc_feature (1)..( 10): Result.001 file - promoters70/1030547
tatataaaca

SEQ ID NO: 81915 - DNA, 10 bp, Unknown
  misc_feature (1)..( 10): Result.001 file - promoters70/1030547
tatataataa

SEQ ID NO: 81916 - DNA, 10 bp, Unknown
  misc_feature (1)..( 10): Result.001 file - promoters70/1030547
cctataaata

SEQ ID NO: 81917 - DNA, 10 bp, Unknown
  misc_feature (1)..( 10): Result.001 file - promoters70/1030547
acgataaata

SEQ ID NO: 81918 - DNA, 10 bp, Unknown
  misc_feature (1)..( 10): Result.001 file - promoters70/1030547
tataaacaaa

SEQ ID NO: 81919 - DNA, 10 bp, Unknown
  misc_feature (1)..( 10): Result.001 file - promoters70/1030547
aataaccaaa

SEQ ID NO: 81920 - DNA, 10 bp, Unknown
  misc_feature (1)..( 10): Result.001 file - promoters70/1030547
tataaatatc

SEQ ID NO: 81921 - DNA, 9 bp, Unknown
  misc_feature (1)..( 9): Result.001 file - promoters70/1030547
agttggtta

SEQ ID NO: 81922 - DNA, 9 bp, Unknown
  misc_feature (1)..( 9): Result.001 file - promoters70/1030547
ttttgatta

SEQ ID NO: 81923 - DNA, 9 bp, Unknown
  misc_feature (1)..( 9): Result.001 file - promoters70/1030547
ttttaattc

SEQ ID NO: 81924 - DNA, 14 bp, Unknown
  misc_feature (1)..( 14): Result.001 file - promoters70/1030547
aaacttataattat

SEQ ID NO: 81925 - DNA, 14 bp, Unknown
  misc_feature (1)..( 14): Result.001 file - promoters70/1030547
atctttataagtat

SEQ ID NO: 81926 - DNA, 14 bp, Unknown
  misc_feature (1)..( 14): Result.001 file - promoters70/1030547
cgttttaaaagtaa

SEQ ID NO: 81927 - DNA, 14 bp, Unknown
  misc_feature (1)..( 14): Result.001 file - promoters70/1030547
atctttatacaaaa

SEQ ID NO: 81928 - DNA, 10 bp, Unknown
  misc_feature (1)..( 10): Result.001 file - promoters70/1030547
catattatac

SEQ ID NO: 81929 - DNA, 10 bp, Unknown
  misc_feature (1)..( 10): Result.001 file - promoters70/1030547
atctttatac

SEQ ID NO: 81930 - DNA, 10 bp, Unknown
  misc_feature (1)..( 10): Result.001 file - promoters70/1030547
atctttataa

SEQ ID NO: 81931 - DNA, 10 bp, Unknown
  misc_feature (1)..( 10): Result.001 file - promoters70/1030547
aaatatgttt

SEQ ID NO: 81932 - DNA, 10 bp, Unknown
  misc_feature (1)..( 10): Result.001 file - promoters70/1030547
taatatattt

SEQ ID NO: 81933 - DNA, 10 bp, Unknown
  misc_feature (1)..( 10): Result.001 file - promoters70/1030605
taacatataa

SEQ ID NO: 81934 - DNA, 11 bp, Unknown
  misc_feature (1)..( 11): Result.001 file - promoters70/1030605
aaaataataat

SEQ ID NO: 81935 - DNA, 11 bp, Unknown
  misc_feature (1)..( 11): Result.001 file - promoters70/1030605
aaaaaaataca

SEQ ID NO: 81936 - DNA, 11 bp, Unknown
  misc_feature (1)..( 11): Result.001 file - promoters70/1030605
aaaaaaagaat

SEQ ID NO: 81937 - DNA, 11 bp, Unknown
  misc_feature (1)..( 11): Result.001 file - promoters70/1030605
tgaagaatctg

SEQ ID NO: 81938 - DNA, 11 bp, Unknown
  misc_feature (1)..( 11): Result.001 file - promoters70/1030605
taaattagaat

SEQ ID NO: 81939 - DNA, 11 bp, Unknown
  misc_feature (1)..( 11): Result.001 file - promoters70/1030605
ataaatagaat

SEQ ID NO: 81940 - DNA, 11 bp, Unknown
  misc_feature (1)..( 11): Result.001 file - promoters70/1030605
gttaattgaaa

SEQ ID NO: 81941 - DNA, 11 bp, Unknown
  misc_feature (1)..( 11): Result.001 file - promoters70/1030605
ttacttggaaa

SEQ ID NO: 81942 - DNA, 16 bp, Unknown
  misc_feature (1)..( 16): Result.001 file - promoters70/1030605
ccttctataaaaagga

SEQ ID NO: 81943 - DNA, 16 bp, Unknown
  misc_feature (1)..( 16): Result.001 file - promoters70/1030605
cctactatataaactc

SEQ ID NO: 81944 - DNA, 16 bp, Unknown
  misc_feature (1)..( 16): Result.001 file - promoters70/1030605
ctctctatatataaag

SEQ ID NO: 81945 - DNA, 16 bp, Unknown
  misc_feature (1)..( 16): Result.001 file - promoters70/1030605
ataagtatatatactc

SEQ ID NO: 81946 - DNA, 14 bp, Unknown
  misc_feature (1)..( 14): Result.001 file - promoters70/1030605
ttaaactatagttg

SEQ ID NO: 81947 - DNA, 14 bp, Unknown
  misc_feature (1)..( 14): Result.001 file - promoters70/1030605
tagtactatcgttt

SEQ ID NO: 81948 - DNA, 14 bp, Unknown
  misc_feature (1)..( 14): Result.001 file - promoters70/1030605
ttaaaatatattta

SEQ ID NO: 81949 - DNA, 14 bp, Unknown
  misc_feature (1)..( 14): Result.001 file - promoters70/1030605
ttgacatattttta

SEQ ID NO: 81950 - DNA, 10 bp, Unknown
  misc_feature (1)..( 10): Result.001 file - promoters70/1030605
tatttagaaa

SEQ ID NO: 81951 - DNA, 10 bp, Unknown
  misc_feature (1)..( 10): Result.001 file - promoters70/1030605
tattgagata

SEQ ID NO: 81952 - DNA, 10 bp, Unknown
  misc_feature (1)..( 10): Result.001 file - promoters70/1030605
tatttaatca

SEQ ID NO: 81953 - DNA, 10 bp, Unknown
  misc_feature (1)..( 10): Result.001 file - promoters70/1030757
tttttataaa

SEQ ID NO: 81954 - DNA, 10 bp, Unknown
  misc_feature (1)..( 10): Result.001 file - promoters70/1030757
caaatacatt

SEQ ID NO: 81955 - DNA, 10 bp, Unknown
  misc_feature (1)..( 10): Result.001 file - promoters70/1030757
caaaaacaac

SEQ ID NO: 81956 - DNA, 10 bp, Unknown
  misc_feature (1)..( 10): Result.001 file - promoters70/1030757
taaatacatt

SEQ ID NO: 81957 - DNA, 8 bp, Unknown
  misc_feature (1)..( 8): Result.001 file - promoters70/1030757
cttctgaa

SEQ ID NO: 81958 - DNA, 8 bp, Unknown
  misc_feature (1)..( 8): Result.001 file - promoters70/1030757
cttttgaa

SEQ ID NO: 81959 - DNA, 8 bp, Unknown
  misc_feature (1)..( 8): Result.001 file - promoters70/1030821
attttgag

SEQ ID NO: 81960 - DNA, 9 bp, Unknown
  misc_feature (1)..( 9): Result.001 file - promoters70/1030821
aataacatc

SEQ ID NO: 81961 - DNA, 9 bp, Unknown
  misc_feature (1)..( 9): Result.001 file - promoters70/1030821
aataacaaa

SEQ ID NO: 81962 - DNA, 9 bp, Unknown
  misc_feature (1)..( 9): Result.001 file - promoters70/1030821
tataaaaaa

SEQ ID NO: 81963 - DNA, 9 bp, Unknown
  misc_feature (1)..( 9): Result.001 file - promoters70/1030821
aacaaaaaa

SEQ ID NO: 81964 - DNA, 12 bp, Unknown
  misc_feature (1)..( 12): Result.001 file - promoters70/1030821
tcaataaactta

SEQ ID NO: 81965 - DNA, 12 bp, Unknown
  misc_feature (1)..( 12): Result.001 file - promoters70/1030821
acaaaaaataat

SEQ ID NO: 81966 - DNA, 12 bp, Unknown
  misc_feature (1)..( 12): Result.001 file - promoters70/1030821
agaaacaatgta

SEQ ID NO: 81967 - DNA, 12 bp, Unknown
  misc_feature (1)..( 12): Result.001 file - promoters70/1030821
acaatctactta

SEQ ID NO: 81968 - DNA, 7 bp, Unknown
  misc_feature (1)..( 7): Result.001 file - promoters70/1030821
aaacata

SEQ ID NO: 81969 - DNA, 7 bp, Unknown
  misc_feature (1)..( 7): Result.001 file - promoters70/1030821
aaaaata

SEQ ID NO: 81970 - DNA, 8 bp, Unknown
  misc_feature (1)..( 8): Result.001 file - promoters70/1030821
aaatcata

SEQ ID NO: 81971 - DNA, 8 bp, Unknown
  misc_feature (1)..( 8): Result.001 file - promoters70/1030902
aaaatata

SEQ ID NO: 81972 - DNA, 12 bp, Unknown
  misc_feature (1)..( 12): Result.001 file - promoters70/1030902
gtcttataaata

SEQ ID NO: 81973 - DNA, 12 bp, Unknown
  misc_feature (1)..( 12): Result.001 file - promoters70/1030902
catgtataaaaa

SEQ ID NO: 81974 - DNA, 12 bp, Unknown
  misc_feature (1)..( 12): Result.001 file - promoters70/1030916
gtcatataaata

SEQ ID NO: 81975 - DNA, 10 bp, Unknown
  misc_feature (1)..( 10): Result.001 file - promoters70/1030916
aagtactaaa

SEQ ID NO: 81976 - DNA, 10 bp, Unknown
  misc_feature (1)..( 10): Result.001 file - promoters70/1030916
ttttactaac

SEQ ID NO: 81977 - DNA, 10 bp, Unknown
  misc_feature (1)..( 10): Result.001 file - promoters70/1030916
ttttaataac

SEQ ID NO: 81978 - DNA, 9 bp, Unknown
  misc_feature (1)..( 9): Result.001 file - promoters70/1030916
atttcaaaa

SEQ ID NO: 81979 - DNA, 9 bp, Unknown
  misc_feature (1)..( 9): Result.001 file - promoters70/1030916
atttccaaa

SEQ ID NO: 81980 - DNA, 9 bp, Unknown
  misc_feature (1)..( 9): Result.001 file - promoters70/1030916
gggtcaaaa

SEQ ID NO: 81981 - DNA, 9 bp, Unknown
  misc_feature (1)..( 9): Result.001 file - promoters70/1030916
ctttataat

SEQ ID NO: 81982 - DNA, 9 bp, Unknown
  misc_feature (1)..( 9): Result.001 file - promoters70/1030916
cattaaaat

SEQ ID NO: 81983 - DNA, 10 bp, Unknown
  misc_feature (1)..( 10): Result.001 file - promoters70/1031084
acttcataga

SEQ ID NO: 81984 - DNA, 9 bp, Unknown
  misc_feature (1)..( 9): Result.001 file - promoters70/1031084
tagagaatg

SEQ ID NO: 81985 - DNA, 9 bp, Unknown
  misc_feature (1)..( 9): Result.001 file - promoters70/1031084
tagacaatg

SEQ ID NO: 81986 - DNA, 9 bp, Unknown
  misc_feature (1)..( 9): Result.001 file - promoters70/1031267
tagagaata

SEQ ID NO: 81987 - DNA, 9 bp, Unknown
  misc_feature (1)..( 9): Result.001 file - promoters70/1031267
gaaaaaaag

SEQ ID NO: 81988 - DNA, 9 bp, Unknown
  misc_feature (1)..( 9): Result.001 file - promoters70/1031267
caaacaaat

SEQ ID NO: 81989 - DNA, 9 bp, Unknown
  misc_feature (1)..( 9): Result.001 file - promoters70/1031267
caaagaaag

SEQ ID NO: 81990 - DNA, 9 bp, Unknown
  misc_feature (1)..( 9): Result.001 file - promoters70/1031267
caaaaaaaa

SEQ ID NO: 81991 - DNA, 9 bp, Unknown
  misc_feature (1)..( 9): Result.001 file - promoters70/1031267
aaaagaaag

SEQ ID NO: 81992 - DNA, 9 bp, Unknown
  misc_feature (1)..( 9): Result.001 file - promoters70/1031267
caaggaaag

SEQ ID NO: 81993 - DNA, 9 bp, Unknown
  misc_feature (1)..( 9): Result.001 file - promoters70/1031267
taactaaaa

SEQ ID NO: 81994 - DNA, 12 bp, Unknown
  misc_feature (1)..( 12): Result.001 file - promoters70/1031267
ccatcgaattca

SEQ ID NO: 81995 - DNA, 12 bp, Unknown
  misc_feature (1)..( 12): Result.001 file - promoters70/1031267
aaatcaaatcga

SEQ ID NO: 81996 - DNA, 12 bp, Unknown
  misc_feature (1)..( 12): Result.001 file - promoters70/1031267
aaaccaaagaaa

SEQ ID NO: 81997 - DNA, 12 bp, Unknown
  misc_feature (1)..( 12): Result.001 file - promoters70/1031267
cagtcaaatata

SEQ ID NO: 81998 - DNA, 12 bp, Unknown
  misc_feature (1)..( 12): Result.001 file - promoters70/1031267
aagtaaaaaagt

SEQ ID NO: 81999 - DNA, 12 bp, Unknown
  misc_feature (1)..( 12): Result.001 file - promoters70/1031267
tgtacaaggaaa

SEQ ID NO: 82000 - DNA, 12 bp, Unknown
  misc_feature (1)..( 12): Result.001 file - promoters70/1031267
aattcaagacct

SEQ ID NO: 82001 - DNA, 12 bp, Unknown
  misc_feature (1)..( 12): Result.001 file - promoters70/1031267
atggcaaaacca

SEQ ID NO: 82002 - DNA, 12 bp, Unknown
  misc_feature (1)..( 12): Result.001 file - promoters70/1031267
aaatcaaatcga

SEQ ID NO: 82003 - DNA, 12 bp, Unknown
  misc_feature (1)..( 12): Result.001 file - promoters70/1031267
cagtcaaatata

SEQ ID NO: 82004 - DNA, 12 bp, Unknown
  misc_feature (1)..( 12): Result.001 file - promoters70/1031267
aagtaaaaaagt

SEQ ID NO: 82005 - DNA, 12 bp, Unknown
  misc_feature (1)..( 12): Result.001 file - promoters70/1031291
tgtacaaggaaa

SEQ ID NO: 82006 - DNA, 12 bp, Unknown
  misc_feature (1)..( 12): Result.001 file - promoters70/1031291
aataaaaattca

SEQ ID NO: 82007 - DNA, 12 bp, Unknown
  misc_feature (1)..( 12): Result.001 file - promoters70/1031291
cataaaatacaa

SEQ ID NO: 82008 - DNA, 12 bp, Unknown
  misc_feature (1)..( 12): Result.001 file - promoters70/1031291
aataaaatttca

SEQ ID NO: 82009 - DNA, 12 bp, Unknown
  misc_feature (1)..( 12): Result.001 file - promoters70/1031291
cataaatacaat

SEQ ID NO: 82010 - DNA, 12 bp, Unknown
  misc_feature (1)..( 12): Result.001 file - promoters70/1031291
ataaaaattcaa

SEQ ID NO: 82011 - DNA, 12 bp, Unknown
  misc_feature (1)..( 12): Result.001 file - promoters70/1031291
tcactaattcat

SEQ ID NO: 82012 - DNA, 13 bp, Unknown
  misc_feature (1)..( 13): Result.001 file - promoters70/1031291
aataaaatttcac

SEQ ID NO: 82013 - DNA, 13 bp, Unknown
  misc_feature (1)..( 13): Result.001 file - promoters70/1031291
cacataaatacaa

SEQ ID NO: 82014 - DNA, 13 bp, Unknown
  misc_feature (1)..( 13): Result.001 file - promoters70/1031429
aacacaaagtcac

SEQ ID NO: 82015 - DNA, 9 bp, Unknown
  misc_feature (1)..( 9): Result.001 file - promoters70/1031429
taaccaata

SEQ ID NO: 82016 - DNA, 9 bp, Unknown
  misc_feature (1)..( 9): Result.001 file - promoters70/1031429
taatcaaaa

SEQ ID NO: 82017 - DNA, 9 bp, Unknown
  misc_feature (1)..( 9): Result.001 file - promoters70/1031429
cgaccaata

SEQ ID NO: 82018 - DNA, 10 bp, Unknown
  misc_feature (1)..( 10): Result.001 file - promoters70/1031429
aatacaaatc

SEQ ID NO: 82019 - DNA, 10 bp, Unknown
  misc_feature (1)..( 10): Result.001 file - promoters70/1031429
aataccaatc

SEQ ID NO: 82020 - DNA, 10 bp, Unknown
  misc_feature (1)..( 10): Result.001 file - promoters70/1031429
aatacaaatc

SEQ ID NO: 82021 - DNA, 7 bp, Unknown
  misc_feature (1)..( 7): Result.001 file - promoters70/1031429
taaggca

SEQ ID NO: 82022 - DNA, 7 bp, Unknown
  misc_feature (1)..( 7): Result.001 file - promoters70/1031429
taaagca

SEQ ID NO: 82023 - DNA, 7 bp, Unknown
  misc_feature (1)..( 7): Result.001 file - promoters70/1031429
taaggca

SEQ ID NO: 82024 - DNA, 11 bp, Unknown
  misc_feature (1)..( 11): Result.001 file - promoters70/1031429
aaataaacaaa

SEQ ID NO: 82025 - DNA, 11 bp, Unknown
  misc_feature (1)..( 11): Result.001 file - promoters70/1031429
aaagaaataaa

SEQ ID NO: 82026 - DNA, 11 bp, Unknown
  misc_feature (1)..( 11): Result.001 file - promoters70/1031706
gaagaaaccgg

SEQ ID NO: 82027 - DNA, 8 bp, Unknown
  misc_feature (1)..( 8): Result.001 file - promoters70/1031706
tatatata

SEQ ID NO: 82028 - DNA, 8 bp, Unknown
  misc_feature (1)..( 8): Result.001 file - promoters70/1031706
tatatata

SEQ ID NO: 82029 - DNA, 8 bp, Unknown
  misc_feature (1)..( 8): Result.001 file - promoters70/1031799
tatataaa

SEQ ID NO: 82030 - DNA, 10 bp, Unknown
  misc_feature (1)..( 10): Result.001 file - promoters70/1031799
acaaaacatc

SEQ ID NO: 82031 - DNA, 10 bp, Unknown
  misc_feature (1)..( 10): Result.001 file - promoters70/1031799
ataaaacaaa

SEQ ID NO: 82032 - DNA, 10 bp, Unknown
  misc_feature (1)..( 10): Result.001 file - promoters70/1031799
tcaaaaccgt

SEQ ID NO: 82033 - DNA, 10 bp, Unknown
  misc_feature (1)..( 10): Result.001 file - promoters70/1031799
tacaaatatc

SEQ ID NO: 82034 - DNA, 10 bp, Unknown
  misc_feature (1)..( 10): Result.001 file - promoters70/1031799
ataagacagt

SEQ ID NO: 82035 - DNA, 10 bp, Unknown
  misc_feature (1)..( 10): Result.001 file - promoters70/1031799
tagagatagt

SEQ ID NO: 82036 - DNA, 11 bp, Unknown
  misc_feature (1)..( 11): Result.001 file - promoters70/1031799
gtatatatata

SEQ ID NO: 82037 - DNA, 11 bp, Unknown
  misc_feature (1)..( 11): Result.001 file - promoters70/1031799
atatttatata

SEQ ID NO: 82038 - DNA, 11 bp, Unknown
  misc_feature (1)..( 11): Result.001 file - promoters70/1031799
caataaaaagc

SEQ ID NO: 82039 - DNA, 11 bp, Unknown
  misc_feature (1)..( 11): Result.001 file - promoters70/1031799
atatttgtatc

SEQ ID NO: 82040 - DNA, 11 bp, Unknown
  misc_feature (1)..( 11): Result.001 file - promoters70/1031799
ttataaaaccc

SEQ ID NO: 82041 - DNA, 11 bp, Unknown
  misc_feature (1)..( 11): Result.001 file - promoters70/1031799
ctattaaagcc

SEQ ID NO: 82042 - DNA, 13 bp, Unknown
  misc_feature (1)..( 13): Result.001 file - promoters70/1031799
agttataaatcgt

SEQ ID NO: 82043 - DNA, 13 bp, Unknown
  misc_feature (1)..( 13): Result.001 file - promoters70/1031799
agttatgaatccg

SEQ ID NO: 82044 - DNA, 13 bp, Unknown
  misc_feature (1)..( 13): Result.001 file - promoters70/1031799
caaatcaaatcga

SEQ ID NO: 82045 - DNA, 13 bp, Unknown
  misc_feature (1)..( 13): Result.001 file - promoters70/1031799
aacccgaaaccgt

SEQ ID NO: 82046 - DNA, 13 bp, Unknown
  misc_feature (1)..( 13): Result.001 file - promoters70/1031799
gaaaatgaattct

SEQ ID NO: 82047 - DNA, 13 bp, Unknown
  misc_feature (1)..( 13): Result.001 file - promoters70/1032047
taactaaaattag

SEQ ID NO: 82048 - DNA, 7 bp, Unknown
  misc_feature (1)..( 7): Result.001 file - promoters70/1032047
caatatt

SEQ ID NO: 82049 - DNA, 7 bp, Unknown
  misc_feature (1)..( 7): Result.001 file - promoters70/1032047
caaaatt

SEQ ID NO: 82050 - DNA, 7 bp, Unknown
  misc_feature (1)..( 7): Result.001 file - promoters70/1032047
caatata

SEQ ID NO: 82051 - DNA, 7 bp, Unknown
  misc_feature (1)..( 7): Result.001 file - promoters70/1032047
tttttac

SEQ ID NO: 82052 - DNA, 7 bp, Unknown
  misc_feature (1)..( 7): Result.001 file - promoters70/1032047
gttttac

SEQ ID NO: 82053 - DNA, 7 bp, Unknown
  misc_feature (1)..( 7): Result.001 file - promoters70/1032047
tttttat

SEQ ID NO: 82054 - DNA, 12 bp, Unknown
  misc_feature (1)..( 12): Result.001 file - promoters70/1032047
aaaggaaagaat

SEQ ID NO: 82055 - DNA, 12 bp, Unknown
  misc_feature (1)..( 12): Result.001 file - promoters70/1032047
acaggaaaatgg

SEQ ID NO: 82056 - DNA, 12 bp, Unknown
  misc_feature (1)..( 12): Result.001 file - promoters70/1032047
aaagcaaacaat

SEQ ID NO: 82057 - DNA, 13 bp, Unknown
  misc_feature (1)..( 13): Result.001 file - promoters70/1032047
ctcctataaattg

SEQ ID NO: 82058 - DNA, 13 bp, Unknown
  misc_feature (1)..( 13): Result.001 file - promoters70/1032047
ggtgtataaattg

SEQ ID NO: 82059 - DNA, 13 bp, Unknown
  misc_feature (1)..( 13): Result.001 file - promoters70/1032047
ctcttatatattc

SEQ ID NO: 82060 - DNA, 15 bp, Unknown
  misc_feature (1)..( 15): Result.001 file - promoters70/1032047
tatataagatatatg

SEQ ID NO: 82061 - DNA, 15 bp, Unknown
  misc_feature (1)..( 15): Result.001 file - promoters70/1032047
caaaaaagaaatatg

SEQ ID NO: 82062 - DNA, 16 bp, Unknown
  misc_feature (1)..( 16): Result.001 file - promoters70/1032047
ccataaaggaaaaagc

SEQ ID NO: 82063 - DNA, 9 bp, Unknown
  misc_feature (1)..( 9): Result.001 file - promoters70/1032047
atatgaaat

SEQ ID NO: 82064 - DNA, 9 bp, Unknown
  misc_feature (1)..( 9): Result.001 file - promoters70/1032047
ataggaata

SEQ ID NO: 82065 - DNA, 9 bp, Unknown
  misc_feature (1)..( 9): Result.001 file - promoters70/1032047
atagtaata

SEQ ID NO: 82066 - DNA, 13 bp, Unknown
  misc_feature (1)..( 13): Result.001 file - promoters70/1032047
tgtttatggaaaa

SEQ ID NO: 82067 - DNA, 13 bp, Unknown
  misc_feature (1)..( 13): Result.001 file - promoters70/1032047
ccataaaggaaaa

SEQ ID NO: 82068 - DNA, 13 bp, Unknown
  misc_feature (1)..( 13): Result.001 file - promoters70/1032313
ccaaaaaagaaat

SEQ ID NO: 82069 - DNA, 8 bp, Unknown
  misc_feature (1)..( 8): Result.001 file - promoters70/1032313
ggtttttt

SEQ ID NO: 82070 - DNA, 8 bp, Unknown
  misc_feature (1)..( 8): Result.001 file - promoters70/1032313
actttttt

SEQ ID NO: 82071 - DNA, 8 bp, Unknown
  misc_feature (1)..( 8): Result.001 file - promoters70/1032313
tgtttttc

SEQ ID NO: 82072 - DNA, 8 bp, Unknown
  misc_feature (1)..( 8): Result.001 file - promoters70/1032313
cgtttttg

SEQ ID NO: 82073 - DNA, 8 bp, Unknown
  misc_feature (1)..( 8): Result.001 file - promoters70/1032313
tctttttg

SEQ ID NO: 82074 - DNA, 8 bp, Unknown
  misc_feature (1)..( 8): Result.001 file - promoters70/1032381
cgttttcc

SEQ ID NO: 82075 - DNA, 8 bp, Unknown
  misc_feature (1)..( 8): Result.001 file - promoters70/1032381
cttcttta

SEQ ID NO: 82076 - DNA, 8 bp, Unknown
  misc_feature (1)..( 8): Result.001 file - promoters70/1032381
cttcttta

SEQ ID NO: 82077 - DNA, 8 bp, Unknown
  misc_feature (1)..( 8): Result.001 file - promoters70/1032381
attctttt

SEQ ID NO: 82078 - DNA, 8 bp, Unknown
  misc_feature (1)..( 8): Result.001 file - promoters70/1032381
attatttt

SEQ ID NO: 82079 - DNA, 8 bp, Unknown
  misc_feature (1)..( 8): Result.001 file - promoters70/1032381
tatgtttc

SEQ ID NO: 82080 - DNA, 8 bp, Unknown
  misc_feature (1)..( 8): Result.001 file - promoters70/1032381
gatgtttg

SEQ ID NO: 82081 - DNA, 10 bp, Unknown
  misc_feature (1)..( 10): Result.001 file - promoters70/1032381
tataaatcgt

SEQ ID NO: 82082 - DNA, 10 bp, Unknown
  misc_feature (1)..( 10): Result.001 file - promoters70/1032381
aataaattat

SEQ ID NO: 82083 - DNA, 10 bp, Unknown
  misc_feature (1)..( 10): Result.001 file - promoters70/1032381
tataaatata

SEQ ID NO: 82084 - DNA, 10 bp, Unknown
  misc_feature (1)..( 10): Result.001 file - promoters70/1032381
gctaaacaaa

SEQ ID NO: 82085 - DNA, 10 bp, Unknown
  misc_feature (1)..( 10): Result.001 file - promoters70/1032381
accaaagaaa

SEQ ID NO: 82086 - DNA, 10 bp, Unknown
  misc_feature (1)..( 10): Result.001 file - promoters70/1032381
tatagattag

SEQ ID NO: 82087 - DNA, 12 bp, Unknown
  misc_feature (1)..( 12): Result.001 file - promoters70/1032381
agaaaaaaaaaa

SEQ ID NO: 82088 - DNA, 12 bp, Unknown
  misc_feature (1)..( 12): Result.001 file - promoters70/1032381
agaataaaaata

SEQ ID NO: 82089 - DNA, 12 bp, Unknown
  misc_feature (1)..( 12): Result.001 file - promoters70/1032381
ataaaaaattac

SEQ ID NO: 82090 - DNA, 12 bp, Unknown
  misc_feature (1)..( 12): Result.001 file - promoters70/1032381
taaagaaaagac

SEQ ID NO: 82091 - DNA, 12 bp, Unknown
  misc_feature (1)..( 12): Result.001 file - promoters70/1032381
agaagaaacaaa

SEQ ID NO: 82092 - DNA, 12 bp, Unknown
  misc_feature (1)..( 12): Result.001 file - promoters70/1032400
ctaatgaaattt

SEQ ID NO: 82093 - DNA, 8 bp, Unknown
  misc_feature (1)..( 8): Result.001 file - promoters70/1032400
aattgatt

SEQ ID NO: 82094 - DNA, 8 bp, Unknown
  misc_feature (1)..( 8): Result.001 file - promoters70/1032400
aatttatt

SEQ ID NO: 82095 - DNA, 8 bp, Unknown
  misc_feature (1)..( 8): Result.001 file - promoters70/1032498
ctttgatt

SEQ ID NO: 82096 - DNA, 11 bp, Unknown
  misc_feature (1)..( 11): Result.001 file - promoters70/1032498
taaaactaaaa

SEQ ID NO: 82097 - DNA, 11 bp, Unknown
  misc_feature (1)..( 11): Result.001 file - promoters70/1032498
agtaactaaaa

SEQ ID NO: 82098 - DNA, 11 bp, Unknown
  misc_feature (1)..( 11): Result.001 file - promoters70/1032498
gcaaaccaaac

SEQ ID NO: 82099 - DNA, 11 bp, Unknown
  misc_feature (1)..( 11): Result.001 file - promoters70/1032498
acaaatcaaat

SEQ ID NO: 82100 - DNA, 11 bp, Unknown
  misc_feature (1)..( 11): Result.001 file - promoters70/1032498
caaaaccaaag

SEQ ID NO: 82101 - DNA, 11 bp, Unknown
  misc_feature (1)..( 11): Result.001 file - promoters70/1032498
agaaaacaatg

SEQ ID NO: 82102 - DNA, 11 bp, Unknown
  misc_feature (1)..( 11): Result.001 file - promoters70/1032498
gcaacccattc

SEQ ID NO: 82103 - DNA, 11 bp, Unknown
  misc_feature (1)..( 11): Result.001 file - promoters70/1032498
tacatcaaatg

SEQ ID NO: 82104 - DNA, 11 bp, Unknown
  misc_feature (1)..( 11): Result.001 file - promoters70/1032498
tacttcaaaat

SEQ ID NO: 82105 - DNA, 11 bp, Unknown
  misc_feature (1)..( 11): Result.001 file - promoters70/1032498
aatatcaaagg

SEQ ID NO: 82106 - DNA, 11 bp, Unknown
  misc_feature (1)..( 11): Result.001 file - promoters70/1032498
tatctcaaaat

SEQ ID NO: 82107 - DNA, 12 bp, Unknown
  misc_feature (1)..( 12): Result.001 file - promoters70/1032498
tcactctaaaaa

SEQ ID NO: 82108 - DNA, 12 bp, Unknown
  misc_feature (1)..( 12): Result.001 file - promoters70/1032498
gtattatcaatg

SEQ ID NO: 82109 - DNA, 11 bp, Unknown
  misc_feature (1)..( 11): Result.001 file - promoters70/1032498
tcaaatcgaaa

SEQ ID NO: 82110 - DNA, 11 bp, Unknown
  misc_feature (1)..( 11): Result.001 file - promoters70/1032498
tcaaatataga

SEQ ID NO: 82111 - DNA, 11 bp, Unknown
  misc_feature (1)..( 11): Result.001 file - promoters70/1032498
gcaaaccaaac

SEQ ID NO: 82112 - DNA, 11 bp, Unknown
  misc_feature (1)..( 11): Result.001 file - promoters70/1032498
caaaaccaaag

SEQ ID NO: 82113 - DNA, 11 bp, Unknown
  misc_feature (1)..( 11): Result.001 file - promoters70/1032498
gcaacccattc

SEQ ID NO: 82114 - DNA, 11 bp, Unknown
  misc_feature (1)..( 11): Result.001 file - promoters70/1032676
caccaccgatt

SEQ ID NO: 82115 - DNA, 10 bp, Unknown
  misc_feature (1)..( 10): Result.001 file - promoters70/1032676
aaacttaaga

SEQ ID NO: 82116 - DNA, 10 bp, Unknown
  misc_feature (1)..( 10): Result.001 file - promoters70/1032676
gaacgtaaga

SEQ ID NO: 82117 - DNA, 10 bp, Unknown
  misc_feature (1)..( 10): Result.001 file - promoters70/1032676
aaaattaaat

SEQ ID NO: 82118 - DNA, 8 bp, Unknown
  misc_feature (1)..( 8): Result.001 file - promoters70/1032676
atttttct

SEQ ID NO: 82119 - DNA, 8 bp, Unknown
  misc_feature (1)..( 8): Result.001 file - promoters70/1032676
attttttt

SEQ ID NO: 82120 - DNA, 8 bp, Unknown
  misc_feature (1)..( 8): Result.001 file - promoters70/1032676
cttttttt

SEQ ID NO: 82121 - DNA, 9 bp, Unknown
  misc_feature (1)..( 9): Result.001 file - promoters70/1032676
agatattac

SEQ ID NO: 82122 - DNA, 9 bp, Unknown
  misc_feature (1)..( 9): Result.001 file - promoters70/1032676
cgatattaa

SEQ ID NO: 82123 - DNA, 9 bp, Unknown
  misc_feature (1)..( 9): Result.001 file - promoters70/1032676
agacatttt

SEQ ID NO: 82124 - DNA, 9 bp, Unknown
  misc_feature (1)..( 9): Result.001 file - promoters70/1032676
taataataa

SEQ ID NO: 82125 - DNA, 10 bp, Unknown
  misc_feature (1)..( 10): Result.001 file - promoters70/1032676
ttcatattac

SEQ ID NO: 82126 - DNA, 10 bp, Unknown
  misc_feature (1)..( 10): Result.001 file - promoters70/1032676
ttcaaatttt

SEQ ID NO: 82127 - DNA, 11 bp, Unknown
  misc_feature (1)..( 11): Result.001 file - promoters70/1032676
ataaaagtttt

SEQ ID NO: 82128 - DNA, 11 bp, Unknown
  misc_feature (1)..( 11): Result.001 file - promoters70/1032676
gtctgaacgaa

SEQ ID NO: 82129 - DNA, 11 bp, Unknown
  misc_feature (1)..( 11): Result.001 file - promoters70/1032676
aaaagaaagaa

SEQ ID NO: 82130 - DNA, 11 bp, Unknown
  misc_feature (1)..( 11): Result.001 file - promoters70/1032788
aaaaaaaagac

SEQ ID NO: 82131 - DNA, 7 bp, Unknown
  misc_feature (1)..( 7): Result.001 file - promoters70/1032788
ctacaaa

SEQ ID NO: 82132 - DNA, 7 bp, Unknown
  misc_feature (1)..( 7): Result.001 file - promoters70/1032788
ttacaaa

SEQ ID NO: 82133 - DNA, 7 bp, Unknown
  misc_feature (1)..( 7): Result.001 file - promoters70/1032897
ttataaa

SEQ ID NO: 82134 - DNA, 13 bp, Unknown
  misc_feature (1)..( 13): Result.001 file - promoters70/1032897
aattttggttttg

SEQ ID NO: 82135 - DNA, 13 bp, Unknown
  misc_feature (1)..( 13): Result.001 file - promoters70/1032897
aatcttgtttttg

SEQ ID NO: 82136 - DNA, 13 bp, Unknown
  misc_feature (1)..( 13): Result.001 file - promoters70/1032897
aattttttataac

SEQ ID NO: 82137 - DNA, 13 bp, Unknown
  misc_feature (1)..( 13): Result.001 file - promoters70/1032897
tttcttggttcaa

SEQ ID NO: 82138 - DNA, 13 bp, Unknown
  misc_feature (1)..( 13): Result.001 file - promoters70/1032897
aaatgtgtttttt

SEQ ID NO: 82139 - DNA, 13 bp, Unknown
  misc_feature (1)..( 13): Result.001 file - promoters70/1032897
ctacttgttcaaa

SEQ ID NO: 82140 - DNA, 12 bp, Unknown
  misc_feature (1)..( 12): Result.001 file - promoters70/1032897
cttttatttcct

SEQ ID NO: 82141 - DNA, 12 bp, Unknown
  misc_feature (1)..( 12): Result.001 file - promoters70/1032897
tttttgtttcct

SEQ ID NO: 82142 - DNA, 12 bp, Unknown
  misc_feature (1)..( 12): Result.001 file - promoters70/1032897
cttttacgaaac

SEQ ID NO: 82143 - DNA, 12 bp, Unknown
  misc_feature (1)..( 12): Result.001 file - promoters70/1032897
atttttttctac

SEQ ID NO: 82144 - DNA, 12 bp, Unknown
  misc_feature (1)..( 12): Result.001 file - promoters70/1032897
ctttttgtatca

SEQ ID NO: 82145 - DNA, 12 bp, Unknown
  misc_feature (1)..( 12): Result.001 file - promoters70/1033184
atttttctgttc

SEQ ID NO: 82146 - DNA, 7 bp, Unknown
  misc_feature (1)..( 7): Result.001 file - promoters70/1033184
aatatat

SEQ ID NO: 82147 - DNA, 7 bp, Unknown
  misc_feature (1)..( 7): Result.001 file - promoters70/1033184
aatttat

SEQ ID NO: 82148 - DNA, 7 bp, Unknown
  misc_feature (1)..( 7): Result.001 file - promoters70/1033184
tatatat

SEQ ID NO: 82149 - DNA, 8 bp, Unknown
  misc_feature (1)..( 8): Result.001 file - promoters70/1033184
gcccaaag

SEQ ID NO: 82150 - DNA, 8 bp, Unknown
  misc_feature (1)..( 8): Result.001 file - promoters70/1033184
ccccaaag

SEQ ID NO: 82151 - DNA, 8 bp, Unknown
  misc_feature (1)..( 8): Result.001 file - promoters70/1033184
gcccaata

SEQ ID NO: 82152 - DNA, 12 bp, Unknown
  misc_feature (1)..( 12): Result.001 file - promoters70/1033184
tataaattcttc

SEQ ID NO: 82153 - DNA, 12 bp, Unknown
  misc_feature (1)..( 12): Result.001 file - promoters70/1033184
tataaatccttc

SEQ ID NO: 82154 - DNA, 12 bp, Unknown
  misc_feature (1)..( 12): Result.001 file - promoters70/1033184
tatgaatccata

SEQ ID NO: 82155 - DNA, 8 bp, Unknown
  misc_feature (1)..( 8): Result.001 file - promoters70/1033184
gtttttat

SEQ ID NO: 82156 - DNA, 8 bp, Unknown
  misc_feature (1)..( 8): Result.001 file - promoters70/1033184
gttgttac

SEQ ID NO: 82157 - DNA, 8 bp, Unknown
  misc_feature (1)..( 8): Result.001 file - promoters70/1033184
atttttat

SEQ ID NO: 82158 - DNA, 8 bp, Unknown
  misc_feature (1)..( 8): Result.001 file - promoters70/1033184
attttttt

SEQ ID NO: 82159 - DNA, 8 bp, Unknown
  misc_feature (1)..( 8): Result.001 file - promoters70/1033184
atttttct

SEQ ID NO: 82160 - DNA, 8 bp, Unknown
  misc_feature (1)..( 8): Result.001 file - promoters70/1033184
gttttttt

SEQ ID NO: 82161 - DNA, 8 bp, Unknown
  misc_feature (1)..( 8): Result.001 file - promoters70/1033184
gttaactt

SEQ ID NO: 82162 - DNA, 8 bp, Unknown
  misc_feature (1)..( 8): Result.001 file - promoters70/1033184
gttaacga

SEQ ID NO: 82163 - DNA, 8 bp, Unknown
  misc_feature (1)..( 8): Result.001 file - promoters70/1033184
tttaactt

SEQ ID NO: 82164 - DNA, 8 bp, Unknown
  misc_feature (1)..( 8): Result.001 file - promoters70/1033184
aaaacatt

SEQ ID NO: 82165 - DNA, 8 bp, Unknown
  misc_feature (1)..( 8): Result.001 file - promoters70/1033184
taaaaatt

SEQ ID NO: 82166 - DNA, 8 bp, Unknown
  misc_feature (1)..( 8): Result.001 file - promoters70/1033184
aaaaaatt

SEQ ID NO: 82167 - DNA, 9 bp, Unknown
  misc_feature (1)..( 9): Result.001 file - promoters70/1033184
aatcatatg

SEQ ID NO: 82168 - DNA, 9 bp, Unknown
  misc_feature (1)..( 9): Result.001 file - promoters70/1033184
agtcatatt

SEQ ID NO: 82169 - DNA, 9 bp, Unknown
  misc_feature (1)..( 9): Result.001 file - promoters70/1033262
agttatatt

SEQ ID NO: 82170 - DNA, 8 bp, Unknown
  misc_feature (1)..( 8): Result.001 file - promoters70/1033262
aagttgat

SEQ ID NO: 82171 - DNA, 8 bp, Unknown
  misc_feature (1)..( 8): Result.001 file - promoters70/1033262
aagttgat

SEQ ID NO: 82172 - DNA, 8 bp, Unknown
  misc_feature (1)..( 8): Result.001 file - promoters70/1033262
aagttgat

SEQ ID NO: 82173 - DNA, 10 bp, Unknown
  misc_feature (1)..( 10): Result.001 file - promoters70/1033262
gaatttggac

SEQ ID NO: 82174 - DNA, 10 bp, Unknown
  misc_feature (1)..( 10): Result.001 file - promoters70/1033262
gaagttgact

SEQ ID NO: 82175 - DNA, 10 bp, Unknown
  misc_feature (1)..( 10): Result.001 file - promoters70/1033262
ggagttcact

SEQ ID NO: 82176 - DNA, 7 bp, Unknown
  misc_feature (1)..( 7): Result.001 file - promoters70/1033262
agttttt

SEQ ID NO: 82177 - DNA, 7 bp, Unknown
  misc_feature (1)..( 7): Result.001 file - promoters70/1033262
tgttttt

SEQ ID NO: 82178 - DNA, 7 bp, Unknown
  misc_feature (1)..( 7): Result.001 file - promoters70/1033262
agttttt

SEQ ID NO: 82179 - DNA, 12 bp, Unknown
  misc_feature (1)..( 12): Result.001 file - promoters70/1033262
gttaagaagccc

SEQ ID NO: 82180 - DNA, 12 bp, Unknown
  misc_feature (1)..( 12): Result.001 file - promoters70/1033262
gtttagatgcct

SEQ ID NO: 82181 - DNA, 12 bp, Unknown
  misc_feature (1)..( 12): Result.001 file - promoters70/1033262
tgttgaaagccc

SEQ ID NO: 82182 - DNA, 7 bp, Unknown
  misc_feature (1)..( 7): Result.001 file - promoters70/1033262
gaaagac

SEQ ID NO: 82183 - DNA, 7 bp, Unknown
  misc_feature (1)..( 7): Result.001 file - promoters70/1033262
gaaagaa

SEQ ID NO: 82184 - DNA, 7 bp, Unknown
  misc_feature (1)..( 7): Result.001 file - promoters70/1033262
aaaagaa

SEQ ID NO: 82185 - DNA, 8 bp, Unknown
  misc_feature (1)..( 8): Result.001 file - promoters70/1033262
atttgttg

SEQ ID NO: 82186 - DNA, 8 bp, Unknown
  misc_feature (1)..( 8): Result.001 file - promoters70/1033262
atttcttg

SEQ ID NO: 82187 - DNA, 8 bp, Unknown
  misc_feature (1)..( 8): Result.001 file - promoters70/1033262
ttttcttg

SEQ ID NO: 82188 - DNA, 7 bp, Unknown
  misc_feature (1)..( 7): Result.001 file - promoters70/1033262
ctttatt

SEQ ID NO: 82189 - DNA, 7 bp, Unknown
  misc_feature (1)..( 7): Result.001 file - promoters70/1033262
atttatt

SEQ ID NO: 82190 - DNA, 7 bp, Unknown
  misc_feature (1)..( 7): Result.001 file - promoters70/1033262
ctttatt

SEQ ID NO: 82191 - DNA, 7 bp, Unknown
  misc_feature (1)..( 7): Result.001 file - promoters70/1033262
taagaaa

SEQ ID NO: 82192 - DNA, 7 bp, Unknown
  misc_feature (1)..( 7): Result.001 file - promoters70/1033262
aaagaaa

SEQ ID NO: 82193 - DNA, 7 bp, Unknown
  misc_feature (1)..( 7): Result.001 file - promoters70/1033262
aaagaag

SEQ ID NO: 82194 - DNA, 8 bp, Unknown
  misc_feature (1)..( 8): Result.001 file - promoters70/1033262
tgatctgc

SEQ ID NO: 82195 - DNA, 8 bp, Unknown
  misc_feature (1)..( 8): Result.001 file - promoters70/1033262
tgatttgc

SEQ ID NO: 82196 - DNA, 8 bp, Unknown
  misc_feature (1)..( 8): Result.001 file - promoters70/1033262
tgacttgt

SEQ ID NO: 82197 - DNA, 9 bp, Unknown
  misc_feature (1)..( 9): Result.001 file - promoters70/1033262
agataaaga

SEQ ID NO: 82198 - DNA, 9 bp, Unknown
  misc_feature (1)..( 9): Result.001 file - promoters70/1033262
ggataaaga

SEQ ID NO: 82199 - DNA, 9 bp, Unknown
  misc_feature (1)..( 9): Result.001 file - promoters70/1033262
agaaaaaga

SEQ ID NO: 82200 - DNA, 8 bp, Unknown
  misc_feature (1)..( 8): Result.001 file - promoters70/1033262
gaagttga

SEQ ID NO: 82201 - DNA, 8 bp, Unknown
  misc_feature (1)..( 8): Result.001 file - promoters70/1033262
gaagttga

SEQ ID NO: 82202 - DNA, 8 bp, Unknown
  misc_feature (1)..( 8): Result.001 file - promoters70/1033262
caagtagt

SEQ ID NO: 82203 - DNA, 9 bp, Unknown
  misc_feature (1)..( 9): Result.001 file - promoters70/1033262
agttttttt

SEQ ID NO: 82204 - DNA, 9 bp, Unknown
  misc_feature (1)..( 9): Result.001 file - promoters70/1033262
agtgttttt

SEQ ID NO: 82205 - DNA, 9 bp, Unknown
  misc_feature (1)..( 9): Result.001 file - promoters70/1033262
actttcttt

SEQ ID NO: 82206 - DNA, 7 bp, Unknown
  misc_feature (1)..( 7): Result.001 file - promoters70/1033262
aaagaag

SEQ ID NO: 82207 - DNA, 7 bp, Unknown
  misc_feature (1)..( 7): Result.001 file - promoters70/1033262
aaagaag

SEQ ID NO: 82208 - DNA, 7 bp, Unknown
  misc_feature (1)..( 7): Result.001 file - promoters70/1033781
aaagaag

SEQ ID NO: 82209 - DNA, 9 bp, Unknown
  misc_feature (1)..( 9): Result.001 file - promoters70/1033781
aataacaaa

SEQ ID NO: 82210 - DNA, 9 bp, Unknown
  misc_feature (1)..( 9): Result.001 file - promoters70/1033781
aatatcaaa

SEQ ID NO: 82211 - DNA, 9 bp, Unknown
  misc_feature (1)..( 9): Result.001 file - promoters70/1033781
tttaaaaaa

SEQ ID NO: 82212 - DNA, 9 bp, Unknown
  misc_feature (1)..( 9): Result.001 file - promoters70/1033781
aagaaaaaa

SEQ ID NO: 82213 - DNA, 14 bp, Unknown
  misc_feature (1)..( 14): Result.001 file - promoters70/1033781
tcttattaggtgaa

SEQ ID NO: 82214 - DNA, 14 bp, Unknown
  misc_feature (1)..( 14): Result.001 file - promoters70/1033781
tcttattatcgatg

SEQ ID NO: 82215 - DNA, 14 bp, Unknown
  misc_feature (1)..( 14): Result.001 file - promoters70/1033781
agttattaatgaat

SEQ ID NO: 82216 - DNA, 14 bp, Unknown
  misc_feature (1)..( 14): Result.001 file - promoters70/1033781
agctatcatccatg

SEQ ID NO: 82217 - DNA, 10 bp, Unknown
  misc_feature (1)..( 10): Result.001 file - promoters70/1033781
accatttcgt

SEQ ID NO: 82218 - DNA, 10 bp, Unknown
  misc_feature (1)..( 10): Result.001 file - promoters70/1033781
accctttgtt

SEQ ID NO: 82219 - DNA, 10 bp, Unknown
  misc_feature (1)..( 10): Result.001 file - promoters70/1033781
cccattttct

SEQ ID NO: 82220 - DNA, 11 bp, Unknown
  misc_feature (1)..( 11): Result.001 file - promoters70/1033781
gtcatcttcta

SEQ ID NO: 82221 - DNA, 9 bp, Unknown
  misc_feature (1)..( 9): Result.001 file - promoters70/1033781
catgtattt

SEQ ID NO: 82222 - DNA, 9 bp, Unknown
  misc_feature (1)..( 9): Result.001 file - promoters70/1033781
catgaattg

SEQ ID NO: 82223 - DNA, 9 bp, Unknown
  misc_feature (1)..( 9): Result.001 file - promoters70/1033781
cctgaattt

SEQ ID NO: 82224 - DNA, 9 bp, Unknown
  misc_feature (1)..( 9): Result.001 file - promoters70/1033781
gtggaattg

SEQ ID NO: 82225 - DNA, 9 bp, Unknown
  misc_feature (1)..( 9): Result.001 file - promoters70/1033781
tatgatttg

SEQ ID NO: 82226 - DNA, 14 bp, Unknown
  misc_feature (1)..( 14): Result.001 file - promoters70/1033781
tccatttttatttt

SEQ ID NO: 82227 - DNA, 14 bp, Unknown
  misc_feature (1)..( 14): Result.001 file - promoters70/1033781
tagggttttagttt

SEQ ID NO: 82228 - DNA, 14 bp, Unknown
  misc_feature (1)..( 14): Result.001 file - promoters70/1033781
gtattttttaataa

SEQ ID NO: 82229 - DNA, 14 bp, Unknown
  misc_feature (1)..( 14): Result.001 file - promoters70/1033841
gtaatttttggttt

SEQ ID NO: 82230 - DNA, 12 bp, Unknown
  misc_feature (1)..( 12): Result.001 file - promoters70/1033841
ttcttccttccg

SEQ ID NO: 82231 - DNA, 12 bp, Unknown
  misc_feature (1)..( 12): Result.001 file - promoters70/1033841
atcctccttctg

SEQ ID NO: 82232 - DNA, 12 bp, Unknown
  misc_feature (1)..( 12): Result.001 file - promoters70/1033841
gttctccatccc

SEQ ID NO: 82233 - DNA, 12 bp, Unknown
  misc_feature (1)..( 12): Result.001 file - promoters70/1033841
ccattccttttt

SEQ ID NO: 82234 - DNA, 12 bp, Unknown
  misc_feature (1)..( 12): Result.001 file - promoters70/1033841
atcgtccatttt

SEQ ID NO: 82235 - DNA, 12 bp, Unknown
  misc_feature (1)..( 12): Result.001 file - promoters70/1034137
atttttctgttc

SEQ ID NO: 82236 - DNA, 10 bp, Unknown
  misc_feature (1)..( 10): Result.001 file - promoters70/1034137
attatatatg

SEQ ID NO: 82237 - DNA, 10 bp, Unknown
  misc_feature (1)..( 10): Result.001 file - promoters70/1034137
tcaataaatg

SEQ ID NO: 82238 - DNA, 10 bp, Unknown
  misc_feature (1)..( 10): Result.001 file - promoters70/1034137
tcattaaaaa

SEQ ID NO: 82239 - DNA, 10 bp, Unknown
  misc_feature (1)..( 10): Result.001 file - promoters70/1034137
ttaaaaaaaa

SEQ ID NO: 82240 - DNA, 10 bp, Unknown
  misc_feature (1)..( 10): Result.001 file - promoters70/1034137
acaaaaaaaa

SEQ ID NO: 82241 - DNA, 10 bp, Unknown
  misc_feature (1)..( 10): Result.001 file - promoters70/1034137
ttaaaaaagg

SEQ ID NO: 82242 - DNA, 34 bp, Unknown; identical to SEQ ID NO: 76977
  misc_feature (1)..( 34): Result.001 file - promoters70/1034137

SEQ ID NO: 82243 - DNA, 34 bp, Unknown; identical to SEQ ID NO: 76978
  misc_feature (1)..( 34): Result.001 file - promoters70/1034137

SEQ ID NO: 82244 - DNA, 34 bp, Unknown; identical to SEQ ID NO: 76979
  misc_feature (1)..( 34): Result.001 file - promoters70/1034137

SEQ ID NO: 82245 - DNA, 34 bp, Unknown; identical to SEQ ID NO: 76977
  misc_feature (1)..( 34): Result.001 file - promoters70/1034137

SEQ ID NO: 82246 - DNA, 34 bp, Unknown; identical to SEQ ID NO: 76981
  misc_feature (1)..( 34): Result.001 file - promoters70/1034137

SEQ ID NO: 82247 - DNA, 34 bp, Unknown; identical to SEQ ID NO: 76979
  misc_feature (1)..( 34): Result.001 file - promoters70/1034137

SEQ ID NO: 82248 - DNA, 15 bp, Unknown
  misc_feature (1)..( 15): Result.001 file - promoters70/1034137
attgaagacttttca

SEQ ID NO: 82249 - DNA, 15 bp, Unknown
  misc_feature (1)..( 15): Result.001 file - promoters70/1034137
attgaagacttttca

SEQ ID NO: 82250 - DNA, 15 bp, Unknown
  misc_feature (1)..( 15): Result.001 file - promoters70/1034137
gtagaagaccatata

SEQ ID NO: 82251 - DNA, 13 bp, Unknown
  misc_feature (1)..( 13): Result.001 file - promoters70/1034137
ctataagctttaa

SEQ ID NO: 82252 - DNA, 13 bp, Unknown
  misc_feature (1)..( 13): Result.001 file - promoters70/1034137
ctataagctttta

SEQ ID NO: 82253 - DNA, 14 bp, Unknown
  misc_feature (1)..( 14): Result.001 file - promoters70/1034137
aagacagcatttaa

SEQ ID NO: 82254 - DNA, 29 bp, Unknown
  misc_feature (1)..( 29): Result.001 file - promoters70/1034137
aagctttaagtctatcgctagactgtcca

SEQ ID NO: 82255 - DNA, 29 bp, Unknown
  misc_feature (1)..( 29): Result.001 file - promoters70/1034137
agcttttaagtctctcgctagactgtcca

SEQ ID NO: 82256 - DNA, 29 bp, Unknown
  misc_feature (1)..( 29): Result.001 file - promoters70/1034322
agcatttaatgatgataacgatttggaag

SEQ ID NO: 82257 - DNA, 10 bp, Unknown
  misc_feature (1)..( 10): Result.001 file - promoters70/1034322
tatatataga

SEQ ID NO: 82258 - DNA, 10 bp, Unknown
  misc_feature (1)..( 10): Result.001 file - promoters70/1034322
tatataaata

SEQ ID NO: 82259 - DNA, 10 bp, Unknown
  misc_feature (1)..( 10): Result.001 file - promoters70/1034322
tataaatatg

SEQ ID NO: 82260 - DNA, 10 bp, Unknown
  misc_feature (1)..( 10): Result.001 file - promoters70/1034322
tatacaaatc

SEQ ID NO: 82261 - DNA, 10 bp, Unknown
  misc_feature (1)..( 10): Result.001 file - promoters70/1034322
taaacaaatc

SEQ ID NO: 82262 - DNA, 13 bp, Unknown
  misc_feature (1)..( 13): Result.001 file - promoters70/1034322
atttgaatgaaaa

SEQ ID NO: 82263 - DNA, 13 bp, Unknown
  misc_feature (1)..( 13): Result.001 file - promoters70/1034322
attttaataactt

SEQ ID NO: 82264 - DNA, 13 bp, Unknown
  misc_feature (1)..( 13): Result.001 file - promoters70/1034322
aatttaatttgtt

SEQ ID NO: 82265 - DNA, 13 bp, Unknown
  misc_feature (1)..( 13): Result.001 file - promoters70/1034322
cgtttagtaactt

SEQ ID NO: 82266 - DNA, 13 bp, Unknown
  misc_feature (1)..( 13): Result.001 file - promoters70/1034322
aatttaattaacc

SEQ ID NO: 82267 - DNA, 13 bp, Unknown
  misc_feature (1)..( 13): Result.001 file - promoters70/1034322
aatttaatttgtt

SEQ ID NO: 82268 - DNA, 13 bp, Unknown
  misc_feature (1)..( 13): Result.001 file - promoters70/1034322
attttaataactt

SEQ ID NO: 82269 - DNA, 13 bp, Unknown
  misc_feature (1)..( 13): Result.001 file - promoters70/1034652
cgtttagtaactt

SEQ ID NO: 82270 - DNA, 9 bp, Unknown
  misc_feature (1)..( 9): Result.001 file - promoters70/1034652
caaaacatc

SEQ ID NO: 82271 - DNA, 9 bp, Unknown
  misc_feature (1)..( 9): Result.001 file - promoters70/1034652
taaaacaaa

SEQ ID NO: 82272 - DNA, 9 bp, Unknown
  misc_feature (1)..( 9): Result.001 file - promoters70/1034652
acaaatatc

SEQ ID NO: 82273 - DNA, 9 bp, Unknown
  misc_feature (1)..( 9): Result.001 file - promoters70/1034652
aaaaacata

SEQ ID NO: 82274 - DNA, 9 bp, Unknown
  misc_feature (1)..( 9): Result.001 file - promoters70/1034652
caaaaccgt

SEQ ID NO: 82275 - DNA, 9 bp, Unknown
  misc_feature (1)..( 9): Result.001 file - promoters70/1034652
aaaaactca

SEQ ID NO: 82276 - DNA, 11 bp, Unknown
  misc_feature (1)..( 11): Result.001 file - promoters70/1034652
ctccacaaaac

SEQ ID NO: 82277 - DNA, 11 bp, Unknown
  misc_feature (1)..( 11): Result.001 file - promoters70/1034652
taaaacaaaaa

SEQ ID NO: 82278 - DNA, 11 bp, Unknown
  misc_feature (1)..( 11): Result.001 file - promoters70/1034652
tttatcaaaac

SEQ ID NO: 82279 - DNA, 11 bp, Unknown
  misc_feature (1)..( 11): Result.001 file - promoters70/1034652
atcgccaaaaa

SEQ ID NO: 82280 - DNA, 11 bp, Unknown
  misc_feature (1)..( 11): Result.001 file - promoters70/1034652
cgaaacaaaga

SEQ ID NO: 82281 - DNA, 11 bp, Unknown
  misc_feature (1)..( 11): Result.001 file - promoters70/1034652
cgaatcaatct

SEQ ID NO: 82282 - DNA, 9 bp, Unknown
  misc_feature (1)..( 9): Result.001 file - promoters70/1034652
ccatcgaat

SEQ ID NO: 82283 - DNA, 9 bp, Unknown
  misc_feature (1)..( 9): Result.001 file - promoters70/1034652
aaatcaaat

SEQ ID NO: 82284 - DNA, 9 bp, Unknown
  misc_feature (1)..( 9): Result.001 file - promoters70/1034652
ccaccgatt

SEQ ID NO: 82285 - DNA, 9 bp, Unknown
  misc_feature (1)..( 9): Result.001 file - promoters70/1034652
caatcaatg

SEQ ID NO: 82286 - DNA, 9 bp, Unknown
  misc_feature (1)..( 9): Result.001 file - promoters70/1034652
cagtcaaat

SEQ ID NO: 82287 - DNA, 9 bp, Unknown
  misc_feature (1)..( 9): Result.001 file - promoters70/1034652
aagtaaaaa

SEQ ID NO: 82288 - DNA, 11 bp, Unknown
  misc_feature (1)..( 11): Result.001 file - promoters70/1034652
cacccttcttt

SEQ ID NO: 82289 - DNA, 11 bp, Unknown
  misc_feature (1)..( 11): Result.001 file - promoters70/1034652
ctacctttttt

SEQ ID NO: 82290 - DNA, 11 bp, Unknown
  misc_feature (1)..( 11): Result.001 file - promoters70/1034652
ttttcttcttc

SEQ ID NO: 82291 - DNA, 11 bp, Unknown
  misc_feature (1)..( 11): Result.001 file - promoters70/1034652
tataattcttt

SEQ ID NO: 82292 - DNA, 11 bp, Unknown
  misc_feature (1)..( 11): Result.001 file - promoters70/1034652
tttgcttctcc

SEQ ID NO: 82293 - DNA, 11 bp, Unknown
  misc_feature (1)..( 11): Result.001 file - promoters70/1035083
aatccttgaga

SEQ ID NO: 82294 - DNA, 10 bp, Unknown
  misc_feature (1)..( 10): Result.001 file - promoters70/1035083
cattagttct

SEQ ID NO: 82295 - DNA, 10 bp, Unknown
  misc_feature (1)..( 10): Result.001 file - promoters70/1035083
aatttgttat

SEQ ID NO: 82296 - DNA, 10 bp, Unknown
  misc_feature (1)..( 10): Result.001 file - promoters70/1035083
tattatttct

SEQ ID NO: 82297 - DNA, 10 bp, Unknown
  misc_feature (1)..( 10): Result.001 file - promoters70/1035083
tattatacgt

SEQ ID NO: 82298 - DNA, 11 bp, Unknown
  misc_feature (1)..( 11): Result.001 file - promoters70/1035083
aatgtttgtat

SEQ ID NO: 82299 - DNA, 11 bp, Unknown
  misc_feature (1)..( 11): Result.001 file - promoters70/1035083
catgtttagaa

SEQ ID NO: 82300 - DNA, 11 bp, Unknown
  misc_feature (1)..( 11): Result.001 file - promoters70/1035083
aatctttgttt

SEQ ID NO: 82301 - DNA, 11 bp, Unknown
  misc_feature (1)..( 11): Result.001 file - promoters70/1035083
aatctttgtat

SEQ ID NO: 82302 - DNA, 11 bp, Unknown
  misc_feature (1)..( 11): Result.001 file - promoters70/1035083
ttttgaagaat

SEQ ID NO: 82303 - DNA, 11 bp, Unknown
  misc_feature (1)..( 11): Result.001 file - promoters70/1035083
ttttgatgaat

SEQ ID NO: 82304 - DNA, 11 bp, Unknown
  misc_feature (1)..( 11): Result.001 file - promoters70/1035083
atttgctgaat

SEQ ID NO: 82305 - DNA, 11 bp, Unknown
  misc_feature (1)..( 11): Result.001 file - promoters70/1035083
aaaagatgaag

SEQ ID NO: 82306 - DNA, 9 bp, Unknown
  misc_feature (1)..( 9): Result.001 file - promoters70/1035083
tatataaac

SEQ ID NO: 82307 - DNA, 9 bp, Unknown
  misc_feature (1)..( 9): Result.001 file - promoters70/1035083
tatataata

SEQ ID NO: 82308 - DNA, 9 bp, Unknown
  misc_feature (1)..( 9): Result.001 file - promoters70/1035083
tataaaaac

SEQ ID NO: 82309 - DNA, 9 bp, Unknown
  misc_feature (1)..( 9): Result.001 file - promoters70/1035083
cataaaagc

SEQ ID NO: 82310 - DNA, 9 bp, Unknown
  misc_feature (1)..( 9): Result.001 file - promoters70/1035083
gataaatat

SEQ ID NO: 82311 - DNA, 10 bp, Unknown
  misc_feature (1)..( 10): Result.001 file - promoters70/1035083
tataaacaaa

SEQ ID NO: 82312 - DNA, 10 bp, Unknown
  misc_feature (1)..( 10): Result.001 file - promoters70/1035083
aataaccaaa

SEQ ID NO: 82313 - DNA, 10 bp, Unknown
  misc_feature (1)..( 10): Result.001 file - promoters70/1035083
tataaaaacc

SEQ ID NO: 82314 - DNA, 10 bp, Unknown
  misc_feature (1)..( 10): Result.001 file - promoters70/1035083
cataaaagca

SEQ ID NO: 82315 - DNA, 11 bp, Unknown
  misc_feature (1)..( 11): Result.001 file - promoters70/1035083
caaaatttgta

SEQ ID NO: 82316 - DNA, 11 bp, Unknown
  misc_feature (1)..( 11): Result.001 file - promoters70/1035083
caatattttaa

SEQ ID NO: 82317 - DNA, 11 bp, Unknown
  misc_feature (1)..( 11): Result.001 file - promoters70/1035083
aattattttac

SEQ ID NO: 82318 - DNA, 11 bp, Unknown
  misc_feature (1)..( 11): Result.001 file - promoters70/1035172
gctgattttac

SEQ ID NO: 82319 - DNA, 8 bp, Unknown
  misc_feature (1)..( 8): Result.001 file - promoters70/1035172
tttaaccc

SEQ ID NO: 82320 - DNA, 8 bp, Unknown
  misc_feature (1)..( 8): Result.001 file - promoters70/1035172
tttgacca

SEQ ID NO: 82321 - DNA, 8 bp, Unknown
  misc_feature (1)..( 8): Result.001 file - promoters70/1035172
cctaaccc

SEQ ID NO: 82322 - DNA, 7 bp, Unknown
  misc_feature (1)..( 7): Result.001 file - promoters70/1035172
gttgact

SEQ ID NO: 82323 - DNA, 7 bp, Unknown
  misc_feature (1)..( 7): Result.001 file - promoters70/1035172
gttgact

SEQ ID NO: 82324 - DNA, 7 bp, Unknown
  misc_feature (1)..( 7): Result.001 file - promoters70/1035172
attgact

SEQ ID NO: 82325 - DNA, 7 bp, Unknown
  misc_feature (1)..( 7): Result.001 file - promoters70/1035172
gctattt

SEQ ID NO: 82326 - DNA, 7 bp, Unknown
  misc_feature (1)..( 7): Result.001 file - promoters70/1035172
actattt

SEQ ID NO: 82327 - DNA, 7 bp, Unknown
  misc_feature (1)..( 7): Result.001 file - promoters70/1035172
actgttt

SEQ ID NO: 82328 - DNA, 12 bp, Unknown
  misc_feature (1)..( 12): Result.001 file - promoters70/1035172
gaagaagcatcc

SEQ ID NO: 82329 - DNA, 12 bp, Unknown
  misc_feature (1)..( 12): Result.001 file - promoters70/1035172
gaaaaagtaatt

SEQ ID NO: 82330 - DNA, 12 bp, Unknown
  misc_feature (1)..( 12): Result.001 file - promoters70/1035172
caaaaacaaaaa

SEQ ID NO: 82331 - DNA, 8 bp, Unknown
  misc_feature (1)..( 8): Result.001 file - promoters70/1035172
caaaaaac

SEQ ID NO: 82332 - DNA, 8 bp, Unknown
  misc_feature (1)..( 8): Result.001 file - promoters70/1035172
taaaaaat

SEQ ID NO: 82333 - DNA, 8 bp, Unknown
  misc_feature (1)..( 8): Result.001 file - promoters70/1035172
taaacaat

SEQ ID NO: 82334 - DNA, 16 bp, Unknown
  misc_feature (1)..( 16): Result.001 file - promoters70/1035172
tctcttcttcattgaa

SEQ ID NO: 82335 - DNA, 16 bp, Unknown
  misc_feature (1)..( 16): Result.001 file - promoters70/1035172
tcttttctctctataa

SEQ ID NO: 82336 - DNA, 16 bp, Unknown
  misc_feature (1)..( 16): Result.001 file - promoters70/1035172
acttttgtctatataa

SEQ ID NO: 82337 - DNA, 8 bp, Unknown
  misc_feature (1)..( 8): Result.001 file - promoters70/1035172
taaatatt

SEQ ID NO: 82338 - DNA, 8 bp, Unknown
  misc_feature (1)..( 8): Result.001 file - promoters70/1035172
taaatagg

SEQ ID NO: 82339 - DNA, 8 bp, Unknown
  misc_feature (1)..( 8): Result.001 file - promoters70/1035267
caaatatt

SEQ ID NO: 82340 - DNA, 7 bp, Unknown
  misc_feature (1)..( 7): Result.001 file - promoters70/1035267
ccacaga

SEQ ID NO: 82341 - DNA, 7 bp, Unknown
  misc_feature (1)..( 7): Result.001 file - promoters70/1035267
ccacagc

SEQ ID NO: 82342 - DNA, 7 bp, Unknown
  misc_feature (1)..( 7): Result.001 file - promoters70/1035312
tcacaga

SEQ ID NO: 82343 - DNA, 8 bp, Unknown
  misc_feature (1)..( 8): Result.001 file - promoters70/1035312
atcaaaac

SEQ ID NO: 82344 - DNA, 8 bp, Unknown
  misc_feature (1)..( 8): Result.001 file - promoters70/1035312
atcaaaaa

SEQ ID NO: 82345 - DNA, 8 bp, Unknown
  misc_feature (1)..( 8): Result.001 file - promoters70/1035312
accaaaac

SEQ ID NO: 82346 - DNA, 9 bp, Unknown
  misc_feature (1)..( 9): Result.001 file - promoters70/1035312
aaaccaaaa

SEQ ID NO: 82347 - DNA, 9 bp, Unknown
  misc_feature (1)..( 9): Result.001 file - promoters70/1035312
aaaacaatc

SEQ ID NO: 82348 - DNA, 9 bp, Unknown
  misc_feature (1)..( 9): Result.001 file - promoters70/1035312
aaaccaaaa

SEQ ID NO: 82349 - DNA, 8 bp, Unknown
  misc_feature (1)..( 8): Result.001 file - promoters70/1035312
aaatcgaa

SEQ ID NO: 82350 - DNA, 8 bp, Unknown
  misc_feature (1)..( 8): Result.001 file - promoters70/1035312
caatcgaa

SEQ ID NO: 82351 - DNA, 8 bp, Unknown
  misc_feature (1)..( 8): Result.001 file - promoters70/1035312
caaacgaa

SEQ ID NO: 82352 - DNA, 10 bp, Unknown
  misc_feature (1)..( 10): Result.001 file - promoters70/1035312
cgattacaca

SEQ ID NO: 82353 - DNA, 10 bp, Unknown
  misc_feature (1)..( 10): Result.001 file - promoters70/1035312
cgatttcaca

SEQ ID NO: 82354 - DNA, 10 bp, Unknown
  misc_feature (1)..( 10): Result.001 file - promoters70/1035312
agatttcggt

SEQ ID NO: 82355 - DNA, 10 bp, Unknown
  misc_feature (1)..( 10): Result.001 file - promoters70/1035312
attgggccca

SEQ ID NO: 82356 - DNA, 10 bp, Unknown
  misc_feature (1)..( 10): Result.001 file - promoters70/1035312
attcggccca

SEQ ID NO: 82357 - DNA, 10 bp, Unknown
  misc_feature (1)..( 10): Result.001 file - promoters70/1035632
tatgggcctt

SEQ ID NO: 82358 - DNA, 12 bp, Unknown
  misc_feature (1)..( 12): Result.001 file - promoters70/1035632
ttacaaagaaga

SEQ ID NO: 82359 - DNA, 12 bp, Unknown
  misc_feature (1)..( 12): Result.001 file - promoters70/1035632
ttataaatgtat

SEQ ID NO: 82360 - DNA, 12 bp, Unknown
  misc_feature (1)..( 12): Result.001 file - promoters70/1035632
taataaaagtat

SEQ ID NO: 82361 - DNA, 12 bp, Unknown
  misc_feature (1)..( 12): Result.001 file - promoters70/1035632
taccaaaatatt

SEQ ID NO: 82362 - DNA, 10 bp, Unknown
  misc_feature (1)..( 10): Result.001 file - promoters70/1035632
acaaaagata

SEQ ID NO: 82363 - DNA, 10 bp, Unknown
  misc_feature (1)..( 10): Result.001 file - promoters70/1035632
ataaaaaata

SEQ ID NO: 82364 - DNA, 10 bp, Unknown
  misc_feature (1)..( 10): Result.001 file - promoters70/1035632
acaaaagaat

SEQ ID NO: 82365 - DNA, 10 bp, Unknown
  misc_feature (1)..( 10): Result.001 file - promoters70/1035632
acaaaaagta

SEQ ID NO: 82366 - DNA, 8 bp, Unknown
  misc_feature (1)..( 8): Result.001 file - promoters70/1035632
gataaaac

SEQ ID NO: 82367 - DNA, 8 bp, Unknown
  misc_feature (1)..( 8): Result.001 file - promoters70/1035632
aataaaaa

SEQ ID NO: 82368 - DNA, 8 bp, Unknown
  misc_feature (1)..( 8): Result.001 file - promoters70/1035632
agtaaaac

SEQ ID NO: 82369 - DNA, 8 bp, Unknown
  misc_feature (1)..( 8): Result.001 file - promoters70/1375217
aataaata

SEQ ID NO: 82370 - DNA, 10 bp, Unknown
  misc_feature (1)..( 10): Result.001 file - promoters70/1375217
aaaaacaaac

SEQ ID NO: 82371 - DNA, 10 bp, Unknown
  misc_feature (1)..( 10): Result.001 file - promoters70/1375217
ttaaaaaaag

SEQ ID NO: 82372 - DNA, 10 bp, Unknown
  misc_feature (1)..( 10): Result.001 file - promoters70/1375217
ttaagaaaag

SEQ ID NO: 82373 - DNA, 8 bp, Unknown
  misc_feature (1)..( 8): Result.001 file - promoters70/1375217
atgaaaaa

SEQ ID NO: 82374 - DNA, 8 bp, Unknown
  misc_feature (1)..( 8): Result.001 file - promoters70/1375217
aagaaaaa

SEQ ID NO: 82375 - DNA, 8 bp, Unknown
  misc_feature (1)..( 8): Result.001 file - promoters70/1375217
aagaaaag

SEQ ID NO: 82376 - DNA, 13 bp, Unknown
  misc_feature (1)..( 13): Result.001 file - promoters70/1375217
tgtttgtttaaca

SEQ ID NO: 82377 - DNA, 13 bp, Unknown
  misc_feature (1)..( 13): Result.001 file - promoters70/1375217
cttttgtttctgg

SEQ ID NO: 82378 - DNA, 13 bp, Unknown
  misc_feature (1)..( 13): Result.001 file - promoters70/1375217
tgtttttttcagg

SEQ ID NO: 82379 - DNA, 13 bp, Unknown
  misc_feature (1)..( 13): Result.001 file - promoters70/1375217
tttctgtttcaca

SEQ ID NO: 82380 - DNA, 8 bp, Unknown
  misc_feature (1)..( 8): Result.001 file - promoters70/1375217
aatcaaga

SEQ ID NO: 82381 - DNA, 8 bp, Unknown
  misc_feature (1)..( 8): Result.001 file - promoters70/1375217
aatcaatg

SEQ ID NO: 82382 - DNA, 8 bp, Unknown
  misc_feature (1)..( 8): Result.001 file - promoters70/1375217
aataaaga

SEQ ID NO: 82383 - DNA, 9 bp, Unknown
  misc_feature (1)..( 9): Result.001 file - promoters70/1375217
tttccatct

SEQ ID NO: 82384 - DNA, 9 bp, Unknown
  misc_feature (1)..( 9): Result.001 file - promoters70/1375217
gttccttct

SEQ ID NO: 82385 - DNA, 9 bp, Unknown
  misc_feature (1)..( 9): Result.001 file - promoters70/1375471
gttcctttg

SEQ ID NO: 82386 - DNA, 8 bp, Unknown
  misc_feature (1)..( 8): Result.001 file - promoters70/1375471
aaaataaa

SEQ ID NO: 82387 - DNA, 8 bp, Unknown
  misc_feature (1)..( 8): Result.001 file - promoters70/1375471
aaaataat

SEQ ID NO: 82388 - DNA, 8 bp, Unknown
  misc_feature (1)..( 8): Result.001 file - promoters70/1375615
aaaaaaat

SEQ ID NO: 82389 - DNA, 8 bp, Unknown
  misc_feature (1)..( 8): Result.001 file - promoters70/1375615
atcatatt

SEQ ID NO: 82390 - DNA, 8 bp, Unknown
  misc_feature (1)..( 8): Result.001 file - promoters70/1375615
atcatatt

SEQ ID NO: 82391 - DNA, 8 bp, Unknown
  misc_feature (1)..( 8): Result.001 file - promoters70/1375615
atcatatt

SEQ ID NO: 82392 - DNA, 9 bp, Unknown
  misc_feature (1)..( 9): Result.001 file - promoters70/1375615
tttgtagtg

SEQ ID NO: 82393 - DNA, 9 bp, Unknown
  misc_feature (1)..( 9): Result.001 file - promoters70/1375615
attgtagct

SEQ ID NO: 82394 - DNA, 9 bp, Unknown
  misc_feature (1)..( 9): Result.001 file - promoters70/1375615
tttgttgtg

SEQ ID NO: 82395 - DNA, 8 bp, Unknown
  misc_feature (1)..( 8): Result.001 file - promoters70/1375615
tgatttgt

SEQ ID NO: 82396 - DNA, 8 bp, Unknown
  misc_feature (1)..( 8): Result.001 file - promoters70/1375615
agatatgt

SEQ ID NO: 82397 - DNA, 8 bp, Unknown
  misc_feature (1)..( 8): Result.001 file - promoters70/1375615
tgatttgg

SEQ ID NO: 82398 - DNA, 7 bp, Unknown
  misc_feature (1)..( 7): Result.001 file - promoters70/1375615
gtttgtt

SEQ ID NO: 82399 - DNA, 7 bp, Unknown
  misc_feature (1)..( 7): Result.001 file - promoters70/1375615
gtttgtg

SEQ ID NO: 82400 - DNA, 7 bp, Unknown
  misc_feature (1)..( 7): Result.001 file - promoters70/1375615
ttttgtt

SEQ ID NO: 82401 - DNA, 8 bp, Unknown
  misc_feature (1)..( 8): Result.001 file - promoters70/1375615
tgtttgtt

SEQ ID NO: 82402 - DNA, 8 bp, Unknown
  misc_feature (1)..( 8): Result.001 file - promoters70/1375615
gatttgtt

SEQ ID NO: 82403 - DNA, 8 bp, Unknown
  misc_feature (1)..( 8): Result.001 file - promoters70/1375634
gatatgta

SEQ ID NO: 82404 - DNA, 9 bp, Unknown
  misc_feature (1)..( 9): Result.001 file - promoters70/1375634
tgtatggtg

SEQ ID NO: 82405 - DNA, 9 bp, Unknown
  misc_feature (1)..( 9): Result.001 file - promoters70/1375634
tgtatgcat

SEQ ID NO: 82406 - DNA, 9 bp, Unknown
  misc_feature (1)..( 9): Result.001 file - promoters70/1375634
agtaagcat

SEQ ID NO: 82407 - DNA, 10 bp, Unknown
  misc_feature (1)..( 10): Result.001 file - promoters70/1375634
ttaattttta

SEQ ID NO: 82408 - DNA, 10 bp, Unknown
  misc_feature (1)..( 10): Result.001 file - promoters70/1375634
tcaattttat

SEQ ID NO: 82409 - DNA, 10 bp, Unknown
  misc_feature (1)..( 10): Result.001 file - promoters70/1375634
tcaatcttat

SEQ ID NO: 82410 - DNA, 10 bp, Unknown
  misc_feature (1)..( 10): Result.001 file - promoters70/1375634
taatttttat

SEQ ID NO: 82411 - DNA, 10 bp, Unknown
  misc_feature (1)..( 10): Result.001 file - promoters70/1375634
tcaattttat

SEQ ID NO: 82412 - DNA, 10 bp, Unknown
  misc_feature (1)..( 10): Result.001 file - promoters70/1376361
tcaatcttat

SEQ ID NO: 82413 - DNA, 7 bp, Unknown
  misc_feature (1)..( 7): Result.001 file - promoters70/1376361
aatttag

SEQ ID NO: 82414 - DNA, 7 bp, Unknown
  misc_feature (1)..( 7): Result.001 file - promoters70/1376361
aatttag

SEQ ID NO: 82415 - DNA, 7 bp, Unknown
  misc_feature (1)..( 7): Result.001 file - promoters70/1376650
gatttag

SEQ ID NO: 82416 - DNA, 8 bp, Unknown
  misc_feature (1)..( 8): Result.001 file - promoters70/1376650
caaaccaa

SEQ ID NO: 82417 - DNA, 8 bp, Unknown
  misc_feature (1)..( 8): Result.001 file - promoters70/1376650
gaaatcaa

SEQ ID NO: 82418 - DNA, 8 bp, Unknown
  misc_feature (1)..( 8): Result.001 file - promoters70/1376650
gaactcag

SEQ ID NO: 82419 - DNA, 8 bp, Unknown
  misc_feature (1)..( 8): Result.001 file - promoters70/1376650
taacacag

SEQ ID NO: 82420 - DNA, 8 bp, Unknown
  misc_feature (1)..( 8): Result.001 file - promoters70/1376650
gaactcag

SEQ ID NO: 82421 - DNA, 8 bp, Unknown
  misc_feature (1)..( 8): Result.001 file - promoters70/1376650
gaaatcaa

SEQ ID NO: 82422 - DNA, 9 bp, Unknown
  misc_feature (1)..( 9): Result.001 file - promoters70/1376650
ccgaaaaaa

SEQ ID NO: 82423 - DNA, 9 bp, Unknown
  misc_feature (1)..( 9): Result.001 file - promoters70/1376650
aagaaaaaa

SEQ ID NO: 82424 - DNA, 9 bp, Unknown
  misc_feature (1)..( 9): Result.001 file - promoters70/1376881
aagacaaaa

SEQ ID NO: 82425 - DNA, 6 bp, Unknown
  misc_feature (1)..( 6): Result.001 file - promoters70/1376881
agtaaa

SEQ ID NO: 82426 - DNA, 6 bp, Unknown
  misc_feature (1)..( 6): Result.001 file - promoters70/1376881
agtaaa

SEQ ID NO: 82427 - DNA, 6 bp, Unknown
  misc_feature (1)..( 6): Result.001 file - promoters70/1376881
agtaaa

SEQ ID NO: 82428 - DNA, 10 bp, Unknown
  misc_feature (1)..( 10): Result.001 file - promoters70/1376881
tcaacaaaaa

SEQ ID NO: 82429 - DNA, 10 bp, Unknown
  misc_feature (1)..( 10): Result.001 file - promoters70/1376881
gaaacaaaaa

SEQ ID NO: 82430 - DNA, 10 bp, Unknown
  misc_feature (1)..( 10): Result.001 file - promoters70/1377139
gaaagaaagc

SEQ ID NO: 82431 - DNA, 8 bp, Unknown
  misc_feature (1)..( 8): Result.001 file - promoters70/1377139
tttgagaa

SEQ ID NO: 82432 - DNA, 8 bp, Unknown
  misc_feature (1)..( 8): Result.001 file - promoters70/1377139
tttgagag

SEQ ID NO: 82433 - DNA, 8 bp, Unknown
  misc_feature (1)..( 8): Result.001 file - promoters70/1377412
actgagag

SEQ ID NO: 82434 - DNA, 7 bp, Unknown
  misc_feature (1)..( 7): Result.001 file - promoters70/1377412
ttgtgat

SEQ ID NO: 82435 - DNA, 7 bp, Unknown
  misc_feature (1)..( 7): Result.001 file - promoters70/1377412
ttgtgaa

SEQ ID NO: 82436 - DNA, 7 bp, Unknown
  misc_feature (1)..( 7): Result.001 file - promoters70/1377412
ctgtgaa

SEQ ID NO: 82437 - DNA, 11 bp, Unknown
  misc_feature (1)..( 11): Result.001 file - promoters70/1377412
aaatcaaagat

SEQ ID NO: 82438 - DNA, 11 bp, Unknown
  misc_feature (1)..( 11): Result.001 file - promoters70/1377412
aaattaaaccc

SEQ ID NO: 82439 - DNA, 11 bp, Unknown
  misc_feature (1)..( 11): Result.001 file - promoters70/1377412
ggatcacagat

SEQ ID NO: 82440 - DNA, 8 bp, Unknown
  misc_feature (1)..( 8): Result.001 file - promoters70/1377412
ttctccaa

SEQ ID NO: 82441 - DNA, 8 bp, Unknown
  misc_feature (1)..( 8): Result.001 file - promoters70/1377412
ttcttcaa

SEQ ID NO: 82442 - DNA, 8 bp, Unknown
  misc_feature (1)..( 8): Result.001 file - promoters70/1377472
ttcttctt

SEQ ID NO: 82443 - DNA, 7 bp, Unknown
  misc_feature (1)..( 7): Result.001 file - promoters70/1377472
aaaacaa

SEQ ID NO: 82444 - DNA, 7 bp, Unknown
  misc_feature (1)..( 7): Result.001 file - promoters70/1377472
aaaacat

SEQ ID NO: 82445 - DNA, 7 bp, Unknown
  misc_feature (1)..( 7): Result.001 file - promoters70/1377472
aaatcaa

SEQ ID NO: 82446 - DNA, 8 bp, Unknown
  misc_feature (1)..( 8): Result.001 file - promoters70/1377472
aatctttt

SEQ ID NO: 82447 - DNA, 8 bp, Unknown
  misc_feature (1)..( 8): Result.001 file - promoters70/1377472
catcgttt

SEQ ID NO: 82448 - DNA, 8 bp, Unknown
  misc_feature (1)..( 8): Result.001 file - promoters70/1377472
catcgtcg

SEQ ID NO: 82449 - DNA, 8 bp, Unknown
  misc_feature (1)..( 8): Result.001 file - promoters70/1377472
tattattt

SEQ ID NO: 82450 - DNA, 8 bp, Unknown
  misc_feature (1)..( 8): Result.001 file - promoters70/1377472
gattcttt

SEQ ID NO: 82451 - DNA, 8 bp, Unknown
  misc_feature (1)..( 8): Result.001 file - promoters70/1377564
gattctct

SEQ ID NO: 82452 - DNA, 7 bp, Unknown
  misc_feature (1)..( 7): Result.001 file - promoters70/1377564
attttac

SEQ ID NO: 82453 - DNA, 7 bp, Unknown
  misc_feature (1)..( 7): Result.001 file - promoters70/1377564
tttttac

SEQ ID NO: 82454 - DNA, 7 bp, Unknown
  misc_feature (1)..( 7): Result.001 file - promoters70/1377564
attttaa

SEQ ID NO: 82455 - DNA, 7 bp, Unknown
  misc_feature (1)..( 7): Result.001 file - promoters70/1377564
caaaatt

SEQ ID NO: 82456 - DNA, 7 bp, Unknown
  misc_feature (1)..( 7): Result.001 file - promoters70/1377564
caaaatc

SEQ ID NO: 82457 - DNA, 7 bp, Unknown
  misc_feature (1)..( 7): Result.001 file - promoters70/1377642
taaaatc

SEQ ID NO: 82458 - DNA, 10 bp, Unknown
  misc_feature (1)..( 10): Result.001 file - promoters70/1377642
taaaaatgaa

SEQ ID NO: 82459 - DNA, 10 bp, Unknown
  misc_feature (1)..( 10): Result.001 file - promoters70/1377642
taaaaagtct

SEQ ID NO: 82460 - DNA, 10 bp, Unknown
  misc_feature (1)..( 10): Result.001 file - promoters70/1377642
aaaaaaagaa

SEQ ID NO: 82461 - DNA, 10 bp, Unknown
  misc_feature (1)..( 10): Result.001 file - promoters70/1377642
gaaaaagggt

SEQ ID NO: 82462 - DNA, 12 bp, Unknown
  misc_feature (1)..( 12): Result.001 file - promoters70/1377642
atataataaata

SEQ ID NO: 82463 - DNA, 12 bp, Unknown
  misc_feature (1)..( 12): Result.001 file - promoters70/1377642
gcataaaaaata

SEQ ID NO: 82464 - DNA, 12 bp, Unknown
  misc_feature (1)..( 12): Result.001 file - promoters70/1377642
ttattatacttc

SEQ ID NO: 82465 - DNA, 12 bp, Unknown
  misc_feature (1)..( 12): Result.001 file - promoters70/1377642
atataattatct

SEQ ID NO: 82466 - DNA, 12 bp, Unknown
  misc_feature (1)..( 12): Result.001 file - promoters70/1377642
ctaaaatataat

SEQ ID NO: 82467 - DNA, 10 bp, Unknown
  misc_feature (1)..( 10): Result.001 file - promoters70/1377642
gtatatatat

SEQ ID NO: 82468 - DNA, 10 bp, Unknown
  misc_feature (1)..( 10): Result.001 file - promoters70/1377642
aaataaatag

SEQ ID NO: 82469 - DNA, 10 bp, Unknown
  misc_feature (1)..( 10): Result.001 file - promoters70/1377642
aaatatataa

SEQ ID NO: 82470 - DNA, 10 bp, Unknown
  misc_feature (1)..( 10): Result.001 file - promoters70/1377642
taaaatataa

SEQ ID NO: 82471 - DNA, 12 bp, Unknown
  misc_feature (1)..( 12): Result.001 file - promoters70/1377642
tagaaattaata

SEQ ID NO: 82472 - DNA, 12 bp, Unknown
  misc_feature (1)..( 12): Result.001 file - promoters70/1377642
agataattaagt

SEQ ID NO: 82473 - DNA, 11 bp, Unknown
  misc_feature (1)..( 11): Result.001 file - promoters70/1377642
taaaatcaata

SEQ ID NO: 82474 - DNA, 11 bp, Unknown
  misc_feature (1)..( 11): Result.001 file - promoters70/1377642
tttaattatta

SEQ ID NO: 82475 - DNA, 12 bp, Unknown
  misc_feature (1)..( 12): Result.001 file - promoters70/1377642
ataacatcactt

SEQ ID NO: 82476 - DNA, 12 bp, Unknown
  misc_feature (1)..( 12): Result.001 file - promoters70/1377642
ttttatcacaag

SEQ ID NO: 82477 - DNA, 12 bp, Unknown
  misc_feature (1)..( 12): Result.001 file - promoters70/1377642
ttttgtcaacga

SEQ ID NO: 82478 - DNA, 12 bp, Unknown
  misc_feature (1)..( 12): Result.001 file - promoters70/1377642
cggtgtaaacga

SEQ ID NO: 82479 - DNA, 12 bp, Unknown
  misc_feature (1)..( 12): Result.001 file - promoters70/1377642
ttttgtatctaa

SEQ ID NO: 82480 - DNA, 8 bp, Unknown
  misc_feature (1)..( 8): Result.001 file - promoters70/1377642
atatatat

SEQ ID NO: 82481 - DNA, 8 bp, Unknown
  misc_feature (1)..( 8): Result.001 file - promoters70/1377642
atatttat

SEQ ID NO: 82482 - DNA, 8 bp, Unknown
  misc_feature (1)..( 8): Result.001 file - promoters70/1377642
caatttat

SEQ ID NO: 82483 - DNA, 8 bp, Unknown
  misc_feature (1)..( 8): Result.001 file - promoters70/1377642
taatttat

SEQ ID NO: 82484 - DNA, 8 bp, Unknown
  misc_feature (1)..( 8): Result.001 file - promoters70/1377642
aatcaaaa

SEQ ID NO: 82485 - DNA, 8 bp, Unknown
  misc_feature (1)..( 8): Result.001 file - promoters70/1377642
aatcaaat

SEQ ID NO: 82486 - DNA, 9 bp, Unknown
  misc_feature (1)..( 9): Result.001 file - promoters70/1377642
gatccaaac

SEQ ID NO: 82487 - DNA, 9 bp, Unknown
  misc_feature (1)..( 9): Result.001 file - promoters70/1377642
tatcctaac

SEQ ID NO: 82488 - DNA, 11 bp, Unknown
  misc_feature (1)..( 11): Result.001 file - promoters70/1377642
ctagacacgta

SEQ ID NO: 82489 - DNA, 11 bp, Unknown
  misc_feature (1)..( 11): Result.001 file - promoters70/1377642
atcaacacgta

SEQ ID NO: 82490 - DNA, 11 bp, Unknown
  misc_feature (1)..( 11): Result.001 file - promoters70/1377642
aaagagacgaa

SEQ ID NO: 82491 - DNA, 11 bp, Unknown
  misc_feature (1)..( 11): Result.001 file - promoters70/1377642
aaaaagaatac

SEQ ID NO: 82492 - DNA, 8 bp, Unknown
  misc_feature (1)..( 8): Result.001 file - promoters70/1377642
ttataatg

SEQ ID NO: 82493 - DNA, 8 bp, Unknown
  misc_feature (1)..( 8): Result.001 file - promoters70/1377642
atataata

SEQ ID NO: 82494 - DNA, 8 bp, Unknown
  misc_feature (1)..( 8): Result.001 file - promoters70/1377642
ttattata

SEQ ID NO: 82495 - DNA, 8 bp, Unknown
  misc_feature (1)..( 8): Result.001 file - promoters70/1377680
ataaaatc

SEQ ID NO: 82496 - DNA, 11 bp, Unknown
  misc_feature (1)..( 11): Result.001 file - promoters70/1377680
tgtttgaccat

SEQ ID NO: 82497 - DNA, 11 bp, Unknown
  misc_feature (1)..( 11): Result.001 file - promoters70/1377680
tatttgaacat

SEQ ID NO: 82498 - DNA, 11 bp, Unknown
  misc_feature (1)..( 11): Result.001 file - promoters70/1377680
tgtgtgagttc

SEQ ID NO: 82499 - DNA, 8 bp, Unknown
  misc_feature (1)..( 8): Result.001 file - promoters70/1377680
taacgaac

SEQ ID NO: 82500 - DNA, 8 bp, Unknown
  misc_feature (1)..( 8): Result.001 file - promoters70/1377680
caacgaaa

SEQ ID NO: 82501 - DNA, 8 bp, Unknown
  misc_feature (1)..( 8): Result.001 file - promoters70/1377680
caactaaa

SEQ ID NO: 82502 - DNA, 10 bp, Unknown
  misc_feature (1)..( 10): Result.001 file - promoters70/1377680
aaatcatttt

SEQ ID NO: 82503 - DNA, 10 bp, Unknown
  misc_feature (1)..( 10): Result.001 file - promoters70/1377680
aaataatttt

SEQ ID NO: 82504 - DNA, 10 bp, Unknown
  misc_feature (1)..( 10): Result.001 file - promoters70/1377680
caatcatatt

SEQ ID NO: 82505 - DNA, 10 bp, Unknown
  misc_feature (1)..( 10): Result.001 file - promoters70/1377680
ctatcataat

SEQ ID NO: 82506 - DNA, 9 bp, Unknown
  misc_feature (1)..( 9): Result.001 file - promoters70/1377680
ataggaaat

SEQ ID NO: 82507 - DNA, 9 bp, Unknown
  misc_feature (1)..( 9): Result.001 file - promoters70/1377680
ataagaaaa

SEQ ID NO: 82508 - DNA, 9 bp, Unknown
  misc_feature (1)..( 9): Result.001 file - promoters70/1377680
ataataaaa

SEQ ID NO: 82509 - DNA, 9 bp, Unknown
  misc_feature (1)..( 9): Result.001 file - promoters70/1377680
tcaaccata

SEQ ID NO: 82510 - DNA, 9 bp, Unknown
  misc_feature (1)..( 9): Result.001 file - promoters70/1377680
tcaatcata

SEQ ID NO: 82511 - DNA, 9 bp, Unknown
  misc_feature (1)..( 9): Result.001 file - promoters70/1377680
actatcata

SEQ ID NO: 82512 - DNA, 9 bp, Unknown
  misc_feature (1)..( 9): Result.001 file - promoters70/1377680
taatttatt

SEQ ID NO: 82513 - DNA, 9 bp, Unknown
  misc_feature (1)..( 9): Result.001 file - promoters70/1377680
taatttcat

SEQ ID NO: 82514 - DNA, 9 bp, Unknown
  misc_feature (1)..( 9): Result.001 file - promoters70/1377680
aaatttcat

SEQ ID NO: 82515 - DNA, 9 bp, Unknown
  misc_feature (1)..( 9): Result.001 file - promoters70/1377680
taattttca

SEQ ID NO: 82516 - DNA, 9 bp, Unknown
  misc_feature (1)..( 9): Result.001 file - promoters70/1377680
ataatatgt

SEQ ID NO: 82517 - DNA, 9 bp, Unknown
  misc_feature (1)..( 9): Result.001 file - promoters70/1377680
ataataaaa

SEQ ID NO: 82518 - DNA, 9 bp, Unknown
  misc_feature (1)..( 9): Result.001 file - promoters70/1377680
ataagaaaa

SEQ ID NO: 82519 - DNA, 8 bp, Unknown
  misc_feature (1)..( 8): Result.001 file - promoters70/1377680
gaatttct

SEQ ID NO: 82520 - DNA, 8 bp, Unknown
  misc_feature (1)..( 8): Result.001 file - promoters70/1377680
aaatatct

SEQ ID NO: 82521 - DNA, 8 bp, Unknown
  misc_feature (1)..( 8): Result.001 file - promoters70/1377680
aaatatcc

SEQ ID NO: 82522 - DNA, 7 bp, Unknown
  misc_feature (1)..( 7): Result.001 file - promoters70/1377680
tatcata

SEQ ID NO: 82523 - DNA, 7 bp, Unknown
  misc_feature (1)..( 7): Result.001 file - promoters70/1377680
tattata

SEQ ID NO: 82524 - DNA, 7 bp, Unknown
  misc_feature (1)..( 7): Result.001 file - promoters70/1377680
aatcata

SEQ ID NO: 82525 - DNA, 8 bp, Unknown
  misc_feature (1)..( 8): Result.001 file - promoters70/1377680
taataaag

SEQ ID NO: 82526 - DNA, 8 bp, Unknown
  misc_feature (1)..( 8): Result.001 file - promoters70/1377680
taatcaag

SEQ ID NO: 82527 - DNA, 8 bp, Unknown
  misc_feature (1)..( 8): Result.001 file - promoters70/1377680
taacaaaa

SEQ ID NO: 82528 - DNA, 12 bp, Unknown
  misc_feature (1)..( 12): Result.001 file - promoters70/1377680
ataaattaatgc

SEQ ID NO: 82529 - DNA, 12 bp, Unknown
  misc_feature (1)..( 12): Result.001 file - promoters70/1377680
atatattaatgt

SEQ ID NO: 82530 - DNA, 12 bp, Unknown
  misc_feature (1)..( 12): Result.001 file - promoters70/1377718
tttggttattgt

SEQ ID NO: 82531 - DNA, 10 bp, Unknown
  misc_feature (1)..( 10): Result.001 file - promoters70/1377718
taaatttgct

SEQ ID NO: 82532 - DNA, 10 bp, Unknown
  misc_feature (1)..( 10): Result.001 file - promoters70/1377718
taaatttaaa

SEQ ID NO: 82533 - DNA, 10 bp, Unknown
  misc_feature (1)..( 10): Result.001 file - promoters70/1377847
tgaatctgct

SEQ ID NO: 82534 - DNA, 6 bp, Unknown
  misc_feature (1)..( 6): Result.001 file - promoters70/1377847
accaaa

SEQ ID NO: 82535 - DNA, 6 bp, Unknown
  misc_feature (1)..( 6): Result.001 file - promoters70/1377847
accaaa

SEQ ID NO: 82536 - DNA, 6 bp, Unknown
  misc_feature (1)..( 6): Result.001 file - promoters70/1377847
accaaa

SEQ ID NO: 82537 - DNA, 9 bp, Unknown
  misc_feature (1)..( 9): Result.001 file - promoters70/1377847
tgtttgttt

SEQ ID NO: 82538 - DNA, 9 bp, Unknown
  misc_feature (1)..( 9): Result.001 file - promoters70/1377847
tgttttttt

SEQ ID NO: 82539 - DNA, 9 bp, Unknown
  misc_feature (1)..( 9): Result.001 file - promoters70/1377847
tgtttcaca

SEQ ID NO: 82540 - DNA, 8 bp, Unknown
  misc_feature (1)..( 8): Result.001 file - promoters70/1377847
aatcaaga

SEQ ID NO: 82541 - DNA, 8 bp, Unknown
  misc_feature (1)..( 8): Result.001 file - promoters70/1377847
aatcaatg

SEQ ID NO: 82542 - DNA, 8 bp, Unknown
  misc_feature (1)..( 8): Result.001 file - promoters70/1377847
aataaaga

SEQ ID NO: 82543 - DNA, 9 bp, Unknown
  misc_feature (1)..( 9): Result.001 file - promoters70/1377847
tttccatct

SEQ ID NO: 82544 - DNA, 9 bp, Unknown
  misc_feature (1)..( 9): Result.001 file - promoters70/1377847
gttccttct

SEQ ID NO: 82545 - DNA, 9 bp, Unknown
  misc_feature (1)..( 9): Result.001 file - promoters70/1377847
gttcctttg

SEQ ID NO: 82546 - DNA, 13 bp, Unknown
  misc_feature (1)..( 13): Result.001 file - promoters70/1377847
ctagtttcctctt

SEQ ID NO: 82547 - DNA, 13 bp, Unknown
  misc_feature (1)..( 13): Result.001 file - promoters70/1377847
ctctttttctctt

SEQ ID NO: 82548 - DNA, 13 bp, Unknown
  misc_feature (1)..( 13): Result.001 file - promoters70/1377847
ccataattctctt

SEQ ID NO: 82549 - DNA, 13 bp, Unknown
  misc_feature (1)..( 13): Result.001 file - promoters70/1378049
ctctttttctaat

SEQ ID NO: 82550 - DNA, 15 bp, Unknown
  misc_feature (1)..( 15): Result.001 file - promoters70/1378049
aaatattaaccttga

SEQ ID NO: 82551 - DNA, 15 bp, Unknown
  misc_feature (1)..( 15): Result.001 file - promoters70/1378049
aaaaattaaatgcta

SEQ ID NO: 82552 - DNA, 15 bp, Unknown
  misc_feature (1)..( 15): Result.001 file - promoters70/1378049
caaaattgaccctga

SEQ ID NO: 82553 - DNA, 15 bp, Unknown
  misc_feature (1)..( 15): Result.001 file - promoters70/1378049
taaaatttcataacc

SEQ ID NO: 82554 - DNA, 7 bp, Unknown
  misc_feature (1)..( 7): Result.001 file - promoters70/1378049
aaacaaa

SEQ ID NO: 82555 - DNA, 7 bp, Unknown
  misc_feature (1)..( 7): Result.001 file - promoters70/1378049
aaataaa

SEQ ID NO: 82556 - DNA, 7 bp, Unknown
  misc_feature (1)..( 7): Result.001 file - promoters70/1378049
aaacaaa

SEQ ID NO: 82557 - DNA, 7 bp, Unknown
  misc_feature (1)..( 7): Result.001 file - promoters70/1378049
atacata

SEQ ID NO: 82558 - DNA, 11 bp, Unknown
  misc_feature (1)..( 11): Result.001 file - promoters70/1378049
tttgtttaaca

SEQ ID NO: 82559 - DNA, 11 bp, Unknown
  misc_feature (1)..( 11): Result.001 file - promoters70/1378049
tttatttcttt

SEQ ID NO: 82560 - DNA, 11 bp, Unknown
  misc_feature (1)..( 11): Result.001 file - promoters70/1378049
tctgtttcaca

SEQ ID NO: 82561 - DNA, 11 bp, Unknown
  misc_feature (1)..( 11): Result.001 file - promoters70/1378049
attaattcttt

SEQ ID NO: 82562 - DNA, 8 bp, Unknown
  misc_feature (1)..( 8): Result.001 file - promoters70/1378049
gaataaaa

SEQ ID NO: 82563 - DNA, 8 bp, Unknown
  misc_feature (1)..( 8): Result.001 file - promoters70/1378049
caattaaa

SEQ ID NO: 82564 - DNA, 8 bp, Unknown
  misc_feature (1)..( 8): Result.001 file - promoters70/1378049
caataaat

SEQ ID NO: 82565 - DNA, 8 bp, Unknown
  misc_feature (1)..( 8): Result.001 file - promoters70/1378088
caaaaaag

SEQ ID NO: 82566 - DNA, 11 bp, Unknown
  misc_feature (1)..( 11): Result.001 file - promoters70/1378088
aaatattttat

SEQ ID NO: 82567 - DNA, 11 bp, Unknown
  misc_feature (1)..( 11): Result.001 file - promoters70/1378088
acttattttat

SEQ ID NO: 82568 - DNA, 11 bp, Unknown
  misc_feature (1)..( 11): Result.001 file - promoters70/1378088
aattattttaa

SEQ ID NO: 82569 - DNA, 11 bp, Unknown
  misc_feature (1)..( 11): Result.001 file - promoters70/1378088
aactaatttag

SEQ ID NO: 82570 - DNA, 7 bp, Unknown
  misc_feature (1)..( 7): Result.001 file - promoters70/1378088
aagattt

SEQ ID NO: 82571 - DNA, 7 bp, Unknown
  misc_feature (1)..( 7): Result.001 file - promoters70/1378088
tagattt

SEQ ID NO: 82572 - DNA, 7 bp, Unknown
  misc_feature (1)..( 7): Result.001 file - promoters70/1378088
cagattt

SEQ ID NO: 82573 - DNA, 7 bp, Unknown
  misc_feature (1)..( 7): Result.001 file - promoters70/1378088
tagattt

SEQ ID NO: 82574 - DNA, 11 bp, Unknown
  misc_feature (1)..( 11): Result.001 file - promoters70/1378088
tctaaatttta

SEQ ID NO: 82575 - DNA, 11 bp, Unknown
  misc_feature (1)..( 11): Result.001 file - promoters70/1378088
aaattatttta

SEQ ID NO: 82576 - DNA, 11 bp, Unknown
  misc_feature (1)..( 11): Result.001 file - promoters70/1378088
aacttatttta

SEQ ID NO: 82577 - DNA, 11 bp, Unknown
  misc_feature (1)..( 11): Result.001 file - promoters70/1378088
aactaatttag

SEQ ID NO: 82578 - DNA, 13 bp, Unknown
  misc_feature (1)..( 13): Result.001 file - promoters70/1378088
aattggatccgaa

SEQ ID NO: 82579 - DNA, 13 bp, Unknown
  misc_feature (1)..( 13): Result.001 file - promoters70/1378088
aattagatttttt

SEQ ID NO: 82580 - DNA, 13 bp, Unknown
  misc_feature (1)..( 13): Result.001 file - promoters70/1378088
atctagatttgtg

SEQ ID NO: 82581 - DNA, 13 bp, Unknown
  misc_feature (1)..( 13): Result.001 file - promoters70/1378088
tattcgatctttt

SEQ ID NO: 82582 - DNA, 9 bp, Unknown
  misc_feature (1)..( 9): Result.001 file - promoters70/1378088
aaaatctgg

SEQ ID NO: 82583 - DNA, 9 bp, Unknown
  misc_feature (1)..( 9): Result.001 file - promoters70/1378088
aaaatcatt

SEQ ID NO: 82584 - DNA, 9 bp, Unknown
  misc_feature (1)..( 9): Result.001 file - promoters70/1378088
aaaaacatt

SEQ ID NO: 82585 - DNA, 9 bp, Unknown
  misc_feature (1)..( 9): Result.001 file - promoters70/1378088
taaaacaat

SEQ ID NO: 82586 - DNA, 9 bp, Unknown
  misc_feature (1)..( 9): Result.001 file - promoters70/1378088
taaaaatct

SEQ ID NO: 82587 - DNA, 9 bp, Unknown
  misc_feature (1)..( 9): Result.001 file - promoters70/1378088
taaaaatta

SEQ ID NO: 82588 - DNA, 9 bp, Unknown
  misc_feature (1)..( 9): Result.001 file - promoters70/1378088
acaaaatta

SEQ ID NO: 82589 - DNA, 9 bp, Unknown
  misc_feature (1)..( 9): Result.001 file - promoters70/1378088
actaaatta

SEQ ID NO: 82590 - DNA, 11 bp, Unknown
  misc_feature (1)..( 11): Result.001 file - promoters70/1378088
ttactttttta

SEQ ID NO: 82591 - DNA, 11 bp, Unknown
  misc_feature (1)..( 11): Result.001 file - promoters70/1378088
ccaatttgtta

SEQ ID NO: 82592 - DNA, 11 bp, Unknown
  misc_feature (1)..( 11): Result.001 file - promoters70/1378088
ttcgttttttt

SEQ ID NO: 82593 - DNA, 11 bp, Unknown
  misc_feature (1)..( 11): Result.001 file - promoters70/1378088
tacattttatc

SEQ ID NO: 82594 - DNA, 10 bp, Unknown
  misc_feature (1)..( 10): Result.001 file - promoters70/1378088
attttataat

SEQ ID NO: 82595 - DNA, 10 bp, Unknown
  misc_feature (1)..( 10): Result.001 file - promoters70/1378088
attttatagg

SEQ ID NO: 82596 - DNA, 10 bp, Unknown
  misc_feature (1)..( 10): Result.001 file - promoters70/1378088
tttttaattc

SEQ ID NO: 82597 - DNA, 10 bp, Unknown
  misc_feature (1)..( 10): Result.001 file - promoters70/1378088
actttaaaat

SEQ ID NO: 82598 - DNA, 13 bp, Unknown
  misc_feature (1)..( 13): Result.001 file - promoters70/1378088
ttagaagaagtta

SEQ ID NO: 82599 - DNA, 13 bp, Unknown
  misc_feature (1)..( 13): Result.001 file - promoters70/1378088
ttataagaagaaa

SEQ ID NO: 82600 - DNA, 13 bp, Unknown
  misc_feature (1)..( 13): Result.001 file - promoters70/1378088
taaaaagagaaaa

SEQ ID NO: 82601 - DNA, 13 bp, Unknown
  misc_feature (1)..( 13): Result.001 file - promoters70/1378088
ttataaaacaatt

SEQ ID NO: 82602 - DNA, 8 bp, Unknown
  misc_feature (1)..( 8): Result.001 file - promoters70/1378088
gttagaaa

SEQ ID NO: 82603 - DNA, 8 bp, Unknown
  misc_feature (1)..( 8): Result.001 file - promoters70/1378088
gttaaaaa

SEQ ID NO: 82604 - DNA, 8 bp, Unknown
  misc_feature (1)..( 8): Result.001 file - promoters70/1378088
cttataaa

SEQ ID NO: 82605 - DNA, 8 bp, Unknown
  misc_feature (1)..( 8): Result.001 file - promoters70/1378088
attataag

SEQ ID NO: 82606 - DNA, 13 bp, Unknown
  misc_feature (1)..( 13): Result.001 file - promoters70/1378088
taaaaattgggtt

SEQ ID NO: 82607 - DNA, 13 bp, Unknown
  misc_feature (1)..( 13): Result.001 file - promoters70/1378088
taaaaagagaaaa

SEQ ID NO: 82608 - DNA, 13 bp, Unknown
  misc_feature (1)..( 13): Result.001 file - promoters70/1378088
taataatccttat

SEQ ID NO: 82609 - DNA, 13 bp, Unknown
  misc_feature (1)..( 13): Result.001 file - promoters70/1378333
taagaagaaaaaa

SEQ ID NO: 82610 - DNA, 7 bp, Unknown
  misc_feature (1)..( 7): Result.001 file - promoters70/1378333
gctaaaa

SEQ ID NO: 82611 - DNA, 7 bp, Unknown
  misc_feature (1)..( 7): Result.001 file - promoters70/1378333
gctgaaa

SEQ ID NO: 82612 - DNA, 7 bp, Unknown
  misc_feature (1)..( 7): Result.001 file - promoters70/1378393
tctgaaa

SEQ ID NO: 82613 - DNA, 13 bp, Unknown
  misc_feature (1)..( 13): Result.001 file - promoters70/1378393
ggtttgtttatct

SEQ ID NO: 82614 - DNA, 13 bp, Unknown
  misc_feature (1)..( 13): Result.001 file - promoters70/1378393
ggtttgaaaaaat

SEQ ID NO: 82615 - DNA, 13 bp, Unknown
  misc_feature (1)..( 13): Result.001 file - promoters70/1378393
tgtttttttttct

SEQ ID NO: 82616 - DNA, 13 bp, Unknown
  misc_feature (1)..( 13): Result.001 file - promoters70/1380389
ggtgtatttgaca

SEQ ID NO: 82617 - DNA, 8 bp, Unknown
  misc_feature (1)..( 8): Result.001 file - promoters70/1380389
cttgcttt

SEQ ID NO: 82618 - DNA, 8 bp, Unknown
  misc_feature (1)..( 8): Result.001 file - promoters70/1380389
tttggttt

SEQ ID NO: 82619 - DNA, 9 bp, Unknown
  misc_feature (1)..( 9): Result.001 file - promoters70/1380519
tttaggtct

SEQ ID NO: 82620 - DNA, 8 bp, Unknown
  misc_feature (1)..( 8): Result.001 file - promoters70/1380519
gagcaaaa

SEQ ID NO: 82621 - DNA, 8 bp, Unknown
  misc_feature (1)..( 8): Result.001 file - promoters70/1380519
gagaaaaa

SEQ ID NO: 82622 - DNA, 8 bp, Unknown
  misc_feature (1)..( 8): Result.001 file - promoters70/1380708
gagcaatg

SEQ ID NO: 82623 - DNA, 11 bp, Unknown
  misc_feature (1)..( 11): Result.001 file - promoters70/1380708
taacatttttt

SEQ ID NO: 82624 - DNA, 11 bp, Unknown
  misc_feature (1)..( 11): Result.001 file - promoters70/1380708
taagatttttg

SEQ ID NO: 82625 - DNA, 11 bp, Unknown
  misc_feature (1)..( 11): Result.001 file - promoters70/1380708
tagaatttttt

SEQ ID NO: 82626 - DNA, 9 bp, Unknown
  misc_feature (1)..( 9): Result.001 file - promoters70/1380708
tttaatcag

SEQ ID NO: 82627 - DNA, 9 bp, Unknown
  misc_feature (1)..( 9): Result.001 file - promoters70/1380708
tttattcag

SEQ ID NO: 82628 - DNA, 9 bp, Unknown
  misc_feature (1)..( 9): Result.001 file - promoters70/1381002
gttattcga

SEQ ID NO: 82629 - DNA, 16 bp, Unknown
  misc_feature (1)..( 16): Result.001 file - promoters70/1381002
tcaaaaactttcataa

SEQ ID NO: 82630 - DNA, 16 bp, Unknown
  misc_feature (1)..( 16): Result.001 file - promoters70/1381002
tattaaattttaattg

SEQ ID NO: 82631 - DNA, 16 bp, Unknown
  misc_feature (1)..( 16): Result.001 file - promoters70/1381002
catgttactttcttaa

SEQ ID NO: 82632 - DNA, 16 bp, Unknown
  misc_feature (1)..( 16): Result.001 file - promoters70/1381002
tatcaaattgacttgt

SEQ ID NO: 82633 - DNA, 7 bp, Unknown
  misc_feature (1)..( 7): Result.001 file - promoters70/1381002
ttaaaat

SEQ ID NO: 82634 - DNA, 7 bp, Unknown
  misc_feature (1)..( 7): Result.001 file - promoters70/1381002
ttaaaaa

SEQ ID NO: 82635 - DNA, 7 bp, Unknown
  misc_feature (1)..( 7): Result.001 file - promoters70/1381002
gtaaaat

SEQ ID NO: 82636 - DNA, 7 bp, Unknown
  misc_feature (1)..( 7): Result.001 file - promoters70/1381002
tcaacta

SEQ ID NO: 82637 - DNA, 7 bp, Unknown
  misc_feature (1)..( 7): Result.001 file - promoters70/1381002
tcaccta

SEQ ID NO: 82638 - DNA, 7 bp, Unknown
  misc_feature (1)..( 7): Result.001 file - promoters70/1381002
acaccta

SEQ ID NO: 82639 - DNA, 8 bp, Unknown
  misc_feature (1)..( 8): Result.001 file - promoters70/1381002
tatcattt

SEQ ID NO: 82640 - DNA, 8 bp, Unknown
  misc_feature (1)..( 8): Result.001 file - promoters70/1381002
tataattt

SEQ ID NO: 82641 - DNA, 8 bp, Unknown
  misc_feature (1)..( 8): Result.001 file - promoters70/1381002
cataattg

SEQ ID NO: 82642 - DNA, 9 bp, Unknown
  misc_feature (1)..( 9): Result.001 file - promoters70/1381002
tctcaaata

SEQ ID NO: 82643 - DNA, 9 bp, Unknown
  misc_feature (1)..( 9): Result.001 file - promoters70/1381002
tatcaaatt

SEQ ID NO: 82644 - DNA, 9 bp, Unknown
  misc_feature (1)..( 9): Result.001 file - promoters70/1381002
tattaaatt

SEQ ID NO: 82645 - DNA, 8 bp, Unknown
  misc_feature (1)..( 8): Result.001 file - promoters70/1381002
aaaacaca

SEQ ID NO: 82646 - DNA, 8 bp, Unknown
  misc_feature (1)..( 8): Result.001 file - promoters70/1381002
caaacact

SEQ ID NO: 82647 - DNA, 8 bp, Unknown
  misc_feature (1)..( 8): Result.001 file - promoters70/1381457
caatcact

SEQ ID NO: 82648 - DNA, 8 bp, Unknown
  misc_feature (1)..( 8): Result.001 file - promoters70/1381457
ttttgacc

SEQ ID NO: 82649 - DNA, 8 bp, Unknown
  misc_feature (1)..( 8): Result.001 file - promoters70/1381457
ttttgatt

SEQ ID NO: 82650 - DNA, 8 bp, Unknown
  misc_feature (1)..( 8): Result.001 file - promoters70/1381563
gtttcatt

SEQ ID NO: 82651 - DNA, 10 bp, Unknown
  misc_feature (1)..( 10): Result.001 file - promoters70/1381563
cgtacacgtg

SEQ ID NO: 82652 - DNA, 10 bp, Unknown
  misc_feature (1)..( 10): Result.001 file - promoters70/1381563
ggtacacgtg

SEQ ID NO: 82653 - DNA, 10 bp, Unknown
  misc_feature (1)..( 10): Result.001 file - promoters70/1381704
ggttcacgtc

SEQ ID NO: 82654 - DNA, 9 bp, Unknown
  misc_feature (1)..( 9): Result.001 file - promoters70/1381704
gtttccttt

SEQ ID NO: 82655 - DNA, 9 bp, Unknown
  misc_feature (1)..( 9): Result.001 file - promoters70/1381704
gttaccttt

SEQ ID NO: 82656 - DNA, 9 bp, Unknown
  misc_feature (1)..( 9): Result.001 file - promoters70/1381818
gcttcgttt

SEQ ID NO: 82657 - DNA, 8 bp, Unknown
  misc_feature (1)..( 8): Result.001 file - promoters70/1381818
aaataaaa

SEQ ID NO: 82658 - DNA, 8 bp, Unknown
  misc_feature (1)..( 8): Result.001 file - promoters70/1381818
ttataaaa

SEQ ID NO: 82659 - DNA, 8 bp, Unknown
  misc_feature (1)..( 8): Result.001 file - promoters70/1381818
aaataaag

SEQ ID NO: 82660 - DNA, 8 bp, Unknown
  misc_feature (1)..( 8): Result.001 file - promoters70/1381818
ttagaaaa

SEQ ID NO: 82661 - DNA, 8 bp, Unknown
  misc_feature (1)..( 8): Result.001 file - promoters70/1381818
aatgaaaa

SEQ ID NO: 82662 - DNA, 8 bp, Unknown
  misc_feature (1)..( 8): Result.001 file - promoters70/1381818
aatgaaat

SEQ ID NO: 82663 - DNA, 9 bp, Unknown
  misc_feature (1)..( 9): Result.001 file - promoters70/1381818
tatgagaaa

SEQ ID NO: 82664 - DNA, 9 bp, Unknown
  misc_feature (1)..( 9): Result.001 file - promoters70/1381818
tataagaaa

SEQ ID NO: 82665 - DNA, 9 bp, Unknown
  misc_feature (1)..( 9): Result.001 file - promoters70/1381818
aaaaacaaa

SEQ ID NO: 82666 - DNA, 9 bp, Unknown
  misc_feature (1)..( 9): Result.001 file - promoters70/1381818
ttaaaaaaa

SEQ ID NO: 82667 - DNA, 9 bp, Unknown
  misc_feature (1)..( 9): Result.001 file - promoters70/1381818
caaaacatc

SEQ ID NO: 82668 - DNA, 9 bp, Unknown
  misc_feature (1)..( 9): Result.001 file - promoters70/1381818
taagaaaat

SEQ ID NO: 82669 - DNA, 9 bp, Unknown
  misc_feature (1)..( 9): Result.001 file - promoters70/1381818
gaaatcata

SEQ ID NO: 82670 - DNA, 11 bp, Unknown
  misc_feature (1)..( 11): Result.001 file - promoters70/1381818
atgaaaaacaa

SEQ ID NO: 82671 - DNA, 11 bp, Unknown
  misc_feature (1)..( 11): Result.001 file - promoters70/1381818
aagaaaaaata

SEQ ID NO: 82672 - DNA, 11 bp, Unknown
  misc_feature (1)..( 11): Result.001 file - promoters70/1381818
atgagaaatca

SEQ ID NO: 82673 - DNA, 11 bp, Unknown
  misc_feature (1)..( 11): Result.001 file - promoters70/1381818
aagaaaatata

SEQ ID NO: 82674 - DNA, 11 bp, Unknown
  misc_feature (1)..( 11): Result.001 file - promoters70/1381818
atattattagt

SEQ ID NO: 82675 - DNA, 11 bp, Unknown
  misc_feature (1)..( 11): Result.001 file - promoters70/1381818
atataattatt

SEQ ID NO: 82676 - DNA, 11 bp, Unknown
  misc_feature (1)..( 11): Result.001 file - promoters70/1381818
taatgattttg

SEQ ID NO: 82677 - DNA, 11 bp, Unknown
  misc_feature (1)..( 11): Result.001 file - promoters70/1381818
caatgataata

SEQ ID NO: 82678 - DNA, 11 bp, Unknown
  misc_feature (1)..( 11): Result.001 file - promoters70/1381818
ccttgagttta

SEQ ID NO: 82679 - DNA, 11 bp, Unknown
  misc_feature (1)..( 11): Result.001 file - promoters70/1381818
tgttgaatttt

SEQ ID NO: 82680 - DNA, 11 bp, Unknown
  misc_feature (1)..( 11): Result.001 file - promoters70/1381818
attctaatttt

SEQ ID NO: 82681 - DNA, 11 bp, Unknown
  misc_feature (1)..( 11): Result.001 file - promoters70/1381818
agttaactttg

SEQ ID NO: 82682 - DNA, 11 bp, Unknown
  misc_feature (1)..( 11): Result.001 file - promoters70/1381818
agttaactata

SEQ ID NO: 82683 - DNA, 11 bp, Unknown
  misc_feature (1)..( 11): Result.001 file - promoters70/1381818
tattaaccttg

SEQ ID NO: 82684 - DNA, 11 bp, Unknown
  misc_feature (1)..( 11): Result.001 file - promoters70/1381818
agttaactttg

SEQ ID NO: 82685 - DNA, 11 bp, Unknown
  misc_feature (1)..( 11): Result.001 file - promoters70/1381818
ttctaattttc

SEQ ID NO: 82686 - DNA, 11 bp, Unknown
  misc_feature (1)..( 11): Result.001 file - promoters70/1381818
agttaactata

SEQ ID NO: 82687 - DNA, 11 bp, Unknown
  misc_feature (1)..( 11): Result.001 file - promoters70/1381926
aattaacttat

SEQ ID NO: 82688 - DNA, 10 bp, Unknown
  misc_feature (1)..( 10): Result.001 file - promoters70/1381926
gaaaaagata

SEQ ID NO: 82689 - DNA, 10 bp, Unknown
  misc_feature (1)..( 10): Result.001 file - promoters70/1381926
gaaatagatt

SEQ ID NO: 82690 - DNA, 10 bp, Unknown
  misc_feature (1)..( 10): Result.001 file - promoters70/1382713
tatataaatt

SEQ ID NO: 82691 - DNA, 7 bp, Unknown
  misc_feature (1)..( 7): Result.001 file - promoters70/1382713
attgtgt

SEQ ID NO: 82692 - DNA, 7 bp, Unknown
  misc_feature (1)..( 7): Result.001 file - promoters70/1382713
attctgt

SEQ ID NO: 82693 - DNA, 7 bp, Unknown
  misc_feature (1)..( 7): Result.001 file - promoters70/1382713
tttgtgt

SEQ ID NO: 82694 - DNA, 8 bp, Unknown
  misc_feature (1)..( 8): Result.001 file - promoters70/1382713
atttttca

SEQ ID NO: 82695 - DNA, 8 bp, Unknown
  misc_feature (1)..( 8): Result.001 file - promoters70/1382713
attattct

SEQ ID NO: 82696 - DNA, 8 bp, Unknown
  misc_feature (1)..( 8): Result.001 file - promoters70/1383341
cttattct

SEQ ID NO: 82697 - DNA, 13 bp, Unknown
  misc_feature (1)..( 13): Result.001 file - promoters70/1383341
ccccctatgtagt

SEQ ID NO: 82698 - DNA, 13 bp, Unknown
  misc_feature (1)..( 13): Result.001 file - promoters70/1383341
ttttctatataga

SEQ ID NO: 82699 - DNA, 13 bp, Unknown
  misc_feature (1)..( 13): Result.001 file - promoters70/1383341
cttcttttgtagt

SEQ ID NO: 82700 - DNA, 13 bp, Unknown
  misc_feature (1)..( 13): Result.001 file - promoters70/1383341
ctttttttttagt

SEQ ID NO: 82701 - DNA, 13 bp, Unknown
  misc_feature (1)..( 13): Result.001 file - promoters70/1383341
aatactatataaa

SEQ ID NO: 82702 - DNA, 15 bp, Unknown
  misc_feature (1)..( 15): Result.001 file - promoters70/1383341
accttcctaaaaagt

SEQ ID NO: 82703 - DNA, 15 bp, Unknown
  misc_feature (1)..( 15): Result.001 file - promoters70/1383341
aattaaataaaaaaa

SEQ ID NO: 82704 - DNA, 15 bp, Unknown
  misc_feature (1)..( 15): Result.001 file - promoters70/1383341
aaagaaataaatctt

SEQ ID NO: 82705 - DNA, 15 bp, Unknown
  misc_feature (1)..( 15): Result.001 file - promoters70/1383341
aaagaatcaaagaat

SEQ ID NO: 82706 - DNA, 15 bp, Unknown
  misc_feature (1)..( 15): Result.001 file - promoters70/1383485
aattaacgaaacaaa

SEQ ID NO: 82707 - DNA, 11 bp, Unknown
  misc_feature (1)..( 11): Result.001 file - promoters70/1383485
ccagaattaag

SEQ ID NO: 82708 - DNA, 11 bp, Unknown
  misc_feature (1)..( 11): Result.001 file - promoters70/1383485
ccataattagt

SEQ ID NO: 82709 - DNA, 11 bp, Unknown
  misc_feature (1)..( 11): Result.001 file - promoters70/1383552
atgtaattaag

SEQ ID NO: 82710 - DNA, 11 bp, Unknown
  misc_feature (1)..( 11): Result.001 file - promoters70/1383552
ttaaaaataaa

SEQ ID NO: 82711 - DNA, 11 bp, Unknown
  misc_feature (1)..( 11): Result.001 file - promoters70/1383552
gtaaaaattat

SEQ ID NO: 82712 - DNA, 11 bp, Unknown
  misc_feature (1)..( 11): Result.001 file - promoters70/1383552
gcaaaagtaaa

SEQ ID NO: 82713 - DNA, 11 bp, Unknown
  misc_feature (1)..( 11): Result.001 file - promoters70/1383552
ttaaaaacttc

SEQ ID NO: 82714 - DNA, 11 bp, Unknown
  misc_feature (1)..( 11): Result.001 file - promoters70/1383552
tttaaattaat

SEQ ID NO: 82715 - DNA, 11 bp, Unknown
  misc_feature (1)..( 11): Result.001 file - promoters70/1383552
cataaattttt

SEQ ID NO: 82716 - DNA, 9 bp, Unknown
  misc_feature (1)..( 9): Result.001 file - promoters70/1383552
aaaggtcat

SEQ ID NO: 82717 - DNA, 9 bp, Unknown
  misc_feature (1)..( 9): Result.001 file - promoters70/1383552
aaatgtctt

SEQ ID NO: 82718 - DNA, 9 bp, Unknown
  misc_feature (1)..( 9): Result.001 file - promoters70/1383552
taatgtctc

SEQ ID NO: 82719 - DNA, 9 bp, Unknown
  misc_feature (1)..( 9): Result.001 file - promoters70/1383552
taatgttaa

SEQ ID NO: 82720 - DNA, 9 bp, Unknown
  misc_feature (1)..( 9): Result.001 file - promoters70/1383552
ttatgtctt

SEQ ID NO: 82721 - DNA, 9 bp, Unknown
  misc_feature (1)..( 9): Result.001 file - promoters70/1383552
atttgtctt

SEQ ID NO: 82722 - DNA, 14 bp, Unknown
  misc_feature (1)..( 14): Result.001 file - promoters70/1383552
ttaaatttacgctc

SEQ ID NO: 82723 - DNA, 14 bp, Unknown
  misc_feature (1)..( 14): Result.001 file - promoters70/1383552
aaaaatttttctgt

SEQ ID NO: 82724 - DNA, 14 bp, Unknown
  misc_feature (1)..( 14): Result.001 file - promoters70/1383552
atcaatttataata

SEQ ID NO: 82725 - DNA, 14 bp, Unknown
  misc_feature (1)..( 14): Result.001 file - promoters70/1383552
aaaaattgtaatcc

SEQ ID NO: 82726 - DNA, 14 bp, Unknown
  misc_feature (1)..( 14): Result.001 file - promoters70/1383552
aaaaataaaagttc

SEQ ID NO: 82727 - DNA, 14 bp, Unknown
  misc_feature (1)..( 14): Result.001 file - promoters70/1384016
tctcattaataata

SEQ ID NO: 82728 - DNA, 18 bp, Unknown
  misc_feature (1)..( 18): Result.001 file - promoters70/1384016
cataacactttttgttta

SEQ ID NO: 82729 - DNA, 18 bp, Unknown
  misc_feature (1)..( 18): Result.001 file - promoters70/1384016
gaaatatttttttgtact

SEQ ID NO: 82730 - DNA, 18 bp, Unknown
  misc_feature (1)..( 18): Result.001 file - promoters70/1384016
aaataatatttttgaaaa

SEQ ID NO: 82731 - DNA, 18 bp, Unknown
  misc_feature (1)..( 18): Result.001 file - promoters70/1384016
aaaaaatattttcgaatt

SEQ ID NO: 82732 - DNA, 18 bp, Unknown
  misc_feature (1)..( 18): Result.001 file - promoters70/1384016
acattctatatttgatac

SEQ ID NO: 82733 - DNA, 18 bp, Unknown
  misc_feature (1)..( 18): Result.001 file - promoters70/1384016
cgacagcgttttttaaaa

SEQ ID NO: 82734 - DNA, 9 bp, Unknown
  misc_feature (1)..( 9): Result.001 file - promoters70/1384016
ttactaaaa

SEQ ID NO: 82735 - DNA, 9 bp, Unknown
  misc_feature (1)..( 9): Result.001 file - promoters70/1384016
ttacaaaaa

SEQ ID NO: 82736 - DNA, 9 bp, Unknown
  misc_feature (1)..( 9): Result.001 file - promoters70/1384016
ttactaagg

SEQ ID NO: 82737 - DNA, 9 bp, Unknown
  misc_feature (1)..( 9): Result.001 file - promoters70/1384016
gaactaaac

SEQ ID NO: 82738 - DNA, 9 bp, Unknown
  misc_feature (1)..( 9): Result.001 file - promoters70/1384016
ctacaaata

SEQ ID NO: 82739 - DNA, 9 bp, Unknown
  misc_feature (1)..( 9): Result.001 file - promoters70/1385376
ttataaagt

SEQ ID NO: 82740 - DNA, 9 bp, Unknown
  misc_feature (1)..( 9): Result.001 file - promoters70/1385376
taaaaaatt

SEQ ID NO: 82741 - DNA, 9 bp, Unknown
  misc_feature (1)..( 9): Result.001 file - promoters70/1385376
taaaagatt

SEQ ID NO: 82742 - DNA, 9 bp, Unknown
  misc_feature (1)..( 9): Result.001 file - promoters70/1385376
gataagatt

SEQ ID NO: 82743 - DNA, 7 bp, Unknown
  misc_feature (1)..( 7): Result.001 file - promoters70/1385376
ttggttt

SEQ ID NO: 82744 - DNA, 7 bp, Unknown
  misc_feature (1)..( 7): Result.001 file - promoters70/1385376
ttgattt

SEQ ID NO: 82745 - DNA, 7 bp, Unknown
  misc_feature (1)..( 7): Result.001 file - promoters70/1385376
ttggttg

SEQ ID NO: 82746 - DNA, 9 bp, Unknown
  misc_feature (1)..( 9): Result.001 file - promoters70/1385376
tttgatttt

SEQ ID NO: 82747 - DNA, 9 bp, Unknown
  misc_feature (1)..( 9): Result.001 file - promoters70/1385376
tttggtttt

SEQ ID NO: 82748 - DNA, 9 bp, Unknown
  misc_feature (1)..( 9): Result.001 file - promoters70/1387072
cttggttgg

SEQ ID NO: 82749 - DNA, 9 bp, Unknown
  misc_feature (1)..( 9): Result.001 file - promoters70/1387072
aaacaaaaa

SEQ ID NO: 82750 - DNA, 9 bp, Unknown
  misc_feature (1)..( 9): Result.001 file - promoters70/1387072
aaagaaaca

SEQ ID NO: 82751 - DNA, 9 bp, Unknown
  misc_feature (1)..( 9): Result.001 file - promoters70/1387123
aaagaaaaa

SEQ ID NO: 82752 - DNA, 11 bp, Unknown
  misc_feature (1)..( 11): Result.001 file - promoters70/1387123
tgtttgaccat

SEQ ID NO: 82753 - DNA, 11 bp, Unknown
  misc_feature (1)..( 11): Result.001 file - promoters70/1387123
tatttgaacat

SEQ ID NO: 82754 - DNA, 11 bp, Unknown
  misc_feature (1)..( 11): Result.001 file - promoters70/1387123
tgtgtgagttc

SEQ ID NO: 82755 - DNA, 8 bp, Unknown
  misc_feature (1)..( 8): Result.001 file - promoters70/1387123
taacgaac

SEQ ID NO: 82756 - DNA, 8 bp, Unknown
  misc_feature (1)..( 8): Result.001 file - promoters70/1387123
caacgaaa

SEQ ID NO: 82757 - DNA, 8 bp, Unknown
  misc_feature (1)..( 8): Result.001 file - promoters70/1387349
caactaaa

SEQ ID NO: 82758 - DNA, 13 bp, Unknown
  misc_feature (1)..( 13): Result.001 file - promoters70/1387349
atttccatcgaat

SEQ ID NO: 82759 - DNA, 13 bp, Unknown
  misc_feature (1)..( 13): Result.001 file - promoters70/1387349
aaacaaatcaaat

SEQ ID NO: 82760 - DNA, 13 bp, Unknown
  misc_feature (1)..( 13): Result.001 file - promoters70/1387349
aaagaaaccaatt

SEQ ID NO: 82761 - DNA, 13 bp, Unknown
  misc_feature (1)..( 13): Result.001 file - promoters70/1387349
tatcaaaccaatg

SEQ ID NO: 82762 - DNA, 13 bp, Unknown
  misc_feature (1)..( 13): Result.001 file - promoters70/1387349
tcagaaacagtaa

SEQ ID NO: 82763 - DNA, 13 bp, Unknown
  misc_feature (1)..( 13): Result.001 file - promoters70/1387349
tcacaaagactaa

SEQ ID NO: 82764 - DNA, 10 bp, Unknown
  misc_feature (1)..( 10): Result.001 file - promoters70/1387349
ccacaaaaca

SEQ ID NO: 82765 - DNA, 10 bp, Unknown
  misc_feature (1)..( 10): Result.001 file - promoters70/1387349
acacaaagta

SEQ ID NO: 82766 - DNA, 10 bp, Unknown
  misc_feature (1)..( 10): Result.001 file - promoters70/1387349
tcacaaagac

SEQ ID NO: 82767 - DNA, 10 bp, Unknown
  misc_feature (1)..( 10): Result.001 file - promoters70/1387349
aaacaaaaac

SEQ ID NO: 82768 - DNA, 10 bp, Unknown
  misc_feature (1)..( 10): Result.001 file - promoters70/1387349
ctaaaaactc

SEQ ID NO: 82769 - DNA, 10 bp, Unknown
  misc_feature (1)..( 10): Result.001 file - promoters70/1387349
ctagaaaccg

SEQ ID NO: 82770 - DNA, 9 bp, Unknown
  misc_feature (1)..( 9): Result.001 file - promoters70/1387349
tcatagata

SEQ ID NO: 82771 - DNA, 9 bp, Unknown
  misc_feature (1)..( 9): Result.001 file - promoters70/1387349
tcaaagaat

SEQ ID NO: 82772 - DNA, 9 bp, Unknown
  misc_feature (1)..( 9): Result.001 file - promoters70/1387349
acaaagact

SEQ ID NO: 82773 - DNA, 9 bp, Unknown
  misc_feature (1)..( 9): Result.001 file - promoters70/1387349
tcaaaggtc

SEQ ID NO: 82774 - DNA, 9 bp, Unknown
  misc_feature (1)..( 9): Result.001 file - promoters70/1387349
taaaataat

SEQ ID NO: 82775 - DNA, 9 bp, Unknown
  misc_feature (1)..( 9): Result.001 file - promoters70/1387349
gcaatggtt

SEQ ID NO: 82776 - DNA, 12 bp, Unknown
  misc_feature (1)..( 12): Result.001 file - promoters70/1387349
tatgtaatgaat

SEQ ID NO: 82777 - DNA, 12 bp, Unknown
  misc_feature (1)..( 12): Result.001 file - promoters70/1387349
aatgtactgaaa

SEQ ID NO: 82778 - DNA, 13 bp, Unknown
  misc_feature (1)..( 13): Result.001 file - promoters70/1387349
gaagaaactgaaa

SEQ ID NO: 82779 - DNA, 12 bp, Unknown
  misc_feature (1)..( 12): Result.001 file - promoters70/1387349
aatgtacttatc

SEQ ID NO: 82780 - DNA, 12 bp, Unknown
  misc_feature (1)..( 12): Result.001 file - promoters70/1387349
attaaattgaac

SEQ ID NO: 82781 - DNA, 13 bp, Unknown
  misc_feature (1)..( 13): Result.001 file - promoters70/1387356
tcagaatctgatg

SEQ ID NO: 82782 - DNA, 6 bp, Unknown
  misc_feature (1)..( 6): Result.001 file - promoters70/1387356
ttaaaa

SEQ ID NO: 82783 - DNA, 6 bp, Unknown
  misc_feature (1)..( 6): Result.001 file - promoters70/1387356
ttaaaa

SEQ ID NO: 82784 - DNA, 6 bp, Unknown
  misc_feature (1)..( 6): Result.001 file - promoters70/1387356
ttaaaa

SEQ ID NO: 82785 - DNA, 11 bp, Unknown
  misc_feature (1)..( 11): Result.001 file - promoters70/1387356
catgtaaaaat

SEQ ID NO: 82786 - DNA, 11 bp, Unknown
  misc_feature (1)..( 11): Result.001 file - promoters70/1387356
aaactaagaat

SEQ ID NO: 82787 - DNA, 11 bp, Unknown
  misc_feature (1)..( 11): Result.001 file - promoters70/1387417
agagtaaaaaa

SEQ ID NO: 82788 - DNA, 8 bp, Unknown
  misc_feature (1)..( 8): Result.001 file - promoters70/1387417
ctttactg

SEQ ID NO: 82789 - DNA, 8 bp, Unknown
  misc_feature (1)..( 8): Result.001 file - promoters70/1387417
attttctg

SEQ ID NO: 82790 - DNA, 8 bp, Unknown
  misc_feature (1)..( 8): Result.001 file - promoters70/1387417
attttcaa

SEQ ID NO: 82791 - DNA, 9 bp, Unknown
  misc_feature (1)..( 9): Result.001 file - promoters70/1387417
catgatttc

SEQ ID NO: 82792 - DNA, 9 bp, Unknown
  misc_feature (1)..( 9): Result.001 file - promoters70/1387417
aatgttttc

SEQ ID NO: 82793 - DNA, 9 bp, Unknown
  misc_feature (1)..( 9): Result.001 file - promoters70/1387449
aatgctttg

SEQ ID NO: 82794 - DNA, 11 bp, Unknown
  misc_feature (1)..( 11): Result.001 file - promoters70/1387449
cagattttcag

SEQ ID NO: 82795 - DNA, 11 bp, Unknown
  misc_feature (1)..( 11): Result.001 file - promoters70/1387449
caaattttcac

SEQ ID NO: 82796 - DNA, 11 bp, Unknown
  misc_feature (1)..( 11): Result.001 file - promoters70/1387449
caaaatttcac

SEQ ID NO: 82797 - DNA, 8 bp, Unknown
  misc_feature (1)..( 8): Result.001 file - promoters70/1387449
aattatat

SEQ ID NO: 82798 - DNA, 8 bp, Unknown
  misc_feature (1)..( 8): Result.001 file - promoters70/1387449
aattatat

SEQ ID NO: 82799 - DNA, 8 bp, Unknown
  misc_feature (1)..( 8): Result.001 file - promoters70/1387449
aataataa

SEQ ID NO: 82800 - DNA, 7 bp, Unknown
  misc_feature (1)..( 7): Result.001 file - promoters70/1387449
tggtttt

SEQ ID NO: 82801 - DNA, 7 bp, Unknown
  misc_feature (1)..( 7): Result.001 file - promoters70/1387449
gggtttt

SEQ ID NO: 82802 - DNA, 7 bp, Unknown
  misc_feature (1)..( 7): Result.001 file - promoters70/1387616
tggtttg

SEQ ID NO: 82803 - DNA, 9 bp, Unknown
  misc_feature (1)..( 9): Result.001 file - promoters70/1387616
aataaaatt

SEQ ID NO: 82804 - DNA, 9 bp, Unknown
  misc_feature (1)..( 9): Result.001 file - promoters70/1387616
gataatatt

SEQ ID NO: 82805 - DNA, 9 bp, Unknown
  misc_feature (1)..( 9): Result.001 file - promoters70/1387616
tataaaata

SEQ ID NO: 82806 - DNA, 9 bp, Unknown
  misc_feature (1)..( 9): Result.001 file - promoters70/1387616
aataaatct

SEQ ID NO: 82807 - DNA, 9 bp, Unknown
  misc_feature (1)..( 9): Result.001 file - promoters70/1387616
aatattatt

SEQ ID NO: 82808 - DNA, 14 bp, Unknown
  misc_feature (1)..( 14): Result.001 file - promoters70/1387616
taaataaatttttg

SEQ ID NO: 82809 - DNA, 14 bp, Unknown
  misc_feature (1)..( 14): Result.001 file - promoters70/1387616
caaacaaatgtttg

SEQ ID NO: 82810 - DNA, 14 bp, Unknown
  misc_feature (1)..( 14): Result.001 file - promoters70/1387616
taaaaaaagaagaa

SEQ ID NO: 82811 - DNA, 14 bp, Unknown
  misc_feature (1)..( 14): Result.001 file - promoters70/1387616
gtcataaatgtatc

SEQ ID NO: 82812 - DNA, 14 bp, Unknown
  misc_feature (1)..( 14): Result.001 file - promoters70/1387616
tacatacatatact

SEQ ID NO: 82813 - DNA, 8 bp, Unknown
  misc_feature (1)..( 8): Result.001 file - promoters70/1387616
tttcttta

SEQ ID NO: 82814 - DNA, 8 bp, Unknown
  misc_feature (1)..( 8): Result.001 file - promoters70/1387616
tttgtttc

SEQ ID NO: 82815 - DNA, 8 bp, Unknown
  misc_feature (1)..( 8): Result.001 file - promoters70/1387616
tttttttg

SEQ ID NO: 82816 - DNA, 8 bp, Unknown
  misc_feature (1)..( 8): Result.001 file - promoters70/1387616
aatcttta

SEQ ID NO: 82817 - DNA, 8 bp, Unknown
  misc_feature (1)..( 8): Result.001 file - promoters70/1387671
tctgtttc

SEQ ID NO: 82818 - DNA, 13 bp, Unknown
  misc_feature (1)..( 13): Result.001 file - promoters70/1387671
ggttgattgatag

SEQ ID NO: 82819 - DNA, 13 bp, Unknown
  misc_feature (1)..( 13): Result.001 file - promoters70/1387671
atgtctttgttag

SEQ ID NO: 82820 - DNA, 13 bp, Unknown
  misc_feature (1)..( 13): Result.001 file - promoters70/1387671
ttctttttgttct

SEQ ID NO: 82821 - DNA, 13 bp, Unknown
  misc_feature (1)..( 13): Result.001 file - promoters70/1387671
tgaattttgtttt

SEQ ID NO: 82822 - DNA, 13 bp, Unknown
  misc_feature (1)..( 13): Result.001 file - promoters70/1387671
acctttttgtgca

SEQ ID NO: 82823 - DNA, 13 bp, Unknown
  misc_feature (1)..( 13): Result.001 file - promoters70/1387671
ttgtgtttgatta

SEQ ID NO: 82824 - DNA, 13 bp, Unknown
  misc_feature (1)..( 13): Result.001 file - promoters70/1387671
aatgaattctttc

SEQ ID NO: 82825 - DNA, 13 bp, Unknown
  misc_feature (1)..( 13): Result.001 file - promoters70/1387671
catcaatgcttat

SEQ ID NO: 82826 - DNA, 13 bp, Unknown
  misc_feature (1)..( 13): Result.001 file - promoters70/1387671
cattaatccttgt

SEQ ID NO: 82827 - DNA, 13 bp, Unknown
  misc_feature (1)..( 13): Result.001 file - promoters70/1387671
attccatccttat

SEQ ID NO: 82828 - DNA, 13 bp, Unknown
  misc_feature (1)..( 13): Result.001 file - promoters70/1387671
atataataattaa

SEQ ID NO: 82829 - DNA, 13 bp, Unknown
  misc_feature (1)..( 13): Result.001 file - promoters70/1387671
aatatatgcttgc

SEQ ID NO: 82830 - DNA, 13 bp, Unknown
  misc_feature (1)..( 13): Result.001 file - promoters70/1387671
aaacaatgaaagg

SEQ ID NO: 82831 - DNA, 13 bp, Unknown
  misc_feature (1)..( 13): Result.001 file - promoters70/1387671
tctcgtataattc

SEQ ID NO: 82832 - DNA, 13 bp, Unknown
  misc_feature (1)..( 13): Result.001 file - promoters70/1387671
actcttatgattt

SEQ ID NO: 82833 - DNA, 13 bp, Unknown
  misc_feature (1)..( 13): Result.001 file - promoters70/1387671
tttcgtttaacag

SEQ ID NO: 82834 - DNA, 13 bp, Unknown
  misc_feature (1)..( 13): Result.001 file - promoters70/1387671
tcaaaactgattt

SEQ ID NO: 82835 - DNA, 13 bp, Unknown
  misc_feature (1)..( 13): Result.001 file - promoters70/1387671
actcttaaaattg

SEQ ID NO: 82836 - DNA, 13 bp, Unknown
  misc_feature (1)..( 13): Result.001 file - promoters70/1387671
gttcttaggattc

SEQ ID NO: 82837 - DNA, 13 bp, Unknown
  misc_feature (1)..( 13): Result.001 file - promoters70/1387671
aaaaaaaaggaaa

SEQ ID NO: 82838 - DNA, 13 bp, Unknown
  misc_feature (1)..( 13): Result.001 file - promoters70/1387671
tcaaaaaaatatt

SEQ ID NO: 82839 - DNA, 13 bp, Unknown
  misc_feature (1)..( 13): Result.001 file - promoters70/1387671
ataaaaaaatata

SEQ ID NO: 82840 - DNA, 13 bp, Unknown
  misc_feature (1)..( 13): Result.001 file - promoters70/1387671
ataaaaaattacg

SEQ ID NO: 82841 - DNA, 13 bp, Unknown
  misc_feature (1)..( 13): Result.001 file - promoters70/1387671
tcaaaaagcaaaa

SEQ ID NO: 82842 - DNA, 13 bp, Unknown
  misc_feature (1)..( 13): Result.001 file - promoters70/1387671
tgaaatatttttt

SEQ ID NO: 82843 - DNA, 13 bp, Unknown
  misc_feature (1)..( 13): Result.001 file - promoters70/1387671
ataaaaacagtga

SEQ ID NO: 82844 - DNA, 14 bp, Unknown
  misc_feature (1)..( 14): Result.001 file - promoters70/1387671
gtaagaaaaaaaaa

SEQ ID NO: 82845 - DNA, 14 bp, Unknown
  misc_feature (1)..( 14): Result.001 file - promoters70/1387671
tctataaaaaatat

SEQ ID NO: 82846 - DNA, 14 bp, Unknown
  misc_feature (1)..( 14): Result.001 file - promoters70/1387671
cccataaaaaatta

SEQ ID NO: 82847 - DNA, 14 bp, Unknown
  misc_feature (1)..( 14): Result.001 file - promoters70/1387671
agaataaaaacagt

SEQ ID NO: 82848 - DNA, 14 bp, Unknown
  misc_feature (1)..( 14): Result.001 file - promoters70/1387671
caaacaaaacatat

SEQ ID NO: 82849 - DNA, 14 bp, Unknown
  misc_feature (1)..( 14): Result.001 file - promoters70/1387906
atgatgaaatattt

SEQ ID NO: 82850 - DNA, 10 bp, Unknown
  misc_feature (1)..( 10): Result.001 file - promoters70/1387906
tttgaaggtt

SEQ ID NO: 82851 - DNA, 10 bp, Unknown
  misc_feature (1)..( 10): Result.001 file - promoters70/1387906
gaggaaggtg

SEQ ID NO: 82852 - DNA, 10 bp, Unknown
  misc_feature (1)..( 10): Result.001 file - promoters70/1387906
ttttaaggtt

SEQ ID NO: 82853 - DNA, 7 bp, Unknown
  misc_feature (1)..( 7): Result.001 file - promoters70/1387906
gaaaata

SEQ ID NO: 82854 - DNA, 7 bp, Unknown
  misc_feature (1)..( 7): Result.001 file - promoters70/1387906
gaaaatg

SEQ ID NO: 82855 - DNA, 7 bp, Unknown
  misc_feature (1)..( 7): Result.001 file - promoters70/1387906
taaaata

SEQ ID NO: 82856 - DNA, 11 bp, Unknown
  misc_feature (1)..( 11): Result.001 file - promoters70/1387906
atataacaaca

SEQ ID NO: 82857 - DNA, 11 bp, Unknown
  misc_feature (1)..( 11): Result.001 file - promoters70/1387906
ttttaataaca

SEQ ID NO: 82858 - DNA, 11 bp, Unknown
  misc_feature (1)..( 11): Result.001 file - promoters70/1387906
ttttactaact

SEQ ID NO: 82859 - DNA, 10 bp, Unknown
  misc_feature (1)..( 10): Result.001 file - promoters70/1387906
taaatttgtt

SEQ ID NO: 82860 - DNA, 10 bp, Unknown
  misc_feature (1)..( 10): Result.001 file - promoters70/1387906
aaaatctgtt

SEQ ID NO: 82861 - DNA, 10 bp, Unknown
  misc_feature (1)..( 10): Result.001 file - promoters70/1387906
aaaatcgaac

SEQ ID NO: 82862 - DNA, 9 bp, Unknown
  misc_feature (1)..( 9): Result.001 file - promoters70/1387906
ctttataat

SEQ ID NO: 82863 - DNA, 9 bp, Unknown
  misc_feature (1)..( 9): Result.001 file - promoters70/1387906
cattaaaat

SEQ ID NO: 82864 - DNA, 10 bp, Unknown
  misc_feature (1)..( 10): Result.001 file - promoters70/1388009
acttcataga

SEQ ID NO: 82865 - DNA, 11 bp, Unknown
  misc_feature (1)..( 11): Result.001 file - promoters70/1388009
tatgaaaatat

SEQ ID NO: 82866 - DNA, 11 bp, Unknown
  misc_feature (1)..( 11): Result.001 file - promoters70/1388009
tattaaagtat

SEQ ID NO: 82867 - DNA, 11 bp, Unknown
  misc_feature (1)..( 11): Result.001 file - promoters70/1388009
tattaaattat

SEQ ID NO: 82868 - DNA, 7 bp, Unknown
  misc_feature (1)..( 7): Result.001 file - promoters70/1388009
atatttt

SEQ ID NO: 82869 - DNA, 7 bp, Unknown
  misc_feature (1)..( 7): Result.001 file - promoters70/1388009
atatttt

SEQ ID NO: 82870 - DNA, 7 bp, Unknown
  misc_feature (1)..( 7): Result.001 file - promoters70/1388009
atatttt

SEQ ID NO: 82871 - DNA, 7 bp, Unknown
  misc_feature (1)..( 7): Result.001 file - promoters70/1388009
tttttac

SEQ ID NO: 82872 - DNA, 7 bp, Unknown
  misc_feature (1)..( 7): Result.001 file - promoters70/1388009
attttac

SEQ ID NO: 82873 - DNA, 7 bp, Unknown
  misc_feature (1)..( 7): Result.001 file - promoters70/1388009
attttag

SEQ ID NO: 82874 - DNA, 10 bp, Unknown
  misc_feature (1)..( 10): Result.001 file - promoters70/1388009
cgaaatcata

SEQ ID NO: 82875 - DNA, 10 bp, Unknown
  misc_feature (1)..( 10): Result.001 file - promoters70/1388009
acaaataata

SEQ ID NO: 82876 - DNA, 10 bp, Unknown
  misc_feature (1)..( 10): Result.001 file - promoters70/1388009
cgaattcaaa

SEQ ID NO: 82877 - DNA, 7 bp, Unknown
  misc_feature (1)..( 7): Result.001 file - promoters70/1388009
ctatatg

SEQ ID NO: 82878 - DNA, 7 bp, Unknown
  misc_feature (1)..( 7): Result.001 file - promoters70/1388009
ctatata

SEQ ID NO: 82879 - DNA, 7 bp, Unknown
  misc_feature (1)..( 7): Result.001 file - promoters70/1388009
ttatatg

SEQ ID NO: 82880 - DNA, 9 bp, Unknown
  misc_feature (1)..( 9): Result.001 file - promoters70/1388009
acattataa

SEQ ID NO: 82881 - DNA, 9 bp, Unknown
  misc_feature (1)..( 9): Result.001 file - promoters70/1388009
aaattataa

SEQ ID NO: 82882 - DNA, 9 bp, Unknown
  misc_feature (1)..( 9): Result.001 file - promoters70/1389279
aaattatta

SEQ ID NO: 82883 - DNA, 7 bp, Unknown
  misc_feature (1)..( 7): Result.001 file - promoters70/1389279
caatgta

SEQ ID NO: 82884 - DNA, 7 bp, Unknown
  misc_feature (1)..( 7): Result.001 file - promoters70/1389279
caatgtt

SEQ ID NO: 82885 - DNA, 7 bp, Unknown
  misc_feature (1)..( 7): Result.001 file - promoters70/1389279
gaatgtt

SEQ ID NO: 82886 - DNA, 7 bp, Unknown
  misc_feature (1)..( 7): Result.001 file - promoters70/1389279
ggaaaaa

SEQ ID NO: 82887 - DNA, 7 bp, Unknown
  misc_feature (1)..( 7): Result.001 file - promoters70/1389279
agaaaaa

SEQ ID NO: 82888 - DNA, 8 bp, Unknown
  misc_feature (1)..( 8): Result.001 file - promoters70/1389279
agacaaaa

SEQ ID NO: 82889 - DNA, 7 bp, Unknown
  misc_feature (1)..( 7): Result.001 file - promoters70/1389279
acaaaaa

SEQ ID NO: 82890 - DNA, 7 bp, Unknown
  misc_feature (1)..( 7): Result.001 file - promoters70/1389279
acaaaaa

SEQ ID NO: 82891 - DNA, 7 bp, Unknown
  misc_feature (1)..( 7): Result.001 file - promoters70/1389279
gcaaaaa

SEQ ID NO: 82892 - DNA, 8 bp, Unknown
  misc_feature (1)..( 8): Result.001 file - promoters70/1389279
tatatata

SEQ ID NO: 82893 - DNA, 8 bp, Unknown
  misc_feature (1)..( 8): Result.001 file - promoters70/1389279
tatatata

SEQ ID NO: 82894 - DNA, 8 bp, Unknown
  misc_feature (1)..( 8): Result.001 file - promoters70/1389279
tatatata

SEQ ID NO: 82895 - DNA, 9 bp, Unknown
  misc_feature (1)..( 9): Result.001 file - promoters70/1389279
aatacaagt

SEQ ID NO: 82896 - DNA, 9 bp, Unknown
  misc_feature (1)..( 9): Result.001 file - promoters70/1389279
aaaacaagt

SEQ ID NO: 82897 - DNA, 9 bp, Unknown
  misc_feature (1)..( 9): Result.001 file - promoters70/1390146
aaaataagc

SEQ ID NO: 82898 - DNA, 9 bp, Unknown
  misc_feature (1)..( 9): Result.001 file - promoters70/1390146
aatttcaac

SEQ ID NO: 82899 - DNA, 9 bp, Unknown
  misc_feature (1)..( 9): Result.001 file - promoters70/1390146
aatttgaac

SEQ ID NO: 82900 - DNA, 9 bp, Unknown
  misc_feature (1)..( 9): Result.001 file - promoters70/1390146
aatgtgaaa

SEQ ID NO: 82901 - DNA, 9 bp, Unknown
  misc_feature (1)..( 9): Result.001 file - promoters70/1390240
aatatgatt

SEQ ID NO: 82902 - DNA, 11 bp, Unknown
  misc_feature (1)..( 11): Result.001 file - promoters70/1390240
caataatttac

SEQ ID NO: 82903 - DNA, 11 bp, Unknown
  misc_feature (1)..( 11): Result.001 file - promoters70/1390240
aaatcatttgt

SEQ ID NO: 82904 - DNA, 12 bp, Unknown
  misc_feature (1)..( 12): Result.001 file - promoters70/1390240
tgtataatttta

SEQ ID NO: 82905 - DNA, 11 bp, Unknown
  misc_feature (1)..( 11): Result.001 file - promoters70/1390240
aaatcattttt

SEQ ID NO: 82906 - DNA, 12 bp, Unknown
  misc_feature (1)..( 12): Result.001 file - promoters70/1390240
tctctcaattgc

SEQ ID NO: 82907 - DNA, 12 bp, Unknown
  misc_feature (1)..( 12): Result.001 file - promoters70/1390240
gaagtcatattc

SEQ ID NO: 82908 - DNA, 12 bp, Unknown
  misc_feature (1)..( 12): Result.001 file - promoters70/1391420
tcgtccattttt

SEQ ID NO: 82909 - DNA, 7 bp, Unknown
  misc_feature (1)..( 7): Result.001 file - promoters70/1391420
agatttt

SEQ ID NO: 82910 - DNA, 7 bp, Unknown
  misc_feature (1)..( 7): Result.001 file - promoters70/1391420
agatttg

SEQ ID NO: 82911 - DNA, 7 bp, Unknown
  misc_feature (1)..( 7): Result.001 file - promoters70/1393104
agatttt

SEQ ID NO: 82912 - DNA, 7 bp, Unknown
  misc_feature (1)..( 7): Result.001 file - promoters70/1393104
atgtggt

SEQ ID NO: 82913 - DNA, 7 bp, Unknown
  misc_feature (1)..( 7): Result.001 file - promoters70/1393104
atgtgga

SEQ ID NO: 82914 - DNA, 7 bp, Unknown
  misc_feature (1)..( 7): Result.001 file - promoters70/1393139
atgagga

SEQ ID NO: 82915 - DNA, 8 bp, Unknown
  misc_feature (1)..( 8): Result.001 file - promoters70/1393139
tagattac

SEQ ID NO: 82916 - DNA, 8 bp, Unknown
  misc_feature (1)..( 8): Result.001 file - promoters70/1393139
tagatttg

SEQ ID NO: 82917 - DNA, 8 bp, Unknown
  misc_feature (1)..( 8): Result.001 file - promoters70/1393139
aagatttg

SEQ ID NO: 82918 - DNA, 7 bp, Unknown
  misc_feature (1)..( 7): Result.001 file - promoters70/1393139
cttcatt

SEQ ID NO: 82919 - DNA, 7 bp, Unknown
  misc_feature (1)..( 7): Result.001 file - promoters70/1393139
cttcatc

SEQ ID NO: 82920 - DNA, 7 bp, Unknown
  misc_feature (1)..( 7): Result.001 file - promoters70/1393139
ctttatt

SEQ ID NO: 82921 - DNA, 13 bp, Unknown
  misc_feature (1)..( 13): Result.001 file - promoters70/1393139
tctacttttggta

SEQ ID NO: 82922 - DNA, 13 bp, Unknown
  misc_feature (1)..( 13): Result.001 file - promoters70/1393139
tcttcttttgtca

SEQ ID NO: 82923 - DNA, 13 bp, Unknown
  misc_feature (1)..( 13): Result.001 file - promoters70/1393139
ttaactttttagt

SEQ ID NO: 82924 - DNA, 13 bp, Unknown
  misc_feature (1)..( 13): Result.001 file - promoters70/1393139
ataacttttgagt

SEQ ID NO: 82925 - DNA, 10 bp, Unknown
  misc_feature (1)..( 10): Result.001 file - promoters70/1393139
gatacaatac

SEQ ID NO: 82926 - DNA, 10 bp, Unknown
  misc_feature (1)..( 10): Result.001 file - promoters70/1393139
aataaaatac

SEQ ID NO: 82927 - DNA, 10 bp, Unknown
  misc_feature (1)..( 10): Result.001 file - promoters70/1393139
aataaaagcc

SEQ ID NO: 82928 - DNA, 10 bp, Unknown
  misc_feature (1)..( 10): Result.001 file - promoters70/1393139
aatacaagtt

SEQ ID NO: 82929 - DNA, 11 bp, Unknown
  misc_feature (1)..( 11): Result.001 file - promoters70/1393139
taccaaaagta

SEQ ID NO: 82930 - DNA, 11 bp, Unknown
  misc_feature (1)..( 11): Result.001 file - promoters70/1393139
tacgaaatcat

SEQ ID NO: 82931 - DNA, 11 bp, Unknown
  misc_feature (1)..( 11): Result.001 file - promoters70/1393139
agccaacagta

SEQ ID NO: 82932 - DNA, 11 bp, Unknown
  misc_feature (1)..( 11): Result.001 file - promoters70/1393139
acgcgtctaca

SEQ ID NO: 82933 - DNA, 11 bp, Unknown
  misc_feature (1)..( 11): Result.001 file - promoters70/1393139
acgtgtctaga

SEQ ID NO: 82934 - DNA, 11 bp, Unknown
  misc_feature (1)..( 11): Result.001 file - promoters70/1393139
atgagtcaaga

SEQ ID NO: 82935 - DNA, 7 bp, Unknown
  misc_feature (1)..( 7): Result.001 file - promoters70/1393139
ccgaaaa

SEQ ID NO: 82936 - DNA, 7 bp, Unknown
  misc_feature (1)..( 7): Result.001 file - promoters70/1393139
acgaaaa

SEQ ID NO: 82937 - DNA, 7 bp, Unknown
  misc_feature (1)..( 7): Result.001 file - promoters70/1393326
acgaaat

SEQ ID NO: 82938 - DNA, 9 bp, Unknown
  misc_feature (1)..( 9): Result.001 file - promoters70/1393326
ctttatttg

SEQ ID NO: 82939 - DNA, 9 bp, Unknown
  misc_feature (1)..( 9): Result.001 file - promoters70/1393326
atttgtttg

SEQ ID NO: 82940 - DNA, 9 bp, Unknown
  misc_feature (1)..( 9): Result.001 file - promoters70/1393326
atttgttag

SEQ ID NO: 82941 - DNA, 10 bp, Unknown
  misc_feature (1)..( 10): Result.001 file - promoters70/1393326
aaataaagtt

SEQ ID NO: 82942 - DNA, 10 bp, Unknown
  misc_feature (1)..( 10): Result.001 file - promoters70/1393326
gcttaaagtg

SEQ ID NO: 82943 - DNA, 10 bp, Unknown
  misc_feature (1)..( 10): Result.001 file - promoters70/1393326
aaataaggtt

SEQ ID NO: 82944 - DNA, 7 bp, Unknown
  misc_feature (1)..( 7): Result.001 file - promoters70/1393326
cagaaaa

SEQ ID NO: 82945 - DNA, 7 bp, Unknown
  misc_feature (1)..( 7): Result.001 file - promoters70/1393326
aagaaaa

SEQ ID NO: 82946 - DNA, 7 bp, Unknown
  misc_feature (1)..( 7): Result.001 file - promoters70/1393492
aagaaac

SEQ ID NO: 82947 - DNA, 11 bp, Unknown
  misc_feature (1)..( 11): Result.001 file - promoters70/1393492
tttaataccct

SEQ ID NO: 82948 - DNA, 11 bp, Unknown
  misc_feature (1)..( 11): Result.001 file - promoters70/1393492
tttcataacaa

SEQ ID NO: 82949 - DNA, 11 bp, Unknown
  misc_feature (1)..( 11): Result.001 file - promoters70/1393787
gttaatagcct

SEQ ID NO: 82950 - DNA, 13 bp, Unknown
  misc_feature (1)..( 13): Result.001 file - promoters70/1393787
cctttaggtctct

SEQ ID NO: 82951 - DNA, 13 bp, Unknown
  misc_feature (1)..( 13): Result.001 file - promoters70/1393787
gattaatgtctct

SEQ ID NO: 82952 - DNA, 13 bp, Unknown
  misc_feature (1)..( 13): Result.001 file - promoters70/1393787
aagttagttctct

SEQ ID NO: 82953 - DNA, 13 bp, Unknown
  misc_feature (1)..( 13): Result.001 file - promoters70/1393787
gattaatttctct

SEQ ID NO: 82954 - DNA, 9 bp, Unknown
  misc_feature (1)..( 9): Result.001 file - promoters70/1393787
ataaaaatt

SEQ ID NO: 82955 - DNA, 9 bp, Unknown
  misc_feature (1)..( 9): Result.001 file - promoters70/1393787
ataaaaatt

SEQ ID NO: 82956 - DNA, 9 bp, Unknown
  misc_feature (1)..( 9): Result.001 file - promoters70/1393787
ttaaaaaat

SEQ ID NO: 82957 - DNA, 10 bp, Unknown
  misc_feature (1)..( 10): Result.001 file - promoters70/1393787
tcaaataatg

SEQ ID NO: 82958 - DNA, 12 bp, Unknown
  misc_feature (1)..( 12): Result.001 file - promoters70/1393787
acacaattagtt

SEQ ID NO: 82959 - DNA, 12 bp, Unknown
  misc_feature (1)..( 12): Result.001 file - promoters70/1393787
aagaaattcgtt

SEQ ID NO: 82960 - DNA, 13 bp, Unknown
  misc_feature (1)..( 13): Result.001 file - promoters70/1393787
caagaacttccat

SEQ ID NO: 82961 - DNA, 13 bp, Unknown
  misc_feature (1)..( 13): Result.001 file - promoters70/1393787
ttcaaaattctct

SEQ ID NO: 82962 - DNA, 10 bp, Unknown
  misc_feature (1)..( 10): Result.001 file - promoters70/1393787
ttatgttttt

SEQ ID NO: 82963 - DNA, 10 bp, Unknown
  misc_feature (1)..( 10): Result.001 file - promoters70/1393787
ccatgttttt

SEQ ID NO: 82964 - DNA, 10 bp, Unknown
  misc_feature (1)..( 10): Result.001 file - promoters70/1393787
ttatgttatg

SEQ ID NO: 82965 - DNA, 10 bp, Unknown
  misc_feature (1)..( 10): Result.001 file - promoters70/1393787
ctatgctttg

SEQ ID NO: 82966 - DNA, 11 bp, Unknown
  misc_feature (1)..( 11): Result.001 file - promoters70/1393787
attttttttaa

SEQ ID NO: 82967 - DNA, 11 bp, Unknown
  misc_feature (1)..( 11): Result.001 file - promoters70/1393787
cattttcttat

SEQ ID NO: 82968 - DNA, 11 bp, Unknown
  misc_feature (1)..( 11): Result.001 file - promoters70/1393787
cccatttataa

SEQ ID NO: 82969 - DNA, 11 bp, Unknown
  misc_feature (1)..( 11): Result.001 file - promoters70/1393787
cattttcaagt

SEQ ID NO: 82970 - DNA, 11 bp, Unknown
  misc_feature (1)..( 11): Result.001 file - promoters70/1393787
taattatttgt

SEQ ID NO: 82971 - DNA, 11 bp, Unknown
  misc_feature (1)..( 11): Result.001 file - promoters70/1393787
taatcattttc

SEQ ID NO: 82972 - DNA, 11 bp, Unknown
  misc_feature (1)..( 11): Result.001 file - promoters70/1393787
tctccattttc

SEQ ID NO: 82973 - DNA, 11 bp, Unknown
  misc_feature (1)..( 11): Result.001 file - promoters70/1393805
ggcccatttat

SEQ ID NO: 82974 - DNA, 14 bp, Unknown
  misc_feature (1)..( 14): Result.001 file - promoters70/1393805
atagttaagtccaa

SEQ ID NO: 82975 - DNA, 14 bp, Unknown
  misc_feature (1)..( 14): Result.001 file - promoters70/1393805
ataattaaactcta

SEQ ID NO: 82976 - DNA, 14 bp, Unknown
  misc_feature (1)..( 14): Result.001 file - promoters70/1393805
cgggttacgtcatc

SEQ ID NO: 82977 - DNA, 14 bp, Unknown
  misc_feature (1)..( 14): Result.001 file - promoters70/1393805
ccatccacgacatc

SEQ ID NO: 82978 - DNA, 14 bp, Unknown
  misc_feature (1)..( 14): Result.001 file - promoters70/1393805
gtaataaaaaactc

SEQ ID NO: 82979 - DNA, 14 bp, Unknown
  misc_feature (1)..( 14): Result.001 file - promoters70/1393805
aaaattaaatcatc

SEQ ID NO: 82980 - DNA, 9 bp, Unknown
  misc_feature (1)..( 9): Result.001 file - promoters70/1393805
ttaattctt

SEQ ID NO: 82981 - DNA, 9 bp, Unknown
  misc_feature (1)..( 9): Result.001 file - promoters70/1393805
ttacttcaa

SEQ ID NO: 82982 - DNA, 9 bp, Unknown
  misc_feature (1)..( 9): Result.001 file - promoters70/1393805
ttactttat

SEQ ID NO: 82983 - DNA, 9 bp, Unknown
  misc_feature (1)..( 9): Result.001 file - promoters70/1393805
aaacttcac

SEQ ID NO: 82984 - DNA, 9 bp, Unknown
  misc_feature (1)..( 9): Result.001 file - promoters70/1393805
attcttcac

SEQ ID NO: 82985 - DNA, 9 bp, Unknown
  misc_feature (1)..( 9): Result.001 file - promoters70/1394480
tatctccac

SEQ ID NO: 82986 - DNA, 9 bp, Unknown
  misc_feature (1)..( 9): Result.001 file - promoters70/1394480
aaactttaa

SEQ ID NO: 82987 - DNA, 9 bp, Unknown
  misc_feature (1)..( 9): Result.001 file - promoters70/1394480
aaaatttct

SEQ ID NO: 82988 - DNA, 9 bp, Unknown
  misc_feature (1)..( 9): Result.001 file - promoters70/1394480
aaaatctct

SEQ ID NO: 82989 - DNA, 8 bp, Unknown
  misc_feature (1)..( 8): Result.001 file - promoters70/1394480
tttgaaac

SEQ ID NO: 82990 - DNA, 8 bp, Unknown
  misc_feature (1)..( 8): Result.001 file - promoters70/1394480
tgtgaaac

SEQ ID NO: 82991 - DNA, 8 bp, Unknown
  misc_feature (1)..( 8): Result.001 file - promoters70/1394480
tgtgaaaa

SEQ ID NO: 82992 - DNA, 9 bp, Unknown
  misc_feature (1)..( 9): Result.001 file - promoters70/1394480
gatatttct

SEQ ID NO: 82993 - DNA, 9 bp, Unknown
  misc_feature (1)..( 9): Result.001 file - promoters70/1394480
aaaatttct

SEQ ID NO: 82994 - DNA, 9 bp, Unknown
  misc_feature (1)..( 9): Result.001 file - promoters70/1394480
aaaatctct

SEQ ID NO: 82995 - DNA, 9 bp, Unknown
  misc_feature (1)..( 9): Result.001 file - promoters70/1394480
tttcaaaat

SEQ ID NO: 82996 - DNA, 9 bp, Unknown
  misc_feature (1)..( 9): Result.001 file - promoters70/1394480
tatcaaaat

SEQ ID NO: 82997 - DNA, 9 bp, Unknown
  misc_feature (1)..( 9): Result.001 file - promoters70/1394510
ttttaaaat

SEQ ID NO: 82998 - DNA, 11 bp, Unknown
  misc_feature (1)..( 11): Result.001 file - promoters70/1394510
taacatttttt

SEQ ID NO: 82999 - DNA, 11 bp, Unknown
  misc_feature (1)..( 11): Result.001 file - promoters70/1394510
taagatttttg

SEQ ID NO: 83000 - DNA, 11 bp, Unknown
  misc_feature (1)..( 11): Result.001 file - promoters70/1394510
tagaatttttt

SEQ ID NO: 83001 - DNA, 9 bp, Unknown
  misc_feature (1)..( 9): Result.001 file - promoters70/1394510
tttaatcag

SEQ ID NO: 83002 - DNA, 9 bp, Unknown
  misc_feature (1)..( 9): Result.001 file - promoters70/1394510
tttattcag

SEQ ID NO: 83003 - DNA, 9 bp, Unknown
  misc_feature (1)..( 9): Result.001 file - promoters70/1394592
gttattcga

SEQ ID NO: 83004 - DNA, 9 bp, Unknown
  misc_feature (1)..( 9): Result.001 file - promoters70/1394592
ataattata

SEQ ID NO: 83005 - DNA, 9 bp, Unknown
  misc_feature (1)..( 9): Result.001 file - promoters70/1394592
ccaatcata

SEQ ID NO: 83006 - DNA, 9 bp, Unknown
  misc_feature (1)..( 9): Result.001 file - promoters70/1395095
atatttaat

SEQ ID NO: 83007 - DNA, 9 bp, Unknown
  misc_feature (1)..( 9): Result.001 file - promoters70/1395095
aaaataaga

SEQ ID NO: 83008 - DNA, 9 bp, Unknown
  misc_feature (1)..( 9): Result.001 file - promoters70/1395095
aaaataatc

SEQ ID NO: 83009 - DNA, 9 bp, Unknown
  misc_feature (1)..( 9): Result.001 file - promoters70/1395095
aaaatgatc

SEQ ID NO: 83010 - DNA, 7 bp, Unknown
  misc_feature (1)..( 7): Result.001 file - promoters70/1395095
catagat

SEQ ID NO: 83011 - DNA, 7 bp, Unknown
  misc_feature (1)..( 7): Result.001 file - promoters70/1395095
aatagat

SEQ ID NO: 83012 - DNA, 7 bp, Unknown
  misc_feature (1)..( 7): Result.001 file - promoters70/1395095
aatcgat

SEQ ID NO: 83013 - DNA, 8 bp, Unknown
  misc_feature (1)..( 8): Result.001 file - promoters70/1395095
tttatttc

SEQ ID NO: 83014 - DNA, 8 bp, Unknown
  misc_feature (1)..( 8): Result.001 file - promoters70/1395095
tttctttc

SEQ ID NO: 83015 - DNA, 8 bp, Unknown
  misc_feature (1)..( 8): Result.001 file - promoters70/1395095
tttgtttt

SEQ ID NO: 83016 - DNA, 8 bp, Unknown
  misc_feature (1)..( 8): Result.001 file - promoters70/1395095
aaaaaaag

SEQ ID NO: 83017 - DNA, 8 bp, Unknown
  misc_feature (1)..( 8): Result.001 file - promoters70/1395095
caaagaag

SEQ ID NO: 83018 - DNA, 8 bp, Unknown
  misc_feature (1)..( 8): Result.001 file - promoters70/1395095
gaaaaaaa

SEQ ID NO: 83019 - DNA, 11 bp, Unknown
  misc_feature (1)..( 11): Result.001 file - promoters70/1395095
caacttttttt

SEQ ID NO: 83020 - DNA, 11 bp, Unknown
  misc_feature (1)..( 11): Result.001 file - promoters70/1395095
caaattttttt

SEQ ID NO: 83021 - DNA, 11 bp, Unknown
  misc_feature (1)..( 11): Result.001 file - promoters70/1395095
tacatttttta

SEQ ID NO: 83022 - DNA, 8 bp, Unknown
  misc_feature (1)..( 8): Result.001 file - promoters70/1395095
caagtctt

SEQ ID NO: 83023 - DNA, 8 bp, Unknown
  misc_feature (1)..( 8): Result.001 file - promoters70/1395095
aaagtctt

SEQ ID NO: 83024 - DNA, 8 bp, Unknown
  misc_feature (1)..( 8): Result.001 file - promoters70/1395095
aaattctg

SEQ ID NO: 83025 - DNA, 8 bp, Unknown
  misc_feature (1)..( 8): Result.001 file - promoters70/1395095
catatttt

SEQ ID NO: 83026 - DNA, 8 bp, Unknown
  misc_feature (1)..( 8): Result.001 file - promoters70/1395095
catttttt

SEQ ID NO: 83027 - DNA, 8 bp, Unknown
  misc_feature (1)..( 8): Result.001 file - promoters70/1395095
aatttttt

SEQ ID NO: 83028 - DNA, 8 bp, Unknown
  misc_feature (1)..( 8): Result.001 file - promoters70/1395095
aaaattca

SEQ ID NO: 83029 - DNA, 8 bp, Unknown
  misc_feature (1)..( 8): Result.001 file - promoters70/1395095
aaaattct

SEQ ID NO: 83030 - DNA, 8 bp, Unknown
  misc_feature (1)..( 8): Result.001 file - promoters70/1395095
taaagtct

SEQ ID NO: 83031 - DNA, 8 bp, Unknown
  misc_feature (1)..( 8): Result.001 file - promoters70/1395095
tataaatt

SEQ ID NO: 83032 - DNA, 8 bp, Unknown
  misc_feature (1)..( 8): Result.001 file - promoters70/1395095
tataaacc

SEQ ID NO: 83033 - DNA, 8 bp, Unknown
  misc_feature (1)..( 8): Result.001 file - promoters70/1395636
aataaaaa

SEQ ID NO: 83034 - DNA, 7 bp, Unknown
  misc_feature (1)..( 7): Result.001 file - promoters70/1395636
caatatt

SEQ ID NO: 83035 - DNA, 7 bp, Unknown
  misc_feature (1)..( 7): Result.001 file - promoters70/1395636
caaaatt

SEQ ID NO: 83036 - DNA, 7 bp, Unknown
  misc_feature (1)..( 7): Result.001 file - promoters70/1395636
caatata

SEQ ID NO: 83037 - DNA, 7 bp, Unknown
  misc_feature (1)..( 7): Result.001 file - promoters70/1395636
tttttac

SEQ ID NO: 83038 - DNA, 7 bp, Unknown
  misc_feature (1)..( 7): Result.001 file - promoters70/1395636
gttttac

SEQ ID NO: 83039 - DNA, 7 bp, Unknown
  misc_feature (1)..( 7): Result.001 file - promoters70/1395636
tttttat

SEQ ID NO: 83040 - DNA, 12 bp, Unknown
  misc_feature (1)..( 12): Result.001 file - promoters70/1395636
aaaggaaagaat

SEQ ID NO: 83041 - DNA, 12 bp, Unknown
  misc_feature (1)..( 12): Result.001 file - promoters70/1395636
acaggaaaatgg

SEQ ID NO: 83042 - DNA, 12 bp, Unknown
  misc_feature (1)..( 12): Result.001 file - promoters70/1395636
aaagcaaacaat

SEQ ID NO: 83043 - DNA, 9 bp, Unknown
  misc_feature (1)..( 9): Result.001 file - promoters70/1395636
tataaattg

SEQ ID NO: 83044 - DNA, 9 bp, Unknown
  misc_feature (1)..( 9): Result.001 file - promoters70/1395636
tataaattg

SEQ ID NO: 83045 - DNA, 9 bp, Unknown
  misc_feature (1)..( 9): Result.001 file - promoters70/1395636
tataaataa

SEQ ID NO: 83046 - DNA, 7 bp, Unknown
  misc_feature (1)..( 7): Result.001 file - promoters70/1395636
attgttt

SEQ ID NO: 83047 - DNA, 7 bp, Unknown
  misc_feature (1)..( 7): Result.001 file - promoters70/1395636
tttgttt

SEQ ID NO: 83048 - DNA, 7 bp, Unknown
  misc_feature (1)..( 7): Result.001 file - promoters70/1395824
tttattt

SEQ ID NO: 83049 - DNA, 10 bp, Unknown
  misc_feature (1)..( 10): Result.001 file - promoters70/1395824
ttcaaatata

SEQ ID NO: 83050 - DNA, 10 bp, Unknown
  misc_feature (1)..( 10): Result.001 file - promoters70/1395824
cacaaacata

SEQ ID NO: 83051 - DNA, 10 bp, Unknown
  misc_feature (1)..( 10): Result.001 file - promoters70/1396085
ttcagataaa

SEQ ID NO: 83052 - DNA, 10 bp, Unknown
  misc_feature (1)..( 10): Result.001 file - promoters70/1396085
attttaatct

SEQ ID NO: 83053 - DNA, 10 bp, Unknown
  misc_feature (1)..( 10): Result.001 file - promoters70/1396085
tttttattct

SEQ ID NO: 83054 - DNA, 10 bp, Unknown
  misc_feature (1)..( 10): Result.001 file - promoters70/1396085
tctttgttca

SEQ ID NO: 83055 - DNA, 10 bp, Unknown
  misc_feature (1)..( 10): Result.001 file - promoters70/1396085
tttttacggc

SEQ ID NO: 83056 - DNA, 9 bp, Unknown
  misc_feature (1)..( 9): Result.001 file - promoters70/1396085
atatatctt

SEQ ID NO: 83057 - DNA, 9 bp, Unknown
  misc_feature (1)..( 9): Result.001 file - promoters70/1396085
ataaatctt

SEQ ID NO: 83058 - DNA, 10 bp, Unknown
  misc_feature (1)..( 10): Result.001 file - promoters70/1396085
ttatcatatt

SEQ ID NO: 83059 - DNA, 10 bp, Unknown
  misc_feature (1)..( 10): Result.001 file - promoters70/1396085
ataaattaat

SEQ ID NO: 83060 - DNA, 8 bp, Unknown
  misc_feature (1)..( 8): Result.001 file - promoters70/1396085
aaagtaat

SEQ ID NO: 83061 - DNA, 8 bp, Unknown
  misc_feature (1)..( 8): Result.001 file - promoters70/1396085
aaaataaa

SEQ ID NO: 83062 - DNA, 8 bp, Unknown
  misc_feature (1)..( 8): Result.001 file - promoters70/1396085
aaaatagc

SEQ ID NO: 83063 - DNA, 8 bp, Unknown
  misc_feature (1)..( 8): Result.001 file - promoters70/1396182
caaataaa

SEQ ID NO: 83064 - DNA, 9 bp, Unknown
  misc_feature (1)..( 9): Result.001 file - promoters70/1396182
aagaataag

SEQ ID NO: 83065 - DNA, 9 bp, Unknown
  misc_feature (1)..( 9): Result.001 file - promoters70/1396182
gttaataag

SEQ ID NO: 83066 - DNA, 9 bp, Unknown
  misc_feature (1)..( 9): Result.001 file - promoters70/1396182
aagagtaaa

SEQ ID NO: 83067 - DNA, 7 bp, Unknown
  misc_feature (1)..( 7): Result.001 file - promoters70/1396182
aaaacaa

SEQ ID NO: 83068 - DNA, 7 bp, Unknown
  misc_feature (1)..( 7): Result.001 file - promoters70/1396182
aaagcaa

SEQ ID NO: 83069 - DNA, 7 bp, Unknown
  misc_feature (1)..( 7): Result.001 file - promoters70/1396182
gaaacaa

SEQ ID NO: 83070 - DNA, 11 bp, Unknown
  misc_feature (1)..( 11): Result.001 file - promoters70/1396182
tagtatgcaat

SEQ ID NO: 83071 - DNA, 11 bp, Unknown
  misc_feature (1)..( 11): Result.001 file - promoters70/1396182
ggaaatgaaat

SEQ ID NO: 83072 - DNA, 11 bp, Unknown
  misc_feature (1)..( 11): Result.001 file - promoters70/1396182
ggaaaagaaaa

SEQ ID NO: 83073 - DNA, 7 bp, Unknown
  misc_feature (1)..( 7): Result.001 file - promoters70/1396182
ctatata

SEQ ID NO: 83074 - DNA, 7 bp, Unknown
  misc_feature (1)..( 7): Result.001 file - promoters70/1396182
gtatata

SEQ ID NO: 83075 - DNA, 7 bp, Unknown
  misc_feature (1)..( 7): Result.001 file - promoters70/1396238
gtatata

SEQ ID NO: 83076 - DNA, 7 bp, Unknown
  misc_feature (1)..( 7): Result.001 file - promoters70/1396238
taatggg

SEQ ID NO: 83077 - DNA, 7 bp, Unknown
  misc_feature (1)..( 7): Result.001 file - promoters70/1396238
taaaggg

SEQ ID NO: 83078 - DNA, 7 bp, Unknown
  misc_feature (1)..( 7): Result.001 file - promoters70/1396308
taaaggc

SEQ ID NO: 83079 - DNA, 10 bp, Unknown
  misc_feature (1)..( 10): Result.001 file - promoters70/1396308
taaaaatgaa

SEQ ID NO: 83080 - DNA, 10 bp, Unknown
  misc_feature (1)..( 10): Result.001 file - promoters70/1396308
taaaaagtct

SEQ ID NO: 83081 - DNA, 10 bp, Unknown
  misc_feature (1)..( 10): Result.001 file - promoters70/1396308
aaaaaaagaa

SEQ ID NO: 83082 - DNA, 10 bp, Unknown
  misc_feature (1)..( 10): Result.001 file - promoters70/1396308
gaaaaagggt

SEQ ID NO: 83083 - DNA, 12 bp, Unknown
  misc_feature (1)..( 12): Result.001 file - promoters70/1396308
atataataaata

SEQ ID NO: 83084 - DNA, 12 bp, Unknown
  misc_feature (1)..( 12): Result.001 file - promoters70/1396308
gcataaaaaata

SEQ ID NO: 83085 - DNA, 12 bp, Unknown
  misc_feature (1)..( 12): Result.001 file - promoters70/1396308
ttattatacttc

SEQ ID NO: 83086 - DNA, 12 bp, Unknown
  misc_feature (1)..( 12): Result.001 file - promoters70/1396308
atataattatct

SEQ ID NO: 83087 - DNA, 12 bp, Unknown
  misc_feature (1)..( 12): Result.001 file - promoters70/1396308
ctaaaatataat

SEQ ID NO: 83088 - DNA, 10 bp, Unknown
  misc_feature (1)..( 10): Result.001 file - promoters70/1396308
gtatatatat

SEQ ID NO: 83089 - DNA, 10 bp, Unknown
  misc_feature (1)..( 10): Result.001 file - promoters70/1396308
aaataaatag

SEQ ID NO: 83090 - DNA, 10 bp, Unknown
  misc_feature (1)..( 10): Result.001 file - promoters70/1396308
aaatatataa

SEQ ID NO: 83091 - DNA, 10 bp, Unknown
  misc_feature (1)..( 10): Result.001 file - promoters70/1396308
taaaatataa

SEQ ID NO: 83092 - DNA, 12 bp, Unknown
  misc_feature (1)..( 12): Result.001 file - promoters70/1396308
tagaaattaata

SEQ ID NO: 83093 - DNA, 12 bp, Unknown
  misc_feature (1)..( 12): Result.001 file - promoters70/1396308
agataattaagt

SEQ ID NO: 83094 - DNA, 11 bp, Unknown
  misc_feature (1)..( 11): Result.001 file - promoters70/1396308
taaaatcaata

SEQ ID NO: 83095 - DNA, 11 bp, Unknown
  misc_feature (1)..( 11): Result.001 file - promoters70/1396308
tttaattatta

SEQ ID NO: 83096 - DNA, 12 bp, Unknown
  misc_feature (1)..( 12): Result.001 file - promoters70/1396308
ataacatcactt

SEQ ID NO: 83097 - DNA, 12 bp, Unknown
  misc_feature (1)..( 12): Result.001 file - promoters70/1396308
ttttatcacaag

SEQ ID NO: 83098 - DNA, 12 bp, Unknown
  misc_feature (1)..( 12): Result.001 file - promoters70/1396308
ttttgtcaacga

SEQ ID NO: 83099 - DNA, 12 bp, Unknown
  misc_feature (1)..( 12): Result.001 file - promoters70/1396308
cggtgtaaacga

SEQ ID NO: 83100 - DNA, 12 bp, Unknown
  misc_feature (1)..( 12): Result.001 file - promoters70/1396308
ttttgtatctaa

SEQ ID NO: 83101 - DNA, 8 bp, Unknown
  misc_feature (1)..( 8): Result.001 file - promoters70/1396308
atatatat

SEQ ID NO: 83102 - DNA, 8 bp, Unknown
  misc_feature (1)..( 8): Result.001 file - promoters70/1396308
atatttat

SEQ ID NO: 83103 - DNA, 8 bp, Unknown
  misc_feature (1)..( 8): Result.001 file - promoters70/1396308
caatttat

SEQ ID NO: 83104 - DNA, 8 bp, Unknown
  misc_feature (1)..( 8): Result.001 file - promoters70/1396308
taatttat

SEQ ID NO: 83105 - DNA, 8 bp, Unknown
  misc_feature (1)..( 8): Result.001 file - promoters70/1396308
aatcaaaa

SEQ ID NO: 83106 - DNA, 8 bp, Unknown
  misc_feature (1)..( 8): Result.001 file - promoters70/1396308
aatcaaat

SEQ ID NO: 83107 - DNA, 9 bp, Unknown
  misc_feature (1)..( 9): Result.001 file - promoters70/1396308
gatccaaac

SEQ ID NO: 83108 - DNA, 9 bp, Unknown
  misc_feature (1)..( 9): Result.001 file - promoters70/1396308
tatcctaac

SEQ ID NO: 83109 - DNA, 11 bp, Unknown
  misc_feature (1)..( 11): Result.001 file - promoters70/1396308
ctagacacgta

SEQ ID NO: 83110 - DNA, 11 bp, Unknown
  misc_feature (1)..( 11): Result.001 file - promoters70/1396308
atcaacacgta

SEQ ID NO: 83111 - DNA, 11 bp, Unknown
  misc_feature (1)..( 11): Result.001 file - promoters70/1396308
aaagagacgaa

SEQ ID NO: 83112 - DNA, 11 bp, Unknown
  misc_feature (1)..( 11): Result.001 file - promoters70/1396308
aaaaagaatac

SEQ ID NO: 83113 - DNA, 8 bp, Unknown
  misc_feature (1)..( 8): Result.001 file - promoters70/1396308
ttataatg

SEQ ID NO: 83114 - DNA, 8 bp, Unknown
  misc_feature (1)..( 8): Result.001 file - promoters70/1396308
atataata

SEQ ID NO: 83115 - DNA, 8 bp, Unknown
  misc_feature (1)..( 8): Result.001 file - promoters70/1396308
ttattata

SEQ ID NO: 83116 - DNA, 8 bp, Unknown
  misc_feature (1)..( 8): Result.001 file - promoters70/1396354
ataaaatc

SEQ ID NO: 83117 - DNA, 6 bp, Unknown
  misc_feature (1)..( 6): Result.001 file - promoters70/1396354
tacatt

SEQ ID NO: 83118 - DNA, 6 bp, Unknown
  misc_feature (1)..( 6): Result.001 file - promoters70/1396354
tacatt

SEQ ID NO: 83119 - DNA, 6 bp, Unknown
  misc_feature (1)..( 6): Result.001 file - promoters70/1396354
tacatt

SEQ ID NO: 83120 - DNA, 7 bp, Unknown
  misc_feature (1)..( 7): Result.001 file - promoters70/1396354
cttgatt

SEQ ID NO: 83121 - DNA, 7 bp, Unknown
  misc_feature (1)..( 7): Result.001 file - promoters70/1396354
tttgatt

SEQ ID NO: 83122 - DNA, 7 bp, Unknown
  misc_feature (1)..( 7): Result.001 file - promoters70/1396469
tttgatt

SEQ ID NO: 83123 - DNA, 9 bp, Unknown
  misc_feature (1)..( 9): Result.001 file - promoters70/1396469
ttttcttat

SEQ ID NO: 83124 - DNA, 9 bp, Unknown
  misc_feature (1)..( 9): Result.001 file - promoters70/1396469
cattcttat

SEQ ID NO: 83125 - DNA, 9 bp, Unknown
  misc_feature (1)..( 9): Result.001 file - promoters70/1396469
catgctttc

SEQ ID NO: 83126 - DNA, 9 bp, Unknown
  misc_feature (1)..( 9): Result.001 file - promoters70/1396469
acttacaaa

SEQ ID NO: 83127 - DNA, 9 bp, Unknown
  misc_feature (1)..( 9): Result.001 file - promoters70/1396469
acttactta

SEQ ID NO: 83128 - DNA, 9 bp, Unknown
  misc_feature (1)..( 9): Result.001 file - promoters70/1396469
ccttccaaa

SEQ ID NO: 83129 - DNA, 9 bp, Unknown
  misc_feature (1)..( 9): Result.001 file - promoters70/1396469
atataaaca

SEQ ID NO: 83130 - DNA, 9 bp, Unknown
  misc_feature (1)..( 9): Result.001 file - promoters70/1396469
atattaaca

SEQ ID NO: 83131 - DNA, 9 bp, Unknown
  misc_feature (1)..( 9): Result.001 file - promoters70/1396469
atatataca

SEQ ID NO: 83132 - DNA, 11 bp, Unknown
  misc_feature (1)..( 11): Result.001 file - promoters70/1396469
aagtaaacaaa

SEQ ID NO: 83133 - DNA, 11 bp, Unknown
  misc_feature (1)..( 11): Result.001 file - promoters70/1396469
aagaaaacaaa

SEQ ID NO: 83134 - DNA, 12 bp, Unknown
  misc_feature (1)..( 12): Result.001 file - promoters70/1396469
ttcataacgaaa

SEQ ID NO: 83135 - DNA, 14 bp, Unknown
  misc_feature (1)..( 14): Result.001 file - promoters70/1396469
tcagatatacattg

SEQ ID NO: 83136 - DNA, 14 bp, Unknown
  misc_feature (1)..( 14): Result.001 file - promoters70/1396469
ttttctataaatta

SEQ ID NO: 83137 - DNA, 14 bp, Unknown
  misc_feature (1)..( 14): Result.001 file - promoters70/1396469
ttttttatagatta

SEQ ID NO: 83138 - DNA, 14 bp, Unknown
  misc_feature (1)..( 14): Result.001 file - promoters70/1396469
agagctaaaaacgg

SEQ ID NO: 83139 - DNA, 7 bp, Unknown
  misc_feature (1)..( 7): Result.001 file - promoters70/1396469
caacaac

SEQ ID NO: 83140 - DNA, 7 bp, Unknown
  misc_feature (1)..( 7): Result.001 file - promoters70/1396469
caacaaa

SEQ ID NO: 83141 - DNA, 7 bp, Unknown
  misc_feature (1)..( 7): Result.001 file - promoters70/1396482
aaacaaa

SEQ ID NO: 83142 - DNA, 9 bp, Unknown
  misc_feature (1)..( 9): Result.001 file - promoters70/1396482
aaaaaaata

SEQ ID NO: 83143 - DNA, 9 bp, Unknown
  misc_feature (1)..( 9): Result.001 file - promoters70/1396482
aaaaaaagt

SEQ ID NO: 83144 - DNA, 9 bp, Unknown
  misc_feature (1)..( 9): Result.001 file - promoters70/1397080
aaatagtga

SEQ ID NO: 83145 - DNA, 9 bp, Unknown
  misc_feature (1)..( 9): Result.001 file - promoters70/1397080
ccatcgaat

SEQ ID NO: 83146 - DNA, 9 bp, Unknown
  misc_feature (1)..( 9): Result.001 file - promoters70/1397080
aaatcaaat

SEQ ID NO: 83147 - DNA, 9 bp, Unknown
  misc_feature (1)..( 9): Result.001 file - promoters70/1397080
aaaacaaaa

SEQ ID NO: 83148 - DNA, 10 bp, Unknown
  misc_feature (1)..( 10): Result.001 file - promoters70/1397080
ctacacatag

SEQ ID NO: 83149 - DNA, 10 bp, Unknown
  misc_feature (1)..( 10): Result.001 file - promoters70/1397080
ctaaacaaaa

SEQ ID NO: 83150 - DNA, 10 bp, Unknown
  misc_feature (1)..( 10): Result.001 file - promoters70/1397125
aaaaacaaaa

SEQ ID NO: 83151 - DNA, 8 bp, Unknown
  misc_feature (1)..( 8): Result.001 file - promoters70/1397125
tcccaaaa

SEQ ID NO: 83152 - DNA, 8 bp, Unknown
  misc_feature (1)..( 8): Result.001 file - promoters70/1397125
tcctaaaa

SEQ ID NO: 83153 - DNA, 8 bp, Unknown
  misc_feature (1)..( 8): Result.001 file - promoters70/1397125
acccaaaa

SEQ ID NO: 83154 - DNA, 8 bp, Unknown
  misc_feature (1)..( 8): Result.001 file - promoters70/1397125
tactaaaa

SEQ ID NO: 83155 - DNA, 8 bp, Unknown
  misc_feature (1)..( 8): Result.001 file - promoters70/1397125
taagatta

SEQ ID NO: 83156 - DNA, 8 bp, Unknown
  misc_feature (1)..( 8): Result.001 file - promoters70/1397125
taaaattt

SEQ ID NO: 83157 - DNA, 8 bp, Unknown
  misc_feature (1)..( 8): Result.001 file - promoters70/1397125
caaaattg

SEQ ID NO: 83158 - DNA, 8 bp, Unknown
  misc_feature (1)..( 8): Result.001 file - promoters70/1397203
gaaacttt

SEQ ID NO: 83159 - DNA, 8 bp, Unknown
  misc_feature (1)..( 8): Result.001 file - promoters70/1397203
gtattcta

SEQ ID NO: 83160 - DNA, 8 bp, Unknown
  misc_feature (1)..( 8): Result.001 file - promoters70/1397203
ttattcta

SEQ ID NO: 83161 - DNA, 8 bp, Unknown
  misc_feature (1)..( 8): Result.001 file - promoters70/1397203
ttaatctc

SEQ ID NO: 83162 - DNA, 9 bp, Unknown
  misc_feature (1)..( 9): Result.001 file - promoters70/1397203
aaaaaagaa

SEQ ID NO: 83163 - DNA, 9 bp, Unknown
  misc_feature (1)..( 9): Result.001 file - promoters70/1397203
aaaaaactc

SEQ ID NO: 83164 - DNA, 9 bp, Unknown
  misc_feature (1)..( 9): Result.001 file - promoters70/1397203
aaaaagaaa

SEQ ID NO: 83165 - DNA, 9 bp, Unknown
  misc_feature (1)..( 9): Result.001 file - promoters70/1397203
aaacactta

SEQ ID NO: 83166 - DNA, 10 bp, Unknown
  misc_feature (1)..( 10): Result.001 file - promoters70/1397203
aaattataaa

SEQ ID NO: 83167 - DNA, 10 bp, Unknown
  misc_feature (1)..( 10): Result.001 file - promoters70/1397203
aatttaaaaa

SEQ ID NO: 83168 - DNA, 10 bp, Unknown
  misc_feature (1)..( 10): Result.001 file - promoters70/1397231
aaataataat

SEQ ID NO: 83169 - DNA, 9 bp, Unknown
  misc_feature (1)..( 9): Result.001 file - promoters70/1397231
caagttaat

SEQ ID NO: 83170 - DNA, 9 bp, Unknown
  misc_feature (1)..( 9): Result.001 file - promoters70/1397231
tatgttaat

SEQ ID NO: 83171 - DNA, 9 bp, Unknown
  misc_feature (1)..( 9): Result.001 file - promoters70/1397231
caatttaaa

SEQ ID NO: 83172 - DNA, 9 bp, Unknown
  misc_feature (1)..( 9): Result.001 file - promoters70/1397231
attgttaac

SEQ ID NO: 83173 - DNA, 9 bp, Unknown
  misc_feature (1)..( 9): Result.001 file - promoters70/1397231
tttgtaaat

SEQ ID NO: 83174 - DNA, 9 bp, Unknown
  misc_feature (1)..( 9): Result.001 file - promoters70/1397231
tatttcaaa

SEQ ID NO: 83175 - DNA, 9 bp, Unknown
  misc_feature (1)..( 9): Result.001 file - promoters70/1397231
atcttcaaa

SEQ ID NO: 83176 - DNA, 12 bp, Unknown
  misc_feature (1)..( 12): Result.001 file - promoters70/1397231
tttattttccca

SEQ ID NO: 83177 - DNA, 12 bp, Unknown
  misc_feature (1)..( 12): Result.001 file - promoters70/1397231
attattttcttg

SEQ ID NO: 83178 - DNA, 12 bp, Unknown
  misc_feature (1)..( 12): Result.001 file - promoters70/1397231
atcattttctta

SEQ ID NO: 83179 - DNA, 12 bp, Unknown
  misc_feature (1)..( 12): Result.001 file - promoters70/1397231
aatattttgcaa

SEQ ID NO: 83180 - DNA, 12 bp, Unknown
  misc_feature (1)..( 12): Result.001 file - promoters70/1397231
tttaattgacaa

SEQ ID NO: 83181 - DNA, 12 bp, Unknown
  misc_feature (1)..( 12): Result.001 file - promoters70/1397231
agagttttgttg

SEQ ID NO: 83182 - DNA, 13 bp, Unknown
  misc_feature (1)..( 13): Result.001 file - promoters70/1397231
attagttctaatc

SEQ ID NO: 83183 - DNA, 13 bp, Unknown
  misc_feature (1)..( 13): Result.001 file - promoters70/1397231
attatttcaaatg

SEQ ID NO: 83184 - DNA, 13 bp, Unknown
  misc_feature (1)..( 13): Result.001 file - promoters70/1397231
tcaatttaaaaag

SEQ ID NO: 83185 - DNA, 13 bp, Unknown
  misc_feature (1)..( 13): Result.001 file - promoters70/1397231
ctctcgtataatt

SEQ ID NO: 83186 - DNA, 13 bp, Unknown
  misc_feature (1)..( 13): Result.001 file - promoters70/1397231
attttttttcatc

SEQ ID NO: 83187 - DNA, 13 bp, Unknown
  misc_feature (1)..( 13): Result.001 file - promoters70/1397231
tcatcttcaaaat

SEQ ID NO: 83188 - DNA, 16 bp, Unknown
  misc_feature (1)..( 16): Result.001 file - promoters70/1397231
ataaatgtatttcact

SEQ ID NO: 83189 - DNA, 16 bp, Unknown
  misc_feature (1)..( 16): Result.001 file - promoters70/1397231
aattatgtatattgtt

SEQ ID NO: 83190 - DNA, 16 bp, Unknown
  misc_feature (1)..( 16): Result.001 file - promoters70/1397231
agttttgtattatcaa

SEQ ID NO: 83191 - DNA, 16 bp, Unknown
  misc_feature (1)..( 16): Result.001 file - promoters70/1397231
ataaaagtataaaaaa

SEQ ID NO: 83192 - DNA, 16 bp, Unknown
  misc_feature (1)..( 16): Result.001 file - promoters70/1397231
ttacttttaacaaaac

SEQ ID NO: 83193 - DNA, 16 bp, Unknown
  misc_feature (1)..( 16): Result.001 file - promoters70/1397231
aggctagatacaaaac

SEQ ID NO: 83194 - DNA, 8 bp, Unknown
  misc_feature (1)..( 8): Result.001 file - promoters70/1397231
ataaaaaa

SEQ ID NO: 83195 - DNA, 8 bp, Unknown
  misc_feature (1)..( 8): Result.001 file - promoters70/1397231
tcaaaaaa

SEQ ID NO: 83196 - DNA, 8 bp, Unknown
  misc_feature (1)..( 8): Result.001 file - promoters70/1397231
agaaaaaa

SEQ ID NO: 83197 - DNA, 8 bp, Unknown
  misc_feature (1)..( 8): Result.001 file - promoters70/1397231
ataaaaat

SEQ ID NO: 83198 - DNA, 9 bp, Unknown
  misc_feature (1)..( 9): Result.001 file - promoters70/1397231
agaaacaaa

SEQ ID NO: 83199 - DNA, 9 bp, Unknown
  misc_feature (1)..( 9): Result.001 file - promoters70/1397231
aaaataaat

SEQ ID NO: 83200 - DNA, 10 bp, Unknown
  misc_feature (1)..( 10): Result.001 file - promoters70/1397231
ctatatgctt

SEQ ID NO: 83201 - DNA, 10 bp, Unknown
  misc_feature (1)..( 10): Result.001 file - promoters70/1397231
atatatgtct

SEQ ID NO: 83202 - DNA, 10 bp, Unknown
  misc_feature (1)..( 10): Result.001 file - promoters70/1397231
tcatattctt

SEQ ID NO: 83203 - DNA, 10 bp, Unknown
  misc_feature (1)..( 10): Result.001 file - promoters70/1397231
ttatatataa

SEQ ID NO: 83204 - DNA, 10 bp, Unknown
  misc_feature (1)..( 10): Result.001 file - promoters70/1397231
ttaaatataa

SEQ ID NO: 83205 - DNA, 10 bp, Unknown
  misc_feature (1)..( 10): Result.001 file - promoters70/1397263
gcatattttg

SEQ ID NO: 83206 - DNA, 11 bp, Unknown
  misc_feature (1)..( 11): Result.001 file - promoters70/1397263
aaaaatcaaag

SEQ ID NO: 83207 - DNA, 11 bp, Unknown
  misc_feature (1)..( 11): Result.001 file - promoters70/1397263
atacatcaaat

SEQ ID NO: 83208 - DNA, 11 bp, Unknown
  misc_feature (1)..( 11): Result.001 file - promoters70/1397263
gaatatcaaag

SEQ ID NO: 83209 - DNA, 11 bp, Unknown
  misc_feature (1)..( 11): Result.001 file - promoters70/1397263
atacaccaata

SEQ ID NO: 83210 - DNA, 11 bp, Unknown
  misc_feature (1)..( 11): Result.001 file - promoters70/1397263
atttatgaaaa

SEQ ID NO: 83211 - DNA, 11 bp, Unknown
  misc_feature (1)..( 11): Result.001 file - promoters70/1397263
tattatcaatg

SEQ ID NO: 83212 - DNA, 10 bp, Unknown
  misc_feature (1)..( 10): Result.001 file - promoters70/1397263
ttaaacgtat

SEQ ID NO: 83213 - DNA, 10 bp, Unknown
  misc_feature (1)..( 10): Result.001 file - promoters70/1397263
agaaaagtaa

SEQ ID NO: 83214 - DNA, 10 bp, Unknown
  misc_feature (1)..( 10): Result.001 file - promoters70/1397263
aataaattaa

SEQ ID NO: 83215 - DNA, 10 bp, Unknown
  misc_feature (1)..( 10): Result.001 file - promoters70/1397263
agaaaaataa

SEQ ID NO: 83216 - DNA, 10 bp, Unknown
  misc_feature (1)..( 10): Result.001 file - promoters70/1397263
tgaaaaaata

SEQ ID NO: 83217 - DNA, 10 bp, Unknown
  misc_feature (1)..( 10): Result.001 file - promoters70/1397263
ttaaagatat

SEQ ID NO: 83218 - DNA, 10 bp, Unknown
  misc_feature (1)..( 10): Result.001 file - promoters70/1397263
tcaaaattat

SEQ ID NO: 83219 - DNA, 17 bp, Unknown
  misc_feature (1)..( 17): Result.001 file - promoters70/1397263
ggaaattattttaacaa

SEQ ID NO: 83220 - DNA, 17 bp, Unknown
  misc_feature (1)..( 17): Result.001 file - promoters70/1397263
gttatttattttagatt

SEQ ID NO: 83221 - DNA, 17 bp, Unknown
  misc_feature (1)..( 17): Result.001 file - promoters70/1397263
ggaaattgtttcgaaac

SEQ ID NO: 83222 - DNA, 17 bp, Unknown
  misc_feature (1)..( 17): Result.001 file - promoters70/1397263
tttttttttttttacag

SEQ ID NO: 83223 - DNA, 17 bp, Unknown
  misc_feature (1)..( 17): Result.001 file - promoters70/1397263
ggaatttggaaaagacc

SEQ ID NO: 83224 - DNA, 17 bp, Unknown
  misc_feature (1)..( 17): Result.001 file - promoters70/1397263
ccattttcgtttaacag

SEQ ID NO: 83225 - DNA, 11 bp, Unknown
  misc_feature (1)..( 11): Result.001 file - promoters70/1397263
ttcaaaaaaga

SEQ ID NO: 83226 - DNA, 11 bp, Unknown
  misc_feature (1)..( 11): Result.001 file - promoters70/1397263
gttaaaaaagt

SEQ ID NO: 83227 - DNA, 11 bp, Unknown
  misc_feature (1)..( 11): Result.001 file - promoters70/1397263
ttagtaaaaga

SEQ ID NO: 83228 - DNA, 11 bp, Unknown
  misc_feature (1)..( 11): Result.001 file - promoters70/1397263
ttcaaaaaaaa

SEQ ID NO: 83229 - DNA, 11 bp, Unknown
  misc_feature (1)..( 11): Result.001 file - promoters70/1397263
tataataaact

SEQ ID NO: 83230 - DNA, 11 bp, Unknown
  misc_feature (1)..( 11): Result.001 file - promoters70/1397263
cagaaaatagt

SEQ ID NO: 83231 - DNA, 10 bp, Unknown
  misc_feature (1)..( 10): Result.001 file - promoters70/1397263
tgcccaaact

SEQ ID NO: 83232 - DNA, 10 bp, Unknown
  misc_feature (1)..( 10): Result.001 file - promoters70/1397263
ggcccaataa

SEQ ID NO: 83233 - DNA, 10 bp, Unknown
  misc_feature (1)..( 10): Result.001 file - promoters70/1397263
ggcccaataa

SEQ ID NO: 83234 - DNA, 10 bp, Unknown
  misc_feature (1)..( 10): Result.001 file - promoters70/1397263
ggcccagtaa

SEQ ID NO: 83235 - DNA, 10 bp, Unknown
  misc_feature (1)..( 10): Result.001 file - promoters70/1397263
agcccaaaac

SEQ ID NO: 83236 - DNA, 10 bp, Unknown
  misc_feature (1)..( 10): Result.001 file - promoters70/1397263
ggcccaccgg

SEQ ID NO: 83237 - DNA, 12 bp, Unknown
  misc_feature (1)..( 12): Result.001 file - promoters70/1397263
gtaaaactaaaa

SEQ ID NO: 83238 - DNA, 12 bp, Unknown
  misc_feature (1)..( 12): Result.001 file - promoters70/1397263
tgcaaaccaaac

SEQ ID NO: 83239 - DNA, 12 bp, Unknown
  misc_feature (1)..( 12): Result.001 file - promoters70/1397263
gagtaactaaaa

SEQ ID NO: 83240 - DNA, 12 bp, Unknown
  misc_feature (1)..( 12): Result.001 file - promoters70/1397263
ggcaacccattc

SEQ ID NO: 83241 - DNA, 12 bp, Unknown
  misc_feature (1)..( 12): Result.001 file - promoters70/1397263
caccaccgattt

SEQ ID NO: 83242 - DNA, 12 bp, Unknown
  misc_feature (1)..( 12): Result.001 file - promoters70/1397350
ggcaacataaaa

SEQ ID NO: 83243 - DNA, 13 bp, Unknown
  misc_feature (1)..( 13): Result.001 file - promoters70/1397350
gtctcatggattc

SEQ ID NO: 83244 - DNA, 13 bp, Unknown
  misc_feature (1)..( 13): Result.001 file - promoters70/1397350
gtttcaaggattc

SEQ ID NO: 83245 - DNA, 13 bp, Unknown
  misc_feature (1)..( 13): Result.001 file - promoters70/1397461
gtctgatggataa

SEQ ID NO: 83246 - DNA, 12 bp, Unknown
  misc_feature (1)..( 12): Result.001 file - promoters70/1397461
catacaaattgc

SEQ ID NO: 83247 - DNA, 12 bp, Unknown
  misc_feature (1)..( 12): Result.001 file - promoters70/1397461
tttacaaattta

SEQ ID NO: 83248 - DNA, 12 bp, Unknown
  misc_feature (1)..( 12): Result.001 file - promoters70/1397461
tacacaaattaa

SEQ ID NO: 83249 - DNA, 12 bp, Unknown
  misc_feature (1)..( 12): Result.001 file - promoters70/1397461
aagaaaaaatgc

SEQ ID NO: 83250 - DNA, 12 bp, Unknown
  misc_feature (1)..( 12): Result.001 file - promoters70/1397461
aataaaaaaggg

SEQ ID NO: 83251 - DNA, 12 bp, Unknown
  misc_feature (1)..( 12): Result.001 file - promoters70/1397461
aataaaatgaat

SEQ ID NO: 83252 - DNA, 10 bp, Unknown
  misc_feature (1)..( 10): Result.001 file - promoters70/1397461
ctttttgttt

SEQ ID NO: 83253 - DNA, 10 bp, Unknown
  misc_feature (1)..( 10): Result.001 file - promoters70/1397461
tattttgttt

SEQ ID NO: 83254 - DNA, 10 bp, Unknown
  misc_feature (1)..( 10): Result.001 file - promoters70/1397461
ctttttgatg

SEQ ID NO: 83255 - DNA, 10 bp, Unknown
  misc_feature (1)..( 10): Result.001 file - promoters70/1397461
atttatgtaa

SEQ ID NO: 83256 - DNA, 10 bp, Unknown
  misc_feature (1)..( 10): Result.001 file - promoters70/1397461
gtgtttcttt

SEQ ID NO: 83257 - DNA, 10 bp, Unknown
  misc_feature (1)..( 10): Result.001 file - promoters70/1397461
cttattgggc

SEQ ID NO: 83258 - DNA, 8 bp, Unknown
  misc_feature (1)..( 8): Result.001 file - promoters70/1397461
tcaaaaat

SEQ ID NO: 83259 - DNA, 8 bp, Unknown
  misc_feature (1)..( 8): Result.001 file - promoters70/1397461
tcagaaag

SEQ ID NO: 83260 - DNA, 8 bp, Unknown
  misc_feature (1)..( 8): Result.001 file - promoters70/1397461
caaaaaat

SEQ ID NO: 83261 - DNA, 8 bp, Unknown
  misc_feature (1)..( 8): Result.001 file - promoters70/1397461
tcaaaaca

SEQ ID NO: 83262 - DNA, 8 bp, Unknown
  misc_feature (1)..( 8): Result.001 file - promoters70/1397461
cgaaaatc

SEQ ID NO: 83263 - DNA, 9 bp, Unknown
  misc_feature (1)..( 9): Result.001 file - promoters70/1397500
ccaacaaat

SEQ ID NO: 83264 - DNA, 8 bp, Unknown
  misc_feature (1)..( 8): Result.001 file - promoters70/1397500
aattatat

SEQ ID NO: 83265 - DNA, 8 bp, Unknown
  misc_feature (1)..( 8): Result.001 file - promoters70/1397500
aatcataa

SEQ ID NO: 83266 - DNA, 8 bp, Unknown
  misc_feature (1)..( 8): Result.001 file - promoters70/1397500
aatgatat

SEQ ID NO: 83267 - DNA, 8 bp, Unknown
  misc_feature (1)..( 8): Result.001 file - promoters70/1397500
aaatggag

SEQ ID NO: 83268 - DNA, 8 bp, Unknown
  misc_feature (1)..( 8): Result.001 file - promoters70/1397500
aaatggtt

SEQ ID NO: 83269 - DNA, 8 bp, Unknown
  misc_feature (1)..( 8): Result.001 file - promoters70/1397500
caatagag

SEQ ID NO: 83270 - DNA, 10 bp, Unknown
  misc_feature (1)..( 10): Result.001 file - promoters70/1397500
cacttgaatt

SEQ ID NO: 83271 - DNA, 10 bp, Unknown
  misc_feature (1)..( 10): Result.001 file - promoters70/1397500
aaattgaatc

SEQ ID NO: 83272 - DNA, 10 bp, Unknown
  misc_feature (1)..( 10): Result.001 file - promoters70/1397500
aaattaaatc

SEQ ID NO: 83273 - DNA, 9 bp, Unknown
  misc_feature (1)..( 9): Result.001 file - promoters70/1397500
ttataatga

SEQ ID NO: 83274 - DNA, 9 bp, Unknown
  misc_feature (1)..( 9): Result.001 file - promoters70/1397500
ttaaaatat

SEQ ID NO: 83275 - DNA, 9 bp, Unknown
  misc_feature (1)..( 9): Result.001 file - promoters70/1397500
atataaaaa

SEQ ID NO: 83276 - DNA, 9 bp, Unknown
  misc_feature (1)..( 9): Result.001 file - promoters70/1397500
gctgctaat

SEQ ID NO: 83277 - DNA, 9 bp, Unknown
  misc_feature (1)..( 9): Result.001 file - promoters70/1397500
agtgccaat

SEQ ID NO: 83278 - DNA, 9 bp, Unknown
  misc_feature (1)..( 9): Result.001 file - promoters70/1397500
agttccaac

SEQ ID NO: 83279 - DNA, 10 bp, Unknown
  misc_feature (1)..( 10): Result.001 file - promoters70/1397500
tcattattat

SEQ ID NO: 83280 - DNA, 10 bp, Unknown
  misc_feature (1)..( 10): Result.001 file - promoters70/1397500
cgcttagtat

SEQ ID NO: 83281 - DNA, 10 bp, Unknown
  misc_feature (1)..( 10): Result.001 file - promoters70/1397500
tcactattag

SEQ ID NO: 83282 - DNA, 9 bp, Unknown
  misc_feature (1)..( 9): Result.001 file - promoters70/1397500
attattatt

SEQ ID NO: 83283 - DNA, 9 bp, Unknown
  misc_feature (1)..( 9): Result.001 file - promoters70/1397500
ataattatt

SEQ ID NO: 83284 - DNA, 9 bp, Unknown
  misc_feature (1)..( 9): Result.001 file - promoters70/1397500
ataaatata

SEQ ID NO: 83285 - DNA, 10 bp, Unknown
  misc_feature (1)..( 10): Result.001 file - promoters70/1397500
ttttttataa

SEQ ID NO: 83286 - DNA, 10 bp, Unknown
  misc_feature (1)..( 10): Result.001 file - promoters70/1397500
ggaattataa

SEQ ID NO: 83287 - DNA, 10 bp, Unknown
  misc_feature (1)..( 10): Result.001 file - promoters70/1397500
taaatcatat

SEQ ID NO: 83288 - DNA, 10 bp, Unknown
  misc_feature (1)..( 10): Result.001 file - promoters70/1397500
taaatcaaat

SEQ ID NO: 83289 - DNA, 7 bp, Unknown
  misc_feature (1)..( 7): Result.001 file - promoters70/1397500
atttttg

SEQ ID NO: 83290 - DNA, 7 bp, Unknown
  misc_feature (1)..( 7): Result.001 file - promoters70/1397500
atttttt

SEQ ID NO: 83291 - DNA, 7 bp, Unknown
  misc_feature (1)..( 7): Result.001 file - promoters70/1397500
ctttttt

SEQ ID NO: 83292 - DNA, 9 bp, Unknown
  misc_feature (1)..( 9): Result.001 file - promoters70/1397500
ttcgacaaa

SEQ ID NO: 83293 - DNA, 9 bp, Unknown
  misc_feature (1)..( 9): Result.001 file - promoters70/1397500
ttcaacaat

SEQ ID NO: 83294 - DNA, 9 bp, Unknown
  misc_feature (1)..( 9): Result.001 file - promoters70/1397500
gaaaacaat

SEQ ID NO: 83295 - DNA, 8 bp, Unknown
  misc_feature (1)..( 8): Result.001 file - promoters70/1397500
caaccaat

SEQ ID NO: 83296 - DNA, 8 bp, Unknown
  misc_feature (1)..( 8): Result.001 file - promoters70/1397500
caaccaaa

SEQ ID NO: 83297 - DNA, 8 bp, Unknown
  misc_feature (1)..( 8): Result.001 file - promoters70/1397500
aaactaaa

SEQ ID NO: 83298 - DNA, 8 bp, Unknown
  misc_feature (1)..( 8): Result.001 file - promoters70/1397500
aaacaatt

SEQ ID NO: 83299 - DNA, 8 bp, Unknown
  misc_feature (1)..( 8): Result.001 file - promoters70/1397500
aaataatt

SEQ ID NO: 83300 - DNA, 8 bp, Unknown
  misc_feature (1)..( 8): Result.001 file - promoters70/1397500
caacaata

SEQ ID NO: 83301 - DNA, 10 bp, Unknown
  misc_feature (1)..( 10): Result.001 file - promoters70/1397500
attttatgaa

SEQ ID NO: 83302 - DNA, 10 bp, Unknown
  misc_feature (1)..( 10): Result.001 file - promoters70/1397500
tttttgtgac

SEQ ID NO: 83303 - DNA, 10 bp, Unknown
  misc_feature (1)..( 10): Result.001 file - promoters70/1397500
tttttgtgac

SEQ ID NO: 83304 - DNA, 9 bp, Unknown
  misc_feature (1)..( 9): Result.001 file - promoters70/1397500
tcatattac

SEQ ID NO: 83305 - DNA, 9 bp, Unknown
  misc_feature (1)..( 9): Result.001 file - promoters70/1397500
acatatttt

SEQ ID NO: 83306 - DNA, 9 bp, Unknown
  misc_feature (1)..( 9): Result.001 file - promoters70/1397700
atatattca

SEQ ID NO: 83307 - DNA, 7 bp, Unknown
  misc_feature (1)..( 7): Result.001 file - promoters70/1397700
atgtttg

SEQ ID NO: 83308 - DNA, 7 bp, Unknown
  misc_feature (1)..( 7): Result.001 file - promoters70/1397700
gtgtttg

SEQ ID NO: 83309 - DNA, 7 bp, Unknown
  misc_feature (1)..( 7): Result.001 file - promoters70/1397700
gtgattg

SEQ ID NO: 83310 - DNA, 8 bp, Unknown
  misc_feature (1)..( 8): Result.001 file - promoters70/1397700
atttcaaa

SEQ ID NO: 83311 - DNA, 8 bp, Unknown
  misc_feature (1)..( 8): Result.001 file - promoters70/1397700
attacaaa

SEQ ID NO: 83312 - DNA, 8 bp, Unknown
  misc_feature (1)..( 8): Result.001 file - promoters70/1397700
ctttaaaa

SEQ ID NO: 83313 - DNA, 11 bp, Unknown
  misc_feature (1)..( 11): Result.001 file - promoters70/1397700
taaagtgaagt

SEQ ID NO: 83314 - DNA, 11 bp, Unknown
  misc_feature (1)..( 11): Result.001 file - promoters70/1397700
taaagtcaaaa

SEQ ID NO: 83315 - DNA, 11 bp, Unknown
  misc_feature (1)..( 11): Result.001 file - promoters70/1397700
aaaaatcaaaa

SEQ ID NO: 83316 - DNA, 10 bp, Unknown
  misc_feature (1)..( 10): Result.001 file - promoters70/1397700
gaagtcatat

SEQ ID NO: 83317 - DNA, 10 bp, Unknown
  misc_feature (1)..( 10): Result.001 file - promoters70/1397700
aaagtcaaaa

SEQ ID NO: 83318 - DNA, 10 bp, Unknown
  misc_feature (1)..( 10): Result.001 file - promoters70/1397753
aaaatcaaaa

SEQ ID NO: 83319 - DNA, 12 bp, Unknown
  misc_feature (1)..( 12): Result.001 file - promoters70/1397753
ttctcaaattgt

SEQ ID NO: 83320 - DNA, 12 bp, Unknown
  misc_feature (1)..( 12): Result.001 file - promoters70/1397753
ttctaaaataat

SEQ ID NO: 83321 - DNA, 12 bp, Unknown
  misc_feature (1)..( 12): Result.001 file - promoters70/1397821
gaagaaaaaaat

SEQ ID NO: 83322 - DNA, 10 bp, Unknown
  misc_feature (1)..( 10): Result.001 file - promoters70/1397821
gaattgatgt

SEQ ID NO: 83323 - DNA, 10 bp, Unknown
  misc_feature (1)..( 10): Result.001 file - promoters70/1397821
gaattgatta

SEQ ID NO: 83324 - DNA, 10 bp, Unknown
  misc_feature (1)..( 10): Result.001 file - promoters70/1397821
tctttggtta

SEQ ID NO: 83325 - DNA, 10 bp, Unknown
  misc_feature (1)..( 10): Result.001 file - promoters70/1397821
taattcattg

SEQ ID NO: 83326 - DNA, 11 bp, Unknown
  misc_feature (1)..( 11): Result.001 file - promoters70/1397821
gtcttttcaaa

SEQ ID NO: 83327 - DNA, 11 bp, Unknown
  misc_feature (1)..( 11): Result.001 file - promoters70/1397821
gtccttttacc

SEQ ID NO: 83328 - DNA, 11 bp, Unknown
  misc_feature (1)..( 11): Result.001 file - promoters70/1397821
atcttttcaat

SEQ ID NO: 83329 - DNA, 11 bp, Unknown
  misc_feature (1)..( 11): Result.001 file - promoters70/1398124
ctattttaata

SEQ ID NO: 83330 - DNA, 7 bp, Unknown
  misc_feature (1)..( 7): Result.001 file - promoters70/1398124
aatgttg

SEQ ID NO: 83331 - DNA, 7 bp, Unknown
  misc_feature (1)..( 7): Result.001 file - promoters70/1398124
aatattg

SEQ ID NO: 83332 - DNA, 7 bp, Unknown
  misc_feature (1)..( 7): Result.001 file - promoters70/1398124
aattttg

SEQ ID NO: 83333 - DNA, 8 bp, Unknown
  misc_feature (1)..( 8): Result.001 file - promoters70/1398124
ttatgtat

SEQ ID NO: 83334 - DNA, 8 bp, Unknown
  misc_feature (1)..( 8): Result.001 file - promoters70/1398124
ttaagtag

SEQ ID NO: 83335 - DNA, 8 bp, Unknown
  misc_feature (1)..( 8): Result.001 file - promoters70/1398337
ataattag

SEQ ID NO: 83336 - DNA, 11 bp, Unknown
  misc_feature (1)..( 11): Result.001 file - promoters70/1398337
taaacacaaac

SEQ ID NO: 83337 - DNA, 11 bp, Unknown
  misc_feature (1)..( 11): Result.001 file - promoters70/1398337
gaaacaaaaac

SEQ ID NO: 83338 - DNA, 11 bp, Unknown
  misc_feature (1)..( 11): Result.001 file - promoters70/1398545
gaaagaaagct

SEQ ID NO: 83339 - DNA, 10 bp, Unknown
  misc_feature (1)..( 10): Result.001 file - promoters70/1398545
tataataaac

SEQ ID NO: 83340 - DNA, 10 bp, Unknown
  misc_feature (1)..( 10): Result.001 file - promoters70/1398545
tgtaataata

SEQ ID NO: 83341 - DNA, 10 bp, Unknown
  misc_feature (1)..( 10): Result.001 file - promoters70/1398545
gttaaaaaag

SEQ ID NO: 83342 - DNA, 10 bp, Unknown
  misc_feature (1)..( 10): Result.001 file - promoters70/1398545
cataataatg

SEQ ID NO: 83343 - DNA, 10 bp, Unknown
  misc_feature (1)..( 10): Result.001 file - promoters70/1398545
attaataaaa

SEQ ID NO: 83344 - DNA, 10 bp, Unknown
  misc_feature (1)..( 10): Result.001 file - promoters70/1398545
tataaaaaaa

SEQ ID NO: 83345 - DNA, 10 bp, Unknown
  misc_feature (1)..( 10): Result.001 file - promoters70/1398545
attagtaaaa

SEQ ID NO: 83346 - DNA, 14 bp, Unknown
  misc_feature (1)..( 14): Result.001 file - promoters70/1398545
aactcttttgagaa

SEQ ID NO: 83347 - DNA, 14 bp, Unknown
  misc_feature (1)..( 14): Result.001 file - promoters70/1398545
aactcttttgaagt

SEQ ID NO: 83348 - DNA, 14 bp, Unknown
  misc_feature (1)..( 14): Result.001 file - promoters70/1398545
tactatttatacat

SEQ ID NO: 83349 - DNA, 14 bp, Unknown
  misc_feature (1)..( 14): Result.001 file - promoters70/1398545
atttcttttcacat

SEQ ID NO: 83350 - DNA, 14 bp, Unknown
  misc_feature (1)..( 14): Result.001 file - promoters70/1398545
gcctattaataaaa

SEQ ID NO: 83351 - DNA, 14 bp, Unknown
  misc_feature (1)..( 14): Result.001 file - promoters70/1398545
ttcttataaaaaaa

SEQ ID NO: 83352 - DNA, 14 bp, Unknown
  misc_feature (1)..( 14): Result.001 file - promoters70/1398545
tttgattagtaaaa

SEQ ID NO: 83353 - DNA, 11 bp, Unknown
  misc_feature (1)..( 11): Result.001 file - promoters70/1398545
ttgagaaaagt

SEQ ID NO: 83354 - DNA, 11 bp, Unknown
  misc_feature (1)..( 11): Result.001 file - promoters70/1398545
atgaaaaaata

SEQ ID NO: 83355 - DNA, 11 bp, Unknown
  misc_feature (1)..( 11): Result.001 file - promoters70/1398545
ttcaaaaaaat

SEQ ID NO: 83356 - DNA, 11 bp, Unknown
  misc_feature (1)..( 11): Result.001 file - promoters70/1398545
cttaaagatat

SEQ ID NO: 83357 - DNA, 11 bp, Unknown
  misc_feature (1)..( 11): Result.001 file - promoters70/1398545
ttcataaaata

SEQ ID NO: 83358 - DNA, 11 bp, Unknown
  misc_feature (1)..( 11): Result.001 file - promoters70/1398545
gtcaaacaaat

SEQ ID NO: 83359 - DNA, 12 bp, Unknown
  misc_feature (1)..( 12): Result.001 file - promoters70/1398545
aaggcccaataa

SEQ ID NO: 83360 - DNA, 12 bp, Unknown
  misc_feature (1)..( 12): Result.001 file - promoters70/1398545
aaagcccattaa

SEQ ID NO: 83361 - DNA, 12 bp, Unknown
  misc_feature (1)..( 12): Result.001 file - promoters70/1398545
aaggcccaaaac

SEQ ID NO: 83362 - DNA, 12 bp, Unknown
  misc_feature (1)..( 12): Result.001 file - promoters70/1398545
atggcccagtaa

SEQ ID NO: 83363 - DNA, 12 bp, Unknown
  misc_feature (1)..( 12): Result.001 file - promoters70/1398545
aaagcccaaaac

SEQ ID NO: 83364 - DNA, 12 bp, Unknown
  misc_feature (1)..( 12): Result.001 file - promoters70/1398545
tcggcccaccgg

SEQ ID NO: 83365 - DNA, 15 bp, Unknown
  misc_feature (1)..( 15): Result.001 file - promoters70/1398545
tctctcgtataattc

SEQ ID NO: 83366 - DNA, 15 bp, Unknown
  misc_feature (1)..( 15): Result.001 file - promoters70/1398545
aaattaaactaattc

SEQ ID NO: 83367 - DNA, 15 bp, Unknown
  misc_feature (1)..( 15): Result.001 file - promoters70/1398545
agtaacaactaattt

SEQ ID NO: 83368 - DNA, 15 bp, Unknown
  misc_feature (1)..( 15): Result.001 file - promoters70/1398545
cacaagaactaaact

SEQ ID NO: 83369 - DNA, 15 bp, Unknown
  misc_feature (1)..( 15): Result.001 file - promoters70/1398545
agagagatctagggt

SEQ ID NO: 83370 - DNA, 15 bp, Unknown
  misc_feature (1)..( 15): Result.001 file - promoters70/1398573
agagacatcaatttt

SEQ ID NO: 83371 - DNA, 9 bp, Unknown
  misc_feature (1)..( 9): Result.001 file - promoters70/1398573
atttagaaa

SEQ ID NO: 83372 - DNA, 9 bp, Unknown
  misc_feature (1)..( 9): Result.001 file - promoters70/1398573
caatagaaa

SEQ ID NO: 83373 - DNA, 9 bp, Unknown
  misc_feature (1)..( 9): Result.001 file - promoters70/1398573
attttgaaa

SEQ ID NO: 83374 - DNA, 8 bp, Unknown
  misc_feature (1)..( 8): Result.001 file - promoters70/1398573
aacagcat

SEQ ID NO: 83375 - DNA, 8 bp, Unknown
  misc_feature (1)..( 8): Result.001 file - promoters70/1398573
aacaacat

SEQ ID NO: 83376 - DNA, 8 bp, Unknown
  misc_feature (1)..( 8): Result.001 file - promoters70/1399325
aacgtatg

SEQ ID NO: 83377 - DNA, 11 bp, Unknown
  misc_feature (1)..( 11): Result.001 file - promoters70/1399325
aaagtaattta

SEQ ID NO: 83378 - DNA, 11 bp, Unknown
  misc_feature (1)..( 11): Result.001 file - promoters70/1399325
acagtagtttc

SEQ ID NO: 83379 - DNA, 11 bp, Unknown
  misc_feature (1)..( 11): Result.001 file - promoters70/1399325
aaattaaatca

SEQ ID NO: 83380 - DNA, 11 bp, Unknown
  misc_feature (1)..( 11): Result.001 file - promoters70/1399325
aaaataaacta

SEQ ID NO: 83381 - DNA, 11 bp, Unknown
  misc_feature (1)..( 11): Result.001 file - promoters70/1399325
tgttgagtttc

SEQ ID NO: 83382 - DNA, 10 bp, Unknown
  misc_feature (1)..( 10): Result.001 file - promoters70/1399325
taaattttaa

SEQ ID NO: 83383 - DNA, 10 bp, Unknown
  misc_feature (1)..( 10): Result.001 file - promoters70/1399325
caaatttgtt

SEQ ID NO: 83384 - DNA, 10 bp, Unknown
  misc_feature (1)..( 10): Result.001 file - promoters70/1399325
taaatatgtt

SEQ ID NO: 83385 - DNA, 10 bp, Unknown
  misc_feature (1)..( 10): Result.001 file - promoters70/1399325
taaataacat

SEQ ID NO: 83386 - DNA, 11 bp, Unknown
  misc_feature (1)..( 11): Result.001 file - promoters70/1399325
atagttaagtc

SEQ ID NO: 83387 - DNA, 11 bp, Unknown
  misc_feature (1)..( 11): Result.001 file - promoters70/1399325
ataattaaact

SEQ ID NO: 83388 - DNA, 11 bp, Unknown
  misc_feature (1)..( 11): Result.001 file - promoters70/1399325
cgggttacgtc

SEQ ID NO: 83389 - DNA, 11 bp, Unknown
  misc_feature (1)..( 11): Result.001 file - promoters70/1399345
aaaattaaatc

SEQ ID NO: 83390 - DNA, 12 bp, Unknown
  misc_feature (1)..( 12): Result.001 file - promoters70/1399345
tataaacttttc

SEQ ID NO: 83391 - DNA, 12 bp, Unknown
  misc_feature (1)..( 12): Result.001 file - promoters70/1399345
aaaaaagttttt

SEQ ID NO: 83392 - DNA, 12 bp, Unknown
  misc_feature (1)..( 12): Result.001 file - promoters70/1399345
actttagttttg

SEQ ID NO: 83393 - DNA, 12 bp, Unknown
  misc_feature (1)..( 12): Result.001 file - promoters70/1399345
actagggttttt

SEQ ID NO: 83394 - DNA, 13 bp, Unknown
  misc_feature (1)..( 13): Result.001 file - promoters70/1399345
ttgaacgttgttg

SEQ ID NO: 83395 - DNA, 13 bp, Unknown
  misc_feature (1)..( 13): Result.001 file - promoters70/1399726
aaaaaagtgttga

SEQ ID NO: 83396 - DNA, 11 bp, Unknown
  misc_feature (1)..( 11): Result.001 file - promoters70/1399726
ccaattcattt

SEQ ID NO: 83397 - DNA, 11 bp, Unknown
  misc_feature (1)..( 11): Result.001 file - promoters70/1399726
ccaattaattt

SEQ ID NO: 83398 - DNA, 11 bp, Unknown
  misc_feature (1)..( 11): Result.001 file - promoters70/1399726
gtaataaatga

SEQ ID NO: 83399 - DNA, 8 bp, Unknown
  misc_feature (1)..( 8): Result.001 file - promoters70/1399726
agtaataa

SEQ ID NO: 83400 - DNA, 8 bp, Unknown
  misc_feature (1)..( 8): Result.001 file - promoters70/1399726
agtgataa

SEQ ID NO: 83401 - DNA, 8 bp, Unknown
  misc_feature (1)..( 8): Result.001 file - promoters70/1399726
aatgataa

SEQ ID NO: 83402 - DNA, 8 bp, Unknown
  misc_feature (1)..( 8): Result.001 file - promoters70/1399726
caaattct

SEQ ID NO: 83403 - DNA, 8 bp, Unknown
  misc_feature (1)..( 8): Result.001 file - promoters70/1399726
caaattaa

SEQ ID NO: 83404 - DNA, 8 bp, Unknown
  misc_feature (1)..( 8): Result.001 file - promoters70/1399726
caaactct

SEQ ID NO: 83405 - DNA, 13 bp, Unknown
  misc_feature (1)..( 13): Result.001 file - promoters70/1399726
gtcttacacaaat

SEQ ID NO: 83406 - DNA, 13 bp, Unknown
  misc_feature (1)..( 13): Result.001 file - promoters70/1399726
gatcaacaaaaat

SEQ ID NO: 83407 - DNA, 13 bp, Unknown
  misc_feature (1)..( 13): Result.001 file - promoters70/1399726
ctttcacaccaaa

SEQ ID NO: 83408 - DNA, 8 bp, Unknown
  misc_feature (1)..( 8): Result.001 file - promoters70/1399726
aagcaaaa

SEQ ID NO: 83409 - DNA, 8 bp, Unknown
  misc_feature (1)..( 8): Result.001 file - promoters70/1399726
aagaaaaa

SEQ ID NO: 83410 - DNA, 8 bp, Unknown
  misc_feature (1)..( 8): Result.001 file - promoters70/1399726
aaacaaag

SEQ ID NO: 83411 - DNA, 11 bp, Unknown
  misc_feature (1)..( 11): Result.001 file - promoters70/1399726
aaaatgaaaaa

SEQ ID NO: 83412 - DNA, 11 bp, Unknown
  misc_feature (1)..( 11): Result.001 file - promoters70/1399726
aaaaagaaaac

SEQ ID NO: 83413 - DNA, 11 bp, Unknown
  misc_feature (1)..( 11): Result.001 file - promoters70/1399726
ataataaaaaa

SEQ ID NO: 83414 - DNA, 8 bp, Unknown
  misc_feature (1)..( 8): Result.001 file - promoters70/1399726
taaagtac

SEQ ID NO: 83415 - DNA, 8 bp, Unknown
  misc_feature (1)..( 8): Result.001 file - promoters70/1399726
caaaatac

SEQ ID NO: 83416 - DNA, 8 bp, Unknown
  misc_feature (1)..( 8): Result.001 file - promoters70/1399726
caaaattt

SEQ ID NO: 83417 - DNA, 8 bp, Unknown
  misc_feature (1)..( 8): Result.001 file - promoters70/1399726
aaaacatc

SEQ ID NO: 83418 - DNA, 8 bp, Unknown
  misc_feature (1)..( 8): Result.001 file - promoters70/1399726
aaaacaaa

SEQ ID NO: 83419 - DNA, 8 bp, Unknown
  misc_feature (1)..( 8): Result.001 file - promoters70/1399726
gaaagaaa

SEQ ID NO: 83420 - DNA, 11 bp, Unknown
  misc_feature (1)..( 11): Result.001 file - promoters70/1399726
aaaaacgaaaa

SEQ ID NO: 83421 - DNA, 11 bp, Unknown
  misc_feature (1)..( 11): Result.001 file - promoters70/1399726
aaaaaagaaga

SEQ ID NO: 83422 - DNA, 11 bp, Unknown
  misc_feature (1)..( 11): Result.001 file - promoters70/1411616
aaaaaagaaaa

SEQ ID NO: 83423 - DNA, 8 bp, Unknown
  misc_feature (1)..( 8): Result.001 file - promoters70/1411616
taaaacag

SEQ ID NO: 83424 - DNA, 8 bp, Unknown
  misc_feature (1)..( 8): Result.001 file - promoters70/1411616
aaaatcag

SEQ ID NO: 83425 - DNA, 8 bp, Unknown
  misc_feature (1)..( 8): Result.001 file - promoters70/1413191
aaaatcct

SEQ ID NO: 83426 - DNA, 10 bp, Unknown
  misc_feature (1)..( 10): Result.001 file - promoters70/1413191
gtttcttaag

SEQ ID NO: 83427 - DNA, 10 bp, Unknown
  misc_feature (1)..( 10): Result.001 file - promoters70/1413191
cttttttatc

SEQ ID NO: 83428 - DNA, 10 bp, Unknown
  misc_feature (1)..( 10): Result.001 file - promoters70/1413191
aaatcttaat

SEQ ID NO: 83429 - DNA, 10 bp, Unknown
  misc_feature (1)..( 10): Result.001 file - promoters70/1413191
ttgtcttttt

SEQ ID NO: 83430 - DNA, 14 bp, Unknown
  misc_feature (1)..( 14): Result.001 file - promoters70/1413191
tgaggaaaaaaaac

SEQ ID NO: 83431 - DNA, 14 bp, Unknown
  misc_feature (1)..( 14): Result.001 file - promoters70/1413191
caaccaaaagaaat

SEQ ID NO: 83432 - DNA, 14 bp, Unknown
  misc_feature (1)..( 14): Result.001 file - promoters70/1413191
caatcaaaagccct

SEQ ID NO: 83433 - DNA, 14 bp, Unknown
  misc_feature (1)..( 14): Result.001 file - promoters70/1413191
atctctaaaggccc

SEQ ID NO: 83434 - DNA, 10 bp, Unknown
  misc_feature (1)..( 10): Result.001 file - promoters70/1413191
taaatgttgc

SEQ ID NO: 83435 - DNA, 10 bp, Unknown
  misc_feature (1)..( 10): Result.001 file - promoters70/1413191
tttatgttgt

SEQ ID NO: 83436 - DNA, 10 bp, Unknown
  misc_feature (1)..( 10): Result.001 file - promoters70/1413191
tttttgttga

SEQ ID NO: 83437 - DNA, 10 bp, Unknown
  misc_feature (1)..( 10): Result.001 file - promoters70/1413191
tgtctgttga

SEQ ID NO: 83438 - DNA, 7 bp, Unknown
  misc_feature (1)..( 7): Result.001 file - promoters70/1413191
atataaa

SEQ ID NO: 83439 - DNA, 7 bp, Unknown
  misc_feature (1)..( 7): Result.001 file - promoters70/1413191
atataaa

SEQ ID NO: 83440 - DNA, 7 bp, Unknown
  misc_feature (1)..( 7): Result.001 file - promoters70/1413191
atataag

SEQ ID NO: 83441 - DNA, 7 bp, Unknown
  misc_feature (1)..( 7): Result.001 file - promoters70/1441044
ctataaa

SEQ ID NO: 83442 - DNA, 13 bp, Unknown
  misc_feature (1)..( 13): Result.001 file - promoters70/1441044
tcaaatttttttt

SEQ ID NO: 83443 - DNA, 13 bp, Unknown
  misc_feature (1)..( 13): Result.001 file - promoters70/1441044
acaaacttttttt

SEQ ID NO: 83444 - DNA, 13 bp, Unknown
  misc_feature (1)..( 13): Result.001 file - promoters70/1441044
acaaacattaaga

SEQ ID NO: 83445 - DNA, 9 bp, Unknown
  misc_feature (1)..( 9): Result.001 file - promoters70/1441044
aactaaacc

SEQ ID NO: 83446 - DNA, 9 bp, Unknown
  misc_feature (1)..( 9): Result.001 file - promoters70/1441044
aactaaacc

SEQ ID NO: 83447 - DNA, 9 bp, Unknown
  misc_feature (1)..( 9): Result.001 file - promoters70/1441044
aactaatca

SEQ ID NO: 83448 - DNA, 7 bp, Unknown
  misc_feature (1)..( 7): Result.001 file - promoters70/1441044
aaataat

SEQ ID NO: 83449 - DNA, 7 bp, Unknown
  misc_feature (1)..( 7): Result.001 file - promoters70/1441044
aaacaat

SEQ ID NO: 83450 - DNA, 7 bp, Unknown
  misc_feature (1)..( 7): Result.001 file - promoters70/1441184
aaacaaa

SEQ ID NO: 83451 - DNA, 19 bp, Unknown
  misc_feature (1)..( 19): Result.001 file - promoters70/1441184
tatataaatcccttaaacc

SEQ ID NO: 83452 - DNA, 19 bp, Unknown
  misc_feature (1)..( 19): Result.001 file - promoters70/1441184
ataaataatctcttaaaac

SEQ ID NO: 83453 - DNA, 19 bp, Unknown
  misc_feature (1)..( 19): Result.001 file - promoters70/1441184
tatataaatccttcactcg

SEQ ID NO: 83454 - DNA, 19 bp, Unknown
  misc_feature (1)..( 19): Result.001 file - promoters70/1441184
tataaacaaaccttaaacc

SEQ ID NO: 83455 - DNA, 19 bp, Unknown
  misc_feature (1)..( 19): Result.001 file - promoters70/1441184
tgtataaaaacacttgcga

SEQ ID NO: 83456 - DNA, 19 bp, Unknown
  misc_feature (1)..( 19): Result.001 file - promoters70/1441184
actataaatactctcggtt

SEQ ID NO: 83457 - DNA, 12 bp, Unknown
  misc_feature (1)..( 12): Result.001 file - promoters70/1441184
gtatataaatcc

SEQ ID NO: 83458 - DNA, 12 bp, Unknown
  misc_feature (1)..( 12): Result.001 file - promoters70/1441184
gtataaaaacac

SEQ ID NO: 83459 - DNA, 12 bp, Unknown
  misc_feature (1)..( 12): Result.001 file - promoters70/1441184
ttatataaatcc

SEQ ID NO: 83460 - DNA, 12 bp, Unknown
  misc_feature (1)..( 12): Result.001 file - promoters70/1441184
cactataaacaa

SEQ ID NO: 83461 - DNA, 12 bp, Unknown
  misc_feature (1)..( 12): Result.001 file - promoters70/1441184
aactataaatac

SEQ ID NO: 83462 - DNA, 12 bp, Unknown
  misc_feature (1)..( 12): Result.001 file - promoters70/1441657
tcttataaataa

SEQ ID NO: 83463 - DNA, 11 bp, Unknown
  misc_feature (1)..( 11): Result.001 file - promoters70/1441657
atcttctgtct

SEQ ID NO: 83464 - DNA, 11 bp, Unknown
  misc_feature (1)..( 11): Result.001 file - promoters70/1441657
cacttgtgttt

SEQ ID NO: 83465 - DNA, 11 bp, Unknown
  misc_feature (1)..( 11): Result.001 file - promoters70/1441657
atcttctaaaa

SEQ ID NO: 83466 - DNA, 11 bp, Unknown
  misc_feature (1)..( 11): Result.001 file - promoters70/1441657
taattgtattt

SEQ ID NO: 83467 - DNA, 7 bp, Unknown
  misc_feature (1)..( 7): Result.001 file - promoters70/1441657
ccaaaca

SEQ ID NO: 83468 - DNA, 7 bp, Unknown
  misc_feature (1)..( 7): Result.001 file - promoters70/1441657
ccaaacc

SEQ ID NO: 83469 - DNA, 7 bp, Unknown
  misc_feature (1)..( 7): Result.001 file - promoters70/1441657
tcaaacc

SEQ ID NO: 83470 - DNA, 9 bp, Unknown
  misc_feature (1)..( 9): Result.001 file - promoters70/1441657
aaattttca

SEQ ID NO: 83471 - DNA, 9 bp, Unknown
  misc_feature (1)..( 9): Result.001 file - promoters70/1441657
taatttttg

SEQ ID NO: 83472 - DNA, 9 bp, Unknown
  misc_feature (1)..( 9): Result.001 file - promoters70/1441657
aaatattca

SEQ ID NO: 83473 - DNA, 7 bp, Unknown
  misc_feature (1)..( 7): Result.001 file - promoters70/1441657
caaaatt

SEQ ID NO: 83474 - DNA, 7 bp, Unknown
  misc_feature (1)..( 7): Result.001 file - promoters70/1441657
caatatt

SEQ ID NO: 83475 - DNA, 7 bp, Unknown
  misc_feature (1)..( 7): Result.001 file - promoters70/1441665
caatatg

SEQ ID NO: 83476 - DNA, 13 bp, Unknown
  misc_feature (1)..( 13): Result.001 file - promoters70/1441665
catataaaacgat

SEQ ID NO: 83477 - DNA, 13 bp, Unknown
  misc_feature (1)..( 13): Result.001 file - promoters70/1441665
gatacaaaaccct

SEQ ID NO: 83478 - DNA, 13 bp, Unknown
  misc_feature (1)..( 13): Result.001 file - promoters70/1441665
gagacaaatagaa

SEQ ID NO: 83479 - DNA, 13 bp, Unknown
  misc_feature (1)..( 13): Result.001 file - promoters70/1441665
tatataaaaccaa

SEQ ID NO: 83480 - DNA, 13 bp, Unknown
  misc_feature (1)..( 13): Result.001 file - promoters70/1441665
gggaaaaaatcaa

SEQ ID NO: 83481 - DNA, 13 bp, Unknown
  misc_feature (1)..( 13): Result.001 file - promoters70/1441665
gagtcaaagaaat

SEQ ID NO: 83482 - DNA, 10 bp, Unknown
  misc_feature (1)..( 10): Result.001 file - promoters70/1441665
ataaaatggt

SEQ ID NO: 83483 - DNA, 10 bp, Unknown
  misc_feature (1)..( 10): Result.001 file - promoters70/1441665
ataaaaacag

SEQ ID NO: 83484 - DNA, 10 bp, Unknown
  misc_feature (1)..( 10): Result.001 file - promoters70/1441665
agaaaaaaaa

SEQ ID NO: 83485 - DNA, 10 bp, Unknown
  misc_feature (1)..( 10): Result.001 file - promoters70/1441665
agaagaaaca

SEQ ID NO: 83486 - DNA, 10 bp, Unknown
  misc_feature (1)..( 10): Result.001 file - promoters70/1441665
tcaaaaaatt

SEQ ID NO: 83487 - DNA, 10 bp, Unknown
  misc_feature (1)..( 10): Result.001 file - promoters70/1441665
caaagaaatt

SEQ ID NO: 83488 - DNA, 17 bp, Unknown
  misc_feature (1)..( 17): Result.001 file - promoters70/1441665
gtgttcaaaaaaatatt

SEQ ID NO: 83489 - DNA, 17 bp, Unknown
  misc_feature (1)..( 17): Result.001 file - promoters70/1441665
gtgatcaaatccgagcc

SEQ ID NO: 83490 - DNA, 17 bp, Unknown
  misc_feature (1)..( 17): Result.001 file - promoters70/1441665
taattcaaaaagcaaaa

SEQ ID NO: 83491 - DNA, 17 bp, Unknown
  misc_feature (1)..( 17): Result.001 file - promoters70/1441665
aaaaaaaaaaaggaaaa

SEQ ID NO: 83492 - DNA, 17 bp, Unknown
  misc_feature (1)..( 17): Result.001 file - promoters70/1441665
aaattccaaattttgaa

SEQ ID NO: 83493 - DNA, 17 bp, Unknown
  misc_feature (1)..( 17): Result.001 file - promoters70/1441665
aaaatcaaaaaattatt

SEQ ID NO: 83494 - DNA, 12 bp, Unknown
  misc_feature (1)..( 12): Result.001 file - promoters70/1441665
cactatataaag

SEQ ID NO: 83495 - DNA, 12 bp, Unknown
  misc_feature (1)..( 12): Result.001 file - promoters70/1441665
cactatttaaag

SEQ ID NO: 83496 - DNA, 12 bp, Unknown
  misc_feature (1)..( 12): Result.001 file - promoters70/1441665
tcttatatataa

SEQ ID NO: 83497 - DNA, 12 bp, Unknown
  misc_feature (1)..( 12): Result.001 file - promoters70/1441665
tactattaaagc

SEQ ID NO: 83498 - DNA, 12 bp, Unknown
  misc_feature (1)..( 12): Result.001 file - promoters70/1441665
tttaattaaaac

SEQ ID NO: 83499 - DNA, 12 bp, Unknown
  misc_feature (1)..( 12): Result.001 file - promoters70/1441665
gcttatttatga

SEQ ID NO: 83500 - DNA, 12 bp, Unknown
  misc_feature (1)..( 12): Result.001 file - promoters70/1441665
ggtcatttaaag

SEQ ID NO: 83501 - DNA, 12 bp, Unknown
  misc_feature (1)..( 12): Result.001 file - promoters70/1441665
ctcttatgattt

SEQ ID NO: 83502 - DNA, 12 bp, Unknown
  misc_feature (1)..( 12): Result.001 file - promoters70/1441665
ttcttaggattc

SEQ ID NO: 83503 - DNA, 12 bp, Unknown
  misc_feature (1)..( 12): Result.001 file - promoters70/1441665
ctcgtataattc

SEQ ID NO: 83504 - DNA, 12 bp, Unknown
  misc_feature (1)..( 12): Result.001 file - promoters70/1441665
ttcttattggaa

SEQ ID NO: 83505 - DNA, 12 bp, Unknown
  misc_feature (1)..( 12): Result.001 file - promoters70/1441665
cttccatgtttt

SEQ ID NO: 83506 - DNA, 12 bp, Unknown
  misc_feature (1)..( 12): Result.001 file - promoters70/1441665
ttcgtttaacag

SEQ ID NO: 83507 - DNA, 8 bp, Unknown
  misc_feature (1)..( 8): Result.001 file - promoters70/1441665
aatgggcc

SEQ ID NO: 83508 - DNA, 8 bp, Unknown
  misc_feature (1)..( 8): Result.001 file - promoters70/1441665
tatgggcc

SEQ ID NO: 83509 - DNA, 8 bp, Unknown
  misc_feature (1)..( 8): Result.001 file - promoters70/1441665
aatgggtc

SEQ ID NO: 83510 - DNA, 8 bp, Unknown
  misc_feature (1)..( 8): Result.001 file - promoters70/1441665
tttgggcc

SEQ ID NO: 83511 - DNA, 8 bp, Unknown
  misc_feature (1)..( 8): Result.001 file - promoters70/1441665
tgtgggcc

SEQ ID NO: 83512 - DNA, 8 bp, Unknown
  misc_feature (1)..( 8): Result.001 file - promoters70/1441665
tttcggcc

SEQ ID NO: 83513 - DNA, 9 bp, Unknown
  misc_feature (1)..( 9): Result.001 file - promoters70/1441665
caaacaaaa

SEQ ID NO: 83514 - DNA, 9 bp, Unknown
  misc_feature (1)..( 9): Result.001 file - promoters70/1441665
gaaacaaag

SEQ ID NO: 83515 - DNA, 9 bp, Unknown
  misc_feature (1)..( 9): Result.001 file - promoters70/1441665
caaagaaat

SEQ ID NO: 83516 - DNA, 9 bp, Unknown
  misc_feature (1)..( 9): Result.001 file - promoters70/1441665
aaaaaaaaa

SEQ ID NO: 83517 - DNA, 9 bp, Unknown
  misc_feature (1)..( 9): Result.001 file - promoters70/1441665
caaaaaatt

SEQ ID NO: 83518 - DNA, 9 bp, Unknown
  misc_feature (1)..( 9): Result.001 file - promoters70/1441814
aaaaccaag

SEQ ID NO: 83519 - DNA, 12 bp, Unknown
  misc_feature (1)..( 12): Result.001 file - promoters70/1441814
caacaatgtaca

SEQ ID NO: 83520 - DNA, 12 bp, Unknown
  misc_feature (1)..( 12): Result.001 file - promoters70/1441814
caataatttaca

SEQ ID NO: 83521 - DNA, 12 bp, Unknown
  misc_feature (1)..( 12): Result.001 file - promoters70/1441814
tgaaaatttata

SEQ ID NO: 83522 - DNA, 12 bp, Unknown
  misc_feature (1)..( 12): Result.001 file - promoters70/1441814
gtataattttat

SEQ ID NO: 83523 - DNA, 12 bp, Unknown
  misc_feature (1)..( 12): Result.001 file - promoters70/1441814
tgaaaattactc

SEQ ID NO: 83524 - DNA, 8 bp, Unknown
  misc_feature (1)..( 8): Result.001 file - promoters70/1441814
ataacttt

SEQ ID NO: 83525 - DNA, 8 bp, Unknown
  misc_feature (1)..( 8): Result.001 file - promoters70/1441814
ataactgt

SEQ ID NO: 83526 - DNA, 8 bp, Unknown
  misc_feature (1)..( 8): Result.001 file - promoters70/1441814
ataactct

SEQ ID NO: 83527 - DNA, 8 bp, Unknown
  misc_feature (1)..( 8): Result.001 file - promoters70/1441814
ataaaaac

SEQ ID NO: 83528 - DNA, 12 bp, Unknown
  misc_feature (1)..( 12): Result.001 file - promoters70/1441814
tacacaagattt

SEQ ID NO: 83529 - DNA, 12 bp, Unknown
  misc_feature (1)..( 12): Result.001 file - promoters70/1441814
tacataagtttt

SEQ ID NO: 83530 - DNA, 12 bp, Unknown
  misc_feature (1)..( 12): Result.001 file - promoters70/1441814
aacacaaaccca

SEQ ID NO: 83531 - DNA, 12 bp, Unknown
  misc_feature (1)..( 12): Result.001 file - promoters70/1441814
ttttgaagtttg

SEQ ID NO: 83532 - DNA, 11 bp, Unknown
  misc_feature (1)..( 11): Result.001 file - promoters70/1441814
ctttgcttaca

SEQ ID NO: 83533 - DNA, 11 bp, Unknown
  misc_feature (1)..( 11): Result.001 file - promoters70/1441814
ttttacttttt

SEQ ID NO: 83534 - DNA, 11 bp, Unknown
  misc_feature (1)..( 11): Result.001 file - promoters70/1441814
ttttaccagtg

SEQ ID NO: 83535 - DNA, 11 bp, Unknown
  misc_feature (1)..( 11): Result.001 file - promoters70/1441835
atatacttttt

SEQ ID NO: 83536 - DNA, 12 bp, Unknown
  misc_feature (1)..( 12): Result.001 file - promoters70/1441835
tttccatcgaat

SEQ ID NO: 83537 - DNA, 12 bp, Unknown
  misc_feature (1)..( 12): Result.001 file - promoters70/1441835
aacaaatcaaat

SEQ ID NO: 83538 - DNA, 12 bp, Unknown
  misc_feature (1)..( 12): Result.001 file - promoters70/1441835
gcaaaaccaaag

SEQ ID NO: 83539 - DNA, 12 bp, Unknown
  misc_feature (1)..( 12): Result.001 file - promoters70/1441835
tagcagtcaaat

SEQ ID NO: 83540 - DNA, 12 bp, Unknown
  misc_feature (1)..( 12): Result.001 file - promoters70/1441835
aaaacaccaaag

SEQ ID NO: 83541 - DNA, 12 bp, Unknown
  misc_feature (1)..( 12): Result.001 file - promoters70/1441835
tggcaagtaaaa

SEQ ID NO: 83542 - DNA, 12 bp, Unknown
  misc_feature (1)..( 12): Result.001 file - promoters70/1441835
aaaactccaaat

SEQ ID NO: 83543 - DNA, 11 bp, Unknown
  misc_feature (1)..( 11): Result.001 file - promoters70/1441835
aattcaagacc

SEQ ID NO: 83544 - DNA, 11 bp, Unknown
  misc_feature (1)..( 11): Result.001 file - promoters70/1441835
atggcaaaacc

SEQ ID NO: 83545 - DNA, 11 bp, Unknown
  misc_feature (1)..( 11): Result.001 file - promoters70/1441835
aaatcaaatcg

SEQ ID NO: 83546 - DNA, 11 bp, Unknown
  misc_feature (1)..( 11): Result.001 file - promoters70/1441835
cagtcaaatat

SEQ ID NO: 83547 - DNA, 11 bp, Unknown
  misc_feature (1)..( 11): Result.001 file - promoters70/1441835
aacacaactca

SEQ ID NO: 83548 - DNA, 11 bp, Unknown
  misc_feature (1)..( 11): Result.001 file - promoters70/1441835
aagtaaaaaag

SEQ ID NO: 83549 - DNA, 11 bp, Unknown
  misc_feature (1)..( 11): Result.001 file - promoters70/1441859
gtgtaaaacac

SEQ ID NO: 83550 - DNA, 9 bp, Unknown
  misc_feature (1)..( 9): Result.001 file - promoters70/1441859
ataaaaata

SEQ ID NO: 83551 - DNA, 9 bp, Unknown
  misc_feature (1)..( 9): Result.001 file - promoters70/1441859
ctaaaaact

SEQ ID NO: 83552 - DNA, 9 bp, Unknown
  misc_feature (1)..( 9): Result.001 file - promoters70/1441859
ataataata

SEQ ID NO: 83553 - DNA, 9 bp, Unknown
  misc_feature (1)..( 9): Result.001 file - promoters70/1441859
ctaaaaaaa

SEQ ID NO: 83554 - DNA, 8 bp, Unknown
  misc_feature (1)..( 8): Result.001 file - promoters70/1441859
ttaattta

SEQ ID NO: 83555 - DNA, 8 bp, Unknown
  misc_feature (1)..( 8): Result.001 file - promoters70/1441859
ttattttg

SEQ ID NO: 83556 - DNA, 8 bp, Unknown
  misc_feature (1)..( 8): Result.001 file - promoters70/1441859
atatttta

SEQ ID NO: 83557 - DNA, 8 bp, Unknown
  misc_feature (1)..( 8): Result.001 file - promoters70/1441912
atatcttg

SEQ ID NO: 83558 - DNA, 10 bp, Unknown
  misc_feature (1)..( 10): Result.001 file - promoters70/1441912
gtttggtttt

SEQ ID NO: 83559 - DNA, 10 bp, Unknown
  misc_feature (1)..( 10): Result.001 file - promoters70/1441912
atttgatttt

SEQ ID NO: 83560 - DNA, 10 bp, Unknown
  misc_feature (1)..( 10): Result.001 file - promoters70/1441912
gttgggttta

SEQ ID NO: 83561 - DNA, 6 bp, Unknown
  misc_feature (1)..( 6): Result.001 file - promoters70/1441912
tatata

SEQ ID NO: 83562 - DNA, 6 bp, Unknown
  misc_feature (1)..( 6): Result.001 file - promoters70/1441912
tatata

SEQ ID NO: 83563 - DNA, 6 bp, Unknown
  misc_feature (1)..( 6): Result.001 file - promoters70/1441912
tatata

SEQ ID NO: 83564 - DNA, 10 bp, Unknown
  misc_feature (1)..( 10): Result.001 file - promoters70/1441912
tgagaaagtt

SEQ ID NO: 83565 - DNA, 10 bp, Unknown
  misc_feature (1)..( 10): Result.001 file - promoters70/1441912
aacaaaagtt

SEQ ID NO: 83566 - DNA, 10 bp, Unknown
  misc_feature (1)..( 10): Result.001 file - promoters70/1442156
aacacaagtt

SEQ ID NO: 83567 - DNA, 7 bp, Unknown
  misc_feature (1)..( 7): Result.001 file - promoters70/1442156
attttaa

SEQ ID NO: 83568 - DNA, 7 bp, Unknown
  misc_feature (1)..( 7): Result.001 file - promoters70/1442156
attttag

SEQ ID NO: 83569 - DNA, 7 bp, Unknown
  misc_feature (1)..( 7): Result.001 file - promoters70/1442156
attctag

SEQ ID NO: 83570 - DNA, 9 bp, Unknown
  misc_feature (1)..( 9): Result.001 file - promoters70/1442156
atatagtta

SEQ ID NO: 83571 - DNA, 9 bp, Unknown
  misc_feature (1)..( 9): Result.001 file - promoters70/1442156
aaataatta

SEQ ID NO: 83572 - DNA, 9 bp, Unknown
  misc_feature (1)..( 9): Result.001 file - promoters70/1442156
aaagaatca

SEQ ID NO: 83573 - DNA, 7 bp, Unknown
  misc_feature (1)..( 7): Result.001 file - promoters70/1442156
aatatac

SEQ ID NO: 83574 - DNA, 7 bp, Unknown
  misc_feature (1)..( 7): Result.001 file - promoters70/1442156
aatatat

SEQ ID NO: 83575 - DNA, 7 bp, Unknown
  misc_feature (1)..( 7): Result.001 file - promoters70/1442156
catatac

SEQ ID NO: 83576 - DNA, 7 bp, Unknown
  misc_feature (1)..( 7): Result.001 file - promoters70/1442156
aaaaaat

SEQ ID NO: 83577 - DNA, 7 bp, Unknown
  misc_feature (1)..( 7): Result.001 file - promoters70/1442156
aaaaaaa

SEQ ID NO: 83578 - DNA, 7 bp, Unknown
  misc_feature (1)..( 7): Result.001 file - promoters70/1442156
aaaaaag

SEQ ID NO: 83579 - DNA, 8 bp, Unknown
  misc_feature (1)..( 8): Result.001 file - promoters70/1442156
aaacaaaa

SEQ ID NO: 83580 - DNA, 7 bp, Unknown
  misc_feature (1)..( 7): Result.001 file - promoters70/1442156
tttattt

SEQ ID NO: 83581 - DNA, 7 bp, Unknown
  misc_feature (1)..( 7): Result.001 file - promoters70/1442156
tttattt

SEQ ID NO: 83582 - DNA, 7 bp, Unknown
  misc_feature (1)..( 7): Result.001 file - promoters70/1442156
tttatta

SEQ ID NO: 83583 - DNA, 10 bp, Unknown
  misc_feature (1)..( 10): Result.001 file - promoters70/1442156
ttagtcaaaa

SEQ ID NO: 83584 - DNA, 10 bp, Unknown
  misc_feature (1)..( 10): Result.001 file - promoters70/1442156
aaaatcaaaa

SEQ ID NO: 83585 - DNA, 10 bp, Unknown
  misc_feature (1)..( 10): Result.001 file - promoters70/1442156
aaaataaaaa

SEQ ID NO: 83586 - DNA, 7 bp, Unknown
  misc_feature (1)..( 7): Result.001 file - promoters70/1442156
aaaataa

SEQ ID NO: 83587 - DNA, 7 bp, Unknown
  misc_feature (1)..( 7): Result.001 file - promoters70/1442156
aaaatag

SEQ ID NO: 83588 - DNA, 7 bp, Unknown
  misc_feature (1)..( 7): Result.001 file - promoters70/1442156
aaaataa

SEQ ID NO: 83589 - DNA, 8 bp, Unknown
  misc_feature (1)..( 8): Result.001 file - promoters70/1442156
cgtcttct

SEQ ID NO: 83590 - DNA, 8 bp, Unknown
  misc_feature (1)..( 8): Result.001 file - promoters70/1442156
cttcttct

SEQ ID NO: 83591 - DNA, 8 bp, Unknown
  misc_feature (1)..( 8): Result.001 file - promoters70/1442156
cttcttca

SEQ ID NO: 83592 - DNA, 6 bp, Unknown
  misc_feature (1)..( 6): Result.001 file - promoters70/1442156
cacgtg

SEQ ID NO: 83593 - DNA, 6 bp, Unknown
  misc_feature (1)..( 6): Result.001 file - promoters70/1442156
cacgtg

SEQ ID NO: 83594 - DNA, 6 bp, Unknown
  misc_feature (1)..( 6): Result.001 file - promoters70/1442156
cacgtg

SEQ ID NO: 83595 - DNA, 9 bp, Unknown
  misc_feature (1)..( 9): Result.001 file - promoters70/1442156
attaatatc

SEQ ID NO: 83596 - DNA, 9 bp, Unknown
  misc_feature (1)..( 9): Result.001 file - promoters70/1442156
attaattta

SEQ ID NO: 83597 - DNA, 9 bp, Unknown
  misc_feature (1)..( 9): Result.001 file - promoters70/1442156
tttatttta

SEQ ID NO: 83598 - DNA, 7 bp, Unknown
  misc_feature (1)..( 7): Result.001 file - promoters70/1442156
taattac

SEQ ID NO: 83599 - DNA, 7 bp, Unknown
  misc_feature (1)..( 7): Result.001 file - promoters70/1442156
aaattac

SEQ ID NO: 83600 - DNA, 7 bp, Unknown
  misc_feature (1)..( 7): Result.001 file - promoters70/1442408
aaattat

SEQ ID NO: 83601 - DNA, 8 bp, Unknown
  misc_feature (1)..( 8): Result.001 file - promoters70/1442408
cttccttt

SEQ ID NO: 83602 - DNA, 8 bp, Unknown
  misc_feature (1)..( 8): Result.001 file - promoters70/1442408
cttctttt

SEQ ID NO: 83603 - DNA, 8 bp, Unknown
  misc_feature (1)..( 8): Result.001 file - promoters70/1442427
actctttt

SEQ ID NO: 83604 - DNA, 10 bp, Unknown
  misc_feature (1)..( 10): Result.001 file - promoters70/1442427
taaatttgct

SEQ ID NO: 83605 - DNA, 10 bp, Unknown
  misc_feature (1)..( 10): Result.001 file - promoters70/1442427
taaatttaaa

SEQ ID NO: 83606 - DNA, 10 bp, Unknown
  misc_feature (1)..( 10): Result.001 file - promoters70/1442476
tgaatctgct

SEQ ID NO: 83607 - DNA, 16 bp, Unknown
  misc_feature (1)..( 16): Result.001 file - promoters70/1442476
agcaaagaattgacca

SEQ ID NO: 83608 - DNA, 16 bp, Unknown
  misc_feature (1)..( 16): Result.001 file - promoters70/1442476
gctgctgaattggaat

SEQ ID NO: 83609 - DNA, 16 bp, Unknown
  misc_feature (1)..( 16): Result.001 file - promoters70/1442476
cttgtggaaatgacgt

SEQ ID NO: 83610 - DNA, 16 bp, Unknown
  misc_feature (1)..( 16): Result.001 file - promoters70/1442476
tcttatgatttgcttc

SEQ ID NO: 83611 - DNA, 16 bp, Unknown
  misc_feature (1)..( 16): Result.001 file - promoters70/1442476
acagcagtattagctt

SEQ ID NO: 83612 - DNA, 16 bp, Unknown
  misc_feature (1)..( 16): Result.001 file - promoters70/1442476
ctcgtataattctttt

SEQ ID NO: 83613 - DNA, 16 bp, Unknown
  misc_feature (1)..( 16): Result.001 file - promoters70/1442476
ttacgccaaaagacac

SEQ ID NO: 83614 - DNA, 8 bp, Unknown
  misc_feature (1)..( 8): Result.001 file - promoters70/1442476
gaaaaaaa

SEQ ID NO: 83615 - DNA, 8 bp, Unknown
  misc_feature (1)..( 8): Result.001 file - promoters70/1442476
caaaaaaa

SEQ ID NO: 83616 - DNA, 9 bp, Unknown
  misc_feature (1)..( 9): Result.001 file - promoters70/1442476
aaactaaaa

SEQ ID NO: 83617 - DNA, 9 bp, Unknown
  misc_feature (1)..( 9): Result.001 file - promoters70/1442476
aaaccaaac

SEQ ID NO: 83618 - DNA, 9 bp, Unknown
  misc_feature (1)..( 9): Result.001 file - promoters70/1442476
tgaccaaac

SEQ ID NO: 83619 - DNA, 9 bp, Unknown
  misc_feature (1)..( 9): Result.001 file - promoters70/1442504
taactaaaa

SEQ ID NO: 83620 - DNA, 11 bp, Unknown
  misc_feature (1)..( 11): Result.001 file - promoters70/1442504
attatctctct

SEQ ID NO: 83621 - DNA, 11 bp, Unknown
  misc_feature (1)..( 11): Result.001 file - promoters70/1442504
tgagtctctct

SEQ ID NO: 83622 - DNA, 11 bp, Unknown
  misc_feature (1)..( 11): Result.001 file - promoters70/1442504
attatctctca

SEQ ID NO: 83623 - DNA, 11 bp, Unknown
  misc_feature (1)..( 11): Result.001 file - promoters70/1442504
ttgttctattt

SEQ ID NO: 83624 - DNA, 11 bp, Unknown
  misc_feature (1)..( 11): Result.001 file - promoters70/1442504
taattatattt

SEQ ID NO: 83625 - DNA, 11 bp, Unknown
  misc_feature (1)..( 11): Result.001 file - promoters70/1442649
aaaatctctgt

SEQ ID NO: 83626 - DNA, 8 bp, Unknown
  misc_feature (1)..( 8): Result.001 file - promoters70/1442649
aaatagtt

SEQ ID NO: 83627 - DNA, 8 bp, Unknown
  misc_feature (1)..( 8): Result.001 file - promoters70/1442649
gaatagta

SEQ ID NO: 83628 - DNA, 9 bp, Unknown
  misc_feature (1)..( 9): Result.001 file - promoters70/1442649
taactagtt

SEQ ID NO: 83629 - DNA, 7 bp, Unknown
  misc_feature (1)..( 7): Result.001 file - promoters70/1442649
atatcat

SEQ ID NO: 83630 - DNA, 7 bp, Unknown
  misc_feature (1)..( 7): Result.001 file - promoters70/1442649
atatcaa

SEQ ID NO: 83631 - DNA, 7 bp, Unknown
  misc_feature (1)..( 7): Result.001 file - promoters70/1442649
ttatcat

SEQ ID NO: 83632 - DNA, 6 bp, Unknown
  misc_feature (1)..( 6): Result.001 file - promoters70/1442649
tattta

SEQ ID NO: 83633 - DNA, 6 bp, Unknown
  misc_feature (1)..( 6): Result.001 file - promoters70/1442649
tattta

SEQ ID NO: 83634 - DNA, 6 bp, Unknown
  misc_feature (1)..( 6): Result.001 file - promoters70/1442880
tattta

SEQ ID NO: 83635 - DNA, 9 bp, Unknown
  misc_feature (1)..( 9): Result.001 file - promoters70/1442880
ttctctttt

SEQ ID NO: 83636 - DNA, 9 bp, Unknown
  misc_feature (1)..( 9): Result.001 file - promoters70/1442880
acctctttt

SEQ ID NO: 83637 - DNA, 9 bp, Unknown
  misc_feature (1)..( 9): Result.001 file - promoters70/1442880
accccttag

SEQ ID NO: 83638 - DNA, 7 bp, Unknown
  misc_feature (1)..( 7): Result.001 file - promoters70/1442880
aatttac

SEQ ID NO: 83639 - DNA, 7 bp, Unknown
  misc_feature (1)..( 7): Result.001 file - promoters70/1442880
aatctac

SEQ ID NO: 83640 - DNA, 7 bp, Unknown
  misc_feature (1)..( 7): Result.001 file - promoters70/1442880
aatttat

SEQ ID NO: 83641 - DNA, 11 bp, Unknown
  misc_feature (1)..( 11): Result.001 file - promoters70/1442880
ctaaaatagta

SEQ ID NO: 83642 - DNA, 11 bp, Unknown
  misc_feature (1)..( 11): Result.001 file - promoters70/1442880
aaataattgta

SEQ ID NO: 83643 - DNA, 11 bp, Unknown
  misc_feature (1)..( 11): Result.001 file - promoters70/1442880
aaagaattgaa

SEQ ID NO: 83644 - DNA, 8 bp, Unknown
  misc_feature (1)..( 8): Result.001 file - promoters70/1442880
aaggtata

SEQ ID NO: 83645 - DNA, 8 bp, Unknown
  misc_feature (1)..( 8): Result.001 file - promoters70/1442880
aagctata

SEQ ID NO: 83646 - DNA, 8 bp, Unknown
  misc_feature (1)..( 8): Result.001 file - promoters70/1442880
cagcaata

SEQ ID NO: 83647 - DNA, 10 bp, Unknown
  misc_feature (1)..( 10): Result.001 file - promoters70/1442880
ttactaaaat

SEQ ID NO: 83648 - DNA, 10 bp, Unknown
  misc_feature (1)..( 10): Result.001 file - promoters70/1442880
ttattaattt

SEQ ID NO: 83649 - DNA, 11 bp, Unknown
  misc_feature (1)..( 11): Result.001 file - promoters70/1442880
gaactgaaaga

SEQ ID NO: 83650 - DNA, 11 bp, Unknown
  misc_feature (1)..( 11): Result.001 file - promoters70/1442880
ttgtataaatt

SEQ ID NO: 83651 - DNA, 9 bp, Unknown
  misc_feature (1)..( 9): Result.001 file - promoters70/1442880
aaagaagaa

SEQ ID NO: 83652 - DNA, 9 bp, Unknown
  misc_feature (1)..( 9): Result.001 file - promoters70/1442880
aaagaattg

SEQ ID NO: 83653 - DNA, 9 bp, Unknown
  misc_feature (1)..( 9): Result.001 file - promoters70/1442880
aaataattg

SEQ ID NO: 83654 - DNA, 13 bp, Unknown
  misc_feature (1)..( 13): Result.001 file - promoters70/1442880
aatatcaccgacg

SEQ ID NO: 83655 - DNA, 13 bp, Unknown
  misc_feature (1)..( 13): Result.001 file - promoters70/1442880
aatatcttgtaag

SEQ ID NO: 83656 - DNA, 13 bp, Unknown
  misc_feature (1)..( 13): Result.001 file - promoters70/1442880
aatctcaacgacg

SEQ ID NO: 83657 - DNA, 8 bp, Unknown
  misc_feature (1)..( 8): Result.001 file - promoters70/1442880
taatcata

SEQ ID NO: 83658 - DNA, 8 bp, Unknown
  misc_feature (1)..( 8): Result.001 file - promoters70/1442880
aaataata

SEQ ID NO: 83659 - DNA, 8 bp, Unknown
  misc_feature (1)..( 8): Result.001 file - promoters70/1442975
aaacaatc

SEQ ID NO: 83660 - DNA, 12 bp, Unknown
  misc_feature (1)..( 12): Result.001 file - promoters70/1442975
ctttttgtttat

SEQ ID NO: 83661 - DNA, 12 bp, Unknown
  misc_feature (1)..( 12): Result.001 file - promoters70/1442975
tgatttgtatat

SEQ ID NO: 83662 - DNA, 12 bp, Unknown
  misc_feature (1)..( 12): Result.001 file - promoters70/1442975
cttattgtataa

SEQ ID NO: 83663 - DNA, 8 bp, Unknown
  misc_feature (1)..( 8): Result.001 file - promoters70/1442975
gctggatt

SEQ ID NO: 83664 - DNA, 8 bp, Unknown
  misc_feature (1)..( 8): Result.001 file - promoters70/1442975
tctgaatt

SEQ ID NO: 83665 - DNA, 8 bp, Unknown
  misc_feature (1)..( 8): Result.001 file - promoters70/1442993
tctgaaca

SEQ ID NO: 83666 - DNA, 13 bp, Unknown
  misc_feature (1)..( 13): Result.001 file - promoters70/1442993
ctaaaatagtaaa

SEQ ID NO: 83667 - DNA, 13 bp, Unknown
  misc_feature (1)..( 13): Result.001 file - promoters70/1442993
aaataattgtata

SEQ ID NO: 83668 - DNA, 13 bp, Unknown
  misc_feature (1)..( 13): Result.001 file - promoters70/1442993
tcatatttgtata

SEQ ID NO: 83669 - DNA, 13 bp, Unknown
  misc_feature (1)..( 13): Result.001 file - promoters70/1442993
aaagaattgaaca

SEQ ID NO: 83670 - DNA, 10 bp, Unknown
  misc_feature (1)..( 10): Result.001 file - promoters70/1442993
gaaaaagata

SEQ ID NO: 83671 - DNA, 10 bp, Unknown
  misc_feature (1)..( 10): Result.001 file - promoters70/1442993
gaaatagatt

SEQ ID NO: 83672 - DNA, 10 bp, Unknown
  misc_feature (1)..( 10): Result.001 file - promoters70/1442993
ttagtagatt

SEQ ID NO: 83673 - DNA, 10 bp, Unknown
  misc_feature (1)..( 10): Result.001 file - promoters70/1442993
tatataaatt

SEQ ID NO: 83674 - DNA, 10 bp, Unknown
  misc_feature (1)..( 10): Result.001 file - promoters70/1442993
ttactaaaat

SEQ ID NO: 83675 - DNA, 10 bp, Unknown
  misc_feature (1)..( 10): Result.001 file - promoters70/1442993
ttattaattt

SEQ ID NO: 83676 - DNA, 11 bp, Unknown
  misc_feature (1)..( 11): Result.001 file - promoters70/1442993
gaactgaaaga

SEQ ID NO: 83677 - DNA, 11 bp, Unknown
  misc_feature (1)..( 11): Result.001 file - promoters70/1443021
ttgtataaatt

SEQ ID NO: 83678 - DNA, 12 bp, Unknown
  misc_feature (1)..( 12): Result.001 file - promoters70/1443021
atacaatatatc

SEQ ID NO: 83679 - DNA, 12 bp, Unknown
  misc_feature (1)..( 12): Result.001 file - promoters70/1443021
tcaaaatttatc

SEQ ID NO: 83680 - DNA, 12 bp, Unknown
  misc_feature (1)..( 12): Result.001 file - promoters70/1443192
tcagaatttgga

SEQ ID NO: 83681 - DNA, 18 bp, Unknown
  misc_feature (1)..( 18): Result.001 file - promoters70/1443192
aaaaattattaaagtata

SEQ ID NO: 83682 - DNA, 18 bp, Unknown
  misc_feature (1)..( 18): Result.001 file - promoters70/1443192
aaagattattaaattata

SEQ ID NO: 83683 - DNA, 18 bp, Unknown
  misc_feature (1)..( 18): Result.001 file - promoters70/1443192
aaaatttatctgtaaatg

SEQ ID NO: 83684 - DNA, 9 bp, Unknown
  misc_feature (1)..( 9): Result.001 file - promoters70/1443192
ttactaata

SEQ ID NO: 83685 - DNA, 9 bp, Unknown
  misc_feature (1)..( 9): Result.001 file - promoters70/1443192
ttattaaag

SEQ ID NO: 83686 - DNA, 9 bp, Unknown
  misc_feature (1)..( 9): Result.001 file - promoters70/1443192
ataataatt

SEQ ID NO: 83687 - DNA, 9 bp, Unknown
  misc_feature (1)..( 9): Result.001 file - promoters70/1443192
ataatttta

SEQ ID NO: 83688 - DNA, 9 bp, Unknown
  misc_feature (1)..( 9): Result.001 file - promoters70/1443192
ctaatttta

SEQ ID NO: 83689 - DNA, 9 bp, Unknown
  misc_feature (1)..( 9): Result.001 file - promoters70/1443192
ataattatt

SEQ ID NO: 83690 - DNA, 10 bp, Unknown
  misc_feature (1)..( 10): Result.001 file - promoters70/1443192
ctatatatat

SEQ ID NO: 83691 - DNA, 10 bp, Unknown
  misc_feature (1)..( 10): Result.001 file - promoters70/1443192
ttatttatat

SEQ ID NO: 83692 - DNA, 10 bp, Unknown
  misc_feature (1)..( 10): Result.001 file - promoters70/1443192
ctatataaac

SEQ ID NO: 83693 - DNA, 8 bp, Unknown
  misc_feature (1)..( 8): Result.001 file - promoters70/1443192
taatagaa

SEQ ID NO: 83694 - DNA, 8 bp, Unknown
  misc_feature (1)..( 8): Result.001 file - promoters70/1443192
taattgaa

SEQ ID NO: 83695 - DNA, 8 bp, Unknown
  misc_feature (1)..( 8): Result.001 file - promoters70/1443306
aaattatt

SEQ ID NO: 83696 - DNA, 8 bp, Unknown
  misc_feature (1)..( 8): Result.001 file - promoters70/1443306
tttttaat

SEQ ID NO: 83697 - DNA, 8 bp, Unknown
  misc_feature (1)..( 8): Result.001 file - promoters70/1443306
tttgtaat

SEQ ID NO: 83698 - DNA, 8 bp, Unknown
  misc_feature (1)..( 8): Result.001 file - promoters70/1443306
tttgtaac

SEQ ID NO: 83699 - DNA, 12 bp, Unknown
  misc_feature (1)..( 12): Result.001 file - promoters70/1443306
taagatattttt

SEQ ID NO: 83700 - DNA, 12 bp, Unknown
  misc_feature (1)..( 12): Result.001 file - promoters70/1443306
aaaaatatattt

SEQ ID NO: 83701 - DNA, 12 bp, Unknown
  misc_feature (1)..( 12): Result.001 file - promoters70/1443306
taaaatacttta

SEQ ID NO: 83702 - DNA, 7 bp, Unknown
  misc_feature (1)..( 7): Result.001 file - promoters70/1443306
tttattt

SEQ ID NO: 83703 - DNA, 7 bp, Unknown
  misc_feature (1)..( 7): Result.001 file - promoters70/1443306
tttcttt

SEQ ID NO: 83704 - DNA, 7 bp, Unknown
  misc_feature (1)..( 7): Result.001 file - promoters70/1443306
ttcattt

SEQ ID NO: 83705 - DNA, 7 bp, Unknown
  misc_feature (1)..( 7): Result.001 file - promoters70/1443306
cataaac

SEQ ID NO: 83706 - DNA, 7 bp, Unknown
  misc_feature (1)..( 7): Result.001 file - promoters70/1443306
cataaat

SEQ ID NO: 83707 - DNA, 7 bp, Unknown
  misc_feature (1)..( 7): Result.001 file - promoters70/1443306
cataaac

SEQ ID NO: 83708 - DNA, 12 bp, Unknown
  misc_feature (1)..( 12): Result.001 file - promoters70/1443306
ttcatataaata

SEQ ID NO: 83709 - DNA, 12 bp, Unknown
  misc_feature (1)..( 12): Result.001 file - promoters70/1443306
taactataaata

SEQ ID NO: 83710 - DNA, 12 bp, Unknown
  misc_feature (1)..( 12): Result.001 file - promoters70/1443306
tatatataaata

SEQ ID NO: 83711 - DNA, 12 bp, Unknown
  misc_feature (1)..( 12): Result.001 file - promoters70/1443306
aatctataaaaa

SEQ ID NO: 83712 - DNA, 11 bp, Unknown
  misc_feature (1)..( 11): Result.001 file - promoters70/1443306
tcaattttttt

SEQ ID NO: 83713 - DNA, 11 bp, Unknown
  misc_feature (1)..( 11): Result.001 file - promoters70/1443306
ctaattttagc

SEQ ID NO: 83714 - DNA, 11 bp, Unknown
  misc_feature (1)..( 11): Result.001 file - promoters70/1443338
attatttttac

SEQ ID NO: 83715 - DNA, 9 bp, Unknown
  misc_feature (1)..( 9): Result.001 file - promoters70/1443338
aattacaat

SEQ ID NO: 83716 - DNA, 9 bp, Unknown
  misc_feature (1)..( 9): Result.001 file - promoters70/1443338
tcttataat

SEQ ID NO: 83717 - DNA, 9 bp, Unknown
  misc_feature (1)..( 9): Result.001 file - promoters70/1443338
tcttataaa

SEQ ID NO: 83718 - DNA, 8 bp, Unknown
  misc_feature (1)..( 8): Result.001 file - promoters70/1443338
acttatat

SEQ ID NO: 83719 - DNA, 8 bp, Unknown
  misc_feature (1)..( 8): Result.001 file - promoters70/1443338
tcttataa

SEQ ID NO: 83720 - DNA, 8 bp, Unknown
  misc_feature (1)..( 8): Result.001 file - promoters70/1443349
tcttataa

SEQ ID NO: 83721 - DNA, 11 bp, Unknown
  misc_feature (1)..( 11): Result.001 file - promoters70/1443349
ttttgaagaat

SEQ ID NO: 83722 - DNA, 11 bp, Unknown
  misc_feature (1)..( 11): Result.001 file - promoters70/1443349
ttttgatgaat

SEQ ID NO: 83723 - DNA, 11 bp, Unknown
  misc_feature (1)..( 11): Result.001 file - promoters70/1443349
gtttgaatcgt

SEQ ID NO: 83724 - DNA, 11 bp, Unknown
  misc_feature (1)..( 11): Result.001 file - promoters70/1443349
ttgtgaatgtc

SEQ ID NO: 83725 - DNA, 16 bp, Unknown
  misc_feature (1)..( 16): Result.001 file - promoters70/1443349
aaaaatgttagatagg

SEQ ID NO: 83726 - DNA, 16 bp, Unknown
  misc_feature (1)..( 16): Result.001 file - promoters70/1443349
ataaattttaaaatta

SEQ ID NO: 83727 - DNA, 16 bp, Unknown
  misc_feature (1)..( 16): Result.001 file - promoters70/1443349
atagatttgaaaaaca

SEQ ID NO: 83728 - DNA, 16 bp, Unknown
  misc_feature (1)..( 16): Result.001 file - promoters70/1443349
tttgattctaaaatat

SEQ ID NO: 83729 - DNA, 16 bp, Unknown
  misc_feature (1)..( 16): Result.001 file - promoters70/1443349
ggatagtaaaaaaaga

SEQ ID NO: 83730 - DNA, 8 bp, Unknown
  misc_feature (1)..( 8): Result.001 file - promoters70/1443349
cattaaag

SEQ ID NO: 83731 - DNA, 8 bp, Unknown
  misc_feature (1)..( 8): Result.001 file - promoters70/1443349
aattcaag

SEQ ID NO: 83732 - DNA, 8 bp, Unknown
  misc_feature (1)..( 8): Result.001 file - promoters70/1443349
cattaata

SEQ ID NO: 83733 - DNA, 8 bp, Unknown
  misc_feature (1)..( 8): Result.001 file - promoters70/1443349
aattcact

SEQ ID NO: 83734 - DNA, 11 bp, Unknown
  misc_feature (1)..( 11): Result.001 file - promoters70/1443349
cttatataaac

SEQ ID NO: 83735 - DNA, 11 bp, Unknown
  misc_feature (1)..( 11): Result.001 file - promoters70/1443349
tatatataata

SEQ ID NO: 83736 - DNA, 11 bp, Unknown
  misc_feature (1)..( 11): Result.001 file - promoters70/1443349
agtatataaac

SEQ ID NO: 83737 - DNA, 11 bp, Unknown
  misc_feature (1)..( 11): Result.001 file - promoters70/1443349
tataaataaaa

SEQ ID NO: 83738 - DNA, 11 bp, Unknown
  misc_feature (1)..( 11): Result.001 file - promoters70/1443349
tacctataaat

SEQ ID NO: 83739 - DNA, 12 bp, Unknown
  misc_feature (1)..( 12): Result.001 file - promoters70/1443349
tatataaacaaa

SEQ ID NO: 83740 - DNA, 12 bp, Unknown
  misc_feature (1)..( 12): Result.001 file - promoters70/1443349
ataataaccaaa

SEQ ID NO: 83741 - DNA, 12 bp, Unknown
  misc_feature (1)..( 12): Result.001 file - promoters70/1443349
tatataaactct

SEQ ID NO: 83742 - DNA, 12 bp, Unknown
  misc_feature (1)..( 12): Result.001 file - promoters70/1443349
tttataaataaa

SEQ ID NO: 83743 - DNA, 12 bp, Unknown
  misc_feature (1)..( 12): Result.001 file - promoters70/1443349
cctataaatatc

SEQ ID NO: 83744 - DNA, 8 bp, Unknown
  misc_feature (1)..( 8): Result.001 file - promoters70/1443349
cttcattt

SEQ ID NO: 83745 - DNA, 8 bp, Unknown
  misc_feature (1)..( 8): Result.001 file - promoters70/1443349
cttcataa

SEQ ID NO: 83746 - DNA, 8 bp, Unknown
  misc_feature (1)..( 8): Result.001 file - promoters70/1443349
ctttataa

SEQ ID NO: 83747 - DNA, 8 bp, Unknown
  misc_feature (1)..( 8): Result.001 file - promoters70/1443349
atttttaa

SEQ ID NO: 83748 - DNA, 14 bp, Unknown
  misc_feature (1)..( 14): Result.001 file - promoters70/1443349
ttagataggaaaaa

SEQ ID NO: 83749 - DNA, 14 bp, Unknown
  misc_feature (1)..( 14): Result.001 file - promoters70/1443349
atagatttgaaaaa

SEQ ID NO: 83750 - DNA, 14 bp, Unknown
  misc_feature (1)..( 14): Result.001 file - promoters70/1443349
atggatagtaaaaa

SEQ ID NO: 83751 - DNA, 14 bp, Unknown
  misc_feature (1)..( 14): Result.001 file - promoters70/1443349
ataaattttaaaat

SEQ ID NO: 83752 - DNA, 14 bp, Unknown
  misc_feature (1)..( 14): Result.001 file - promoters70/1443349
tttgattctaaaat

SEQ ID NO: 83753 - DNA, 13 bp, Unknown
  misc_feature (1)..( 13): Result.001 file - promoters70/1443349
acttataattatg

SEQ ID NO: 83754 - DNA, 13 bp, Unknown
  misc_feature (1)..( 13): Result.001 file - promoters70/1443349
aataataataatg

SEQ ID NO: 83755 - DNA, 13 bp, Unknown
  misc_feature (1)..( 13): Result.001 file - promoters70/1443349
ctttataagtata

SEQ ID NO: 83756 - DNA, 13 bp, Unknown
  misc_feature (1)..( 13): Result.001 file - promoters70/1443349
ttttaaaagtaag

SEQ ID NO: 83757 - DNA, 13 bp, Unknown
  misc_feature (1)..( 13): Result.001 file - promoters70/1443349
cttcataacaaaa

SEQ ID NO: 83758 - DNA, 11 bp, Unknown
  misc_feature (1)..( 11): Result.001 file - promoters70/1443349
cgttttaaaag

SEQ ID NO: 83759 - DNA, 11 bp, Unknown
  misc_feature (1)..( 11): Result.001 file - promoters70/1443349
atttttaaatt

SEQ ID NO: 83760 - DNA, 11 bp, Unknown
  misc_feature (1)..( 11): Result.001 file - promoters70/1443349
ctttataagta

SEQ ID NO: 83761 - DNA, 11 bp, Unknown
  misc_feature (1)..( 11): Result.001 file - promoters70/1443356
cttcataacaa

SEQ ID NO: 83762 - DNA, 10 bp, Unknown
  misc_feature (1)..( 10): Result.001 file - promoters70/1443356
aacaaatttc

SEQ ID NO: 83763 - DNA, 10 bp, Unknown
  misc_feature (1)..( 10): Result.001 file - promoters70/1443356
tacaattttc

SEQ ID NO: 83764 - DNA, 10 bp, Unknown
  misc_feature (1)..( 10): Result.001 file - promoters70/1443356
tacaatattt

SEQ ID NO: 83765 - DNA, 8 bp, Unknown
  misc_feature (1)..( 8): Result.001 file - promoters70/1443356
tttgtttg

SEQ ID NO: 83766 - DNA, 8 bp, Unknown
  misc_feature (1)..( 8): Result.001 file - promoters70/1443356
tttctttg

SEQ ID NO: 83767 - DNA, 8 bp, Unknown
  misc_feature (1)..( 8): Result.001 file - promoters70/1443356
tttattta

SEQ ID NO: 83768 - DNA, 7 bp, Unknown
  misc_feature (1)..( 7): Result.001 file - promoters70/1443356
gacaata

SEQ ID NO: 83769 - DNA, 7 bp, Unknown
  misc_feature (1)..( 7): Result.001 file - promoters70/1443356
tacaata

SEQ ID NO: 83770 - DNA, 7 bp, Unknown
  misc_feature (1)..( 7): Result.001 file - promoters70/1443418
tacaatt

SEQ ID NO: 83771 - DNA, 8 bp, Unknown
  misc_feature (1)..( 8): Result.001 file - promoters70/1443418
aattttat

SEQ ID NO: 83772 - DNA, 8 bp, Unknown
  misc_feature (1)..( 8): Result.001 file - promoters70/1443418
aattttta

SEQ ID NO: 83773 - DNA, 8 bp, Unknown
  misc_feature (1)..( 8): Result.001 file - promoters70/1443418
tattttta

SEQ ID NO: 83774 - DNA, 8 bp, Unknown
  misc_feature (1)..( 8): Result.001 file - promoters70/1443418
ttttatta

SEQ ID NO: 83775 - DNA, 8 bp, Unknown
  misc_feature (1)..( 8): Result.001 file - promoters70/1443418
ttttattg

SEQ ID NO: 83776 - DNA, 8 bp, Unknown
  misc_feature (1)..( 8): Result.001 file - promoters70/1443418
atttctta

SEQ ID NO: 83777 - DNA, 9 bp, Unknown
  misc_feature (1)..( 9): Result.001 file - promoters70/1443418
gatttaaag

SEQ ID NO: 83778 - DNA, 9 bp, Unknown
  misc_feature (1)..( 9): Result.001 file - promoters70/1443418
tgtttaaaa

SEQ ID NO: 83779 - DNA, 9 bp, Unknown
  misc_feature (1)..( 9): Result.001 file - promoters70/1443418
tgttcaaaa

SEQ ID NO: 83780 - DNA, 9 bp, Unknown
  misc_feature (1)..( 9): Result.001 file - promoters70/1443418
aaaatataa

SEQ ID NO: 83781 - DNA, 9 bp, Unknown
  misc_feature (1)..( 9): Result.001 file - promoters70/1443418
tttatataa

SEQ ID NO: 83782 - DNA, 9 bp, Unknown
  misc_feature (1)..( 9): Result.001 file - promoters70/1443633
tatatataa

SEQ ID NO: 83783 - DNA, 9 bp, Unknown
  misc_feature (1)..( 9): Result.001 file - promoters70/1443633
acaatacat

SEQ ID NO: 83784 - DNA, 9 bp, Unknown
  misc_feature (1)..( 9): Result.001 file - promoters70/1443633
gagatacat

SEQ ID NO: 83785 - DNA, 9 bp, Unknown
  misc_feature (1)..( 9): Result.001 file - promoters70/1443633
agaatacac

SEQ ID NO: 83786 - DNA, 9 bp, Unknown
  misc_feature (1)..( 9): Result.001 file - promoters70/1443633
agactacag

SEQ ID NO: 83787 - DNA, 8 bp, Unknown
  misc_feature (1)..( 8): Result.001 file - promoters70/1443633
acgaaatc

SEQ ID NO: 83788 - DNA, 8 bp, Unknown
  misc_feature (1)..( 8): Result.001 file - promoters70/1443633
acgaaatt

SEQ ID NO: 83789 - DNA, 8 bp, Unknown
  misc_feature (1)..( 8): Result.001 file - promoters70/1443683
cagaaatt

SEQ ID NO: 83790 - DNA, 17 bp, Unknown
  misc_feature (1)..( 17): Result.001 file - promoters70/1443683
tattagcttagactata

SEQ ID NO: 83791 - DNA, 17 bp, Unknown
  misc_feature (1)..( 17): Result.001 file - promoters70/1443683
gatttgcttctcccaag

SEQ ID NO: 83792 - DNA, 17 bp, Unknown
  misc_feature (1)..( 17): Result.001 file - promoters70/1443683
tattagagagatagaga

SEQ ID NO: 83793 - DNA, 17 bp, Unknown
  misc_feature (1)..( 17): Result.001 file - promoters70/1443683
tacgtgcttccaacaaa

SEQ ID NO: 83794 - DNA, 17 bp, Unknown
  misc_feature (1)..( 17): Result.001 file - promoters70/1443683
caagtgcttcaaacaaa

SEQ ID NO: 83795 - DNA, 17 bp, Unknown
  misc_feature (1)..( 17): Result.001 file - promoters70/1444131
gaagagctccagaagca

SEQ ID NO: 83796 - DNA, 13 bp, Unknown
  misc_feature (1)..( 13): Result.001 file - promoters70/1444131
ggatatatcaaac

SEQ ID NO: 83797 - DNA, 13 bp, Unknown
  misc_feature (1)..( 13): Result.001 file - promoters70/1444131
gacattataaaat

SEQ ID NO: 83798 - DNA, 13 bp, Unknown
  misc_feature (1)..( 13): Result.001 file - promoters70/1444131
gaccttaaaaaat

SEQ ID NO: 83799 - DNA, 13 bp, Unknown
  misc_feature (1)..( 13): Result.001 file - promoters70/1444131
caaacaataaaat

SEQ ID NO: 83800 - DNA, 13 bp, Unknown
  misc_feature (1)..( 13): Result.001 file - promoters70/1444131
taaaaaatcaaaa

SEQ ID NO: 83801 - DNA, 13 bp, Unknown
  misc_feature (1)..( 13): Result.001 file - promoters70/1444441
gacattataaaat

SEQ ID NO: 83802 - DNA, 11 bp, Unknown
  misc_feature (1)..( 11): Result.001 file - promoters70/1444441
aactcttttga

SEQ ID NO: 83803 - DNA, 11 bp, Unknown
  misc_feature (1)..( 11): Result.001 file - promoters70/1444441
aactcttttga

SEQ ID NO: 83804 - DNA, 11 bp, Unknown
  misc_feature (1)..( 11): Result.001 file - promoters70/1444441
tactatttata

SEQ ID NO: 83805 - DNA, 11 bp, Unknown
  misc_feature (1)..( 11): Result.001 file - promoters70/1444441
gtatctttttg

SEQ ID NO: 83806 - DNA, 11 bp, Unknown
  misc_feature (1)..( 11): Result.001 file - promoters70/1444441
atttcttttca

SEQ ID NO: 83807 - DNA, 12 bp, Unknown
  misc_feature (1)..( 12): Result.001 file - promoters70/1444460
aaatcttcttga

SEQ ID NO: 83808 - DNA, 9 bp, Unknown
  misc_feature (1)..( 9): Result.001 file - promoters70/1444460
cgaaacaca

SEQ ID NO: 83809 - DNA, 9 bp, Unknown
  misc_feature (1)..( 9): Result.001 file - promoters70/1444460
tgaaacagg

SEQ ID NO: 83810 - DNA, 9 bp, Unknown
  misc_feature (1)..( 9): Result.001 file - promoters70/1444460
ttaaacaca

SEQ ID NO: 83811 - DNA, 9 bp, Unknown
  misc_feature (1)..( 9): Result.001 file - promoters70/1444460
tgaaacgaa

SEQ ID NO: 83812 - DNA, 7 bp, Unknown
  misc_feature (1)..( 7): Result.001 file - promoters70/1444460
tttcttc

SEQ ID NO: 83813 - DNA, 7 bp, Unknown
  misc_feature (1)..( 7): Result.001 file - promoters70/1444460
tttcttc

SEQ ID NO: 83814 - DNA, 7 bp, Unknown
  misc_feature (1)..( 7): Result.001 file - promoters70/1444479
tttcttc

SEQ ID NO: 83815 - DNA, 18 bp, Unknown
  misc_feature (1)..( 18): Result.001 file - promoters70/1444479
aaaaattattaaagtata

SEQ ID NO: 83816 - DNA, 18 bp, Unknown
  misc_feature (1)..( 18): Result.001 file - promoters70/1444479
aaagattattaaattata

SEQ ID NO: 83817 - DNA, 18 bp, Unknown
  misc_feature (1)..( 18): Result.001 file - promoters70/1444479
aaaatttatctgtaaatg

SEQ ID NO: 83818 - DNA, 10 bp, Unknown
  misc_feature (1)..( 10): Result.001 file - promoters70/1444479
tttactaata

SEQ ID NO: 83819 - DNA, 10 bp, Unknown
  misc_feature (1)..( 10): Result.001 file - promoters70/1444479
attattaaag

SEQ ID NO: 83820 - DNA, 10 bp, Unknown
  misc_feature (1)..( 10): Result.001 file - promoters70/1444479
tttgctatac

SEQ ID NO: 83821 - DNA, 10 bp, Unknown
  misc_feature (1)..( 10): Result.001 file - promoters70/1444479
tataataatt

SEQ ID NO: 83822 - DNA, 9 bp, Unknown
  misc_feature (1)..( 9): Result.001 file - promoters70/1444479
ataatttta

SEQ ID NO: 83823 - DNA, 9 bp, Unknown
  misc_feature (1)..( 9): Result.001 file - promoters70/1444479
ctaatttta

SEQ ID NO: 83824 - DNA, 9 bp, Unknown
  misc_feature (1)..( 9): Result.001 file - promoters70/1444479
ataattatt

SEQ ID NO: 83825 - DNA, 7 bp, Unknown
  misc_feature (1)..( 7): Result.001 file - promoters70/1444479
catttta

SEQ ID NO: 83826 - DNA, 7 bp, Unknown
  misc_feature (1)..( 7): Result.001 file - promoters70/1444479
tatttta

SEQ ID NO: 83827 - DNA, 7 bp, Unknown
  misc_feature (1)..( 7): Result.001 file - promoters70/1444479
tattttt

SEQ ID NO: 83828 - DNA, 10 bp, Unknown
  misc_feature (1)..( 10): Result.001 file - promoters70/1444479
ctatatatat

SEQ ID NO: 83829 - DNA, 10 bp, Unknown
  misc_feature (1)..( 10): Result.001 file - promoters70/1444479
ttatttatat

SEQ ID NO: 83830 - DNA, 10 bp, Unknown
  misc_feature (1)..( 10): Result.001 file - promoters70/1444479
gtatatataa

SEQ ID NO: 83831 - DNA, 10 bp, Unknown
  misc_feature (1)..( 10): Result.001 file - promoters70/1444479
ctatataaac

SEQ ID NO: 83832 - DNA, 9 bp, Unknown
  misc_feature (1)..( 9): Result.001 file - promoters70/1444479
ctaatttta

SEQ ID NO: 83833 - DNA, 9 bp, Unknown
  misc_feature (1)..( 9): Result.001 file - promoters70/1444479
ctaatttta

SEQ ID NO: 83834 - DNA, 9 bp, Unknown
  misc_feature (1)..( 9): Result.001 file - promoters70/1444479
aaaatgtta

SEQ ID NO: 83835 - DNA, 8 bp, Unknown
  misc_feature (1)..( 8): Result.001 file - promoters70/1444479
ttttgtta

SEQ ID NO: 83836 - DNA, 8 bp, Unknown
  misc_feature (1)..( 8): Result.001 file - promoters70/1444479
atttgtta

SEQ ID NO: 83837 - DNA, 8 bp, Unknown
  misc_feature (1)..( 8): Result.001 file - promoters70/1444479
ttttgttt

SEQ ID NO: 83838 - DNA, 8 bp, Unknown
  misc_feature (1)..( 8): Result.001 file - promoters70/1444479
tcaaaaaa

SEQ ID NO: 83839 - DNA, 8 bp, Unknown
  misc_feature (1)..( 8): Result.001 file - promoters70/1444479
acaaaaaa

SEQ ID NO: 83840 - DNA, 8 bp, Unknown
  misc_feature (1)..( 8): Result.001 file - promoters70/1444479
acaaaact

SEQ ID NO: 83841 - DNA, 11 bp, Unknown
  misc_feature (1)..( 11): Result.001 file - promoters70/1444479
aaacaatcatt

SEQ ID NO: 83842 - DNA, 11 bp, Unknown
  misc_feature (1)..( 11): Result.001 file - promoters70/1444479
aaaaaataatt

SEQ ID NO: 83843 - DNA, 11 bp, Unknown
  misc_feature (1)..( 11): Result.001 file - promoters70/1444479
aaaaaattgat

SEQ ID NO: 83844 - DNA, 8 bp, Unknown
  misc_feature (1)..( 8): Result.001 file - promoters70/1444479
taatagaa

SEQ ID NO: 83845 - DNA, 8 bp, Unknown
  misc_feature (1)..( 8): Result.001 file - promoters70/1444479
taattgaa

SEQ ID NO: 83846 - DNA, 8 bp, Unknown
  misc_feature (1)..( 8): Result.001 file - promoters70/1444479
aaattatt

SEQ ID NO: 83847 - DNA, 9 bp, Unknown
  misc_feature (1)..( 9): Result.001 file - promoters70/1444479
aacatattt

SEQ ID NO: 83848 - DNA, 9 bp, Unknown
  misc_feature (1)..( 9): Result.001 file - promoters70/1444479
aaaatattt

SEQ ID NO: 83849 - DNA, 9 bp, Unknown
  misc_feature (1)..( 9): Result.001 file - promoters70/1444479
aaaacattt

SEQ ID NO: 83850 - DNA, 7 bp, Unknown
  misc_feature (1)..( 7): Result.001 file - promoters70/1444479
attttgt

SEQ ID NO: 83851 - DNA, 7 bp, Unknown
  misc_feature (1)..( 7): Result.001 file - promoters70/1444479
attttgt

SEQ ID NO: 83852 - DNA, 7 bp, Unknown
  misc_feature (1)..( 7): Result.001 file - promoters70/1444479
tttttgt

SEQ ID NO: 83853 - DNA, 8 bp, Unknown
  misc_feature (1)..( 8): Result.001 file - promoters70/1444479
aaaaaaat

SEQ ID NO: 83854 - DNA, 8 bp, Unknown
  misc_feature (1)..( 8): Result.001 file - promoters70/1444479
aaaaaaaa

SEQ ID NO: 83855 - DNA, 8 bp, Unknown
  misc_feature (1)..( 8): Result.001 file - promoters70/1444506
aaaaaaat

SEQ ID NO: 83856 - DNA, 18 bp, Unknown
  misc_feature (1)..( 18): Result.001 file - promoters70/1444506
aaaaattattaaagtata

SEQ ID NO: 83857 - DNA, 18 bp, Unknown
  misc_feature (1)..( 18): Result.001 file - promoters70/1444506
aaagattattaaattata

SEQ ID NO: 83858 - DNA, 18 bp, Unknown
  misc_feature (1)..( 18): Result.001 file - promoters70/1444506
aaaatttatctgtaaatg

SEQ ID NO: 83859 - DNA, 10 bp, Unknown
  misc_feature (1)..( 10): Result.001 file - promoters70/1444506
tttactaata

SEQ ID NO: 83860 - DNA, 10 bp, Unknown
  misc_feature (1)..( 10): Result.001 file - promoters70/1444506
attattaaag

SEQ ID NO: 83861 - DNA, 10 bp, Unknown
  misc_feature (1)..( 10): Result.001 file - promoters70/1444506
tttgctatac

SEQ ID NO: 83862 - DNA, 10 bp, Unknown
  misc_feature (1)..( 10): Result.001 file - promoters70/1444506
tataataatt

SEQ ID NO: 83863 - DNA, 9 bp, Unknown
  misc_feature (1)..( 9): Result.001 file - promoters70/1444506
ataatttta

SEQ ID NO: 83864 - DNA, 9 bp, Unknown
  misc_feature (1)..( 9): Result.001 file - promoters70/1444506
ctaatttta

SEQ ID NO: 83865 - DNA, 9 bp, Unknown
  misc_feature (1)..( 9): Result.001 file - promoters70/1444506
ataattatt

SEQ ID NO: 83866 - DNA, 7 bp, Unknown
  misc_feature (1)..( 7): Result.001 file - promoters70/1444506
catttta

SEQ ID NO: 83867 - DNA, 7 bp, Unknown
  misc_feature (1)..( 7): Result.001 file - promoters70/1444506
tatttta

SEQ ID NO: 83868 - DNA, 7 bp, Unknown
  misc_feature (1)..( 7): Result.001 file - promoters70/1444506
tattttt

SEQ ID NO: 83869 - DNA, 10 bp, Unknown
  misc_feature (1)..( 10): Result.001 file - promoters70/1444506
ctatatatat

SEQ ID NO: 83870 - DNA, 10 bp, Unknown
  misc_feature (1)..( 10): Result.001 file - promoters70/1444506
ttatttatat

SEQ ID NO: 83871 - DNA, 10 bp, Unknown
  misc_feature (1)..( 10): Result.001 file - promoters70/1444506
gtatatataa

SEQ ID NO: 83872 - DNA, 10 bp, Unknown
  misc_feature (1)..( 10): Result.001 file - promoters70/1444506
ctatataaac

SEQ ID NO: 83873 - DNA, 9 bp, Unknown
  misc_feature (1)..( 9): Result.001 file - promoters70/1444506
ctaatttta

SEQ ID NO: 83874 - DNA, 9 bp, Unknown
  misc_feature (1)..( 9): Result.001 file - promoters70/1444506
ctaatttta

SEQ ID NO: 83875 - DNA, 9 bp, Unknown
  misc_feature (1)..( 9): Result.001 file - promoters70/1444506
aaaatgtta

SEQ ID NO: 83876 - DNA, 8 bp, Unknown
  misc_feature (1)..( 8): Result.001 file - promoters70/1444506
ttttgtta

SEQ ID NO: 83877 - DNA, 8 bp, Unknown
  misc_feature (1)..( 8): Result.001 file - promoters70/1444506
atttgtta

SEQ ID NO: 83878 - DNA, 8 bp, Unknown
  misc_feature (1)..( 8): Result.001 file - promoters70/1444506
ttttgttt

SEQ ID NO: 83879 - DNA, 8 bp, Unknown
  misc_feature (1)..( 8): Result.001 file - promoters70/1444506
tcaaaaaa

SEQ ID NO: 83880 - DNA, 8 bp, Unknown
  misc_feature (1)..( 8): Result.001 file - promoters70/1444506
acaaaaaa

SEQ ID NO: 83881 - DNA, 8 bp, Unknown
  misc_feature (1)..( 8): Result.001 file - promoters70/1444506
acaaaact

SEQ ID NO: 83882 - DNA, 11 bp, Unknown
  misc_feature (1)..( 11): Result.001 file - promoters70/1444506
aaacaatcatt

SEQ ID NO: 83883 - DNA, 11 bp, Unknown
  misc_feature (1)..( 11): Result.001 file - promoters70/1444506
aaaaaataatt

SEQ ID NO: 83884 - DNA, 11 bp, Unknown
  misc_feature (1)..( 11): Result.001 file - promoters70/1444506
aaaaaattgat

SEQ ID NO: 83885 - DNA, 8 bp, Unknown
  misc_feature (1)..( 8): Result.001 file - promoters70/1444506
taatagaa

SEQ ID NO: 83886 - DNA, 8 bp, Unknown
  misc_feature (1)..( 8): Result.001 file - promoters70/1444506
taattgaa

SEQ ID NO: 83887 - DNA, 8 bp, Unknown
  misc_feature (1)..( 8): Result.001 file - promoters70/1444506
aaattatt

SEQ ID NO: 83888 - DNA, 9 bp, Unknown
  misc_feature (1)..( 9): Result.001 file - promoters70/1444506
aacatattt

SEQ ID NO: 83889 - DNA, 9 bp, Unknown
  misc_feature (1)..( 9): Result.001 file - promoters70/1444506
aaaatattt

SEQ ID NO: 83890 - DNA, 9 bp, Unknown
  misc_feature (1)..( 9): Result.001 file - promoters70/1444506
aaaacattt

SEQ ID NO: 83891 - DNA, 7 bp, Unknown
  misc_feature (1)..( 7): Result.001 file - promoters70/1444506
attttgt

SEQ ID NO: 83892 - DNA, 7 bp, Unknown
  misc_feature (1)..( 7): Result.001 file - promoters70/1444506
attttgt

SEQ ID NO: 83893 - DNA, 7 bp, Unknown
  misc_feature (1)..( 7): Result.001 file - promoters70/1444506
tttttgt

SEQ ID NO: 83894 - DNA, 8 bp, Unknown
  misc_feature (1)..( 8): Result.001 file - promoters70/1444506
aaaaaaat

SEQ ID NO: 83895 - DNA, 8 bp, Unknown
  misc_feature (1)..( 8): Result.001 file - promoters70/1444506
aaaaaaaa

SEQ ID NO: 83896 - DNA, 8 bp, Unknown
  misc_feature (1)..( 8): Result.001 file - promoters70/1444514
aaaaaaat

SEQ ID NO: 83897 - DNA, 18 bp, Unknown
  misc_feature (1)..( 18): Result.001 file - promoters70/1444514
aaaaattattaaagtata

SEQ ID NO: 83898 - DNA, 18 bp, Unknown
  misc_feature (1)..( 18): Result.001 file - promoters70/1444514
aaagattattaaattata

SEQ ID NO: 83899 - DNA, 18 bp, Unknown
  misc_feature (1)..( 18): Result.001 file - promoters70/1444514
aaaatttatctgtaaatg

SEQ ID NO: 83900 - DNA, 9 bp, Unknown
  misc_feature (1)..( 9): Result.001 file - promoters70/1444514
ttactaata

SEQ ID NO: 83901 - DNA, 9 bp, Unknown
  misc_feature (1)..( 9): Result.001 file - promoters70/1444514
ttattaaag

SEQ ID NO: 83902 - DNA, 9 bp, Unknown
  misc_feature (1)..( 9): Result.001 file - promoters70/1444514
ataataatt

SEQ ID NO: 83903 - DNA, 9 bp, Unknown
  misc_feature (1)..( 9): Result.001 file - promoters70/1444514
ataatttta

SEQ ID NO: 83904 - DNA, 9 bp, Unknown
  misc_feature (1)..( 9): Result.001 file - promoters70/1444514
ctaatttta

SEQ ID NO: 83905 - DNA, 9 bp, Unknown
  misc_feature (1)..( 9): Result.001 file - promoters70/1444514
ataattatt

SEQ ID NO: 83906 - DNA, 10 bp, Unknown
  misc_feature (1)..( 10): Result.001 file - promoters70/1444514
ctatatatat

SEQ ID NO: 83907 - DNA, 10 bp, Unknown
  misc_feature (1)..( 10): Result.001 file - promoters70/1444514
ttatttatat

SEQ ID NO: 83908 - DNA, 10 bp, Unknown
  misc_feature (1)..( 10): Result.001 file - promoters70/1444514
ctatataaac

SEQ ID NO: 83909 - DNA, 8 bp, Unknown
  misc_feature (1)..( 8): Result.001 file - promoters70/1444514
taatagaa

SEQ ID NO: 83910 - DNA, 8 bp, Unknown
  misc_feature (1)..( 8): Result.001 file - promoters70/1444514
taattgaa

SEQ ID NO: 83911 - DNA, 8 bp, Unknown
  misc_feature (1)..( 8): Result.001 file - promoters70/1446636
aaattatt

SEQ ID NO: 83912 - DNA, 9 bp, Unknown
  misc_feature (1)..( 9): Result.001 file - promoters70/1446636
aagggtaaa

SEQ ID NO: 83913 - DNA, 9 bp, Unknown
  misc_feature (1)..( 9): Result.001 file - promoters70/1446636
gaggttaaa

SEQ ID NO: 83914 - DNA, 9 bp, Unknown
  misc_feature (1)..( 9): Result.001 file - promoters70/1446636
gaggtgaaa

SEQ ID NO: 83915 - DNA, 8 bp, Unknown
  misc_feature (1)..( 8): Result.001 file - promoters70/1446636
taaggata

SEQ ID NO: 83916 - DNA, 8 bp, Unknown
  misc_feature (1)..( 8): Result.001 file - promoters70/1446636
aaaggata

SEQ ID NO: 83917 - DNA, 9 bp, Unknown
  misc_feature (1)..( 9): Result.001 file - promoters70/1447425
aaatggaac

SEQ ID NO: 83918 - DNA, 10 bp, Unknown
  misc_feature (1)..( 10): Result.001 file - promoters70/1447425
aatttggcgg

SEQ ID NO: 83919 - DNA, 10 bp, Unknown
  misc_feature (1)..( 10): Result.001 file - promoters70/1447425
aatttgatag

SEQ ID NO: 83920 - DNA, 10 bp, Unknown
  misc_feature (1)..( 10): Result.001 file - promoters70/1447646
catttgattt

SEQ ID NO: 83921 - DNA, 10 bp, Unknown
  misc_feature (1)..( 10): Result.001 file - promoters70/1447646
ggaaggagag

SEQ ID NO: 83922 - DNA, 10 bp, Unknown
  misc_feature (1)..( 10): Result.001 file - promoters70/1447646
ggaagtagag

SEQ ID NO: 83923 - DNA, 10 bp, Unknown
  misc_feature (1)..( 10): Result.001 file - promoters70/1447646
ggaagtagag

SEQ ID NO: 83924 - DNA, 10 bp, Unknown
  misc_feature (1)..( 10): Result.001 file - promoters70/1447646
gaagaaagga

SEQ ID NO: 83925 - DNA, 10 bp, Unknown
  misc_feature (1)..( 10): Result.001 file - promoters70/1447646
gaaggaagga

SEQ ID NO: 83926 - DNA, 10 bp, Unknown
  misc_feature (1)..( 10): Result.001 file - promoters70/1447646
taagaaaaaa

SEQ ID NO: 83927 - DNA, 9 bp, Unknown
  misc_feature (1)..( 9): Result.001 file - promoters70/1447646
gagatgaga

SEQ ID NO: 83928 - DNA, 9 bp, Unknown
  misc_feature (1)..( 9): Result.001 file - promoters70/1447646
aagatgatg

SEQ ID NO: 83929 - DNA, 9 bp, Unknown
  misc_feature (1)..( 9): Result.001 file - promoters70/1447646
aagttgatg

SEQ ID NO: 83930 - DNA, 8 bp, Unknown
  misc_feature (1)..( 8): Result.001 file - promoters70/1447646
gataaaga

SEQ ID NO: 83931 - DNA, 8 bp, Unknown
  misc_feature (1)..( 8): Result.001 file - promoters70/1447646
gataaaat

SEQ ID NO: 83932 - DNA, 8 bp, Unknown
  misc_feature (1)..( 8): Result.001 file - promoters70/1447646
gataaaga

SEQ ID NO: 83933 - DNA, 8 bp, Unknown
  misc_feature (1)..( 8): Result.001 file - promoters70/1447646
agtggaaa

SEQ ID NO: 83934 - DNA, 8 bp, Unknown
  misc_feature (1)..( 8): Result.001 file - promoters70/1447646
tgtgaaaa

SEQ ID NO: 83935 - DNA, 8 bp, Unknown
  misc_feature (1)..( 8): Result.001 file - promoters70/1447646
agttgaag

SEQ ID NO: 83936 - DNA, 8 bp, Unknown
  misc_feature (1)..( 8): Result.001 file - promoters70/1447646
gaagttga

SEQ ID NO: 83937 - DNA, 8 bp, Unknown
  misc_feature (1)..( 8): Result.001 file - promoters70/1447646
gaatttgt

SEQ ID NO: 83938 - DNA, 8 bp, Unknown
  misc_feature (1)..( 8): Result.001 file - promoters70/1447953
gaagttga

SEQ ID NO: 83939 - DNA, 11 bp, Unknown
  misc_feature (1)..( 11): Result.001 file - promoters70/1447953
ttataattatg

SEQ ID NO: 83940 - DNA, 11 bp, Unknown
  misc_feature (1)..( 11): Result.001 file - promoters70/1447953
atattattatt

SEQ ID NO: 83941 - DNA, 11 bp, Unknown
  misc_feature (1)..( 11): Result.001 file - promoters70/1447953
ttataagtata

SEQ ID NO: 83942 - DNA, 11 bp, Unknown
  misc_feature (1)..( 11): Result.001 file - promoters70/1447953
atataagtaac

SEQ ID NO: 83943 - DNA, 11 bp, Unknown
  misc_feature (1)..( 11): Result.001 file - promoters70/1448231
caatctttata

SEQ ID NO: 83944 - DNA, 7 bp, Unknown
  misc_feature (1)..( 7): Result.001 file - promoters70/1448231
cttaact

SEQ ID NO: 83945 - DNA, 7 bp, Unknown
  misc_feature (1)..( 7): Result.001 file - promoters70/1448231
cttaacc

SEQ ID NO: 83946 - DNA, 7 bp, Unknown
  misc_feature (1)..( 7): Result.001 file - promoters70/1450625
tttaacc

SEQ ID NO: 83947 - DNA, 8 bp, Unknown
  misc_feature (1)..( 8): Result.001 file - promoters70/1450625
aattttga

SEQ ID NO: 83948 - DNA, 8 bp, Unknown
  misc_feature (1)..( 8): Result.001 file - promoters70/1450625
aattttaa

SEQ ID NO: 83949 - DNA, 8 bp, Unknown
  misc_feature (1)..( 8): Result.001 file - promoters70/1450625
cattgtaa

SEQ ID NO: 83950 - DNA, 6 bp, Unknown
  misc_feature (1)..( 6): Result.001 file - promoters70/1450625
ttattc

SEQ ID NO: 83951 - DNA, 6 bp, Unknown
  misc_feature (1)..( 6): Result.001 file - promoters70/1450625
ttattc

SEQ ID NO: 83952 - DNA, 6 bp, Unknown
  misc_feature (1)..( 6): Result.001 file - promoters70/1450696
ttattc

SEQ ID NO: 83953 - DNA, 9 bp, Unknown
  misc_feature (1)..( 9): Result.001 file - promoters70/1450696
aaaaataat

SEQ ID NO: 83954 - DNA, 9 bp, Unknown
  misc_feature (1)..( 9): Result.001 file - promoters70/1450696
aaaactaaa

SEQ ID NO: 83955 - DNA, 9 bp, Unknown
  misc_feature (1)..( 9): Result.001 file - promoters70/1450696
caaaccaaa

SEQ ID NO: 83956 - DNA, 9 bp, Unknown
  misc_feature (1)..( 9): Result.001 file - promoters70/1450696
aaaaccacc

SEQ ID NO: 83957 - DNA, 8 bp, Unknown
  misc_feature (1)..( 8): Result.001 file - promoters70/1450696
aatatata

SEQ ID NO: 83958 - DNA, 8 bp, Unknown
  misc_feature (1)..( 8): Result.001 file - promoters70/1450696
tatatata

SEQ ID NO: 83959 - DNA, 8 bp, Unknown
  misc_feature (1)..( 8): Result.001 file - promoters70/1450696
aatataaa

SEQ ID NO: 83960 - DNA, 8 bp, Unknown
  misc_feature (1)..( 8): Result.001 file - promoters70/1450696
catatatt

SEQ ID NO: 83961 - DNA, 8 bp, Unknown
  misc_feature (1)..( 8): Result.001 file - promoters70/1450696
ttttttct

SEQ ID NO: 83962 - DNA, 8 bp, Unknown
  misc_feature (1)..( 8): Result.001 file - promoters70/1450696
tttttttg

SEQ ID NO: 83963 - DNA, 8 bp, Unknown
  misc_feature (1)..( 8): Result.001 file - promoters70/1450696
ttttttta

SEQ ID NO: 83964 - DNA, 9 bp, Unknown
  misc_feature (1)..( 9): Result.001 file - promoters70/1450811
ttttattag

SEQ ID NO: 83965 - DNA, 9 bp, Unknown
  misc_feature (1)..( 9): Result.001 file - promoters70/1450811
agatattta

SEQ ID NO: 83966 - DNA, 9 bp, Unknown
  misc_feature (1)..( 9): Result.001 file - promoters70/1450811
agatactta

SEQ ID NO: 83967 - DNA, 9 bp, Unknown
  misc_feature (1)..( 9): Result.001 file - promoters70/1455944
ggctactta

SEQ ID NO: 83968 - DNA, 11 bp, Unknown
  misc_feature (1)..( 11): Result.001 file - promoters70/1455944
aaataaaatgt

SEQ ID NO: 83969 - DNA, 11 bp, Unknown
  misc_feature (1)..( 11): Result.001 file - promoters70/1455944
tgctaaaattg

SEQ ID NO: 83970 - DNA, 11 bp, Unknown
  misc_feature (1)..( 11): Result.001 file - promoters70/1455944
aaagaaaacat

SEQ ID NO: 83971 - DNA, 11 bp, Unknown
  misc_feature (1)..( 11): Result.001 file - promoters70/1455944
acgtaagattg

SEQ ID NO: 83972 - DNA, 11 bp, Unknown
  misc_feature (1)..( 11): Result.001 file - promoters70/1455944
caaaatagatt

SEQ ID NO: 83973 - DNA, 11 bp, Unknown
  misc_feature (1)..( 11): Result.001 file - promoters70/1455944
aaaaaaagaaa

SEQ ID NO: 83974 - DNA, 11 bp, Unknown
  misc_feature (1)..( 11): Result.001 file - promoters70/1455944
caataaagtag

SEQ ID NO: 83975 - DNA, 11 bp, Unknown
  misc_feature (1)..( 11): Result.001 file - promoters70/1455944
aaataaagctt

SEQ ID NO: 83976 - DNA, 11 bp, Unknown
  misc_feature (1)..( 11): Result.001 file - promoters70/1455944
caacaaaatag

SEQ ID NO: 83977 - DNA, 11 bp, Unknown
  misc_feature (1)..( 11): Result.001 file - promoters70/1455944
aaacaaagaaa

SEQ ID NO: 83978 - DNA, 11 bp, Unknown
  misc_feature (1)..( 11): Result.001 file - promoters70/1455944
caataaagtag

SEQ ID NO: 83979 - DNA, 11 bp, Unknown
  misc_feature (1)..( 11): Result.001 file - promoters70/1455944
aaataaagctt

SEQ ID NO: 83980 - DNA, 7 bp, Unknown
  misc_feature (1)..( 7): Result.001 file - promoters70/1455944
aaattaa

SEQ ID NO: 83981 - DNA, 7 bp, Unknown
  misc_feature (1)..( 7): Result.001 file - promoters70/1455944
aaattat

SEQ ID NO: 83982 - DNA, 7 bp, Unknown
  misc_feature (1)..( 7): Result.001 file - promoters70/1455944
aaagtaa

SEQ ID NO: 83983 - DNA, 7 bp, Unknown
  misc_feature (1)..( 7): Result.001 file - promoters70/1455944
aaatatt

SEQ ID NO: 83984 - DNA, 8 bp, Unknown
  misc_feature (1)..( 8): Result.001 file - promoters70/1455944
ggaaaaaa

SEQ ID NO: 83985 - DNA, 8 bp, Unknown
  misc_feature (1)..( 8): Result.001 file - promoters70/1455944
tgaacaaa

SEQ ID NO: 83986 - DNA, 8 bp, Unknown
  misc_feature (1)..( 8): Result.001 file - promoters70/1455944
tgaccaaa

SEQ ID NO: 83987 - DNA, 11 bp, Unknown
  misc_feature (1)..( 11): Result.001 file - promoters70/1455944
gaatctctctg

SEQ ID NO: 83988 - DNA, 11 bp, Unknown
  misc_feature (1)..( 11): Result.001 file - promoters70/1455944
caatcactctc

SEQ ID NO: 83989 - DNA, 11 bp, Unknown
  misc_feature (1)..( 11): Result.001 file - promoters70/1455944
caatccctctc

SEQ ID NO: 83990 - DNA, 10 bp, Unknown
  misc_feature (1)..( 10): Result.001 file - promoters70/1455944
tatatatacc

SEQ ID NO: 83991 - DNA, 10 bp, Unknown
  misc_feature (1)..( 10): Result.001 file - promoters70/1455944
tatataatag

SEQ ID NO: 83992 - DNA, 10 bp, Unknown
  misc_feature (1)..( 10): Result.001 file - promoters70/1455944
tatataaacc

SEQ ID NO: 83993 - DNA, 10 bp, Unknown
  misc_feature (1)..( 10): Result.001 file - promoters70/1455944
tatttaaaca

SEQ ID NO: 83994 - DNA, 9 bp, Unknown
  misc_feature (1)..( 9): Result.001 file - promoters70/1455944
ttgaccagg

SEQ ID NO: 83995 - DNA, 9 bp, Unknown
  misc_feature (1)..( 9): Result.001 file - promoters70/1455944
ttgaccaaa

SEQ ID NO: 83996 - DNA, 9 bp, Unknown
  misc_feature (1)..( 9): Result.001 file - promoters70/1455956
atgaacaaa

SEQ ID NO: 83997 - DNA, 9 bp, Unknown
  misc_feature (1)..( 9): Result.001 file - promoters70/1455956
tgttaattt

SEQ ID NO: 83998 - DNA, 9 bp, Unknown
  misc_feature (1)..( 9): Result.001 file - promoters70/1455956
tgttaattg

SEQ ID NO: 83999 - DNA, 9 bp, Unknown
  misc_feature (1)..( 9): Result.001 file - promoters70/1455956
agttgattt

SEQ ID NO: 84000 - DNA, 8 bp, Unknown
  misc_feature (1)..( 8): Result.001 file - promoters70/1455956
ttgatttg

SEQ ID NO: 84001 - DNA, 8 bp, Unknown
  misc_feature (1)..( 8): Result.001 file - promoters70/1455956
ttgttttg

SEQ ID NO: 84002 - DNA, 8 bp, Unknown
  misc_feature (1)..( 8): Result.001 file - promoters70/1455956
ttgattct

SEQ ID NO: 84003 - DNA, 8 bp, Unknown
  misc_feature (1)..( 8): Result.001 file - promoters70/1455956
taacttcc

SEQ ID NO: 84004 - DNA, 8 bp, Unknown
  misc_feature (1)..( 8): Result.001 file - promoters70/1455956
taatttca

SEQ ID NO: 84005 - DNA, 8 bp, Unknown
  misc_feature (1)..( 8): Result.001 file - promoters70/1455956
aaacctcc

SEQ ID NO: 84006 - DNA, 8 bp, Unknown
  misc_feature (1)..( 8): Result.001 file - promoters70/1455956
ataaattt

SEQ ID NO: 84007 - DNA, 8 bp, Unknown
  misc_feature (1)..( 8): Result.001 file - promoters70/1455956
ttaatttt

SEQ ID NO: 84008 - DNA, 8 bp, Unknown
  misc_feature (1)..( 8): Result.001 file - promoters70/1455972
ttaattgt

SEQ ID NO: 84009 - DNA, 10 bp, Unknown
  misc_feature (1)..( 10): Result.001 file - promoters70/1455972
ttcaaatata

SEQ ID NO: 84010 - DNA, 10 bp, Unknown
  misc_feature (1)..( 10): Result.001 file - promoters70/1455972
cacaaacata

SEQ ID NO: 84011 - DNA, 10 bp, Unknown
  misc_feature (1)..( 10): Result.001 file - promoters70/1459039
ttcagataaa

SEQ ID NO: 84012 - DNA, 9 bp, Unknown
  misc_feature (1)..( 9): Result.001 file - promoters70/1459039
atataaagg

SEQ ID NO: 84013 - DNA, 9 bp, Unknown
  misc_feature (1)..( 9): Result.001 file - promoters70/1459039
atataaatt

SEQ ID NO: 84014 - DNA, 9 bp, Unknown
  misc_feature (1)..( 9): Result.001 file - promoters70/1459039
ctataaaac

SEQ ID NO: 84015 - DNA, 9 bp, Unknown
  misc_feature (1)..( 9): Result.001 file - promoters70/1459039
ctataaatt

SEQ ID NO: 84016 - DNA, 9 bp, Unknown
  misc_feature (1)..( 9): Result.001 file - promoters70/1459039
atataaaga

SEQ ID NO: 84017 - DNA, 9 bp, Unknown
  misc_feature (1)..( 9): Result.001 file - promoters70/1459223
ctataaagg

SEQ ID NO: 84018 - DNA, 10 bp, Unknown
  misc_feature (1)..( 10): Result.001 file - promoters70/1459223
aaaaaaatat

SEQ ID NO: 84019 - DNA, 10 bp, Unknown
  misc_feature (1)..( 10): Result.001 file - promoters70/1459223
aaaaaaggaa

SEQ ID NO: 84020 - DNA, 11 bp, Unknown
  misc_feature (1)..( 11): Result.001 file - promoters70/1459223
aaagaaataat

SEQ ID NO: 84021 - DNA, 11 bp, Unknown
  misc_feature (1)..( 11): Result.001 file - promoters70/1459223
aaaaaaatggt

SEQ ID NO: 84022 - DNA, 11 bp, Unknown
  misc_feature (1)..( 11): Result.001 file - promoters70/1459223
gatgaaatatt

SEQ ID NO: 84023 - DNA, 11 bp, Unknown
  misc_feature (1)..( 11): Result.001 file - promoters70/1459223
tgataaatatt

SEQ ID NO: 84024 - DNA, 10 bp, Unknown
  misc_feature (1)..( 10): Result.001 file - promoters70/1459223
catataaaac

SEQ ID NO: 84025 - DNA, 10 bp, Unknown
  misc_feature (1)..( 10): Result.001 file - promoters70/1459223
tttataaata

SEQ ID NO: 84026 - DNA, 10 bp, Unknown
  misc_feature (1)..( 10): Result.001 file - promoters70/1459223
tttatacata

SEQ ID NO: 84027 - DNA, 10 bp, Unknown
  misc_feature (1)..( 10): Result.001 file - promoters70/1459223
gttattaata

SEQ ID NO: 84028 - DNA, 10 bp, Unknown
  misc_feature (1)..( 10): Result.001 file - promoters70/1459223
aataataact

SEQ ID NO: 84029 - DNA, 10 bp, Unknown
  misc_feature (1)..( 10): Result.001 file - promoters70/1459223
tcaattaatc

SEQ ID NO: 84030 - DNA, 10 bp, Unknown
  misc_feature (1)..( 10): Result.001 file - promoters70/1459223
caaacaaaac

SEQ ID NO: 84031 - DNA, 10 bp, Unknown
  misc_feature (1)..( 10): Result.001 file - promoters70/1459223
caatcaaatc

SEQ ID NO: 84032 - DNA, 10 bp, Unknown
  misc_feature (1)..( 10): Result.001 file - promoters70/1459223
caaagaaatt

SEQ ID NO: 84033 - DNA, 10 bp, Unknown
  misc_feature (1)..( 10): Result.001 file - promoters70/1459223
ttgtcaaatg

SEQ ID NO: 84034 - DNA, 10 bp, Unknown
  misc_feature (1)..( 10): Result.001 file - promoters70/1459223
gtaagaaaaa

SEQ ID NO: 84035 - DNA, 10 bp, Unknown
  misc_feature (1)..( 10): Result.001 file - promoters70/1461780
ttatttaatc

SEQ ID NO: 84036 - DNA, 11 bp, Unknown
  misc_feature (1)..( 11): Result.001 file - promoters70/1461780
ttttctcttcc

SEQ ID NO: 84037 - DNA, 11 bp, Unknown
  misc_feature (1)..( 11): Result.001 file - promoters70/1461780
tttactccatt

SEQ ID NO: 84038 - DNA, 11 bp, Unknown
  misc_feature (1)..( 11): Result.001 file - promoters70/1461791
aatactcaatt

SEQ ID NO: 84039 - DNA, 11 bp, Unknown
  misc_feature (1)..( 11): Result.001 file - promoters70/1461791
taaggtgtgtt

SEQ ID NO: 84040 - DNA, 11 bp, Unknown
  misc_feature (1)..( 11): Result.001 file - promoters70/1461791
gaagttgtgtt

SEQ ID NO: 84041 - DNA, 11 bp, Unknown
  misc_feature (1)..( 11): Result.001 file - promoters70/1461791
gaaattgaaac

SEQ ID NO: 84042 - DNA, 6 bp, Unknown
  misc_feature (1)..( 6): Result.001 file - promoters70/1461791
caattt

SEQ ID NO: 84043 - DNA, 6 bp, Unknown
  misc_feature (1)..( 6): Result.001 file - promoters70/1461791
caattt

SEQ ID NO: 84044 - DNA, 6 bp, Unknown
  misc_feature (1)..( 6): Result.001 file - promoters70/1461791
caattt

SEQ ID NO: 84045 - DNA, 9 bp, Unknown
  misc_feature (1)..( 9): Result.001 file - promoters70/1461791
actttaaat

SEQ ID NO: 84046 - DNA, 9 bp, Unknown
  misc_feature (1)..( 9): Result.001 file - promoters70/1461791
actataaat

SEQ ID NO: 84047 - DNA, 9 bp, Unknown
  misc_feature (1)..( 9): Result.001 file - promoters70/1461791
tatataaaa

SEQ ID NO: 84048 - DNA, 7 bp, Unknown
  misc_feature (1)..( 7): Result.001 file - promoters70/1461791
gttaaac

SEQ ID NO: 84049 - DNA, 7 bp, Unknown
  misc_feature (1)..( 7): Result.001 file - promoters70/1461791
gttgaac

SEQ ID NO: 84050 - DNA, 7 bp, Unknown
  misc_feature (1)..( 7): Result.001 file - promoters70/1461791
gttgaaa

SEQ ID NO: 84051 - DNA, 9 bp, Unknown
  misc_feature (1)..( 9): Result.001 file - promoters70/1461791
ttaaataaa

SEQ ID NO: 84052 - DNA, 9 bp, Unknown
  misc_feature (1)..( 9): Result.001 file - promoters70/1461791
tgaaacaaa

SEQ ID NO: 84053 - DNA, 9 bp, Unknown
  misc_feature (1)..( 9): Result.001 file - promoters70/1461791
tgaaacaca

SEQ ID NO: 84054 - DNA, 9 bp, Unknown
  misc_feature (1)..( 9): Result.001 file - promoters70/1461791
gacaataac

SEQ ID NO: 84055 - DNA, 7 bp, Unknown
  misc_feature (1)..( 7): Result.001 file - promoters70/1461791
gaaatcg

SEQ ID NO: 84056 - DNA, 7 bp, Unknown
  misc_feature (1)..( 7): Result.001 file - promoters70/1461791
gaattcg

SEQ ID NO: 84057 - DNA, 7 bp, Unknown
  misc_feature (1)..( 7): Result.001 file - promoters70/1461803
gaaatcg

SEQ ID NO: 84058 - DNA, 15 bp, Unknown
  misc_feature (1)..( 15): Result.001 file - promoters70/1461803
atggcatataattaa

SEQ ID NO: 84059 - DNA, 15 bp, Unknown
  misc_feature (1)..( 15): Result.001 file - promoters70/1461803
actccatttaatttt

SEQ ID NO: 84060 - DNA, 15 bp, Unknown
  misc_feature (1)..( 15): Result.001 file - promoters70/1461803
ttaaattatgattaa

SEQ ID NO: 84061 - DNA, 15 bp, Unknown
  misc_feature (1)..( 15): Result.001 file - promoters70/1461803
actacatttggagat

SEQ ID NO: 84062 - DNA, 8 bp, Unknown
  misc_feature (1)..( 8): Result.001 file - promoters70/1461803
caacatga

SEQ ID NO: 84063 - DNA, 8 bp, Unknown
  misc_feature (1)..( 8): Result.001 file - promoters70/1461803
caaaatgc

SEQ ID NO: 84064 - DNA, 8 bp, Unknown
  misc_feature (1)..( 8): Result.001 file - promoters70/1461803
aaacctga

SEQ ID NO: 84065 - DNA, 12 bp, Unknown
  misc_feature (1)..( 12): Result.001 file - promoters70/1461803
accaataaaaga

SEQ ID NO: 84066 - DNA, 12 bp, Unknown
  misc_feature (1)..( 12): Result.001 file - promoters70/1461803
tctcataaaaga

SEQ ID NO: 84067 - DNA, 12 bp, Unknown
  misc_feature (1)..( 12): Result.001 file - promoters70/1461803
accaagaaaacc

SEQ ID NO: 84068 - DNA, 11 bp, Unknown
  misc_feature (1)..( 11): Result.001 file - promoters70/1461803
agaagatgagt

SEQ ID NO: 84069 - DNA, 11 bp, Unknown
  misc_feature (1)..( 11): Result.001 file - promoters70/1461803
agaagagaaaa

SEQ ID NO: 84070 - DNA, 11 bp, Unknown
  misc_feature (1)..( 11): Result.001 file - promoters70/1461803
agacgattagt

SEQ ID NO: 84071 - DNA, 11 bp, Unknown
  misc_feature (1)..( 11): Result.001 file - promoters70/1461803
agaagatgagt

SEQ ID NO: 84072 - DNA, 11 bp, Unknown
  misc_feature (1)..( 11): Result.001 file - promoters70/1461803
aaacaatgagt

SEQ ID NO: 84073 - DNA, 11 bp, Unknown
  misc_feature (1)..( 11): Result.001 file - promoters70/1461803
agacgattagt

SEQ ID NO: 84074 - DNA, 8 bp, Unknown
  misc_feature (1)..( 8): Result.001 file - promoters70/1461803
aattttca

SEQ ID NO: 84075 - DNA, 8 bp, Unknown
  misc_feature (1)..( 8): Result.001 file - promoters70/1461803
aatcttcc

SEQ ID NO: 84076 - DNA, 8 bp, Unknown
  misc_feature (1)..( 8): Result.001 file - promoters70/1461803
tcttttca

SEQ ID NO: 84077 - DNA, 8 bp, Unknown
  misc_feature (1)..( 8): Result.001 file - promoters70/1461803
aataattt

SEQ ID NO: 84078 - DNA, 8 bp, Unknown
  misc_feature (1)..( 8): Result.001 file - promoters70/1461803
aataatta

SEQ ID NO: 84079 - DNA, 8 bp, Unknown
  misc_feature (1)..( 8): Result.001 file - promoters70/1461803
tatactta

SEQ ID NO: 84080 - DNA, 10 bp, Unknown
  misc_feature (1)..( 10): Result.001 file - promoters70/1461803
accaataaaa

SEQ ID NO: 84081 - DNA, 10 bp, Unknown
  misc_feature (1)..( 10): Result.001 file - promoters70/1461803
gccaatataa

SEQ ID NO: 84082 - DNA, 10 bp, Unknown
  misc_feature (1)..( 10): Result.001 file - promoters70/1461803
accaagaaaa

SEQ ID NO: 84083 - DNA, 10 bp, Unknown
  misc_feature (1)..( 10): Result.001 file - promoters70/1461803
taaaagaaag

SEQ ID NO: 84084 - DNA, 11 bp, Unknown
  misc_feature (1)..( 11): Result.001 file - promoters70/1461803
cacaatataaa

SEQ ID NO: 84085 - DNA, 11 bp, Unknown
  misc_feature (1)..( 11): Result.001 file - promoters70/1461803
gtcaatataaa

SEQ ID NO: 84086 - DNA, 11 bp, Unknown
  misc_feature (1)..( 11): Result.001 file - promoters70/1461803
gtcaataaata

SEQ ID NO: 84087 - DNA, 8 bp, Unknown
  misc_feature (1)..( 8): Result.001 file - promoters70/1461803
aaggaaat

SEQ ID NO: 84088 - DNA, 8 bp, Unknown
  misc_feature (1)..( 8): Result.001 file - promoters70/1461803
aagcaaaa

SEQ ID NO: 84089 - DNA, 9 bp, Unknown
  misc_feature (1)..( 9): Result.001 file - promoters70/1461839
ccgcacaac

SEQ ID NO: 84090 - DNA, 14 bp, Unknown
  misc_feature (1)..( 14): Result.001 file - promoters70/1461839
aaaaagaaaagaaa

SEQ ID NO: 84091 - DNA, 14 bp, Unknown
  misc_feature (1)..( 14): Result.001 file - promoters70/1461839
atttagataagtaa

SEQ ID NO: 84092 - DNA, 14 bp, Unknown
  misc_feature (1)..( 14): Result.001 file - promoters70/1461839
aaaaagaaaaagaa

SEQ ID NO: 84093 - DNA, 14 bp, Unknown
  misc_feature (1)..( 14): Result.001 file - promoters70/1461839
aaccagaaaagaaa

SEQ ID NO: 84094 - DNA, 11 bp, Unknown
  misc_feature (1)..( 11): Result.001 file - promoters70/1461839
aaagaaagaat

SEQ ID NO: 84095 - DNA, 11 bp, Unknown
  misc_feature (1)..( 11): Result.001 file - promoters70/1461839
aaaaaaagaaa

SEQ ID NO: 84096 - DNA, 11 bp, Unknown
  misc_feature (1)..( 11): Result.001 file - promoters70/1461839
cagaaaagaaa

SEQ ID NO: 84097 - DNA, 11 bp, Unknown
  misc_feature (1)..( 11): Result.001 file - promoters70/1461839
aagtaaagtat

SEQ ID NO: 84098 - DNA, 8 bp, Unknown
  misc_feature (1)..( 8): Result.001 file - promoters70/1461839
caatcttc

SEQ ID NO: 84099 - DNA, 8 bp, Unknown
  misc_feature (1)..( 8): Result.001 file - promoters70/1461839
caatctaa

SEQ ID NO: 84100 - DNA, 8 bp, Unknown
  misc_feature (1)..( 8): Result.001 file - promoters70/1461839
taatctaa

SEQ ID NO: 84101 - DNA, 8 bp, Unknown
  misc_feature (1)..( 8): Result.001 file - promoters70/1461839
caatcttc

SEQ ID NO: 84102 - DNA, 9 bp, Unknown
  misc_feature (1)..( 9): Result.001 file - promoters70/1461839
caaaggagg

SEQ ID NO: 84103 - DNA, 9 bp, Unknown
  misc_feature (1)..( 9): Result.001 file - promoters70/1461839
aaaaagaga

SEQ ID NO: 84104 - DNA, 9 bp, Unknown
  misc_feature (1)..( 9): Result.001 file - promoters70/1461839
caaaggagg

SEQ ID NO: 84105 - DNA, 9 bp, Unknown
  misc_feature (1)..( 9): Result.001 file - promoters70/1470993
aaaaggaga

SEQ ID NO: 84106 - DNA, 8 bp, Unknown
  misc_feature (1)..( 8): Result.001 file - promoters70/1470993
aaagattg

SEQ ID NO: 84107 - DNA, 8 bp, Unknown
  misc_feature (1)..( 8): Result.001 file - promoters70/1470993
aaagcttg

SEQ ID NO: 84108 - DNA, 8 bp, Unknown
  misc_feature (1)..( 8): Result.001 file - promoters70/1470993
aaaaattt

SEQ ID NO: 84109 - DNA, 7 bp, Unknown
  misc_feature (1)..( 7): Result.001 file - promoters70/1470993
ccactaa

SEQ ID NO: 84110 - DNA, 7 bp, Unknown
  misc_feature (1)..( 7): Result.001 file - promoters70/1470993
ccattaa

SEQ ID NO: 84111 - DNA, 7 bp, Unknown
  misc_feature (1)..( 7): Result.001 file - promoters70/1470993
ccattag

SEQ ID NO: 84112 - DNA, 9 bp, Unknown
  misc_feature (1)..( 9): Result.001 file - promoters70/1470993
cttaattta

SEQ ID NO: 84113 - DNA, 9 bp, Unknown
  misc_feature (1)..( 9): Result.001 file - promoters70/1470993
actaaatta

SEQ ID NO: 84114 - DNA, 9 bp, Unknown
  misc_feature (1)..( 9): Result.001 file - promoters70/1470993
actgaattc

SEQ ID NO: 84115 - DNA, 8 bp, Unknown
  misc_feature (1)..( 8): Result.001 file - promoters70/1470993
cagttttc

SEQ ID NO: 84116 - DNA, 8 bp, Unknown
  misc_feature (1)..( 8): Result.001 file - promoters70/1470993
tagttttg

SEQ ID NO: 84117 - DNA, 8 bp, Unknown
  misc_feature (1)..( 8): Result.001 file - promoters70/1471041
tagctttg

SEQ ID NO: 84118 - DNA, 6 bp, Unknown
  misc_feature (1)..( 6): Result.001 file - promoters70/1471041
ataaat

SEQ ID NO: 84119 - DNA, 7 bp, Unknown
  misc_feature (1)..( 7): Result.001 file - promoters70/1471041
aataaat

SEQ ID NO: 84120 - DNA, 7 bp, Unknown
  misc_feature (1)..( 7): Result.001 file - promoters70/1471041
caaaaaa

SEQ ID NO: 84121 - DNA, 7 bp, Unknown
  misc_feature (1)..( 7): Result.001 file - promoters70/1471041
aaacatg

SEQ ID NO: 84122 - DNA, 7 bp, Unknown
  misc_feature (1)..( 7): Result.001 file - promoters70/1471041
aaaaatg

SEQ ID NO: 84123 - DNA, 7 bp, Unknown
  misc_feature (1)..( 7): Result.001 file - promoters70/1472778
aaaaata

SEQ ID NO: 84124 - DNA, 13 bp, Unknown
  misc_feature (1)..( 13): Result.001 file - promoters70/1472778
gtttaaaacaaag

SEQ ID NO: 84125 - DNA, 13 bp, Unknown
  misc_feature (1)..( 13): Result.001 file - promoters70/1472778
cagcaaaacgaag

SEQ ID NO: 84126 - DNA, 13 bp, Unknown
  misc_feature (1)..( 13): Result.001 file - promoters70/1472778
ctataaaacgtgt

SEQ ID NO: 84127 - DNA, 13 bp, Unknown
  misc_feature (1)..( 13): Result.001 file - promoters70/1472778
gtatataacccaa

SEQ ID NO: 84128 - DNA, 13 bp, Unknown
  misc_feature (1)..( 13): Result.001 file - promoters70/1472778
gtatattattaat

SEQ ID NO: 84129 - DNA, 12 bp, Unknown
  misc_feature (1)..( 12): Result.001 file - promoters70/1472778
gatataatacag

SEQ ID NO: 84130 - DNA, 12 bp, Unknown
  misc_feature (1)..( 12): Result.001 file - promoters70/1472778
taaataacacag

SEQ ID NO: 84131 - DNA, 12 bp, Unknown
  misc_feature (1)..( 12): Result.001 file - promoters70/1472778
tatataacacaa

SEQ ID NO: 84132 - DNA, 12 bp, Unknown
  misc_feature (1)..( 12): Result.001 file - promoters70/1472778
tatttaagtaaa

SEQ ID NO: 84133 - DNA, 9 bp, Unknown
  misc_feature (1)..( 9): Result.001 file - promoters70/1472778
ttacttttt

SEQ ID NO: 84134 - DNA, 9 bp, Unknown
  misc_feature (1)..( 9): Result.001 file - promoters70/1472778
ttaattttc

SEQ ID NO: 84135 - DNA, 9 bp, Unknown
  misc_feature (1)..( 9): Result.001 file - promoters70/1472778
gtaatgttc

SEQ ID NO: 84136 - DNA, 9 bp, Unknown
  misc_feature (1)..( 9): Result.001 file - promoters70/1472778
tgaattttc

SEQ ID NO: 84137 - DNA, 10 bp, Unknown
  misc_feature (1)..( 10): Result.001 file - promoters70/1472778
ttttagtttg

SEQ ID NO: 84138 - DNA, 10 bp, Unknown
  misc_feature (1)..( 10): Result.001 file - promoters70/1472778
ttttcgtttc

SEQ ID NO: 84139 - DNA, 10 bp, Unknown
  misc_feature (1)..( 10): Result.001 file - promoters70/1472778
ttttatttta

SEQ ID NO: 84140 - DNA, 10 bp, Unknown
  misc_feature (1)..( 10): Result.001 file - promoters70/1472778
tgtaatgttc

SEQ ID NO: 84141 - DNA, 10 bp, Unknown
  misc_feature (1)..( 10): Result.001 file - promoters70/1472778
ttgaattttc

SEQ ID NO: 84142 - DNA, 10 bp, Unknown
  misc_feature (1)..( 10): Result.001 file - promoters70/1472778
gaaacactta

SEQ ID NO: 84143 - DNA, 10 bp, Unknown
  misc_feature (1)..( 10): Result.001 file - promoters70/1472778
gatacagtta

SEQ ID NO: 84144 - DNA, 10 bp, Unknown
  misc_feature (1)..( 10): Result.001 file - promoters70/1472778
gaatcacttc

SEQ ID NO: 84145 - DNA, 10 bp, Unknown
  misc_feature (1)..( 10): Result.001 file - promoters70/1472778
tataaagtta

SEQ ID NO: 84146 - DNA, 10 bp, Unknown
  misc_feature (1)..( 10): Result.001 file - promoters70/1472799
tctacagttc

SEQ ID NO: 84147 - DNA, 8 bp, Unknown
  misc_feature (1)..( 8): Result.001 file - promoters70/1472799
atcatatt

SEQ ID NO: 84148 - DNA, 8 bp, Unknown
  misc_feature (1)..( 8): Result.001 file - promoters70/1472799
atcatatt

SEQ ID NO: 84149 - DNA, 8 bp, Unknown
  misc_feature (1)..( 8): Result.001 file - promoters70/1472799
atcatatt

SEQ ID NO: 84150 - DNA, 9 bp, Unknown
  misc_feature (1)..( 9): Result.001 file - promoters70/1472799
tttgtagtg

SEQ ID NO: 84151 - DNA, 9 bp, Unknown
  misc_feature (1)..( 9): Result.001 file - promoters70/1472799
attgtagct

SEQ ID NO: 84152 - DNA, 9 bp, Unknown
  misc_feature (1)..( 9): Result.001 file - promoters70/1472799
tttgttgtg

SEQ ID NO: 84153 - DNA, 8 bp, Unknown
  misc_feature (1)..( 8): Result.001 file - promoters70/1472799
tgatttgt

SEQ ID NO: 84154 - DNA, 8 bp, Unknown
  misc_feature (1)..( 8): Result.001 file - promoters70/1472799
agatatgt

SEQ ID NO: 84155 - DNA, 8 bp, Unknown
  misc_feature (1)..( 8): Result.001 file - promoters70/1472799
tgatttgg

SEQ ID NO: 84156 - DNA, 7 bp, Unknown
  misc_feature (1)..( 7): Result.001 file - promoters70/1472799
gtttgtt

SEQ ID NO: 84157 - DNA, 7 bp, Unknown
  misc_feature (1)..( 7): Result.001 file - promoters70/1472799
gtttgtg

SEQ ID NO: 84158 - DNA, 7 bp, Unknown
  misc_feature (1)..( 7): Result.001 file - promoters70/1472799
ttttgtt

SEQ ID NO: 84159 - DNA, 8 bp, Unknown
  misc_feature (1)..( 8): Result.001 file - promoters70/1472799
tgtttgtt

SEQ ID NO: 84160 - DNA, 8 bp, Unknown
  misc_feature (1)..( 8): Result.001 file - promoters70/1472799
gatttgtt

SEQ ID NO: 84161 - DNA, 8 bp, Unknown
  misc_feature (1)..( 8): Result.001 file - promoters70/1481696
gatatgta

SEQ ID NO: 84162 - DNA, 7 bp, Unknown
  misc_feature (1)..( 7): Result.001 file - promoters70/1481696
tttactt

SEQ ID NO: 84163 - DNA, 7 bp, Unknown
  misc_feature (1)..( 7): Result.001 file - promoters70/1481696
tttgctt

SEQ ID NO: 84164 - DNA, 7 bp, Unknown
  misc_feature (1)..( 7): Result.001 file - promoters70/1481696
attactt

SEQ ID NO: 84165 - DNA, 7 bp, Unknown
  misc_feature (1)..( 7): Result.001 file - promoters70/1481696
tttgctg

SEQ ID NO: 84166 - DNA, 10 bp, Unknown
  misc_feature (1)..( 10): Result.001 file - promoters70/1481696
caaaagaatc

SEQ ID NO: 84167 - DNA, 10 bp, Unknown
  misc_feature (1)..( 10): Result.001 file - promoters70/1481696
caaaacaatt

SEQ ID NO: 84168 - DNA, 10 bp, Unknown
  misc_feature (1)..( 10): Result.001 file - promoters70/1481696
acaaagaaac

SEQ ID NO: 84169 - DNA, 10 bp, Unknown
  misc_feature (1)..( 10): Result.001 file - promoters70/1481696
attaagaaaa

SEQ ID NO: 84170 - DNA, 12 bp, Unknown
  misc_feature (1)..( 12): Result.001 file - promoters70/1481696
tttattcaatcc

SEQ ID NO: 84171 - DNA, 12 bp, Unknown
  misc_feature (1)..( 12): Result.001 file - promoters70/1481696
cttatgcaaagc

SEQ ID NO: 84172 - DNA, 12 bp, Unknown
  misc_feature (1)..( 12): Result.001 file - promoters70/1481696
tatatttaattt

SEQ ID NO: 84173 - DNA, 12 bp, Unknown
  misc_feature (1)..( 12): Result.001 file - promoters70/1481696
tatatttacttt

SEQ ID NO: 84174 - DNA, 8 bp, Unknown
  misc_feature (1)..( 8): Result.001 file - promoters70/1481696
tttcttac

SEQ ID NO: 84175 - DNA, 8 bp, Unknown
  misc_feature (1)..( 8): Result.001 file - promoters70/1481696
tttattat

SEQ ID NO: 84176 - DNA, 9 bp, Unknown
  misc_feature (1)..( 9): Result.001 file - promoters70/1481696
tttgattaa

SEQ ID NO: 84177 - DNA, 9 bp, Unknown
  misc_feature (1)..( 9): Result.001 file - promoters70/1481696
tctgattaa

SEQ ID NO: 84178 - DNA, 9 bp, Unknown
  misc_feature (1)..( 9): Result.001 file - promoters70/1481696
tgatattat

SEQ ID NO: 84179 - DNA, 15 bp, Unknown
  misc_feature (1)..( 15): Result.001 file - promoters70/1481696
tttgcttctttggat

SEQ ID NO: 84180 - DNA, 15 bp, Unknown
  misc_feature (1)..( 15): Result.001 file - promoters70/1481696
gatggatctttagat

SEQ ID NO: 84181 - DNA, 15 bp, Unknown
  misc_feature (1)..( 15): Result.001 file - promoters70/1481696
tgctgatgtttgatt

SEQ ID NO: 84182 - DNA, 15 bp, Unknown
  misc_feature (1)..( 15): Result.001 file - promoters70/1482448
tgctaatgtgaactt

SEQ ID NO: 84183 - DNA, 9 bp, Unknown
  misc_feature (1)..( 9): Result.001 file - promoters70/1482448
actatatat

SEQ ID NO: 84184 - DNA, 9 bp, Unknown
  misc_feature (1)..( 9): Result.001 file - promoters70/1482448
actatataa

SEQ ID NO: 84185 - DNA, 9 bp, Unknown
  misc_feature (1)..( 9): Result.001 file - promoters70/1482448
ctaatataa

SEQ ID NO: 84186 - DNA, 8 bp, Unknown
  misc_feature (1)..( 8): Result.001 file - promoters70/1482448
cattttta

SEQ ID NO: 84187 - DNA, 8 bp, Unknown
  misc_feature (1)..( 8): Result.001 file - promoters70/1482448
catttttt

SEQ ID NO: 84188 - DNA, 8 bp, Unknown
  misc_feature (1)..( 8): Result.001 file - promoters70/1482448
tttttttt

SEQ ID NO: 84189 - DNA, 8 bp, Unknown
  misc_feature (1)..( 8): Result.001 file - promoters70/1482448
attgtaag

SEQ ID NO: 84190 - DNA, 8 bp, Unknown
  misc_feature (1)..( 8): Result.001 file - promoters70/1482448
attttaaa

SEQ ID NO: 84191 - DNA, 8 bp, Unknown
  misc_feature (1)..( 8): Result.001 file - promoters70/1532660
cgtttaaa

SEQ ID NO: 84192 - DNA, 10 bp, Unknown
  misc_feature (1)..( 10): Result.001 file - promoters70/1532660
caaaatttac

SEQ ID NO: 84193 - DNA, 10 bp, Unknown
  misc_feature (1)..( 10): Result.001 file - promoters70/1532660
ttaaatttgt

SEQ ID NO: 84194 - DNA, 10 bp, Unknown
  misc_feature (1)..( 10): Result.001 file - promoters70/1532660
taaaatttgt

SEQ ID NO: 84195 - DNA, 10 bp, Unknown
  misc_feature (1)..( 10): Result.001 file - promoters70/1532660
aaaagtttgt

SEQ ID NO: 84196 - DNA, 10 bp, Unknown
  misc_feature (1)..( 10): Result.001 file - promoters70/1532660
ttaactttaa

SEQ ID NO: 84197 - DNA, 10 bp, Unknown
  misc_feature (1)..( 10): Result.001 file - promoters70/1532660
gtaaatttgt

SEQ ID NO: 84198 - DNA, 12 bp, Unknown
  misc_feature (1)..( 12): Result.001 file - promoters70/1532660
aaaaaatcaaag

SEQ ID NO: 84199 - DNA, 12 bp, Unknown
  misc_feature (1)..( 12): Result.001 file - promoters70/1532660
aaagaatagttc

SEQ ID NO: 84200 - DNA, 12 bp, Unknown
  misc_feature (1)..( 12): Result.001 file - promoters70/1532660
aaaaaacttcca

SEQ ID NO: 84201 - DNA, 12 bp, Unknown
  misc_feature (1)..( 12): Result.001 file - promoters70/1532660
taaacatctctg

SEQ ID NO: 84202 - DNA, 12 bp, Unknown
  misc_feature (1)..( 12): Result.001 file - promoters70/1532660
gaaaaattcatc

SEQ ID NO: 84203 - DNA, 12 bp, Unknown
  misc_feature (1)..( 12): Result.001 file - promoters70/1532660
aaagaaatctgc

SEQ ID NO: 84204 - DNA, 12 bp, Unknown
  misc_feature (1)..( 12): Result.001 file - promoters70/1532937
gccctatttatc

SEQ ID NO: 84205 - DNA, 10 bp, Unknown
  misc_feature (1)..( 10): Result.001 file - promoters70/1532937
ttttgtaaat

SEQ ID NO: 84206 - DNA, 10 bp, Unknown
  misc_feature (1)..( 10): Result.001 file - promoters70/1532937
ttttgttttt

SEQ ID NO: 84207 - DNA, 10 bp, Unknown
  misc_feature (1)..( 10): Result.001 file - promoters70/1532937
ttttgttgtt

SEQ ID NO: 84208 - DNA, 11 bp, Unknown
  misc_feature (1)..( 11): Result.001 file - promoters70/1532937
gtttgatttga

SEQ ID NO: 84209 - DNA, 11 bp, Unknown
  misc_feature (1)..( 11): Result.001 file - promoters70/1532937
cataggttgtt

SEQ ID NO: 84210 - DNA, 11 bp, Unknown
  misc_feature (1)..( 11): Result.001 file - promoters70/1532937
tttttgtttct

SEQ ID NO: 84211 - DNA, 11 bp, Unknown
  misc_feature (1)..( 11): Result.001 file - promoters70/1532937
gtttgattaaa

SEQ ID NO: 84212 - DNA, 14 bp, Unknown
  misc_feature (1)..( 14): Result.001 file - promoters70/1532937
ttgtaataataact

SEQ ID NO: 84213 - DNA, 14 bp, Unknown
  misc_feature (1)..( 14): Result.001 file - promoters70/1532937
tattaataaaattt

SEQ ID NO: 84214 - DNA, 14 bp, Unknown
  misc_feature (1)..( 14): Result.001 file - promoters70/1532937
tattaataaatttt

SEQ ID NO: 84215 - DNA, 14 bp, Unknown
  misc_feature (1)..( 14): Result.001 file - promoters70/1532937
ttttaacaaaacaa

SEQ ID NO: 84216 - DNA, 14 bp, Unknown
  misc_feature (1)..( 14): Result.001 file - promoters70/1532937
gattaagaaaataa

SEQ ID NO: 84217 - DNA, 14 bp, Unknown
  misc_feature (1)..( 14): Result.001 file - promoters70/1532937
aaagaataaaaatt

SEQ ID NO: 84218 - DNA, 14 bp, Unknown
  misc_feature (1)..( 14): Result.001 file - promoters70/1532937
ttgaaacaaagaaa

SEQ ID NO: 84219 - DNA, 13 bp, Unknown
  misc_feature (1)..( 13): Result.001 file - promoters70/1532937
ctttttttttttt

SEQ ID NO: 84220 - DNA, 13 bp, Unknown
  misc_feature (1)..( 13): Result.001 file - promoters70/1532937
ctttttttgtttc

SEQ ID NO: 84221 - DNA, 13 bp, Unknown
  misc_feature (1)..( 13): Result.001 file - promoters70/1532937
gttgttttgtttg

SEQ ID NO: 84222 - DNA, 13 bp, Unknown
  misc_feature (1)..( 13): Result.001 file - promoters70/1532937
cataggttgtttt

SEQ ID NO: 84223 - DNA, 13 bp, Unknown
  misc_feature (1)..( 13): Result.001 file - promoters70/1532937
acttccatgtttt

SEQ ID NO: 84224 - DNA, 13 bp, Unknown
  misc_feature (1)..( 13): Result.001 file - promoters70/1532937
cttttgttgttac

SEQ ID NO: 84225 - DNA, 14 bp, Unknown
  misc_feature (1)..( 14): Result.001 file - promoters70/1532937
taataataactctt

SEQ ID NO: 84226 - DNA, 14 bp, Unknown
  misc_feature (1)..( 14): Result.001 file - promoters70/1532937
tattaataaatttt

SEQ ID NO: 84227 - DNA, 14 bp, Unknown
  misc_feature (1)..( 14): Result.001 file - promoters70/1532937
tattaataaaattt

SEQ ID NO: 84228 - DNA, 14 bp, Unknown
  misc_feature (1)..( 14): Result.001 file - promoters70/1532937
ttttaacaaaacaa

SEQ ID NO: 84229 - DNA, 14 bp, Unknown
  misc_feature (1)..( 14): Result.001 file - promoters70/1532937
gattaagaaaataa

SEQ ID NO: 84230 - DNA, 14 bp, Unknown
  misc_feature (1)..( 14): Result.001 file - promoters70/1532937
aaagaataaaaatt

SEQ ID NO: 84231 - DNA, 14 bp, Unknown
  misc_feature (1)..( 14): Result.001 file - promoters70/1532937
ttgaaacaaagaaa

SEQ ID NO: 84232 - DNA, 10 bp, Unknown
  misc_feature (1)..( 10): Result.001 file - promoters70/1532937
cgttcttgcc

SEQ ID NO: 84233 - DNA, 10 bp, Unknown
  misc_feature (1)..( 10): Result.001 file - promoters70/1532937
tgtttttgct

SEQ ID NO: 84234 - DNA, 10 bp, Unknown
  misc_feature (1)..( 10): Result.001 file - promoters70/1532937
tgttttaaga

SEQ ID NO: 84235 - DNA, 10 bp, Unknown
  misc_feature (1)..( 10): Result.001 file - promoters70/1532937
tttttttgtt

SEQ ID NO: 84236 - DNA, 10 bp, Unknown
  misc_feature (1)..( 10): Result.001 file - promoters70/1532937
tccttttgtt

SEQ ID NO: 84237 - DNA, 10 bp, Unknown
  misc_feature (1)..( 10): Result.001 file - promoters70/1532948
tgttttgttt

SEQ ID NO: 84238 - DNA, 8 bp, Unknown
  misc_feature (1)..( 8): Result.001 file - promoters70/1532948
attccatt

SEQ ID NO: 84239 - DNA, 8 bp, Unknown
  misc_feature (1)..( 8): Result.001 file - promoters70/1532948
tttccatt

SEQ ID NO: 84240 - DNA, 8 bp, Unknown
  misc_feature (1)..( 8): Result.001 file - promoters70/1532948
attccaaa

SEQ ID NO: 84241 - DNA, 8 bp, Unknown
  misc_feature (1)..( 8): Result.001 file - promoters70/1532948
tttgtaat

SEQ ID NO: 84242 - DNA, 8 bp, Unknown
  misc_feature (1)..( 8): Result.001 file - promoters70/1532948
attgtaat

SEQ ID NO: 84243 - DNA, 8 bp, Unknown
  misc_feature (1)..( 8): Result.001 file - promoters70/1532948
tttgtaac

SEQ ID NO: 84244 - DNA, 12 bp, Unknown
  misc_feature (1)..( 12): Result.001 file - promoters70/1532948
gttggaatttag

SEQ ID NO: 84245 - DNA, 12 bp, Unknown
  misc_feature (1)..( 12): Result.001 file - promoters70/1532948
aaaagaaattaa

SEQ ID NO: 84246 - DNA, 12 bp, Unknown
  misc_feature (1)..( 12): Result.001 file - promoters70/1532948
aaaagaaaataa

SEQ ID NO: 84247 - DNA, 12 bp, Unknown
  misc_feature (1)..( 12): Result.001 file - promoters70/1532948
aaatgaaatatc

SEQ ID NO: 84248 - DNA, 12 bp, Unknown
  misc_feature (1)..( 12): Result.001 file - promoters70/1532948
ataagacaacac

SEQ ID NO: 84249 - DNA, 12 bp, Unknown
  misc_feature (1)..( 12): Result.001 file - promoters70/1532948
ttgagacaaaaa

SEQ ID NO: 84250 - DNA, 12 bp, Unknown
  misc_feature (1)..( 12): Result.001 file - promoters70/1532948
ttgaaacaaaaa

SEQ ID NO: 84251 - DNA, 12 bp, Unknown
  misc_feature (1)..( 12): Result.001 file - promoters70/1532948
gagaaagaaagc

SEQ ID NO: 84252 - DNA, 9 bp, Unknown
  misc_feature (1)..( 9): Result.001 file - promoters70/1532948
ggagaaaaa

SEQ ID NO: 84253 - DNA, 9 bp, Unknown
  misc_feature (1)..( 9): Result.001 file - promoters70/1532948
atggaaaaa

SEQ ID NO: 84254 - DNA, 9 bp, Unknown
  misc_feature (1)..( 9): Result.001 file - promoters70/1532948
ggagaaaac

SEQ ID NO: 84255 - DNA, 8 bp, Unknown
  misc_feature (1)..( 8): Result.001 file - promoters70/1532948
accaataa

SEQ ID NO: 84256 - DNA, 8 bp, Unknown
  misc_feature (1)..( 8): Result.001 file - promoters70/1532948
cccactaa

SEQ ID NO: 84257 - DNA, 8 bp, Unknown
  misc_feature (1)..( 8): Result.001 file - promoters70/1532948
cccactag

SEQ ID NO: 84258 - DNA, 11 bp, Unknown
  misc_feature (1)..( 11): Result.001 file - promoters70/1532948
taacaagtaaa

SEQ ID NO: 84259 - DNA, 11 bp, Unknown
  misc_feature (1)..( 11): Result.001 file - promoters70/1532948
taataagtaaa

SEQ ID NO: 84260 - DNA, 11 bp, Unknown
  misc_feature (1)..( 11): Result.001 file - promoters70/1534378
gcaagagtaaa

SEQ ID NO: 84261 - DNA, 9 bp, Unknown
  misc_feature (1)..( 9): Result.001 file - promoters70/1534378
gaaattctt

SEQ ID NO: 84262 - DNA, 9 bp, Unknown
  misc_feature (1)..( 9): Result.001 file - promoters70/1534378
tcaatcctt

SEQ ID NO: 84263 - DNA, 9 bp, Unknown
  misc_feature (1)..( 9): Result.001 file - promoters70/1534378
gaaattctg

SEQ ID NO: 84264 - DNA, 7 bp, Unknown
  misc_feature (1)..( 7): Result.001 file - promoters70/1534378
aatggat

SEQ ID NO: 84265 - DNA, 7 bp, Unknown
  misc_feature (1)..( 7): Result.001 file - promoters70/1534378
aattgat

SEQ ID NO: 84266 - DNA, 7 bp, Unknown
  misc_feature (1)..( 7): Result.001 file - promoters70/1534378
aatggac

SEQ ID NO: 84267 - DNA, 7 bp, Unknown
  misc_feature (1)..( 7): Result.001 file - promoters70/1534378
gaccaac

SEQ ID NO: 84268 - DNA, 7 bp, Unknown
  misc_feature (1)..( 7): Result.001 file - promoters70/1534378
taccaac

SEQ ID NO: 84269 - DNA, 7 bp, Unknown
  misc_feature (1)..( 7): Result.001 file - promoters70/1534528
gacaaac

SEQ ID NO: 84270 - DNA, 7 bp, Unknown
  misc_feature (1)..( 7): Result.001 file - promoters70/1534528
ctatata

SEQ ID NO: 84271 - DNA, 7 bp, Unknown
  misc_feature (1)..( 7): Result.001 file - promoters70/1534528
gtatata

SEQ ID NO: 84272 - DNA, 7 bp, Unknown
  misc_feature (1)..( 7): Result.001 file - promoters70/1537456
gtatata

SEQ ID NO: 84273 - DNA, 8 bp, Unknown
  misc_feature (1)..( 8): Result.001 file - promoters70/1537456
cttccttt

SEQ ID NO: 84274 - DNA, 8 bp, Unknown
  misc_feature (1)..( 8): Result.001 file - promoters70/1537456
ctttcttt

SEQ ID NO: 84275 - DNA, 8 bp, Unknown
  misc_feature (1)..( 8): Result.001 file - promoters70/1537617
ctttcttc

SEQ ID NO: 84276 - DNA, 9 bp, Unknown
  misc_feature (1)..( 9): Result.001 file - promoters70/1537617
tgtatggtg

SEQ ID NO: 84277 - DNA, 9 bp, Unknown
  misc_feature (1)..( 9): Result.001 file - promoters70/1537617
tgtatgcat

SEQ ID NO: 84278 - DNA, 9 bp, Unknown
  misc_feature (1)..( 9): Result.001 file - promoters70/1537617
agtaagcat

SEQ ID NO: 84279 - DNA, 10 bp, Unknown
  misc_feature (1)..( 10): Result.001 file - promoters70/1537617
ttaattttta

SEQ ID NO: 84280 - DNA, 10 bp, Unknown
  misc_feature (1)..( 10): Result.001 file - promoters70/1537617
tcaattttat

SEQ ID NO: 84281 - DNA, 10 bp, Unknown
  misc_feature (1)..( 10): Result.001 file - promoters70/1537617
tcaatcttat

SEQ ID NO: 84282 - DNA, 10 bp, Unknown
  misc_feature (1)..( 10): Result.001 file - promoters70/1537617
taatttttat

SEQ ID NO: 84283 - DNA, 10 bp, Unknown
  misc_feature (1)..( 10): Result.001 file - promoters70/1537617
tcaattttat

SEQ ID NO: 84284 - DNA, 10 bp, Unknown
  misc_feature (1)..( 10): Result.001 file - promoters70/1557606
tcaatcttat

SEQ ID NO: 84285 - DNA, 9 bp, Unknown
  misc_feature (1)..( 9): Result.001 file - promoters70/1557606
ttgacgacg

SEQ ID NO: 84286 - DNA, 9 bp, Unknown
  misc_feature (1)..( 9): Result.001 file - promoters70/1557606
ttggcgaga

SEQ ID NO: 84287 - DNA, 9 bp, Unknown
  misc_feature (1)..( 9): Result.001 file - promoters70/1557769
ccggcaaga

SEQ ID NO: 84288 - DNA, 12 bp, Unknown
  misc_feature (1)..( 12): Result.001 file - promoters70/1557769
atttttgtctaa

SEQ ID NO: 84289 - DNA, 12 bp, Unknown
  misc_feature (1)..( 12): Result.001 file - promoters70/1557769
atttttgttcca

SEQ ID NO: 84290 - DNA, 12 bp, Unknown
  misc_feature (1)..( 12): Result.001 file - promoters70/1557769
atttttcatttt

SEQ ID NO: 84291 - DNA, 12 bp, Unknown
  misc_feature (1)..( 12): Result.001 file - promoters70/1557769
ttttttgtttct

SEQ ID NO: 84292 - DNA, 12 bp, Unknown
  misc_feature (1)..( 12): Result.001 file - promoters70/1557769
cttttttttttt

SEQ ID NO: 84293 - DNA, 17 bp, Unknown
  misc_feature (1)..( 17): Result.001 file - promoters70/1557769
gatattactaatagatt

SEQ ID NO: 84294 - DNA, 17 bp, Unknown
  misc_feature (1)..( 17): Result.001 file - promoters70/1557769
ttgattagtaaaagaat

SEQ ID NO: 84295 - DNA, 17 bp, Unknown
  misc_feature (1)..( 17): Result.001 file - promoters70/1557769
atcgttattaataaatt

SEQ ID NO: 84296 - DNA, 17 bp, Unknown
  misc_feature (1)..( 17): Result.001 file - promoters70/1557769
ttttgtaataataactc

SEQ ID NO: 84297 - DNA, 17 bp, Unknown
  misc_feature (1)..( 17): Result.001 file - promoters70/1557769
aacgatattaatcattg

SEQ ID NO: 84298 - DNA, 17 bp, Unknown
  misc_feature (1)..( 17): Result.001 file - promoters70/1557769
gatattattttttgttc

SEQ ID NO: 84299 - DNA, 9 bp, Unknown
  misc_feature (1)..( 9): Result.001 file - promoters70/1557769
aatttttct

SEQ ID NO: 84300 - DNA, 9 bp, Unknown
  misc_feature (1)..( 9): Result.001 file - promoters70/1557769
cattttttt

SEQ ID NO: 84301 - DNA, 9 bp, Unknown
  misc_feature (1)..( 9): Result.001 file - promoters70/1557769
tgtttctct

SEQ ID NO: 84302 - DNA, 9 bp, Unknown
  misc_feature (1)..( 9): Result.001 file - promoters70/1557769
aatctttac

SEQ ID NO: 84303 - DNA, 9 bp, Unknown
  misc_feature (1)..( 9): Result.001 file - promoters70/1557769
catttttgt

SEQ ID NO: 84304 - DNA, 9 bp, Unknown
  misc_feature (1)..( 9): Result.001 file - promoters70/1557769
acttttttt

SEQ ID NO: 84305 - DNA, 8 bp, Unknown
  misc_feature (1)..( 8): Result.001 file - promoters70/1557769
gatattac

SEQ ID NO: 84306 - DNA, 8 bp, Unknown
  misc_feature (1)..( 8): Result.001 file - promoters70/1557769
gatattaa

SEQ ID NO: 84307 - DNA, 8 bp, Unknown
  misc_feature (1)..( 8): Result.001 file - promoters70/1557769
gatattat

SEQ ID NO: 84308 - DNA, 8 bp, Unknown
  misc_feature (1)..( 8): Result.001 file - promoters70/1557769
aataataa

SEQ ID NO: 84309 - DNA, 8 bp, Unknown
  misc_feature (1)..( 8): Result.001 file - promoters70/1557769
attaataa

SEQ ID NO: 84310 - DNA, 15 bp, Unknown
  misc_feature (1)..( 15): Result.001 file - promoters70/1557769
ttgctaaaaatcctt

SEQ ID NO: 84311 - DNA, 15 bp, Unknown
  misc_feature (1)..( 15): Result.001 file - promoters70/1557769
atttcaaaaatactt

SEQ ID NO: 84312 - DNA, 15 bp, Unknown
  misc_feature (1)..( 15): Result.001 file - promoters70/1557769
gtaacaaaaaagatg

SEQ ID NO: 84313 - DNA, 15 bp, Unknown
  misc_feature (1)..( 15): Result.001 file - promoters70/1557769
aacacaaaagccgaa

SEQ ID NO: 84314 - DNA, 15 bp, Unknown
  misc_feature (1)..( 15): Result.001 file - promoters70/1557769
caaacaaaactaatt

SEQ ID NO: 84315 - DNA, 10 bp, Unknown
  misc_feature (1)..( 10): Result.001 file - promoters70/1557769
agaataaaaa

SEQ ID NO: 84316 - DNA, 10 bp, Unknown
  misc_feature (1)..( 10): Result.001 file - promoters70/1557769
agaaaaaaaa

SEQ ID NO: 84317 - DNA, 10 bp, Unknown
  misc_feature (1)..( 10): Result.001 file - promoters70/1557769
gcaataaaat

SEQ ID NO: 84318 - DNA, 10 bp, Unknown
  misc_feature (1)..( 10): Result.001 file - promoters70/1557769
tctataaaaa

SEQ ID NO: 84319 - DNA, 10 bp, Unknown
  misc_feature (1)..( 10): Result.001 file - promoters70/1567007
tcaatcaaat

SEQ ID NO: 84320 - DNA, 8 bp, Unknown
  misc_feature (1)..( 8): Result.001 file - promoters70/1567007
ctaaaaga

SEQ ID NO: 84321 - DNA, 8 bp, Unknown
  misc_feature (1)..( 8): Result.001 file - promoters70/1567007
ctaaaaaa

SEQ ID NO: 84322 - DNA, 8 bp, Unknown
  misc_feature (1)..( 8): Result.001 file - promoters70/1567007
ttaaaaaa

SEQ ID NO: 84323 - DNA, 8 bp, Unknown
  misc_feature (1)..( 8): Result.001 file - promoters70/1567007
aaaagaac

SEQ ID NO: 84324 - DNA, 8 bp, Unknown
  misc_feature (1)..( 8): Result.001 file - promoters70/1567007
taaaaaac

SEQ ID NO: 84325 - DNA, 8 bp, Unknown
  misc_feature (1)..( 8): Result.001 file - promoters70/1567092
taaaaaaa

SEQ ID NO: 84326 - DNA, 13 bp, Unknown
  misc_feature (1)..( 13): Result.001 file - promoters70/1567092
caacaatgtacaa

SEQ ID NO: 84327 - DNA, 13 bp, Unknown
  misc_feature (1)..( 13): Result.001 file - promoters70/1567092
caataatttacat

SEQ ID NO: 84328 - DNA, 13 bp, Unknown
  misc_feature (1)..( 13): Result.001 file - promoters70/1567092
ttacaatttacaa

SEQ ID NO: 84329 - DNA, 13 bp, Unknown
  misc_feature (1)..( 13): Result.001 file - promoters70/1567092
tgaaaatttatac

SEQ ID NO: 84330 - DNA, 13 bp, Unknown
  misc_feature (1)..( 13): Result.001 file - promoters70/1567092
gtataattttata

SEQ ID NO: 84331 - DNA, 10 bp, Unknown
  misc_feature (1)..( 10): Result.001 file - promoters70/1567092
tttgcttaca

SEQ ID NO: 84332 - DNA, 10 bp, Unknown
  misc_feature (1)..( 10): Result.001 file - promoters70/1567092
gttgtttata

SEQ ID NO: 84333 - DNA, 10 bp, Unknown
  misc_feature (1)..( 10): Result.001 file - promoters70/1567092
tttacttttt

SEQ ID NO: 84334 - DNA, 10 bp, Unknown
  misc_feature (1)..( 10): Result.001 file - promoters70/1567092
catgtttaat

SEQ ID NO: 84335 - DNA, 10 bp, Unknown
  misc_feature (1)..( 10): Result.001 file - promoters70/1567092
catatttagc

SEQ ID NO: 84336 - DNA, 10 bp, Unknown
  misc_feature (1)..( 10): Result.001 file - promoters70/1567535
tgagttcata

SEQ ID NO: 84337 - DNA, 9 bp, Unknown
  misc_feature (1)..( 9): Result.001 file - promoters70/1567535
aaatcttct

SEQ ID NO: 84338 - DNA, 9 bp, Unknown
  misc_feature (1)..( 9): Result.001 file - promoters70/1567535
gtttcttct

SEQ ID NO: 84339 - DNA, 9 bp, Unknown
  misc_feature (1)..( 9): Result.001 file - promoters70/1567535
ggttcttca

SEQ ID NO: 84340 - DNA, 9 bp, Unknown
  misc_feature (1)..( 9): Result.001 file - promoters70/1567547
gtttcctct

SEQ ID NO: 84341 - DNA, 11 bp, Unknown
  misc_feature (1)..( 11): Result.001 file - promoters70/1567547
caacacaaaaa

SEQ ID NO: 84342 - DNA, 11 bp, Unknown
  misc_feature (1)..( 11): Result.001 file - promoters70/1567547
aaacacaagaa

SEQ ID NO: 84343 - DNA, 11 bp, Unknown
  misc_feature (1)..( 11): Result.001 file - promoters70/1567547
gaacaaaaaaa

SEQ ID NO: 84344 - DNA, 11 bp, Unknown
  misc_feature (1)..( 11): Result.001 file - promoters70/1567547
acacacaaagt

SEQ ID NO: 84345 - DNA, 9 bp, Unknown
  misc_feature (1)..( 9): Result.001 file - promoters70/1567547
ccacaagat

SEQ ID NO: 84346 - DNA, 11 bp, Unknown
  misc_feature (1)..( 11): Result.001 file - promoters70/1568230
aaacaaatcaa

SEQ ID NO: 84347 - DNA, 10 bp, Unknown
  misc_feature (1)..( 10): Result.001 file - promoters70/1568230
ttaatataaa

SEQ ID NO: 84348 - DNA, 10 bp, Unknown
  misc_feature (1)..( 10): Result.001 file - promoters70/1568230
acaatttaaa

SEQ ID NO: 84349 - DNA, 10 bp, Unknown
  misc_feature (1)..( 10): Result.001 file - promoters70/1568508
ttattataaa

SEQ ID NO: 84350 - DNA, 9 bp, Unknown
  misc_feature (1)..( 9): Result.001 file - promoters70/1568508
aattacaat

SEQ ID NO: 84351 - DNA, 9 bp, Unknown
  misc_feature (1)..( 9): Result.001 file - promoters70/1568508
tcttataat

SEQ ID NO: 84352 - DNA, 9 bp, Unknown
  misc_feature (1)..( 9): Result.001 file - promoters70/1568508
tcttataaa

SEQ ID NO: 84353 - DNA, 8 bp, Unknown
  misc_feature (1)..( 8): Result.001 file - promoters70/1568508
acttatat

SEQ ID NO: 84354 - DNA, 8 bp, Unknown
  misc_feature (1)..( 8): Result.001 file - promoters70/1568508
tcttataa

SEQ ID NO: 84355 - DNA, 8 bp, Unknown
  misc_feature (1)..( 8): Result.001 file - promoters70/1569568
tcttataa

SEQ ID NO: 84356 - DNA, 8 bp, Unknown
  misc_feature (1)..( 8): Result.001 file - promoters70/1569568
caaataaa

SEQ ID NO: 84357 - DNA, 8 bp, Unknown
  misc_feature (1)..( 8): Result.001 file - promoters70/1569568
aaaataaa

SEQ ID NO: 84358 - DNA, 8 bp, Unknown
  misc_feature (1)..( 8): Result.001 file - promoters70/1569568
aaaataaa

SEQ ID NO: 84359 - DNA, 8 bp, Unknown
  misc_feature (1)..( 8): Result.001 file - promoters70/1569568
caaagaaa

SEQ ID NO: 84360 - DNA, 8 bp, Unknown
  misc_feature (1)..( 8): Result.001 file - promoters70/1569568
aaaataat

SEQ ID NO: 84361 - DNA, 8 bp, Unknown
  misc_feature (1)..( 8): Result.001 file - promoters70/1569568
taaaattt

SEQ ID NO: 84362 - DNA, 8 bp, Unknown
  misc_feature (1)..( 8): Result.001 file - promoters70/1569568
taaaataa

SEQ ID NO: 84363 - DNA, 8 bp, Unknown
  misc_feature (1)..( 8): Result.001 file - promoters70/1569568
gaaacttt

SEQ ID NO: 84364 - DNA, 8 bp, Unknown
  misc_feature (1)..( 8): Result.001 file - promoters70/1569568
aaaaataa

SEQ ID NO: 84365 - DNA, 7 bp, Unknown
  misc_feature (1)..( 7): Result.001 file - promoters70/1569568
aaataaa

SEQ ID NO: 84366 - DNA, 7 bp, Unknown
  misc_feature (1)..( 7): Result.001 file - promoters70/1569568
aaataac

SEQ ID NO: 84367 - DNA, 7 bp, Unknown
  misc_feature (1)..( 7): Result.001 file - promoters70/1569568
aaagaaa

SEQ ID NO: 84368 - DNA, 7 bp, Unknown
  misc_feature (1)..( 7): Result.001 file - promoters70/1569568
aaataat

SEQ ID NO: 84369 - DNA, 10 bp, Unknown
  misc_feature (1)..( 10): Result.001 file - promoters70/1569568
tttatttact

SEQ ID NO: 84370 - DNA, 10 bp, Unknown
  misc_feature (1)..( 10): Result.001 file - promoters70/1569568
ggtatttact

SEQ ID NO: 84371 - DNA, 10 bp, Unknown
  misc_feature (1)..( 10): Result.001 file - promoters70/1569568
tttatttcat

SEQ ID NO: 84372 - DNA, 10 bp, Unknown
  misc_feature (1)..( 10): Result.001 file - promoters70/1569568
aatatctcat

SEQ ID NO: 84373 - DNA, 9 bp, Unknown
  misc_feature (1)..( 9): Result.001 file - promoters70/1569568
aaaattaaa

SEQ ID NO: 84374 - DNA, 9 bp, Unknown
  misc_feature (1)..( 9): Result.001 file - promoters70/1569568
aaacttaat

SEQ ID NO: 84375 - DNA, 9 bp, Unknown
  misc_feature (1)..( 9): Result.001 file - promoters70/1569568
tagattaaa

SEQ ID NO: 84376 - DNA, 9 bp, Unknown
  misc_feature (1)..( 9): Result.001 file - promoters70/1569568
tgccttaat

SEQ ID NO: 84377 - DNA, 15 bp, Unknown
  misc_feature (1)..( 15): Result.001 file - promoters70/1569568
ttttactaaaaaaga

SEQ ID NO: 84378 - DNA, 15 bp, Unknown
  misc_feature (1)..( 15): Result.001 file - promoters70/1569568
ctttaataagaaata

SEQ ID NO: 84379 - DNA, 15 bp, Unknown
  misc_feature (1)..( 15): Result.001 file - promoters70/1569568
ttttacttgatctaa

SEQ ID NO: 84380 - DNA, 15 bp, Unknown
  misc_feature (1)..( 15): Result.001 file - promoters70/1569568
accaaaaaagaaata

SEQ ID NO: 84381 - DNA, 11 bp, Unknown
  misc_feature (1)..( 11): Result.001 file - promoters70/1569568
taatgtctcgt

SEQ ID NO: 84382 - DNA, 11 bp, Unknown
  misc_feature (1)..( 11): Result.001 file - promoters70/1569568
taatatctcat

SEQ ID NO: 84383 - DNA, 11 bp, Unknown
  misc_feature (1)..( 11): Result.001 file - promoters70/1569568
tgatggctcgg

SEQ ID NO: 84384 - DNA, 11 bp, Unknown
  misc_feature (1)..( 11): Result.001 file - promoters70/1569568
ttttatttcat

SEQ ID NO: 84385 - DNA, 14 bp, Unknown
  misc_feature (1)..( 14): Result.001 file - promoters70/1569568
ctcttttatttatt

SEQ ID NO: 84386 - DNA, 14 bp, Unknown
  misc_feature (1)..( 14): Result.001 file - promoters70/1569568
aaattttataatca

SEQ ID NO: 84387 - DNA, 14 bp, Unknown
  misc_feature (1)..( 14): Result.001 file - promoters70/1569568
tctctttatttatt

SEQ ID NO: 84388 - DNA, 14 bp, Unknown
  misc_feature (1)..( 14): Result.001 file - promoters70/1569721
aaaatttacctaac

SEQ ID NO: 84389 - DNA, 9 bp, Unknown
  misc_feature (1)..( 9): Result.001 file - promoters70/1569721
aaaagaaga

SEQ ID NO: 84390 - DNA, 9 bp, Unknown
  misc_feature (1)..( 9): Result.001 file - promoters70/1569721
tatagaaga

SEQ ID NO: 84391 - DNA, 9 bp, Unknown
  misc_feature (1)..( 9): Result.001 file - promoters70/1569721
tagagaaga

SEQ ID NO: 84392 - DNA, 9 bp, Unknown
  misc_feature (1)..( 9): Result.001 file - promoters70/1570606
tagacaaga

SEQ ID NO: 84393 - DNA, 10 bp, Unknown
  misc_feature (1)..( 10): Result.001 file - promoters70/1570606
atataataaa

SEQ ID NO: 84394 - DNA, 10 bp, Unknown
  misc_feature (1)..( 10): Result.001 file - promoters70/1570606
ttgtaataat

SEQ ID NO: 84395 - DNA, 10 bp, Unknown
  misc_feature (1)..( 10): Result.001 file - promoters70/1570606
ttttaacaaa

SEQ ID NO: 84396 - DNA, 10 bp, Unknown
  misc_feature (1)..( 10): Result.001 file - promoters70/1570606
gtataaaaaa

SEQ ID NO: 84397 - DNA, 10 bp, Unknown
  misc_feature (1)..( 10): Result.001 file - promoters70/1570606
tattaataaa

SEQ ID NO: 84398 - DNA, 10 bp, Unknown
  misc_feature (1)..( 10): Result.001 file - promoters70/1570606
ttttaatata

SEQ ID NO: 84399 - DNA, 10 bp, Unknown
  misc_feature (1)..( 10): Result.001 file - promoters70/1570606
ttgtgatatt

SEQ ID NO: 84400 - DNA, 15 bp, Unknown
  misc_feature (1)..( 15): Result.001 file - promoters70/1570606
agtttcattaacgtt

SEQ ID NO: 84401 - DNA, 15 bp, Unknown
  misc_feature (1)..( 15): Result.001 file - promoters70/1570606
tgttacatttaagtt

SEQ ID NO: 84402 - DNA, 15 bp, Unknown
  misc_feature (1)..( 15): Result.001 file - promoters70/1570606
acttttattatttca

SEQ ID NO: 84403 - DNA, 15 bp, Unknown
  misc_feature (1)..( 15): Result.001 file - promoters70/1570606
ttttgtattatcaat

SEQ ID NO: 84404 - DNA, 15 bp, Unknown
  misc_feature (1)..( 15): Result.001 file - promoters70/1570606
acttttaaatagaaa

SEQ ID NO: 84405 - DNA, 15 bp, Unknown
  misc_feature (1)..( 15): Result.001 file - promoters70/1570606
actatgatttaaaat

SEQ ID NO: 84406 - DNA, 11 bp, Unknown
  misc_feature (1)..( 11): Result.001 file - promoters70/1570606
tattaataaaa

SEQ ID NO: 84407 - DNA, 11 bp, Unknown
  misc_feature (1)..( 11): Result.001 file - promoters70/1570606
gattagtaaaa

SEQ ID NO: 84408 - DNA, 11 bp, Unknown
  misc_feature (1)..( 11): Result.001 file - promoters70/1570606
ttgtaataata

SEQ ID NO: 84409 - DNA, 11 bp, Unknown
  misc_feature (1)..( 11): Result.001 file - promoters70/1570606
ttttaatatat

SEQ ID NO: 84410 - DNA, 11 bp, Unknown
  misc_feature (1)..( 11): Result.001 file - promoters70/1570606
gcttagtacaa

SEQ ID NO: 84411 - DNA, 11 bp, Unknown
  misc_feature (1)..( 11): Result.001 file - promoters70/1570606
ttgtgatatta

SEQ ID NO: 84412 - DNA, 14 bp, Unknown
  misc_feature (1)..( 14): Result.001 file - promoters70/1570606
ggacaacataaatt

SEQ ID NO: 84413 - DNA, 14 bp, Unknown
  misc_feature (1)..( 14): Result.001 file - promoters70/1570606
caaaaacaaaaagt

SEQ ID NO: 84414 - DNA, 14 bp, Unknown
  misc_feature (1)..( 14): Result.001 file - promoters70/1570606
taaaaacagtgatc

SEQ ID NO: 84415 - DNA, 14 bp, Unknown
  misc_feature (1)..( 14): Result.001 file - promoters70/1570606
aagaaaaaaaaaaa

SEQ ID NO: 84416 - DNA, 14 bp, Unknown
  misc_feature (1)..( 14): Result.001 file - promoters70/1570606
aagaaacaaagtaa

SEQ ID NO: 84417 - DNA, 14 bp, Unknown
  misc_feature (1)..( 14): Result.001 file - promoters70/1570606
ctataaaaaatttt

SEQ ID NO: 84418 - DNA, 14 bp, Unknown
  misc_feature (1)..( 14): Result.001 file - promoters70/1570622
gttaaacaagtttt

SEQ ID NO: 84419 - DNA, 9 bp, Unknown
  misc_feature (1)..( 9): Result.001 file - promoters70/1570622
tcgtatcat

SEQ ID NO: 84420 - DNA, 9 bp, Unknown
  misc_feature (1)..( 9): Result.001 file - promoters70/1570622
tcgtttcaa

SEQ ID NO: 84421 - DNA, 9 bp, Unknown
  misc_feature (1)..( 9): Result.001 file - promoters70/1570622
ctatttcaa

SEQ ID NO: 84422 - DNA, 8 bp, Unknown
  misc_feature (1)..( 8): Result.001 file - promoters70/1570622
aaacataa

SEQ ID NO: 84423 - DNA, 8 bp, Unknown
  misc_feature (1)..( 8): Result.001 file - promoters70/1570622
aaaaatac

SEQ ID NO: 84424 - DNA, 8 bp, Unknown
  misc_feature (1)..( 8): Result.001 file - promoters70/1570622
caacttaa

SEQ ID NO: 84425 - DNA, 19 bp, Unknown
  misc_feature (1)..( 19): Result.001 file - promoters70/1570622
taatacaattgagagataa

SEQ ID NO: 84426 - DNA, 19 bp, Unknown
  misc_feature (1)..( 19): Result.001 file - promoters70/1570622
taaaacaaaacacaccctt

SEQ ID NO: 84427 - DNA, 19 bp, Unknown
  misc_feature (1)..( 19): Result.001 file - promoters70/1570622
aaaaaaaaaaaaggaaaac

SEQ ID NO: 84428 - DNA, 9 bp, Unknown
  misc_feature (1)..( 9): Result.001 file - promoters70/1570622
tacttttta

SEQ ID NO: 84429 - DNA, 9 bp, Unknown
  misc_feature (1)..( 9): Result.001 file - promoters70/1570622
tactttttt

SEQ ID NO: 84430 - DNA, 10 bp, Unknown
  misc_feature (1)..( 10): Result.001 file - promoters70/1570622
gacttctttt

SEQ ID NO: 84431 - DNA, 9 bp, Unknown
  misc_feature (1)..( 9): Result.001 file - promoters70/1570622
cgggattaa

SEQ ID NO: 84432 - DNA, 9 bp, Unknown
  misc_feature (1)..( 9): Result.001 file - promoters70/1570622
tatgattaa

SEQ ID NO: 84433 - DNA, 9 bp, Unknown
  misc_feature (1)..( 9): Result.001 file - promoters70/1570622
tatgagtaa

SEQ ID NO: 84434 - DNA, 9 bp, Unknown
  misc_feature (1)..( 9): Result.001 file - promoters70/1570622
acttcatat

SEQ ID NO: 84435 - DNA, 9 bp, Unknown
  misc_feature (1)..( 9): Result.001 file - promoters70/1570622
tcttcttat

SEQ ID NO: 84436 - DNA, 9 bp, Unknown
  misc_feature (1)..( 9): Result.001 file - promoters70/1570622
tcttcttca

SEQ ID NO: 84437 - DNA, 9 bp, Unknown
  misc_feature (1)..( 9): Result.001 file - promoters70/1570622
tttgacaac

SEQ ID NO: 84438 - DNA, 9 bp, Unknown
  misc_feature (1)..( 9): Result.001 file - promoters70/1570622
tttaacaat

SEQ ID NO: 84439 - DNA, 9 bp, Unknown
  misc_feature (1)..( 9): Result.001 file - promoters70/1570860
gataagaat

SEQ ID NO: 84440 - DNA, 12 bp, Unknown
  misc_feature (1)..( 12): Result.001 file - promoters70/1570860
gagaaatatact

SEQ ID NO: 84441 - DNA, 12 bp, Unknown
  misc_feature (1)..( 12): Result.001 file - promoters70/1570860
gagacatagtcc

SEQ ID NO: 84442 - DNA, 12 bp, Unknown
  misc_feature (1)..( 12): Result.001 file - promoters70/1570869
gaaaaatattta

SEQ ID NO: 84443 - DNA, 11 bp, Unknown
  misc_feature (1)..( 11): Result.001 file - promoters70/1570869
ttttgaagaat

SEQ ID NO: 84444 - DNA, 11 bp, Unknown
  misc_feature (1)..( 11): Result.001 file - promoters70/1570869
ttttgatgaat

SEQ ID NO: 84445 - DNA, 11 bp, Unknown
  misc_feature (1)..( 11): Result.001 file - promoters70/1570869
gtttgaatcgt

SEQ ID NO: 84446 - DNA, 11 bp, Unknown
  misc_feature (1)..( 11): Result.001 file - promoters70/1570869
tttcgatgtat

SEQ ID NO: 84447 - DNA, 11 bp, Unknown
  misc_feature (1)..( 11): Result.001 file - promoters70/1570869
ttgtgaatgtc

SEQ ID NO: 84448 - DNA, 16 bp, Unknown
  misc_feature (1)..( 16): Result.001 file - promoters70/1570869
ataaaaatgttagata

SEQ ID NO: 84449 - DNA, 16 bp, Unknown
  misc_feature (1)..( 16): Result.001 file - promoters70/1570869
tcataaattttaaaat

SEQ ID NO: 84450 - DNA, 16 bp, Unknown
  misc_feature (1)..( 16): Result.001 file - promoters70/1570869
tgttaaatatgaatat

SEQ ID NO: 84451 - DNA, 16 bp, Unknown
  misc_feature (1)..( 16): Result.001 file - promoters70/1570869
aaatagatttgaaaaa

SEQ ID NO: 84452 - DNA, 16 bp, Unknown
  misc_feature (1)..( 16): Result.001 file - promoters70/1570869
cttttgattctaaaat

SEQ ID NO: 84453 - DNA, 16 bp, Unknown
  misc_feature (1)..( 16): Result.001 file - promoters70/1570869
gtaaaaaaagagatct

SEQ ID NO: 84454 - DNA, 11 bp, Unknown
  misc_feature (1)..( 11): Result.001 file - promoters70/1570869
cttatataaac

SEQ ID NO: 84455 - DNA, 11 bp, Unknown
  misc_feature (1)..( 11): Result.001 file - promoters70/1570869
tatatataata

SEQ ID NO: 84456 - DNA, 11 bp, Unknown
  misc_feature (1)..( 11): Result.001 file - promoters70/1570869
agtatataaac

SEQ ID NO: 84457 - DNA, 11 bp, Unknown
  misc_feature (1)..( 11): Result.001 file - promoters70/1570869
tataaataaaa

SEQ ID NO: 84458 - DNA, 11 bp, Unknown
  misc_feature (1)..( 11): Result.001 file - promoters70/1570869
tgtatataaat

SEQ ID NO: 84459 - DNA, 11 bp, Unknown
  misc_feature (1)..( 11): Result.001 file - promoters70/1570869
tacctataaat

SEQ ID NO: 84460 - DNA, 12 bp, Unknown
  misc_feature (1)..( 12): Result.001 file - promoters70/1570869
tatataaacaaa

SEQ ID NO: 84461 - DNA, 12 bp, Unknown
  misc_feature (1)..( 12): Result.001 file - promoters70/1570869
ataataaccaaa

SEQ ID NO: 84462 - DNA, 12 bp, Unknown
  misc_feature (1)..( 12): Result.001 file - promoters70/1570869
tatataaactct

SEQ ID NO: 84463 - DNA, 12 bp, Unknown
  misc_feature (1)..( 12): Result.001 file - promoters70/1570869
tttataaataaa

SEQ ID NO: 84464 - DNA, 12 bp, Unknown
  misc_feature (1)..( 12): Result.001 file - promoters70/1570869
tatataaatgac

SEQ ID NO: 84465 - DNA, 12 bp, Unknown
  misc_feature (1)..( 12): Result.001 file - promoters70/1570869
cctataaatatc

SEQ ID NO: 84466 - DNA, 12 bp, Unknown
  misc_feature (1)..( 12): Result.001 file - promoters70/1570869
agttcttcattt

SEQ ID NO: 84467 - DNA, 12 bp, Unknown
  misc_feature (1)..( 12): Result.001 file - promoters70/1570869
ctcgcttcataa

SEQ ID NO: 84468 - DNA, 12 bp, Unknown
  misc_feature (1)..( 12): Result.001 file - promoters70/1570869
atatctttataa

SEQ ID NO: 84469 - DNA, 12 bp, Unknown
  misc_feature (1)..( 12): Result.001 file - promoters70/1570869
aacaatttttaa

SEQ ID NO: 84470 - DNA, 12 bp, Unknown
  misc_feature (1)..( 12): Result.001 file - promoters70/1570869
ataactttatgt

SEQ ID NO: 84471 - DNA, 14 bp, Unknown
  misc_feature (1)..( 14): Result.001 file - promoters70/1570869
ttagataggaaaaa

SEQ ID NO: 84472 - DNA, 14 bp, Unknown
  misc_feature (1)..( 14): Result.001 file - promoters70/1570869
atagatttgaaaaa

SEQ ID NO: 84473 - DNA, 14 bp, Unknown
  misc_feature (1)..( 14): Result.001 file - promoters70/1570869
atggatagtaaaaa

SEQ ID NO: 84474 - DNA, 14 bp, Unknown
  misc_feature (1)..( 14): Result.001 file - promoters70/1570869
ataaattttaaaat

SEQ ID NO: 84475 - DNA, 14 bp, Unknown
  misc_feature (1)..( 14): Result.001 file - promoters70/1570869
tttgattctaaaat

SEQ ID NO: 84476 - DNA, 13 bp, Unknown
  misc_feature (1)..( 13): Result.001 file - promoters70/1570869
acttataattatg

SEQ ID NO: 84477 - DNA, 13 bp, Unknown
  misc_feature (1)..( 13): Result.001 file - promoters70/1570869
aataataataatg

SEQ ID NO: 84478 - DNA, 13 bp, Unknown
  misc_feature (1)..( 13): Result.001 file - promoters70/1570869
ctttataagtata

SEQ ID NO: 84479 - DNA, 13 bp, Unknown
  misc_feature (1)..( 13): Result.001 file - promoters70/1570869
ttttaaaagtaag

SEQ ID NO: 84480 - DNA, 13 bp, Unknown
  misc_feature (1)..( 13): Result.001 file - promoters70/1570869
cttcataacaaaa

SEQ ID NO: 84481 - DNA, 13 bp, Unknown
  misc_feature (1)..( 13): Result.001 file - promoters70/1570869
tgttattagttaa

SEQ ID NO: 84482 - DNA, 15 bp, Unknown
  misc_feature (1)..( 15): Result.001 file - promoters70/1570869
tatacgttttaaaag

SEQ ID NO: 84483 - DNA, 15 bp, Unknown
  misc_feature (1)..( 15): Result.001 file - promoters70/1570869
aacaatttttaaatt

SEQ ID NO: 84484 - DNA, 15 bp, Unknown
  misc_feature (1)..( 15): Result.001 file - promoters70/1570869
atatctttataagta

SEQ ID NO: 84485 - DNA, 15 bp, Unknown
  misc_feature (1)..( 15): Result.001 file - promoters70/1570869
ctcgcttcataacaa

SEQ ID NO: 84486 - DNA, 15 bp, Unknown
  misc_feature (1)..( 15): Result.001 file - promoters70/1570869
ataactttatgttat

SEQ ID NO: 84487 - DNA, 11 bp, Unknown
  misc_feature (1)..( 11): Result.001 file - promoters70/1570869
ttattttgcga

SEQ ID NO: 84488 - DNA, 11 bp, Unknown
  misc_feature (1)..( 11): Result.001 file - promoters70/1570869
ttaatttcgtt

SEQ ID NO: 84489 - DNA, 11 bp, Unknown
  misc_feature (1)..( 11): Result.001 file - promoters70/1570869
caaatttcaca

SEQ ID NO: 84490 - DNA, 11 bp, Unknown
  misc_feature (1)..( 11): Result.001 file - promoters70/1570869
tacatttaaca

SEQ ID NO: 84491 - DNA, 11 bp, Unknown
  misc_feature (1)..( 11): Result.001 file - promoters70/1570966
gtaatttagta

SEQ ID NO: 84492 - DNA, 11 bp, Unknown
  misc_feature (1)..( 11): Result.001 file - promoters70/1570966
attaactttga

SEQ ID NO: 84493 - DNA, 11 bp, Unknown
  misc_feature (1)..( 11): Result.001 file - promoters70/1570966
cataagtttca

SEQ ID NO: 84494 - DNA, 11 bp, Unknown
  misc_feature (1)..( 11): Result.001 file - promoters70/1570966
attaacttata

SEQ ID NO: 84495 - DNA, 11 bp, Unknown
  misc_feature (1)..( 11): Result.001 file - promoters70/1570966
gataaattttg

SEQ ID NO: 84496 - DNA, 11 bp, Unknown
  misc_feature (1)..( 11): Result.001 file - promoters70/1570966
gtgaagtatca

SEQ ID NO: 84497 - DNA, 12 bp, Unknown
  misc_feature (1)..( 12): Result.001 file - promoters70/1570966
agacaaaataaa

SEQ ID NO: 84498 - DNA, 12 bp, Unknown
  misc_feature (1)..( 12): Result.001 file - promoters70/1570966
tcttaaaataat

SEQ ID NO: 84499 - DNA, 12 bp, Unknown
  misc_feature (1)..( 12): Result.001 file - promoters70/1570966
cattaaaataaa

SEQ ID NO: 84500 - DNA, 12 bp, Unknown
  misc_feature (1)..( 12): Result.001 file - promoters70/1570966
aaaagaaataaa

SEQ ID NO: 84501 - DNA, 12 bp, Unknown
  misc_feature (1)..( 12): Result.001 file - promoters70/1570966
aaagcaaacaat

SEQ ID NO: 84502 - DNA, 8 bp, Unknown
  misc_feature (1)..( 8): Result.001 file - promoters70/1570966
ctatataa

SEQ ID NO: 84503 - DNA, 8 bp, Unknown
  misc_feature (1)..( 8): Result.001 file - promoters70/1570966
ttatatat

SEQ ID NO: 84504 - DNA, 8 bp, Unknown
  misc_feature (1)..( 8): Result.001 file - promoters70/1570966
ctatatat

SEQ ID NO: 84505 - DNA, 8 bp, Unknown
  misc_feature (1)..( 8): Result.001 file - promoters70/1570966
agatataa

SEQ ID NO: 84506 - DNA, 8 bp, Unknown
  misc_feature (1)..( 8): Result.001 file - promoters70/1570966
atatatat

SEQ ID NO: 84507 - DNA, 9 bp, Unknown
  misc_feature (1)..( 9): Result.001 file - promoters70/1570966
tgtttgatt

SEQ ID NO: 84508 - DNA, 9 bp, Unknown
  misc_feature (1)..( 9): Result.001 file - promoters70/1570966
tatttcatt

SEQ ID NO: 84509 - DNA, 9 bp, Unknown
  misc_feature (1)..( 9): Result.001 file - promoters70/1570966
atttttatt

SEQ ID NO: 84510 - DNA, 9 bp, Unknown
  misc_feature (1)..( 9): Result.001 file - promoters70/1570966
ttttttaca

SEQ ID NO: 84511 - DNA, 9 bp, Unknown
  misc_feature (1)..( 9): Result.001 file - promoters70/1570966
atttttagt

SEQ ID NO: 84512 - DNA, 8 bp, Unknown
  misc_feature (1)..( 8): Result.001 file - promoters70/1570966
aatattcc

SEQ ID NO: 84513 - DNA, 8 bp, Unknown
  misc_feature (1)..( 8): Result.001 file - promoters70/1570966
aatatttc

SEQ ID NO: 84514 - DNA, 8 bp, Unknown
  misc_feature (1)..( 8): Result.001 file - promoters70/1570966
aattttta

SEQ ID NO: 84515 - DNA, 8 bp, Unknown
  misc_feature (1)..( 8): Result.001 file - promoters70/1570966
cattttta

SEQ ID NO: 84516 - DNA, 8 bp, Unknown
  misc_feature (1)..( 8): Result.001 file - promoters70/1570966
tatttttt

SEQ ID NO: 84517 - DNA, 10 bp, Unknown
  misc_feature (1)..( 10): Result.001 file - promoters70/1570966
gaaaaagaca

SEQ ID NO: 84518 - DNA, 10 bp, Unknown
  misc_feature (1)..( 10): Result.001 file - promoters70/1570966
taaaaaggaa

SEQ ID NO: 84519 - DNA, 10 bp, Unknown
  misc_feature (1)..( 10): Result.001 file - promoters70/1570966
aaaatagaaa

SEQ ID NO: 84520 - DNA, 10 bp, Unknown
  misc_feature (1)..( 10): Result.001 file - promoters70/1570966
gaaaaagccc

SEQ ID NO: 84521 - DNA, 10 bp, Unknown
  misc_feature (1)..( 10): Result.001 file - promoters70/1571014
taaatataaa

SEQ ID NO: 84522 - DNA, 12 bp, Unknown
  misc_feature (1)..( 12): Result.001 file - promoters70/1571014
gtttgtttatct

SEQ ID NO: 84523 - DNA, 12 bp, Unknown
  misc_feature (1)..( 12): Result.001 file - promoters70/1571014
ttttctttggtg

SEQ ID NO: 84524 - DNA, 12 bp, Unknown
  misc_feature (1)..( 12): Result.001 file - promoters70/1571014
gtttttttttct

SEQ ID NO: 84525 - DNA, 7 bp, Unknown
  misc_feature (1)..( 7): Result.001 file - promoters70/1571014
tttaacc

SEQ ID NO: 84526 - DNA, 7 bp, Unknown
  misc_feature (1)..( 7): Result.001 file - promoters70/1571014
tttaaca

SEQ ID NO: 84527 - DNA, 7 bp, Unknown
  misc_feature (1)..( 7): Result.001 file - promoters70/1571014
ttttaca

SEQ ID NO: 84528 - DNA, 9 bp, Unknown
  misc_feature (1)..( 9): Result.001 file - promoters70/1571014
aattttcaa

SEQ ID NO: 84529 - DNA, 9 bp, Unknown
  misc_feature (1)..( 9): Result.001 file - promoters70/1571014
aattttttt

SEQ ID NO: 84530 - DNA, 9 bp, Unknown
  misc_feature (1)..( 9): Result.001 file - promoters70/1571014
gatttacaa

SEQ ID NO: 84531 - DNA, 9 bp, Unknown
  misc_feature (1)..( 9): Result.001 file - promoters70/1571014
attttacat

SEQ ID NO: 84532 - DNA, 7 bp, Unknown
  misc_feature (1)..( 7): Result.001 file - promoters70/1571014
tccaata

SEQ ID NO: 84533 - DNA, 7 bp, Unknown
  misc_feature (1)..( 7): Result.001 file - promoters70/1571014
tccaatt

SEQ ID NO: 84534 - DNA, 7 bp, Unknown
  misc_feature (1)..( 7): Result.001 file - promoters70/1571014
tccaata

SEQ ID NO: 84535 - DNA, 10 bp, Unknown
  misc_feature (1)..( 10): Result.001 file - promoters70/1571014
tttgacagac

SEQ ID NO: 84536 - DNA, 10 bp, Unknown
  misc_feature (1)..( 10): Result.001 file - promoters70/1571014
tttaacaaga

SEQ ID NO: 84537 - DNA, 10 bp, Unknown
  misc_feature (1)..( 10): Result.001 file - promoters70/1571014
actaacaaga

SEQ ID NO: 84538 - DNA, 9 bp, Unknown
  misc_feature (1)..( 9): Result.001 file - promoters70/1571014
ggatgcttt

SEQ ID NO: 84539 - DNA, 9 bp, Unknown
  misc_feature (1)..( 9): Result.001 file - promoters70/1571014
tgattcttt

SEQ ID NO: 84540 - DNA, 9 bp, Unknown
  misc_feature (1)..( 9): Result.001 file - promoters70/1573945
tgattcatg

SEQ ID NO: 84541 - DNA, 7 bp, Unknown
  misc_feature (1)..( 7): Result.001 file - promoters70/1573945
cagaagt

SEQ ID NO: 84542 - DNA, 7 bp, Unknown
  misc_feature (1)..( 7): Result.001 file - promoters70/1573945
cagaaga

SEQ ID NO: 84543 - DNA, 7 bp, Unknown
  misc_feature (1)..( 7): Result.001 file - promoters70/1573945
gagaaga

SEQ ID NO: 84544 - DNA, 10 bp, Unknown
  misc_feature (1)..( 10): Result.001 file - promoters70/1573945
tttaaagttt

SEQ ID NO: 84545 - DNA, 10 bp, Unknown
  misc_feature (1)..( 10): Result.001 file - promoters70/1573945
tgtaaaattt

SEQ ID NO: 84546 - DNA, 10 bp, Unknown
  misc_feature (1)..( 10): Result.001 file - promoters70/1573980
tttaaaagag

SEQ ID NO: 84547 - DNA, 9 bp, Unknown
  misc_feature (1)..( 9): Result.001 file - promoters70/1573980
agtacgatt

SEQ ID NO: 84548 - DNA, 9 bp, Unknown
  misc_feature (1)..( 9): Result.001 file - promoters70/1573980
agtaagata

SEQ ID NO: 84549 - DNA, 9 bp, Unknown
  misc_feature (1)..( 9): Result.001 file - promoters70/1573980
gttaaaata

SEQ ID NO: 84550 - DNA, 9 bp, Unknown
  misc_feature (1)..( 9): Result.001 file - promoters70/1573980
gaagggtta

SEQ ID NO: 84551 - DNA, 9 bp, Unknown
  misc_feature (1)..( 9): Result.001 file - promoters70/1573980
taagagtta

SEQ ID NO: 84552 - DNA, 9 bp, Unknown
  misc_feature (1)..( 9): Result.001 file - promoters70/1573980
taaaagttg

SEQ ID NO: 84553 - DNA, 10 bp, Unknown
  misc_feature (1)..( 10): Result.001 file - promoters70/1573980
catatatact

SEQ ID NO: 84554 - DNA, 10 bp, Unknown
  misc_feature (1)..( 10): Result.001 file - promoters70/1573980
tataaatact

SEQ ID NO: 84555 - DNA, 10 bp, Unknown
  misc_feature (1)..( 10): Result.001 file - promoters70/1573980
tataaatccc

SEQ ID NO: 84556 - DNA, 10 bp, Unknown
  misc_feature (1)..( 10): Result.001 file - promoters70/1573980
tataaaaaca

SEQ ID NO: 84557 - DNA, 10 bp, Unknown
  misc_feature (1)..( 10): Result.001 file - promoters70/1573980
gtatataaat

SEQ ID NO: 84558 - DNA, 10 bp, Unknown
  misc_feature (1)..( 10): Result.001 file - promoters70/1573980
gtatataaaa

SEQ ID NO: 84559 - DNA, 10 bp, Unknown
  misc_feature (1)..( 10): Result.001 file - promoters70/1573980
aactataaat

SEQ ID NO: 84560 - DNA, 8 bp, Unknown
  misc_feature (1)..( 8): Result.001 file - promoters70/1573980
atactata

SEQ ID NO: 84561 - DNA, 8 bp, Unknown
  misc_feature (1)..( 8): Result.001 file - promoters70/1573980
ttacaata

SEQ ID NO: 84562 - DNA, 8 bp, Unknown
  misc_feature (1)..( 8): Result.001 file - promoters70/1574029
ttacaata

SEQ ID NO: 84563 - DNA, 7 bp, Unknown
  misc_feature (1)..( 7): Result.001 file - promoters70/1574029
atgtggt

SEQ ID NO: 84564 - DNA, 7 bp, Unknown
  misc_feature (1)..( 7): Result.001 file - promoters70/1574029
atgtgga

SEQ ID NO: 84565 - DNA, 7 bp, Unknown
  misc_feature (1)..( 7): Result.001 file - promoters70/1580500
atgagga

SEQ ID NO: 84566 - DNA, 8 bp, Unknown
  misc_feature (1)..( 8): Result.001 file - promoters70/1580500
catatagg

SEQ ID NO: 84567 - DNA, 8 bp, Unknown
  misc_feature (1)..( 8): Result.001 file - promoters70/1580500
catataaa

SEQ ID NO: 84568 - DNA, 8 bp, Unknown
  misc_feature (1)..( 8): Result.001 file - promoters70/1580500
tatagaaa

SEQ ID NO: 84569 - DNA, 8 bp, Unknown
  misc_feature (1)..( 8): Result.001 file - promoters70/1580500
aagataat

SEQ ID NO: 84570 - DNA, 9 bp, Unknown
  misc_feature (1)..( 9): Result.001 file - promoters70/1580500
gaaaaaaaa

SEQ ID NO: 84571 - DNA, 9 bp, Unknown
  misc_feature (1)..( 9): Result.001 file - promoters70/1580500
taaataaaa

SEQ ID NO: 84572 - DNA, 9 bp, Unknown
  misc_feature (1)..( 9): Result.001 file - promoters70/1580500
taaataagg

SEQ ID NO: 84573 - DNA, 9 bp, Unknown
  misc_feature (1)..( 9): Result.001 file - promoters70/1580500
taacaaata

SEQ ID NO: 84574 - DNA, 9 bp, Unknown
  misc_feature (1)..( 9): Result.001 file - promoters70/1580500
taataaata

SEQ ID NO: 84575 - DNA, 9 bp, Unknown
  misc_feature (1)..( 9): Result.001 file - promoters70/1580932
atataaatt

SEQ ID NO: 84576 - DNA, 13 bp, Unknown
  misc_feature (1)..( 13): Result.001 file - promoters70/1580932
gagatgcggaagc

SEQ ID NO: 84577 - DNA, 13 bp, Unknown
  misc_feature (1)..( 13): Result.001 file - promoters70/1580932
cagattcggctta

SEQ ID NO: 84578 - DNA, 13 bp, Unknown
  misc_feature (1)..( 13): Result.001 file - promoters70/1580932
tagattcatattc

SEQ ID NO: 84579 - DNA, 8 bp, Unknown
  misc_feature (1)..( 8): Result.001 file - promoters70/1580932
gaagagga

SEQ ID NO: 84580 - DNA, 8 bp, Unknown
  misc_feature (1)..( 8): Result.001 file - promoters70/1580932
gaaaagga

SEQ ID NO: 84581 - DNA, 8 bp, Unknown
  misc_feature (1)..( 8): Result.001 file - promoters70/1580932
taaaggga

SEQ ID NO: 84582 - DNA, 8 bp, Unknown
  misc_feature (1)..( 8): Result.001 file - promoters70/1580932
taaaaaaa

SEQ ID NO: 84583 - DNA, 9 bp, Unknown
  misc_feature (1)..( 9): Result.001 file - promoters70/1580932
gccaaaaat

SEQ ID NO: 84584 - DNA, 9 bp, Unknown
  misc_feature (1)..( 9): Result.001 file - promoters70/1580932
accacaaat

SEQ ID NO: 84585 - DNA, 9 bp, Unknown
  misc_feature (1)..( 9): Result.001 file - promoters70/1580932
accacacaa

SEQ ID NO: 84586 - DNA, 10 bp, Unknown
  misc_feature (1)..( 10): Result.001 file - promoters70/1580932
gaataaacgc

SEQ ID NO: 84587 - DNA, 10 bp, Unknown
  misc_feature (1)..( 10): Result.001 file - promoters70/1580932
aaataaaggg

SEQ ID NO: 84588 - DNA, 10 bp, Unknown
  misc_feature (1)..( 10): Result.001 file - promoters70/1580932
taaaaaaaaa

SEQ ID NO: 84589 - DNA, 10 bp, Unknown
  misc_feature (1)..( 10): Result.001 file - promoters70/1580932
aaaaaaaaaa

SEQ ID NO: 84590 - DNA, 8 bp, Unknown
  misc_feature (1)..( 8): Result.001 file - promoters70/1580932
tcatttaa

SEQ ID NO: 84591 - DNA, 8 bp, Unknown
  misc_feature (1)..( 8): Result.001 file - promoters70/1580932
caatttaa

SEQ ID NO: 84592 - DNA, 8 bp, Unknown
  misc_feature (1)..( 8): Result.001 file - promoters70/1580932
tcatttat

SEQ ID NO: 84593 - DNA, 8 bp, Unknown
  misc_feature (1)..( 8): Result.001 file - promoters70/1580932
gaaaaccc

SEQ ID NO: 84594 - DNA, 8 bp, Unknown
  misc_feature (1)..( 8): Result.001 file - promoters70/1580932
aaaaacca

SEQ ID NO: 84595 - DNA, 8 bp, Unknown
  misc_feature (1)..( 8): Result.001 file - promoters70/1580932
aaaaacct

SEQ ID NO: 84596 - DNA, 9 bp, Unknown
  misc_feature (1)..( 9): Result.001 file - promoters70/1580932
aaagaactg

SEQ ID NO: 84597 - DNA, 8 bp, Unknown
  misc_feature (1)..( 8): Result.001 file - promoters70/1580932
cttcaatg

SEQ ID NO: 84598 - DNA, 8 bp, Unknown
  misc_feature (1)..( 8): Result.001 file - promoters70/1580932
tttcaata

SEQ ID NO: 84599 - DNA, 8 bp, Unknown
  misc_feature (1)..( 8): Result.001 file - promoters70/1580932
tttctata

SEQ ID NO: 84600 - DNA, 10 bp, Unknown
  misc_feature (1)..( 10): Result.001 file - promoters70/1580932
aaatttatta

SEQ ID NO: 84601 - DNA, 10 bp, Unknown
  misc_feature (1)..( 10): Result.001 file - promoters70/1580932
aaatttttta

SEQ ID NO: 84602 - DNA, 10 bp, Unknown
  misc_feature (1)..( 10): Result.001 file - promoters70/1581987
aaatttctga

SEQ ID NO: 84603 - DNA, 7 bp, Unknown
  misc_feature (1)..( 7): Result.001 file - promoters70/1581987
gattatg

SEQ ID NO: 84604 - DNA, 7 bp, Unknown
  misc_feature (1)..( 7): Result.001 file - promoters70/1581987
gataatg

SEQ ID NO: 84605 - DNA, 7 bp, Unknown
  misc_feature (1)..( 7): Result.001 file - promoters70/1582576
aataatg

SEQ ID NO: 84606 - DNA, 7 bp, Unknown
  misc_feature (1)..( 7): Result.001 file - promoters70/1582576
taaataa

SEQ ID NO: 84607 - DNA, 7 bp, Unknown
  misc_feature (1)..( 7): Result.001 file - promoters70/1582576
aaaataa

SEQ ID NO: 84608 - DNA, 8 bp, Unknown
  misc_feature (1)..( 8): Result.001 file - promoters70/1582576
taaagtaa

SEQ ID NO: 84609 - DNA, 7 bp, Unknown
  misc_feature (1)..( 7): Result.001 file - promoters70/1582576
aataaat

SEQ ID NO: 84610 - DNA, 7 bp, Unknown
  misc_feature (1)..( 7): Result.001 file - promoters70/1582576
aataaaa

SEQ ID NO: 84611 - DNA, 7 bp, Unknown
  misc_feature (1)..( 7): Result.001 file - promoters70/1595707
aataaaa

SEQ ID NO: 84612 - DNA, 11 bp, Unknown
  misc_feature (1)..( 11): Result.001 file - promoters70/1595707
cagcccagtca

SEQ ID NO: 84613 - DNA, 11 bp, Unknown
  misc_feature (1)..( 11): Result.001 file - promoters70/1595707
aataccaatca

SEQ ID NO: 84614 - DNA, 11 bp, Unknown
  misc_feature (1)..( 11): Result.001 file - promoters70/1595707
aatacaaatct

SEQ ID NO: 84615 - DNA, 7 bp, Unknown
  misc_feature (1)..( 7): Result.001 file - promoters70/1595707
gacaaac

SEQ ID NO: 84616 - DNA, 7 bp, Unknown
  misc_feature (1)..( 7): Result.001 file - promoters70/1595707
gacaaaa

SEQ ID NO: 84617 - DNA, 7 bp, Unknown
  misc_feature (1)..( 7): Result.001 file - promoters70/1595707
aacaaaa

SEQ ID NO: 84618 - DNA, 9 bp, Unknown
  misc_feature (1)..( 9): Result.001 file - promoters70/1595707
tcaagaaaa

SEQ ID NO: 84619 - DNA, 9 bp, Unknown
  misc_feature (1)..( 9): Result.001 file - promoters70/1595707
acaaaaaaa

SEQ ID NO: 84620 - DNA, 9 bp, Unknown
  misc_feature (1)..( 9): Result.001 file - promoters70/1595741
acaaaagag

SEQ ID NO: 84621 - DNA, 13 bp, Unknown
  misc_feature (1)..( 13): Result.001 file - promoters70/1595741
ctaagaaattctt

SEQ ID NO: 84622 - DNA, 13 bp, Unknown
  misc_feature (1)..( 13): Result.001 file - promoters70/1595741
gtcgtcaatcctt

SEQ ID NO: 84623 - DNA, 13 bp, Unknown
  misc_feature (1)..( 13): Result.001 file - promoters70/1595741
cttggaaattctg

SEQ ID NO: 84624 - DNA, 13 bp, Unknown
  misc_feature (1)..( 13): Result.001 file - promoters70/1595772
cttagaaatcaat

SEQ ID NO: 84625 - DNA, 7 bp, Unknown
  misc_feature (1)..( 7): Result.001 file - promoters70/1595772
atttaaa

SEQ ID NO: 84626 - DNA, 7 bp, Unknown
  misc_feature (1)..( 7): Result.001 file - promoters70/1595772
atttaaa

SEQ ID NO: 84627 - DNA, 7 bp, Unknown
  misc_feature (1)..( 7): Result.001 file - promoters70/1595772
gtttaaa

SEQ ID NO: 84628 - DNA, 7 bp, Unknown
  misc_feature (1)..( 7): Result.001 file - promoters70/1595772
aaaacaa

SEQ ID NO: 84629 - DNA, 7 bp, Unknown
  misc_feature (1)..( 7): Result.001 file - promoters70/1595772
taaacaa

SEQ ID NO: 84630 - DNA, 7 bp, Unknown
  misc_feature (1)..( 7): Result.001 file - promoters70/1595772
aaaacaa

SEQ ID NO: 84631 - DNA, 9 bp, Unknown
  misc_feature (1)..( 9): Result.001 file - promoters70/1595772
atataaata

SEQ ID NO: 84632 - DNA, 9 bp, Unknown
  misc_feature (1)..( 9): Result.001 file - promoters70/1595772
ttataaata

SEQ ID NO: 84633 - DNA, 9 bp, Unknown
  misc_feature (1)..( 9): Result.001 file - promoters70/1595794
atataagtg

SEQ ID NO: 84634 - DNA, 11 bp, Unknown
  misc_feature (1)..( 11): Result.001 file - promoters70/1595794
aacaaattaaa

SEQ ID NO: 84635 - DNA, 11 bp, Unknown
  misc_feature (1)..( 11): Result.001 file - promoters70/1595794
aacatatttta

SEQ ID NO: 84636 - DNA, 11 bp, Unknown
  misc_feature (1)..( 11): Result.001 file - promoters70/1595794
taaaaattata

SEQ ID NO: 84637 - DNA, 11 bp, Unknown
  misc_feature (1)..( 11): Result.001 file - promoters70/1595794
aacaaagtatc

SEQ ID NO: 84638 - DNA, 11 bp, Unknown
  misc_feature (1)..( 11): Result.001 file - promoters70/1595794
taaatatttca

SEQ ID NO: 84639 - DNA, 11 bp, Unknown
  misc_feature (1)..( 11): Result.001 file - promoters70/1662827
tttaaattttt

SEQ ID NO: 84640 - DNA, 10 bp, Unknown
  misc_feature (1)..( 10): Result.001 file - promoters70/1662827
ttttcttaat

SEQ ID NO: 84641 - DNA, 10 bp, Unknown
  misc_feature (1)..( 10): Result.001 file - promoters70/1662827
ttttcataat

SEQ ID NO: 84642 - DNA, 10 bp, Unknown
  misc_feature (1)..( 10): Result.001 file - promoters70/1662827
ctttcattca

SEQ ID NO: 84643 - DNA, 10 bp, Unknown
  misc_feature (1)..( 10): Result.001 file - promoters70/1662827
agttaataaa

SEQ ID NO: 84644 - DNA, 10 bp, Unknown
  misc_feature (1)..( 10): Result.001 file - promoters70/1662827
agttaatatt

SEQ ID NO: 84645 - DNA, 10 bp, Unknown
  misc_feature (1)..( 10): Result.001 file - promoters70/1662827
ttgtaacaaa

SEQ ID NO: 84646 - DNA, 6 bp, Unknown
  misc_feature (1)..( 6): Result.001 file - promoters70/1662827
tacatt

SEQ ID NO: 84647 - DNA, 6 bp, Unknown
  misc_feature (1)..( 6): Result.001 file - promoters70/1662827
tacatt

SEQ ID NO: 84648 - DNA, 6 bp, Unknown
  misc_feature (1)..( 6): Result.001 file - promoters70/1662827
tacatt

SEQ ID NO: 84649 - DNA, 7 bp, Unknown
  misc_feature (1)..( 7): Result.001 file - promoters70/1662827
tttttaa

SEQ ID NO: 84650 - DNA, 7 bp, Unknown
  misc_feature (1)..( 7): Result.001 file - promoters70/1662827
tttttac

SEQ ID NO: 84651 - DNA, 7 bp, Unknown
  misc_feature (1)..( 7): Result.001 file - promoters70/1662827
attttac

SEQ ID NO: 84652 - DNA, 8 bp, Unknown
  misc_feature (1)..( 8): Result.001 file - promoters70/1662827
agacaaaa

SEQ ID NO: 84653 - DNA, 8 bp, Unknown
  misc_feature (1)..( 8): Result.001 file - promoters70/1662827
agaaaaaa

SEQ ID NO: 84654 - DNA, 8 bp, Unknown
  misc_feature (1)..( 8): Result.001 file - promoters70/1662917
aaacgaaa

SEQ ID NO: 84655 - DNA, 11 bp, Unknown
  misc_feature (1)..( 11): Result.001 file - promoters70/1662917
tagagaaattc

SEQ ID NO: 84656 - DNA, 11 bp, Unknown
  misc_feature (1)..( 11): Result.001 file - promoters70/1662917
gtaagaaatcc

SEQ ID NO: 84657 - DNA, 11 bp, Unknown
  misc_feature (1)..( 11): Result.001 file - promoters70/1662917
tttagaaaaat

SEQ ID NO: 84658 - DNA, 8 bp, Unknown
  misc_feature (1)..( 8): Result.001 file - promoters70/1662917
attagttc

SEQ ID NO: 84659 - DNA, 8 bp, Unknown
  misc_feature (1)..( 8): Result.001 file - promoters70/1662917
atttgtta

SEQ ID NO: 84660 - DNA, 8 bp, Unknown
  misc_feature (1)..( 8): Result.001 file - promoters70/1662917
aattgtta

SEQ ID NO: 84661 - DNA, 8 bp, Unknown
  misc_feature (1)..( 8): Result.001 file - promoters70/1662917
ttttcaat

SEQ ID NO: 84662 - DNA, 8 bp, Unknown
  misc_feature (1)..( 8): Result.001 file - promoters70/1662917
attttaat

SEQ ID NO: 84663 - DNA, 8 bp, Unknown
  misc_feature (1)..( 8): Result.001 file - promoters70/1662917
attctaac

SEQ ID NO: 84664 - DNA, 8 bp, Unknown
  misc_feature (1)..( 8): Result.001 file - promoters70/1662917
cttttaaa

SEQ ID NO: 84665 - DNA, 13 bp, Unknown
  misc_feature (1)..( 13): Result.001 file - promoters70/1662917
ttttgaagaattt

SEQ ID NO: 84666 - DNA, 13 bp, Unknown
  misc_feature (1)..( 13): Result.001 file - promoters70/1662917
ttttgatgaatgt

SEQ ID NO: 84667 - DNA, 13 bp, Unknown
  misc_feature (1)..( 13): Result.001 file - promoters70/1662917
atttgctgaataa

SEQ ID NO: 84668 - DNA, 13 bp, Unknown
  misc_feature (1)..( 13): Result.001 file - promoters70/1662917
cccttgtgaatgt

SEQ ID NO: 84669 - DNA, 11 bp, Unknown
  misc_feature (1)..( 11): Result.001 file - promoters70/1662917
atttccataaa

SEQ ID NO: 84670 - DNA, 11 bp, Unknown
  misc_feature (1)..( 11): Result.001 file - promoters70/1662917
attttcataaa

SEQ ID NO: 84671 - DNA, 11 bp, Unknown
  misc_feature (1)..( 11): Result.001 file - promoters70/1662917
aatttcatcct

SEQ ID NO: 84672 - DNA, 17 bp, Unknown
  misc_feature (1)..( 17): Result.001 file - promoters70/1662917
aaaatgttagataggaa

SEQ ID NO: 84673 - DNA, 17 bp, Unknown
  misc_feature (1)..( 17): Result.001 file - promoters70/1662917
taaattttaaaattatt

SEQ ID NO: 84674 - DNA, 17 bp, Unknown
  misc_feature (1)..( 17): Result.001 file - promoters70/1662917
taaattttgaaataatt

SEQ ID NO: 84675 - DNA, 17 bp, Unknown
  misc_feature (1)..( 17): Result.001 file - promoters70/1662917
taattgttaatcttttg

SEQ ID NO: 84676 - DNA, 13 bp, Unknown
  misc_feature (1)..( 13): Result.001 file - promoters70/1662917
tcatcgaacagca

SEQ ID NO: 84677 - DNA, 13 bp, Unknown
  misc_feature (1)..( 13): Result.001 file - promoters70/1662917
taatccaacggca

SEQ ID NO: 84678 - DNA, 13 bp, Unknown
  misc_feature (1)..( 13): Result.001 file - promoters70/1662917
taatccaacggac

SEQ ID NO: 84679 - DNA, 8 bp, Unknown
  misc_feature (1)..( 8): Result.001 file - promoters70/1662917
tatataaa

SEQ ID NO: 84680 - DNA, 8 bp, Unknown
  misc_feature (1)..( 8): Result.001 file - promoters70/1662917
tatataat

SEQ ID NO: 84681 - DNA, 8 bp, Unknown
  misc_feature (1)..( 8): Result.001 file - promoters70/1662917
cctataaa

SEQ ID NO: 84682 - DNA, 10 bp, Unknown
  misc_feature (1)..( 10): Result.001 file - promoters70/1662917
tataaacaaa

SEQ ID NO: 84683 - DNA, 10 bp, Unknown
  misc_feature (1)..( 10): Result.001 file - promoters70/1662917
aataaccaaa

SEQ ID NO: 84684 - DNA, 10 bp, Unknown
  misc_feature (1)..( 10): Result.001 file - promoters70/1662917
tataaatatc

SEQ ID NO: 84685 - DNA, 8 bp, Unknown
  misc_feature (1)..( 8): Result.001 file - promoters70/1662917
aaattcaa

SEQ ID NO: 84686 - DNA, 8 bp, Unknown
  misc_feature (1)..( 8): Result.001 file - promoters70/1662917
aaattctc

SEQ ID NO: 84687 - DNA, 8 bp, Unknown
  misc_feature (1)..( 8): Result.001 file - promoters70/1662917
aaatcctc

SEQ ID NO: 84688 - DNA, 11 bp, Unknown
  misc_feature (1)..( 11): Result.001 file - promoters70/1662917
cttataattat

SEQ ID NO: 84689 - DNA, 11 bp, Unknown
  misc_feature (1)..( 11): Result.001 file - promoters70/1662917
tttataagtat

SEQ ID NO: 84690 - DNA, 11 bp, Unknown
  misc_feature (1)..( 11): Result.001 file - promoters70/1662917
tttgtaacttc

SEQ ID NO: 84691 - DNA, 11 bp, Unknown
  misc_feature (1)..( 11): Result.001 file - promoters70/1662917
tttaaaagtaa

SEQ ID NO: 84692 - DNA, 8 bp, Unknown
  misc_feature (1)..( 8): Result.001 file - promoters70/1662917
gtaatgta

SEQ ID NO: 84693 - DNA, 8 bp, Unknown
  misc_feature (1)..( 8): Result.001 file - promoters70/1662917
tgaatgta

SEQ ID NO: 84694 - DNA, 8 bp, Unknown
  misc_feature (1)..( 8): Result.001 file - promoters70/1662917
tgaatgtc

SEQ ID NO: 84695 - DNA, 10 bp, Unknown
  misc_feature (1)..( 10): Result.001 file - promoters70/1662917
atttaaattg

SEQ ID NO: 84696 - DNA, 10 bp, Unknown
  misc_feature (1)..( 10): Result.001 file - promoters70/1662917
atttaaatca

SEQ ID NO: 84697 - DNA, 10 bp, Unknown
  misc_feature (1)..( 10): Result.001 file - promoters70/1663278
gtgtaagttg

SEQ ID NO: 84698 - DNA, 9 bp, Unknown
  misc_feature (1)..( 9): Result.001 file - promoters70/1663278
gtttttttt

SEQ ID NO: 84699 - DNA, 9 bp, Unknown
  misc_feature (1)..( 9): Result.001 file - promoters70/1663278
gttcttttt

SEQ ID NO: 84700 - DNA, 9 bp, Unknown
  misc_feature (1)..( 9): Result.001 file - promoters70/1663278
attctttgg

SEQ ID NO: 84701 - DNA, 6 bp, Unknown
  misc_feature (1)..( 6): Result.001 file - promoters70/1663278
tagctt

SEQ ID NO: 84702 - DNA, 6 bp, Unknown
  misc_feature (1)..( 6): Result.001 file - promoters70/1663278
tagctt

SEQ ID NO: 84703 - DNA, 6 bp, Unknown
  misc_feature (1)..( 6): Result.001 file - promoters70/1663353
tagctt

SEQ ID NO: 84704 - DNA, 7 bp, Unknown
  misc_feature (1)..( 7): Result.001 file - promoters70/1663353
aaaacaa

SEQ ID NO: 84705 - DNA, 7 bp, Unknown
  misc_feature (1)..( 7): Result.001 file - promoters70/1663353
aaaacat

SEQ ID NO: 84706 - DNA, 7 bp, Unknown
  misc_feature (1)..( 7): Result.001 file - promoters70/1663353
aaatcaa

SEQ ID NO: 84707 - DNA, 8 bp, Unknown
  misc_feature (1)..( 8): Result.001 file - promoters70/1663353
aatctttt

SEQ ID NO: 84708 - DNA, 8 bp, Unknown
  misc_feature (1)..( 8): Result.001 file - promoters70/1663353
catcgttt

SEQ ID NO: 84709 - DNA, 8 bp, Unknown
  misc_feature (1)..( 8): Result.001 file - promoters70/1663353
catcgtcg

SEQ ID NO: 84710 - DNA, 8 bp, Unknown
  misc_feature (1)..( 8): Result.001 file - promoters70/1663353
tattattt

SEQ ID NO: 84711 - DNA, 8 bp, Unknown
  misc_feature (1)..( 8): Result.001 file - promoters70/1663353
gattcttt

SEQ ID NO: 84712 - DNA, 8 bp, Unknown
  misc_feature (1)..( 8): Result.001 file - promoters70/1673798
gattctct

SEQ ID NO: 84713 - DNA, 9 bp, Unknown
  misc_feature (1)..( 9): Result.001 file - promoters70/1673798
aaactaaaa

SEQ ID NO: 84714 - DNA, 9 bp, Unknown
  misc_feature (1)..( 9): Result.001 file - promoters70/1673798
aaaataaaa

SEQ ID NO: 84715 - DNA, 9 bp, Unknown
  misc_feature (1)..( 9): Result.001 file - promoters70/1673798
aaacaaaat

SEQ ID NO: 84716 - DNA, 10 bp, Unknown
  misc_feature (1)..( 10): Result.001 file - promoters70/1673798
taaaataaaa

SEQ ID NO: 84717 - DNA, 10 bp, Unknown
  misc_feature (1)..( 10): Result.001 file - promoters70/1673798
aaaaataaaa

SEQ ID NO: 84718 - DNA, 10 bp, Unknown
  misc_feature (1)..( 10): Result.001 file - promoters70/1711228
taatatatta

SEQ ID NO: 84719 - DNA, 7 bp, Unknown
  misc_feature (1)..( 7): Result.001 file - promoters70/1711228
aagattt

SEQ ID NO: 84720 - DNA, 7 bp, Unknown
  misc_feature (1)..( 7): Result.001 file - promoters70/1711228
aagattc

SEQ ID NO: 84721 - DNA, 7 bp, Unknown
  misc_feature (1)..( 7): Result.001 file - promoters70/1711228
aagattt

SEQ ID NO: 84722 - DNA, 12 bp, Unknown
  misc_feature (1)..( 12): Result.001 file - promoters70/1711228
tgtattttatgt

SEQ ID NO: 84723 - DNA, 12 bp, Unknown
  misc_feature (1)..( 12): Result.001 file - promoters70/1711228
tgtgtttgttgt

SEQ ID NO: 84724 - DNA, 12 bp, Unknown
  misc_feature (1)..( 12): Result.001 file - promoters70/1711228
attattatatgt

SEQ ID NO: 84725 - DNA, 12 bp, Unknown
  misc_feature (1)..( 12): Result.001 file - promoters70/1711228
catatttaatag

SEQ ID NO: 84726 - DNA, 7 bp, Unknown
  misc_feature (1)..( 7): Result.001 file - promoters70/1711228
gagtatt

SEQ ID NO: 84727 - DNA, 7 bp, Unknown
  misc_feature (1)..( 7): Result.001 file - promoters70/1711228
tagtatt

SEQ ID NO: 84728 - DNA, 7 bp, Unknown
  misc_feature (1)..( 7): Result.001 file - promoters70/1711228
tagcatt

SEQ ID NO: 84729 - DNA, 8 bp, Unknown
  misc_feature (1)..( 8): Result.001 file - promoters70/1711228
caacaata

SEQ ID NO: 84730 - DNA, 8 bp, Unknown
  misc_feature (1)..( 8): Result.001 file - promoters70/1711228
caataatg

SEQ ID NO: 84731 - DNA, 8 bp, Unknown
  misc_feature (1)..( 8): Result.001 file - promoters70/1711228
gaattatg

SEQ ID NO: 84732 - DNA, 7 bp, Unknown
  misc_feature (1)..( 7): Result.001 file - promoters70/1711228
tgtattt

SEQ ID NO: 84733 - DNA, 7 bp, Unknown
  misc_feature (1)..( 7): Result.001 file - promoters70/1711228
tgttttt

SEQ ID NO: 84734 - DNA, 8 bp, Unknown
  misc_feature (1)..( 8): Result.001 file - promoters70/1711228
tttatctt

SEQ ID NO: 84735 - DNA, 8 bp, Unknown
  misc_feature (1)..( 8): Result.001 file - promoters70/1711228
atttgttt

SEQ ID NO: 84736 - DNA, 11 bp, Unknown
  misc_feature (1)..( 11): Result.001 file - promoters70/1711228
acacgaaaaaa

SEQ ID NO: 84737 - DNA, 11 bp, Unknown
  misc_feature (1)..( 11): Result.001 file - promoters70/1711228
acaccaaaaaa

SEQ ID NO: 84738 - DNA, 11 bp, Unknown
  misc_feature (1)..( 11): Result.001 file - promoters70/1711318
tgcagaaaaag

SEQ ID NO: 84739 - DNA, 9 bp, Unknown
  misc_feature (1)..( 9): Result.001 file - promoters70/1711318
attaatttc

SEQ ID NO: 84740 - DNA, 9 bp, Unknown
  misc_feature (1)..( 9): Result.001 file - promoters70/1711318
atttatttt

SEQ ID NO: 84741 - DNA, 9 bp, Unknown
  misc_feature (1)..( 9): Result.001 file - promoters70/1711318
tctaacttc

SEQ ID NO: 84742 - DNA, 12 bp, Unknown
  misc_feature (1)..( 12): Result.001 file - promoters70/1711318
aaaggcccatat

SEQ ID NO: 84743 - DNA, 12 bp, Unknown
  misc_feature (1)..( 12): Result.001 file - promoters70/1711318
aaaagccctagt

SEQ ID NO: 84744 - DNA, 12 bp, Unknown
  misc_feature (1)..( 12): Result.001 file - promoters70/1711318
ttcggcccatat

SEQ ID NO: 84745 - DNA, 9 bp, Unknown
  misc_feature (1)..( 9): Result.001 file - promoters70/1711318
aaattgaat

SEQ ID NO: 84746 - DNA, 9 bp, Unknown
  misc_feature (1)..( 9): Result.001 file - promoters70/1711318
aaattgaga

SEQ ID NO: 84747 - DNA, 9 bp, Unknown
  misc_feature (1)..( 9): Result.001 file - promoters70/1711318
acattgaga

SEQ ID NO: 84748 - DNA, 9 bp, Unknown
  misc_feature (1)..( 9): Result.001 file - promoters70/1711318
taaaataaa

SEQ ID NO: 84749 - DNA, 9 bp, Unknown
  misc_feature (1)..( 9): Result.001 file - promoters70/1711318
gaaaacaaa

SEQ ID NO: 84750 - DNA, 9 bp, Unknown
  misc_feature (1)..( 9): Result.001 file - promoters70/1711318
gaaagcaat

SEQ ID NO: 84751 - DNA, 11 bp, Unknown
  misc_feature (1)..( 11): Result.001 file - promoters70/1711318
agtttaggttt

SEQ ID NO: 84752 - DNA, 11 bp, Unknown
  misc_feature (1)..( 11): Result.001 file - promoters70/1711318
tttttaggccc

SEQ ID NO: 84753 - DNA, 12 bp, Unknown
  misc_feature (1)..( 12): Result.001 file - promoters70/1711318
atttataggccc

SEQ ID NO: 84754 - DNA, 8 bp, Unknown
  misc_feature (1)..( 8): Result.001 file - promoters70/1711318
gattgaaa

SEQ ID NO: 84755 - DNA, 8 bp, Unknown
  misc_feature (1)..( 8): Result.001 file - promoters70/1711318
gattgaag

SEQ ID NO: 84756 - DNA, 9 bp, Unknown
  misc_feature (1)..( 9): Result.001 file - promoters70/1711318
atttgcaat

SEQ ID NO: 84757 - DNA, 12 bp, Unknown
  misc_feature (1)..( 12): Result.001 file - promoters70/1711318
aaccctagcccc

SEQ ID NO: 84758 - DNA, 12 bp, Unknown
  misc_feature (1)..( 12): Result.001 file - promoters70/1711318
atttataggccc

SEQ ID NO: 84759 - DNA, 12 bp, Unknown
  misc_feature (1)..( 12): Result.001 file - promoters70/1713842
atttttaggccc

SEQ ID NO: 84760 - DNA, 7 bp, Unknown
  misc_feature (1)..( 7): Result.001 file - promoters70/1713842
tatttat

SEQ ID NO: 84761 - DNA, 7 bp, Unknown
  misc_feature (1)..( 7): Result.001 file - promoters70/1713842
tatttaa

SEQ ID NO: 84762 - DNA, 7 bp, Unknown
  misc_feature (1)..( 7): Result.001 file - promoters70/1713842
aattttt

SEQ ID NO: 84763 - DNA, 8 bp, Unknown
  misc_feature (1)..( 8): Result.001 file - promoters70/1713842
caaaccca

SEQ ID NO: 84764 - DNA, 8 bp, Unknown
  misc_feature (1)..( 8): Result.001 file - promoters70/1713842
caaacctg

SEQ ID NO: 84765 - DNA, 8 bp, Unknown
  misc_feature (1)..( 8): Result.001 file - promoters70/1713842
gaaagctg

SEQ ID NO: 84766 - DNA, 8 bp, Unknown
  misc_feature (1)..( 8): Result.001 file - promoters70/1713842
agagacat

SEQ ID NO: 84767 - DNA, 8 bp, Unknown
  misc_feature (1)..( 8): Result.001 file - promoters70/1713842
agatacag

SEQ ID NO: 84768 - DNA, 8 bp, Unknown
  misc_feature (1)..( 8): Result.001 file - promoters70/1713842
cgatccag

SEQ ID NO: 84769 - DNA, 9 bp, Unknown
  misc_feature (1)..( 9): Result.001 file - promoters70/1713842
tttaaagct

SEQ ID NO: 84770 - DNA, 9 bp, Unknown
  misc_feature (1)..( 9): Result.001 file - promoters70/1713842
tttcaagtt

SEQ ID NO: 84771 - DNA, 9 bp, Unknown
  misc_feature (1)..( 9): Result.001 file - promoters70/1714694
tctcacgtt

SEQ ID NO: 84772 - DNA, 8 bp, Unknown
  misc_feature (1)..( 8): Result.001 file - promoters70/1714694
ttgtattt

SEQ ID NO: 84773 - DNA, 8 bp, Unknown
  misc_feature (1)..( 8): Result.001 file - promoters70/1714694
ttgtatat

SEQ ID NO: 84774 - DNA, 8 bp, Unknown
  misc_feature (1)..( 8): Result.001 file - promoters70/1714694
atgtctat

SEQ ID NO: 84775 - DNA, 7 bp, Unknown
  misc_feature (1)..( 7): Result.001 file - promoters70/1714694
attgctt

SEQ ID NO: 84776 - DNA, 7 bp, Unknown
  misc_feature (1)..( 7): Result.001 file - promoters70/1714694
tttgctt

SEQ ID NO: 84777 - DNA, 7 bp, Unknown
  misc_feature (1)..( 7): Result.001 file - promoters70/1714831
tttactt

SEQ ID NO: 84778 - DNA, 7 bp, Unknown
  misc_feature (1)..( 7): Result.001 file - promoters70/1714831
aaatgca

SEQ ID NO: 84779 - DNA, 7 bp, Unknown
  misc_feature (1)..( 7): Result.001 file - promoters70/1714831
aaatgca

SEQ ID NO: 84780 - DNA, 8 bp, Unknown
  misc_feature (1)..( 8): Result.001 file - promoters70/1714831
aaattgcg

SEQ ID NO: 84781 - DNA, 10 bp, Unknown
  misc_feature (1)..( 10): Result.001 file - promoters70/1714831
aagccgaatt

SEQ ID NO: 84782 - DNA, 10 bp, Unknown
  misc_feature (1)..( 10): Result.001 file - promoters70/1714831
aagacgattc

SEQ ID NO: 84783 - DNA, 10 bp, Unknown
  misc_feature (1)..( 10): Result.001 file - promoters70/1714831
aggcccaatt

SEQ ID NO: 84784 - DNA, 10 bp, Unknown
  misc_feature (1)..( 10): Result.001 file - promoters70/1714831
catgtgaaga

SEQ ID NO: 84785 - DNA, 10 bp, Unknown
  misc_feature (1)..( 10): Result.001 file - promoters70/1714831
catttgattt

SEQ ID NO: 84786 - DNA, 10 bp, Unknown
  misc_feature (1)..( 10): Result.001 file - promoters70/1714831
tatttaattt

SEQ ID NO: 84787 - DNA, 8 bp, Unknown
  misc_feature (1)..( 8): Result.001 file - promoters70/1714831
caaaccca

SEQ ID NO: 84788 - DNA, 8 bp, Unknown
  misc_feature (1)..( 8): Result.001 file - promoters70/1714831
caaacctg

SEQ ID NO: 84789 - DNA, 8 bp, Unknown
  misc_feature (1)..( 8): Result.001 file - promoters70/1714831
gaaagctg

SEQ ID NO: 84790 - DNA, 8 bp, Unknown
  misc_feature (1)..( 8): Result.001 file - promoters70/1714831
agagacat

SEQ ID NO: 84791 - DNA, 8 bp, Unknown
  misc_feature (1)..( 8): Result.001 file - promoters70/1714831
agatacag

SEQ ID NO: 84792 - DNA, 8 bp, Unknown
  misc_feature (1)..( 8): Result.001 file - promoters70/1714831
cgatccag

SEQ ID NO: 84793 - DNA, 9 bp, Unknown
  misc_feature (1)..( 9): Result.001 file - promoters70/1714831
tttaaagct

SEQ ID NO: 84794 - DNA, 9 bp, Unknown
  misc_feature (1)..( 9): Result.001 file - promoters70/1714831
tttcaagtt

SEQ ID NO: 84795 - DNA, 9 bp, Unknown
  misc_feature (1)..( 9): Result.001 file - promoters70/1714989
tctcacgtt

SEQ ID NO: 84796 - DNA, 10 bp, Unknown
  misc_feature (1)..( 10): Result.001 file - promoters70/1714989
tgaaaatatt

SEQ ID NO: 84797 - DNA, 10 bp, Unknown
  misc_feature (1)..( 10): Result.001 file - promoters70/1714989
caaaaataag

SEQ ID NO: 84798 - DNA, 10 bp, Unknown
  misc_feature (1)..( 10): Result.001 file - promoters70/1714989
taaaaattaa

SEQ ID NO: 84799 - DNA, 10 bp, Unknown
  misc_feature (1)..( 10): Result.001 file - promoters70/1714989
caaagattta

SEQ ID NO: 84800 - DNA, 10 bp, Unknown
  misc_feature (1)..( 10): Result.001 file - promoters70/1714989
taaacatatt

SEQ ID NO: 84801 - DNA, 10 bp, Unknown
  misc_feature (1)..( 10): Result.001 file - promoters70/1714989
caaaaaaggt

SEQ ID NO: 84802 - DNA, 10 bp, Unknown
  misc_feature (1)..( 10): Result.001 file - promoters70/1714989
gtaaaatttc

SEQ ID NO: 84803 - DNA, 10 bp, Unknown
  misc_feature (1)..( 10): Result.001 file - promoters70/1714989
taaaaatctc

SEQ ID NO: 84804 - DNA, 10 bp, Unknown
  misc_feature (1)..( 10): Result.001 file - promoters70/1714989
aaaacaaacg

SEQ ID NO: 84805 - DNA, 10 bp, Unknown
  misc_feature (1)..( 10): Result.001 file - promoters70/1714989
aaaaaaaaga

SEQ ID NO: 84806 - DNA, 10 bp, Unknown
  misc_feature (1)..( 10): Result.001 file - promoters70/1714989
taaataaatt

SEQ ID NO: 84807 - DNA, 10 bp, Unknown
  misc_feature (1)..( 10): Result.001 file - promoters70/1714989
taaaaaaaga

SEQ ID NO: 84808 - DNA, 10 bp, Unknown
  misc_feature (1)..( 10): Result.001 file - promoters70/1714989
caaacaaatg

SEQ ID NO: 84809 - DNA, 10 bp, Unknown
  misc_feature (1)..( 10): Result.001 file - promoters70/1714989
gaaacaaatt

SEQ ID NO: 84810 - DNA, 10 bp, Unknown
  misc_feature (1)..( 10): Result.001 file - promoters70/1714989
ttaactaatt

SEQ ID NO: 84811 - DNA, 10 bp, Unknown
  misc_feature (1)..( 10): Result.001 file - promoters70/1714989
taatataact

SEQ ID NO: 84812 - DNA, 10 bp, Unknown
  misc_feature (1)..( 10): Result.001 file - promoters70/1714989
cacaccaaat

SEQ ID NO: 84813 - DNA, 10 bp, Unknown
  misc_feature (1)..( 10): Result.001 file - promoters70/1714989
aaaaccaaag

SEQ ID NO: 84814 - DNA, 10 bp, Unknown
  misc_feature (1)..( 10): Result.001 file - promoters70/1714989
ccaactaaag

SEQ ID NO: 84815 - DNA, 10 bp, Unknown
  misc_feature (1)..( 10): Result.001 file - promoters70/1714989
ataaccaaga

SEQ ID NO: 84816 - DNA, 10 bp, Unknown
  misc_feature (1)..( 10): Result.001 file - promoters70/1714989
taaactatga

SEQ ID NO: 84817 - DNA, 10 bp, Unknown
  misc_feature (1)..( 10): Result.001 file - promoters70/1714989
caaaatatca

SEQ ID NO: 84818 - DNA, 12 bp, Unknown
  misc_feature (1)..( 12): Result.001 file - promoters70/1714989
attacaaaacta

SEQ ID NO: 84819 - DNA, 12 bp, Unknown
  misc_feature (1)..( 12): Result.001 file - promoters70/1714989
tatacaaaaaaa

SEQ ID NO: 84820 - DNA, 12 bp, Unknown
  misc_feature (1)..( 12): Result.001 file - promoters70/1714989
ttaacaaaaaag

SEQ ID NO: 84821 - DNA, 12 bp, Unknown
  misc_feature (1)..( 12): Result.001 file - promoters70/1714989
ctcccaaaaata

SEQ ID NO: 84822 - DNA, 12 bp, Unknown
  misc_feature (1)..( 12): Result.001 file - promoters70/1714989
caaataaacata

SEQ ID NO: 84823 - DNA, 12 bp, Unknown
  misc_feature (1)..( 12): Result.001 file - promoters70/1714989
attcctaaaatc

SEQ ID NO: 84824 - DNA, 12 bp, Unknown
  misc_feature (1)..( 12): Result.001 file - promoters70/1714989
tatacaagaaca

SEQ ID NO: 84825 - DNA, 13 bp, Unknown
  misc_feature (1)..( 13): Result.001 file - promoters70/1714989
aataaataaaagc

SEQ ID NO: 84826 - DNA, 13 bp, Unknown
  misc_feature (1)..( 13): Result.001 file - promoters70/1714989
aaacaataaaatt

SEQ ID NO: 84827 - DNA, 13 bp, Unknown
  misc_feature (1)..( 13): Result.001 file - promoters70/1714989
acattataaaata

SEQ ID NO: 84828 - DNA, 13 bp, Unknown
  misc_feature (1)..( 13): Result.001 file - promoters70/1714989
aaacagtaaaacc

SEQ ID NO: 84829 - DNA, 13 bp, Unknown
  misc_feature (1)..( 13): Result.001 file - promoters70/1714989
aggagataatatt

SEQ ID NO: 84830 - DNA, 13 bp, Unknown
  misc_feature (1)..( 13): Result.001 file - promoters70/1714989
cgtcaaaaaactt

SEQ ID NO: 84831 - DNA, 14 bp, Unknown
  misc_feature (1)..( 14): Result.001 file - promoters70/1714989
cgtcatattattag

SEQ ID NO: 84832 - DNA, 14 bp, Unknown
  misc_feature (1)..( 14): Result.001 file - promoters70/1714989
aaaaatattattag

SEQ ID NO: 84833 - DNA, 14 bp, Unknown
  misc_feature (1)..( 14): Result.001 file - promoters70/1714989
agtgatataattat

SEQ ID NO: 84834 - DNA, 14 bp, Unknown
  misc_feature (1)..( 14): Result.001 file - promoters70/1714989
tttgttattatatt

SEQ ID NO: 84835 - DNA, 14 bp, Unknown
  misc_feature (1)..( 14): Result.001 file - promoters70/1714989
aaacaaattattta

SEQ ID NO: 84836 - DNA, 14 bp, Unknown
  misc_feature (1)..( 14): Result.001 file - promoters70/1714989
tggattatcatttt

SEQ ID NO: 84837 - DNA, 14 bp, Unknown
  misc_feature (1)..( 14): Result.001 file - promoters70/1714989
gttaatatatattt

SEQ ID NO: 84838 - DNA, 11 bp, Unknown
  misc_feature (1)..( 11): Result.001 file - promoters70/1714989
gtttgtttaac

SEQ ID NO: 84839 - DNA, 11 bp, Unknown
  misc_feature (1)..( 11): Result.001 file - promoters70/1714989
ttttatttctt

SEQ ID NO: 84840 - DNA, 11 bp, Unknown
  misc_feature (1)..( 11): Result.001 file - promoters70/1714989
ttttgtttctg

SEQ ID NO: 84841 - DNA, 11 bp, Unknown
  misc_feature (1)..( 11): Result.001 file - promoters70/1714989
aattattttgt

SEQ ID NO: 84842 - DNA, 11 bp, Unknown
  misc_feature (1)..( 11): Result.001 file - promoters70/1714989
acttatatctt

SEQ ID NO: 84843 - DNA, 11 bp, Unknown
  misc_feature (1)..( 11): Result.001 file - promoters70/1714989
ttttataatga

SEQ ID NO: 84844 - DNA, 9 bp, Unknown
  misc_feature (1)..( 9): Result.001 file - promoters70/1714989
ctacatatt

SEQ ID NO: 84845 - DNA, 9 bp, Unknown
  misc_feature (1)..( 9): Result.001 file - promoters70/1714989
aaacatatt

SEQ ID NO: 84846 - DNA, 9 bp, Unknown
  misc_feature (1)..( 9): Result.001 file - promoters70/1714989
caacatata

SEQ ID NO: 84847 - DNA, 9 bp, Unknown
  misc_feature (1)..( 9): Result.001 file - promoters70/1714989
aaaaataag

SEQ ID NO: 84848 - DNA, 9 bp, Unknown
  misc_feature (1)..( 9): Result.001 file - promoters70/1714989
caaaaaagg

SEQ ID NO: 84849 - DNA, 9 bp, Unknown
  misc_feature (1)..( 9): Result.001 file - promoters70/1714989
aaaaaaagc

SEQ ID NO: 84850 - DNA, 11 bp, Unknown
  misc_feature (1)..( 11): Result.001 file - promoters70/1714989
aaaaaataaga

SEQ ID NO: 84851 - DNA, 11 bp, Unknown
  misc_feature (1)..( 11): Result.001 file - promoters70/1714989
gatagataaga

SEQ ID NO: 84852 - DNA, 11 bp, Unknown
  misc_feature (1)..( 11): Result.001 file - promoters70/1714989
caaagacaagt

SEQ ID NO: 84853 - DNA, 11 bp, Unknown
  misc_feature (1)..( 11): Result.001 file - promoters70/1714989
caaaaacaata

SEQ ID NO: 84854 - DNA, 11 bp, Unknown
  misc_feature (1)..( 11): Result.001 file - promoters70/1714989
accccacaaaa

SEQ ID NO: 84855 - DNA, 11 bp, Unknown
  misc_feature (1)..( 11): Result.001 file - promoters70/1714989
gggttacaaaa

SEQ ID NO: 84856 - DNA, 7 bp, Unknown
  misc_feature (1)..( 7): Result.001 file - promoters70/1714989
taagatt

SEQ ID NO: 84857 - DNA, 7 bp, Unknown
  misc_feature (1)..( 7): Result.001 file - promoters70/1714989
taaaatt

SEQ ID NO: 84858 - DNA, 7 bp, Unknown
  misc_feature (1)..( 7): Result.001 file - promoters70/1714989
taagatc

SEQ ID NO: 84859 - DNA, 7 bp, Unknown
  misc_feature (1)..( 7): Result.001 file - promoters70/1714989
aaaaatt

SEQ ID NO: 84860 - DNA, 7 bp, Unknown
  misc_feature (1)..( 7): Result.001 file - promoters70/1714989
caaaatt

SEQ ID NO: 84861 - DNA, 7 bp, Unknown
  misc_feature (1)..( 7): Result.001 file - promoters70/1714989
taaaaat

SEQ ID NO: 84862 - DNA, 7 bp, Unknown
  misc_feature (1)..( 7): Result.001 file - promoters70/1714989
taacaat

SEQ ID NO: 84863 - DNA, 12 bp, Unknown
  misc_feature (1)..( 12): Result.001 file - promoters70/1714989
gagttaaaaaat

SEQ ID NO: 84864 - DNA, 12 bp, Unknown
  misc_feature (1)..( 12): Result.001 file - promoters70/1714989
tagttaatatat

SEQ ID NO: 84865 - DNA, 12 bp, Unknown
  misc_feature (1)..( 12): Result.001 file - promoters70/1714989
tagttaaaaagt

SEQ ID NO: 84866 - DNA, 12 bp, Unknown
  misc_feature (1)..( 12): Result.001 file - promoters70/1714989
ttgttattatat

SEQ ID NO: 84867 - DNA, 12 bp, Unknown
  misc_feature (1)..( 12): Result.001 file - promoters70/1714989
cagttatttaaa

SEQ ID NO: 84868 - DNA, 12 bp, Unknown
  misc_feature (1)..( 12): Result.001 file - promoters70/1715347
aaattatttaca

SEQ ID NO: 84869 - DNA, 11 bp, Unknown
  misc_feature (1)..( 11): Result.001 file - promoters70/1715347
cattagtttcc

SEQ ID NO: 84870 - DNA, 11 bp, Unknown
  misc_feature (1)..( 11): Result.001 file - promoters70/1715347
atttattttcc

SEQ ID NO: 84871 - DNA, 11 bp, Unknown
  misc_feature (1)..( 11): Result.001 file - promoters70/1715347
agttagttctc

SEQ ID NO: 84872 - DNA, 11 bp, Unknown
  misc_feature (1)..( 11): Result.001 file - promoters70/1715347
atacagtgtcc

SEQ ID NO: 84873 - DNA, 11 bp, Unknown
  misc_feature (1)..( 11): Result.001 file - promoters70/1715347
aaatatcttca

SEQ ID NO: 84874 - DNA, 11 bp, Unknown
  misc_feature (1)..( 11): Result.001 file - promoters70/1715347
atttattaaca

SEQ ID NO: 84875 - DNA, 12 bp, Unknown
  misc_feature (1)..( 12): Result.001 file - promoters70/1715347
tcttaaatgctt

SEQ ID NO: 84876 - DNA, 12 bp, Unknown
  misc_feature (1)..( 12): Result.001 file - promoters70/1715347
ctctaattgctt

SEQ ID NO: 84877 - DNA, 12 bp, Unknown
  misc_feature (1)..( 12): Result.001 file - promoters70/1715347
tcttaaataact

SEQ ID NO: 84878 - DNA, 12 bp, Unknown
  misc_feature (1)..( 12): Result.001 file - promoters70/1715347
gcttgaatcaat

SEQ ID NO: 84879 - DNA, 12 bp, Unknown
  misc_feature (1)..( 12): Result.001 file - promoters70/1715347
cgataattgatt

SEQ ID NO: 84880 - DNA, 12 bp, Unknown
  misc_feature (1)..( 12): Result.001 file - promoters70/1715347
ttttaattaaaa

SEQ ID NO: 84881 - DNA, 12 bp, Unknown
  misc_feature (1)..( 12): Result.001 file - promoters70/1715347
tctaaaacgttt

SEQ ID NO: 84882 - DNA, 11 bp, Unknown
  misc_feature (1)..( 11): Result.001 file - promoters70/1715347
gaaatatcttt

SEQ ID NO: 84883 - DNA, 11 bp, Unknown
  misc_feature (1)..( 11): Result.001 file - promoters70/1715347
tatatatattt

SEQ ID NO: 84884 - DNA, 11 bp, Unknown
  misc_feature (1)..( 11): Result.001 file - promoters70/1715347
aaaatatcttg

SEQ ID NO: 84885 - DNA, 11 bp, Unknown
  misc_feature (1)..( 11): Result.001 file - promoters70/1715347
aaaaaatcaaa

SEQ ID NO: 84886 - DNA, 11 bp, Unknown
  misc_feature (1)..( 11): Result.001 file - promoters70/1715347
cccataatttt

SEQ ID NO: 84887 - DNA, 11 bp, Unknown
  misc_feature (1)..( 11): Result.001 file - promoters70/1715347
ccggaatttta

SEQ ID NO: 84888 - DNA, 13 bp, Unknown
  misc_feature (1)..( 13): Result.001 file - promoters70/1715347
aggatcttaaatg

SEQ ID NO: 84889 - DNA, 13 bp, Unknown
  misc_feature (1)..( 13): Result.001 file - promoters70/1715347
aacatctaaaacg

SEQ ID NO: 84890 - DNA, 13 bp, Unknown
  misc_feature (1)..( 13): Result.001 file - promoters70/1715347
aatagcttgaatc

SEQ ID NO: 84891 - DNA, 13 bp, Unknown
  misc_feature (1)..( 13): Result.001 file - promoters70/1715347
tttaattaaaaca

SEQ ID NO: 84892 - DNA, 13 bp, Unknown
  misc_feature (1)..( 13): Result.001 file - promoters70/1715347
accttcttaaata

SEQ ID NO: 84893 - DNA, 13 bp, Unknown
  misc_feature (1)..( 13): Result.001 file - promoters70/1715347
ttgattcaaaatt

SEQ ID NO: 84894 - DNA, 12 bp, Unknown
  misc_feature (1)..( 12): Result.001 file - promoters70/1715347
tcgattatgttt

SEQ ID NO: 84895 - DNA, 12 bp, Unknown
  misc_feature (1)..( 12): Result.001 file - promoters70/1715347
tgtgttatgtta

SEQ ID NO: 84896 - DNA, 13 bp, Unknown
  misc_feature (1)..( 13): Result.001 file - promoters70/1715347
ttgtctatgcttt

SEQ ID NO: 84897 - DNA, 13 bp, Unknown
  misc_feature (1)..( 13): Result.001 file - promoters70/1715347
tattttatcacga

SEQ ID NO: 84898 - DNA, 13 bp, Unknown
  misc_feature (1)..( 13): Result.001 file - promoters70/1715347
tctattatatctg

SEQ ID NO: 84899 - DNA, 13 bp, Unknown
  misc_feature (1)..( 13): Result.001 file - promoters70/1715482
aaaattattttta

SEQ ID NO: 84900 - DNA, 8 bp, Unknown
  misc_feature (1)..( 8): Result.001 file - promoters70/1715482
aattcaca

SEQ ID NO: 84901 - DNA, 8 bp, Unknown
  misc_feature (1)..( 8): Result.001 file - promoters70/1715482
aattcaaa

SEQ ID NO: 84902 - DNA, 8 bp, Unknown
  misc_feature (1)..( 8): Result.001 file - promoters70/1715482
aattaaaa

SEQ ID NO: 84903 - DNA, 9 bp, Unknown
  misc_feature (1)..( 9): Result.001 file - promoters70/1715482
aaaacaact

SEQ ID NO: 84904 - DNA, 9 bp, Unknown
  misc_feature (1)..( 9): Result.001 file - promoters70/1715482
caaataact

SEQ ID NO: 84905 - DNA, 9 bp, Unknown
  misc_feature (1)..( 9): Result.001 file - promoters70/1715535
aaaacagta

SEQ ID NO: 84906 - DNA, 11 bp, Unknown
  misc_feature (1)..( 11): Result.001 file - promoters70/1715535
cagattttcag

SEQ ID NO: 84907 - DNA, 11 bp, Unknown
  misc_feature (1)..( 11): Result.001 file - promoters70/1715535
caaattttcac

SEQ ID NO: 84908 - DNA, 11 bp, Unknown
  misc_feature (1)..( 11): Result.001 file - promoters70/1715535
tggattttctt

SEQ ID NO: 84909 - DNA, 11 bp, Unknown
  misc_feature (1)..( 11): Result.001 file - promoters70/1715535
caaaatttcac

SEQ ID NO: 84910 - DNA, 11 bp, Unknown
  misc_feature (1)..( 11): Result.001 file - promoters70/1715535
ctcttaacaat

SEQ ID NO: 84911 - DNA, 11 bp, Unknown
  misc_feature (1)..( 11): Result.001 file - promoters70/1715535
ctcttagcaaa

SEQ ID NO: 84912 - DNA, 11 bp, Unknown
  misc_feature (1)..( 11): Result.001 file - promoters70/1715535
cccagaacaat

SEQ ID NO: 84913 - DNA, 11 bp, Unknown
  misc_feature (1)..( 11): Result.001 file - promoters70/1807771
atctgaaaaat

SEQ ID NO: 84914 - DNA, 9 bp, Unknown
  misc_feature (1)..( 9): Result.001 file - promoters70/1807771
gaaagtatt

SEQ ID NO: 84915 - DNA, 9 bp, Unknown
  misc_feature (1)..( 9): Result.001 file - promoters70/1807771
caaaatatt

SEQ ID NO: 84916 - DNA, 9 bp, Unknown
  misc_feature (1)..( 9): Result.001 file - promoters70/1807771
caaaatctc

SEQ ID NO: 84917 - DNA, 9 bp, Unknown
  misc_feature (1)..( 9): Result.001 file - promoters70/1807771
gtcatttaa

SEQ ID NO: 84918 - DNA, 9 bp, Unknown
  misc_feature (1)..( 9): Result.001 file - promoters70/1807771
actatttaa

SEQ ID NO: 84919 - DNA, 9 bp, Unknown
  misc_feature (1)..( 9): Result.001 file - promoters70/1807771
gtcttttac

SEQ ID NO: 84920 - DNA, 10 bp, Unknown
  misc_feature (1)..( 10): Result.001 file - promoters70/1807771
atacttatat

SEQ ID NO: 84921 - DNA, 10 bp, Unknown
  misc_feature (1)..( 10): Result.001 file - promoters70/1807771
aaacttatcc

SEQ ID NO: 84922 - DNA, 10 bp, Unknown
  misc_feature (1)..( 10): Result.001 file - promoters70/1807771
gatcttatat

SEQ ID NO: 84923 - DNA, 10 bp, Unknown
  misc_feature (1)..( 10): Result.001 file - promoters70/1807771
aaacttaaac

SEQ ID NO: 84924 - DNA, 9 bp, Unknown
  misc_feature (1)..( 9): Result.001 file - promoters70/1807771
atttaattt

SEQ ID NO: 84925 - DNA, 9 bp, Unknown
  misc_feature (1)..( 9): Result.001 file - promoters70/1807771
atttaattc

SEQ ID NO: 84926 - DNA, 9 bp, Unknown
  misc_feature (1)..( 9): Result.001 file - promoters70/1807771
aattatttc

SEQ ID NO: 84927 - DNA, 10 bp, Unknown
  misc_feature (1)..( 10): Result.001 file - promoters70/1807771
gaaaagaaaa

SEQ ID NO: 84928 - DNA, 10 bp, Unknown
  misc_feature (1)..( 10): Result.001 file - promoters70/1807771
tcgaagcaaa

SEQ ID NO: 84929 - DNA, 10 bp, Unknown
  misc_feature (1)..( 10): Result.001 file - promoters70/1807771
tccaagtaaa

SEQ ID NO: 84930 - DNA, 10 bp, Unknown
  misc_feature (1)..( 10): Result.001 file - promoters70/1807771
tccaggtaca

SEQ ID NO: 84931 - DNA, 12 bp, Unknown
  misc_feature (1)..( 12): Result.001 file - promoters70/1807771
tttgtttgtttt

SEQ ID NO: 84932 - DNA, 12 bp, Unknown
  misc_feature (1)..( 12): Result.001 file - promoters70/1807771
tttgtttttttt

SEQ ID NO: 84933 - DNA, 12 bp, Unknown
  misc_feature (1)..( 12): Result.001 file - promoters70/1807774
atccttttttta

SEQ ID NO: 84934 - DNA, 7 bp, Unknown
  misc_feature (1)..( 7): Result.001 file - promoters70/1807774
aaagttt

SEQ ID NO: 84935 - DNA, 7 bp, Unknown
  misc_feature (1)..( 7): Result.001 file - promoters70/1807774
aaatttt

SEQ ID NO: 84936 - DNA, 7 bp, Unknown
  misc_feature (1)..( 7): Result.001 file - promoters70/1807774
aaattta

SEQ ID NO: 84937 - DNA, 8 bp, Unknown
  misc_feature (1)..( 8): Result.001 file - promoters70/1807774
atatcaac

SEQ ID NO: 84938 - DNA, 8 bp, Unknown
  misc_feature (1)..( 8): Result.001 file - promoters70/1807774
ataccaac

SEQ ID NO: 84939 - DNA, 8 bp, Unknown
  misc_feature (1)..( 8): Result.001 file - promoters70/1807774
ttacaaac

SEQ ID NO: 84940 - DNA, 10 bp, Unknown
  misc_feature (1)..( 10): Result.001 file - promoters70/1807774
ttttggaaat

SEQ ID NO: 84941 - DNA, 10 bp, Unknown
  misc_feature (1)..( 10): Result.001 file - promoters70/1807774
ttttcgaaag

SEQ ID NO: 84942 - DNA, 10 bp, Unknown
  misc_feature (1)..( 10): Result.001 file - promoters70/1807774
ccaaggaaat

SEQ ID NO: 84943 - DNA, 10 bp, Unknown
  misc_feature (1)..( 10): Result.001 file - promoters70/1807774
taaaaagctc

SEQ ID NO: 84944 - DNA, 10 bp, Unknown
  misc_feature (1)..( 10): Result.001 file - promoters70/1807774
taaaaatttt

SEQ ID NO: 84945 - DNA, 10 bp, Unknown
  misc_feature (1)..( 10): Result.001 file - promoters70/1808137
taacaatttt

SEQ ID NO: 84946 - DNA, 10 bp, Unknown
  misc_feature (1)..( 10): Result.001 file - promoters70/1808137
ggtttatttt

SEQ ID NO: 84947 - DNA, 10 bp, Unknown
  misc_feature (1)..( 10): Result.001 file - promoters70/1808137
ggtttattca

SEQ ID NO: 84948 - DNA, 10 bp, Unknown
  misc_feature (1)..( 10): Result.001 file - promoters70/1808156
attttatttt

SEQ ID NO: 84949 - DNA, 12 bp, Unknown
  misc_feature (1)..( 12): Result.001 file - promoters70/1808156
gtttgtttatct

SEQ ID NO: 84950 - DNA, 12 bp, Unknown
  misc_feature (1)..( 12): Result.001 file - promoters70/1808156
ttttctttggtg

SEQ ID NO: 84951 - DNA, 12 bp, Unknown
  misc_feature (1)..( 12): Result.001 file - promoters70/1808156
gtttttttttct

SEQ ID NO: 84952 - DNA, 10 bp, Unknown
  misc_feature (1)..( 10): Result.001 file - promoters70/1808156
ggtataaaaa

SEQ ID NO: 84953 - DNA, 10 bp, Unknown
  misc_feature (1)..( 10): Result.001 file - promoters70/1808156
tatatcaaaa

SEQ ID NO: 84954 - DNA, 10 bp, Unknown
  misc_feature (1)..( 10): Result.001 file - promoters70/1808156
ggtgtaatga

SEQ ID NO: 84955 - DNA, 7 bp, Unknown
  misc_feature (1)..( 7): Result.001 file - promoters70/1808156
tttaacc

SEQ ID NO: 84956 - DNA, 7 bp, Unknown
  misc_feature (1)..( 7): Result.001 file - promoters70/1808156
tttaaca

SEQ ID NO: 84957 - DNA, 7 bp, Unknown
  misc_feature (1)..( 7): Result.001 file - promoters70/1808156
ttttaca

SEQ ID NO: 84958 - DNA, 11 bp, Unknown
  misc_feature (1)..( 11): Result.001 file - promoters70/1808156
agattttttgt

SEQ ID NO: 84959 - DNA, 11 bp, Unknown
  misc_feature (1)..( 11): Result.001 file - promoters70/1808156
gtattttttgt

SEQ ID NO: 84960 - DNA, 11 bp, Unknown
  misc_feature (1)..( 11): Result.001 file - promoters70/1808156
agattttcatg

SEQ ID NO: 84961 - DNA, 8 bp, Unknown
  misc_feature (1)..( 8): Result.001 file - promoters70/1808156
aatttgaa

SEQ ID NO: 84962 - DNA, 8 bp, Unknown
  misc_feature (1)..( 8): Result.001 file - promoters70/1808156
aatgtgaa

SEQ ID NO: 84963 - DNA, 8 bp, Unknown
  misc_feature (1)..( 8): Result.001 file - promoters70/1808172
aatatgat

SEQ ID NO: 84964 - DNA, 12 bp, Unknown
  misc_feature (1)..( 12): Result.001 file - promoters70/1808172
tattaaccttga

SEQ ID NO: 84965 - DNA, 12 bp, Unknown
  misc_feature (1)..( 12): Result.001 file - promoters70/1808172
aattgaccctga

SEQ ID NO: 84966 - DNA, 12 bp, Unknown
  misc_feature (1)..( 12): Result.001 file - promoters70/1808172
aaataataaagt

SEQ ID NO: 84967 - DNA, 7 bp, Unknown
  misc_feature (1)..( 7): Result.001 file - promoters70/1808172
tctctct

SEQ ID NO: 84968 - DNA, 7 bp, Unknown
  misc_feature (1)..( 7): Result.001 file - promoters70/1808172
tctttct

SEQ ID NO: 84969 - DNA, 7 bp, Unknown
  misc_feature (1)..( 7): Result.001 file - promoters70/1808172
tctttca

SEQ ID NO: 84970 - DNA, 8 bp, Unknown
  misc_feature (1)..( 8): Result.001 file - promoters70/1808172
acaaaatc

SEQ ID NO: 84971 - DNA, 8 bp, Unknown
  misc_feature (1)..( 8): Result.001 file - promoters70/1808172
acaaaaca

SEQ ID NO: 84972 - DNA, 8 bp, Unknown
  misc_feature (1)..( 8): Result.001 file - promoters70/1808172
acaaaaca

SEQ ID NO: 84973 - DNA, 8 bp, Unknown
  misc_feature (1)..( 8): Result.001 file - promoters70/1808172
caactatc

SEQ ID NO: 84974 - DNA, 8 bp, Unknown
  misc_feature (1)..( 8): Result.001 file - promoters70/1808172
caattata

SEQ ID NO: 84975 - DNA, 8 bp, Unknown
  misc_feature (1)..( 8): Result.001 file - promoters70/1808172
aaatcata

SEQ ID NO: 84976 - DNA, 7 bp, Unknown
  misc_feature (1)..( 7): Result.001 file - promoters70/1808172
ctctttc

SEQ ID NO: 84977 - DNA, 7 bp, Unknown
  misc_feature (1)..( 7): Result.001 file - promoters70/1808172
ctctttc

SEQ ID NO: 84978 - DNA, 7 bp, Unknown
  misc_feature (1)..( 7): Result.001 file - promoters70/1808172
ttctttc

SEQ ID NO: 84979 - DNA, 10 bp, Unknown
  misc_feature (1)..( 10): Result.001 file - promoters70/1808172
tatatataga

SEQ ID NO: 84980 - DNA, 10 bp, Unknown
  misc_feature (1)..( 10): Result.001 file - promoters70/1808172
tatatataac

SEQ ID NO: 84981 - DNA, 11 bp, Unknown
  misc_feature (1)..( 11): Result.001 file - promoters70/1808172
gatataataca

SEQ ID NO: 84982 - DNA, 9 bp, Unknown
  misc_feature (1)..( 9): Result.001 file - promoters70/1808172
atattctga

SEQ ID NO: 84983 - DNA, 9 bp, Unknown
  misc_feature (1)..( 9): Result.001 file - promoters70/1808172
aaattttga

SEQ ID NO: 84984 - DNA, 9 bp, Unknown
  misc_feature (1)..( 9): Result.001 file - promoters70/1808172
aaagtttat

SEQ ID NO: 84985 - DNA, 9 bp, Unknown
  misc_feature (1)..( 9): Result.001 file - promoters70/1808172
aatgaaaaa

SEQ ID NO: 84986 - DNA, 9 bp, Unknown
  misc_feature (1)..( 9): Result.001 file - promoters70/1808172
tatgagaaa

SEQ ID NO: 84987 - DNA, 9 bp, Unknown
  misc_feature (1)..( 9): Result.001 file - promoters70/1808172
tataagaaa

SEQ ID NO: 84988 - DNA, 7 bp, Unknown
  misc_feature (1)..( 7): Result.001 file - promoters70/1808172
atgtttt

SEQ ID NO: 84989 - DNA, 7 bp, Unknown
  misc_feature (1)..( 7): Result.001 file - promoters70/1808172
ttgtttt

SEQ ID NO: 84990 - DNA, 7 bp, Unknown
  misc_feature (1)..( 7): Result.001 file - promoters70/1808172
ttgttta

SEQ ID NO: 84991 - DNA, 7 bp, Unknown
  misc_feature (1)..( 7): Result.001 file - promoters70/1808172
attttta

SEQ ID NO: 84992 - DNA, 7 bp, Unknown
  misc_feature (1)..( 7): Result.001 file - promoters70/1808172
atttttt

SEQ ID NO: 84993 - DNA, 7 bp, Unknown
  misc_feature (1)..( 7): Result.001 file - promoters70/1808172
attttta

SEQ ID NO: 84994 - DNA, 9 bp, Unknown
  misc_feature (1)..( 9): Result.001 file - promoters70/1808172
agtcaactt

SEQ ID NO: 84995 - DNA, 9 bp, Unknown
  misc_feature (1)..( 9): Result.001 file - promoters70/1808172
agttaactt

SEQ ID NO: 84996 - DNA, 9 bp, Unknown
  misc_feature (1)..( 9): Result.001 file - promoters70/1808184
aattaactt

SEQ ID NO: 84997 - DNA, 9 bp, Unknown
  misc_feature (1)..( 9): Result.001 file - promoters70/1808184
tctttgtaa

SEQ ID NO: 84998 - DNA, 9 bp, Unknown
  misc_feature (1)..( 9): Result.001 file - promoters70/1808184
tctttataa

SEQ ID NO: 84999 - DNA, 9 bp, Unknown
  misc_feature (1)..( 9): Result.001 file - promoters70/1808184
acattataa

SEQ ID NO: 85000 - DNA, 10 bp, Unknown
  misc_feature (1)..( 10): Result.001 file - promoters70/1808184
tttgacagac

SEQ ID NO: 85001 - DNA, 10 bp, Unknown
  misc_feature (1)..( 10): Result.001 file - promoters70/1808184
tttaacaaga

SEQ ID NO: 85002 - DNA, 10 bp, Unknown
  misc_feature (1)..( 10): Result.001 file - promoters70/1808184
actaacaaga

SEQ ID NO: 85003 - DNA, 8 bp, Unknown
  misc_feature (1)..( 8): Result.001 file - promoters70/1808184
attttcaa

SEQ ID NO: 85004 - DNA, 8 bp, Unknown
  misc_feature (1)..( 8): Result.001 file - promoters70/1808184
atttacaa

SEQ ID NO: 85005 - DNA, 8 bp, Unknown
  misc_feature (1)..( 8): Result.001 file - promoters70/1808184
ttttacat

SEQ ID NO: 85006 - DNA, 10 bp, Unknown
  misc_feature (1)..( 10): Result.001 file - promoters70/1808184
agatatttaa

SEQ ID NO: 85007 - DNA, 10 bp, Unknown
  misc_feature (1)..( 10): Result.001 file - promoters70/1808184
agataattaa

SEQ ID NO: 85008 - DNA, 10 bp, Unknown
  misc_feature (1)..( 10): Result.001 file - promoters70/1809222
agagaatttt

SEQ ID NO: 85009 - DNA, 10 bp, Unknown
  misc_feature (1)..( 10): Result.001 file - promoters70/1809222
tgaaatatat

SEQ ID NO: 85010 - DNA, 10 bp, Unknown
  misc_feature (1)..( 10): Result.001 file - promoters70/1809222
attaatttat

SEQ ID NO: 85011 - DNA, 10 bp, Unknown
  misc_feature (1)..( 10): Result.001 file - promoters70/1957018
attactttgg

SEQ ID NO: 85012 - DNA, 8 bp, Unknown
  misc_feature (1)..( 8): Result.001 file - promoters70/1957018
atttttaa

SEQ ID NO: 85013 - DNA, 8 bp, Unknown
  misc_feature (1)..( 8): Result.001 file - promoters70/1957018
ctttttaa

SEQ ID NO: 85014 - DNA, 8 bp, Unknown
  misc_feature (1)..( 8): Result.001 file - promoters70/1957018
ctttttga

SEQ ID NO: 85015 - DNA, 9 bp, Unknown
  misc_feature (1)..( 9): Result.001 file - promoters70/1957018
gtttttttt

SEQ ID NO: 85016 - DNA, 9 bp, Unknown
  misc_feature (1)..( 9): Result.001 file - promoters70/1957018
gttcttttt

SEQ ID NO: 85017 - DNA, 9 bp, Unknown
  misc_feature (1)..( 9): Result.001 file - promoters70/1957018
atgcttttt

SEQ ID NO: 85018 - DNA, 9 bp, Unknown
  misc_feature (1)..( 9): Result.001 file - promoters70/1957018
aaagatttt

SEQ ID NO: 85019 - DNA, 9 bp, Unknown
  misc_feature (1)..( 9): Result.001 file - promoters70/1957018
tgagatttt

SEQ ID NO: 85020 - DNA, 9 bp, Unknown
  misc_feature (1)..( 9): Result.001 file - promoters70/1957018
aaagattgt

SEQ ID NO: 85021 - DNA, 9 bp, Unknown
  misc_feature (1)..( 9): Result.001 file - promoters70/1957018
ttgtaaaga

SEQ ID NO: 85022 - DNA, 9 bp, Unknown
  misc_feature (1)..( 9): Result.001 file - promoters70/1957018
cagtagaga

SEQ ID NO: 85023 - DNA, 9 bp, Unknown
  misc_feature (1)..( 9): Result.001 file - promoters70/1957018
cagttgaga

SEQ ID NO: 85024 - DNA, 10 bp, Unknown
  misc_feature (1)..( 10): Result.001 file - promoters70/1957018
cgtggacaga

SEQ ID NO: 85025 - DNA, 10 bp, Unknown
  misc_feature (1)..( 10): Result.001 file - promoters70/1957018
tatggataga

SEQ ID NO: 85026 - DNA, 10 bp, Unknown
  misc_feature (1)..( 10): Result.001 file - promoters70/1957212
tatggataaa

SEQ ID NO: 85027 - DNA, 9 bp, Unknown
  misc_feature (1)..( 9): Result.001 file - promoters70/1957212
gattcttac

SEQ ID NO: 85028 - DNA, 9 bp, Unknown
  misc_feature (1)..( 9): Result.001 file - promoters70/1957212
gattctttg

SEQ ID NO: 85029 - DNA, 9 bp, Unknown
  misc_feature (1)..( 9): Result.001 file - promoters70/1957212
cattcgtac

SEQ ID NO: 85030 - DNA, 9 bp, Unknown
  misc_feature (1)..( 9): Result.001 file - promoters70/1957212
tatttaaac

SEQ ID NO: 85031 - DNA, 9 bp, Unknown
  misc_feature (1)..( 9): Result.001 file - promoters70/1957212
tatttaaaa

SEQ ID NO: 85032 - DNA, 9 bp, Unknown
  misc_feature (1)..( 9): Result.001 file - promoters70/1957212
aattgaaac

SEQ ID NO: 85033 - DNA, 8 bp, Unknown
  misc_feature (1)..( 8): Result.001 file - promoters70/1957212
cgagaaac

SEQ ID NO: 85034 - DNA, 8 bp, Unknown
  misc_feature (1)..( 8): Result.001 file - promoters70/1957212
ggagaaag

SEQ ID NO: 85035 - DNA, 8 bp, Unknown
  misc_feature (1)..( 8): Result.001 file - promoters70/1975923
agagagat

SEQ ID NO: 85036 - DNA, 9 bp, Unknown
  misc_feature (1)..( 9): Result.001 file - promoters70/1975923
aaaatatat

SEQ ID NO: 85037 - DNA, 9 bp, Unknown
  misc_feature (1)..( 9): Result.001 file - promoters70/1975923
taaatatca

SEQ ID NO: 85038 - DNA, 9 bp, Unknown
  misc_feature (1)..( 9): Result.001 file - promoters70/1975923
aaaatattg

SEQ ID NO: 85039 - DNA, 9 bp, Unknown
  misc_feature (1)..( 9): Result.001 file - promoters70/1975923
caaatctca

SEQ ID NO: 85040 - DNA, 9 bp, Unknown
  misc_feature (1)..( 9): Result.001 file - promoters70/1975923
agcatctca

SEQ ID NO: 85041 - DNA, 10 bp, Unknown
  misc_feature (1)..( 10): Result.001 file - promoters70/1975923
ttaataaaat

SEQ ID NO: 85042 - DNA, 10 bp, Unknown
  misc_feature (1)..( 10): Result.001 file - promoters70/1975923
ttaatacaat

SEQ ID NO: 85043 - DNA, 10 bp, Unknown
  misc_feature (1)..( 10): Result.001 file - promoters70/1975923
aaaataaatt

SEQ ID NO: 85044 - DNA, 10 bp, Unknown
  misc_feature (1)..( 10): Result.001 file - promoters70/1975923
ataaaaaatt

SEQ ID NO: 85045 - DNA, 10 bp, Unknown
  misc_feature (1)..( 10): Result.001 file - promoters70/1975923
tcaatacaag

SEQ ID NO: 85046 - DNA, 11 bp, Unknown
  misc_feature (1)..( 11): Result.001 file - promoters70/1975923
aaaagaaatta

SEQ ID NO: 85047 - DNA, 11 bp, Unknown
  misc_feature (1)..( 11): Result.001 file - promoters70/1975923
taaataaacct

SEQ ID NO: 85048 - DNA, 11 bp, Unknown
  misc_feature (1)..( 11): Result.001 file - promoters70/1975923
attataaacta

SEQ ID NO: 85049 - DNA, 11 bp, Unknown
  misc_feature (1)..( 11): Result.001 file - promoters70/1975923
aatataaagcc

SEQ ID NO: 85050 - DNA, 11 bp, Unknown
  misc_feature (1)..( 11): Result.001 file - promoters70/1976000
taaacaaattt

SEQ ID NO: 85051 - DNA, 9 bp, Unknown
  misc_feature (1)..( 9): Result.001 file - promoters70/1976000
aaaacacga

SEQ ID NO: 85052 - DNA, 9 bp, Unknown
  misc_feature (1)..( 9): Result.001 file - promoters70/1976000
aaaacaatt

SEQ ID NO: 85053 - DNA, 9 bp, Unknown
  misc_feature (1)..( 9): Result.001 file - promoters70/1976019
caaacgatt

SEQ ID NO: 85054 - DNA, 11 bp, Unknown
  misc_feature (1)..( 11): Result.001 file - promoters70/1976019
aatcactcctt

SEQ ID NO: 85055 - DNA, 11 bp, Unknown
  misc_feature (1)..( 11): Result.001 file - promoters70/1976019
tttcattcctt

SEQ ID NO: 85056 - DNA, 11 bp, Unknown
  misc_feature (1)..( 11): Result.001 file - promoters70/1976019
aaaaacttctt

SEQ ID NO: 85057 - DNA, 11 bp, Unknown
  misc_feature (1)..( 11): Result.001 file - promoters70/1976019
tttgattagta

SEQ ID NO: 85058 - DNA, 7 bp, Unknown
  misc_feature (1)..( 7): Result.001 file - promoters70/1976019
ataaaaa

SEQ ID NO: 85059 - DNA, 7 bp, Unknown
  misc_feature (1)..( 7): Result.001 file - promoters70/1976019
ataaaat

SEQ ID NO: 85060 - DNA, 7 bp, Unknown
  misc_feature (1)..( 7): Result.001 file - promoters70/1976019
ataaaaa

SEQ ID NO: 85061 - DNA, 7 bp, Unknown
  misc_feature (1)..( 7): Result.001 file - promoters70/1976019
ataaaaa

SEQ ID NO: 85062 - DNA, 8 bp, Unknown
  misc_feature (1)..( 8): Result.001 file - promoters70/1976019
taaaaaaa

SEQ ID NO: 85063 - DNA, 8 bp, Unknown
  misc_feature (1)..( 8): Result.001 file - promoters70/1976019
gaaaaaaa

SEQ ID NO: 85064 - DNA, 9 bp, Unknown
  misc_feature (1)..( 9): Result.001 file - promoters70/1976019
aaaagaaaa

SEQ ID NO: 85065 - DNA, 9 bp, Unknown
  misc_feature (1)..( 9): Result.001 file - promoters70/1976078
taacagaat

SEQ ID NO: 85066 - DNA, 10 bp, Unknown
  misc_feature (1)..( 10): Result.001 file - promoters70/1976078
ctagatacaa

SEQ ID NO: 85067 - DNA, 10 bp, Unknown
  misc_feature (1)..( 10): Result.001 file - promoters70/1976078
acagagacat

SEQ ID NO: 85068 - DNA, 10 bp, Unknown
  misc_feature (1)..( 10): Result.001 file - promoters70/1976078
ctagatacag

SEQ ID NO: 85069 - DNA, 10 bp, Unknown
  misc_feature (1)..( 10): Result.001 file - promoters70/1976078
tccgatccag

SEQ ID NO: 85070 - DNA, 13 bp, Unknown
  misc_feature (1)..( 13): Result.001 file - promoters70/1976078
aaatcgaaacaga

SEQ ID NO: 85071 - DNA, 13 bp, Unknown
  misc_feature (1)..( 13): Result.001 file - promoters70/1976078
aaatccaaaccca

SEQ ID NO: 85072 - DNA, 13 bp, Unknown
  misc_feature (1)..( 13): Result.001 file - promoters70/1976078
aaagtcaaacctg

SEQ ID NO: 85073 - DNA, 13 bp, Unknown
  misc_feature (1)..( 13): Result.001 file - promoters70/1976078
attgagaaagctg

SEQ ID NO: 85074 - DNA, 8 bp, Unknown
  misc_feature (1)..( 8): Result.001 file - promoters70/1976078
actttttt

SEQ ID NO: 85075 - DNA, 8 bp, Unknown
  misc_feature (1)..( 8): Result.001 file - promoters70/1976078
actattta

SEQ ID NO: 85076 - DNA, 9 bp, Unknown
  misc_feature (1)..( 9): Result.001 file - promoters70/1976078
gttttgttg

SEQ ID NO: 85077 - DNA, 9 bp, Unknown
  misc_feature (1)..( 9): Result.001 file - promoters70/1976078
attgatttg

SEQ ID NO: 85078 - DNA, 9 bp, Unknown
  misc_feature (1)..( 9): Result.001 file - promoters70/1976078
catgaattg

SEQ ID NO: 85079 - DNA, 9 bp, Unknown
  misc_feature (1)..( 9): Result.001 file - promoters70/1976078
attgattca

SEQ ID NO: 85080 - DNA, 9 bp, Unknown
  misc_feature (1)..( 9): Result.001 file - promoters70/1976078
tttaaagct

SEQ ID NO: 85081 - DNA, 9 bp, Unknown
  misc_feature (1)..( 9): Result.001 file - promoters70/1976078
tttcaagtt

SEQ ID NO: 85082 - DNA, 9 bp, Unknown
  misc_feature (1)..( 9): Result.001 file - promoters70/1976333
tctcacgtt

SEQ ID NO: 85083 - DNA, 18 bp, Unknown
  misc_feature (1)..( 18): Result.001 file - promoters70/1976333
gatcaagattcaatattt

SEQ ID NO: 85084 - DNA, 18 bp, Unknown
  misc_feature (1)..( 18): Result.001 file - promoters70/1976333
acgttagactcaattaaa

SEQ ID NO: 85085 - DNA, 18 bp, Unknown
  misc_feature (1)..( 18): Result.001 file - promoters70/1976387
gataaagagtcaaaattt

SEQ ID NO: 85086 - DNA, 15 bp, Unknown
  misc_feature (1)..( 15): Result.001 file - promoters70/1976387
ctaaaggcccaataa

SEQ ID NO: 85087 - DNA, 15 bp, Unknown
  misc_feature (1)..( 15): Result.001 file - promoters70/1976387
ggaatggcccagtaa

SEQ ID NO: 85088 - DNA, 15 bp, Unknown
  misc_feature (1)..( 15): Result.001 file - promoters70/1976387
gtgaaagcccaaaac

SEQ ID NO: 85089 - DNA, 15 bp, Unknown
  misc_feature (1)..( 15): Result.001 file - promoters70/1976387
ctaaaggcccaattt

SEQ ID NO: 85090 - DNA, 7 bp, Unknown
  misc_feature (1)..( 7): Result.001 file - promoters70/1976387
tatcaat

SEQ ID NO: 85091 - DNA, 7 bp, Unknown
  misc_feature (1)..( 7): Result.001 file - promoters70/1976387
tatcaaa

SEQ ID NO: 85092 - DNA, 7 bp, Unknown
  misc_feature (1)..( 7): Result.001 file - promoters70/1976387
tatgaaa

SEQ ID NO: 85093 - DNA, 12 bp, Unknown
  misc_feature (1)..( 12): Result.001 file - promoters70/1976387
tttattttagat

SEQ ID NO: 85094 - DNA, 12 bp, Unknown
  misc_feature (1)..( 12): Result.001 file - promoters70/1976387
tgaatttgagat

SEQ ID NO: 85095 - DNA, 12 bp, Unknown
  misc_feature (1)..( 12): Result.001 file - promoters70/1976457
gaaattgcgcca

SEQ ID NO: 85096 - DNA, 11 bp, Unknown
  misc_feature (1)..( 11): Result.001 file - promoters70/1976457
tatataataaa

SEQ ID NO: 85097 - DNA, 11 bp, Unknown
  misc_feature (1)..( 11): Result.001 file - promoters70/1976457
tttgtaataat

SEQ ID NO: 85098 - DNA, 11 bp, Unknown
  misc_feature (1)..( 11): Result.001 file - promoters70/1976457
tgaatactaaa

SEQ ID NO: 85099 - DNA, 11 bp, Unknown
  misc_feature (1)..( 11): Result.001 file - promoters70/1976457
tacataataat

SEQ ID NO: 85100 - DNA, 11 bp, Unknown
  misc_feature (1)..( 11): Result.001 file - promoters70/1976457
ctattaataaa

SEQ ID NO: 85101 - DNA, 11 bp, Unknown
  misc_feature (1)..( 11): Result.001 file - promoters70/1976457
tttttaatata

SEQ ID NO: 85102 - DNA, 11 bp, Unknown
  misc_feature (1)..( 11): Result.001 file - promoters70/1976457
agaataaaaat

SEQ ID NO: 85103 - DNA, 16 bp, Unknown
  misc_feature (1)..( 16): Result.001 file - promoters70/1976457
gtaagaaaaaaaaaaa

SEQ ID NO: 85104 - DNA, 16 bp, Unknown
  misc_feature (1)..( 16): Result.001 file - promoters70/1976457
tctataaaaaatatcg

SEQ ID NO: 85105 - DNA, 16 bp, Unknown
  misc_feature (1)..( 16): Result.001 file - promoters70/1976457
gttccaaaaacaaaaa

SEQ ID NO: 85106 - DNA, 16 bp, Unknown
  misc_feature (1)..( 16): Result.001 file - promoters70/1976457
agaataaaaattgatt

SEQ ID NO: 85107 - DNA, 16 bp, Unknown
  misc_feature (1)..( 16): Result.001 file - promoters70/1976457
tacataataatgtttt

SEQ ID NO: 85108 - DNA, 16 bp, Unknown
  misc_feature (1)..( 16): Result.001 file - promoters70/1976496
aacataaattgtggat

SEQ ID NO: 85109 - DNA, 12 bp, Unknown
  misc_feature (1)..( 12): Result.001 file - promoters70/1976496
agcaaagaattg

SEQ ID NO: 85110 - DNA, 12 bp, Unknown
  misc_feature (1)..( 12): Result.001 file - promoters70/1976496
gctgctgaattg

SEQ ID NO: 85111 - DNA, 12 bp, Unknown
  misc_feature (1)..( 12): Result.001 file - promoters70/1976496
tcttatgatttg

SEQ ID NO: 85112 - DNA, 12 bp, Unknown
  misc_feature (1)..( 12): Result.001 file - promoters70/1976496
ctcgtataattc

SEQ ID NO: 85113 - DNA, 12 bp, Unknown
  misc_feature (1)..( 12): Result.001 file - promoters70/1976496
gtctatgctttg

SEQ ID NO: 85114 - DNA, 12 bp, Unknown
  misc_feature (1)..( 12): Result.001 file - promoters70/1976496
ttaaactaattc

SEQ ID NO: 85115 - DNA, 12 bp, Unknown
  misc_feature (1)..( 12): Result.001 file - promoters70/1976496
ttaatcttttgg

SEQ ID NO: 85116 - DNA, 12 bp, Unknown
  misc_feature (1)..( 12): Result.001 file - promoters70/1976496
aatttcttttca

SEQ ID NO: 85117 - DNA, 12 bp, Unknown
  misc_feature (1)..( 12): Result.001 file - promoters70/1976496
taactcttttga

SEQ ID NO: 85118 - DNA, 12 bp, Unknown
  misc_feature (1)..( 12): Result.001 file - promoters70/1976496
ttaacctttgac

SEQ ID NO: 85119 - DNA, 12 bp, Unknown
  misc_feature (1)..( 12): Result.001 file - promoters70/1976496
aaactcttttga

SEQ ID NO: 85120 - DNA, 12 bp, Unknown
  misc_feature (1)..( 12): Result.001 file - promoters70/2026771
gagtggttttga

SEQ ID NO: 85121 - DNA, 7 bp, Unknown
  misc_feature (1)..( 7): Result.001 file - promoters70/2026771
aaataaa

SEQ ID NO: 85122 - DNA, 7 bp, Unknown
  misc_feature (1)..( 7): Result.001 file - promoters70/2026771
aaataaa

SEQ ID NO: 85123 - DNA, 8 bp, Unknown
  misc_feature (1)..( 8): Result.001 file - promoters70/2029031
aaattaaa

SEQ ID NO: 85124 - DNA, 9 bp, Unknown
  misc_feature (1)..( 9): Result.001 file - promoters70/2029031
ataataaac

SEQ ID NO: 85125 - DNA, 9 bp, Unknown
  misc_feature (1)..( 9): Result.001 file - promoters70/2029031
gtaataata

SEQ ID NO: 85126 - DNA, 9 bp, Unknown
  misc_feature (1)..( 9): Result.001 file - promoters70/2029031
taaataaaa

SEQ ID NO: 85127 - DNA, 9 bp, Unknown
  misc_feature (1)..( 9): Result.001 file - promoters70/2029031
ttaaaaaag

SEQ ID NO: 85128 - DNA, 9 bp, Unknown
  misc_feature (1)..( 9): Result.001 file - promoters70/2029031
ataataatg

SEQ ID NO: 85129 - DNA, 9 bp, Unknown
  misc_feature (1)..( 9): Result.001 file - promoters70/2029031
ttaataaaa

SEQ ID NO: 85130 - DNA, 9 bp, Unknown
  misc_feature (1)..( 9): Result.001 file - promoters70/2029031
ttaacaaaa

SEQ ID NO: 85131 - DNA, 14 bp, Unknown
  misc_feature (1)..( 14): Result.001 file - promoters70/2029031
aactcttttgagaa

SEQ ID NO: 85132 - DNA, 14 bp, Unknown
  misc_feature (1)..( 14): Result.001 file - promoters70/2029031
aactcttttgaagt

SEQ ID NO: 85133 - DNA, 14 bp, Unknown
  misc_feature (1)..( 14): Result.001 file - promoters70/2029031
tactatttatacat

SEQ ID NO: 85134 - DNA, 14 bp, Unknown
  misc_feature (1)..( 14): Result.001 file - promoters70/2029031
gcctattaataaaa

SEQ ID NO: 85135 - DNA, 14 bp, Unknown
  misc_feature (1)..( 14): Result.001 file - promoters70/2029031
taaaattaataacc

SEQ ID NO: 85136 - DNA, 14 bp, Unknown
  misc_feature (1)..( 14): Result.001 file - promoters70/2029033
tacttttaacaaaa

SEQ ID NO: 85137 - DNA, 12 bp, Unknown
  misc_feature (1)..( 12): Result.001 file - promoters70/2029033
gattctttccta

SEQ ID NO: 85138 - DNA, 12 bp, Unknown
  misc_feature (1)..( 12): Result.001 file - promoters70/2029033
atttatttcctt

SEQ ID NO: 85139 - DNA, 12 bp, Unknown
  misc_feature (1)..( 12): Result.001 file - promoters70/2029033
atttatttactt

SEQ ID NO: 85140 - DNA, 8 bp, Unknown
  misc_feature (1)..( 8): Result.001 file - promoters70/2029033
tattctaa

SEQ ID NO: 85141 - DNA, 8 bp, Unknown
  misc_feature (1)..( 8): Result.001 file - promoters70/2029033
tattctat

SEQ ID NO: 85142 - DNA, 8 bp, Unknown
  misc_feature (1)..( 8): Result.001 file - promoters70/2029033
ctttctat

SEQ ID NO: 85143 - DNA, 7 bp, Unknown
  misc_feature (1)..( 7): Result.001 file - promoters70/2029033
attctat

SEQ ID NO: 85144 - DNA, 7 bp, Unknown
  misc_feature (1)..( 7): Result.001 file - promoters70/2029033
tttctat

SEQ ID NO: 85145 - DNA, 7 bp, Unknown
  misc_feature (1)..( 7): Result.001 file - promoters70/2029079
tttttat

SEQ ID NO: 85146 - DNA, 12 bp, Unknown
  misc_feature (1)..( 12): Result.001 file - promoters70/2029079
tcagaattaata

SEQ ID NO: 85147 - DNA, 12 bp, Unknown
  misc_feature (1)..( 12): Result.001 file - promoters70/2029079
tcataattaata

SEQ ID NO: 85148 - DNA, 12 bp, Unknown
  misc_feature (1)..( 12): Result.001 file - promoters70/2029079
catttattaaca

SEQ ID NO: 85149 - DNA, 8 bp, Unknown
  misc_feature (1)..( 8): Result.001 file - promoters70/2029079
ccaaattt

SEQ ID NO: 85150 - DNA, 8 bp, Unknown
  misc_feature (1)..( 8): Result.001 file - promoters70/2029079
ccaatttt

SEQ ID NO: 85151 - DNA, 8 bp, Unknown
  misc_feature (1)..( 8): Result.001 file - promoters70/2104991
ataatttt

SEQ ID NO: 85152 - DNA, 8 bp, Unknown
  misc_feature (1)..( 8): Result.001 file - promoters70/2104991
tcatttca

SEQ ID NO: 85153 - DNA, 8 bp, Unknown
  misc_feature (1)..( 8): Result.001 file - promoters70/2104991
aaatttca

SEQ ID NO: 85154 - DNA, 8 bp, Unknown
  misc_feature (1)..( 8): Result.001 file - promoters70/2104991
aaatttcc

SEQ ID NO: 85155 - DNA, 8 bp, Unknown
  misc_feature (1)..( 8): Result.001 file - promoters70/2104991
taaatctc

SEQ ID NO: 85156 - DNA, 8 bp, Unknown
  misc_feature (1)..( 8): Result.001 file - promoters70/2104991
taaatcag

SEQ ID NO: 85157 - DNA, 8 bp, Unknown
  misc_feature (1)..( 8): Result.001 file - promoters70/2104991
caaaacag

SEQ ID NO: 85158 - DNA, 14 bp, Unknown
  misc_feature (1)..( 14): Result.001 file - promoters70/2104991
aaaaagcttggatt

SEQ ID NO: 85159 - DNA, 14 bp, Unknown
  misc_feature (1)..( 14): Result.001 file - promoters70/2104991
taaaagtttgatat

SEQ ID NO: 85160 - DNA, 14 bp, Unknown
  misc_feature (1)..( 14): Result.001 file - promoters70/2104991
taaaagtttgttat

SEQ ID NO: 85161 - DNA, 14 bp, Unknown
  misc_feature (1)..( 14): Result.001 file - promoters70/2104991
ttggattttgattt

SEQ ID NO: 85162 - DNA, 14 bp, Unknown
  misc_feature (1)..( 14): Result.001 file - promoters70/2104991
taaaagtttgatat

SEQ ID NO: 85163 - DNA, 14 bp, Unknown
  misc_feature (1)..( 14): Result.001 file - promoters70/2105398
taaaagtttgttat

SEQ ID NO: 85164 - DNA, 10 bp, Unknown
  misc_feature (1)..( 10): Result.001 file - promoters70/2105398
taatacatct

SEQ ID NO: 85165 - DNA, 10 bp, Unknown
  misc_feature (1)..( 10): Result.001 file - promoters70/2105398
aaatacattt

SEQ ID NO: 85166 - DNA, 10 bp, Unknown
  misc_feature (1)..( 10): Result.001 file - promoters70/2105398
aaagacaagt

SEQ ID NO: 85167 - DNA, 10 bp, Unknown
  misc_feature (1)..( 10): Result.001 file - promoters70/2105514
gtgtaccttt

SEQ ID NO: 85168 - DNA, 13 bp, Unknown
  misc_feature (1)..( 13): Result.001 file - promoters70/2105514
tctcgtataattc

SEQ ID NO: 85169 - DNA, 13 bp, Unknown
  misc_feature (1)..( 13): Result.001 file - promoters70/2105514
actcttatgattt

SEQ ID NO: 85170 - DNA, 13 bp, Unknown
  misc_feature (1)..( 13): Result.001 file - promoters70/2105514
tctcttgtaatga

SEQ ID NO: 85171 - DNA, 13 bp, Unknown
  misc_feature (1)..( 13): Result.001 file - promoters70/2105514
acttccatgtttt

SEQ ID NO: 85172 - DNA, 13 bp, Unknown
  misc_feature (1)..( 13): Result.001 file - promoters70/2105514
tctctactcttgg

SEQ ID NO: 85173 - DNA, 13 bp, Unknown
  misc_feature (1)..( 13): Result.001 file - promoters70/2105514
tctcttaaaagtc

SEQ ID NO: 85174 - DNA, 10 bp, Unknown
  misc_feature (1)..( 10): Result.001 file - promoters70/2105514
aaaagttttt

SEQ ID NO: 85175 - DNA, 10 bp, Unknown
  misc_feature (1)..( 10): Result.001 file - promoters70/2105514
tttagttttg

SEQ ID NO: 85176 - DNA, 10 bp, Unknown
  misc_feature (1)..( 10): Result.001 file - promoters70/2105514
gaaaatttca

SEQ ID NO: 85177 - DNA, 11 bp, Unknown
  misc_feature (1)..( 11): Result.001 file - promoters70/2105514
gtttgttgttg

SEQ ID NO: 85178 - DNA, 11 bp, Unknown
  misc_feature (1)..( 11): Result.001 file - promoters70/2105514
acaagtttcct

SEQ ID NO: 85179 - DNA, 11 bp, Unknown
  misc_feature (1)..( 11): Result.001 file - promoters70/2105514
aaaagtgttga

SEQ ID NO: 85180 - DNA, 11 bp, Unknown
  misc_feature (1)..( 11): Result.001 file - promoters70/2105514
tttacttttaa

SEQ ID NO: 85181 - DNA, 12 bp, Unknown
  misc_feature (1)..( 12): Result.001 file - promoters70/2105514
tattaaagccgc

SEQ ID NO: 85182 - DNA, 12 bp, Unknown
  misc_feature (1)..( 12): Result.001 file - promoters70/2105514
tataaaagcaat

SEQ ID NO: 85183 - DNA, 13 bp, Unknown
  misc_feature (1)..( 13): Result.001 file - promoters70/2105514
tatataaagacgc

SEQ ID NO: 85184 - DNA, 13 bp, Unknown
  misc_feature (1)..( 13): Result.001 file - promoters70/2105514
tatataaatcctt

SEQ ID NO: 85185 - DNA, 13 bp, Unknown
  misc_feature (1)..( 13): Result.001 file - promoters70/2105514
tatataagtatcg

SEQ ID NO: 85186 - DNA, 13 bp, Unknown
  misc_feature (1)..( 13): Result.001 file - promoters70/2105535
tttatgaatccat

SEQ ID NO: 85187 - DNA, 11 bp, Unknown
  misc_feature (1)..( 11): Result.001 file - promoters70/2105535
tatcaaacaaa

SEQ ID NO: 85188 - DNA, 11 bp, Unknown
  misc_feature (1)..( 11): Result.001 file - promoters70/2105535
aaccaaagaaa

SEQ ID NO: 85189 - DNA, 11 bp, Unknown
  misc_feature (1)..( 11): Result.001 file - promoters70/2105535
caccaaagcac

SEQ ID NO: 85190 - DNA, 11 bp, Unknown
  misc_feature (1)..( 11): Result.001 file - promoters70/2105535
tgtcaaataaa

SEQ ID NO: 85191 - DNA, 11 bp, Unknown
  misc_feature (1)..( 11): Result.001 file - promoters70/2105535
tgtcaaatttg

SEQ ID NO: 85192 - DNA, 11 bp, Unknown
  misc_feature (1)..( 11): Result.001 file - promoters70/2105535
ggttatagatt

SEQ ID NO: 85193 - DNA, 9 bp, Unknown
  misc_feature (1)..( 9): Result.001 file - promoters70/2105535
taaacaaaa

SEQ ID NO: 85194 - DNA, 9 bp, Unknown
  misc_feature (1)..( 9): Result.001 file - promoters70/2105535
aaaataaaa

SEQ ID NO: 85195 - DNA, 9 bp, Unknown
  misc_feature (1)..( 9): Result.001 file - promoters70/2105535
caaataaat

SEQ ID NO: 85196 - DNA, 9 bp, Unknown
  misc_feature (1)..( 9): Result.001 file - promoters70/2105535
caaagaaag

SEQ ID NO: 85197 - DNA, 9 bp, Unknown
  misc_feature (1)..( 9): Result.001 file - promoters70/2105535
gatacaatg

SEQ ID NO: 85198 - DNA, 9 bp, Unknown
  misc_feature (1)..( 9): Result.001 file - promoters70/2105535
tatagattt

SEQ ID NO: 85199 - DNA, 11 bp, Unknown
  misc_feature (1)..( 11): Result.001 file - promoters70/2105535
cttttaagtat

SEQ ID NO: 85200 - DNA, 11 bp, Unknown
  misc_feature (1)..( 11): Result.001 file - promoters70/2105535
gtgttatgtac

SEQ ID NO: 85201 - DNA, 11 bp, Unknown
  misc_feature (1)..( 11): Result.001 file - promoters70/2105535
gtaatatgtat

SEQ ID NO: 85202 - DNA, 11 bp, Unknown
  misc_feature (1)..( 11): Result.001 file - promoters70/2105535
tctatatatac

SEQ ID NO: 85203 - DNA, 11 bp, Unknown
  misc_feature (1)..( 11): Result.001 file - promoters70/2105535
aatttgttctt

SEQ ID NO: 85204 - DNA, 11 bp, Unknown
  misc_feature (1)..( 11): Result.001 file - promoters70/2106017
ccattaacttt

SEQ ID NO: 85205 - DNA, 7 bp, Unknown
  misc_feature (1)..( 7): Result.001 file - promoters70/2106017
gaactaa

SEQ ID NO: 85206 - DNA, 7 bp, Unknown
  misc_feature (1)..( 7): Result.001 file - promoters70/2106017
caactaa

SEQ ID NO: 85207 - DNA, 7 bp, Unknown
  misc_feature (1)..( 7): Result.001 file - promoters70/2106017
caactac

SEQ ID NO: 85208 - DNA, 8 bp, Unknown
  misc_feature (1)..( 8): Result.001 file - promoters70/2106017
taaagttt

SEQ ID NO: 85209 - DNA, 8 bp, Unknown
  misc_feature (1)..( 8): Result.001 file - promoters70/2106017
aaaacttt

SEQ ID NO: 85210 - DNA, 8 bp, Unknown
  misc_feature (1)..( 8): Result.001 file - promoters70/2113502
aaaacttt

SEQ ID NO: 85211 - DNA, 11 bp, Unknown
  misc_feature (1)..( 11): Result.001 file - promoters70/2113502
ccaataaaaag

SEQ ID NO: 85212 - DNA, 11 bp, Unknown
  misc_feature (1)..( 11): Result.001 file - promoters70/2113502
actataaaact

SEQ ID NO: 85213 - DNA, 11 bp, Unknown
  misc_feature (1)..( 11): Result.001 file - promoters70/2113502
tatataaatcc

SEQ ID NO: 85214 - DNA, 11 bp, Unknown
  misc_feature (1)..( 11): Result.001 file - promoters70/2113502
actattaaagc

SEQ ID NO: 85215 - DNA, 11 bp, Unknown
  misc_feature (1)..( 11): Result.001 file - promoters70/2113502
tttataaactc

SEQ ID NO: 85216 - DNA, 11 bp, Unknown
  misc_feature (1)..( 11): Result.001 file - promoters70/2113502
tttatgaatcc

SEQ ID NO: 85217 - DNA, 10 bp, Unknown
  misc_feature (1)..( 10): Result.001 file - promoters70/2113502
tattaagaaa

SEQ ID NO: 85218 - DNA, 10 bp, Unknown
  misc_feature (1)..( 10): Result.001 file - promoters70/2113502
cattaataaa

SEQ ID NO: 85219 - DNA, 10 bp, Unknown
  misc_feature (1)..( 10): Result.001 file - promoters70/2113502
tattaaagtt

SEQ ID NO: 85220 - DNA, 10 bp, Unknown
  misc_feature (1)..( 10): Result.001 file - promoters70/2113502
aattaaagac

SEQ ID NO: 85221 - DNA, 10 bp, Unknown
  misc_feature (1)..( 10): Result.001 file - promoters70/2113502
tataactaaa

SEQ ID NO: 85222 - DNA, 10 bp, Unknown
  misc_feature (1)..( 10): Result.001 file - promoters70/2113502
aattaaaaat

SEQ ID NO: 85223 - DNA, 11 bp, Unknown
  misc_feature (1)..( 11): Result.001 file - promoters70/2113502
ataaagcccat

SEQ ID NO: 85224 - DNA, 11 bp, Unknown
  misc_feature (1)..( 11): Result.001 file - promoters70/2113502
aaaaggcccat

SEQ ID NO: 85225 - DNA, 11 bp, Unknown
  misc_feature (1)..( 11): Result.001 file - promoters70/2113502
aaatagcccaa

SEQ ID NO: 85226 - DNA, 11 bp, Unknown
  misc_feature (1)..( 11): Result.001 file - promoters70/2113502
aaaaggcccat

SEQ ID NO: 85227 - DNA, 11 bp, Unknown
  misc_feature (1)..( 11): Result.001 file - promoters70/2113502
taaaggcccaa

SEQ ID NO: 85228 - DNA, 11 bp, Unknown
  misc_feature (1)..( 11): Result.001 file - promoters70/2113502
caaaagcccta

SEQ ID NO: 85229 - DNA, 16 bp, Unknown
  misc_feature (1)..( 16): Result.001 file - promoters70/2113502
ggcctatttacaatgt

SEQ ID NO: 85230 - DNA, 16 bp, Unknown
  misc_feature (1)..( 16): Result.001 file - promoters70/2113502
ggcctatatactatga

SEQ ID NO: 85231 - DNA, 16 bp, Unknown
  misc_feature (1)..( 16): Result.001 file - promoters70/2113502
tcacacgaaccaatgt

SEQ ID NO: 85232 - DNA, 16 bp, Unknown
  misc_feature (1)..( 16): Result.001 file - promoters70/2113502
tttaatgcatctatga

SEQ ID NO: 85233 - DNA, 16 bp, Unknown
  misc_feature (1)..( 16): Result.001 file - promoters70/2113502
acattatatataaaaa

SEQ ID NO: 85234 - DNA, 16 bp, Unknown
  misc_feature (1)..( 16): Result.001 file - promoters70/2113502
aacagttgtataattt

SEQ ID NO: 85235 - DNA, 12 bp, Unknown
  misc_feature (1)..( 12): Result.001 file - promoters70/2113502
gttccaatcttg

SEQ ID NO: 85236 - DNA, 12 bp, Unknown
  misc_feature (1)..( 12): Result.001 file - promoters70/2113502
ttgtaaattttg

SEQ ID NO: 85237 - DNA, 12 bp, Unknown
  misc_feature (1)..( 12): Result.001 file - promoters70/2113502
aaagcaatctca

SEQ ID NO: 85238 - DNA, 12 bp, Unknown
  misc_feature (1)..( 12): Result.001 file - promoters70/2113502
gcttcaagcttt

SEQ ID NO: 85239 - DNA, 12 bp, Unknown
  misc_feature (1)..( 12): Result.001 file - promoters70/2113502
atttaaattttt

SEQ ID NO: 85240 - DNA, 12 bp, Unknown
  misc_feature (1)..( 12): Result.001 file - promoters70/2113620
attaaaatgtct

SEQ ID NO: 85241 - DNA, 8 bp, Unknown
  misc_feature (1)..( 8): Result.001 file - promoters70/2113620
gaaggaag

SEQ ID NO: 85242 - DNA, 8 bp, Unknown
  misc_feature (1)..( 8): Result.001 file - promoters70/2113620
aaagaaag

SEQ ID NO: 85243 - DNA, 8 bp, Unknown
  misc_feature (1)..( 8): Result.001 file - promoters70/2113734
gaatgaat

SEQ ID NO: 85244 - DNA, 9 bp, Unknown
  misc_feature (1)..( 9): Result.001 file - promoters70/2113734
tgttagaga

SEQ ID NO: 85245 - DNA, 9 bp, Unknown
  misc_feature (1)..( 9): Result.001 file - promoters70/2113734
aattaaaga

SEQ ID NO: 85246 - DNA, 9 bp, Unknown
  misc_feature (1)..( 9): Result.001 file - promoters70/2113734
aattaaaaa

SEQ ID NO: 85247 - DNA, 11 bp, Unknown
  misc_feature (1)..( 11): Result.001 file - promoters70/2113734
tgctaagataa

SEQ ID NO: 85248 - DNA, 11 bp, Unknown
  misc_feature (1)..( 11): Result.001 file - promoters70/2113734
aattaaaataa

SEQ ID NO: 85249 - DNA, 11 bp, Unknown
  misc_feature (1)..( 11): Result.001 file - promoters70/2113846
aattaaaaaat

SEQ ID NO: 85250 - DNA, 8 bp, Unknown
  misc_feature (1)..( 8): Result.001 file - promoters70/2113846
tataattt

SEQ ID NO: 85251 - DNA, 8 bp, Unknown
  misc_feature (1)..( 8): Result.001 file - promoters70/2113846
tatcattt

SEQ ID NO: 85252 - DNA, 8 bp, Unknown
  misc_feature (1)..( 8): Result.001 file - promoters70/2113846
tatgatta

SEQ ID NO: 85253 - DNA, 9 bp, Unknown
  misc_feature (1)..( 9): Result.001 file - promoters70/2113846
aatttaacg

SEQ ID NO: 85254 - DNA, 9 bp, Unknown
  misc_feature (1)..( 9): Result.001 file - promoters70/2113846
tttttgacg

SEQ ID NO: 85255 - DNA, 9 bp, Unknown
  misc_feature (1)..( 9): Result.001 file - promoters70/2113889
aatttaatg

SEQ ID NO: 85256 - DNA, 13 bp, Unknown
  misc_feature (1)..( 13): Result.001 file - promoters70/2113889
catattctgaaaa

SEQ ID NO: 85257 - DNA, 13 bp, Unknown
  misc_feature (1)..( 13): Result.001 file - promoters70/2113889
taaattttgagta

SEQ ID NO: 85258 - DNA, 13 bp, Unknown
  misc_feature (1)..( 13): Result.001 file - promoters70/2113889
aaaatttatcctt

SEQ ID NO: 85259 - DNA, 13 bp, Unknown
  misc_feature (1)..( 13): Result.001 file - promoters70/2113889
agcatttaaaaat

SEQ ID NO: 85260 - DNA, 13 bp, Unknown
  misc_feature (1)..( 13): Result.001 file - promoters70/2113889
caaattgatctct

SEQ ID NO: 85261 - DNA, 10 bp, Unknown
  misc_feature (1)..( 10): Result.001 file - promoters70/2113889
attaaccttg

SEQ ID NO: 85262 - DNA, 10 bp, Unknown
  misc_feature (1)..( 10): Result.001 file - promoters70/2113889
gttaactttg

SEQ ID NO: 85263 - DNA, 10 bp, Unknown
  misc_feature (1)..( 10): Result.001 file - promoters70/2113889
gttgactggt

SEQ ID NO: 85264 - DNA, 10 bp, Unknown
  misc_feature (1)..( 10): Result.001 file - promoters70/2113889
aagaacttta

SEQ ID NO: 85265 - DNA, 10 bp, Unknown
  misc_feature (1)..( 10): Result.001 file - promoters70/2113889
catgactgtg

SEQ ID NO: 85266 - DNA, 8 bp, Unknown
  misc_feature (1)..( 8): Result.001 file - promoters70/2113889
aaaataaa

SEQ ID NO: 85267 - DNA, 8 bp, Unknown
  misc_feature (1)..( 8): Result.001 file - promoters70/2113889
aaaataaa

SEQ ID NO: 85268 - DNA, 10 bp, Unknown
  misc_feature (1)..( 10): Result.001 file - promoters70/2113889
aataattaaa

SEQ ID NO: 85269 - DNA, 10 bp, Unknown
  misc_feature (1)..( 10): Result.001 file - promoters70/2113889
tttaattaga

SEQ ID NO: 85270 - DNA, 11 bp, Unknown
  misc_feature (1)..( 11): Result.001 file - promoters70/2113889
aaaatgaaaaa

SEQ ID NO: 85271 - DNA, 11 bp, Unknown
  misc_feature (1)..( 11): Result.001 file - promoters70/2113889
actatgagaaa

SEQ ID NO: 85272 - DNA, 11 bp, Unknown
  misc_feature (1)..( 11): Result.001 file - promoters70/2113889
aaaattaaagt

SEQ ID NO: 85273 - DNA, 11 bp, Unknown
  misc_feature (1)..( 11): Result.001 file - promoters70/2113889
tccattaaacg

SEQ ID NO: 85274 - DNA, 10 bp, Unknown
  misc_feature (1)..( 10): Result.001 file - promoters70/2113889
tatatataga

SEQ ID NO: 85275 - DNA, 10 bp, Unknown
  misc_feature (1)..( 10): Result.001 file - promoters70/2113889
tatttattaa

SEQ ID NO: 85276 - DNA, 10 bp, Unknown
  misc_feature (1)..( 10): Result.001 file - promoters70/2113889
tatatataaa

SEQ ID NO: 85277 - DNA, 10 bp, Unknown
  misc_feature (1)..( 10): Result.001 file - promoters70/2113889
tataaataga

SEQ ID NO: 85278 - DNA, 7 bp, Unknown
  misc_feature (1)..( 7): Result.001 file - promoters70/2113889
caaaaaa

SEQ ID NO: 85279 - DNA, 7 bp, Unknown
  misc_feature (1)..( 7): Result.001 file - promoters70/2113889
caataaa

SEQ ID NO: 85280 - DNA, 7 bp, Unknown
  misc_feature (1)..( 7): Result.001 file - promoters70/2113889
taataaa

SEQ ID NO: 85281 - DNA, 7 bp, Unknown
  misc_feature (1)..( 7): Result.001 file - promoters70/2113889
taacaaa

SEQ ID NO: 85282 - DNA, 7 bp, Unknown
  misc_feature (1)..( 7): Result.001 file - promoters70/2113889
tttaatg

SEQ ID NO: 85283 - DNA, 7 bp, Unknown
  misc_feature (1)..( 7): Result.001 file - promoters70/2113889
attaatg

SEQ ID NO: 85284 - DNA, 7 bp, Unknown
  misc_feature (1)..( 7): Result.001 file - promoters70/2113889
tttaaat

SEQ ID NO: 85285 - DNA, 7 bp, Unknown
  misc_feature (1)..( 7): Result.001 file - promoters70/2114095
attaatt

SEQ ID NO: 85286 - DNA, 7 bp, Unknown
  misc_feature (1)..( 7): Result.001 file - promoters70/2114095
aatcttt

SEQ ID NO: 85287 - DNA, 7 bp, Unknown
  misc_feature (1)..( 7): Result.001 file - promoters70/2114095
aatcttt

SEQ ID NO: 85288 - DNA, 7 bp, Unknown
  misc_feature (1)..( 7): Result.001 file - promoters70/2114095
aaactct

SEQ ID NO: 85289 - DNA, 9 bp, Unknown
  misc_feature (1)..( 9): Result.001 file - promoters70/2114095
aaaaaatct

SEQ ID NO: 85290 - DNA, 9 bp, Unknown
  misc_feature (1)..( 9): Result.001 file - promoters70/2114095
aaaatatca

SEQ ID NO: 85291 - DNA, 9 bp, Unknown
  misc_feature (1)..( 9): Result.001 file - promoters70/2114200
agaaactct

SEQ ID NO: 85292 - DNA, 12 bp, Unknown
  misc_feature (1)..( 12): Result.001 file - promoters70/2114200
aatgaattcttt

SEQ ID NO: 85293 - DNA, 12 bp, Unknown
  misc_feature (1)..( 12): Result.001 file - promoters70/2114200
catcaatgctta

SEQ ID NO: 85294 - DNA, 12 bp, Unknown
  misc_feature (1)..( 12): Result.001 file - promoters70/2114200
taaaaatccttg

SEQ ID NO: 85295 - DNA, 12 bp, Unknown
  misc_feature (1)..( 12): Result.001 file - promoters70/2114200
cattaatccttg

SEQ ID NO: 85296 - DNA, 12 bp, Unknown
  misc_feature (1)..( 12): Result.001 file - promoters70/2114200
attccatcctta

SEQ ID NO: 85297 - DNA, 12 bp, Unknown
  misc_feature (1)..( 12): Result.001 file - promoters70/2114200
ctctcattcatc

SEQ ID NO: 85298 - DNA, 16 bp, Unknown
  misc_feature (1)..( 16): Result.001 file - promoters70/2114200
ccaaacaaaacatata

SEQ ID NO: 85299 - DNA, 16 bp, Unknown
  misc_feature (1)..( 16): Result.001 file - promoters70/2114200
ttctataaaaaatatc

SEQ ID NO: 85300 - DNA, 16 bp, Unknown
  misc_feature (1)..( 16): Result.001 file - promoters70/2114200
ctatataaaaccaaga

SEQ ID NO: 85301 - DNA, 16 bp, Unknown
  misc_feature (1)..( 16): Result.001 file - promoters70/2114200
aatggtgataaatatt

SEQ ID NO: 85302 - DNA, 16 bp, Unknown
  misc_feature (1)..( 16): Result.001 file - promoters70/2114200
aagaataaaaattgat

SEQ ID NO: 85303 - DNA, 16 bp, Unknown
  misc_feature (1)..( 16): Result.001 file - promoters70/2187156
caaatgatgaaatatt

SEQ ID NO: 85304 - DNA, 11 bp, Unknown
  misc_feature (1)..( 11): Result.001 file - promoters70/2187156
ccagaattaag

SEQ ID NO: 85305 - DNA, 11 bp, Unknown
  misc_feature (1)..( 11): Result.001 file - promoters70/2187156
ccataattagt

SEQ ID NO: 85306 - DNA, 11 bp, Unknown
  misc_feature (1)..( 11): Result.001 file - promoters70/2217732
atgtaattaag

SEQ ID NO: 85307 - DNA, 16 bp, Unknown
  misc_feature (1)..( 16): Result.001 file - promoters70/2217732
atatttatatagataa

SEQ ID NO: 85308 - DNA, 16 bp, Unknown
  misc_feature (1)..( 16): Result.001 file - promoters70/2217732
ccctatataaagataa

SEQ ID NO: 85309 - DNA, 16 bp, Unknown
  misc_feature (1)..( 16): Result.001 file - promoters70/2217732
taggttatttagttaa

SEQ ID NO: 85310 - DNA, 16 bp, Unknown
  misc_feature (1)..( 16): Result.001 file - promoters70/2217732
cccaataaaaagcaaa

SEQ ID NO: 85311 - DNA, 16 bp, Unknown
  misc_feature (1)..( 16): Result.001 file - promoters70/2217732
tataatataaaggtcc

SEQ ID NO: 85312 - DNA, 16 bp, Unknown
  misc_feature (1)..( 16): Result.001 file - promoters70/2217817
tccactataaaacttg

SEQ ID NO: 85313 - DNA, 7 bp, Unknown
  misc_feature (1)..( 7): Result.001 file - promoters70/2217817
gtagatt

SEQ ID NO: 85314 - DNA, 7 bp, Unknown
  misc_feature (1)..( 7): Result.001 file - promoters70/2217817
atagatt

SEQ ID NO: 85315 - DNA, 7 bp, Unknown
  misc_feature (1)..( 7): Result.001 file - promoters70/2217996
ataaatt

SEQ ID NO: 85316 - DNA, 8 bp, Unknown
  misc_feature (1)..( 8): Result.001 file - promoters70/2217996
caaaccca

SEQ ID NO: 85317 - DNA, 8 bp, Unknown
  misc_feature (1)..( 8): Result.001 file - promoters70/2217996
caaacctg

SEQ ID NO: 85318 - DNA, 8 bp, Unknown
  misc_feature (1)..( 8): Result.001 file - promoters70/2217996
gaaagctg

SEQ ID NO: 85319 - DNA, 8 bp, Unknown
  misc_feature (1)..( 8): Result.001 file - promoters70/2217996
agagacat

SEQ ID NO: 85320 - DNA, 8 bp, Unknown
  misc_feature (1)..( 8): Result.001 file - promoters70/2217996
agatacag

SEQ ID NO: 85321 - DNA, 8 bp, Unknown
  misc_feature (1)..( 8): Result.001 file - promoters70/2217996
cgatccag

SEQ ID NO: 85322 - DNA, 9 bp, Unknown
  misc_feature (1)..( 9): Result.001 file - promoters70/2217996
tttaaagct

SEQ ID NO: 85323 - DNA, 9 bp, Unknown
  misc_feature (1)..( 9): Result.001 file - promoters70/2217996
tttcaagtt

SEQ ID NO: 85324 - DNA, 9 bp, Unknown
  misc_feature (1)..( 9): Result.001 file - promoters70/2218260
tctcacgtt

SEQ ID NO: 85325 - DNA, 9 bp, Unknown
  misc_feature (1)..( 9): Result.001 file - promoters70/2218260
aaaaattct

SEQ ID NO: 85326 - DNA, 9 bp, Unknown
  misc_feature (1)..( 9): Result.001 file - promoters70/2218260
gaaagttca

SEQ ID NO: 85327 - DNA, 10 bp, Unknown
  misc_feature (1)..( 10): Result.001 file - promoters70/2218260
taataataac

SEQ ID NO: 85328 - DNA, 10 bp, Unknown
  misc_feature (1)..( 10): Result.001 file - promoters70/2218260
ccaaaattga

SEQ ID NO: 85329 - DNA, 10 bp, Unknown
  misc_feature (1)..( 10): Result.001 file - promoters70/2218260
gcaaagttgt

SEQ ID NO: 85330 - DNA, 10 bp, Unknown
  misc_feature (1)..( 10): Result.001 file - promoters70/2218260
atcaaattga

SEQ ID NO: 85331 - DNA, 10 bp, Unknown
  misc_feature (1)..( 10): Result.001 file - promoters70/2218260
gtatttatat

SEQ ID NO: 85332 - DNA, 10 bp, Unknown
  misc_feature (1)..( 10): Result.001 file - promoters70/2218260
gtatatatat

SEQ ID NO: 85333 - DNA, 10 bp, Unknown
  misc_feature (1)..( 10): Result.001 file - promoters70/2218260
cgatttataa

SEQ ID NO: 85334 - DNA, 10 bp, Unknown
  misc_feature (1)..( 10): Result.001 file - promoters70/2218260
cgttatataa

SEQ ID NO: 85335 - DNA, 10 bp, Unknown
  misc_feature (1)..( 10): Result.001 file - promoters70/2218260
ctataaatac

SEQ ID NO: 85336 - DNA, 10 bp, Unknown
  misc_feature (1)..( 10): Result.001 file - promoters70/2218260
caataaaaag

SEQ ID NO: 85337 - DNA, 16 bp, Unknown
  misc_feature (1)..( 16): Result.001 file - promoters70/2218260
caaactcaaaaacttt

SEQ ID NO: 85338 - DNA, 16 bp, Unknown
  misc_feature (1)..( 16): Result.001 file - promoters70/2218260
tcaaaaaaaaaagttt

SEQ ID NO: 85339 - DNA, 16 bp, Unknown
  misc_feature (1)..( 16): Result.001 file - promoters70/2218260
gagatgtgcaaagttg

SEQ ID NO: 85340 - DNA, 16 bp, Unknown
  misc_feature (1)..( 16): Result.001 file - promoters70/2218260
tataaataaaattaat

SEQ ID NO: 85341 - DNA, 16 bp, Unknown
  misc_feature (1)..( 16): Result.001 file - promoters70/2218260
agagaaaaaaaagttg

SEQ ID NO: 85342 - DNA, 16 bp, Unknown
  misc_feature (1)..( 16): Result.001 file - promoters70/2218260
tgtatatatatttttt

SEQ ID NO: 85343 - DNA, 15 bp, Unknown
  misc_feature (1)..( 15): Result.001 file - promoters70/2218260
tagttataaatcgtt

SEQ ID NO: 85344 - DNA, 15 bp, Unknown
  misc_feature (1)..( 15): Result.001 file - promoters70/2218260
aagttatgaatccga

SEQ ID NO: 85345 - DNA, 15 bp, Unknown
  misc_feature (1)..( 15): Result.001 file - promoters70/2218260
gtcaaataaattatt

SEQ ID NO: 85346 - DNA, 15 bp, Unknown
  misc_feature (1)..( 15): Result.001 file - promoters70/2218260
agtaactaaaattag

SEQ ID NO: 85347 - DNA, 15 bp, Unknown
  misc_feature (1)..( 15): Result.001 file - promoters70/2218260
agattataaatcatc

SEQ ID NO: 85348 - DNA, 15 bp, Unknown
  misc_feature (1)..( 15): Result.001 file - promoters70/2218260
aagttagttctcttg

SEQ ID NO: 85349 - DNA, 15 bp, Unknown
  misc_feature (1)..( 15): Result.001 file - promoters70/2218271
ttcaatttaatcaat

SEQ ID NO: 85350 - DNA, 12 bp, Unknown
  misc_feature (1)..( 12): Result.001 file - promoters70/2218271
ggtatatatata

SEQ ID NO: 85351 - DNA, 12 bp, Unknown
  misc_feature (1)..( 12): Result.001 file - promoters70/2218271
tatatttatata

SEQ ID NO: 85352 - DNA, 12 bp, Unknown
  misc_feature (1)..( 12): Result.001 file - promoters70/2218271
ccaataaaaagc

SEQ ID NO: 85353 - DNA, 12 bp, Unknown
  misc_feature (1)..( 12): Result.001 file - promoters70/2218271
cttatataaaga

SEQ ID NO: 85354 - DNA, 12 bp, Unknown
  misc_feature (1)..( 12): Result.001 file - promoters70/2218271
cgtctttataaa

SEQ ID NO: 85355 - DNA, 12 bp, Unknown
  misc_feature (1)..( 12): Result.001 file - promoters70/2218271
cttatattcttc

SEQ ID NO: 85356 - DNA, 14 bp, Unknown
  misc_feature (1)..( 14): Result.001 file - promoters70/2218271
cttagttataaatc

SEQ ID NO: 85357 - DNA, 14 bp, Unknown
  misc_feature (1)..( 14): Result.001 file - promoters70/2218271
aaaagttatgaatc

SEQ ID NO: 85358 - DNA, 14 bp, Unknown
  misc_feature (1)..( 14): Result.001 file - promoters70/2218271
ttatgttatttatt

SEQ ID NO: 85359 - DNA, 14 bp, Unknown
  misc_feature (1)..( 14): Result.001 file - promoters70/2218271
agggaaaatgaatt

SEQ ID NO: 85360 - DNA, 14 bp, Unknown
  misc_feature (1)..( 14): Result.001 file - promoters70/2218271
taaaattagcagtc

SEQ ID NO: 85361 - DNA, 14 bp, Unknown
  misc_feature (1)..( 14): Result.001 file - promoters70/2218271
aaaagttacatggc

SEQ ID NO: 85362 - DNA, 14 bp, Unknown
  misc_feature (1)..( 14): Result.001 file - promoters70/2218271
tgaatttattttcc

SEQ ID NO: 85363 - DNA, 11 bp, Unknown
  misc_feature (1)..( 11): Result.001 file - promoters70/2218271
agaaaagtaag

SEQ ID NO: 85364 - DNA, 11 bp, Unknown
  misc_feature (1)..( 11): Result.001 file - promoters70/2218271
agaaaaataac

SEQ ID NO: 85365 - DNA, 11 bp, Unknown
  misc_feature (1)..( 11): Result.001 file - promoters70/2218271
accaaaataaa

SEQ ID NO: 85366 - DNA, 11 bp, Unknown
  misc_feature (1)..( 11): Result.001 file - promoters70/2218271
ataaaaattca

SEQ ID NO: 85367 - DNA, 11 bp, Unknown
  misc_feature (1)..( 11): Result.001 file - promoters70/2218271
ctattaataaa

SEQ ID NO: 85368 - DNA, 11 bp, Unknown
  misc_feature (1)..( 11): Result.001 file - promoters70/2218271
taaaaaatcaa

SEQ ID NO: 85369 - DNA, 8 bp, Unknown
  misc_feature (1)..( 8): Result.001 file - promoters70/2218271
aggcccaa

SEQ ID NO: 85370 - DNA, 8 bp, Unknown
  misc_feature (1)..( 8): Result.001 file - promoters70/2218271
aggcccaa

SEQ ID NO: 85371 - DNA, 8 bp, Unknown
  misc_feature (1)..( 8): Result.001 file - promoters70/2218271
aggcccat

SEQ ID NO: 85372 - DNA, 8 bp, Unknown
  misc_feature (1)..( 8): Result.001 file - promoters70/2218271
aggcccaa

SEQ ID NO: 85373 - DNA, 8 bp, Unknown
  misc_feature (1)..( 8): Result.001 file - promoters70/2218271
aagcccat

SEQ ID NO: 85374 - DNA, 8 bp, Unknown
  misc_feature (1)..( 8): Result.001 file - promoters70/2685931
agcccaaa

SEQ ID NO: 85375 - DNA, 11 bp, Unknown
  misc_feature (1)..( 11): Result.001 file - promoters70/2685931
taactgatttt

SEQ ID NO: 85376 - DNA, 11 bp, Unknown
  misc_feature (1)..( 11): Result.001 file - promoters70/2685931
taaatgataac

SEQ ID NO: 85377 - DNA, 11 bp, Unknown
  misc_feature (1)..( 11): Result.001 file - promoters70/2685931
aatatgaaaat

SEQ ID NO: 85378 - DNA, 8 bp, Unknown
  misc_feature (1)..( 8): Result.001 file - promoters70/2685931
tctttgaa

SEQ ID NO: 85379 - DNA, 8 bp, Unknown
  misc_feature (1)..( 8): Result.001 file - promoters70/2685931
tctttgat

SEQ ID NO: 85380 - DNA, 8 bp, Unknown
  misc_feature (1)..( 8): Result.001 file - promoters70/2685931
tcttggaa

SEQ ID NO: 85381 - DNA, 8 bp, Unknown
  misc_feature (1)..( 8): Result.001 file - promoters70/2685931
acattaaa

SEQ ID NO: 85382 - DNA, 8 bp, Unknown
  misc_feature (1)..( 8): Result.001 file - promoters70/2685931
acatcaaa

SEQ ID NO: 85383 - DNA, 8 bp, Unknown
  misc_feature (1)..( 8): Result.001 file - promoters70/2685951
acattatc

SEQ ID NO: 85384 - DNA, 7 bp, Unknown
  misc_feature (1)..( 7): Result.001 file - promoters70/2685951
aaataaa

SEQ ID NO: 85385 - DNA, 7 bp, Unknown
  misc_feature (1)..( 7): Result.001 file - promoters70/2685951
aaataag

SEQ ID NO: 85386 - DNA, 7 bp, Unknown
  misc_feature (1)..( 7): Result.001 file - promoters70/2724699
aaaaaag

SEQ ID NO: 85387 - DNA, 7 bp, Unknown
  misc_feature (1)..( 7): Result.001 file - promoters70/2724699
aattatc

SEQ ID NO: 85388 - DNA, 7 bp, Unknown
  misc_feature (1)..( 7): Result.001 file - promoters70/2724699
cattatc

SEQ ID NO: 85389 - DNA, 7 bp, Unknown
  misc_feature (1)..( 7): Result.001 file - promoters70/2724699
cattata

SEQ ID NO: 85390 - DNA, 9 bp, Unknown
  misc_feature (1)..( 9): Result.001 file - promoters70/2724699
aaaagttta

SEQ ID NO: 85391 - DNA, 9 bp, Unknown
  misc_feature (1)..( 9): Result.001 file - promoters70/2724699
aaatgtttt

SEQ ID NO: 85392 - DNA, 9 bp, Unknown
  misc_feature (1)..( 9): Result.001 file - promoters70/2918658
caatatttt

SEQ ID NO: 85393 - DNA, 12 bp, Unknown
  misc_feature (1)..( 12): Result.001 file - promoters70/2918658
acattataaaat

SEQ ID NO: 85394 - DNA, 12 bp, Unknown
  misc_feature (1)..( 12): Result.001 file - promoters70/2918658
tttttataatca

SEQ ID NO: 85395 - DNA, 13 bp, Unknown
  misc_feature (1)..( 13): Result.001 file - promoters70/2918658
aaggtatcaaaca

SEQ ID NO: 85396 - DNA, 13 bp, Unknown
  misc_feature (1)..( 13): Result.001 file - promoters70/2918658
acattaaaaaaat

SEQ ID NO: 85397 - DNA, 13 bp, Unknown
  misc_feature (1)..( 13): Result.001 file - promoters70/2918658
attttagaaaagt

SEQ ID NO: 85398 - DNA, 13 bp, Unknown
  misc_feature (1)..( 13): Result.001 file - promoters70/2918680
tgcacagggatca

SEQ ID NO: 85399 - DNA, 9 bp, Unknown
  misc_feature (1)..( 9): Result.001 file - promoters70/2918680
gaaaaaaag

SEQ ID NO: 85400 - DNA, 9 bp, Unknown
  misc_feature (1)..( 9): Result.001 file - promoters70/2918680
caaacaaat

SEQ ID NO: 85401 - DNA, 9 bp, Unknown
  misc_feature (1)..( 9): Result.001 file - promoters70/2918680
caaaaaaaa

SEQ ID NO: 85402 - DNA, 10 bp, Unknown
  misc_feature (1)..( 10): Result.001 file - promoters70/2918680
aaaactaaaa

SEQ ID NO: 85403 - DNA, 10 bp, Unknown
  misc_feature (1)..( 10): Result.001 file - promoters70/2918680
caaacacaag

SEQ ID NO: 85404 - DNA, 10 bp, Unknown
  misc_feature (1)..( 10): Result.001 file - promoters70/2990263
caaagaaagg

SEQ ID NO: 85405 - DNA, 10 bp, Unknown
  misc_feature (1)..( 10): Result.001 file - promoters70/2990263
tttaagaaag

SEQ ID NO: 85406 - DNA, 10 bp, Unknown
  misc_feature (1)..( 10): Result.001 file - promoters70/2990263
tcgaagaaag

SEQ ID NO: 85407 - DNA, 10 bp, Unknown
  misc_feature (1)..( 10): Result.001 file - promoters70/2990263
tcgaagaagg

SEQ ID NO: 85408 - DNA, 9 bp, Unknown
  misc_feature (1)..( 9): Result.001 file - promoters70/2990263
aaaggagaa

SEQ ID NO: 85409 - DNA, 9 bp, Unknown
  misc_feature (1)..( 9): Result.001 file - promoters70/2990263
caagaagaa

SEQ ID NO: 85410 - DNA, 9 bp, Unknown
  misc_feature (1)..( 9): Result.001 file - promoters70/2990611
aaagcagag

SEQ ID NO: 85411 - DNA, 7 bp, Unknown
  misc_feature (1)..( 7): Result.001 file - promoters70/2990611
attgttt

SEQ ID NO: 85412 - DNA, 7 bp, Unknown
  misc_feature (1)..( 7): Result.001 file - promoters70/2990611
tttgttt

SEQ ID NO: 85413 - DNA, 7 bp, Unknown
  misc_feature (1)..( 7): Result.001 file - promoters70/2990611
tttattt

SEQ ID NO: 85414 - DNA, 13 bp, Unknown
  misc_feature (1)..( 13): Result.001 file - promoters70/2990611
tgtttatggaaaa

SEQ ID NO: 85415 - DNA, 13 bp, Unknown
  misc_feature (1)..( 13): Result.001 file - promoters70/2990611
ccataaaggaaaa

SEQ ID NO: 85416 - DNA, 13 bp, Unknown
  misc_feature (1)..( 13): Result.001 file - promoters70/2990611
ccaaaaaagaaat

SEQ ID NO: 85417 - DNA, 8 bp, Unknown
  misc_feature (1)..( 8): Result.001 file - promoters70/2990611
tttcttta

SEQ ID NO: 85418 - DNA, 8 bp, Unknown
  misc_feature (1)..( 8): Result.001 file - promoters70/2990611
tttcttat

SEQ ID NO: 85419 - DNA, 8 bp, Unknown
  misc_feature (1)..( 8): Result.001 file - promoters70/2990611
tttattta

SEQ ID NO: 85420 - DNA, 8 bp, Unknown
  misc_feature (1)..( 8): Result.001 file - promoters70/2990611
tttctttt

SEQ ID NO: 85421 - DNA, 8 bp, Unknown
  misc_feature (1)..( 8): Result.001 file - promoters70/2990611
tttattta

SEQ ID NO: 85422 - DNA, 8 bp, Unknown
  misc_feature (1)..( 8): Result.001 file - promoters70/2990611
tttatttt

SEQ ID NO: 85423 - DNA, 9 bp, Unknown
  misc_feature (1)..( 9): Result.001 file - promoters70/2990611
ataataaag

SEQ ID NO: 85424 - DNA, 9 bp, Unknown
  misc_feature (1)..( 9): Result.001 file - promoters70/2990611
ataataagt

SEQ ID NO: 85425 - DNA, 9 bp, Unknown
  misc_feature (1)..( 9): Result.001 file - promoters70/2990611
ccaatcagt

SEQ ID NO: 85426 - DNA, 9 bp, Unknown
  misc_feature (1)..( 9): Result.001 file - promoters70/2990611
gttaacttt

SEQ ID NO: 85427 - DNA, 9 bp, Unknown
  misc_feature (1)..( 9): Result.001 file - promoters70/2990611
aataagttt

SEQ ID NO: 85428 - DNA, 9 bp, Unknown
  misc_feature (1)..( 9): Result.001 file - promoters70/2991239
aatcagtgt

SEQ ID NO: 85429 - DNA, 10 bp, Unknown
  misc_feature (1)..( 10): Result.001 file - promoters70/2991239
attatatatg

SEQ ID NO: 85430 - DNA, 10 bp, Unknown
  misc_feature (1)..( 10): Result.001 file - promoters70/2991239
tcaataaatg

SEQ ID NO: 85431 - DNA, 10 bp, Unknown
  misc_feature (1)..( 10): Result.001 file - promoters70/2991239
tcattaaaaa

SEQ ID NO: 85432 - DNA, 10 bp, Unknown
  misc_feature (1)..( 10): Result.001 file - promoters70/2991239
ttaaaaaaaa

SEQ ID NO: 85433 - DNA, 10 bp, Unknown
  misc_feature (1)..( 10): Result.001 file - promoters70/2991239
acaaaaaaaa

SEQ ID NO: 85434 - DNA, 10 bp, Unknown
  misc_feature (1)..( 10): Result.001 file - promoters70/2991239
ttaaaaaagg

SEQ ID NO: 85435 - DNA, 34 bp, Unknown; identical to SEQ ID NO: 76977
  misc_feature (1)..( 34): Result.001 file - promoters70/2991239

SEQ ID NO: 85436 - DNA, 34 bp, Unknown; identical to SEQ ID NO: 76978
  misc_feature (1)..( 34): Result.001 file - promoters70/2991239

SEQ ID NO: 85437 - DNA, 34 bp, Unknown; identical to SEQ ID NO: 76979
  misc_feature (1)..( 34): Result.001 file - promoters70/2991239

SEQ ID NO: 85438 - DNA, 34 bp, Unknown; identical to SEQ ID NO: 76977
  misc_feature (1)..( 34): Result.001 file - promoters70/2991239

SEQ ID NO: 85439 - DNA, 34 bp, Unknown; identical to SEQ ID NO: 76981
  misc_feature (1)..( 34): Result.001 file - promoters70/2991239

SEQ ID NO: 85440 - DNA, 34 bp, Unknown; identical to SEQ ID NO: 76979
  misc_feature (1)..( 34): Result.001 file - promoters70/2991239

SEQ ID NO: 85441 - DNA, 15 bp, Unknown
  misc_feature (1)..( 15): Result.001 file - promoters70/2991239
attgaagacttttca

SEQ ID NO: 85442 - DNA, 15 bp, Unknown
  misc_feature (1)..( 15): Result.001 file - promoters70/2991239
attgaagacttttca

SEQ ID NO: 85443 - DNA, 15 bp, Unknown
  misc_feature (1)..( 15): Result.001 file - promoters70/2991239
gtagaagaccatata

SEQ ID NO: 85444 - DNA, 13 bp, Unknown
  misc_feature (1)..( 13): Result.001 file - promoters70/2991239
ctataagctttaa

SEQ ID NO: 85445 - DNA, 13 bp, Unknown
  misc_feature (1)..( 13): Result.001 file - promoters70/2991239
ctataagctttta

SEQ ID NO: 85446 - DNA, 14 bp, Unknown
  misc_feature (1)..( 14): Result.001 file - promoters70/2991239
aagacagcatttaa

SEQ ID NO: 85447 - DNA, 29 bp, Unknown
  misc_feature (1)..( 29): Result.001 file - promoters70/2991239
aagctttaagtctatcgctagactgtcca

SEQ ID NO: 85448 - DNA, 29 bp, Unknown
  misc_feature (1)..( 29): Result.001 file - promoters70/2991239
agcttttaagtctctcgctagactgtcca

SEQ ID NO: 85449 - DNA, 29 bp, Unknown
  misc_feature (1)..( 29): Result.001 file - promoters70/2991489
agcatttaatgatgataacgatttggaag

SEQ ID NO: 85450 - DNA, 13 bp, Unknown
  misc_feature (1)..( 13): Result.001 file - promoters70/2991489
gaaataggcccaa

SEQ ID NO: 85451 - DNA, 13 bp, Unknown
  misc_feature (1)..( 13): Result.001 file - promoters70/2991489
taaaaaggcccat

SEQ ID NO: 85452 - DNA, 13 bp, Unknown
  misc_feature (1)..( 13): Result.001 file - promoters70/2991489
cctaaaggcccaa

SEQ ID NO: 85453 - DNA, 13 bp, Unknown
  misc_feature (1)..( 13): Result.001 file - promoters70/2991489
agaaaaggcccat

SEQ ID NO: 85454 - DNA, 13 bp, Unknown
  misc_feature (1)..( 13): Result.001 file - promoters70/2991489
taaaaaatatctg

SEQ ID NO: 85455 - DNA, 13 bp, Unknown
  misc_feature (1)..( 13): Result.001 file - promoters70/2992101
ccaaacggctagg

SEQ ID NO: 85456 - DNA, 9 bp, Unknown
  misc_feature (1)..( 9): Result.001 file - promoters70/2992101
cttcatatg

SEQ ID NO: 85457 - DNA, 9 bp, Unknown
  misc_feature (1)..( 9): Result.001 file - promoters70/2992101
tttcttatg

SEQ ID NO: 85458 - DNA, 10 bp, Unknown
  misc_feature (1)..( 10): Result.001 file - promoters70/2992101
tttacttctg

SEQ ID NO: 85459 - DNA, 8 bp, Unknown
  misc_feature (1)..( 8): Result.001 file - promoters70/2992101
tctcttct

SEQ ID NO: 85460 - DNA, 8 bp, Unknown
  misc_feature (1)..( 8): Result.001 file - promoters70/2992101
tcttttct

SEQ ID NO: 85461 - DNA, 8 bp, Unknown
  misc_feature (1)..( 8): Result.001 file - promoters70/2992247
gcttatct

SEQ ID NO: 85462 - DNA, 9 bp, Unknown
  misc_feature (1)..( 9): Result.001 file - promoters70/2992247
caaagatat

SEQ ID NO: 85463 - DNA, 9 bp, Unknown
  misc_feature (1)..( 9): Result.001 file - promoters70/2992247
cttagatat

SEQ ID NO: 85464 - DNA, 9 bp, Unknown
  misc_feature (1)..( 9): Result.001 file - promoters70/2992247
cttaaatat

SEQ ID NO: 85465 - DNA, 6 bp, Unknown
  misc_feature (1)..( 6): Result.001 file - promoters70/2992247
atcttc

SEQ ID NO: 85466 - DNA, 6 bp, Unknown
  misc_feature (1)..( 6): Result.001 file - promoters70/2992247
atcttc

SEQ ID NO: 85467 - DNA, 6 bp, Unknown
  misc_feature (1)..( 6): Result.001 file - promoters70/2992247
atcttc

SEQ ID NO: 85468 - DNA, 9 bp, Unknown
  misc_feature (1)..( 9): Result.001 file - promoters70/2992247
tgagttttt

SEQ ID NO: 85469 - DNA, 9 bp, Unknown
  misc_feature (1)..( 9): Result.001 file - promoters70/2992247
tgatttttt

SEQ ID NO: 85470 - DNA, 9 bp, Unknown
  misc_feature (1)..( 9): Result.001 file - promoters70/2992247
tatgttttt

SEQ ID NO: 85471 - DNA, 10 bp, Unknown
  misc_feature (1)..( 10): Result.001 file - promoters70/2992247
aaatccaaaa

SEQ ID NO: 85472 - DNA, 10 bp, Unknown
  misc_feature (1)..( 10): Result.001 file - promoters70/2992247
aaatcaaaaa

SEQ ID NO: 85473 - DNA, 11 bp, Unknown
  misc_feature (1)..( 11): Result.001 file - promoters70/2992247
gtgatcaaatc

SEQ ID NO: 85474 - DNA, 11 bp, Unknown
  misc_feature (1)..( 11): Result.001 file - promoters70/2992247
aaagtcacaag

SEQ ID NO: 85475 - DNA, 10 bp, Unknown
  misc_feature (1)..( 10): Result.001 file - promoters70/2992247
gagtttaggt

SEQ ID NO: 85476 - DNA, 10 bp, Unknown
  misc_feature (1)..( 10): Result.001 file - promoters70/2992247
aatttttggt

SEQ ID NO: 85477 - DNA, 10 bp, Unknown
  misc_feature (1)..( 10): Result.001 file - promoters70/2992247
ttgttttgtc

SEQ ID NO: 85478 - DNA, 8 bp, Unknown
  misc_feature (1)..( 8): Result.001 file - promoters70/2992247
aatagtta

SEQ ID NO: 85479 - DNA, 8 bp, Unknown
  misc_feature (1)..( 8): Result.001 file - promoters70/2992247
aattgttt

SEQ ID NO: 85480 - DNA, 9 bp, Unknown
  misc_feature (1)..( 9): Result.001 file - promoters70/2992281
ttttggttt

SEQ ID NO: 85481 - DNA, 11 bp, Unknown
  misc_feature (1)..( 11): Result.001 file - promoters70/2992281
gaatcattaat

SEQ ID NO: 85482 - DNA, 11 bp, Unknown
  misc_feature (1)..( 11): Result.001 file - promoters70/2992281
aaatcatcaat

SEQ ID NO: 85483 - DNA, 11 bp, Unknown
  misc_feature (1)..( 11): Result.001 file - promoters70/2992281
aagttattaat

SEQ ID NO: 85484 - DNA, 11 bp, Unknown
  misc_feature (1)..( 11): Result.001 file - promoters70/2992281
aaagcatgttc

SEQ ID NO: 85485 - DNA, 11 bp, Unknown
  misc_feature (1)..( 11): Result.001 file - promoters70/2992281
tccaatgttaa

SEQ ID NO: 85486 - DNA, 11 bp, Unknown
  misc_feature (1)..( 11): Result.001 file - promoters70/2992281
tttaattttaa

SEQ ID NO: 85487 - DNA, 11 bp, Unknown
  misc_feature (1)..( 11): Result.001 file - promoters70/2992722
tttcatttggt

SEQ ID NO: 85488 - DNA, 7 bp, Unknown
  misc_feature (1)..( 7): Result.001 file - promoters70/2992722
aatttac

SEQ ID NO: 85489 - DNA, 7 bp, Unknown
  misc_feature (1)..( 7): Result.001 file - promoters70/2992722
aatctac

SEQ ID NO: 85490 - DNA, 7 bp, Unknown
  misc_feature (1)..( 7): Result.001 file - promoters70/2992722
aatttat

SEQ ID NO: 85491 - DNA, 11 bp, Unknown
  misc_feature (1)..( 11): Result.001 file - promoters70/2992722
aaaatagtaaa

SEQ ID NO: 85492 - DNA, 11 bp, Unknown
  misc_feature (1)..( 11): Result.001 file - promoters70/2992722
ataattgtata

SEQ ID NO: 85493 - DNA, 11 bp, Unknown
  misc_feature (1)..( 11): Result.001 file - promoters70/2992722
atatttgtata

SEQ ID NO: 85494 - DNA, 10 bp, Unknown
  misc_feature (1)..( 10): Result.001 file - promoters70/2992722
gaaaaagata

SEQ ID NO: 85495 - DNA, 10 bp, Unknown
  misc_feature (1)..( 10): Result.001 file - promoters70/2992722
gaaatagatt

SEQ ID NO: 85496 - DNA, 10 bp, Unknown
  misc_feature (1)..( 10): Result.001 file - promoters70/2992722
ttagtagatt

SEQ ID NO: 85497 - DNA, 10 bp, Unknown
  misc_feature (1)..( 10): Result.001 file - promoters70/2992722
tatataaatt

SEQ ID NO: 85498 - DNA, 8 bp, Unknown
  misc_feature (1)..( 8): Result.001 file - promoters70/2992722
aaggtata

SEQ ID NO: 85499 - DNA, 8 bp, Unknown
  misc_feature (1)..( 8): Result.001 file - promoters70/2992722
aagctata

SEQ ID NO: 85500 - DNA, 8 bp, Unknown
  misc_feature (1)..( 8): Result.001 file - promoters70/2992722
cagcaata

SEQ ID NO: 85501 - DNA, 9 bp, Unknown
  misc_feature (1)..( 9): Result.001 file - promoters70/2992722
ttactaaaa

SEQ ID NO: 85502 - DNA, 9 bp, Unknown
  misc_feature (1)..( 9): Result.001 file - promoters70/2992722
ttattaatt

SEQ ID NO: 85503 - DNA, 9 bp, Unknown
  misc_feature (1)..( 9): Result.001 file - promoters70/2993642
gtataaatt

SEQ ID NO: 85504 - DNA, 7 bp, Unknown
  misc_feature (1)..( 7): Result.001 file - promoters70/2993642
cttcttc

SEQ ID NO: 85505 - DNA, 7 bp, Unknown
  misc_feature (1)..( 7): Result.001 file - promoters70/2993642
ctttttc

SEQ ID NO: 85506 - DNA, 7 bp, Unknown
  misc_feature (1)..( 7): Result.001 file - promoters70/2993642
ttttttc

SEQ ID NO: 85507 - DNA, 7 bp, Unknown
  misc_feature (1)..( 7): Result.001 file - promoters70/2993642
tatttag

SEQ ID NO: 85508 - DNA, 7 bp, Unknown
  misc_feature (1)..( 7): Result.001 file - promoters70/2993642
tatttat

SEQ ID NO: 85509 - DNA, 7 bp, Unknown
  misc_feature (1)..( 7): Result.001 file - promoters70/2993642
tatatat

SEQ ID NO: 85510 - DNA, 8 bp, Unknown
  misc_feature (1)..( 8): Result.001 file - promoters70/2993642
ccacgtca

SEQ ID NO: 85511 - DNA, 8 bp, Unknown
  misc_feature (1)..( 8): Result.001 file - promoters70/2993642
ccacgtgg

SEQ ID NO: 85512 - DNA, 8 bp, Unknown
  misc_feature (1)..( 8): Result.001 file - promoters70/2993642
acacgtgg

SEQ ID NO: 85513 - DNA, 14 bp, Unknown
  misc_feature (1)..( 14): Result.001 file - promoters70/2993642
tttatatattttta

SEQ ID NO: 85514 - DNA, 14 bp, Unknown
  misc_feature (1)..( 14): Result.001 file - promoters70/2993642
aactaggattctta

SEQ ID NO: 85515 - DNA, 14 bp, Unknown
  misc_feature (1)..( 14): Result.001 file - promoters70/2993642
tttatatattttgt

SEQ ID NO: 85516 - DNA, 8 bp, Unknown
  misc_feature (1)..( 8): Result.001 file - promoters70/2993642
aaatgtaa

SEQ ID NO: 85517 - DNA, 8 bp, Unknown
  misc_feature (1)..( 8): Result.001 file - promoters70/2993642
aaatgttt

SEQ ID NO: 85518 - DNA, 8 bp, Unknown
  misc_feature (1)..( 8): Result.001 file - promoters70/2996222
aaatattt

SEQ ID NO: 85519 - DNA, 18 bp, Unknown
  misc_feature (1)..( 18): Result.001 file - promoters70/2996222
aaaaattattaaagtata

SEQ ID NO: 85520 - DNA, 18 bp, Unknown
  misc_feature (1)..( 18): Result.001 file - promoters70/2996222
aaagattattaaattata

SEQ ID NO: 85521 - DNA, 18 bp, Unknown
  misc_feature (1)..( 18): Result.001 file - promoters70/2996222
aaaatttatctgtaaatg

SEQ ID NO: 85522 - DNA, 10 bp, Unknown
  misc_feature (1)..( 10): Result.001 file - promoters70/2996222
tttactaata

SEQ ID NO: 85523 - DNA, 10 bp, Unknown
  misc_feature (1)..( 10): Result.001 file - promoters70/2996222
attattaaag

SEQ ID NO: 85524 - DNA, 10 bp, Unknown
  misc_feature (1)..( 10): Result.001 file - promoters70/2996222
tttgctatac

SEQ ID NO: 85525 - DNA, 10 bp, Unknown
  misc_feature (1)..( 10): Result.001 file - promoters70/2996222
tataataatt

SEQ ID NO: 85526 - DNA, 9 bp, Unknown
  misc_feature (1)..( 9): Result.001 file - promoters70/2996222
ataatttta

SEQ ID NO: 85527 - DNA, 9 bp, Unknown
  misc_feature (1)..( 9): Result.001 file - promoters70/2996222
ctaatttta

SEQ ID NO: 85528 - DNA, 9 bp, Unknown
  misc_feature (1)..( 9): Result.001 file - promoters70/2996222
ataattatt

SEQ ID NO: 85529 - DNA, 7 bp, Unknown
  misc_feature (1)..( 7): Result.001 file - promoters70/2996222
catttta

SEQ ID NO: 85530 - DNA, 7 bp, Unknown
  misc_feature (1)..( 7): Result.001 file - promoters70/2996222
tatttta

SEQ ID NO: 85531 - DNA, 7 bp, Unknown
  misc_feature (1)..( 7): Result.001 file - promoters70/2996222
tattttt

SEQ ID NO: 85532 - DNA, 10 bp, Unknown
  misc_feature (1)..( 10): Result.001 file - promoters70/2996222
ctatatatat

SEQ ID NO: 85533 - DNA, 10 bp, Unknown
  misc_feature (1)..( 10): Result.001 file - promoters70/2996222
ttatttatat

SEQ ID NO: 85534 - DNA, 10 bp, Unknown
  misc_feature (1)..( 10): Result.001 file - promoters70/2996222
gtatatataa

SEQ ID NO: 85535 - DNA, 10 bp, Unknown
  misc_feature (1)..( 10): Result.001 file - promoters70/2996222
ctatataaac

SEQ ID NO: 85536 - DNA, 9 bp, Unknown
  misc_feature (1)..( 9): Result.001 file - promoters70/2996222
ctaatttta

SEQ ID NO: 85537 - DNA, 9 bp, Unknown
  misc_feature (1)..( 9): Result.001 file - promoters70/2996222
ctaatttta

SEQ ID NO: 85538 - DNA, 9 bp, Unknown
  misc_feature (1)..( 9): Result.001 file - promoters70/2996222
aaaatgtta

SEQ ID NO: 85539 - DNA, 8 bp, Unknown
  misc_feature (1)..( 8): Result.001 file - promoters70/2996222
ttttgtta

SEQ ID NO: 85540 - DNA, 8 bp, Unknown
  misc_feature (1)..( 8): Result.001 file - promoters70/2996222
atttgtta

SEQ ID NO: 85541 - DNA, 8 bp, Unknown
  misc_feature (1)..( 8): Result.001 file - promoters70/2996222
ttttgttt

SEQ ID NO: 85542 - DNA, 8 bp, Unknown
  misc_feature (1)..( 8): Result.001 file - promoters70/2996222
tcaaaaaa

SEQ ID NO: 85543 - DNA, 8 bp, Unknown
  misc_feature (1)..( 8): Result.001 file - promoters70/2996222
acaaaaaa

SEQ ID NO: 85544 - DNA, 8 bp, Unknown
  misc_feature (1)..( 8): Result.001 file - promoters70/2996222
acaaaact

SEQ ID NO: 85545 - DNA, 11 bp, Unknown
  misc_feature (1)..( 11): Result.001 file - promoters70/2996222
aaacaatcatt

SEQ ID NO: 85546 - DNA, 11 bp, Unknown
  misc_feature (1)..( 11): Result.001 file - promoters70/2996222
aaaaaataatt

SEQ ID NO: 85547 - DNA, 11 bp, Unknown
  misc_feature (1)..( 11): Result.001 file - promoters70/2996222
aaaaaattgat

SEQ ID NO: 85548 - DNA, 8 bp, Unknown
  misc_feature (1)..( 8): Result.001 file - promoters70/2996222
taatagaa

SEQ ID NO: 85549 - DNA, 8 bp, Unknown
  misc_feature (1)..( 8): Result.001 file - promoters70/2996222
taattgaa

SEQ ID NO: 85550 - DNA, 8 bp, Unknown
  misc_feature (1)..( 8): Result.001 file - promoters70/2996222
aaattatt

SEQ ID NO: 85551 - DNA, 9 bp, Unknown
  misc_feature (1)..( 9): Result.001 file - promoters70/2996222
aacatattt

SEQ ID NO: 85552 - DNA, 9 bp, Unknown
  misc_feature (1)..( 9): Result.001 file - promoters70/2996222
aaaatattt

SEQ ID NO: 85553 - DNA, 9 bp, Unknown
  misc_feature (1)..( 9): Result.001 file - promoters70/2996222
aaaacattt

SEQ ID NO: 85554 - DNA, 7 bp, Unknown
  misc_feature (1)..( 7): Result.001 file - promoters70/2996222
attttgt

SEQ ID NO: 85555 - DNA, 7 bp, Unknown
  misc_feature (1)..( 7): Result.001 file - promoters70/2996222
attttgt

SEQ ID NO: 85556 - DNA, 7 bp, Unknown
  misc_feature (1)..( 7): Result.001 file - promoters70/2996222
tttttgt

SEQ ID NO: 85557 - DNA, 8 bp, Unknown
  misc_feature (1)..( 8): Result.001 file - promoters70/2996222
aaaaaaat

SEQ ID NO: 85558 - DNA, 8 bp, Unknown
  misc_feature (1)..( 8): Result.001 file - promoters70/2996222
aaaaaaaa

SEQ ID NO: 85559 - DNA, 8 bp, Unknown
  misc_feature (1)..( 8): Result.001 file - promoters70/3003010
aaaaaaat

SEQ ID NO: 85560 - DNA, 7 bp, Unknown
  misc_feature (1)..( 7): Result.001 file - promoters70/3003010
caaaatt

SEQ ID NO: 85561 - DNA, 7 bp, Unknown
  misc_feature (1)..( 7): Result.001 file - promoters70/3003010
caatatt

SEQ ID NO: 85562 - DNA, 7 bp, Unknown
  misc_feature (1)..( 7): Result.001 file - promoters70/3043962
caatatg

SEQ ID NO: 85563 - DNA, 12 bp, Unknown
  misc_feature (1)..( 12): Result.001 file - promoters70/3043962
atttgaattttt

SEQ ID NO: 85564 - DNA, 12 bp, Unknown
  misc_feature (1)..( 12): Result.001 file - promoters70/3043962
atttgatatgct

SEQ ID NO: 85565 - DNA, 12 bp, Unknown
  misc_feature (1)..( 12): Result.001 file - promoters70/3043962
atttgagttttt

SEQ ID NO: 85566 - DNA, 9 bp, Unknown
  misc_feature (1)..( 9): Result.001 file - promoters70/3043962
actatttaa

SEQ ID NO: 85567 - DNA, 9 bp, Unknown
  misc_feature (1)..( 9): Result.001 file - promoters70/3043962
tctatataa

SEQ ID NO: 85568 - DNA, 9 bp, Unknown
  misc_feature (1)..( 9): Result.001 file - promoters70/3043962
actattatc

SEQ ID NO: 85569 - DNA, 8 bp, Unknown
  misc_feature (1)..( 8): Result.001 file - promoters70/3043962
ttataaaa

SEQ ID NO: 85570 - DNA, 8 bp, Unknown
  misc_feature (1)..( 8): Result.001 file - promoters70/3043962
ttattaaa

SEQ ID NO: 85571 - DNA, 8 bp, Unknown
  misc_feature (1)..( 8): Result.001 file - promoters70/3408983
atataaat

SEQ ID NO: 85572 - DNA, 8 bp, Unknown
  misc_feature (1)..( 8): Result.001 file - promoters70/3408983
aaatatga

SEQ ID NO: 85573 - DNA, 8 bp, Unknown
  misc_feature (1)..( 8): Result.001 file - promoters70/3408983
gaatgtga

SEQ ID NO: 85574 - DNA, 8 bp, Unknown
  misc_feature (1)..( 8): Result.001 file - promoters70/3409165
aaatattc

SEQ ID NO: 85575 - DNA, 7 bp, Unknown
  misc_feature (1)..( 7): Result.001 file - promoters70/3409165
ttcatat

SEQ ID NO: 85576 - DNA, 7 bp, Unknown
  misc_feature (1)..( 7): Result.001 file - promoters70/3409165
ttcataa

SEQ ID NO: 85577 - DNA, 7 bp, Unknown
  misc_feature (1)..( 7): Result.001 file - promoters70/3409489
ttcttaa

SEQ ID NO: 85578 - DNA, 7 bp, Unknown
  misc_feature (1)..( 7): Result.001 file - promoters70/3409489
cgaagaa

SEQ ID NO: 85579 - DNA, 7 bp, Unknown
  misc_feature (1)..( 7): Result.001 file - promoters70/3409489
cgatgaa

SEQ ID NO: 85580 - DNA, 7 bp, Unknown
  misc_feature (1)..( 7): Result.001 file - promoters70/3409489
agaagaa

SEQ ID NO: 85581 - DNA, 8 bp, Unknown
  misc_feature (1)..( 8): Result.001 file - promoters70/3409489
acttcctt

SEQ ID NO: 85582 - DNA, 8 bp, Unknown
  misc_feature (1)..( 8): Result.001 file - promoters70/3409489
gcttactt

SEQ ID NO: 85583 - DNA, 8 bp, Unknown
  misc_feature (1)..( 8): Result.001 file - promoters70/3409489
acttccgc

SEQ ID NO: 85584 - DNA, 9 bp, Unknown
  misc_feature (1)..( 9): Result.001 file - promoters70/3409489
ctatggtta

SEQ ID NO: 85585 - DNA, 9 bp, Unknown
  misc_feature (1)..( 9): Result.001 file - promoters70/3409489
aaatgatta

SEQ ID NO: 85586 - DNA, 9 bp, Unknown
  misc_feature (1)..( 9): Result.001 file - promoters70/3433799
aaaggatta

SEQ ID NO: 85587 - DNA, 12 bp, Unknown
  misc_feature (1)..( 12): Result.001 file - promoters70/3433799
gattgataacag

SEQ ID NO: 85588 - DNA, 12 bp, Unknown
  misc_feature (1)..( 12): Result.001 file - promoters70/3433799
gattgttaacag

SEQ ID NO: 85589 - DNA, 12 bp, Unknown
  misc_feature (1)..( 12): Result.001 file - promoters70/3433799
tattaataatcg

SEQ ID NO: 85590 - DNA, 7 bp, Unknown
  misc_feature (1)..( 7): Result.001 file - promoters70/3433799
tggcaaa

SEQ ID NO: 85591 - DNA, 7 bp, Unknown
  misc_feature (1)..( 7): Result.001 file - promoters70/3433799
tggaaaa

SEQ ID NO: 85592 - DNA, 7 bp, Unknown
  misc_feature (1)..( 7): Result.001 file - promoters70/3433799
tggaaac

SEQ ID NO: 85593 - DNA, 9 bp, Unknown
  misc_feature (1)..( 9): Result.001 file - promoters70/3433799
aaatcattg

SEQ ID NO: 85594 - DNA, 9 bp, Unknown
  misc_feature (1)..( 9): Result.001 file - promoters70/3433799
aaaccattt

SEQ ID NO: 85595 - DNA, 9 bp, Unknown
  misc_feature (1)..( 9): Result.001 file - promoters70/3433799
tatccattt

SEQ ID NO: 85596 - DNA, 9 bp, Unknown
  misc_feature (1)..( 9): Result.001 file - promoters70/3433799
ctttataat

SEQ ID NO: 85597 - DNA, 9 bp, Unknown
  misc_feature (1)..( 9): Result.001 file - promoters70/3433799
cattaaaat

SEQ ID NO: 85598 - DNA, 10 bp, Unknown
  misc_feature (1)..( 10): Result.001 file - promoters70/3433904
acttcataga

SEQ ID NO: 85599 - DNA, 11 bp, Unknown
  misc_feature (1)..( 11): Result.001 file - promoters70/3433904
acattttaaat

SEQ ID NO: 85600 - DNA, 11 bp, Unknown
  misc_feature (1)..( 11): Result.001 file - promoters70/3433904
ccattctaaac

SEQ ID NO: 85601 - DNA, 11 bp, Unknown
  misc_feature (1)..( 11): Result.001 file - promoters70/3433904
tacttttaaca

SEQ ID NO: 85602 - DNA, 11 bp, Unknown
  misc_feature (1)..( 11): Result.001 file - promoters70/3433904
ccaatcttctt

SEQ ID NO: 85603 - DNA, 11 bp, Unknown
  misc_feature (1)..( 11): Result.001 file - promoters70/3433904
tcaatgttctt

SEQ ID NO: 85604 - DNA, 11 bp, Unknown
  misc_feature (1)..( 11): Result.001 file - promoters70/3433904
ggtttcttctc

SEQ ID NO: 85605 - DNA, 8 bp, Unknown
  misc_feature (1)..( 8): Result.001 file - promoters70/3433904
cattaaag

SEQ ID NO: 85606 - DNA, 8 bp, Unknown
  misc_feature (1)..( 8): Result.001 file - promoters70/3433904
tattaaag

SEQ ID NO: 85607 - DNA, 8 bp, Unknown
  misc_feature (1)..( 8): Result.001 file - promoters70/3433904
tataaaac

SEQ ID NO: 85608 - DNA, 8 bp, Unknown
  misc_feature (1)..( 8): Result.001 file - promoters70/3433904
tataaatg

SEQ ID NO: 85609 - DNA, 8 bp, Unknown
  misc_feature (1)..( 8): Result.001 file - promoters70/3433904
tataaaga

SEQ ID NO: 85610 - DNA, 8 bp, Unknown
  misc_feature (1)..( 8): Result.001 file - promoters70/3433904
tataaatt

SEQ ID NO: 85611 - DNA, 8 bp, Unknown
  misc_feature (1)..( 8): Result.001 file - promoters70/3433944
tatgaatc

SEQ ID NO: 85612 - DNA, 10 bp, Unknown
  misc_feature (1)..( 10): Result.001 file - promoters70/3433944
aaacttaaga

SEQ ID NO: 85613 - DNA, 10 bp, Unknown
  misc_feature (1)..( 10): Result.001 file - promoters70/3433944
gaacgtaaga

SEQ ID NO: 85614 - DNA, 10 bp, Unknown
  misc_feature (1)..( 10): Result.001 file - promoters70/3433944
aaaattaaat

SEQ ID NO: 85615 - DNA, 8 bp, Unknown
  misc_feature (1)..( 8): Result.001 file - promoters70/3433944
atttttct

SEQ ID NO: 85616 - DNA, 8 bp, Unknown
  misc_feature (1)..( 8): Result.001 file - promoters70/3433944
attttttt

SEQ ID NO: 85617 - DNA, 8 bp, Unknown
  misc_feature (1)..( 8): Result.001 file - promoters70/3433944
cttttttt

SEQ ID NO: 85618 - DNA, 9 bp, Unknown
  misc_feature (1)..( 9): Result.001 file - promoters70/3433944
agatattac

SEQ ID NO: 85619 - DNA, 9 bp, Unknown
  misc_feature (1)..( 9): Result.001 file - promoters70/3433944
cgatattaa

SEQ ID NO: 85620 - DNA, 9 bp, Unknown
  misc_feature (1)..( 9): Result.001 file - promoters70/3433944
agacatttt

SEQ ID NO: 85621 - DNA, 9 bp, Unknown
  misc_feature (1)..( 9): Result.001 file - promoters70/3433944
taataataa

SEQ ID NO: 85622 - DNA, 10 bp, Unknown
  misc_feature (1)..( 10): Result.001 file - promoters70/3433944
ttcatattac

SEQ ID NO: 85623 - DNA, 10 bp, Unknown
  misc_feature (1)..( 10): Result.001 file - promoters70/3433944
ttcaaatttt

SEQ ID NO: 85624 - DNA, 11 bp, Unknown
  misc_feature (1)..( 11): Result.001 file - promoters70/3433944
ataaaagtttt

SEQ ID NO: 85625 - DNA, 11 bp, Unknown
  misc_feature (1)..( 11): Result.001 file - promoters70/3433944
gtctgaacgaa

SEQ ID NO: 85626 - DNA, 11 bp, Unknown
  misc_feature (1)..( 11): Result.001 file - promoters70/3433944
aaaagaaagaa

SEQ ID NO: 85627 - DNA, 11 bp, Unknown
  misc_feature (1)..( 11): Result.001 file - promoters70/3434108
aaaaaaaagac

SEQ ID NO: 85628 - DNA, 12 bp, Unknown
  misc_feature (1)..( 12): Result.001 file - promoters70/3434108
ataatttacttt

SEQ ID NO: 85629 - DNA, 12 bp, Unknown
  misc_feature (1)..( 12): Result.001 file - promoters70/3434108
tgaatttatttt

SEQ ID NO: 85630 - DNA, 12 bp, Unknown
  misc_feature (1)..( 12): Result.001 file - promoters70/3434108
aatgtttgcttc

SEQ ID NO: 85631 - DNA, 12 bp, Unknown
  misc_feature (1)..( 12): Result.001 file - promoters70/3434108
ttaatttcctga

SEQ ID NO: 85632 - DNA, 12 bp, Unknown
  misc_feature (1)..( 12): Result.001 file - promoters70/3434108
ataatttagtct

SEQ ID NO: 85633 - DNA, 10 bp, Unknown
  misc_feature (1)..( 10): Result.001 file - promoters70/3434108
tttttacttt

SEQ ID NO: 85634 - DNA, 12 bp, Unknown
  misc_feature (1)..( 12): Result.001 file - promoters70/3434108
tcaatttaatca

SEQ ID NO: 85635 - DNA, 13 bp, Unknown
  misc_feature (1)..( 13): Result.001 file - promoters70/3434108
acttaaatttacg

SEQ ID NO: 85636 - DNA, 13 bp, Unknown
  misc_feature (1)..( 13): Result.001 file - promoters70/3434108
aaataaattgaat

SEQ ID NO: 85637 - DNA, 13 bp, Unknown
  misc_feature (1)..( 13): Result.001 file - promoters70/3434108
atttaaatttttt

SEQ ID NO: 85638 - DNA, 13 bp, Unknown
  misc_feature (1)..( 13): Result.001 file - promoters70/3434108
actttaattgaac

SEQ ID NO: 85639 - DNA, 13 bp, Unknown
  misc_feature (1)..( 13): Result.001 file - promoters70/3434108
aaaaaaattgtaa

SEQ ID NO: 85640 - DNA, 13 bp, Unknown
  misc_feature (1)..( 13): Result.001 file - promoters70/3434108
tcccaaattgaat

SEQ ID NO: 85641 - DNA, 13 bp, Unknown
  misc_feature (1)..( 13): Result.001 file - promoters70/3434108
caccagattttta

SEQ ID NO: 85642 - DNA, 13 bp, Unknown
  misc_feature (1)..( 13): Result.001 file - promoters70/3434108
tctttaaccaaaa

SEQ ID NO: 85643 - DNA, 13 bp, Unknown
  misc_feature (1)..( 13): Result.001 file - promoters70/3434108
tcttaaaaaatca

SEQ ID NO: 85644 - DNA, 13 bp, Unknown
  misc_feature (1)..( 13): Result.001 file - promoters70/3434108
atataaaaatttt

SEQ ID NO: 85645 - DNA, 14 bp, Unknown
  misc_feature (1)..( 14): Result.001 file - promoters70/3434108
ccacaaagaatttt

SEQ ID NO: 85646 - DNA, 14 bp, Unknown
  misc_feature (1)..( 14): Result.001 file - promoters70/3434108
ttctgaaaagctaa

SEQ ID NO: 85647 - DNA, 14 bp, Unknown
  misc_feature (1)..( 14): Result.001 file - promoters70/3434108
agagaaaaaaaagt

SEQ ID NO: 85648 - DNA, 14 bp, Unknown
  misc_feature (1)..( 14): Result.001 file - promoters70/3434233
tatcaataaacatt

SEQ ID NO: 85649 - DNA, 11 bp, Unknown
  misc_feature (1)..( 11): Result.001 file - promoters70/3434233
aaagcccaaca

SEQ ID NO: 85650 - DNA, 11 bp, Unknown
  misc_feature (1)..( 11): Result.001 file - promoters70/3434233
taagctcaaag

SEQ ID NO: 85651 - DNA, 11 bp, Unknown
  misc_feature (1)..( 11): Result.001 file - promoters70/3434233
aaagccattat

SEQ ID NO: 85652 - DNA, 11 bp, Unknown
  misc_feature (1)..( 11): Result.001 file - promoters70/3434233
taagccacata

SEQ ID NO: 85653 - DNA, 11 bp, Unknown
  misc_feature (1)..( 11): Result.001 file - promoters70/3434233
acagcaacata

SEQ ID NO: 85654 - DNA, 8 bp, Unknown
  misc_feature (1)..( 8): Result.001 file - promoters70/3434233
atatagat

SEQ ID NO: 85655 - DNA, 8 bp, Unknown
  misc_feature (1)..( 8): Result.001 file - promoters70/3434233
ttattgat

SEQ ID NO: 85656 - DNA, 8 bp, Unknown
  misc_feature (1)..( 8): Result.001 file - promoters70/3434233
atatagtt

SEQ ID NO: 85657 - DNA, 8 bp, Unknown
  misc_feature (1)..( 8): Result.001 file - promoters70/3434233
atatagat

SEQ ID NO: 85658 - DNA, 8 bp, Unknown
  misc_feature (1)..( 8): Result.001 file - promoters70/3434279
ttactgaa

SEQ ID NO: 85659 - DNA, 11 bp, Unknown
  misc_feature (1)..( 11): Result.001 file - promoters70/3434279
aaatattcaac

SEQ ID NO: 85660 - DNA, 11 bp, Unknown
  misc_feature (1)..( 11): Result.001 file - promoters70/3434279
atatatacaaa

SEQ ID NO: 85661 - DNA, 11 bp, Unknown
  misc_feature (1)..( 11): Result.001 file - promoters70/3434279
aaatatttttt

SEQ ID NO: 85662 - DNA, 11 bp, Unknown
  misc_feature (1)..( 11): Result.001 file - promoters70/3434279
acatataaaat

SEQ ID NO: 85663 - DNA, 11 bp, Unknown
  misc_feature (1)..( 11): Result.001 file - promoters70/3434279
ctataaaaaat

SEQ ID NO: 85664 - DNA, 11 bp, Unknown
  misc_feature (1)..( 11): Result.001 file - promoters70/3434279
cagaataaaaa

SEQ ID NO: 85665 - DNA, 11 bp, Unknown
  misc_feature (1)..( 11): Result.001 file - promoters70/3434279
atagaagaaac

SEQ ID NO: 85666 - DNA, 13 bp, Unknown
  misc_feature (1)..( 13): Result.001 file - promoters70/3434279
ggtgataaatatt

SEQ ID NO: 85667 - DNA, 13 bp, Unknown
  misc_feature (1)..( 13): Result.001 file - promoters70/3434279
tataaaaaatatc

SEQ ID NO: 85668 - DNA, 13 bp, Unknown
  misc_feature (1)..( 13): Result.001 file - promoters70/3434279
atgatgaaatatt

SEQ ID NO: 85669 - DNA, 14 bp, Unknown
  misc_feature (1)..( 14): Result.001 file - promoters70/3434279
aaacaaaacatata

SEQ ID NO: 85670 - DNA, 14 bp, Unknown
  misc_feature (1)..( 14): Result.001 file - promoters70/3434279
agatacaaaaccct

SEQ ID NO: 85671 - DNA, 14 bp, Unknown
  misc_feature (1)..( 14): Result.001 file - promoters70/3434311
agagacaaatagaa

SEQ ID NO: 85672 - DNA, 7 bp, Unknown
  misc_feature (1)..( 7): Result.001 file - promoters70/3434311
catcaga

SEQ ID NO: 85673 - DNA, 7 bp, Unknown
  misc_feature (1)..( 7): Result.001 file - promoters70/3434311
catcagg

SEQ ID NO: 85674 - DNA, 7 bp, Unknown
  misc_feature (1)..( 7): Result.001 file - promoters70/3434311
aatcaga

SEQ ID NO: 85675 - DNA, 9 bp, Unknown
  misc_feature (1)..( 9): Result.001 file - promoters70/3434311
taatgttac

SEQ ID NO: 85676 - DNA, 9 bp, Unknown
  misc_feature (1)..( 9): Result.001 file - promoters70/3434311
aaatgtttc

SEQ ID NO: 85677 - DNA, 9 bp, Unknown
  misc_feature (1)..( 9): Result.001 file - promoters70/3434311
taattttac

SEQ ID NO: 85678 - DNA, 11 bp, Unknown
  misc_feature (1)..( 11): Result.001 file - promoters70/3434311
atactttaagt

SEQ ID NO: 85679 - DNA, 11 bp, Unknown
  misc_feature (1)..( 11): Result.001 file - promoters70/3434311
ccgcttgaagt

SEQ ID NO: 85680 - DNA, 11 bp, Unknown
  misc_feature (1)..( 11): Result.001 file - promoters70/3434400
ataatttaact

SEQ ID NO: 85681 - DNA, 11 bp, Unknown
  misc_feature (1)..( 11): Result.001 file - promoters70/3434400
aaaatgtctac

SEQ ID NO: 85682 - DNA, 11 bp, Unknown
  misc_feature (1)..( 11): Result.001 file - promoters70/3434400
caaatgtgttt

SEQ ID NO: 85683 - DNA, 11 bp, Unknown
  misc_feature (1)..( 11): Result.001 file - promoters70/3434400
aaaatctgttt

SEQ ID NO: 85684 - DNA, 11 bp, Unknown
  misc_feature (1)..( 11): Result.001 file - promoters70/3434400
aaaatcgaacc

SEQ ID NO: 85685 - DNA, 12 bp, Unknown
  misc_feature (1)..( 12): Result.001 file - promoters70/3434400
aatgaacataca

SEQ ID NO: 85686 - DNA, 12 bp, Unknown
  misc_feature (1)..( 12): Result.001 file - promoters70/3434400
aatgaagatagt

SEQ ID NO: 85687 - DNA, 12 bp, Unknown
  misc_feature (1)..( 12): Result.001 file - promoters70/3434400
ggagaacattgt

SEQ ID NO: 85688 - DNA, 12 bp, Unknown
  misc_feature (1)..( 12): Result.001 file - promoters70/3434400
tgcaaagaaagt

SEQ ID NO: 85689 - DNA, 10 bp, Unknown
  misc_feature (1)..( 10): Result.001 file - promoters70/3434400
gttttttaat

SEQ ID NO: 85690 - DNA, 10 bp, Unknown
  misc_feature (1)..( 10): Result.001 file - promoters70/3434400
actttataat

SEQ ID NO: 85691 - DNA, 10 bp, Unknown
  misc_feature (1)..( 10): Result.001 file - promoters70/3434400
acattaaaat

SEQ ID NO: 85692 - DNA, 10 bp, Unknown
  misc_feature (1)..( 10): Result.001 file - promoters70/3434563
acttcataga

SEQ ID NO: 85693 - DNA, 14 bp, Unknown
  misc_feature (1)..( 14): Result.001 file - promoters70/3434563
tctttttgtgcaac

SEQ ID NO: 85694 - DNA, 14 bp, Unknown
  misc_feature (1)..( 14): Result.001 file - promoters70/3434563
agtttttgtaataa

SEQ ID NO: 85695 - DNA, 14 bp, Unknown
  misc_feature (1)..( 14): Result.001 file - promoters70/3434563
tttttctgttcaac

SEQ ID NO: 85696 - DNA, 14 bp, Unknown
  misc_feature (1)..( 14): Result.001 file - promoters70/3434563
tatttttgttggtt

SEQ ID NO: 85697 - DNA, 14 bp, Unknown
  misc_feature (1)..( 14): Result.001 file - promoters70/3434563
tatctttcaccttt

SEQ ID NO: 85698 - DNA, 14 bp, Unknown
  misc_feature (1)..( 14): Result.001 file - promoters70/3434563
catttttctgatga

SEQ ID NO: 85699 - DNA, 13 bp, Unknown
  misc_feature (1)..( 13): Result.001 file - promoters70/3434563
acaagagaagaag

SEQ ID NO: 85700 - DNA, 13 bp, Unknown
  misc_feature (1)..( 13): Result.001 file - promoters70/3434563
aaaagagaaaggt

SEQ ID NO: 85701 - DNA, 13 bp, Unknown
  misc_feature (1)..( 13): Result.001 file - promoters70/3434563
agaaaagaaagaa

SEQ ID NO: 85702 - DNA, 13 bp, Unknown
  misc_feature (1)..( 13): Result.001 file - promoters70/3434563
ggaaaagaaagaa

SEQ ID NO: 85703 - DNA, 13 bp, Unknown
  misc_feature (1)..( 13): Result.001 file - promoters70/3434563
aaaaaagataata

SEQ ID NO: 85704 - DNA, 13 bp, Unknown
  misc_feature (1)..( 13): Result.001 file - promoters70/3434563
gaaaaagaggttt

SEQ ID NO: 85705 - DNA, 9 bp, Unknown
  misc_feature (1)..( 9): Result.001 file - promoters70/3434563
gattttggt

SEQ ID NO: 85706 - DNA, 9 bp, Unknown
  misc_feature (1)..( 9): Result.001 file - promoters70/3434563
cattttgtc

SEQ ID NO: 85707 - DNA, 9 bp, Unknown
  misc_feature (1)..( 9): Result.001 file - promoters70/3434563
agttttgta

SEQ ID NO: 85708 - DNA, 9 bp, Unknown
  misc_feature (1)..( 9): Result.001 file - promoters70/3434563
ccttttgtt

SEQ ID NO: 85709 - DNA, 9 bp, Unknown
  misc_feature (1)..( 9): Result.001 file - promoters70/3434563
gatttagta

SEQ ID NO: 85710 - DNA, 9 bp, Unknown
  misc_feature (1)..( 9): Result.001 file - promoters70/3435133
cattgtgtg

SEQ ID NO: 85711 - DNA, 7 bp, Unknown
  misc_feature (1)..( 7): Result.001 file - promoters70/3435133
gtagatt

SEQ ID NO: 85712 - DNA, 7 bp, Unknown
  misc_feature (1)..( 7): Result.001 file - promoters70/3435133
atagatt

SEQ ID NO: 85713 - DNA, 7 bp, Unknown
  misc_feature (1)..( 7): Result.001 file - promoters70/3435452
ataaatt

SEQ ID NO: 85714 - DNA, 9 bp, Unknown
  misc_feature (1)..( 9): Result.001 file - promoters70/3435452
agaaatata

SEQ ID NO: 85715 - DNA, 9 bp, Unknown
  misc_feature (1)..( 9): Result.001 file - promoters70/3435452
aataatata

SEQ ID NO: 85716 - DNA, 9 bp, Unknown
  misc_feature (1)..( 9): Result.001 file - promoters70/3435452
agaaaaata

SEQ ID NO: 85717 - DNA, 7 bp, Unknown
  misc_feature (1)..( 7): Result.001 file - promoters70/3435452
ctaaaaa

SEQ ID NO: 85718 - DNA, 7 bp, Unknown
  misc_feature (1)..( 7): Result.001 file - promoters70/3435452
ctaaaat

SEQ ID NO: 85719 - DNA, 7 bp, Unknown
  misc_feature (1)..( 7): Result.001 file - promoters70/3435452
ttaaaat

SEQ ID NO: 85720 - DNA, 9 bp, Unknown
  misc_feature (1)..( 9): Result.001 file - promoters70/3435452
agaaattat

SEQ ID NO: 85721 - DNA, 9 bp, Unknown
  misc_feature (1)..( 9): Result.001 file - promoters70/3435452
agaaattct

SEQ ID NO: 85722 - DNA, 9 bp, Unknown
  misc_feature (1)..( 9): Result.001 file - promoters70/3435452
tcaaagtat

SEQ ID NO: 85723 - DNA, 9 bp, Unknown
  misc_feature (1)..( 9): Result.001 file - promoters70/3435452
tattctatt

SEQ ID NO: 85724 - DNA, 9 bp, Unknown
  misc_feature (1)..( 9): Result.001 file - promoters70/3435452
tatgctaaa

SEQ ID NO: 85725 - DNA, 9 bp, Unknown
  misc_feature (1)..( 9): Result.001 file - promoters70/3435452
aatgttaaa

SEQ ID NO: 85726 - DNA, 12 bp, Unknown
  misc_feature (1)..( 12): Result.001 file - promoters70/3435452
aggaagtcatca

SEQ ID NO: 85727 - DNA, 12 bp, Unknown
  misc_feature (1)..( 12): Result.001 file - promoters70/3435452
ttaacttcatca

SEQ ID NO: 85728 - DNA, 12 bp, Unknown
  misc_feature (1)..( 12): Result.001 file - promoters70/3435469
ttaactttatca

SEQ ID NO: 85729 - DNA, 10 bp, Unknown
  misc_feature (1)..( 10): Result.001 file - promoters70/3435469
tttttaaaaa

SEQ ID NO: 85730 - DNA, 10 bp, Unknown
  misc_feature (1)..( 10): Result.001 file - promoters70/3435469
ttttgaaaaa

SEQ ID NO: 85731 - DNA, 10 bp, Unknown
  misc_feature (1)..( 10): Result.001 file - promoters70/3435469
tttcgaatct

SEQ ID NO: 85732 - DNA, 7 bp, Unknown
  misc_feature (1)..( 7): Result.001 file - promoters70/3435469
cacaaaa

SEQ ID NO: 85733 - DNA, 7 bp, Unknown
  misc_feature (1)..( 7): Result.001 file - promoters70/3435469
aacaaaa

SEQ ID NO: 85734 - DNA, 7 bp, Unknown
  misc_feature (1)..( 7): Result.001 file - promoters70/3435469
aacgaaa

SEQ ID NO: 85735 - DNA, 10 bp, Unknown
  misc_feature (1)..( 10): Result.001 file - promoters70/3435469
ttttgagcta

SEQ ID NO: 85736 - DNA, 10 bp, Unknown
  misc_feature (1)..( 10): Result.001 file - promoters70/3435469
ttttgacttg

SEQ ID NO: 85737 - DNA, 10 bp, Unknown
  misc_feature (1)..( 10): Result.001 file - promoters70/3435469
ttttgatcta

SEQ ID NO: 85738 - DNA, 7 bp, Unknown
  misc_feature (1)..( 7): Result.001 file - promoters70/3435469
tctttag

SEQ ID NO: 85739 - DNA, 7 bp, Unknown
  misc_feature (1)..( 7): Result.001 file - promoters70/3435469
tctttag

SEQ ID NO: 85740 - DNA, 7 bp, Unknown
  misc_feature (1)..( 7): Result.001 file - promoters70/3435469
ttttgag

SEQ ID NO: 85741 - DNA, 11 bp, Unknown
  misc_feature (1)..( 11): Result.001 file - promoters70/3435469
tttatatcgtg

SEQ ID NO: 85742 - DNA, 11 bp, Unknown
  misc_feature (1)..( 11): Result.001 file - promoters70/3435469
cttatctcgtg

SEQ ID NO: 85743 - DNA, 11 bp, Unknown
  misc_feature (1)..( 11): Result.001 file - promoters70/3435469
cttttctttct

SEQ ID NO: 85744 - DNA, 8 bp, Unknown
  misc_feature (1)..( 8): Result.001 file - promoters70/3435469
aatatata

SEQ ID NO: 85745 - DNA, 8 bp, Unknown
  misc_feature (1)..( 8): Result.001 file - promoters70/3435469
aatttata

SEQ ID NO: 85746 - DNA, 8 bp, Unknown
  misc_feature (1)..( 8): Result.001 file - promoters70/3435534
gatttatc

SEQ ID NO: 85747 - DNA, 11 bp, Unknown
  misc_feature (1)..( 11): Result.001 file - promoters70/3435534
tggcagaataa

SEQ ID NO: 85748 - DNA, 11 bp, Unknown
  misc_feature (1)..( 11): Result.001 file - promoters70/3435534
aaacagagtaa

SEQ ID NO: 85749 - DNA, 11 bp, Unknown
  misc_feature (1)..( 11): Result.001 file - promoters70/3435534
aaacagaggat

SEQ ID NO: 85750 - DNA, 11 bp, Unknown
  misc_feature (1)..( 11): Result.001 file - promoters70/3435534
gtctatatgaa

SEQ ID NO: 85751 - DNA, 11 bp, Unknown
  misc_feature (1)..( 11): Result.001 file - promoters70/3435534
gtctatgtgaa

SEQ ID NO: 85752 - DNA, 11 bp, Unknown
  misc_feature (1)..( 11): Result.001 file - promoters70/3435632
atctttgttct

SEQ ID NO: 85753 - DNA, 9 bp, Unknown
  misc_feature (1)..( 9): Result.001 file - promoters70/3435632
ttttctttg

SEQ ID NO: 85754 - DNA, 9 bp, Unknown
  misc_feature (1)..( 9): Result.001 file - promoters70/3435632
ttttgtttc

SEQ ID NO: 85755 - DNA, 9 bp, Unknown
  misc_feature (1)..( 9): Result.001 file - promoters70/3435632
atgtctttg

SEQ ID NO: 85756 - DNA, 7 bp, Unknown
  misc_feature (1)..( 7): Result.001 file - promoters70/3435632
cttttta

SEQ ID NO: 85757 - DNA, 7 bp, Unknown
  misc_feature (1)..( 7): Result.001 file - promoters70/3435632
cttttta

SEQ ID NO: 85758 - DNA, 7 bp, Unknown
  misc_feature (1)..( 7): Result.001 file - promoters70/3435632
attttta

SEQ ID NO: 85759 - DNA, 9 bp, Unknown
  misc_feature (1)..( 9): Result.001 file - promoters70/3435632
cttaagtca

SEQ ID NO: 85760 - DNA, 9 bp, Unknown
  misc_feature (1)..( 9): Result.001 file - promoters70/3435632
cttaattca

SEQ ID NO: 85761 - DNA, 9 bp, Unknown
  misc_feature (1)..( 9): Result.001 file - promoters70/3435632
tttatgtct

SEQ ID NO: 85762 - DNA, 8 bp, Unknown
  misc_feature (1)..( 8): Result.001 file - promoters70/3435632
aaaaaata

SEQ ID NO: 85763 - DNA, 8 bp, Unknown
  misc_feature (1)..( 8): Result.001 file - promoters70/3435632
aaaaaatt

SEQ ID NO: 85764 - DNA, 8 bp, Unknown
  misc_feature (1)..( 8): Result.001 file - promoters70/3435632
aaataatt

SEQ ID NO: 85765 - DNA, 8 bp, Unknown
  misc_feature (1)..( 8): Result.001 file - promoters70/3435632
aaataact

SEQ ID NO: 85766 - DNA, 8 bp, Unknown
  misc_feature (1)..( 8): Result.001 file - promoters70/3435632
aaataatt

SEQ ID NO: 85767 - DNA, 8 bp, Unknown
  misc_feature (1)..( 8): Result.001 file - promoters70/3435761
aaaaaatt

SEQ ID NO: 85768 - DNA, 8 bp, Unknown
  misc_feature (1)..( 8): Result.001 file - promoters70/3435761
gaaaaaaa

SEQ ID NO: 85769 - DNA, 8 bp, Unknown
  misc_feature (1)..( 8): Result.001 file - promoters70/3435761
gaaaaaag

SEQ ID NO: 85770 - DNA, 9 bp, Unknown
  misc_feature (1)..( 9): Result.001 file - promoters70/3435761
caaagaaag

SEQ ID NO: 85771 - DNA, 9 bp, Unknown
  misc_feature (1)..( 9): Result.001 file - promoters70/3435761
caaaaaaaa

SEQ ID NO: 85772 - DNA, 9 bp, Unknown
  misc_feature (1)..( 9): Result.001 file - promoters70/3435761
aaactaaaa

SEQ ID NO: 85773 - DNA, 9 bp, Unknown
  misc_feature (1)..( 9): Result.001 file - promoters70/3435829
taactaaaa

SEQ ID NO: 85774 - DNA, 8 bp, Unknown
  misc_feature (1)..( 8): Result.001 file - promoters70/3435829
ataagata

SEQ ID NO: 85775 - DNA, 8 bp, Unknown
  misc_feature (1)..( 8): Result.001 file - promoters70/3435829
ctaaaata

SEQ ID NO: 85776 - DNA, 8 bp, Unknown
  misc_feature (1)..( 8): Result.001 file - promoters70/3435829
ctacaatt

SEQ ID NO: 85777 - DNA, 8 bp, Unknown
  misc_feature (1)..( 8): Result.001 file - promoters70/3435829
attaacta

SEQ ID NO: 85778 - DNA, 8 bp, Unknown
  misc_feature (1)..( 8): Result.001 file - promoters70/3435829
tctaacta

SEQ ID NO: 85779 - DNA, 8 bp, Unknown
  misc_feature (1)..( 8): Result.001 file - promoters70/3436196
attgactc

SEQ ID NO: 85780 - DNA, 8 bp, Unknown
  misc_feature (1)..( 8): Result.001 file - promoters70/3436196
aaaccttt

SEQ ID NO: 85781 - DNA, 8 bp, Unknown
  misc_feature (1)..( 8): Result.001 file - promoters70/3436196
aaatcttc

SEQ ID NO: 85782 - DNA, 8 bp, Unknown
  misc_feature (1)..( 8): Result.001 file - promoters70/3436196
aaatcttt

SEQ ID NO: 85783 - DNA, 7 bp, Unknown
  misc_feature (1)..( 7): Result.001 file - promoters70/3436196
tctaaaa

SEQ ID NO: 85784 - DNA, 7 bp, Unknown
  misc_feature (1)..( 7): Result.001 file - promoters70/3436196
actaaaa

SEQ ID NO: 85785 - DNA, 7 bp, Unknown
  misc_feature (1)..( 7): Result.001 file - promoters70/3436196
actaaat

SEQ ID NO: 85786 - DNA, 10 bp, Unknown
  misc_feature (1)..( 10): Result.001 file - promoters70/3436196
cacataaaat

SEQ ID NO: 85787 - DNA, 10 bp, Unknown
  misc_feature (1)..( 10): Result.001 file - promoters70/3436196
atcataaaat

SEQ ID NO: 85788 - DNA, 10 bp, Unknown
  misc_feature (1)..( 10): Result.001 file - promoters70/3437193
atcgtaacct

SEQ ID NO: 85789 - DNA, 10 bp, Unknown
  misc_feature (1)..( 10): Result.001 file - promoters70/3437193
attaatgata

SEQ ID NO: 85790 - DNA, 10 bp, Unknown
  misc_feature (1)..( 10): Result.001 file - promoters70/3437193
attgatgaga

SEQ ID NO: 85791 - DNA, 10 bp, Unknown
  misc_feature (1)..( 10): Result.001 file - promoters70/3437244
acagatcaga

SEQ ID NO: 85792 - DNA, 8 bp, Unknown
  misc_feature (1)..( 8): Result.001 file - promoters70/3437244
aaatcaag

SEQ ID NO: 85793 - DNA, 8 bp, Unknown
  misc_feature (1)..( 8): Result.001 file - promoters70/3437244
gaatcaac

SEQ ID NO: 85794 - DNA, 8 bp, Unknown
  misc_feature (1)..( 8): Result.001 file - promoters70/3437244
ccatcaac

SEQ ID NO: 85795 - DNA, 8 bp, Unknown
  misc_feature (1)..( 8): Result.001 file - promoters70/3437244
gaatcaca

SEQ ID NO: 85796 - DNA, 10 bp, Unknown
  misc_feature (1)..( 10): Result.001 file - promoters70/3437244
cgtttagtgt

SEQ ID NO: 85797 - DNA, 10 bp, Unknown
  misc_feature (1)..( 10): Result.001 file - promoters70/3437244
tttttagttt

SEQ ID NO: 85798 - DNA, 10 bp, Unknown
  misc_feature (1)..( 10): Result.001 file - promoters70/3437244
attttatttt

SEQ ID NO: 85799 - DNA, 10 bp, Unknown
  misc_feature (1)..( 10): Result.001 file - promoters70/3437331
attttattac

SEQ ID NO: 85800 - DNA, 11 bp, Unknown
  misc_feature (1)..( 11): Result.001 file - promoters70/3437331
cattgtgtggc

SEQ ID NO: 85801 - DNA, 11 bp, Unknown
  misc_feature (1)..( 11): Result.001 file - promoters70/3437331
cattttgtttt

SEQ ID NO: 85802 - DNA, 11 bp, Unknown
  misc_feature (1)..( 11): Result.001 file - promoters70/3437710
atatttgtttt

SEQ ID NO: 85803 - DNA, 8 bp, Unknown
  misc_feature (1)..( 8): Result.001 file - promoters70/3437710
tatccaag

SEQ ID NO: 85804 - DNA, 8 bp, Unknown
  misc_feature (1)..( 8): Result.001 file - promoters70/3437710
aatccaaa

SEQ ID NO: 85805 - DNA, 8 bp, Unknown
  misc_feature (1)..( 8): Result.001 file - promoters70/3437710
tatccaag

SEQ ID NO: 85806 - DNA, 8 bp, Unknown
  misc_feature (1)..( 8): Result.001 file - promoters70/3438069
tatccaac

SEQ ID NO: 85807 - DNA, 7 bp, Unknown
  misc_feature (1)..( 7): Result.001 file - promoters70/3438069
agaaagg

SEQ ID NO: 85808 - DNA, 7 bp, Unknown
  misc_feature (1)..( 7): Result.001 file - promoters70/3438069
agaaagt

SEQ ID NO: 85809 - DNA, 7 bp, Unknown
  misc_feature (1)..( 7): Result.001 file - promoters70/3438069
agatagt

SEQ ID NO: 85810 - DNA, 8 bp, Unknown
  misc_feature (1)..( 8): Result.001 file - promoters70/3438069
gcataatg

SEQ ID NO: 85811 - DNA, 8 bp, Unknown
  misc_feature (1)..( 8): Result.001 file - promoters70/3438069
ttataatg

SEQ ID NO: 85812 - DNA, 8 bp, Unknown
  misc_feature (1)..( 8): Result.001 file - promoters70/3438069
ttaaaatc

SEQ ID NO: 85813 - DNA, 8 bp, Unknown
  misc_feature (1)..( 8): Result.001 file - promoters70/3438069
tcaaaatc

SEQ ID NO: 85814 - DNA, 8 bp, Unknown
  misc_feature (1)..( 8): Result.001 file - promoters70/3438069
gttaattg

SEQ ID NO: 85815 - DNA, 8 bp, Unknown
  misc_feature (1)..( 8): Result.001 file - promoters70/3438069
gttaattg

SEQ ID NO: 85816 - DNA, 8 bp, Unknown
  misc_feature (1)..( 8): Result.001 file - promoters70/3438171
attacttg

SEQ ID NO: 85817 - DNA, 9 bp, Unknown
  misc_feature (1)..( 9): Result.001 file - promoters70/3438171
agaatgttg

SEQ ID NO: 85818 - DNA, 9 bp, Unknown
  misc_feature (1)..( 9): Result.001 file - promoters70/3438171
agaatgtat

SEQ ID NO: 85819 - DNA, 9 bp, Unknown
  misc_feature (1)..( 9): Result.001 file - promoters70/3438171
ttaatatat

SEQ ID NO: 85820 - DNA, 8 bp, Unknown
  misc_feature (1)..( 8): Result.001 file - promoters70/3438171
atatatca

SEQ ID NO: 85821 - DNA, 8 bp, Unknown
  misc_feature (1)..( 8): Result.001 file - promoters70/3438171
gtatgtca

SEQ ID NO: 85822 - DNA, 8 bp, Unknown
  misc_feature (1)..( 8): Result.001 file - promoters70/3438171
atatatac

SEQ ID NO: 85823 - DNA, 8 bp, Unknown
  misc_feature (1)..( 8): Result.001 file - promoters70/3438171
taatattt

SEQ ID NO: 85824 - DNA, 8 bp, Unknown
  misc_feature (1)..( 8): Result.001 file - promoters70/3438171
taatgttt

SEQ ID NO: 85825 - DNA, 8 bp, Unknown
  misc_feature (1)..( 8): Result.001 file - promoters70/3438171
taaaatta

SEQ ID NO: 85826 - DNA, 6 bp, Unknown
  misc_feature (1)..( 6): Result.001 file - promoters70/3438171
aaatat

SEQ ID NO: 85827 - DNA, 6 bp, Unknown
  misc_feature (1)..( 6): Result.001 file - promoters70/3438171
aaatat

SEQ ID NO: 85828 - DNA, 7 bp, Unknown
  misc_feature (1)..( 7): Result.001 file - promoters70/3438171
aaattat

SEQ ID NO: 85829 - DNA, 9 bp, Unknown
  misc_feature (1)..( 9): Result.001 file - promoters70/3438171
taaaaaata

SEQ ID NO: 85830 - DNA, 9 bp, Unknown
  misc_feature (1)..( 9): Result.001 file - promoters70/3438171
gaaaaaata

SEQ ID NO: 85831 - DNA, 9 bp, Unknown
  misc_feature (1)..( 9): Result.001 file - promoters70/3438171
taaaaaaaa

SEQ ID NO: 85832 - DNA, 8 bp, Unknown
  misc_feature (1)..( 8): Result.001 file - promoters70/3438171
tttttatt

SEQ ID NO: 85833 - DNA, 8 bp, Unknown
  misc_feature (1)..( 8): Result.001 file - promoters70/3438171
attttatt

SEQ ID NO: 85834 - DNA, 8 bp, Unknown
  misc_feature (1)..( 8): Result.001 file - promoters70/3438171
tttttatt

SEQ ID NO: 85835 - DNA, 7 bp, Unknown
  misc_feature (1)..( 7): Result.001 file - promoters70/3438171
atatttt

SEQ ID NO: 85836 - DNA, 7 bp, Unknown
  misc_feature (1)..( 7): Result.001 file - promoters70/3438171
atattta

SEQ ID NO: 85837 - DNA, 7 bp, Unknown
  misc_feature (1)..( 7): Result.001 file - promoters70/3438171
ttattta

SEQ ID NO: 85838 - DNA, 19 bp, Unknown
  misc_feature (1)..( 19): Result.001 file - promoters70/3438171
aaattattcacacatgttg

SEQ ID NO: 85839 - DNA, 19 bp, Unknown
  misc_feature (1)..( 19): Result.001 file - promoters70/3438171
taattattcatacaagttg

SEQ ID NO: 85840 - DNA, 19 bp, Unknown
  misc_feature (1)..( 19): Result.001 file - promoters70/3438171
aaattagcgagtaggataa

SEQ ID NO: 85841 - DNA, 11 bp, Unknown
  misc_feature (1)..( 11): Result.001 file - promoters70/3438171
gtttaaaaatt

SEQ ID NO: 85842 - DNA, 11 bp, Unknown
  misc_feature (1)..( 11): Result.001 file - promoters70/3438171
gtttaatttat

SEQ ID NO: 85843 - DNA, 11 bp, Unknown
  misc_feature (1)..( 11): Result.001 file - promoters70/3438171
gttaaaaaatt

SEQ ID NO: 85844 - DNA, 8 bp, Unknown
  misc_feature (1)..( 8): Result.001 file - promoters70/3438171
atagttta

SEQ ID NO: 85845 - DNA, 8 bp, Unknown
  misc_feature (1)..( 8): Result.001 file - promoters70/3438171
ataatttc

SEQ ID NO: 85846 - DNA, 8 bp, Unknown
  misc_feature (1)..( 8): Result.001 file - promoters70/3438171
gaaatttc

SEQ ID NO: 85847 - DNA, 9 bp, Unknown
  misc_feature (1)..( 9): Result.001 file - promoters70/3438171
aataaattt

SEQ ID NO: 85848 - DNA, 9 bp, Unknown
  misc_feature (1)..( 9): Result.001 file - promoters70/3438171
tatatattc

SEQ ID NO: 85849 - DNA, 9 bp, Unknown
  misc_feature (1)..( 9): Result.001 file - promoters70/3438171
aataaaaaa

SEQ ID NO: 85850 - DNA, 9 bp, Unknown
  misc_feature (1)..( 9): Result.001 file - promoters70/3438171
aatacaaaa

SEQ ID NO: 85851 - DNA, 11 bp, Unknown
  misc_feature (1)..( 11): Result.001 file - promoters70/3438171
ctttgaataaa

SEQ ID NO: 85852 - DNA, 11 bp, Unknown
  misc_feature (1)..( 11): Result.001 file - promoters70/3438171
atttaaataaa

SEQ ID NO: 85853 - DNA, 11 bp, Unknown
  misc_feature (1)..( 11): Result.001 file - promoters70/3438171
atttaaagaca

SEQ ID NO: 85854 - DNA, 11 bp, Unknown
  misc_feature (1)..( 11): Result.001 file - promoters70/3438171
gtttaaaacaa

SEQ ID NO: 85855 - DNA, 7 bp, Unknown
  misc_feature (1)..( 7): Result.001 file - promoters70/3438171
aaaacaa

SEQ ID NO: 85856 - DNA, 7 bp, Unknown
  misc_feature (1)..( 7): Result.001 file - promoters70/3438171
taaacaa

SEQ ID NO: 85857 - DNA, 7 bp, Unknown
  misc_feature (1)..( 7): Result.001 file - promoters70/3438171
aaaacaa

SEQ ID NO: 85858 - DNA, 9 bp, Unknown
  misc_feature (1)..( 9): Result.001 file - promoters70/3438171
atataaata

SEQ ID NO: 85859 - DNA, 9 bp, Unknown
  misc_feature (1)..( 9): Result.001 file - promoters70/3438171
ttataaata

SEQ ID NO: 85860 - DNA, 9 bp, Unknown
  misc_feature (1)..( 9): Result.001 file - promoters70/3438194
atataagtg

SEQ ID NO: 85861 - DNA, 9 bp, Unknown
  misc_feature (1)..( 9): Result.001 file - promoters70/3438194
aaaatagag

SEQ ID NO: 85862 - DNA, 9 bp, Unknown
  misc_feature (1)..( 9): Result.001 file - promoters70/3438194
caaatagtc

SEQ ID NO: 85863 - DNA, 9 bp, Unknown
  misc_feature (1)..( 9): Result.001 file - promoters70/3438194
gaaacagag

SEQ ID NO: 85864 - DNA, 9 bp, Unknown
  misc_feature (1)..( 9): Result.001 file - promoters70/3438194
gaagcagag

SEQ ID NO: 85865 - DNA, 9 bp, Unknown
  misc_feature (1)..( 9): Result.001 file - promoters70/3438236
gaagcaact

SEQ ID NO: 85866 - DNA, 12 bp, Unknown
  misc_feature (1)..( 12): Result.001 file - promoters70/3438236
tatttgattgaa

SEQ ID NO: 85867 - DNA, 12 bp, Unknown
  misc_feature (1)..( 12): Result.001 file - promoters70/3438236
aaggtgaatgat

SEQ ID NO: 85868 - DNA, 12 bp, Unknown
  misc_feature (1)..( 12): Result.001 file - promoters70/3438236
taattgcttgca

SEQ ID NO: 85869 - DNA, 12 bp, Unknown
  misc_feature (1)..( 12): Result.001 file - promoters70/3438236
catttaattaga

SEQ ID NO: 85870 - DNA, 12 bp, Unknown
  misc_feature (1)..( 12): Result.001 file - promoters70/3438236
catataagtaag

SEQ ID NO: 85871 - DNA, 12 bp, Unknown
  misc_feature (1)..( 12): Result.001 file - promoters70/3438236
gctgctattgct

SEQ ID NO: 85872 - DNA, 14 bp, Unknown
  misc_feature (1)..( 14): Result.001 file - promoters70/3438236
taagtcttaagcac

SEQ ID NO: 85873 - DNA, 14 bp, Unknown
  misc_feature (1)..( 14): Result.001 file - promoters70/3438236
aatctcttaaaacc

SEQ ID NO: 85874 - DNA, 14 bp, Unknown
  misc_feature (1)..( 14): Result.001 file - promoters70/3438236
aatcccttaaaccc

SEQ ID NO: 85875 - DNA, 14 bp, Unknown
  misc_feature (1)..( 14): Result.001 file - promoters70/3438236
cgttatataaatcc

SEQ ID NO: 85876 - DNA, 14 bp, Unknown
  misc_feature (1)..( 14): Result.001 file - promoters70/3438236
ttatttatgaatcc

SEQ ID NO: 85877 - DNA, 14 bp, Unknown
  misc_feature (1)..( 14): Result.001 file - promoters70/3438236
acccttatattctt

SEQ ID NO: 85878 - DNA, 13 bp, Unknown
  misc_feature (1)..( 13): Result.001 file - promoters70/3438236
acactttttgttt

SEQ ID NO: 85879 - DNA, 13 bp, Unknown
  misc_feature (1)..( 13): Result.001 file - promoters70/3438236
gagcattttgttt

SEQ ID NO: 85880 - DNA, 13 bp, Unknown
  misc_feature (1)..( 13): Result.001 file - promoters70/3438236
gggctttttgatg

SEQ ID NO: 85881 - DNA, 13 bp, Unknown
  misc_feature (1)..( 13): Result.001 file - promoters70/3438236
gcgcttttccagt

SEQ ID NO: 85882 - DNA, 13 bp, Unknown
  misc_feature (1)..( 13): Result.001 file - promoters70/3438236
ttggtttttacaa

SEQ ID NO: 85883 - DNA, 13 bp, Unknown
  misc_feature (1)..( 13): Result.001 file - promoters70/3438512
agccatattgatt

SEQ ID NO: 85884 - DNA, 12 bp, Unknown
  misc_feature (1)..( 12): Result.001 file - promoters70/3438512
tttgcttacaat

SEQ ID NO: 85885 - DNA, 12 bp, Unknown
  misc_feature (1)..( 12): Result.001 file - promoters70/3438512
gttgtttatata

SEQ ID NO: 85886 - DNA, 12 bp, Unknown
  misc_feature (1)..( 12): Result.001 file - promoters70/3438512
tttgctgatgtt

SEQ ID NO: 85887 - DNA, 12 bp, Unknown
  misc_feature (1)..( 12): Result.001 file - promoters70/3438512
catgtttaatct

SEQ ID NO: 85888 - DNA, 12 bp, Unknown
  misc_feature (1)..( 12): Result.001 file - promoters70/3438512
gtagtttactct

SEQ ID NO: 85889 - DNA, 12 bp, Unknown
  misc_feature (1)..( 12): Result.001 file - promoters70/3438512
tgagttcataat

SEQ ID NO: 85890 - DNA, 8 bp, Unknown
  misc_feature (1)..( 8): Result.001 file - promoters70/3438512
caataaac

SEQ ID NO: 85891 - DNA, 8 bp, Unknown
  misc_feature (1)..( 8): Result.001 file - promoters70/3438512
aaataaaa

SEQ ID NO: 85892 - DNA, 8 bp, Unknown
  misc_feature (1)..( 8): Result.001 file - promoters70/3438512
caaaaaat

SEQ ID NO: 85893 - DNA, 8 bp, Unknown
  misc_feature (1)..( 8): Result.001 file - promoters70/3438512
gaaaaaaa

SEQ ID NO: 85894 - DNA, 9 bp, Unknown
  misc_feature (1)..( 9): Result.001 file - promoters70/3438512
caaaacaat

SEQ ID NO: 85895 - DNA, 9 bp, Unknown
  misc_feature (1)..( 9): Result.001 file - promoters70/3438512
caaataaca

SEQ ID NO: 85896 - DNA, 10 bp, Unknown
  misc_feature (1)..( 10): Result.001 file - promoters70/3438512
tttgtttgtt

SEQ ID NO: 85897 - DNA, 10 bp, Unknown
  misc_feature (1)..( 10): Result.001 file - promoters70/3438512
aatgtttgag

SEQ ID NO: 85898 - DNA, 10 bp, Unknown
  misc_feature (1)..( 10): Result.001 file - promoters70/3438512
tttattttcc

SEQ ID NO: 85899 - DNA, 10 bp, Unknown
  misc_feature (1)..( 10): Result.001 file - promoters70/3438512
tttattttta

SEQ ID NO: 85900 - DNA, 10 bp, Unknown
  misc_feature (1)..( 10): Result.001 file - promoters70/3438512
aatgtttgct

SEQ ID NO: 85901 - DNA, 10 bp, Unknown
  misc_feature (1)..( 10): Result.001 file - promoters70/3438512
aatgtgtgag

SEQ ID NO: 85902 - DNA, 13 bp, Unknown
  misc_feature (1)..( 13): Result.001 file - promoters70/3438512
atcggagaatatc

SEQ ID NO: 85903 - DNA, 13 bp, Unknown
  misc_feature (1)..( 13): Result.001 file - promoters70/3438512
tgacttaaatatc

SEQ ID NO: 85904 - DNA, 13 bp, Unknown
  misc_feature (1)..( 13): Result.001 file - promoters70/3438512
ttgttagaaaatc

SEQ ID NO: 85905 - DNA, 13 bp, Unknown
  misc_feature (1)..( 13): Result.001 file - promoters70/3438512
ctagaagaaaaaa

SEQ ID NO: 85906 - DNA, 13 bp, Unknown
  misc_feature (1)..( 13): Result.001 file - promoters70/3438512
gaagaagaaagac

SEQ ID NO: 85907 - DNA, 13 bp, Unknown
  misc_feature (1)..( 13): Result.001 file - promoters70/3438632
caagaagaaaaaa

SEQ ID NO: 85908 - DNA, 13 bp, Unknown
  misc_feature (1)..( 13): Result.001 file - promoters70/3438632
ataggcccaacaa

SEQ ID NO: 85909 - DNA, 13 bp, Unknown
  misc_feature (1)..( 13): Result.001 file - promoters70/3438632
aaaggcccaataa

SEQ ID NO: 85910 - DNA, 13 bp, Unknown
  misc_feature (1)..( 13): Result.001 file - promoters70/3438632
agaggcccatata

SEQ ID NO: 85911 - DNA, 13 bp, Unknown
  misc_feature (1)..( 13): Result.001 file - promoters70/3438632
taaagcccaataa

SEQ ID NO: 85912 - DNA, 13 bp, Unknown
  misc_feature (1)..( 13): Result.001 file - promoters70/3438632
agaggcccattta

SEQ ID NO: 85913 - DNA, 13 bp, Unknown
  misc_feature (1)..( 13): Result.001 file - promoters70/3438632
ggcaatttgaatg

SEQ ID NO: 85914 - DNA, 13 bp, Unknown
  misc_feature (1)..( 13): Result.001 file - promoters70/3438632
ataaatatgaatc

SEQ ID NO: 85915 - DNA, 13 bp, Unknown
  misc_feature (1)..( 13): Result.001 file - promoters70/3438632
tgtattatcaatg

SEQ ID NO: 85916 - DNA, 13 bp, Unknown
  misc_feature (1)..( 13): Result.001 file - promoters70/3438632
ttctttatcatca

SEQ ID NO: 85917 - DNA, 13 bp, Unknown
  misc_feature (1)..( 13): Result.001 file - promoters70/3438648
ttctttatcataa

SEQ ID NO: 85918 - DNA, 9 bp, Unknown
  misc_feature (1)..( 9): Result.001 file - promoters70/3438648
aaaaaatta

SEQ ID NO: 85919 - DNA, 9 bp, Unknown
  misc_feature (1)..( 9): Result.001 file - promoters70/3438648
aaataattc

SEQ ID NO: 85920 - DNA, 9 bp, Unknown
  misc_feature (1)..( 9): Result.001 file - promoters70/3438648
agaaaattc

SEQ ID NO: 85921 - DNA, 9 bp, Unknown
  misc_feature (1)..( 9): Result.001 file - promoters70/3438648
acttaattc

SEQ ID NO: 85922 - DNA, 9 bp, Unknown
  misc_feature (1)..( 9): Result.001 file - promoters70/3438648
tatattagt

SEQ ID NO: 85923 - DNA, 9 bp, Unknown
  misc_feature (1)..( 9): Result.001 file - promoters70/3438648
catatgagt

SEQ ID NO: 85924 - DNA, 9 bp, Unknown
  misc_feature (1)..( 9): Result.001 file - promoters70/3438648
aatatgatt

SEQ ID NO: 85925 - DNA, 9 bp, Unknown
  misc_feature (1)..( 9): Result.001 file - promoters70/3438648
aataggatt

SEQ ID NO: 85926 - DNA, 8 bp, Unknown
  misc_feature (1)..( 8): Result.001 file - promoters70/3438648
taatttac

SEQ ID NO: 85927 - DNA, 8 bp, Unknown
  misc_feature (1)..( 8): Result.001 file - promoters70/3438648
aaatttat

SEQ ID NO: 85928 - DNA, 8 bp, Unknown
  misc_feature (1)..( 8): Result.001 file - promoters70/3438648
aaaattac

SEQ ID NO: 85929 - DNA, 8 bp, Unknown
  misc_feature (1)..( 8): Result.001 file - promoters70/3438648
aaaaatac

SEQ ID NO: 85930 - DNA, 9 bp, Unknown
  misc_feature (1)..( 9): Result.001 file - promoters70/3438648
gaaaaaaat

SEQ ID NO: 85931 - DNA, 9 bp, Unknown
  misc_feature (1)..( 9): Result.001 file - promoters70/3438648
gaagaaaac

SEQ ID NO: 85932 - DNA, 9 bp, Unknown
  misc_feature (1)..( 9): Result.001 file - promoters70/3438648
taaaaaatt

SEQ ID NO: 85933 - DNA, 9 bp, Unknown
  misc_feature (1)..( 9): Result.001 file - promoters70/3438648
aatacaaac

SEQ ID NO: 85934 - DNA, 9 bp, Unknown
  misc_feature (1)..( 9): Result.001 file - promoters70/3438648
tataaaaac

SEQ ID NO: 85935 - DNA, 9 bp, Unknown
  misc_feature (1)..( 9): Result.001 file - promoters70/3438648
taaaaaaaa

SEQ ID NO: 85936 - DNA, 9 bp, Unknown
  misc_feature (1)..( 9): Result.001 file - promoters70/3438648
gaaaataaa

SEQ ID NO: 85937 - DNA, 9 bp, Unknown
  misc_feature (1)..( 9): Result.001 file - promoters70/3438648
taaaaaaca

SEQ ID NO: 85938 - DNA, 9 bp, Unknown
  misc_feature (1)..( 9): Result.001 file - promoters70/3438648
gaaaataca

SEQ ID NO: 85939 - DNA, 11 bp, Unknown
  misc_feature (1)..( 11): Result.001 file - promoters70/3438648
ttgaaaattta

SEQ ID NO: 85940 - DNA, 11 bp, Unknown
  misc_feature (1)..( 11): Result.001 file - promoters70/3438648
ttggaaagagc

SEQ ID NO: 85941 - DNA, 11 bp, Unknown
  misc_feature (1)..( 11): Result.001 file - promoters70/3438648
atgaaaattac

SEQ ID NO: 85942 - DNA, 11 bp, Unknown
  misc_feature (1)..( 11): Result.001 file - promoters70/3438648
ggaaaaaatac

SEQ ID NO: 85943 - DNA, 10 bp, Unknown
  misc_feature (1)..( 10): Result.001 file - promoters70/3438648
aaatacaaac

SEQ ID NO: 85944 - DNA, 10 bp, Unknown
  misc_feature (1)..( 10): Result.001 file - promoters70/3438648
aaacacaaac

SEQ ID NO: 85945 - DNA, 10 bp, Unknown
  misc_feature (1)..( 10): Result.001 file - promoters70/3438648
ttataaaaaa

SEQ ID NO: 85946 - DNA, 10 bp, Unknown
  misc_feature (1)..( 10): Result.001 file - promoters70/3438734
ttataaaaac

SEQ ID NO: 85947 - DNA, 11 bp, Unknown
  misc_feature (1)..( 11): Result.001 file - promoters70/3438734
gttagattttg

SEQ ID NO: 85948 - DNA, 11 bp, Unknown
  misc_feature (1)..( 11): Result.001 file - promoters70/3438734
gtttgatcatg

SEQ ID NO: 85949 - DNA, 11 bp, Unknown
  misc_feature (1)..( 11): Result.001 file - promoters70/3438946
tgttgatgatg

SEQ ID NO: 85950 - DNA, 9 bp, Unknown
  misc_feature (1)..( 9): Result.001 file - promoters70/3438946
ctttataat

SEQ ID NO: 85951 - DNA, 9 bp, Unknown
  misc_feature (1)..( 9): Result.001 file - promoters70/3438946
cattaaaat

SEQ ID NO: 85952 - DNA, 10 bp, Unknown
  misc_feature (1)..( 10): Result.001 file - promoters70/3439364
acttcataga

SEQ ID NO: 85953 - DNA, 14 bp, Unknown
  misc_feature (1)..( 14): Result.001 file - promoters70/3439364
ttttttttaacaaa

SEQ ID NO: 85954 - DNA, 14 bp, Unknown
  misc_feature (1)..( 14): Result.001 file - promoters70/3439364
gtgattttaaaaaa

SEQ ID NO: 85955 - DNA, 14 bp, Unknown
  misc_feature (1)..( 14): Result.001 file - promoters70/3439364
atatttttataaat

SEQ ID NO: 85956 - DNA, 14 bp, Unknown
  misc_feature (1)..( 14): Result.001 file - promoters70/3439364
atatatttaatcag

SEQ ID NO: 85957 - DNA, 7 bp, Unknown
  misc_feature (1)..( 7): Result.001 file - promoters70/3439364
ttaaatt

SEQ ID NO: 85958 - DNA, 7 bp, Unknown
  misc_feature (1)..( 7): Result.001 file - promoters70/3439364
ttatatt

SEQ ID NO: 85959 - DNA, 7 bp, Unknown
  misc_feature (1)..( 7): Result.001 file - promoters70/3439364
ttaaatg

SEQ ID NO: 85960 - DNA, 13 bp, Unknown
  misc_feature (1)..( 13): Result.001 file - promoters70/3439364
atctgtttttctt

SEQ ID NO: 85961 - DNA, 13 bp, Unknown
  misc_feature (1)..( 13): Result.001 file - promoters70/3439364
ttttgtatttatt

SEQ ID NO: 85962 - DNA, 13 bp, Unknown
  misc_feature (1)..( 13): Result.001 file - promoters70/3439364
ttttgaattcatt

SEQ ID NO: 85963 - DNA, 12 bp, Unknown
  misc_feature (1)..( 12): Result.001 file - promoters70/3439364
aatagtattttt

SEQ ID NO: 85964 - DNA, 12 bp, Unknown
  misc_feature (1)..( 12): Result.001 file - promoters70/3439364
acacatatattt

SEQ ID NO: 85965 - DNA, 12 bp, Unknown
  misc_feature (1)..( 12): Result.001 file - promoters70/3439364
acacagatatta

SEQ ID NO: 85966 - DNA, 11 bp, Unknown
  misc_feature (1)..( 11): Result.001 file - promoters70/3439364
tatataaactc

SEQ ID NO: 85967 - DNA, 11 bp, Unknown
  misc_feature (1)..( 11): Result.001 file - promoters70/3439364
tatatataagt

SEQ ID NO: 85968 - DNA, 11 bp, Unknown
  misc_feature (1)..( 11): Result.001 file - promoters70/3439364
tatatatactc

SEQ ID NO: 85969 - DNA, 9 bp, Unknown
  misc_feature (1)..( 9): Result.001 file - promoters70/3439364
gtatttaga

SEQ ID NO: 85970 - DNA, 9 bp, Unknown
  misc_feature (1)..( 9): Result.001 file - promoters70/3439364
atatttaat

SEQ ID NO: 85971 - DNA, 9 bp, Unknown
  misc_feature (1)..( 9): Result.001 file - promoters70/3439364
atattttta

SEQ ID NO: 85972 - DNA, 8 bp, Unknown
  misc_feature (1)..( 8): Result.001 file - promoters70/3439364
cacagttt

SEQ ID NO: 85973 - DNA, 8 bp, Unknown
  misc_feature (1)..( 8): Result.001 file - promoters70/3439364
aacagttt

SEQ ID NO: 85974 - DNA, 8 bp, Unknown
  misc_feature (1)..( 8): Result.001 file - promoters70/3439364
aacagtaa

SEQ ID NO: 85975 - DNA, 11 bp, Unknown
  misc_feature (1)..( 11): Result.001 file - promoters70/3439364
aaaaaaaaaat

SEQ ID NO: 85976 - DNA, 11 bp, Unknown
  misc_feature (1)..( 11): Result.001 file - promoters70/3439364
aaaaaaagaat

SEQ ID NO: 85977 - DNA, 11 bp, Unknown
  misc_feature (1)..( 11): Result.001 file - promoters70/3439364
gaatgaagaat

SEQ ID NO: 85978 - DNA, 13 bp, Unknown
  misc_feature (1)..( 13): Result.001 file - promoters70/3439364
aatagaatagtat

SEQ ID NO: 85979 - DNA, 13 bp, Unknown
  misc_feature (1)..( 13): Result.001 file - promoters70/3439364
acacagatattat

SEQ ID NO: 85980 - DNA, 13 bp, Unknown
  misc_feature (1)..( 13): Result.001 file - promoters70/3439364
acacatatatttc

SEQ ID NO: 85981 - DNA, 8 bp, Unknown
  misc_feature (1)..( 8): Result.001 file - promoters70/3439364
aataaaaa

SEQ ID NO: 85982 - DNA, 8 bp, Unknown
  misc_feature (1)..( 8): Result.001 file - promoters70/3439364
aattaaaa

SEQ ID NO: 85983 - DNA, 8 bp, Unknown
  misc_feature (1)..( 8): Result.001 file - promoters70/3439416
tataaaat

SEQ ID NO: 85984 - DNA, 15 bp, Unknown
  misc_feature (1)..( 15): Result.001 file - promoters70/3439416
gtagaagaaagaaac

SEQ ID NO: 85985 - DNA, 15 bp, Unknown
  misc_feature (1)..( 15): Result.001 file - promoters70/3439416
gagggagagagagag

SEQ ID NO: 85986 - DNA, 15 bp, Unknown
  misc_feature (1)..( 15): Result.001 file - promoters70/3439416
gattttgaaagaagg

SEQ ID NO: 85987 - DNA, 15 bp, Unknown
  misc_feature (1)..( 15): Result.001 file - promoters70/3439416
caagaagaaaaaaat

SEQ ID NO: 85988 - DNA, 15 bp, Unknown
  misc_feature (1)..( 15): Result.001 file - promoters70/3439416
cttagagacaaagta

SEQ ID NO: 85989 - DNA, 15 bp, Unknown
  misc_feature (1)..( 15): Result.001 file - promoters70/3439472
aaatggtaaataatt

SEQ ID NO: 85990 - DNA, 14 bp, Unknown
  misc_feature (1)..( 14): Result.001 file - promoters70/3439472
aaccctaattatct

SEQ ID NO: 85991 - DNA, 14 bp, Unknown
  misc_feature (1)..( 14): Result.001 file - promoters70/3439472
gtgattaattaatc

SEQ ID NO: 85992 - DNA, 14 bp, Unknown
  misc_feature (1)..( 14): Result.001 file - promoters70/3439472
ttttataaatattt

SEQ ID NO: 85993 - DNA, 14 bp, Unknown
  misc_feature (1)..( 14): Result.001 file - promoters70/3439472
attaataaattttg

SEQ ID NO: 85994 - DNA, 14 bp, Unknown
  misc_feature (1)..( 14): Result.001 file - promoters70/3439472
aataataactcttt

SEQ ID NO: 85995 - DNA, 14 bp, Unknown
  misc_feature (1)..( 14): Result.001 file - promoters70/3439472
tcaattaatctttt

SEQ ID NO: 85996 - DNA, 16 bp, Unknown
  misc_feature (1)..( 16): Result.001 file - promoters70/3439472
acaaatttttactttt

SEQ ID NO: 85997 - DNA, 16 bp, Unknown
  misc_feature (1)..( 16): Result.001 file - promoters70/3439472
tcaaacttttattttt

SEQ ID NO: 85998 - DNA, 16 bp, Unknown
  misc_feature (1)..( 16): Result.001 file - promoters70/3439472
ttaaatattttataaa

SEQ ID NO: 85999 - DNA, 16 bp, Unknown
  misc_feature (1)..( 16): Result.001 file - promoters70/3439472
gtttattgttacaaat

SEQ ID NO: 86000 - DNA, 16 bp, Unknown
  misc_feature (1)..( 16): Result.001 file - promoters70/3439472
acaagtttcctctacc

SEQ ID NO: 86001 - DNA, 16 bp, Unknown
  misc_feature (1)..( 16): Result.001 file - promoters70/3439472
aaaaagtttttgtaat

SEQ ID NO: 86002 - DNA, 12 bp, Unknown
  misc_feature (1)..( 12): Result.001 file - promoters70/3439472
agaaacaaagta

SEQ ID NO: 86003 - DNA, 12 bp, Unknown
  misc_feature (1)..( 12): Result.001 file - promoters70/3439472
cgaaccaatcag

SEQ ID NO: 86004 - DNA, 12 bp, Unknown
  misc_feature (1)..( 12): Result.001 file - promoters70/3439472
agaaaaaaaaaa

SEQ ID NO: 86005 - DNA, 12 bp, Unknown
  misc_feature (1)..( 12): Result.001 file - promoters70/3439472
agaaagaaataa

SEQ ID NO: 86006 - DNA, 12 bp, Unknown
  misc_feature (1)..( 12): Result.001 file - promoters70/3439472
tcaaaaaattat

SEQ ID NO: 86007 - DNA, 12 bp, Unknown
  misc_feature (1)..( 12): Result.001 file - promoters70/3439472
ataaatattcaa

SEQ ID NO: 86008 - DNA, 16 bp, Unknown
  misc_feature (1)..( 16): Result.001 file - promoters70/3439472
acataaattttttata

SEQ ID NO: 86009 - DNA, 16 bp, Unknown
  misc_feature (1)..( 16): Result.001 file - promoters70/3439472
tgtataattttatata

SEQ ID NO: 86010 - DNA, 16 bp, Unknown
  misc_feature (1)..( 16): Result.001 file - promoters70/3439472
tcggtcatttttggat

SEQ ID NO: 86011 - DNA, 16 bp, Unknown
  misc_feature (1)..( 16): Result.001 file - promoters70/3439472
gacctaagtttaagtt

SEQ ID NO: 86012 - DNA, 16 bp, Unknown
  misc_feature (1)..( 16): Result.001 file - promoters70/3439472
gttcaaactttcatct

SEQ ID NO: 86013 - DNA, 16 bp, Unknown
  misc_feature (1)..( 16): Result.001 file - promoters70/3439641
tacatcagttttaaag

SEQ ID NO: 86014 - DNA, 12 bp, Unknown
  misc_feature (1)..( 12): Result.001 file - promoters70/3439641
tgcatacgtttt

SEQ ID NO: 86015 - DNA, 12 bp, Unknown
  misc_feature (1)..( 12): Result.001 file - promoters70/3439641
aatcgtcgtttt

SEQ ID NO: 86016 - DNA, 12 bp, Unknown
  misc_feature (1)..( 12): Result.001 file - promoters70/3439641
gaaatatgtttc

SEQ ID NO: 86017 - DNA, 12 bp, Unknown
  misc_feature (1)..( 12): Result.001 file - promoters70/3439641
gaagtatgtgtt

SEQ ID NO: 86018 - DNA, 10 bp, Unknown
  misc_feature (1)..( 10): Result.001 file - promoters70/3439641
aaaaacatta

SEQ ID NO: 86019 - DNA, 10 bp, Unknown
  misc_feature (1)..( 10): Result.001 file - promoters70/3439641
aaagacaaag

SEQ ID NO: 86020 - DNA, 10 bp, Unknown
  misc_feature (1)..( 10): Result.001 file - promoters70/3439641
gaagacgaag

SEQ ID NO: 86021 - DNA, 9 bp, Unknown
  misc_feature (1)..( 9): Result.001 file - promoters70/3439641
gtccaaatt

SEQ ID NO: 86022 - DNA, 9 bp, Unknown
  misc_feature (1)..( 9): Result.001 file - promoters70/3439641
tggcaaatt

SEQ ID NO: 86023 - DNA, 9 bp, Unknown
  misc_feature (1)..( 9): Result.001 file - promoters70/3439641
gtccatatt

SEQ ID NO: 86024 - DNA, 10 bp, Unknown
  misc_feature (1)..( 10): Result.001 file - promoters70/3439641
gcccatattg

SEQ ID NO: 86025 - DNA, 10 bp, Unknown
  misc_feature (1)..( 10): Result.001 file - promoters70/3439641
gcccattaag

SEQ ID NO: 86026 - DNA, 10 bp, Unknown
  misc_feature (1)..( 10): Result.001 file - promoters70/3439641
gcccataaag

SEQ ID NO: 86027 - DNA, 11 bp, Unknown
  misc_feature (1)..( 11): Result.001 file - promoters70/3439641
ttttgtttcgt

SEQ ID NO: 86028 - DNA, 11 bp, Unknown
  misc_feature (1)..( 11): Result.001 file - promoters70/3439641
ttttgattcgt

SEQ ID NO: 86029 - DNA, 11 bp, Unknown
  misc_feature (1)..( 11): Result.001 file - promoters70/3439641
gtttgcttcga

SEQ ID NO: 86030 - DNA, 8 bp, Unknown
  misc_feature (1)..( 8): Result.001 file - promoters70/3439641
tatttcat

SEQ ID NO: 86031 - DNA, 8 bp, Unknown
  misc_feature (1)..( 8): Result.001 file - promoters70/3439641
tatttcat

SEQ ID NO: 86032 - DNA, 8 bp, Unknown
  misc_feature (1)..( 8): Result.001 file - promoters70/3439641
tatatcag

SEQ ID NO: 86033 - DNA, 7 bp, Unknown
  misc_feature (1)..( 7): Result.001 file - promoters70/3439641
aaatttt

SEQ ID NO: 86034 - DNA, 7 bp, Unknown
  misc_feature (1)..( 7): Result.001 file - promoters70/3439641
taatttt

SEQ ID NO: 86035 - DNA, 8 bp, Unknown
  misc_feature (1)..( 8): Result.001 file - promoters70/3593205
taatgttt

SEQ ID NO: 86036 - DNA, 11 bp, Unknown
  misc_feature (1)..( 11): Result.001 file - promoters70/3593205
aaatattttat

SEQ ID NO: 86037 - DNA, 11 bp, Unknown
  misc_feature (1)..( 11): Result.001 file - promoters70/3593205
acttattttat

SEQ ID NO: 86038 - DNA, 11 bp, Unknown
  misc_feature (1)..( 11): Result.001 file - promoters70/3593205
aactaatttag

SEQ ID NO: 86039 - DNA, 8 bp, Unknown
  misc_feature (1)..( 8): Result.001 file - promoters70/3593205
cctgaaac

SEQ ID NO: 86040 - DNA, 8 bp, Unknown
  misc_feature (1)..( 8): Result.001 file - promoters70/3593205
tatgaaac

SEQ ID NO: 86041 - DNA, 8 bp, Unknown
  misc_feature (1)..( 8): Result.001 file - promoters70/3593205
tatcaaac

SEQ ID NO: 86042 - DNA, 7 bp, Unknown
  misc_feature (1)..( 7): Result.001 file - promoters70/3593205
caaaatt

SEQ ID NO: 86043 - DNA, 7 bp, Unknown
  misc_feature (1)..( 7): Result.001 file - promoters70/3593205
aaaaatt

SEQ ID NO: 86044 - DNA, 8 bp, Unknown
  misc_feature (1)..( 8): Result.001 file - promoters70/3593205
taataatc

SEQ ID NO: 86045 - DNA, 7 bp, Unknown
  misc_feature (1)..( 7): Result.001 file - promoters70/3593205
aaaattc

SEQ ID NO: 86046 - DNA, 7 bp, Unknown
  misc_feature (1)..( 7): Result.001 file - promoters70/3593205
aaaattg

SEQ ID NO: 86047 - DNA, 7 bp, Unknown
  misc_feature (1)..( 7): Result.001 file - promoters70/3593205
caaattg

SEQ ID NO: 86048 - DNA, 7 bp, Unknown
  misc_feature (1)..( 7): Result.001 file - promoters70/3593205
aaacttc

SEQ ID NO: 86049 - DNA, 7 bp, Unknown
  misc_feature (1)..( 7): Result.001 file - promoters70/3593205
aaactta

SEQ ID NO: 86050 - DNA, 7 bp, Unknown
  misc_feature (1)..( 7): Result.001 file - promoters70/3593205
aaatttc

SEQ ID NO: 86051 - DNA, 13 bp, Unknown
  misc_feature (1)..( 13): Result.001 file - promoters70/3593205
aattggatccgaa

SEQ ID NO: 86052 - DNA, 13 bp, Unknown
  misc_feature (1)..( 13): Result.001 file - promoters70/3593205
aattagatttttt

SEQ ID NO: 86053 - DNA, 13 bp, Unknown
  misc_feature (1)..( 13): Result.001 file - promoters70/3593205
tattcgatctttt

SEQ ID NO: 86054 - DNA, 8 bp, Unknown
  misc_feature (1)..( 8): Result.001 file - promoters70/3593205
ttatccga

SEQ ID NO: 86055 - DNA, 8 bp, Unknown
  misc_feature (1)..( 8): Result.001 file - promoters70/3593205
ttatcctt

SEQ ID NO: 86056 - DNA, 8 bp, Unknown
  misc_feature (1)..( 8): Result.001 file - promoters70/3593205
ttattctt

SEQ ID NO: 86057 - DNA, 10 bp, Unknown
  misc_feature (1)..( 10): Result.001 file - promoters70/3593205
ttactttttt

SEQ ID NO: 86058 - DNA, 10 bp, Unknown
  misc_feature (1)..( 10): Result.001 file - promoters70/3593205
ttcgtttttt

SEQ ID NO: 86059 - DNA, 10 bp, Unknown
  misc_feature (1)..( 10): Result.001 file - promoters70/3593205
tacattttat

SEQ ID NO: 86060 - DNA, 8 bp, Unknown
  misc_feature (1)..( 8): Result.001 file - promoters70/3593205
tttataat

SEQ ID NO: 86061 - DNA, 8 bp, Unknown
  misc_feature (1)..( 8): Result.001 file - promoters70/3593205
tttttaat

SEQ ID NO: 86062 - DNA, 8 bp, Unknown
  misc_feature (1)..( 8): Result.001 file - promoters70/3593205
tttaaaat

SEQ ID NO: 86063 - DNA, 8 bp, Unknown
  misc_feature (1)..( 8): Result.001 file - promoters70/3593205
gttagaaa

SEQ ID NO: 86064 - DNA, 8 bp, Unknown
  misc_feature (1)..( 8): Result.001 file - promoters70/3593205
gttaaaaa

SEQ ID NO: 86065 - DNA, 8 bp, Unknown
  misc_feature (1)..( 8): Result.001 file - promoters70/3593205
cttataaa

SEQ ID NO: 86066 - DNA, 7 bp, Unknown
  misc_feature (1)..( 7): Result.001 file - promoters70/3593205
taaaaat

SEQ ID NO: 86067 - DNA, 7 bp, Unknown
  misc_feature (1)..( 7): Result.001 file - promoters70/3593205
taaaaag

SEQ ID NO: 86068 - DNA, 7 bp, Unknown
  misc_feature (1)..( 7): Result.001 file - promoters70/3593230
taataat

SEQ ID NO: 86069 - DNA, 8 bp, Unknown
  misc_feature (1)..( 8): Result.001 file - promoters70/3593230
cacattca

SEQ ID NO: 86070 - DNA, 8 bp, Unknown
  misc_feature (1)..( 8): Result.001 file - promoters70/3593230
gtcattca

SEQ ID NO: 86071 - DNA, 8 bp, Unknown
  misc_feature (1)..( 8): Result.001 file - promoters70/3593230
cacgttct

SEQ ID NO: 86072 - DNA, 8 bp, Unknown
  misc_feature (1)..( 8): Result.001 file - promoters70/3593230
tacatgtt

SEQ ID NO: 86073 - DNA, 8 bp, Unknown
  misc_feature (1)..( 8): Result.001 file - promoters70/3593230
ctttcttg

SEQ ID NO: 86074 - DNA, 8 bp, Unknown
  misc_feature (1)..( 8): Result.001 file - promoters70/3593230
tcttcttg

SEQ ID NO: 86075 - DNA, 8 bp, Unknown
  misc_feature (1)..( 8): Result.001 file - promoters70/3593230
tcttcttt

SEQ ID NO: 86076 - DNA, 7 bp, Unknown
  misc_feature (1)..( 7): Result.001 file - promoters70/3593230
catcaca

SEQ ID NO: 86077 - DNA, 7 bp, Unknown
  misc_feature (1)..( 7): Result.001 file - promoters70/3593230
gatcaca

SEQ ID NO: 86078 - DNA, 7 bp, Unknown
  misc_feature (1)..( 7): Result.001 file - promoters70/3597145
gattaca

SEQ ID NO: 86079 - DNA, 11 bp, Unknown
  misc_feature (1)..( 11): Result.001 file - promoters70/3597145
gaagaggaaga

SEQ ID NO: 86080 - DNA, 11 bp, Unknown
  misc_feature (1)..( 11): Result.001 file - promoters70/3597145
gaagaagaatt

SEQ ID NO: 86081 - DNA, 11 bp, Unknown
  misc_feature (1)..( 11): Result.001 file - promoters70/3597145
tcagaagaaaa

SEQ ID NO: 86082 - DNA, 11 bp, Unknown
  misc_feature (1)..( 11): Result.001 file - promoters70/3597145
gaagacgaaca

SEQ ID NO: 86083 - DNA, 11 bp, Unknown
  misc_feature (1)..( 11): Result.001 file - promoters70/3597145
taagaataaaa

SEQ ID NO: 86084 - DNA, 11 bp, Unknown
  misc_feature (1)..( 11): Result.001 file - promoters70/3597145
cgcgaggacca

SEQ ID NO: 86085 - DNA, 12 bp, Unknown
  misc_feature (1)..( 12): Result.001 file - promoters70/3597145
ctctgagatcgg

SEQ ID NO: 86086 - DNA, 12 bp, Unknown
  misc_feature (1)..( 12): Result.001 file - promoters70/3597145
aaatgaaatcat

SEQ ID NO: 86087 - DNA, 12 bp, Unknown
  misc_feature (1)..( 12): Result.001 file - promoters70/3597145
aaatgaaatttc

SEQ ID NO: 86088 - DNA, 12 bp, Unknown
  misc_feature (1)..( 12): Result.001 file - promoters70/3597145
gagaaaaaacat

SEQ ID NO: 86089 - DNA, 12 bp, Unknown
  misc_feature (1)..( 12): Result.001 file - promoters70/3597145
caattaaaataa

SEQ ID NO: 86090 - DNA, 12 bp, Unknown
  misc_feature (1)..( 12): Result.001 file - promoters70/3597145
gtatgaaacgaa

SEQ ID NO: 86091 - DNA, 12 bp, Unknown
  misc_feature (1)..( 12): Result.001 file - promoters70/3597145
aaatgaatggag

SEQ ID NO: 86092 - DNA, 12 bp, Unknown
  misc_feature (1)..( 12): Result.001 file - promoters70/3597175
tggtgatatttt

SEQ ID NO: 86093 - DNA, 8 bp, Unknown
  misc_feature (1)..( 8): Result.001 file - promoters70/3597175
gctctata

SEQ ID NO: 86094 - DNA, 8 bp, Unknown
  misc_feature (1)..( 8): Result.001 file - promoters70/3597175
gctatata

SEQ ID NO: 86095 - DNA, 8 bp, Unknown
  misc_feature (1)..( 8): Result.001 file - promoters70/4254434
actctatg

SEQ ID NO: 86096 - DNA, 8 bp, Unknown
  misc_feature (1)..( 8): Result.001 file - promoters70/4254434
tttagatt

SEQ ID NO: 86097 - DNA, 8 bp, Unknown
  misc_feature (1)..( 8): Result.001 file - promoters70/4254434
tttagaga

SEQ ID NO: 86098 - DNA, 8 bp, Unknown
  misc_feature (1)..( 8): Result.001 file - promoters70/4254434
attaaatt

SEQ ID NO: 86099 - DNA, 11 bp, Unknown
  misc_feature (1)..( 11): Result.001 file - promoters70/4254434
agatttagata

SEQ ID NO: 86100 - DNA, 11 bp, Unknown
  misc_feature (1)..( 11): Result.001 file - promoters70/4254434
agattttgatt

SEQ ID NO: 86101 - DNA, 11 bp, Unknown
  misc_feature (1)..( 11): Result.001 file - promoters70/4262420
ttcattaaatt

SEQ ID NO: 86102 - DNA, 10 bp, Unknown
  misc_feature (1)..( 10): Result.001 file - promoters70/4262420
cctattggtt

SEQ ID NO: 86103 - DNA, 10 bp, Unknown
  misc_feature (1)..( 10): Result.001 file - promoters70/4262420
tctaatggtt

SEQ ID NO: 86104 - DNA, 10 bp, Unknown
  misc_feature (1)..( 10): Result.001 file - promoters70/4262420
cctattgaca

SEQ ID NO: 86105 - DNA, 6 bp, Unknown
  misc_feature (1)..( 6): Result.001 file - promoters70/4262420
tgggat

SEQ ID NO: 86106 - DNA, 6 bp, Unknown
  misc_feature (1)..( 6): Result.001 file - promoters70/4262420
tgggat

SEQ ID NO: 86107 - DNA, 6 bp, Unknown
  misc_feature (1)..( 6): Result.001 file - promoters70/4262422
tgggat

SEQ ID NO: 86108 - DNA, 9 bp, Unknown
  misc_feature (1)..( 9): Result.001 file - promoters70/4262422
ttgtaattt

SEQ ID NO: 86109 - DNA, 9 bp, Unknown
  misc_feature (1)..( 9): Result.001 file - promoters70/4262422
ttgtagttt

SEQ ID NO: 86110 - DNA, 9 bp, Unknown
  misc_feature (1)..( 9): Result.001 file - promoters70/4262422
ttgtatttt

SEQ ID NO: 86111 - DNA, 7 bp, Unknown
  misc_feature (1)..( 7): Result.001 file - promoters70/4262422
accaaat

SEQ ID NO: 86112 - DNA, 7 bp, Unknown
  misc_feature (1)..( 7): Result.001 file - promoters70/4262422
accaaag

SEQ ID NO: 86113 - DNA, 7 bp, Unknown
  misc_feature (1)..( 7): Result.001 file - promoters70/4262422
gccaaag

SEQ ID NO: 86114 - DNA, 8 bp, Unknown
  misc_feature (1)..( 8): Result.001 file - promoters70/4262422
tagtgtta

SEQ ID NO: 86115 - DNA, 8 bp, Unknown
  misc_feature (1)..( 8): Result.001 file - promoters70/4262422
tagagttc

SEQ ID NO: 86116 - DNA, 8 bp, Unknown
  misc_feature (1)..( 8): Result.001 file - promoters70/4262422
tagtttta

SEQ ID NO: 86117 - DNA, 7 bp, Unknown
  misc_feature (1)..( 7): Result.001 file - promoters70/4262422
gattaga

SEQ ID NO: 86118 - DNA, 7 bp, Unknown
  misc_feature (1)..( 7): Result.001 file - promoters70/4262422
gataaga

SEQ ID NO: 86119 - DNA, 7 bp, Unknown
  misc_feature (1)..( 7): Result.001 file - promoters70/4262422
gataagt

SEQ ID NO: 86120 - DNA, 12 bp, Unknown
  misc_feature (1)..( 12): Result.001 file - promoters70/4262422
taatttcatttg

SEQ ID NO: 86121 - DNA, 12 bp, Unknown
  misc_feature (1)..( 12): Result.001 file - promoters70/4262422
taatttaatttg

SEQ ID NO: 86122 - DNA, 12 bp, Unknown
  misc_feature (1)..( 12): Result.001 file - promoters70/4262428
tggtttaatcat

SEQ ID NO: 86123 - DNA, 8 bp, Unknown
  misc_feature (1)..( 8): Result.001 file - promoters70/4262428
atgttaac

SEQ ID NO: 86124 - DNA, 8 bp, Unknown
  misc_feature (1)..( 8): Result.001 file - promoters70/4262428
atgttaaa

SEQ ID NO: 86125 - DNA, 8 bp, Unknown
  misc_feature (1)..( 8): Result.001 file - promoters70/4262428
ttgttaac

SEQ ID NO: 86126 - DNA, 7 bp, Unknown
  misc_feature (1)..( 7): Result.001 file - promoters70/4262428
attaaat

SEQ ID NO: 86127 - DNA, 7 bp, Unknown
  misc_feature (1)..( 7): Result.001 file - promoters70/4262428
attaaat

SEQ ID NO: 86128 - DNA, 7 bp, Unknown
  misc_feature (1)..( 7): Result.001 file - promoters70/4262428
attaaat

SEQ ID NO: 86129 - DNA, 9 bp, Unknown
  misc_feature (1)..( 9): Result.001 file - promoters70/4262428
ccattaaag

SEQ ID NO: 86130 - DNA, 9 bp, Unknown
  misc_feature (1)..( 9): Result.001 file - promoters70/4262428
ccaataaag

SEQ ID NO: 86131 - DNA, 9 bp, Unknown
  misc_feature (1)..( 9): Result.001 file - promoters70/4262428
taattgaag

SEQ ID NO: 86132 - DNA, 9 bp, Unknown
  misc_feature (1)..( 9): Result.001 file - promoters70/4262428
ttctttctt

SEQ ID NO: 86133 - DNA, 9 bp, Unknown
  misc_feature (1)..( 9): Result.001 file - promoters70/4262428
ttctctctt

SEQ ID NO: 86134 - DNA, 9 bp, Unknown
  misc_feature (1)..( 9): Result.001 file - promoters70/4262428
ttctttgtg

SEQ ID NO: 86135 - DNA, 7 bp, Unknown
  misc_feature (1)..( 7): Result.001 file - promoters70/4262428
tatttaa

SEQ ID NO: 86136 - DNA, 7 bp, Unknown
  misc_feature (1)..( 7): Result.001 file - promoters70/4262428
tatataa

SEQ ID NO: 86137 - DNA, 7 bp, Unknown
  misc_feature (1)..( 7): Result.001 file - promoters70/4262428
aatataa

SEQ ID NO: 86138 - DNA, 9 bp, Unknown
  misc_feature (1)..( 9): Result.001 file - promoters70/4262428
cataaatag

SEQ ID NO: 86139 - DNA, 9 bp, Unknown
  misc_feature (1)..( 9): Result.001 file - promoters70/4262428
tataaatgt

SEQ ID NO: 86140 - DNA, 9 bp, Unknown
  misc_feature (1)..( 9): Result.001 file - promoters70/4267125
aataaaaat

SEQ ID NO: 86141 - DNA, 8 bp, Unknown
  misc_feature (1)..( 8): Result.001 file - promoters70/4267125
cgatttgt

SEQ ID NO: 86142 - DNA, 8 bp, Unknown
  misc_feature (1)..( 8): Result.001 file - promoters70/4267125
ttatttgt

SEQ ID NO: 86143 - DNA, 8 bp, Unknown
  misc_feature (1)..( 8): Result.001 file - promoters70/4270131
ttacttga

SEQ ID NO: 86144 - DNA, 8 bp, Unknown
  misc_feature (1)..( 8): Result.001 file - promoters70/4270131
ttaataac

SEQ ID NO: 86145 - DNA, 8 bp, Unknown
  misc_feature (1)..( 8): Result.001 file - promoters70/4270131
ttaataac

SEQ ID NO: 86146 - DNA, 8 bp, Unknown
  misc_feature (1)..( 8): Result.001 file - promoters70/4281662
ataataat

SEQ ID NO: 86147 - DNA, 10 bp, Unknown
  misc_feature (1)..( 10): Result.001 file - promoters70/4281662
actttttaaa

SEQ ID NO: 86148 - DNA, 10 bp, Unknown
  misc_feature (1)..( 10): Result.001 file - promoters70/4281662
actttataat

SEQ ID NO: 86149 - DNA, 10 bp, Unknown
  misc_feature (1)..( 10): Result.001 file - promoters70/4281662
acattaaaat

SEQ ID NO: 86150 - DNA, 10 bp, Unknown
  misc_feature (1)..( 10): Result.001 file - promoters70/4281662
acttcataga

SEQ ID NO: 86151 - DNA, 8 bp, Unknown
  misc_feature (1)..( 8): Result.001 file - promoters70/4281662
aagataat

SEQ ID NO: 86152 - DNA, 8 bp, Unknown
  misc_feature (1)..( 8): Result.001 file - promoters70/4281662
aagatagt

SEQ ID NO: 86153 - DNA, 8 bp, Unknown
  misc_feature (1)..( 8): Result.001 file - promoters70/4281662
aagaaagt

SEQ ID NO: 86154 - DNA, 8 bp, Unknown
  misc_feature (1)..( 8): Result.001 file - promoters70/4281662
attttgtg

SEQ ID NO: 86155 - DNA, 8 bp, Unknown
  misc_feature (1)..( 8): Result.001 file - promoters70/4281662
attatgtc

SEQ ID NO: 86156 - DNA, 8 bp, Unknown
  misc_feature (1)..( 8): Result.001 file - promoters70/4281662
cttatgtc

SEQ ID NO: 86157 - DNA, 9 bp, Unknown
  misc_feature (1)..( 9): Result.001 file - promoters70/4281662
ttttaaaat

SEQ ID NO: 86158 - DNA, 9 bp, Unknown
  misc_feature (1)..( 9): Result.001 file - promoters70/4281662
cattaaaat

SEQ ID NO: 86159 - DNA, 9 bp, Unknown
  misc_feature (1)..( 9): Result.001 file - promoters70/4281662
ctttataat

SEQ ID NO: 86160 - DNA, 10 bp, Unknown
  misc_feature (1)..( 10): Result.001 file - promoters70/4281662
acttcataga

SEQ ID NO: 86161 - DNA, 7 bp, Unknown
  misc_feature (1)..( 7): Result.001 file - promoters70/4281662
tccattg

SEQ ID NO: 86162 - DNA, 7 bp, Unknown
  misc_feature (1)..( 7): Result.001 file - promoters70/4281662
tccattt

SEQ ID NO: 86163 - DNA, 7 bp, Unknown
  misc_feature (1)..( 7): Result.001 file - promoters70/4281711
accattt

SEQ ID NO: 86164 - DNA, 7 bp, Unknown
  misc_feature (1)..( 7): Result.001 file - promoters70/4281711
taataaa

SEQ ID NO: 86165 - DNA, 7 bp, Unknown
  misc_feature (1)..( 7): Result.001 file - promoters70/4281711
gaataaa

SEQ ID NO: 86166 - DNA, 7 bp, Unknown
  misc_feature (1)..( 7): Result.001 file - promoters70/4281744
gaagaaa

SEQ ID NO: 86167 - DNA, 7 bp, Unknown
  misc_feature (1)..( 7): Result.001 file - promoters70/4281744
aatttac

SEQ ID NO: 86168 - DNA, 7 bp, Unknown
  misc_feature (1)..( 7): Result.001 file - promoters70/4281744
aatctac

SEQ ID NO: 86169 - DNA, 7 bp, Unknown
  misc_feature (1)..( 7): Result.001 file - promoters70/4281744
aatttat

SEQ ID NO: 86170 - DNA, 11 bp, Unknown
  misc_feature (1)..( 11): Result.001 file - promoters70/4281744
aaaatagtaaa

SEQ ID NO: 86171 - DNA, 11 bp, Unknown
  misc_feature (1)..( 11): Result.001 file - promoters70/4281744
ataattgtata

SEQ ID NO: 86172 - DNA, 11 bp, Unknown
  misc_feature (1)..( 11): Result.001 file - promoters70/4281744
atatttgtata

SEQ ID NO: 86173 - DNA, 10 bp, Unknown
  misc_feature (1)..( 10): Result.001 file - promoters70/4281744
gaaaaagata

SEQ ID NO: 86174 - DNA, 10 bp, Unknown
  misc_feature (1)..( 10): Result.001 file - promoters70/4281744
gaaatagatt

SEQ ID NO: 86175 - DNA, 10 bp, Unknown
  misc_feature (1)..( 10): Result.001 file - promoters70/4281744
ttagtagatt

SEQ ID NO: 86176 - DNA, 10 bp, Unknown
  misc_feature (1)..( 10): Result.001 file - promoters70/4281744
tatataaatt

SEQ ID NO: 86177 - DNA, 8 bp, Unknown
  misc_feature (1)..( 8): Result.001 file - promoters70/4281744
aaggtata

SEQ ID NO: 86178 - DNA, 8 bp, Unknown
  misc_feature (1)..( 8): Result.001 file - promoters70/4281744
aagctata

SEQ ID NO: 86179 - DNA, 8 bp, Unknown
  misc_feature (1)..( 8): Result.001 file - promoters70/4281744
cagcaata

SEQ ID NO: 86180 - DNA, 9 bp, Unknown
  misc_feature (1)..( 9): Result.001 file - promoters70/4281744
ttactaaaa

SEQ ID NO: 86181 - DNA, 9 bp, Unknown
  misc_feature (1)..( 9): Result.001 file - promoters70/4281744
ttattaatt

SEQ ID NO: 86182 - DNA, 9 bp, Unknown
  misc_feature (1)..( 9): Result.001 file - promoters70/4281773
gtataaatt

SEQ ID NO: 86183 - DNA, 11 bp, Unknown
  misc_feature (1)..( 11): Result.001 file - promoters70/4281773
ctgaattggaa

SEQ ID NO: 86184 - DNA, 11 bp, Unknown
  misc_feature (1)..( 11): Result.001 file - promoters70/4281773
atgatttgctt

SEQ ID NO: 86185 - DNA, 11 bp, Unknown
  misc_feature (1)..( 11): Result.001 file - promoters70/4281773
aagaattgacc

SEQ ID NO: 86186 - DNA, 11 bp, Unknown
  misc_feature (1)..( 11): Result.001 file - promoters70/4281773
agtattagctt

SEQ ID NO: 86187 - DNA, 11 bp, Unknown
  misc_feature (1)..( 11): Result.001 file - promoters70/4281925
aagtattgtgg

SEQ ID NO: 86188 - DNA, 11 bp, Unknown
  misc_feature (1)..( 11): Result.001 file - promoters70/4281925
aaattaaaaca

SEQ ID NO: 86189 - DNA, 11 bp, Unknown
  misc_feature (1)..( 11): Result.001 file - promoters70/4281925
aaaataacaca

SEQ ID NO: 86190 - DNA, 11 bp, Unknown
  misc_feature (1)..( 11): Result.001 file - promoters70/4281925
gcaataaaaat

SEQ ID NO: 86191 - DNA, 8 bp, Unknown
  misc_feature (1)..( 8): Result.001 file - promoters70/4281925
taattttt

SEQ ID NO: 86192 - DNA, 8 bp, Unknown
  misc_feature (1)..( 8): Result.001 file - promoters70/4281925
taaatttt

SEQ ID NO: 86193 - DNA, 8 bp, Unknown
  misc_feature (1)..( 8): Result.001 file - promoters70/4281925
aaattttg

SEQ ID NO: 86194 - DNA, 14 bp, Unknown
  misc_feature (1)..( 14): Result.001 file - promoters70/4281925
aatttataaatgta

SEQ ID NO: 86195 - DNA, 14 bp, Unknown
  misc_feature (1)..( 14): Result.001 file - promoters70/4281925
aatttacatatcta

SEQ ID NO: 86196 - DNA, 14 bp, Unknown
  misc_feature (1)..( 14): Result.001 file - promoters70/4281997
attttacttttcat

SEQ ID NO: 86197 - DNA, 6 bp, Unknown
  misc_feature (1)..( 6): Result.001 file - promoters70/4281997
attatc

SEQ ID NO: 86198 - DNA, 6 bp, Unknown
  misc_feature (1)..( 6): Result.001 file - promoters70/4281997
attatc

SEQ ID NO: 86199 - DNA, 6 bp, Unknown
  misc_feature (1)..( 6): Result.001 file - promoters70/4282316
attatc

SEQ ID NO: 86200 - DNA, 7 bp, Unknown
  misc_feature (1)..( 7): Result.001 file - promoters70/4282316
aattatc

SEQ ID NO: 86201 - DNA, 7 bp, Unknown
  misc_feature (1)..( 7): Result.001 file - promoters70/4282316
cattatc

SEQ ID NO: 86202 - DNA, 7 bp, Unknown
  misc_feature (1)..( 7): Result.001 file - promoters70/4282316
cattata

SEQ ID NO: 86203 - DNA, 9 bp, Unknown
  misc_feature (1)..( 9): Result.001 file - promoters70/4282316
aaaagttta

SEQ ID NO: 86204 - DNA, 9 bp, Unknown
  misc_feature (1)..( 9): Result.001 file - promoters70/4282316
aaatgtttt

SEQ ID NO: 86205 - DNA, 9 bp, Unknown
  misc_feature (1)..( 9): Result.001 file - promoters70/4282418
caatatttt

SEQ ID NO: 86206 - DNA, 9 bp, Unknown
  misc_feature (1)..( 9): Result.001 file - promoters70/4282418
aaactaaaa

SEQ ID NO: 86207 - DNA, 9 bp, Unknown
  misc_feature (1)..( 9): Result.001 file - promoters70/4282418
aaaataaaa

SEQ ID NO: 86208 - DNA, 9 bp, Unknown
  misc_feature (1)..( 9): Result.001 file - promoters70/4282503
aaagtaaac

SEQ ID NO: 86209 - DNA, 7 bp, Unknown
  misc_feature (1)..( 7): Result.001 file - promoters70/4282503
taaaatt

SEQ ID NO: 86210 - DNA, 7 bp, Unknown
  misc_feature (1)..( 7): Result.001 file - promoters70/4282503
taaaatc

SEQ ID NO: 86211 - DNA, 7 bp, Unknown
  misc_feature (1)..( 7): Result.001 file - promoters70/4282503
caaaatc

SEQ ID NO: 86212 - DNA, 10 bp, Unknown
  misc_feature (1)..( 10): Result.001 file - promoters70/4282503
tttgaatgcc

SEQ ID NO: 86213 - DNA, 10 bp, Unknown
  misc_feature (1)..( 10): Result.001 file - promoters70/4282503
ttttaataac

SEQ ID NO: 86214 - DNA, 10 bp, Unknown
  misc_feature (1)..( 10): Result.001 file - promoters70/4282503
ttttactaac

SEQ ID NO: 86215 - DNA, 11 bp, Unknown
  misc_feature (1)..( 11): Result.001 file - promoters70/4282503
ccaattatatg

SEQ ID NO: 86216 - DNA, 11 bp, Unknown
  misc_feature (1)..( 11): Result.001 file - promoters70/4282503
tttattaaatg

SEQ ID NO: 86217 - DNA, 11 bp, Unknown
  misc_feature (1)..( 11): Result.001 file - promoters70/4282667
tttactaactt

SEQ ID NO: 86218 - DNA, 8 bp, Unknown
  misc_feature (1)..( 8): Result.001 file - promoters70/4282667
aatgggct

SEQ ID NO: 86219 - DNA, 8 bp, Unknown
  misc_feature (1)..( 8): Result.001 file - promoters70/4282667
aataggcc

SEQ ID NO: 86220 - DNA, 8 bp, Unknown
  misc_feature (1)..( 8): Result.001 file - promoters70/4282667
tatgggcc

SEQ ID NO: 86221 - DNA, 8 bp, Unknown
  misc_feature (1)..( 8): Result.001 file - promoters70/4282667
aatgggcc

SEQ ID NO: 86222 - DNA, 8 bp, Unknown
  misc_feature (1)..( 8): Result.001 file - promoters70/4282667
aatgggtc

SEQ ID NO: 86223 - DNA, 8 bp, Unknown
  misc_feature (1)..( 8): Result.001 file - promoters70/4282667
tttgggcc

SEQ ID NO: 86224 - DNA, 12 bp, Unknown
  misc_feature (1)..( 12): Result.001 file - promoters70/4282667
attgttacaaat

SEQ ID NO: 86225 - DNA, 12 bp, Unknown
  misc_feature (1)..( 12): Result.001 file - promoters70/4282667
atttttactttt

SEQ ID NO: 86226 - DNA, 12 bp, Unknown
  misc_feature (1)..( 12): Result.001 file - promoters70/4282667
tttgttagttca

SEQ ID NO: 86227 - DNA, 12 bp, Unknown
  misc_feature (1)..( 12): Result.001 file - promoters70/4282667
attgataggtgc

SEQ ID NO: 86228 - DNA, 12 bp, Unknown
  misc_feature (1)..( 12): Result.001 file - promoters70/4282667
gactttagtttt

SEQ ID NO: 86229 - DNA, 12 bp, Unknown
  misc_feature (1)..( 12): Result.001 file - promoters70/4282667
tttgtttttgat

SEQ ID NO: 86230 - DNA, 10 bp, Unknown
  misc_feature (1)..( 10): Result.001 file - promoters70/4282667
attcaactat

SEQ ID NO: 86231 - DNA, 10 bp, Unknown
  misc_feature (1)..( 10): Result.001 file - promoters70/4282667
attcaaaaag

SEQ ID NO: 86232 - DNA, 10 bp, Unknown
  misc_feature (1)..( 10): Result.001 file - promoters70/4282667
gttcaaaaaa

SEQ ID NO: 86233 - DNA, 10 bp, Unknown
  misc_feature (1)..( 10): Result.001 file - promoters70/4282667
aaaaaaaaaa

SEQ ID NO: 86234 - DNA, 10 bp, Unknown
  misc_feature (1)..( 10): Result.001 file - promoters70/4282667
gttcgaaaga

SEQ ID NO: 86235 - DNA, 10 bp, Unknown
  misc_feature (1)..( 10): Result.001 file - promoters70/4282788
aaacaaagta

SEQ ID NO: 86236 - DNA, 8 bp, Unknown
  misc_feature (1)..( 8): Result.001 file - promoters70/4282788
gttgcttt

SEQ ID NO: 86237 - DNA, 8 bp, Unknown
  misc_feature (1)..( 8): Result.001 file - promoters70/4282788
tttgattt

SEQ ID NO: 86238 - DNA, 8 bp, Unknown
  misc_feature (1)..( 8): Result.001 file - promoters70/4283003
tttgattg

SEQ ID NO: 86239 - DNA, 11 bp, Unknown
  misc_feature (1)..( 11): Result.001 file - promoters70/4283003
aataatttgta

SEQ ID NO: 86240 - DNA, 11 bp, Unknown
  misc_feature (1)..( 11): Result.001 file - promoters70/4283003
aatattttagg

SEQ ID NO: 86241 - DNA, 11 bp, Unknown
  misc_feature (1)..( 11): Result.001 file - promoters70/4283240
aattattggta

SEQ ID NO: 86242 - DNA, 8 bp, Unknown
  misc_feature (1)..( 8): Result.001 file - promoters70/4283240
tcaagatt

SEQ ID NO: 86243 - DNA, 8 bp, Unknown
  misc_feature (1)..( 8): Result.001 file - promoters70/4283240
tcatgatg

SEQ ID NO: 86244 - DNA, 8 bp, Unknown
  misc_feature (1)..( 8): Result.001 file - promoters70/4283240
acaaaatt

SEQ ID NO: 86245 - DNA, 10 bp, Unknown
  misc_feature (1)..( 10): Result.001 file - promoters70/4283240
gaattgatat

SEQ ID NO: 86246 - DNA, 10 bp, Unknown
  misc_feature (1)..( 10): Result.001 file - promoters70/4283240
aaattgatat

SEQ ID NO: 86247 - DNA, 10 bp, Unknown
  misc_feature (1)..( 10): Result.001 file - promoters70/4283293
aaattgtagg

SEQ ID NO: 86248 - DNA, 8 bp, Unknown
  misc_feature (1)..( 8): Result.001 file - promoters70/4283293
tttctttc

SEQ ID NO: 86249 - DNA, 8 bp, Unknown
  misc_feature (1)..( 8): Result.001 file - promoters70/4283293
tttatttc

SEQ ID NO: 86250 - DNA, 8 bp, Unknown
  misc_feature (1)..( 8): Result.001 file - promoters70/4283293
cttatttt

SEQ ID NO: 86251 - DNA, 7 bp, Unknown
  misc_feature (1)..( 7): Result.001 file - promoters70/4283293
aatttaa

SEQ ID NO: 86252 - DNA, 7 bp, Unknown
  misc_feature (1)..( 7): Result.001 file - promoters70/4283293
tatttaa

SEQ ID NO: 86253 - DNA, 7 bp, Unknown
  misc_feature (1)..( 7): Result.001 file - promoters70/4283297
tatttaa

SEQ ID NO: 86254 - DNA, 13 bp, Unknown
  misc_feature (1)..( 13): Result.001 file - promoters70/4283297
aattaaataaata

SEQ ID NO: 86255 - DNA, 13 bp, Unknown
  misc_feature (1)..( 13): Result.001 file - promoters70/4283297
aataaaaatggaa

SEQ ID NO: 86256 - DNA, 13 bp, Unknown
  misc_feature (1)..( 13): Result.001 file - promoters70/4283338
cataaacatggaa

SEQ ID NO: 86257 - DNA, 7 bp, Unknown
  misc_feature (1)..( 7): Result.001 file - promoters70/4283338
taagcca

SEQ ID NO: 86258 - DNA, 7 bp, Unknown
  misc_feature (1)..( 7): Result.001 file - promoters70/4283338
aaagcca

SEQ ID NO: 86259 - DNA, 7 bp, Unknown
  misc_feature (1)..( 7): Result.001 file - promoters70/4283355
aaagccc

SEQ ID NO: 86260 - DNA, 12 bp, Unknown
  misc_feature (1)..( 12): Result.001 file - promoters70/4283355
ccatcgaattca

SEQ ID NO: 86261 - DNA, 12 bp, Unknown
  misc_feature (1)..( 12): Result.001 file - promoters70/4283355
aaatcaaatcga

SEQ ID NO: 86262 - DNA, 12 bp, Unknown
  misc_feature (1)..( 12): Result.001 file - promoters70/4283355
cagtcaaatata

SEQ ID NO: 86263 - DNA, 12 bp, Unknown
  misc_feature (1)..( 12): Result.001 file - promoters70/4283355
aaaccaaagaaa

SEQ ID NO: 86264 - DNA, 12 bp, Unknown
  misc_feature (1)..( 12): Result.001 file - promoters70/4283355
aagtaaaaaagt

SEQ ID NO: 86265 - DNA, 12 bp, Unknown
  misc_feature (1)..( 12): Result.001 file - promoters70/4283378
tgtacaaggaaa

SEQ ID NO: 86266 - DNA, 8 bp, Unknown
  misc_feature (1)..( 8): Result.001 file - promoters70/4283378
tatataat

SEQ ID NO: 86267 - DNA, 8 bp, Unknown
  misc_feature (1)..( 8): Result.001 file - promoters70/4283378
tatataaa

SEQ ID NO: 86268 - DNA, 8 bp, Unknown
  misc_feature (1)..( 8): Result.001 file - promoters70/4283378
tatataaa

SEQ ID NO: 86269 - DNA, 8 bp, Unknown
  misc_feature (1)..( 8): Result.001 file - promoters70/4283378
tttataaa

SEQ ID NO: 86270 - DNA, 8 bp, Unknown
  misc_feature (1)..( 8): Result.001 file - promoters70/4283378
cctataaa

SEQ ID NO: 86271 - DNA, 10 bp, Unknown
  misc_feature (1)..( 10): Result.001 file - promoters70/4283378
tgaatgtata

SEQ ID NO: 86272 - DNA, 10 bp, Unknown
  misc_feature (1)..( 10): Result.001 file - promoters70/4283378
ataatgtaaa

SEQ ID NO: 86273 - DNA, 10 bp, Unknown
  misc_feature (1)..( 10): Result.001 file - promoters70/4283378
tcgatgtata

SEQ ID NO: 86274 - DNA, 10 bp, Unknown
  misc_feature (1)..( 10): Result.001 file - promoters70/4283378
tgaatgtcaa

SEQ ID NO: 86275 - DNA, 15 bp, Unknown
  misc_feature (1)..( 15): Result.001 file - promoters70/4283378
tatacgttttaaaag

SEQ ID NO: 86276 - DNA, 15 bp, Unknown
  misc_feature (1)..( 15): Result.001 file - promoters70/4283378
aacaatttttaaatt

SEQ ID NO: 86277 - DNA, 15 bp, Unknown
  misc_feature (1)..( 15): Result.001 file - promoters70/4283378
atatctttataagta

SEQ ID NO: 86278 - DNA, 15 bp, Unknown
  misc_feature (1)..( 15): Result.001 file - promoters70/4283378
ctcgcttcataacaa

SEQ ID NO: 86279 - DNA, 15 bp, Unknown
  misc_feature (1)..( 15): Result.001 file - promoters70/4283378
ataactttatgttat

SEQ ID NO: 86280 - DNA, 8 bp, Unknown
  misc_feature (1)..( 8): Result.001 file - promoters70/4283378
aaaaatat

SEQ ID NO: 86281 - DNA, 8 bp, Unknown
  misc_feature (1)..( 8): Result.001 file - promoters70/4283378
aaatatac

SEQ ID NO: 86282 - DNA, 8 bp, Unknown
  misc_feature (1)..( 8): Result.001 file - promoters70/4283378
aaatgtca

SEQ ID NO: 86283 - DNA, 8 bp, Unknown
  misc_feature (1)..( 8): Result.001 file - promoters70/4283378
aaatgtta

SEQ ID NO: 86284 - DNA, 12 bp, Unknown
  misc_feature (1)..( 12): Result.001 file - promoters70/4283378
aaaaatatatac

SEQ ID NO: 86285 - DNA, 12 bp, Unknown
  misc_feature (1)..( 12): Result.001 file - promoters70/4283378
gatagtatatac

SEQ ID NO: 86286 - DNA, 12 bp, Unknown
  misc_feature (1)..( 12): Result.001 file - promoters70/4283378
tttaatatgtac

SEQ ID NO: 86287 - DNA, 12 bp, Unknown
  misc_feature (1)..( 12): Result.001 file - promoters70/4283378
tagaatatgttt

SEQ ID NO: 86288 - DNA, 11 bp, Unknown
  misc_feature (1)..( 11): Result.001 file - promoters70/4283378
ttattttgcga

SEQ ID NO: 86289 - DNA, 11 bp, Unknown
  misc_feature (1)..( 11): Result.001 file - promoters70/4283378
ttaatttcgtt

SEQ ID NO: 86290 - DNA, 11 bp, Unknown
  misc_feature (1)..( 11): Result.001 file - promoters70/4283378
caaatttcaca

SEQ ID NO: 86291 - DNA, 11 bp, Unknown
  misc_feature (1)..( 11): Result.001 file - promoters70/4283378
tacatttaaca

SEQ ID NO: 86292 - DNA, 11 bp, Unknown
  misc_feature (1)..( 11): Result.001 file - promoters70/4283378
gtaatttagta

SEQ ID NO: 86293 - DNA, 8 bp, Unknown
  misc_feature (1)..( 8): Result.001 file - promoters70/4283378
aaatttcc

SEQ ID NO: 86294 - DNA, 8 bp, Unknown
  misc_feature (1)..( 8): Result.001 file - promoters70/4283378
aaattttt

SEQ ID NO: 86295 - DNA, 8 bp, Unknown
  misc_feature (1)..( 8): Result.001 file - promoters70/4283378
taattttg

SEQ ID NO: 86296 - DNA, 9 bp, Unknown
  misc_feature (1)..( 9): Result.001 file - promoters70/4283386
taatctttt

SEQ ID NO: 86297 - DNA, 8 bp, Unknown
  misc_feature (1)..( 8): Result.001 file - promoters70/4283386
gttctatc

SEQ ID NO: 86298 - DNA, 8 bp, Unknown
  misc_feature (1)..( 8): Result.001 file - promoters70/4283386
gttttatt

SEQ ID NO: 86299 - DNA, 8 bp, Unknown
  misc_feature (1)..( 8): Result.001 file - promoters70/4283386
catttatt

SEQ ID NO: 86300 - DNA, 9 bp, Unknown
  misc_feature (1)..( 9): Result.001 file - promoters70/4283386
tttatttta

SEQ ID NO: 86301 - DNA, 9 bp, Unknown
  misc_feature (1)..( 9): Result.001 file - promoters70/4283386
tttctttta

SEQ ID NO: 86302 - DNA, 9 bp, Unknown
  misc_feature (1)..( 9): Result.001 file - promoters70/4577400
cttctctta

SEQ ID NO: 86303 - DNA, 11 bp, Unknown
  misc_feature (1)..( 11): Result.001 file - promoters70/4577400
ccagaattaag

SEQ ID NO: 86304 - DNA, 11 bp, Unknown
  misc_feature (1)..( 11): Result.001 file - promoters70/4577400
ccataattagt

SEQ ID NO: 86305 - DNA, 11 bp, Unknown
  misc_feature (1)..( 11): Result.001 file - promoters70/4608096
atgtaattaag

SEQ ID NO: 86306 - DNA, 10 bp, Unknown
  misc_feature (1)..( 10): Result.001 file - promoters70/4608096
tatatatata

SEQ ID NO: 86307 - DNA, 10 bp, Unknown
  misc_feature (1)..( 10): Result.001 file - promoters70/4608096
tatttatata

SEQ ID NO: 86308 - DNA, 10 bp, Unknown
  misc_feature (1)..( 10): Result.001 file - promoters70/4608096
aataaaaagc

SEQ ID NO: 86309 - DNA, 10 bp, Unknown
  misc_feature (1)..( 10): Result.001 file - promoters70/4608096
tataaaaccc

SEQ ID NO: 86310 - DNA, 10 bp, Unknown
  misc_feature (1)..( 10): Result.001 file - promoters70/4608096
tataaattag

SEQ ID NO: 86311 - DNA, 10 bp, Unknown
  misc_feature (1)..( 10): Result.001 file - promoters70/4608096
tataaaactt

SEQ ID NO: 86312 - DNA, 10 bp, Unknown
  misc_feature (1)..( 10): Result.001 file - promoters70/4608104
tataaagaca

SEQ ID NO: 86313 - DNA, 9 bp, Unknown
  misc_feature (1)..( 9): Result.001 file - promoters70/4608104
actaatagc

SEQ ID NO: 86314 - DNA, 9 bp, Unknown
  misc_feature (1)..( 9): Result.001 file - promoters70/4608104
tttaataga

SEQ ID NO: 86315 - DNA, 9 bp, Unknown
  misc_feature (1)..( 9): Result.001 file - promoters70/4608104
ttttataga

SEQ ID NO: 86316 - DNA, 9 bp, Unknown
  misc_feature (1)..( 9): Result.001 file - promoters70/4608965
cctaacaga

SEQ ID NO: 86317 - DNA, 12 bp, Unknown
  misc_feature (1)..( 12): Result.001 file - promoters70/4608965
ctttataaaacc

SEQ ID NO: 86318 - DNA, 12 bp, Unknown
  misc_feature (1)..( 12): Result.001 file - promoters70/4608965
tcttataaataa

SEQ ID NO: 86319 - DNA, 12 bp, Unknown
  misc_feature (1)..( 12): Result.001 file - promoters70/4608965
ttatataaatcc

SEQ ID NO: 86320 - DNA, 12 bp, Unknown
  misc_feature (1)..( 12): Result.001 file - promoters70/4608965
cactataaaact

SEQ ID NO: 86321 - DNA, 12 bp, Unknown
  misc_feature (1)..( 12): Result.001 file - promoters70/4608965
tcttatatataa

SEQ ID NO: 86322 - DNA, 12 bp, Unknown
  misc_feature (1)..( 12): Result.001 file - promoters70/4608985
atttatgaatcc

SEQ ID NO: 86323 - DNA, 8 bp, Unknown
  misc_feature (1)..( 8): Result.001 file - promoters70/4608985
cccaaaaa

SEQ ID NO: 86324 - DNA, 8 bp, Unknown
  misc_feature (1)..( 8): Result.001 file - promoters70/4608985
tacaaaaa

SEQ ID NO: 86325 - DNA, 8 bp, Unknown
  misc_feature (1)..( 8): Result.001 file - promoters70/4608985
tcctaaaa

SEQ ID NO: 86326 - DNA, 8 bp, Unknown
  misc_feature (1)..( 8): Result.001 file - promoters70/4608985
aacaaaaa

SEQ ID NO: 86327 - DNA, 11 bp, Unknown
  misc_feature (1)..( 11): Result.001 file - promoters70/4608985
aaacagtaaaa

SEQ ID NO: 86328 - DNA, 11 bp, Unknown
  misc_feature (1)..( 11): Result.001 file - promoters70/4608985
aaacaataaaa

SEQ ID NO: 86329 - DNA, 11 bp, Unknown
  misc_feature (1)..( 11): Result.001 file - promoters70/4608985
agataatattt

SEQ ID NO: 86330 - DNA, 11 bp, Unknown
  misc_feature (1)..( 11): Result.001 file - promoters70/4608985
cgtcaaaaaac

SEQ ID NO: 86331 - DNA, 10 bp, Unknown
  misc_feature (1)..( 10): Result.001 file - promoters70/4608985
attaataaag

SEQ ID NO: 86332 - DNA, 10 bp, Unknown
  misc_feature (1)..( 10): Result.001 file - promoters70/4608985
attaatattt

SEQ ID NO: 86333 - DNA, 10 bp, Unknown
  misc_feature (1)..( 10): Result.001 file - promoters70/4608985
gataatattt

SEQ ID NO: 86334 - DNA, 10 bp, Unknown
  misc_feature (1)..( 10): Result.001 file - promoters70/4608985
tttattatag

SEQ ID NO: 86335 - DNA, 10 bp, Unknown
  misc_feature (1)..( 10): Result.001 file - promoters70/4608985
tttattttat

SEQ ID NO: 86336 - DNA, 12 bp, Unknown
  misc_feature (1)..( 12): Result.001 file - promoters70/4608985
taagaaatttcc

SEQ ID NO: 86337 - DNA, 12 bp, Unknown
  misc_feature (1)..( 12): Result.001 file - promoters70/4608985
taaaaaaactaa

SEQ ID NO: 86338 - DNA, 12 bp, Unknown
  misc_feature (1)..( 12): Result.001 file - promoters70/4608985
caagaaaactca

SEQ ID NO: 86339 - DNA, 12 bp, Unknown
  misc_feature (1)..( 12): Result.001 file - promoters70/4608985
taaataactaat

SEQ ID NO: 86340 - DNA, 7 bp, Unknown
  misc_feature (1)..( 7): Result.001 file - promoters70/4608985
taagatt

SEQ ID NO: 86341 - DNA, 7 bp, Unknown
  misc_feature (1)..( 7): Result.001 file - promoters70/4608985
taaaatt

SEQ ID NO: 86342 - DNA, 7 bp, Unknown
  misc_feature (1)..( 7): Result.001 file - promoters70/4608985
taagatc

SEQ ID NO: 86343 - DNA, 7 bp, Unknown
  misc_feature (1)..( 7): Result.001 file - promoters70/4608985
aaaaatt

SEQ ID NO: 86344 - DNA, 7 bp, Unknown
  misc_feature (1)..( 7): Result.001 file - promoters70/4608985
taaaaat

SEQ ID NO: 86345 - DNA, 11 bp, Unknown
  misc_feature (1)..( 11): Result.001 file - promoters70/4608985
caaagacaagt

SEQ ID NO: 86346 - DNA, 11 bp, Unknown
  misc_feature (1)..( 11): Result.001 file - promoters70/4608985
gatagataaga

SEQ ID NO: 86347 - DNA, 11 bp, Unknown
  misc_feature (1)..( 11): Result.001 file - promoters70/4608985
caaaaacaata

SEQ ID NO: 86348 - DNA, 11 bp, Unknown
  misc_feature (1)..( 11): Result.001 file - promoters70/4608985
gggttacaaaa

SEQ ID NO: 86349 - DNA, 14 bp, Unknown
  misc_feature (1)..( 14): Result.001 file - promoters70/4608985
taaataaatttttg

SEQ ID NO: 86350 - DNA, 14 bp, Unknown
  misc_feature (1)..( 14): Result.001 file - promoters70/4608985
caaacaaatgtttg

SEQ ID NO: 86351 - DNA, 14 bp, Unknown
  misc_feature (1)..( 14): Result.001 file - promoters70/4608985
taactaatttctta

SEQ ID NO: 86352 - DNA, 15 bp, Unknown
  misc_feature (1)..( 15): Result.001 file - promoters70/4608985
taatataactcttgg

SEQ ID NO: 86353 - DNA, 11 bp, Unknown
  misc_feature (1)..( 11): Result.001 file - promoters70/4608985
agttaaaaaat

SEQ ID NO: 86354 - DNA, 11 bp, Unknown
  misc_feature (1)..( 11): Result.001 file - promoters70/4608985
agttaatatat

SEQ ID NO: 86355 - DNA, 11 bp, Unknown
  misc_feature (1)..( 11): Result.001 file - promoters70/4608985
tgttattatat

SEQ ID NO: 86356 - DNA, 11 bp, Unknown
  misc_feature (1)..( 11): Result.001 file - promoters70/4610551
agttatttaaa

SEQ ID NO: 86357 - DNA, 11 bp, Unknown
  misc_feature (1)..( 11): Result.001 file - promoters70/4610551
aagaaaatcta

SEQ ID NO: 86358 - DNA, 11 bp, Unknown
  misc_feature (1)..( 11): Result.001 file - promoters70/4610551
tggaaaatgtt

SEQ ID NO: 86359 - DNA, 11 bp, Unknown
  misc_feature (1)..( 11): Result.001 file - promoters70/4610551
aagaaaaaaaa

SEQ ID NO: 86360 - DNA, 11 bp, Unknown
  misc_feature (1)..( 11): Result.001 file - promoters70/4610551
accaaaatcta

SEQ ID NO: 86361 - DNA, 11 bp, Unknown
  misc_feature (1)..( 11): Result.001 file - promoters70/4610551
ataaaaatgtg

SEQ ID NO: 86362 - DNA, 11 bp, Unknown
  misc_feature (1)..( 11): Result.001 file - promoters70/4701809
ctgaaaacaaa

SEQ ID NO: 86363 - DNA, 12 bp, Unknown
  misc_feature (1)..( 12): Result.001 file - promoters70/4701809
ataatgttattt

SEQ ID NO: 86364 - DNA, 12 bp, Unknown
  misc_feature (1)..( 12): Result.001 file - promoters70/4701809
aaaatgtttttt

SEQ ID NO: 86365 - DNA, 12 bp, Unknown
  misc_feature (1)..( 12): Result.001 file - promoters70/4701809
ataacgttttta

SEQ ID NO: 86366 - DNA, 7 bp, Unknown
  misc_feature (1)..( 7): Result.001 file - promoters70/4701809
aaagtcc

SEQ ID NO: 86367 - DNA, 7 bp, Unknown
  misc_feature (1)..( 7): Result.001 file - promoters70/4701809
aaagtca

SEQ ID NO: 86368 - DNA, 7 bp, Unknown
  misc_feature (1)..( 7): Result.001 file - promoters70/4701809
aaactca

SEQ ID NO: 86369 - DNA, 8 bp, Unknown
  misc_feature (1)..( 8): Result.001 file - promoters70/4701809
atttttct

SEQ ID NO: 86370 - DNA, 8 bp, Unknown
  misc_feature (1)..( 8): Result.001 file - promoters70/4701809
atttttta

SEQ ID NO: 86371 - DNA, 8 bp, Unknown
  misc_feature (1)..( 8): Result.001 file - promoters70/4701809
gtttctct

SEQ ID NO: 86372 - DNA, 10 bp, Unknown
  misc_feature (1)..( 10): Result.001 file - promoters70/4701809
ttcaaaattt

SEQ ID NO: 86373 - DNA, 10 bp, Unknown
  misc_feature (1)..( 10): Result.001 file - promoters70/4701809
tacaagatta

SEQ ID NO: 86374 - DNA, 10 bp, Unknown
  misc_feature (1)..( 10): Result.001 file - promoters70/4701809
ttctaaattg

SEQ ID NO: 86375 - DNA, 10 bp, Unknown
  misc_feature (1)..( 10): Result.001 file - promoters70/4701809
taataagttg

SEQ ID NO: 86376 - DNA, 8 bp, Unknown
  misc_feature (1)..( 8): Result.001 file - promoters70/4701809
ttataaat

SEQ ID NO: 86377 - DNA, 8 bp, Unknown
  misc_feature (1)..( 8): Result.001 file - promoters70/4701809
ttataaaa

SEQ ID NO: 86378 - DNA, 8 bp, Unknown
  misc_feature (1)..( 8): Result.001 file - promoters70/4701809
aaataaaa

SEQ ID NO: 86379 - DNA, 9 bp, Unknown
  misc_feature (1)..( 9): Result.001 file - promoters70/4701809
atttttttc

SEQ ID NO: 86380 - DNA, 9 bp, Unknown
  misc_feature (1)..( 9): Result.001 file - promoters70/4701809
atttttttt

SEQ ID NO: 86381 - DNA, 10 bp, Unknown
  misc_feature (1)..( 10): Result.001 file - promoters70/4701809
ttttgttttt

SEQ ID NO: 86382 - DNA, 10 bp, Unknown
  misc_feature (1)..( 10): Result.001 file - promoters70/4701809
tatgttaata

SEQ ID NO: 86383 - DNA, 10 bp, Unknown
  misc_feature (1)..( 10): Result.001 file - promoters70/4701809
taaattaata

SEQ ID NO: 86384 - DNA, 10 bp, Unknown
  misc_feature (1)..( 10): Result.001 file - promoters70/4701809
atgattaatc

SEQ ID NO: 86385 - DNA, 10 bp, Unknown
  misc_feature (1)..( 10): Result.001 file - promoters70/4701809
taaagtaatg

SEQ ID NO: 86386 - DNA, 12 bp, Unknown
  misc_feature (1)..( 12): Result.001 file - promoters70/4701809
tcgttgtgtaat

SEQ ID NO: 86387 - DNA, 12 bp, Unknown
  misc_feature (1)..( 12): Result.001 file - promoters70/4701809
tcgttttgtttt

SEQ ID NO: 86388 - DNA, 12 bp, Unknown
  misc_feature (1)..( 12): Result.001 file - promoters70/4701809
ttattttttttt

SEQ ID NO: 86389 - DNA, 13 bp, Unknown
  misc_feature (1)..( 13): Result.001 file - promoters70/4701809
tgagattccaaac

SEQ ID NO: 86390 - DNA, 13 bp, Unknown
  misc_feature (1)..( 13): Result.001 file - promoters70/4701809
ttagattcatatt

SEQ ID NO: 86391 - DNA, 13 bp, Unknown
  misc_feature (1)..( 13): Result.001 file - promoters70/4701809
ttaaattaatatt

SEQ ID NO: 86392 - DNA, 7 bp, Unknown
  misc_feature (1)..( 7): Result.001 file - promoters70/4701809
aaattaa

SEQ ID NO: 86393 - DNA, 7 bp, Unknown
  misc_feature (1)..( 7): Result.001 file - promoters70/4701809
caattaa

SEQ ID NO: 86394 - DNA, 7 bp, Unknown
  misc_feature (1)..( 7): Result.001 file - promoters70/4701809
aaattaa

SEQ ID NO: 86395 - DNA, 10 bp, Unknown
  misc_feature (1)..( 10): Result.001 file - promoters70/4701809
tgggtttttg

SEQ ID NO: 86396 - DNA, 10 bp, Unknown
  misc_feature (1)..( 10): Result.001 file - promoters70/4701809
tttttttttg

SEQ ID NO: 86397 - DNA, 10 bp, Unknown
  misc_feature (1)..( 10): Result.001 file - promoters70/4701809
tttgttttta

SEQ ID NO: 86398 - DNA, 7 bp, Unknown
  misc_feature (1)..( 7): Result.001 file - promoters70/4701809
ataaaat

SEQ ID NO: 86399 - DNA, 7 bp, Unknown
  misc_feature (1)..( 7): Result.001 file - promoters70/4701809
ataaaaa

SEQ ID NO: 86400 - DNA, 7 bp, Unknown
  misc_feature (1)..( 7): Result.001 file - promoters70/4766447
ttaaaaa

SEQ ID NO: 86401 - DNA, 8 bp, Unknown
  misc_feature (1)..( 8): Result.001 file - promoters70/4766447
tcaatcaa

SEQ ID NO: 86402 - DNA, 8 bp, Unknown
  misc_feature (1)..( 8): Result.001 file - promoters70/4766447
ccaagcaa

SEQ ID NO: 86403 - DNA, 8 bp, Unknown
  misc_feature (1)..( 8): Result.001 file - promoters70/4766447
tcaaacaa

SEQ ID NO: 86404 - DNA, 7 bp, Unknown
  misc_feature (1)..( 7): Result.001 file - promoters70/4766447
tttgttt

SEQ ID NO: 86405 - DNA, 7 bp, Unknown
  misc_feature (1)..( 7): Result.001 file - promoters70/4766447
tttattt

SEQ ID NO: 86406 - DNA, 7 bp, Unknown
  misc_feature (1)..( 7): Result.001 file - promoters70/4766447
attattt

SEQ ID NO: 86407 - DNA, 11 bp, Unknown
  misc_feature (1)..( 11): Result.001 file - promoters70/4766447
attccactttt

SEQ ID NO: 86408 - DNA, 11 bp, Unknown
  misc_feature (1)..( 11): Result.001 file - promoters70/4766447
aatccaatttt

SEQ ID NO: 86409 - DNA, 11 bp, Unknown
  misc_feature (1)..( 11): Result.001 file - promoters70/4766490
aatacaaaaaa

SEQ ID NO: 86410 - DNA, 10 bp, Unknown
  misc_feature (1)..( 10): Result.001 file - promoters70/4766490
tttgaaaaga

SEQ ID NO: 86411 - DNA, 10 bp, Unknown
  misc_feature (1)..( 10): Result.001 file - promoters70/4766490
aaaaaaaaga

SEQ ID NO: 86412 - DNA, 11 bp, Unknown
  misc_feature (1)..( 11): Result.001 file - promoters70/4766490
gaagaaacaga

SEQ ID NO: 86413 - DNA, 12 bp, Unknown
  misc_feature (1)..( 12): Result.001 file - promoters70/4766490
tgaaaagatgaa

SEQ ID NO: 86414 - DNA, 12 bp, Unknown
  misc_feature (1)..( 12): Result.001 file - promoters70/4766490
acacaagaagaa

SEQ ID NO: 86415 - DNA, 12 bp, Unknown
  misc_feature (1)..( 12): Result.001 file - promoters70/4766602
gaaaaaaaagaa

SEQ ID NO: 86416 - DNA, 9 bp, Unknown
  misc_feature (1)..( 9): Result.001 file - promoters70/4766602
actatatat

SEQ ID NO: 86417 - DNA, 9 bp, Unknown
  misc_feature (1)..( 9): Result.001 file - promoters70/4766602
actatataa

SEQ ID NO: 86418 - DNA, 9 bp, Unknown
  misc_feature (1)..( 9): Result.001 file - promoters70/4766602
ctaatataa

SEQ ID NO: 86419 - DNA, 8 bp, Unknown
  misc_feature (1)..( 8): Result.001 file - promoters70/4766602
cattttta

SEQ ID NO: 86420 - DNA, 8 bp, Unknown
  misc_feature (1)..( 8): Result.001 file - promoters70/4766602
catttttt

SEQ ID NO: 86421 - DNA, 8 bp, Unknown
  misc_feature (1)..( 8): Result.001 file - promoters70/4766602
tttttttt

SEQ ID NO: 86422 - DNA, 8 bp, Unknown
  misc_feature (1)..( 8): Result.001 file - promoters70/4766602
attgtaag

SEQ ID NO: 86423 - DNA, 8 bp, Unknown
  misc_feature (1)..( 8): Result.001 file - promoters70/4766602
attttaaa

SEQ ID NO: 86424 - DNA, 8 bp, Unknown
  misc_feature (1)..( 8): Result.001 file - promoters70/4766712
cgtttaaa

SEQ ID NO: 86425 - DNA, 9 bp, Unknown
  misc_feature (1)..( 9): Result.001 file - promoters70/4766712
ttataaata

SEQ ID NO: 86426 - DNA, 9 bp, Unknown
  misc_feature (1)..( 9): Result.001 file - promoters70/4766712
gtataaaaa

SEQ ID NO: 86427 - DNA, 9 bp, Unknown
  misc_feature (1)..( 9): Result.001 file - promoters70/4766712
ttataaata

SEQ ID NO: 86428 - DNA, 11 bp, Unknown
  misc_feature (1)..( 11): Result.001 file - promoters70/4766712
aagaccctaac

SEQ ID NO: 86429 - DNA, 11 bp, Unknown
  misc_feature (1)..( 11): Result.001 file - promoters70/4766712
aagacccgttg

SEQ ID NO: 86430 - DNA, 11 bp, Unknown
  misc_feature (1)..( 11): Result.001 file - promoters70/4766712
cagaaccgttg

SEQ ID NO: 86431 - DNA, 6 bp, Unknown
  misc_feature (1)..( 6): Result.001 file - promoters70/4766712
attaaa

SEQ ID NO: 86432 - DNA, 6 bp, Unknown
  misc_feature (1)..( 6): Result.001 file - promoters70/4766712
attaaa

SEQ ID NO: 86433 - DNA, 6 bp, Unknown
  misc_feature (1)..( 6): Result.001 file - promoters70/4766712
attaaa

SEQ ID NO: 86434 - DNA, 9 bp, Unknown
  misc_feature (1)..( 9): Result.001 file - promoters70/4766712
gaaatgatg

SEQ ID NO: 86435 - DNA, 9 bp, Unknown
  misc_feature (1)..( 9): Result.001 file - promoters70/4766712
gaaatgaga

SEQ ID NO: 86436 - DNA, 9 bp, Unknown
  misc_feature (1)..( 9): Result.001 file - promoters70/4766866
ttaataaga

SEQ ID NO: 86437 - DNA, 8 bp, Unknown
  misc_feature (1)..( 8): Result.001 file - promoters70/4766866
attccatt

SEQ ID NO: 86438 - DNA, 8 bp, Unknown
  misc_feature (1)..( 8): Result.001 file - promoters70/4766866
tttccatt

SEQ ID NO: 86439 - DNA, 8 bp, Unknown
  misc_feature (1)..( 8): Result.001 file - promoters70/4766866
attccaaa

SEQ ID NO: 86440 - DNA, 8 bp, Unknown
  misc_feature (1)..( 8): Result.001 file - promoters70/4766866
tttgtaat

SEQ ID NO: 86441 - DNA, 8 bp, Unknown
  misc_feature (1)..( 8): Result.001 file - promoters70/4766866
attgtaat

SEQ ID NO: 86442 - DNA, 8 bp, Unknown
  misc_feature (1)..( 8): Result.001 file - promoters70/4766866
tttgtaac

SEQ ID NO: 86443 - DNA, 12 bp, Unknown
  misc_feature (1)..( 12): Result.001 file - promoters70/4766866
gttggaatttag

SEQ ID NO: 86444 - DNA, 12 bp, Unknown
  misc_feature (1)..( 12): Result.001 file - promoters70/4766866
aaaagaaattaa

SEQ ID NO: 86445 - DNA, 12 bp, Unknown
  misc_feature (1)..( 12): Result.001 file - promoters70/4766866
aaaagaaaataa

SEQ ID NO: 86446 - DNA, 12 bp, Unknown
  misc_feature (1)..( 12): Result.001 file - promoters70/4766866
aaatgaaatatc

SEQ ID NO: 86447 - DNA, 12 bp, Unknown
  misc_feature (1)..( 12): Result.001 file - promoters70/4766866
ataagacaacac

SEQ ID NO: 86448 - DNA, 12 bp, Unknown
  misc_feature (1)..( 12): Result.001 file - promoters70/4766866
ttgagacaaaaa

SEQ ID NO: 86449 - DNA, 12 bp, Unknown
  misc_feature (1)..( 12): Result.001 file - promoters70/4766866
ttgaaacaaaaa

SEQ ID NO: 86450 - DNA, 12 bp, Unknown
  misc_feature (1)..( 12): Result.001 file - promoters70/4766866
gagaaagaaagc

SEQ ID NO: 86451 - DNA, 9 bp, Unknown
  misc_feature (1)..( 9): Result.001 file - promoters70/4766866
ggagaaaaa

SEQ ID NO: 86452 - DNA, 9 bp, Unknown
  misc_feature (1)..( 9): Result.001 file - promoters70/4766866
atggaaaaa

SEQ ID NO: 86453 - DNA, 9 bp, Unknown
  misc_feature (1)..( 9): Result.001 file - promoters70/4766866
ggagaaaac

SEQ ID NO: 86454 - DNA, 8 bp, Unknown
  misc_feature (1)..( 8): Result.001 file - promoters70/4766866
accaataa

SEQ ID NO: 86455 - DNA, 8 bp, Unknown
  misc_feature (1)..( 8): Result.001 file - promoters70/4766866
cccactaa

SEQ ID NO: 86456 - DNA, 8 bp, Unknown
  misc_feature (1)..( 8): Result.001 file - promoters70/4766866
cccactag

SEQ ID NO: 86457 - DNA, 11 bp, Unknown
  misc_feature (1)..( 11): Result.001 file - promoters70/4766866
taacaagtaaa

SEQ ID NO: 86458 - DNA, 11 bp, Unknown
  misc_feature (1)..( 11): Result.001 file - promoters70/4766866
taataagtaaa

SEQ ID NO: 86459 - DNA, 11 bp, Unknown
  misc_feature (1)..( 11): Result.001 file - promoters70/4766936
gcaagagtaaa

SEQ ID NO: 86460 - DNA, 8 bp, Unknown
  misc_feature (1)..( 8): Result.001 file - promoters70/4766936
tttatttg

SEQ ID NO: 86461 - DNA, 8 bp, Unknown
  misc_feature (1)..( 8): Result.001 file - promoters70/4766936
tttgttta

SEQ ID NO: 86462 - DNA, 8 bp, Unknown
  misc_feature (1)..( 8): Result.001 file - promoters70/4766936
tttctttg

SEQ ID NO: 86463 - DNA, 8 bp, Unknown
  misc_feature (1)..( 8): Result.001 file - promoters70/4766936
atttgtta

SEQ ID NO: 86464 - DNA, 8 bp, Unknown
  misc_feature (1)..( 8): Result.001 file - promoters70/4766936
aattgtta

SEQ ID NO: 86465 - DNA, 8 bp, Unknown
  misc_feature (1)..( 8): Result.001 file - promoters70/4766936
aatggttt

SEQ ID NO: 86466 - DNA, 16 bp, Unknown
  misc_feature (1)..( 16): Result.001 file - promoters70/4766936
tttttacaacacaagt

SEQ ID NO: 86467 - DNA, 16 bp, Unknown
  misc_feature (1)..( 16): Result.001 file - promoters70/4766936
tttctaccacacaagt

SEQ ID NO: 86468 - DNA, 16 bp, Unknown
  misc_feature (1)..( 16): Result.001 file - promoters70/4766936
tttttaaccgtatcag

SEQ ID NO: 86469 - DNA, 10 bp, Unknown
  misc_feature (1)..( 10): Result.001 file - promoters70/4766936
atcttttaaa

SEQ ID NO: 86470 - DNA, 10 bp, Unknown
  misc_feature (1)..( 10): Result.001 file - promoters70/4766936
atctttgtaa

SEQ ID NO: 86471 - DNA, 10 bp, Unknown
  misc_feature (1)..( 10): Result.001 file - promoters70/4766936
ttctttataa

SEQ ID NO: 86472 - DNA, 10 bp, Unknown
  misc_feature (1)..( 10): Result.001 file - promoters70/4766936
atctatataa

SEQ ID NO: 86473 - DNA, 10 bp, Unknown
  misc_feature (1)..( 10): Result.001 file - promoters70/4766936
atgccacatc

SEQ ID NO: 86474 - DNA, 10 bp, Unknown
  misc_feature (1)..( 10): Result.001 file - promoters70/4766936
ttgccacgtg

SEQ ID NO: 86475 - DNA, 10 bp, Unknown
  misc_feature (1)..( 10): Result.001 file - promoters70/4766936
ttgccacgtg

SEQ ID NO: 86476 - DNA, 8 bp, Unknown
  misc_feature (1)..( 8): Result.001 file - promoters70/4766936
aatttttt

SEQ ID NO: 86477 - DNA, 8 bp, Unknown
  misc_feature (1)..( 8): Result.001 file - promoters70/4766936
aatgtttt

SEQ ID NO: 86478 - DNA, 8 bp, Unknown
  misc_feature (1)..( 8): Result.001 file - promoters70/4766936
aatgttaa

SEQ ID NO: 86479 - DNA, 9 bp, Unknown
  misc_feature (1)..( 9): Result.001 file - promoters70/4766936
attttttgt

SEQ ID NO: 86480 - DNA, 9 bp, Unknown
  misc_feature (1)..( 9): Result.001 file - promoters70/4766936
attttttgt

SEQ ID NO: 86481 - DNA, 9 bp, Unknown
  misc_feature (1)..( 9): Result.001 file - promoters70/4766936
attctttat

SEQ ID NO: 86482 - DNA, 9 bp, Unknown
  misc_feature (1)..( 9): Result.001 file - promoters70/4766936
ttaacaaat

SEQ ID NO: 86483 - DNA, 9 bp, Unknown
  misc_feature (1)..( 9): Result.001 file - promoters70/4766936
ttatcaaat

SEQ ID NO: 86484 - DNA, 9 bp, Unknown
  misc_feature (1)..( 9): Result.001 file - promoters70/4766977
gtataaaaa

SEQ ID NO: 86485 - DNA, 10 bp, Unknown
  misc_feature (1)..( 10): Result.001 file - promoters70/4766977
ctataaatag

SEQ ID NO: 86486 - DNA, 10 bp, Unknown
  misc_feature (1)..( 10): Result.001 file - promoters70/4766977
ctataaaaaa

SEQ ID NO: 86487 - DNA, 10 bp, Unknown
  misc_feature (1)..( 10): Result.001 file - promoters70/4767298
atataaatag

SEQ ID NO: 86488 - DNA, 7 bp, Unknown
  misc_feature (1)..( 7): Result.001 file - promoters70/4767298
tatttca

SEQ ID NO: 86489 - DNA, 7 bp, Unknown
  misc_feature (1)..( 7): Result.001 file - promoters70/4767298
tatttcc

SEQ ID NO: 86490 - DNA, 7 bp, Unknown
  misc_feature (1)..( 7): Result.001 file - promoters70/4767298
tatgtca

SEQ ID NO: 86491 - DNA, 7 bp, Unknown
  misc_feature (1)..( 7): Result.001 file - promoters70/4767298
ttcattt

SEQ ID NO: 86492 - DNA, 7 bp, Unknown
  misc_feature (1)..( 7): Result.001 file - promoters70/4767298
ttcattt

SEQ ID NO: 86493 - DNA, 7 bp, Unknown
  misc_feature (1)..( 7): Result.001 file - promoters70/4767298
ttcgttt

SEQ ID NO: 86494 - DNA, 9 bp, Unknown
  misc_feature (1)..( 9): Result.001 file - promoters70/4767298
taatttgat

SEQ ID NO: 86495 - DNA, 9 bp, Unknown
  misc_feature (1)..( 9): Result.001 file - promoters70/4767298
aaatatgat

SEQ ID NO: 86496 - DNA, 9 bp, Unknown
  misc_feature (1)..( 9): Result.001 file - promoters70/4767379
aaatataaa

SEQ ID NO: 86497 - DNA, 10 bp, Unknown
  misc_feature (1)..( 10): Result.001 file - promoters70/4767379
aaaatattaa

SEQ ID NO: 86498 - DNA, 10 bp, Unknown
  misc_feature (1)..( 10): Result.001 file - promoters70/4767379
taaaaattaa

SEQ ID NO: 86499 - DNA, 10 bp, Unknown
  misc_feature (1)..( 10): Result.001 file - promoters70/4767379
gtaaaatttc

SEQ ID NO: 86500 - DNA, 10 bp, Unknown
  misc_feature (1)..( 10): Result.001 file - promoters70/4767379
taacaattct

SEQ ID NO: 86501 - DNA, 10 bp, Unknown
  misc_feature (1)..( 10): Result.001 file - promoters70/4767379
ctaaaatttc

SEQ ID NO: 86502 - DNA, 9 bp, Unknown
  misc_feature (1)..( 9): Result.001 file - promoters70/4767379
aaaaataaa

SEQ ID NO: 86503 - DNA, 9 bp, Unknown
  misc_feature (1)..( 9): Result.001 file - promoters70/4767379
aaaattaat

SEQ ID NO: 86504 - DNA, 9 bp, Unknown
  misc_feature (1)..( 9): Result.001 file - promoters70/4767379
taaaataca

SEQ ID NO: 86505 - DNA, 9 bp, Unknown
  misc_feature (1)..( 9): Result.001 file - promoters70/4767379
aaacatata

SEQ ID NO: 86506 - DNA, 9 bp, Unknown
  misc_feature (1)..( 9): Result.001 file - promoters70/4767379
gataatatt

SEQ ID NO: 86507 - DNA, 10 bp, Unknown
  misc_feature (1)..( 10): Result.001 file - promoters70/4767379
aaataaaagc

SEQ ID NO: 86508 - DNA, 10 bp, Unknown
  misc_feature (1)..( 10): Result.001 file - promoters70/4767379
caataaaatt

SEQ ID NO: 86509 - DNA, 10 bp, Unknown
  misc_feature (1)..( 10): Result.001 file - promoters70/4767379
ttataaaata

SEQ ID NO: 86510 - DNA, 10 bp, Unknown
  misc_feature (1)..( 10): Result.001 file - promoters70/4767379
aaagaaaatt

SEQ ID NO: 86511 - DNA, 10 bp, Unknown
  misc_feature (1)..( 10): Result.001 file - promoters70/4767379
agataatatt

SEQ ID NO: 86512 - DNA, 7 bp, Unknown
  misc_feature (1)..( 7): Result.001 file - promoters70/4767379
aaacaaa

SEQ ID NO: 86513 - DNA, 7 bp, Unknown
  misc_feature (1)..( 7): Result.001 file - promoters70/4767379
aaataaa

SEQ ID NO: 86514 - DNA, 7 bp, Unknown
  misc_feature (1)..( 7): Result.001 file - promoters70/4767379
aaacaaa

SEQ ID NO: 86515 - DNA, 7 bp, Unknown
  misc_feature (1)..( 7): Result.001 file - promoters70/4767379
aaaaaaa

SEQ ID NO: 86516 - DNA, 7 bp, Unknown
  misc_feature (1)..( 7): Result.001 file - promoters70/4767379
atacata

SEQ ID NO: 86517 - DNA, 10 bp, Unknown
  misc_feature (1)..( 10): Result.001 file - promoters70/4767379
aatgaaaaac

SEQ ID NO: 86518 - DNA, 10 bp, Unknown
  misc_feature (1)..( 10): Result.001 file - promoters70/4767379
aatgaaattc

SEQ ID NO: 86519 - DNA, 10 bp, Unknown
  misc_feature (1)..( 10): Result.001 file - promoters70/4767379
aatgatattc

SEQ ID NO: 86520 - DNA, 10 bp, Unknown
  misc_feature (1)..( 10): Result.001 file - promoters70/4767379
tttgatatat

SEQ ID NO: 86521 - DNA, 10 bp, Unknown
  misc_feature (1)..( 10): Result.001 file - promoters70/4767379
aatgattact

SEQ ID NO: 86522 - DNA, 11 bp, Unknown
  misc_feature (1)..( 11): Result.001 file - promoters70/4767379
atgaaaaacaa

SEQ ID NO: 86523 - DNA, 11 bp, Unknown
  misc_feature (1)..( 11): Result.001 file - promoters70/4767379
aagaaaaaata

SEQ ID NO: 86524 - DNA, 11 bp, Unknown
  misc_feature (1)..( 11): Result.001 file - promoters70/4767379
gttaaaaaata

SEQ ID NO: 86525 - DNA, 11 bp, Unknown
  misc_feature (1)..( 11): Result.001 file - promoters70/4767379
aagaaaagcgc

SEQ ID NO: 86526 - DNA, 11 bp, Unknown
  misc_feature (1)..( 11): Result.001 file - promoters70/4767487
tagagaagata

SEQ ID NO: 86527 - DNA, 11 bp, Unknown
  misc_feature (1)..( 11): Result.001 file - promoters70/4767487
tatgtaaacgt

SEQ ID NO: 86528 - DNA, 11 bp, Unknown
  misc_feature (1)..( 11): Result.001 file - promoters70/4767487
tatttaaaaag

SEQ ID NO: 86529 - DNA, 11 bp, Unknown
  misc_feature (1)..( 11): Result.001 file - promoters70/4767487
ctagtaaacat

SEQ ID NO: 86530 - DNA, 11 bp, Unknown
  misc_feature (1)..( 11): Result.001 file - promoters70/4767487
gcattaaaata

SEQ ID NO: 86531 - DNA, 12 bp, Unknown
  misc_feature (1)..( 12): Result.001 file - promoters70/4767487
attttagaaaga

SEQ ID NO: 86532 - DNA, 9 bp, Unknown
  misc_feature (1)..( 9): Result.001 file - promoters70/4767487
tttgttttt

SEQ ID NO: 86533 - DNA, 9 bp, Unknown
  misc_feature (1)..( 9): Result.001 file - promoters70/4767487
tttgatttc

SEQ ID NO: 86534 - DNA, 9 bp, Unknown
  misc_feature (1)..( 9): Result.001 file - promoters70/4767487
tgtattttg

SEQ ID NO: 86535 - DNA, 9 bp, Unknown
  misc_feature (1)..( 9): Result.001 file - promoters70/4767487
cttatcttg

SEQ ID NO: 86536 - DNA, 10 bp, Unknown
  misc_feature (1)..( 10): Result.001 file - promoters70/4767487
cgattttctt

SEQ ID NO: 86537 - DNA, 10 bp, Unknown
  misc_feature (1)..( 10): Result.001 file - promoters70/4767487
attttttctt

SEQ ID NO: 86538 - DNA, 10 bp, Unknown
  misc_feature (1)..( 10): Result.001 file - promoters70/4767487
taattgtctc

SEQ ID NO: 86539 - DNA, 10 bp, Unknown
  misc_feature (1)..( 10): Result.001 file - promoters70/4767487
taattttttc

SEQ ID NO: 86540 - DNA, 10 bp, Unknown
  misc_feature (1)..( 10): Result.001 file - promoters70/4767487
ttatgaatga

SEQ ID NO: 86541 - DNA, 10 bp, Unknown
  misc_feature (1)..( 10): Result.001 file - promoters70/4767487
ctatgaattc

SEQ ID NO: 86542 - DNA, 10 bp, Unknown
  misc_feature (1)..( 10): Result.001 file - promoters70/4767487
ttatgattaa

SEQ ID NO: 86543 - DNA, 10 bp, Unknown
  misc_feature (1)..( 10): Result.001 file - promoters70/4767515
atatcattaa

SEQ ID NO: 86544 - DNA, 11 bp, Unknown
  misc_feature (1)..( 11): Result.001 file - promoters70/4767515
ctcaaaatacc

SEQ ID NO: 86545 - DNA, 11 bp, Unknown
  misc_feature (1)..( 11): Result.001 file - promoters70/4767515
tttaaaacacc

SEQ ID NO: 86546 - DNA, 11 bp, Unknown
  misc_feature (1)..( 11): Result.001 file - promoters70/4767515
aggaaaacata

SEQ ID NO: 86547 - DNA, 11 bp, Unknown
  misc_feature (1)..( 11): Result.001 file - promoters70/4767515
aacaaaacaat

SEQ ID NO: 86548 - DNA, 11 bp, Unknown
  misc_feature (1)..( 11): Result.001 file - promoters70/4767515
aactaaacaag

SEQ ID NO: 86549 - DNA, 11 bp, Unknown
  misc_feature (1)..( 11): Result.001 file - promoters70/4767701
aacgaaaccaa

SEQ ID NO: 86550 - DNA, 9 bp, Unknown
  misc_feature (1)..( 9): Result.001 file - promoters70/4767701
aattctgag

SEQ ID NO: 86551 - DNA, 9 bp, Unknown
  misc_feature (1)..( 9): Result.001 file - promoters70/4767701
gattttgaa

SEQ ID NO: 86552 - DNA, 9 bp, Unknown
  misc_feature (1)..( 9): Result.001 file - promoters70/4767701
aattttaaa

SEQ ID NO: 86553 - DNA, 9 bp, Unknown
  misc_feature (1)..( 9): Result.001 file - promoters70/4767701
aattttgtg

SEQ ID NO: 86554 - DNA, 9 bp, Unknown
  misc_feature (1)..( 9): Result.001 file - promoters70/4767701
ttttttgtt

SEQ ID NO: 86555 - DNA, 9 bp, Unknown
  misc_feature (1)..( 9): Result.001 file - promoters70/4767701
aattgtaat

SEQ ID NO: 86556 - DNA, 13 bp, Unknown
  misc_feature (1)..( 13): Result.001 file - promoters70/4767701
aagcaatttcaca

SEQ ID NO: 86557 - DNA, 13 bp, Unknown
  misc_feature (1)..( 13): Result.001 file - promoters70/4767701
aatcaatttaaaa

SEQ ID NO: 86558 - DNA, 13 bp, Unknown
  misc_feature (1)..( 13): Result.001 file - promoters70/4767701
aagcaatctcaaa

SEQ ID NO: 86559 - DNA, 13 bp, Unknown
  misc_feature (1)..( 13): Result.001 file - promoters70/4767701
atccaattttgtg

SEQ ID NO: 86560 - DNA, 13 bp, Unknown
  misc_feature (1)..( 13): Result.001 file - promoters70/4767701
catgaatttaaat

SEQ ID NO: 86561 - DNA, 13 bp, Unknown
  misc_feature (1)..( 13): Result.001 file - promoters70/4767701
gtttgattaaaat

SEQ ID NO: 86562 - DNA, 10 bp, Unknown
  misc_feature (1)..( 10): Result.001 file - promoters70/4767701
ggtatatata

SEQ ID NO: 86563 - DNA, 10 bp, Unknown
  misc_feature (1)..( 10): Result.001 file - promoters70/4767701
gttatataaa

SEQ ID NO: 86564 - DNA, 10 bp, Unknown
  misc_feature (1)..( 10): Result.001 file - promoters70/4767701
cttatttatg

SEQ ID NO: 86565 - DNA, 10 bp, Unknown
  misc_feature (1)..( 10): Result.001 file - promoters70/4767701
cttatattct

SEQ ID NO: 86566 - DNA, 10 bp, Unknown
  misc_feature (1)..( 10): Result.001 file - promoters70/4767701
cttatatata

SEQ ID NO: 86567 - DNA, 10 bp, Unknown
  misc_feature (1)..( 10): Result.001 file - promoters70/4767701
gctatataaa

SEQ ID NO: 86568 - DNA, 11 bp, Unknown
  misc_feature (1)..( 11): Result.001 file - promoters70/4767701
aatcaaatagt

SEQ ID NO: 86569 - DNA, 11 bp, Unknown
  misc_feature (1)..( 11): Result.001 file - promoters70/4767701
attcaaatcaa

SEQ ID NO: 86570 - DNA, 11 bp, Unknown
  misc_feature (1)..( 11): Result.001 file - promoters70/4767701
catcaaatagt

SEQ ID NO: 86571 - DNA, 11 bp, Unknown
  misc_feature (1)..( 11): Result.001 file - promoters70/4767701
aatccaatttt

SEQ ID NO: 86572 - DNA, 11 bp, Unknown
  misc_feature (1)..( 11): Result.001 file - promoters70/4767701
atttaaatttt

SEQ ID NO: 86573 - DNA, 11 bp, Unknown
  misc_feature (1)..( 11): Result.001 file - promoters70/4767952
attaaaatgtc

SEQ ID NO: 86574 - DNA, 8 bp, Unknown
  misc_feature (1)..( 8): Result.001 file - promoters70/4767952
caaactaa

SEQ ID NO: 86575 - DNA, 8 bp, Unknown
  misc_feature (1)..( 8): Result.001 file - promoters70/4767952
aaaattaa

SEQ ID NO: 86576 - DNA, 8 bp, Unknown
  misc_feature (1)..( 8): Result.001 file - promoters70/4767952
aaaattta

SEQ ID NO: 86577 - DNA, 8 bp, Unknown
  misc_feature (1)..( 8): Result.001 file - promoters70/4767952
tataaatt

SEQ ID NO: 86578 - DNA, 8 bp, Unknown
  misc_feature (1)..( 8): Result.001 file - promoters70/4767952
attaaatt

SEQ ID NO: 86579 - DNA, 8 bp, Unknown
  misc_feature (1)..( 8): Result.001 file - promoters70/4767952
attaaatg

SEQ ID NO: 86580 - DNA, 8 bp, Unknown
  misc_feature (1)..( 8): Result.001 file - promoters70/4767952
attaaatt

SEQ ID NO: 86581 - DNA, 8 bp, Unknown
  misc_feature (1)..( 8): Result.001 file - promoters70/4767952
tttacatt

SEQ ID NO: 86582 - DNA, 8 bp, Unknown
  misc_feature (1)..( 8): Result.001 file - promoters70/4767952
attaaatg

SEQ ID NO: 86583 - DNA, 7 bp, Unknown
  misc_feature (1)..( 7): Result.001 file - promoters70/4767952
gtagaca

SEQ ID NO: 86584 - DNA, 7 bp, Unknown
  misc_feature (1)..( 7): Result.001 file - promoters70/4767952
gtataca

SEQ ID NO: 86585 - DNA, 7 bp, Unknown
  misc_feature (1)..( 7): Result.001 file - promoters70/4767952
ttataca

SEQ ID NO: 86586 - DNA, 7 bp, Unknown
  misc_feature (1)..( 7): Result.001 file - promoters70/4767952
agaccaa

SEQ ID NO: 86587 - DNA, 7 bp, Unknown
  misc_feature (1)..( 7): Result.001 file - promoters70/4767952
agatcaa

SEQ ID NO: 86588 - DNA, 7 bp, Unknown
  misc_feature (1)..( 7): Result.001 file - promoters70/4767976
ggatcaa

SEQ ID NO: 86589 - DNA, 7 bp, Unknown
  misc_feature (1)..( 7): Result.001 file - promoters70/4767976
ctatata

SEQ ID NO: 86590 - DNA, 7 bp, Unknown
  misc_feature (1)..( 7): Result.001 file - promoters70/4767976
gtatata

SEQ ID NO: 86591 - DNA, 7 bp, Unknown
  misc_feature (1)..( 7): Result.001 file - promoters70/4767982
gtatata

SEQ ID NO: 86592 - DNA, 10 bp, Unknown
  misc_feature (1)..( 10): Result.001 file - promoters70/4767982
ttaaacttgt

SEQ ID NO: 86593 - DNA, 10 bp, Unknown
  misc_feature (1)..( 10): Result.001 file - promoters70/4767982
ttaaacttgc

SEQ ID NO: 86594 - DNA, 10 bp, Unknown
  misc_feature (1)..( 10): Result.001 file - promoters70/4767982
acaaacatgt

SEQ ID NO: 86595 - DNA, 7 bp, Unknown
  misc_feature (1)..( 7): Result.001 file - promoters70/4767982
attctaa

SEQ ID NO: 86596 - DNA, 7 bp, Unknown
  misc_feature (1)..( 7): Result.001 file - promoters70/4767982
attttaa

SEQ ID NO: 86597 - DNA, 7 bp, Unknown
  misc_feature (1)..( 7): Result.001 file - promoters70/4767994
tttttaa

SEQ ID NO: 86598 - DNA, 6 bp, Unknown
  misc_feature (1)..( 6): Result.001 file - promoters70/4767994
aaatga

SEQ ID NO: 86599 - DNA, 6 bp, Unknown
  misc_feature (1)..( 6): Result.001 file - promoters70/4767994
aaatga

SEQ ID NO: 86600 - DNA, 6 bp, Unknown
  misc_feature (1)..( 6): Result.001 file - promoters70/4767994
aaatga

SEQ ID NO: 86601 - DNA, 7 bp, Unknown
  misc_feature (1)..( 7): Result.001 file - promoters70/4767994
tggccct

SEQ ID NO: 86602 - DNA, 7 bp, Unknown
  misc_feature (1)..( 7): Result.001 file - promoters70/4767994
tgggcct

SEQ ID NO: 86603 - DNA, 7 bp, Unknown
  misc_feature (1)..( 7): Result.001 file - promoters70/4767994
tggccct

SEQ ID NO: 86604 - DNA, 11 bp, Unknown
  misc_feature (1)..( 11): Result.001 file - promoters70/4767994
atttgtttatt

SEQ ID NO: 86605 - DNA, 11 bp, Unknown
  misc_feature (1)..( 11): Result.001 file - promoters70/4767994
attagtttatc

SEQ ID NO: 86606 - DNA, 11 bp, Unknown
  misc_feature (1)..( 11): Result.001 file - promoters70/4767994
aactttttatt

SEQ ID NO: 86607 - DNA, 9 bp, Unknown
  misc_feature (1)..( 9): Result.001 file - promoters70/4767994
taaccaata

SEQ ID NO: 86608 - DNA, 9 bp, Unknown
  misc_feature (1)..( 9): Result.001 file - promoters70/4767994
taatcaaaa

SEQ ID NO: 86609 - DNA, 9 bp, Unknown
  misc_feature (1)..( 9): Result.001 file - promoters70/4767994
cgaccaata

SEQ ID NO: 86610 - DNA, 10 bp, Unknown
  misc_feature (1)..( 10): Result.001 file - promoters70/4767994
aatacaaatc

SEQ ID NO: 86611 - DNA, 10 bp, Unknown
  misc_feature (1)..( 10): Result.001 file - promoters70/4767994
aataccaatc

SEQ ID NO: 86612 - DNA, 10 bp, Unknown
  misc_feature (1)..( 10): Result.001 file - promoters70/4767994
aatacaaatc

SEQ ID NO: 86613 - DNA, 7 bp, Unknown
  misc_feature (1)..( 7): Result.001 file - promoters70/4767994
taaggca

SEQ ID NO: 86614 - DNA, 7 bp, Unknown
  misc_feature (1)..( 7): Result.001 file - promoters70/4767994
taaagca

SEQ ID NO: 86615 - DNA, 7 bp, Unknown
  misc_feature (1)..( 7): Result.001 file - promoters70/4767994
taaggca

SEQ ID NO: 86616 - DNA, 11 bp, Unknown
  misc_feature (1)..( 11): Result.001 file - promoters70/4767994
aaataaacaaa

SEQ ID NO: 86617 - DNA, 11 bp, Unknown
  misc_feature (1)..( 11): Result.001 file - promoters70/4767994
aaagaaataaa

SEQ ID NO: 86618 - DNA, 11 bp, Unknown
  misc_feature (1)..( 11): Result.001 file - promoters70/4767994
gaagaaaccgg

SEQ ID NO: 86619 - DNA, 10 bp, Unknown
  misc_feature (1)..( 10): Result.001 file - promoters70/4767994
caccattgtt

SEQ ID NO: 86620 - DNA, 10 bp, Unknown
  misc_feature (1)..( 10): Result.001 file - promoters70/4767994
caccattgtc

SEQ ID NO: 86621 - DNA, 10 bp, Unknown
  misc_feature (1)..( 10): Result.001 file - promoters70/4768007
tttcatcgtc

SEQ ID NO: 86622 - DNA, 15 bp, Unknown
  misc_feature (1)..( 15): Result.001 file - promoters70/4768007
taagaatgtcaacca

SEQ ID NO: 86623 - DNA, 15 bp, Unknown
  misc_feature (1)..( 15): Result.001 file - promoters70/4768007
caagaataggtttaa

SEQ ID NO: 86624 - DNA, 15 bp, Unknown
  misc_feature (1)..( 15): Result.001 file - promoters70/4768007
aaagaaaataataat

SEQ ID NO: 86625 - DNA, 9 bp, Unknown
  misc_feature (1)..( 9): Result.001 file - promoters70/4768007
tatatatag

SEQ ID NO: 86626 - DNA, 9 bp, Unknown
  misc_feature (1)..( 9): Result.001 file - promoters70/4768007
tatataaat

SEQ ID NO: 86627 - DNA, 9 bp, Unknown
  misc_feature (1)..( 9): Result.001 file - promoters70/4768007
tatatatag

SEQ ID NO: 86628 - DNA, 12 bp, Unknown
  misc_feature (1)..( 12): Result.001 file - promoters70/4768007
ttgagtttaggc

SEQ ID NO: 86629 - DNA, 12 bp, Unknown
  misc_feature (1)..( 12): Result.001 file - promoters70/4768007
ttgattttaaac

SEQ ID NO: 86630 - DNA, 12 bp, Unknown
  misc_feature (1)..( 12): Result.001 file - promoters70/4768007
atttttttcaaa

SEQ ID NO: 86631 - DNA, 10 bp, Unknown
  misc_feature (1)..( 10): Result.001 file - promoters70/4768007
ccaaatgttt

SEQ ID NO: 86632 - DNA, 10 bp, Unknown
  misc_feature (1)..( 10): Result.001 file - promoters70/4768007
ccaaataaaa

SEQ ID NO: 86633 - DNA, 10 bp, Unknown
  misc_feature (1)..( 10): Result.001 file - promoters70/4768039
acaaaaaaaa

SEQ ID NO: 86634 - DNA, 9 bp, Unknown
  misc_feature (1)..( 9): Result.001 file - promoters70/4768039
attcctaaa

SEQ ID NO: 86635 - DNA, 9 bp, Unknown
  misc_feature (1)..( 9): Result.001 file - promoters70/4768039
atttctaaa

SEQ ID NO: 86636 - DNA, 9 bp, Unknown
  misc_feature (1)..( 9): Result.001 file - promoters70/4768039
ttttttaac

SEQ ID NO: 86637 - DNA, 8 bp, Unknown
  misc_feature (1)..( 8): Result.001 file - promoters70/4768039
gataatat

SEQ ID NO: 86638 - DNA, 8 bp, Unknown
  misc_feature (1)..( 8): Result.001 file - promoters70/4768039
tataatat

SEQ ID NO: 86639 - DNA, 8 bp, Unknown
  misc_feature (1)..( 8): Result.001 file - promoters70/4768039
tattatag

SEQ ID NO: 86640 - DNA, 11 bp, Unknown
  misc_feature (1)..( 11): Result.001 file - promoters70/4768039
ggaagaaaaag

SEQ ID NO: 86641 - DNA, 11 bp, Unknown
  misc_feature (1)..( 11): Result.001 file - promoters70/4768039
caaaaaaaaag

SEQ ID NO: 86642 - DNA, 11 bp, Unknown
  misc_feature (1)..( 11): Result.001 file - promoters70/4768066
caaacaaaaat

SEQ ID NO: 86643 - DNA, 6 bp, Unknown
  misc_feature (1)..( 6): Result.001 file - promoters70/4768066
gtatat

SEQ ID NO: 86644 - DNA, 6 bp, Unknown
  misc_feature (1)..( 6): Result.001 file - promoters70/4768066
gtatat

SEQ ID NO: 86645 - DNA, 6 bp, Unknown
  misc_feature (1)..( 6): Result.001 file - promoters70/4768147
gtatat

SEQ ID NO: 86646 - DNA, 13 bp, Unknown
  misc_feature (1)..( 13): Result.001 file - promoters70/4768147
ctctactttctcc

SEQ ID NO: 86647 - DNA, 13 bp, Unknown
  misc_feature (1)..( 13): Result.001 file - promoters70/4768147
caataatttttcc

SEQ ID NO: 86648 - DNA, 13 bp, Unknown
  misc_feature (1)..( 13): Result.001 file - promoters70/4768147
ataatgtttgagt

SEQ ID NO: 86649 - DNA, 7 bp, Unknown
  misc_feature (1)..( 7): Result.001 file - promoters70/4768147
tattata

SEQ ID NO: 86650 - DNA, 7 bp, Unknown
  misc_feature (1)..( 7): Result.001 file - promoters70/4768147
tattatg

SEQ ID NO: 86651 - DNA, 7 bp, Unknown
  misc_feature (1)..( 7): Result.001 file - promoters70/4768147
tattata

SEQ ID NO: 86652 - DNA, 10 bp, Unknown
  misc_feature (1)..( 10): Result.001 file - promoters70/4768147
aaaacaataa

SEQ ID NO: 86653 - DNA, 10 bp, Unknown
  misc_feature (1)..( 10): Result.001 file - promoters70/4768147
taaataataa

SEQ ID NO: 86654 - DNA, 10 bp, Unknown
  misc_feature (1)..( 10): Result.001 file - promoters70/4768217
aaaacacaaa

SEQ ID NO: 86655 - DNA, 13 bp, Unknown
  misc_feature (1)..( 13): Result.001 file - promoters70/4768217
aaagaaaagaaag

SEQ ID NO: 86656 - DNA, 13 bp, Unknown
  misc_feature (1)..( 13): Result.001 file - promoters70/4768217
ttagataagtaaa

SEQ ID NO: 86657 - DNA, 13 bp, Unknown
  misc_feature (1)..( 13): Result.001 file - promoters70/4768217
gcccaaaatgaaa

SEQ ID NO: 86658 - DNA, 13 bp, Unknown
  misc_feature (1)..( 13): Result.001 file - promoters70/4768217
gcggataagcaaa

SEQ ID NO: 86659 - DNA, 13 bp, Unknown
  misc_feature (1)..( 13): Result.001 file - promoters70/4768217
ttatatattgcaa

SEQ ID NO: 86660 - DNA, 13 bp, Unknown
  misc_feature (1)..( 13): Result.001 file - promoters70/4768217
taatataagtata

SEQ ID NO: 86661 - DNA, 13 bp, Unknown
  misc_feature (1)..( 13): Result.001 file - promoters70/4768236
aaaaaaattgaaa

SEQ ID NO: 86662 - DNA, 9 bp, Unknown
  misc_feature (1)..( 9): Result.001 file - promoters70/4768236
aaagaaatt

SEQ ID NO: 86663 - DNA, 9 bp, Unknown
  misc_feature (1)..( 9): Result.001 file - promoters70/4768236
ctagaaatt

SEQ ID NO: 86664 - DNA, 9 bp, Unknown
  misc_feature (1)..( 9): Result.001 file - promoters70/4768236
aaaaaaata

SEQ ID NO: 86665 - DNA, 9 bp, Unknown
  misc_feature (1)..( 9): Result.001 file - promoters70/4768236
aagtcaaaa

SEQ ID NO: 86666 - DNA, 9 bp, Unknown
  misc_feature (1)..( 9): Result.001 file - promoters70/4768236
atttcaaaa

SEQ ID NO: 86667 - DNA, 9 bp, Unknown
  misc_feature (1)..( 9): Result.001 file - promoters70/4768236
aagacaaaa

SEQ ID NO: 86668 - DNA, 7 bp, Unknown
  misc_feature (1)..( 7): Result.001 file - promoters70/4768236
aaaaaag

SEQ ID NO: 86669 - DNA, 7 bp, Unknown
  misc_feature (1)..( 7): Result.001 file - promoters70/4768236
aaaaaaa

SEQ ID NO: 86670 - DNA, 7 bp, Unknown
  misc_feature (1)..( 7): Result.001 file - promoters70/4768236
aaacaat

SEQ ID NO: 86671 - DNA, 7 bp, Unknown
  misc_feature (1)..( 7): Result.001 file - promoters70/4768236
aaaatat

SEQ ID NO: 86672 - DNA, 7 bp, Unknown
  misc_feature (1)..( 7): Result.001 file - promoters70/4768236
aaaataa

SEQ ID NO: 86673 - DNA, 8 bp, Unknown
  misc_feature (1)..( 8): Result.001 file - promoters70/4768250
aaaactaa

SEQ ID NO: 86674 - DNA, 9 bp, Unknown
  misc_feature (1)..( 9): Result.001 file - promoters70/4768250
aataatatt

SEQ ID NO: 86675 - DNA, 9 bp, Unknown
  misc_feature (1)..( 9): Result.001 file - promoters70/4768250
aattatatc

SEQ ID NO: 86676 - DNA, 9 bp, Unknown
  misc_feature (1)..( 9): Result.001 file - promoters70/4768250
tacaatatt

SEQ ID NO: 86677 - DNA, 9 bp, Unknown
  misc_feature (1)..( 9): Result.001 file - promoters70/4768250
atcaatatg

SEQ ID NO: 86678 - DNA, 7 bp, Unknown
  misc_feature (1)..( 7): Result.001 file - promoters70/4768250
caagatt

SEQ ID NO: 86679 - DNA, 7 bp, Unknown
  misc_feature (1)..( 7): Result.001 file - promoters70/4768250
caaaatt

SEQ ID NO: 86680 - DNA, 7 bp, Unknown
  misc_feature (1)..( 7): Result.001 file - promoters70/4768250
caatatt

SEQ ID NO: 86681 - DNA, 7 bp, Unknown
  misc_feature (1)..( 7): Result.001 file - promoters70/4768250
caatatg

SEQ ID NO: 86682 - DNA, 10 bp, Unknown
  misc_feature (1)..( 10): Result.001 file - promoters70/4768250
agaaaaacct

SEQ ID NO: 86683 - DNA, 10 bp, Unknown
  misc_feature (1)..( 10): Result.001 file - promoters70/4768250
acaaaaccct

SEQ ID NO: 86684 - DNA, 10 bp, Unknown
  misc_feature (1)..( 10): Result.001 file - promoters70/4768250
agaaaaaaat

SEQ ID NO: 86685 - DNA, 10 bp, Unknown
  misc_feature (1)..( 10): Result.001 file - promoters70/4768250
ctaaaataat

SEQ ID NO: 86686 - DNA, 6 bp, Unknown
  misc_feature (1)..( 6): Result.001 file - promoters70/4768250
aataaa

SEQ ID NO: 86687 - DNA, 6 bp, Unknown
  misc_feature (1)..( 6): Result.001 file - promoters70/4768250
aataaa

SEQ ID NO: 86688 - DNA, 6 bp, Unknown
  misc_feature (1)..( 6): Result.001 file - promoters70/4768250
aataaa

SEQ ID NO: 86689 - DNA, 10 bp, Unknown
  misc_feature (1)..( 10): Result.001 file - promoters70/4768250
cttttagtta

SEQ ID NO: 86690 - DNA, 10 bp, Unknown
  misc_feature (1)..( 10): Result.001 file - promoters70/4768250
cttgtagtac

SEQ ID NO: 86691 - DNA, 10 bp, Unknown
  misc_feature (1)..( 10): Result.001 file - promoters70/4768250
aatttattta

SEQ ID NO: 86692 - DNA, 8 bp, Unknown
  misc_feature (1)..( 8): Result.001 file - promoters70/4768250
aaataata

SEQ ID NO: 86693 - DNA, 8 bp, Unknown
  misc_feature (1)..( 8): Result.001 file - promoters70/4768250
aaaaaatt

SEQ ID NO: 86694 - DNA, 8 bp, Unknown
  misc_feature (1)..( 8): Result.001 file - promoters70/4768250
aaataata

SEQ ID NO: 86695 - DNA, 13 bp, Unknown
  misc_feature (1)..( 13): Result.001 file - promoters70/4768250
agtaatttttgaa

SEQ ID NO: 86696 - DNA, 13 bp, Unknown
  misc_feature (1)..( 13): Result.001 file - promoters70/4768250
agtaatttttggt

SEQ ID NO: 86697 - DNA, 13 bp, Unknown
  misc_feature (1)..( 13): Result.001 file - promoters70/4768250
actgagtttaggt

SEQ ID NO: 86698 - DNA, 8 bp, Unknown
  misc_feature (1)..( 8): Result.001 file - promoters70/4768250
taagttta

SEQ ID NO: 86699 - DNA, 8 bp, Unknown
  misc_feature (1)..( 8): Result.001 file - promoters70/4768250
taatttta

SEQ ID NO: 86700 - DNA, 8 bp, Unknown
  misc_feature (1)..( 8): Result.001 file - promoters70/4768265
caattttg

SEQ ID NO: 86701 - DNA, 8 bp, Unknown
  misc_feature (1)..( 8): Result.001 file - promoters70/4768265
aaaacatt

SEQ ID NO: 86702 - DNA, 8 bp, Unknown
  misc_feature (1)..( 8): Result.001 file - promoters70/4768265
aaaacagt

SEQ ID NO: 86703 - DNA, 8 bp, Unknown
  misc_feature (1)..( 8): Result.001 file - promoters70/4768265
aaaaaatt

SEQ ID NO: 86704 - DNA, 8 bp, Unknown
  misc_feature (1)..( 8): Result.001 file - promoters70/4768285
aaaataat

SEQ ID NO: 86705 - DNA, 7 bp, Unknown
  misc_feature (1)..( 7): Result.001 file - promoters70/4768285
tttcatt

SEQ ID NO: 86706 - DNA, 7 bp, Unknown
  misc_feature (1)..( 7): Result.001 file - promoters70/4768285
tttgatt

SEQ ID NO: 86707 - DNA, 7 bp, Unknown
  misc_feature (1)..( 7): Result.001 file - promoters70/4768285
tttaatt

SEQ ID NO: 86708 - DNA, 7 bp, Unknown
  misc_feature (1)..( 7): Result.001 file - promoters70/4768289
tttgatt

SEQ ID NO: 86709 - DNA, 9 bp, Unknown
  misc_feature (1)..( 9): Result.001 file - promoters70/4768289
gtttattaa

SEQ ID NO: 86710 - DNA, 9 bp, Unknown
  misc_feature (1)..( 9): Result.001 file - promoters70/4768289
atttattaa

SEQ ID NO: 86711 - DNA, 9 bp, Unknown
  misc_feature (1)..( 9): Result.001 file - promoters70/4768319
gtttatgaa

SEQ ID NO: 86712 - DNA, 13 bp, Unknown
  misc_feature (1)..( 13): Result.001 file - promoters70/4768319
catcttcctttgt

SEQ ID NO: 86713 - DNA, 13 bp, Unknown
  misc_feature (1)..( 13): Result.001 file - promoters70/4768319
attcttcgtttgt

SEQ ID NO: 86714 - DNA, 13 bp, Unknown
  misc_feature (1)..( 13): Result.001 file - promoters70/4768319
cattttctttttg

SEQ ID NO: 86715 - DNA, 11 bp, Unknown
  misc_feature (1)..( 11): Result.001 file - promoters70/4768319
tagataattgt

SEQ ID NO: 86716 - DNA, 11 bp, Unknown
  misc_feature (1)..( 11): Result.001 file - promoters70/4768319
cagataagtct

SEQ ID NO: 86717 - DNA, 11 bp, Unknown
  misc_feature (1)..( 11): Result.001 file - promoters70/4768354
tagacaattgt

SEQ ID NO: 86718 - DNA, 11 bp, Unknown
  misc_feature (1)..( 11): Result.001 file - promoters70/4768354
taacatttttt

SEQ ID NO: 86719 - DNA, 11 bp, Unknown
  misc_feature (1)..( 11): Result.001 file - promoters70/4768354
taagatttttg

SEQ ID NO: 86720 - DNA, 11 bp, Unknown
  misc_feature (1)..( 11): Result.001 file - promoters70/4768354
tagaatttttt

SEQ ID NO: 86721 - DNA, 9 bp, Unknown
  misc_feature (1)..( 9): Result.001 file - promoters70/4768354
tttaatcag

SEQ ID NO: 86722 - DNA, 9 bp, Unknown
  misc_feature (1)..( 9): Result.001 file - promoters70/4768354
tttattcag

SEQ ID NO: 86723 - DNA, 9 bp, Unknown
  misc_feature (1)..( 9): Result.001 file - promoters70/4768528
gttattcga

SEQ ID NO: 86724 - DNA, 9 bp, Unknown
  misc_feature (1)..( 9): Result.001 file - promoters70/4768528
aaactttaa

SEQ ID NO: 86725 - DNA, 9 bp, Unknown
  misc_feature (1)..( 9): Result.001 file - promoters70/4768528
aaaatttct

SEQ ID NO: 86726 - DNA, 9 bp, Unknown
  misc_feature (1)..( 9): Result.001 file - promoters70/4768528
aaaatctct

SEQ ID NO: 86727 - DNA, 8 bp, Unknown
  misc_feature (1)..( 8): Result.001 file - promoters70/4768528
tttgaaac

SEQ ID NO: 86728 - DNA, 8 bp, Unknown
  misc_feature (1)..( 8): Result.001 file - promoters70/4768528
tgtgaaac

SEQ ID NO: 86729 - DNA, 8 bp, Unknown
  misc_feature (1)..( 8): Result.001 file - promoters70/4768528
tgtgaaaa

SEQ ID NO: 86730 - DNA, 9 bp, Unknown
  misc_feature (1)..( 9): Result.001 file - promoters70/4768528
gatatttct

SEQ ID NO: 86731 - DNA, 9 bp, Unknown
  misc_feature (1)..( 9): Result.001 file - promoters70/4768528
aaaatttct

SEQ ID NO: 86732 - DNA, 9 bp, Unknown
  misc_feature (1)..( 9): Result.001 file - promoters70/4768528
aaaatctct

SEQ ID NO: 86733 - DNA, 9 bp, Unknown
  misc_feature (1)..( 9): Result.001 file - promoters70/4768528
tttcaaaat

SEQ ID NO: 86734 - DNA, 9 bp, Unknown
  misc_feature (1)..( 9): Result.001 file - promoters70/4768528
tatcaaaat

SEQ ID NO: 86735 - DNA, 9 bp, Unknown
  misc_feature (1)..( 9): Result.001 file - promoters70/4768532
ttttaaaat

SEQ ID NO: 86736 - DNA, 7 bp, Unknown
  misc_feature (1)..( 7): Result.001 file - promoters70/4768532
tttttgt

SEQ ID NO: 86737 - DNA, 7 bp, Unknown
  misc_feature (1)..( 7): Result.001 file - promoters70/4768532
gttttgt

SEQ ID NO: 86738 - DNA, 8 bp, Unknown
  misc_feature (1)..( 8): Result.001 file - promoters70/4768532
attattgg

SEQ ID NO: 86739 - DNA, 9 bp, Unknown
  misc_feature (1)..( 9): Result.001 file - promoters70/4768532
tgtcctaat

SEQ ID NO: 86740 - DNA, 9 bp, Unknown
  misc_feature (1)..( 9): Result.001 file - promoters70/4768532
tgtcttaac

SEQ ID NO: 86741 - DNA, 9 bp, Unknown
  misc_feature (1)..( 9): Result.001 file - promoters70/4768615
cgtccgaat

SEQ ID NO: 86742 - DNA, 10 bp, Unknown
  misc_feature (1)..( 10): Result.001 file - promoters70/4768615
tgaaaatatt

SEQ ID NO: 86743 - DNA, 10 bp, Unknown
  misc_feature (1)..( 10): Result.001 file - promoters70/4768615
caaaaataag

SEQ ID NO: 86744 - DNA, 10 bp, Unknown
  misc_feature (1)..( 10): Result.001 file - promoters70/4768615
taaaaattaa

SEQ ID NO: 86745 - DNA, 10 bp, Unknown
  misc_feature (1)..( 10): Result.001 file - promoters70/4768615
ataaagtata

SEQ ID NO: 86746 - DNA, 10 bp, Unknown
  misc_feature (1)..( 10): Result.001 file - promoters70/4768615
caaaaaaggt

SEQ ID NO: 86747 - DNA, 10 bp, Unknown
  misc_feature (1)..( 10): Result.001 file - promoters70/4768615
gtaaaatttc

SEQ ID NO: 86748 - DNA, 10 bp, Unknown
  misc_feature (1)..( 10): Result.001 file - promoters70/4768615
taaaaatctc

SEQ ID NO: 86749 - DNA, 10 bp, Unknown
  misc_feature (1)..( 10): Result.001 file - promoters70/4768615
aaaacaaacg

SEQ ID NO: 86750 - DNA, 10 bp, Unknown
  misc_feature (1)..( 10): Result.001 file - promoters70/4768615
aaaaaaaaga

SEQ ID NO: 86751 - DNA, 10 bp, Unknown
  misc_feature (1)..( 10): Result.001 file - promoters70/4768615
taaataaatt

SEQ ID NO: 86752 - DNA, 10 bp, Unknown
  misc_feature (1)..( 10): Result.001 file - promoters70/4768615
caaacaaatg

SEQ ID NO: 86753 - DNA, 10 bp, Unknown
  misc_feature (1)..( 10): Result.001 file - promoters70/4768615
ataatgaatt

SEQ ID NO: 86754 - DNA, 10 bp, Unknown
  misc_feature (1)..( 10): Result.001 file - promoters70/4768615
ttaactaatt

SEQ ID NO: 86755 - DNA, 11 bp, Unknown
  misc_feature (1)..( 11): Result.001 file - promoters70/4768615
ataatataact

SEQ ID NO: 86756 - DNA, 11 bp, Unknown
  misc_feature (1)..( 11): Result.001 file - promoters70/4768615
aattacaaaac

SEQ ID NO: 86757 - DNA, 11 bp, Unknown
  misc_feature (1)..( 11): Result.001 file - promoters70/4768615
gtatacaaaaa

SEQ ID NO: 86758 - DNA, 11 bp, Unknown
  misc_feature (1)..( 11): Result.001 file - promoters70/4768615
caatactatct

SEQ ID NO: 86759 - DNA, 11 bp, Unknown
  misc_feature (1)..( 11): Result.001 file - promoters70/4768615
tttaacaaaaa

SEQ ID NO: 86760 - DNA, 11 bp, Unknown
  misc_feature (1)..( 11): Result.001 file - promoters70/4768615
actcccaaaaa

SEQ ID NO: 86761 - DNA, 11 bp, Unknown
  misc_feature (1)..( 11): Result.001 file - promoters70/4768615
aattcctaaaa

SEQ ID NO: 86762 - DNA, 11 bp, Unknown
  misc_feature (1)..( 11): Result.001 file - promoters70/4768615
gaatactaaaa

SEQ ID NO: 86763 - DNA, 13 bp, Unknown
  misc_feature (1)..( 13): Result.001 file - promoters70/4768615
aataaataaaagc

SEQ ID NO: 86764 - DNA, 13 bp, Unknown
  misc_feature (1)..( 13): Result.001 file - promoters70/4768615
aaacaataaaatt

SEQ ID NO: 86765 - DNA, 13 bp, Unknown
  misc_feature (1)..( 13): Result.001 file - promoters70/4768615
atgaaatataagt

SEQ ID NO: 86766 - DNA, 13 bp, Unknown
  misc_feature (1)..( 13): Result.001 file - promoters70/4768615
aaacagtaaaacc

SEQ ID NO: 86767 - DNA, 13 bp, Unknown
  misc_feature (1)..( 13): Result.001 file - promoters70/4768615
aggagataatatt

SEQ ID NO: 86768 - DNA, 13 bp, Unknown
  misc_feature (1)..( 13): Result.001 file - promoters70/4768615
cgtcaaaaaactt

SEQ ID NO: 86769 - DNA, 14 bp, Unknown
  misc_feature (1)..( 14): Result.001 file - promoters70/4768615
gaatgtcaaccaac

SEQ ID NO: 86770 - DNA, 14 bp, Unknown
  misc_feature (1)..( 14): Result.001 file - promoters70/4768615
tttaataaaccaat

SEQ ID NO: 86771 - DNA, 14 bp, Unknown
  misc_feature (1)..( 14): Result.001 file - promoters70/4768615
gagacgagaccaat

SEQ ID NO: 86772 - DNA, 14 bp, Unknown
  misc_feature (1)..( 14): Result.001 file - promoters70/4768615
aacgacaaaacaag

SEQ ID NO: 86773 - DNA, 14 bp, Unknown
  misc_feature (1)..( 14): Result.001 file - promoters70/4768615
aagtacaaaacgaa

SEQ ID NO: 86774 - DNA, 14 bp, Unknown
  misc_feature (1)..( 14): Result.001 file - promoters70/4768615
aacaacaaaaaaag

SEQ ID NO: 86775 - DNA, 7 bp, Unknown
  misc_feature (1)..( 7): Result.001 file - promoters70/4768615
taagatt

SEQ ID NO: 86776 - DNA, 7 bp, Unknown
  misc_feature (1)..( 7): Result.001 file - promoters70/4768615
taaaatt

SEQ ID NO: 86777 - DNA, 7 bp, Unknown
  misc_feature (1)..( 7): Result.001 file - promoters70/4768615
taagatc

SEQ ID NO: 86778 - DNA, 7 bp, Unknown
  misc_feature (1)..( 7): Result.001 file - promoters70/4768615
aaaaatt

SEQ ID NO: 86779 - DNA, 7 bp, Unknown
  misc_feature (1)..( 7): Result.001 file - promoters70/4768615
taaaaat

SEQ ID NO: 86780 - DNA, 7 bp, Unknown
  misc_feature (1)..( 7): Result.001 file - promoters70/4768635
caaaaat

SEQ ID NO: 86781 - DNA, 10 bp, Unknown
  misc_feature (1)..( 10): Result.001 file - promoters70/4768635
aaacaaaaca

SEQ ID NO: 86782 - DNA, 10 bp, Unknown
  misc_feature (1)..( 10): Result.001 file - promoters70/4768635
aaacaaaaac

SEQ ID NO: 86783 - DNA, 10 bp, Unknown
  misc_feature (1)..( 10): Result.001 file - promoters70/4768635
taacataaca

SEQ ID NO: 86784 - DNA, 10 bp, Unknown
  misc_feature (1)..( 10): Result.001 file - promoters70/4768635
ctacaaaaat

SEQ ID NO: 86785 - DNA, 11 bp, Unknown
  misc_feature (1)..( 11): Result.001 file - promoters70/4768635
acccaataact

SEQ ID NO: 86786 - DNA, 11 bp, Unknown
  misc_feature (1)..( 11): Result.001 file - promoters70/4768698
aggctataaat

SEQ ID NO: 86787 - DNA, 8 bp, Unknown
  misc_feature (1)..( 8): Result.001 file - promoters70/4768698
attagttc

SEQ ID NO: 86788 - DNA, 8 bp, Unknown
  misc_feature (1)..( 8): Result.001 file - promoters70/4768698
atttgtta

SEQ ID NO: 86789 - DNA, 8 bp, Unknown
  misc_feature (1)..( 8): Result.001 file - promoters70/4768698
attagtta

SEQ ID NO: 86790 - DNA, 8 bp, Unknown
  misc_feature (1)..( 8): Result.001 file - promoters70/4768698
attagtta

SEQ ID NO: 86791 - DNA, 8 bp, Unknown
  misc_feature (1)..( 8): Result.001 file - promoters70/4768698
aattgtta

SEQ ID NO: 86792 - DNA, 14 bp, Unknown
  misc_feature (1)..( 14): Result.001 file - promoters70/4768698
aattcgaatttttc

SEQ ID NO: 86793 - DNA, 14 bp, Unknown
  misc_feature (1)..( 14): Result.001 file - promoters70/4768698
ggccggaattttag

SEQ ID NO: 86794 - DNA, 14 bp, Unknown
  misc_feature (1)..( 14): Result.001 file - promoters70/4768698
atttgaaattttca

SEQ ID NO: 86795 - DNA, 14 bp, Unknown
  misc_feature (1)..( 14): Result.001 file - promoters70/4768698
tttgaaaatttcat

SEQ ID NO: 86796 - DNA, 14 bp, Unknown
  misc_feature (1)..( 14): Result.001 file - promoters70/4768698
gcgctaaactttta

SEQ ID NO: 86797 - DNA, 16 bp, Unknown
  misc_feature (1)..( 16): Result.001 file - promoters70/4768698
attcgaatttttcaat

SEQ ID NO: 86798 - DNA, 16 bp, Unknown
  misc_feature (1)..( 16): Result.001 file - promoters70/4768698
tttagtctattttaat

SEQ ID NO: 86799 - DNA, 16 bp, Unknown
  misc_feature (1)..( 16): Result.001 file - promoters70/4768698
atttgaaattttcata

SEQ ID NO: 86800 - DNA, 16 bp, Unknown
  misc_feature (1)..( 16): Result.001 file - promoters70/4768698
gcgctaaacttttaaa

SEQ ID NO: 86801 - DNA, 16 bp, Unknown
  misc_feature (1)..( 16): Result.001 file - promoters70/4768698
tttgaaaatttcataa

SEQ ID NO: 86802 - DNA, 14 bp, Unknown
  misc_feature (1)..( 14): Result.001 file - promoters70/4768698
atgttagataggaa

SEQ ID NO: 86803 - DNA, 14 bp, Unknown
  misc_feature (1)..( 14): Result.001 file - promoters70/4768698
gtgttaaatatgaa

SEQ ID NO: 86804 - DNA, 14 bp, Unknown
  misc_feature (1)..( 14): Result.001 file - promoters70/4768698
ttgttttatttact

SEQ ID NO: 86805 - DNA, 14 bp, Unknown
  misc_feature (1)..( 14): Result.001 file - promoters70/4768698
ttctaaaatattgt

SEQ ID NO: 86806 - DNA, 8 bp, Unknown
  misc_feature (1)..( 8): Result.001 file - promoters70/4768698
tatataaa

SEQ ID NO: 86807 - DNA, 8 bp, Unknown
  misc_feature (1)..( 8): Result.001 file - promoters70/4768698
tatataaa

SEQ ID NO: 86808 - DNA, 8 bp, Unknown
  misc_feature (1)..( 8): Result.001 file - promoters70/4768698
tatataaa

SEQ ID NO: 86809 - DNA, 8 bp, Unknown
  misc_feature (1)..( 8): Result.001 file - promoters70/4768698
cctataaa

SEQ ID NO: 86810 - DNA, 8 bp, Unknown
  misc_feature (1)..( 8): Result.001 file - promoters70/4768698
gaaaattc

SEQ ID NO: 86811 - DNA, 8 bp, Unknown
  misc_feature (1)..( 8): Result.001 file - promoters70/4768698
gaaaattt

SEQ ID NO: 86812 - DNA, 8 bp, Unknown
  misc_feature (1)..( 8): Result.001 file - promoters70/4768698
tgaaattt

SEQ ID NO: 86813 - DNA, 8 bp, Unknown
  misc_feature (1)..( 8): Result.001 file - promoters70/4768698
taaacttt

SEQ ID NO: 86814 - DNA, 11 bp, Unknown
  misc_feature (1)..( 11): Result.001 file - promoters70/4768698
cttataattat

SEQ ID NO: 86815 - DNA, 11 bp, Unknown
  misc_feature (1)..( 11): Result.001 file - promoters70/4768698
tttataagtat

SEQ ID NO: 86816 - DNA, 11 bp, Unknown
  misc_feature (1)..( 11): Result.001 file - promoters70/4768698
tttgtaacttc

SEQ ID NO: 86817 - DNA, 11 bp, Unknown
  misc_feature (1)..( 11): Result.001 file - promoters70/4768698
gttattagtta

SEQ ID NO: 86818 - DNA, 11 bp, Unknown
  misc_feature (1)..( 11): Result.001 file - promoters70/4768698
gttattagtta

SEQ ID NO: 86819 - DNA, 10 bp, Unknown
  misc_feature (1)..( 10): Result.001 file - promoters70/4768698
gtaacttcag

SEQ ID NO: 86820 - DNA, 10 bp, Unknown
  misc_feature (1)..( 10): Result.001 file - promoters70/4768698
ataactttat

SEQ ID NO: 86821 - DNA, 10 bp, Unknown
  misc_feature (1)..( 10): Result.001 file - promoters70/4768698
ataactttat

SEQ ID NO: 86822 - DNA, 10 bp, Unknown
  misc_feature (1)..( 10): Result.001 file - promoters70/4768698
atatctttat

SEQ ID NO: 86823 - DNA, 18 bp, Unknown
  misc_feature (1)..( 18): Result.001 file - promoters70/4768698
ttgttatgtaaattttga

SEQ ID NO: 86824 - DNA, 18 bp, Unknown
  misc_feature (1)..( 18): Result.001 file - promoters70/4768698
attgtgaaataattttgt

SEQ ID NO: 86825 - DNA, 18 bp, Unknown
  misc_feature (1)..( 18): Result.001 file - promoters70/4768698
attgtgaaataattttgt

SEQ ID NO: 86826 - DNA, 18 bp, Unknown
  misc_feature (1)..( 18): Result.001 file - promoters70/4768829
taattgttaatcttttga

SEQ ID NO: 86827 - DNA, 8 bp, Unknown
  misc_feature (1)..( 8): Result.001 file - promoters70/4768829
caaattat

SEQ ID NO: 86828 - DNA, 8 bp, Unknown
  misc_feature (1)..( 8): Result.001 file - promoters70/4768829
caaaatat

SEQ ID NO: 86829 - DNA, 8 bp, Unknown
  misc_feature (1)..( 8): Result.001 file - promoters70/4768829
caaattat

SEQ ID NO: 86830 - DNA, 7 bp, Unknown
  misc_feature (1)..( 7): Result.001 file - promoters70/4768829
tatttct

SEQ ID NO: 86831 - DNA, 7 bp, Unknown
  misc_feature (1)..( 7): Result.001 file - promoters70/4768829
tatgtct

SEQ ID NO: 86832 - DNA, 7 bp, Unknown
  misc_feature (1)..( 7): Result.001 file - promoters70/4768829
aatgtct

SEQ ID NO: 86833 - DNA, 7 bp, Unknown
  misc_feature (1)..( 7): Result.001 file - promoters70/4768829
tttattt

SEQ ID NO: 86834 - DNA, 7 bp, Unknown
  misc_feature (1)..( 7): Result.001 file - promoters70/4768829
tttattt

SEQ ID NO: 86835 - DNA, 7 bp, Unknown
  misc_feature (1)..( 7): Result.001 file - promoters70/4768829
tttatta

SEQ ID NO: 86836 - DNA, 8 bp, Unknown
  misc_feature (1)..( 8): Result.001 file - promoters70/4768829
taaaaaaa

SEQ ID NO: 86837 - DNA, 8 bp, Unknown
  misc_feature (1)..( 8): Result.001 file - promoters70/4768829
taaaaaag

SEQ ID NO: 86838 - DNA, 9 bp, Unknown
  misc_feature (1)..( 9): Result.001 file - promoters70/4768829
taaacaaaa

SEQ ID NO: 86839 - DNA, 7 bp, Unknown
  misc_feature (1)..( 7): Result.001 file - promoters70/4768829
aaatcaa

SEQ ID NO: 86840 - DNA, 7 bp, Unknown
  misc_feature (1)..( 7): Result.001 file - promoters70/4768829
gaatcaa

SEQ ID NO: 86841 - DNA, 7 bp, Unknown
  misc_feature (1)..( 7): Result.001 file - promoters70/4768848
gaatcac

SEQ ID NO: 86842 - DNA, 9 bp, Unknown
  misc_feature (1)..( 9): Result.001 file - promoters70/4768848
atctccatc

SEQ ID NO: 86843 - DNA, 9 bp, Unknown
  misc_feature (1)..( 9): Result.001 file - promoters70/4768848
tactccatt

SEQ ID NO: 86844 - DNA, 9 bp, Unknown
  misc_feature (1)..( 9): Result.001 file - promoters70/4768848
tactcaatt

SEQ ID NO: 86845 - DNA, 7 bp, Unknown
  misc_feature (1)..( 7): Result.001 file - promoters70/4768848
attaaat

SEQ ID NO: 86846 - DNA, 7 bp, Unknown
  misc_feature (1)..( 7): Result.001 file - promoters70/4768848
attaaaa

SEQ ID NO: 86847 - DNA, 8 bp, Unknown
  misc_feature (1)..( 8): Result.001 file - promoters70/4769059
tttataat

SEQ ID NO: 86848 - DNA, 12 bp, Unknown
  misc_feature (1)..( 12): Result.001 file - promoters70/4769059
ctatctctttat

SEQ ID NO: 86849 - DNA, 12 bp, Unknown
  misc_feature (1)..( 12): Result.001 file - promoters70/4769059
ttatatctgtat

SEQ ID NO: 86850 - DNA, 12 bp, Unknown
  misc_feature (1)..( 12): Result.001 file - promoters70/4769137
ttagatcgtacc

SEQ ID NO: 86851 - DNA, 9 bp, Unknown
  misc_feature (1)..( 9): Result.001 file - promoters70/4769137
tttgtctat

SEQ ID NO: 86852 - DNA, 9 bp, Unknown
  misc_feature (1)..( 9): Result.001 file - promoters70/4769137
tttttcttt

SEQ ID NO: 86853 - DNA, 9 bp, Unknown
  misc_feature (1)..( 9): Result.001 file - promoters70/4769137
gttgtcttt

SEQ ID NO: 86854 - DNA, 9 bp, Unknown
  misc_feature (1)..( 9): Result.001 file - promoters70/4769137
atttacttt

SEQ ID NO: 86855 - DNA, 8 bp, Unknown
  misc_feature (1)..( 8): Result.001 file - promoters70/4769137
taaaaaaa

SEQ ID NO: 86856 - DNA, 8 bp, Unknown
  misc_feature (1)..( 8): Result.001 file - promoters70/4769137
taacaaat

SEQ ID NO: 86857 - DNA, 8 bp, Unknown
  misc_feature (1)..( 8): Result.001 file - promoters70/4769137
taacaaaa

SEQ ID NO: 86858 - DNA, 8 bp, Unknown
  misc_feature (1)..( 8): Result.001 file - promoters70/4769137
tttttgtg

SEQ ID NO: 86859 - DNA, 8 bp, Unknown
  misc_feature (1)..( 8): Result.001 file - promoters70/4769137
ttttggtg

SEQ ID NO: 86860 - DNA, 8 bp, Unknown
  misc_feature (1)..( 8): Result.001 file - promoters70/4769137
atttggta

SEQ ID NO: 86861 - DNA, 6 bp, Unknown
  misc_feature (1)..( 6): Result.001 file - promoters70/4769137
tataaa

SEQ ID NO: 86862 - DNA, 6 bp, Unknown
  misc_feature (1)..( 6): Result.001 file - promoters70/4769137
tataaa

SEQ ID NO: 86863 - DNA, 6 bp, Unknown
  misc_feature (1)..( 6): Result.001 file - promoters70/4769137
tataaa

SEQ ID NO: 86864 - DNA, 8 bp, Unknown
  misc_feature (1)..( 8): Result.001 file - promoters70/4769137
tttttttg

SEQ ID NO: 86865 - DNA, 8 bp, Unknown
  misc_feature (1)..( 8): Result.001 file - promoters70/4769137
ttttttag

SEQ ID NO: 86866 - DNA, 9 bp, Unknown
  misc_feature (1)..( 9): Result.001 file - promoters70/4769137
ttttattag

SEQ ID NO: 86867 - DNA, 9 bp, Unknown
  misc_feature (1)..( 9): Result.001 file - promoters70/4769137
attactttg

SEQ ID NO: 86868 - DNA, 9 bp, Unknown
  misc_feature (1)..( 9): Result.001 file - promoters70/4769137
tttactttg

SEQ ID NO: 86869 - DNA, 9 bp, Unknown
  misc_feature (1)..( 9): Result.001 file - promoters70/4769137
ttttctttt

SEQ ID NO: 86870 - DNA, 9 bp, Unknown
  misc_feature (1)..( 9): Result.001 file - promoters70/4769137
ccactagtt

SEQ ID NO: 86871 - DNA, 9 bp, Unknown
  misc_feature (1)..( 9): Result.001 file - promoters70/4769137
ttactggtt

SEQ ID NO: 86872 - DNA, 9 bp, Unknown
  misc_feature (1)..( 9): Result.001 file - promoters70/4769153
ccaccagtt

SEQ ID NO: 86873 - DNA, 13 bp, Unknown
  misc_feature (1)..( 13): Result.001 file - promoters70/4769153
acattataaaata

SEQ ID NO: 86874 - DNA, 13 bp, Unknown
  misc_feature (1)..( 13): Result.001 file - promoters70/4769153
acattaaaaaaat

SEQ ID NO: 86875 - DNA, 13 bp, Unknown
  misc_feature (1)..( 13): Result.001 file - promoters70/4769153
tatatatataata

SEQ ID NO: 86876 - DNA, 10 bp, Unknown
  misc_feature (1)..( 10): Result.001 file - promoters70/4769153
aaattgttta

SEQ ID NO: 86877 - DNA, 10 bp, Unknown
  misc_feature (1)..( 10): Result.001 file - promoters70/4769153
aaaatgtagt

SEQ ID NO: 86878 - DNA, 10 bp, Unknown
  misc_feature (1)..( 10): Result.001 file - promoters70/4769180
atatttttta

SEQ ID NO: 86879 - DNA, 9 bp, Unknown
  misc_feature (1)..( 9): Result.001 file - promoters70/4769180
aaaaacatt

SEQ ID NO: 86880 - DNA, 9 bp, Unknown
  misc_feature (1)..( 9): Result.001 file - promoters70/4769180
gaaaaaatt

SEQ ID NO: 86881 - DNA, 9 bp, Unknown
  misc_feature (1)..( 9): Result.001 file - promoters70/4769180
acaataatc

SEQ ID NO: 86882 - DNA, 10 bp, Unknown
  misc_feature (1)..( 10): Result.001 file - promoters70/4769180
caaaaaaaag

SEQ ID NO: 86883 - DNA, 10 bp, Unknown
  misc_feature (1)..( 10): Result.001 file - promoters70/4769180
atggaaaaag

SEQ ID NO: 86884 - DNA, 10 bp, Unknown
  misc_feature (1)..( 10): Result.001 file - promoters70/4769180
aaataaaata

SEQ ID NO: 86885 - DNA, 9 bp, Unknown
  misc_feature (1)..( 9): Result.001 file - promoters70/4769180
tgtttacag

SEQ ID NO: 86886 - DNA, 9 bp, Unknown
  misc_feature (1)..( 9): Result.001 file - promoters70/4769180
tagttacag

SEQ ID NO: 86887 - DNA, 9 bp, Unknown
  misc_feature (1)..( 9): Result.001 file - promoters70/4769180
taggtacat

SEQ ID NO: 86888 - DNA, 7 bp, Unknown
  misc_feature (1)..( 7): Result.001 file - promoters70/4769180
agaaaat

SEQ ID NO: 86889 - DNA, 7 bp, Unknown
  misc_feature (1)..( 7): Result.001 file - promoters70/4769180
agaaaag

SEQ ID NO: 86890 - DNA, 7 bp, Unknown
  misc_feature (1)..( 7): Result.001 file - promoters70/4769180
tgaaaag

SEQ ID NO: 86891 - DNA, 8 bp, Unknown
  misc_feature (1)..( 8): Result.001 file - promoters70/4769180
aagaaaaa

SEQ ID NO: 86892 - DNA, 8 bp, Unknown
  misc_feature (1)..( 8): Result.001 file - promoters70/4769180
aagaaaaa

SEQ ID NO: 86893 - DNA, 8 bp, Unknown
  misc_feature (1)..( 8): Result.001 file - promoters70/4769180
gagagaaa

SEQ ID NO: 86894 - DNA, 8 bp, Unknown
  misc_feature (1)..( 8): Result.001 file - promoters70/4769180
ttcctctt

SEQ ID NO: 86895 - DNA, 8 bp, Unknown
  misc_feature (1)..( 8): Result.001 file - promoters70/4769180
ttcttctt

SEQ ID NO: 86896 - DNA, 8 bp, Unknown
  misc_feature (1)..( 8): Result.001 file - promoters70/4769180
ttctgctt

SEQ ID NO: 86897 - DNA, 9 bp, Unknown
  misc_feature (1)..( 9): Result.001 file - promoters70/4769180
gtaacaaat

SEQ ID NO: 86898 - DNA, 9 bp, Unknown
  misc_feature (1)..( 9): Result.001 file - promoters70/4769180
ataataaat

SEQ ID NO: 86899 - DNA, 9 bp, Unknown
  misc_feature (1)..( 9): Result.001 file - promoters70/4769180
ataatagta

SEQ ID NO: 86900 - DNA, 7 bp, Unknown
  misc_feature (1)..( 7): Result.001 file - promoters70/4769180
ctaaaat

SEQ ID NO: 86901 - DNA, 7 bp, Unknown
  misc_feature (1)..( 7): Result.001 file - promoters70/4769180
ctataat

SEQ ID NO: 86902 - DNA, 7 bp, Unknown
  misc_feature (1)..( 7): Result.001 file - promoters70/4769180
atataat

SEQ ID NO: 86903 - DNA, 9 bp, Unknown
  misc_feature (1)..( 9): Result.001 file - promoters70/4769180
aaatcaatc

SEQ ID NO: 86904 - DNA, 9 bp, Unknown
  misc_feature (1)..( 9): Result.001 file - promoters70/4769180
aaattaatc

SEQ ID NO: 86905 - DNA, 9 bp, Unknown
  misc_feature (1)..( 9): Result.001 file - promoters70/4769180
tgatttatc

SEQ ID NO: 86906 - DNA, 11 bp, Unknown
  misc_feature (1)..( 11): Result.001 file - promoters70/4769180
taattaccaaa

SEQ ID NO: 86907 - DNA, 11 bp, Unknown
  misc_feature (1)..( 11): Result.001 file - promoters70/4769180
gaataaccaaa

SEQ ID NO: 86908 - DNA, 11 bp, Unknown
  misc_feature (1)..( 11): Result.001 file - promoters70/4769180
gaataatattt

SEQ ID NO: 86909 - DNA, 8 bp, Unknown
  misc_feature (1)..( 8): Result.001 file - promoters70/4769180
aaaacatt

SEQ ID NO: 86910 - DNA, 8 bp, Unknown
  misc_feature (1)..( 8): Result.001 file - promoters70/4769180
aaaatatt

SEQ ID NO: 86911 - DNA, 8 bp, Unknown
  misc_feature (1)..( 8): Result.001 file - promoters70/4769301
ttaatatt

SEQ ID NO: 86912 - DNA, 14 bp, Unknown
  misc_feature (1)..( 14): Result.001 file - promoters70/4769301
ggtcttacaatttt

SEQ ID NO: 86913 - DNA, 14 bp, Unknown
  misc_feature (1)..( 14): Result.001 file - promoters70/4769301
agaaatacaatttt

SEQ ID NO: 86914 - DNA, 14 bp, Unknown
  misc_feature (1)..( 14): Result.001 file - promoters70/4769301
agaactactattcg

SEQ ID NO: 86915 - DNA, 8 bp, Unknown
  misc_feature (1)..( 8): Result.001 file - promoters70/4769301
ctaaaata

SEQ ID NO: 86916 - DNA, 8 bp, Unknown
  misc_feature (1)..( 8): Result.001 file - promoters70/4769301
ctaaaaaa

SEQ ID NO: 86917 - DNA, 8 bp, Unknown
  misc_feature (1)..( 8): Result.001 file - promoters70/4769301
ttaaaaaa

SEQ ID NO: 86918 - DNA, 7 bp, Unknown
  misc_feature (1)..( 7): Result.001 file - promoters70/4769301
cttttgg

SEQ ID NO: 86919 - DNA, 7 bp, Unknown
  misc_feature (1)..( 7): Result.001 file - promoters70/4769301
tttttgg

SEQ ID NO: 86920 - DNA, 7 bp, Unknown
  misc_feature (1)..( 7): Result.001 file - promoters70/4769301
tttttgt

SEQ ID NO: 86921 - DNA, 10 bp, Unknown
  misc_feature (1)..( 10): Result.001 file - promoters70/4769301
ttttaaaaga

SEQ ID NO: 86922 - DNA, 10 bp, Unknown
  misc_feature (1)..( 10): Result.001 file - promoters70/4769301
tttcaaaaaa

SEQ ID NO: 86923 - DNA, 10 bp, Unknown
  misc_feature (1)..( 10): Result.001 file - promoters70/4769312
ttgcaaaaaa

SEQ ID NO: 86924 - DNA, 11 bp, Unknown
  misc_feature (1)..( 11): Result.001 file - promoters70/4769312
aaataaaatgt

SEQ ID NO: 86925 - DNA, 11 bp, Unknown
  misc_feature (1)..( 11): Result.001 file - promoters70/4769312
tgctaaaattg

SEQ ID NO: 86926 - DNA, 11 bp, Unknown
  misc_feature (1)..( 11): Result.001 file - promoters70/4769312
aaagaaaacat

SEQ ID NO: 86927 - DNA, 11 bp, Unknown
  misc_feature (1)..( 11): Result.001 file - promoters70/4769312
acgtaagattg

SEQ ID NO: 86928 - DNA, 11 bp, Unknown
  misc_feature (1)..( 11): Result.001 file - promoters70/4769312
caaaatagatt

SEQ ID NO: 86929 - DNA, 11 bp, Unknown
  misc_feature (1)..( 11): Result.001 file - promoters70/4769312
aaaaaaagaaa

SEQ ID NO: 86930 - DNA, 11 bp, Unknown
  misc_feature (1)..( 11): Result.001 file - promoters70/4769312
caataaagtag

SEQ ID NO: 86931 - DNA, 11 bp, Unknown
  misc_feature (1)..( 11): Result.001 file - promoters70/4769312
aaataaagctt

SEQ ID NO: 86932 - DNA, 11 bp, Unknown
  misc_feature (1)..( 11): Result.001 file - promoters70/4769312
caacaaaatag

SEQ ID NO: 86933 - DNA, 11 bp, Unknown
  misc_feature (1)..( 11): Result.001 file - promoters70/4769312
aaacaaagaaa

SEQ ID NO: 86934 - DNA, 11 bp, Unknown
  misc_feature (1)..( 11): Result.001 file - promoters70/4769312
caataaagtag

SEQ ID NO: 86935 - DNA, 11 bp, Unknown
  misc_feature (1)..( 11): Result.001 file - promoters70/4769312
aaataaagctt

SEQ ID NO: 86936 - DNA, 7 bp, Unknown
  misc_feature (1)..( 7): Result.001 file - promoters70/4769312
aaattaa

SEQ ID NO: 86937 - DNA, 7 bp, Unknown
  misc_feature (1)..( 7): Result.001 file - promoters70/4769312
aaattat

SEQ ID NO: 86938 - DNA, 7 bp, Unknown
  misc_feature (1)..( 7): Result.001 file - promoters70/4769312
aaagtaa

SEQ ID NO: 86939 - DNA, 7 bp, Unknown
  misc_feature (1)..( 7): Result.001 file - promoters70/4769312
aaatatt

SEQ ID NO: 86940 - DNA, 8 bp, Unknown
  misc_feature (1)..( 8): Result.001 file - promoters70/4769312
ggaaaaaa

SEQ ID NO: 86941 - DNA, 8 bp, Unknown
  misc_feature (1)..( 8): Result.001 file - promoters70/4769312
tgaacaaa

SEQ ID NO: 86942 - DNA, 8 bp, Unknown
  misc_feature (1)..( 8): Result.001 file - promoters70/4769312
tgaccaaa

SEQ ID NO: 86943 - DNA, 11 bp, Unknown
  misc_feature (1)..( 11): Result.001 file - promoters70/4769312
gaatctctctg

SEQ ID NO: 86944 - DNA, 11 bp, Unknown
  misc_feature (1)..( 11): Result.001 file - promoters70/4769312
caatcactctc

SEQ ID NO: 86945 - DNA, 11 bp, Unknown
  misc_feature (1)..( 11): Result.001 file - promoters70/4769312
caatccctctc

SEQ ID NO: 86946 - DNA, 10 bp, Unknown
  misc_feature (1)..( 10): Result.001 file - promoters70/4769312
tatatatacc

SEQ ID NO: 86947 - DNA, 10 bp, Unknown
  misc_feature (1)..( 10): Result.001 file - promoters70/4769312
tatataatag

SEQ ID NO: 86948 - DNA, 10 bp, Unknown
  misc_feature (1)..( 10): Result.001 file - promoters70/4769312
tatataaacc

SEQ ID NO: 86949 - DNA, 10 bp, Unknown
  misc_feature (1)..( 10): Result.001 file - promoters70/4769312
tatttaaaca

SEQ ID NO: 86950 - DNA, 9 bp, Unknown
  misc_feature (1)..( 9): Result.001 file - promoters70/4769312
ttgaccagg

SEQ ID NO: 86951 - DNA, 9 bp, Unknown
  misc_feature (1)..( 9): Result.001 file - promoters70/4769312
ttgaccaaa

SEQ ID NO: 86952 - DNA, 9 bp, Unknown
  misc_feature (1)..( 9): Result.001 file - promoters70/4769328
atgaacaaa

SEQ ID NO: 86953 - DNA, 12 bp, Unknown
  misc_feature (1)..( 12): Result.001 file - promoters70/4769328
aagaaaattgac

SEQ ID NO: 86954 - DNA, 12 bp, Unknown
  misc_feature (1)..( 12): Result.001 file - promoters70/4769328
gtcaaatttgtc

SEQ ID NO: 86955 - DNA, 12 bp, Unknown
  misc_feature (1)..( 12): Result.001 file - promoters70/4769328
aagaaatttgct

SEQ ID NO: 86956 - DNA, 12 bp, Unknown
  misc_feature (1)..( 12): Result.001 file - promoters70/4769328
taacaatttttt

SEQ ID NO: 86957 - DNA, 12 bp, Unknown
  misc_feature (1)..( 12): Result.001 file - promoters70/4769328
tatgaatctgct

SEQ ID NO: 86958 - DNA, 10 bp, Unknown
  misc_feature (1)..( 10): Result.001 file - promoters70/4769328
ttcatcgttt

SEQ ID NO: 86959 - DNA, 10 bp, Unknown
  misc_feature (1)..( 10): Result.001 file - promoters70/4769328
ttcttcgaca

SEQ ID NO: 86960 - DNA, 10 bp, Unknown
  misc_feature (1)..( 10): Result.001 file - promoters70/4769328
agcttcgacg

SEQ ID NO: 86961 - DNA, 10 bp, Unknown
  misc_feature (1)..( 10): Result.001 file - promoters70/4769328
acctttgacc

SEQ ID NO: 86962 - DNA, 10 bp, Unknown
  misc_feature (1)..( 10): Result.001 file - promoters70/4769328
ttcttctttg

SEQ ID NO: 86963 - DNA, 10 bp, Unknown
  misc_feature (1)..( 10): Result.001 file - promoters70/4770260
aattttaacc

SEQ ID NO: 86964 - DNA, 8 bp, Unknown
  misc_feature (1)..( 8): Result.001 file - promoters70/4770260
cttcatat

SEQ ID NO: 86965 - DNA, 8 bp, Unknown
  misc_feature (1)..( 8): Result.001 file - promoters70/4770260
attcatat

SEQ ID NO: 86966 - DNA, 8 bp, Unknown
  misc_feature (1)..( 8): Result.001 file - promoters70/4770260
atttatat

SEQ ID NO: 86967 - DNA, 6 bp, Unknown
  misc_feature (1)..( 6): Result.001 file - promoters70/4770260
ccattt

SEQ ID NO: 86968 - DNA, 8 bp, Unknown
  misc_feature (1)..( 8): Result.001 file - promoters70/4770260
ttccattt

SEQ ID NO: 86969 - DNA, 8 bp, Unknown
  misc_feature (1)..( 8): Result.001 file - promoters70/4770260
ttcccttt

SEQ ID NO: 86970 - DNA, 8 bp, Unknown
  misc_feature (1)..( 8): Result.001 file - promoters70/4770260
tttgaaat

SEQ ID NO: 86971 - DNA, 8 bp, Unknown
  misc_feature (1)..( 8): Result.001 file - promoters70/4770260
tttcaaat

SEQ ID NO: 86972 - DNA, 8 bp, Unknown
  misc_feature (1)..( 8): Result.001 file - promoters70/4770278
cttcaaag

SEQ ID NO: 86973 - DNA, 8 bp, Unknown
  misc_feature (1)..( 8): Result.001 file - promoters70/4770278
caaaaatc

SEQ ID NO: 86974 - DNA, 8 bp, Unknown
  misc_feature (1)..( 8): Result.001 file - promoters70/4770278
taaatatc

SEQ ID NO: 86975 - DNA, 8 bp, Unknown
  misc_feature (1)..( 8): Result.001 file - promoters70/4770278
caaaaaaa

SEQ ID NO: 86976 - DNA, 6 bp, Unknown
  misc_feature (1)..( 6): Result.001 file - promoters70/4770278
tttgtc

SEQ ID NO: 86977 - DNA, 6 bp, Unknown
  misc_feature (1)..( 6): Result.001 file - promoters70/4770278
tttgtc

SEQ ID NO: 86978 - DNA, 7 bp, Unknown
  misc_feature (1)..( 7): Result.001 file - promoters70/4770278
tttagtc

SEQ ID NO: 86979 - DNA, 8 bp, Unknown
  misc_feature (1)..( 8): Result.001 file - promoters70/4770278
aaagaaaa

SEQ ID NO: 86980 - DNA, 8 bp, Unknown
  misc_feature (1)..( 8): Result.001 file - promoters70/4770278
aaataaat

SEQ ID NO: 86981 - DNA, 8 bp, Unknown
  misc_feature (1)..( 8): Result.001 file - promoters70/4770305
aaagaaaa

SEQ ID NO: 86982 - DNA, 8 bp, Unknown
  misc_feature (1)..( 8): Result.001 file - promoters70/4770305
cttttaga

SEQ ID NO: 86983 - DNA, 8 bp, Unknown
  misc_feature (1)..( 8): Result.001 file - promoters70/4770305
tgtttaga

SEQ ID NO: 86984 - DNA, 8 bp, Unknown
  misc_feature (1)..( 8): Result.001 file - promoters70/4770379
tgttgaga

SEQ ID NO: 86985 - DNA, 11 bp, Unknown
  misc_feature (1)..( 11): Result.001 file - promoters70/4770379
aagtaaacaaa

SEQ ID NO: 86986 - DNA, 11 bp, Unknown
  misc_feature (1)..( 11): Result.001 file - promoters70/4770379
aagaaaacaaa

SEQ ID NO: 86987 - DNA, 12 bp, Unknown
  misc_feature (1)..( 12): Result.001 file - promoters70/4770379
ttcataacgaaa

SEQ ID NO: 86988 - DNA, 7 bp, Unknown
  misc_feature (1)..( 7): Result.001 file - promoters70/4770379
tttcttt

SEQ ID NO: 86989 - DNA, 7 bp, Unknown
  misc_feature (1)..( 7): Result.001 file - promoters70/4770379
ttttttt

SEQ ID NO: 86990 - DNA, 7 bp, Unknown
  misc_feature (1)..( 7): Result.001 file - promoters70/4770379
tttttag

SEQ ID NO: 86991 - DNA, 9 bp, Unknown
  misc_feature (1)..( 9): Result.001 file - promoters70/4770379
atatacatt

SEQ ID NO: 86992 - DNA, 9 bp, Unknown
  misc_feature (1)..( 9): Result.001 file - promoters70/4770379
ctataaatt

SEQ ID NO: 86993 - DNA, 9 bp, Unknown
  misc_feature (1)..( 9): Result.001 file - promoters70/4770379
ctaaaaacg

SEQ ID NO: 86994 - DNA, 9 bp, Unknown
  misc_feature (1)..( 9): Result.001 file - promoters70/4770379
atataaaca

SEQ ID NO: 86995 - DNA, 9 bp, Unknown
  misc_feature (1)..( 9): Result.001 file - promoters70/4770379
atatataca

SEQ ID NO: 86996 - DNA, 9 bp, Unknown
  misc_feature (1)..( 9): Result.001 file - promoters70/4770379
atataaaga

SEQ ID NO: 86997 - DNA, 7 bp, Unknown
  misc_feature (1)..( 7): Result.001 file - promoters70/4770379
tacgaaa

SEQ ID NO: 86998 - DNA, 7 bp, Unknown
  misc_feature (1)..( 7): Result.001 file - promoters70/4770379
tactaaa

SEQ ID NO: 86999 - DNA, 7 bp, Unknown
  misc_feature (1)..( 7): Result.001 file - promoters70/4770379
aactaaa

SEQ ID NO: 87000 - DNA, 9 bp, Unknown
  misc_feature (1)..( 9): Result.001 file - promoters70/4770379
cgaactaaa

SEQ ID NO: 87001 - DNA, 9 bp, Unknown
  misc_feature (1)..( 9): Result.001 file - promoters70/4770379
cgaactaat

SEQ ID NO: 87002 - DNA, 9 bp, Unknown
  misc_feature (1)..( 9): Result.001 file - promoters70/4770379
cctactaaa

SEQ ID NO: 87003 - DNA, 7 bp, Unknown
  misc_feature (1)..( 7): Result.001 file - promoters70/4770379
cttttct

SEQ ID NO: 87004 - DNA, 7 bp, Unknown
  misc_feature (1)..( 7): Result.001 file - promoters70/4770379
gttttct

SEQ ID NO: 87005 - DNA, 7 bp, Unknown
  misc_feature (1)..( 7): Result.001 file - promoters70/4770443
gttttcg

SEQ ID NO: 87006 - DNA, 17 bp, Unknown
  misc_feature (1)..( 17): Result.001 file - promoters70/4770443
tttaatgttactaatta

SEQ ID NO: 87007 - DNA, 17 bp, Unknown
  misc_feature (1)..( 17): Result.001 file - promoters70/4770443
tttttgaatactaaaag

SEQ ID NO: 87008 - DNA, 17 bp, Unknown
  misc_feature (1)..( 17): Result.001 file - promoters70/4770443
aaatagtttactattta

SEQ ID NO: 87009 - DNA, 17 bp, Unknown
  misc_feature (1)..( 17): Result.001 file - promoters70/4770443
tttattgttacaaatct

SEQ ID NO: 87010 - DNA, 17 bp, Unknown
  misc_feature (1)..( 17): Result.001 file - promoters70/4770443
caataatttacgaaatt

SEQ ID NO: 87011 - DNA, 17 bp, Unknown
  misc_feature (1)..( 17): Result.001 file - promoters70/4770443
gtttcatttatttactt

SEQ ID NO: 87012 - DNA, 17 bp, Unknown
  misc_feature (1)..( 17): Result.001 file - promoters70/4770443
caaattacaattcattc

SEQ ID NO: 87013 - DNA, 13 bp, Unknown
  misc_feature (1)..( 13): Result.001 file - promoters70/4770443
actgatataataa

SEQ ID NO: 87014 - DNA, 13 bp, Unknown
  misc_feature (1)..( 13): Result.001 file - promoters70/4770443
gttgatttaataa

SEQ ID NO: 87015 - DNA, 13 bp, Unknown
  misc_feature (1)..( 13): Result.001 file - promoters70/4770443
gatgaaatatttt

SEQ ID NO: 87016 - DNA, 13 bp, Unknown
  misc_feature (1)..( 13): Result.001 file - promoters70/4770443
gtttatttccaat

SEQ ID NO: 87017 - DNA, 13 bp, Unknown
  misc_feature (1)..( 13): Result.001 file - promoters70/4770443
ctataaaaaattt

SEQ ID NO: 87018 - DNA, 13 bp, Unknown
  misc_feature (1)..( 13): Result.001 file - promoters70/4770443
cataaaaaattac

SEQ ID NO: 87019 - DNA, 13 bp, Unknown
  misc_feature (1)..( 13): Result.001 file - promoters70/4770443
tgataaatattca

SEQ ID NO: 87020 - DNA, 13 bp, Unknown
  misc_feature (1)..( 13): Result.001 file - promoters70/4770443
caacaaaactttc

SEQ ID NO: 87021 - DNA, 9 bp, Unknown
  misc_feature (1)..( 9): Result.001 file - promoters70/4770443
gtttgatta

SEQ ID NO: 87022 - DNA, 9 bp, Unknown
  misc_feature (1)..( 9): Result.001 file - promoters70/4770443
cttttatta

SEQ ID NO: 87023 - DNA, 9 bp, Unknown
  misc_feature (1)..( 9): Result.001 file - promoters70/4770443
gtttgaaat

SEQ ID NO: 87024 - DNA, 9 bp, Unknown
  misc_feature (1)..( 9): Result.001 file - promoters70/4770443
agtttattc

SEQ ID NO: 87025 - DNA, 9 bp, Unknown
  misc_feature (1)..( 9): Result.001 file - promoters70/4770443
ctttcattc

SEQ ID NO: 87026 - DNA, 9 bp, Unknown
  misc_feature (1)..( 9): Result.001 file - promoters70/4770443
cttttaaat

SEQ ID NO: 87027 - DNA, 11 bp, Unknown
  misc_feature (1)..( 11): Result.001 file - promoters70/4770443
ccaaaaatggc

SEQ ID NO: 87028 - DNA, 11 bp, Unknown
  misc_feature (1)..( 11): Result.001 file - promoters70/4770443
tcaaaaatatt

SEQ ID NO: 87029 - DNA, 11 bp, Unknown
  misc_feature (1)..( 11): Result.001 file - promoters70/4770443
agaaaaatgat

SEQ ID NO: 87030 - DNA, 11 bp, Unknown
  misc_feature (1)..( 11): Result.001 file - promoters70/4770443
tcaaaatttat

SEQ ID NO: 87031 - DNA, 11 bp, Unknown
  misc_feature (1)..( 11): Result.001 file - promoters70/4770443
acaagattata

SEQ ID NO: 87032 - DNA, 11 bp, Unknown
  misc_feature (1)..( 11): Result.001 file - promoters70/4770443
aaaaaaaggat

SEQ ID NO: 87033 - DNA, 13 bp, Unknown
  misc_feature (1)..( 13): Result.001 file - promoters70/4770443
taatttttttcta

SEQ ID NO: 87034 - DNA, 13 bp, Unknown
  misc_feature (1)..( 13): Result.001 file - promoters70/4770443
taatgtttttcta

SEQ ID NO: 87035 - DNA, 13 bp, Unknown
  misc_feature (1)..( 13): Result.001 file - promoters70/4770443
tcatttttctcct

SEQ ID NO: 87036 - DNA, 13 bp, Unknown
  misc_feature (1)..( 13): Result.001 file - promoters70/4770443
taatcttttgggg

SEQ ID NO: 87037 - DNA, 13 bp, Unknown
  misc_feature (1)..( 13): Result.001 file - promoters70/4770443
taaattttatcat

SEQ ID NO: 87038 - DNA, 13 bp, Unknown
  misc_feature (1)..( 13): Result.001 file - promoters70/4770443
ttatttttttttg

SEQ ID NO: 87039 - DNA, 13 bp, Unknown
  misc_feature (1)..( 13): Result.001 file - promoters70/4770443
ttattttttgttc

SEQ ID NO: 87040 - DNA, 19 bp, Unknown
  misc_feature (1)..( 19): Result.001 file - promoters70/4770443
tttttttctataaaaaata

SEQ ID NO: 87041 - DNA, 19 bp, Unknown
  misc_feature (1)..( 19): Result.001 file - promoters70/4770443
acatgtcccataaaaaatt

SEQ ID NO: 87042 - DNA, 19 bp, Unknown
  misc_feature (1)..( 19): Result.001 file - promoters70/4770443
tttttatctataaaaaatt

SEQ ID NO: 87043 - DNA, 19 bp, Unknown
  misc_feature (1)..( 19): Result.001 file - promoters70/4770443
tgtcaaatgatgaaatatt

SEQ ID NO: 87044 - DNA, 19 bp, Unknown
  misc_feature (1)..( 19): Result.001 file - promoters70/4770443
gttaatggtgataaatatt

SEQ ID NO: 87045 - DNA, 19 bp, Unknown
  misc_feature (1)..( 19): Result.001 file - promoters70/4770443
attttatcattaatttgtt

SEQ ID NO: 87046 - DNA, 19 bp, Unknown
  misc_feature (1)..( 19): Result.001 file - promoters70/4770443
tttttttgtaaattaggaa

SEQ ID NO: 87047 - DNA, 13 bp, Unknown
  misc_feature (1)..( 13): Result.001 file - promoters70/4770443
aaaatatcgttga

SEQ ID NO: 87048 - DNA, 13 bp, Unknown
  misc_feature (1)..( 13): Result.001 file - promoters70/4770443
taaatattcaact

SEQ ID NO: 87049 - DNA, 13 bp, Unknown
  misc_feature (1)..( 13): Result.001 file - promoters70/4770443
gaaatattttttt

SEQ ID NO: 87050 - DNA, 13 bp, Unknown
  misc_feature (1)..( 13): Result.001 file - promoters70/4770443
aaaattttttttt

SEQ ID NO: 87051 - DNA, 13 bp, Unknown
  misc_feature (1)..( 13): Result.001 file - promoters70/4770443
tgtttatttccaa

SEQ ID NO: 87052 - DNA, 13 bp, Unknown
  misc_feature (1)..( 13): Result.001 file - promoters70/4770477
aaaactttctctc

SEQ ID NO: 87053 - DNA, 11 bp, Unknown
  misc_feature (1)..( 11): Result.001 file - promoters70/4770477
tatagttcagc

SEQ ID NO: 87054 - DNA, 11 bp, Unknown
  misc_feature (1)..( 11): Result.001 file - promoters70/4770477
tatacttcagt

SEQ ID NO: 87055 - DNA, 11 bp, Unknown
  misc_feature (1)..( 11): Result.001 file - promoters70/4770594
ttgatttcagt

SEQ ID NO: 87056 - DNA, 8 bp, Unknown
  misc_feature (1)..( 8): Result.001 file - promoters70/4770594
ttaatata

SEQ ID NO: 87057 - DNA, 8 bp, Unknown
  misc_feature (1)..( 8): Result.001 file - promoters70/4770594
ataagata

SEQ ID NO: 87058 - DNA, 8 bp, Unknown
  misc_feature (1)..( 8): Result.001 file - promoters70/4770594
ttaataat

SEQ ID NO: 87059 - DNA, 10 bp, Unknown
  misc_feature (1)..( 10): Result.001 file - promoters70/4770594
tttcctttta

SEQ ID NO: 87060 - DNA, 10 bp, Unknown
  misc_feature (1)..( 10): Result.001 file - promoters70/4770594
cttcccttta

SEQ ID NO: 87061 - DNA, 10 bp, Unknown
  misc_feature (1)..( 10): Result.001 file - promoters70/4770594
cttcactttc

SEQ ID NO: 87062 - DNA, 9 bp, Unknown
  misc_feature (1)..( 9): Result.001 file - promoters70/4770594
ttttaatac

SEQ ID NO: 87063 - DNA, 9 bp, Unknown
  misc_feature (1)..( 9): Result.001 file - promoters70/4770594
tttttatat

SEQ ID NO: 87064 - DNA, 9 bp, Unknown
  misc_feature (1)..( 9): Result.001 file - promoters70/4770594
tagttatat

SEQ ID NO: 87065 - DNA, 13 bp, Unknown
  misc_feature (1)..( 13): Result.001 file - promoters70/4770594
aaatcattacaat

SEQ ID NO: 87066 - DNA, 13 bp, Unknown
  misc_feature (1)..( 13): Result.001 file - promoters70/4770594
taatgattctttt

SEQ ID NO: 87067 - DNA, 13 bp, Unknown
  misc_feature (1)..( 13): Result.001 file - promoters70/4770594
aaaacattaaaat

SEQ ID NO: 87068 - DNA, 13 bp, Unknown
  misc_feature (1)..( 13): Result.001 file - promoters70/4770594
aaatcattacaat

SEQ ID NO: 87069 - DNA, 13 bp, Unknown
  misc_feature (1)..( 13): Result.001 file - promoters70/4770594
cttactttataat

SEQ ID NO: 87070 - DNA, 13 bp, Unknown
  misc_feature (1)..( 13): Result.001 file - promoters70/4771239
aaaacattaaaat

SEQ ID NO: 87071 - DNA, 9 bp, Unknown
  misc_feature (1)..( 9): Result.001 file - promoters70/4771239
ttgacgacg

SEQ ID NO: 87072 - DNA, 9 bp, Unknown
  misc_feature (1)..( 9): Result.001 file - promoters70/4771239
ttggcgaga

SEQ ID NO: 87073 - DNA, 9 bp, Unknown
  misc_feature (1)..( 9): Result.001 file - promoters70/4771271
ccggcaaga

SEQ ID NO: 87074 - DNA, 7 bp, Unknown
  misc_feature (1)..( 7): Result.001 file - promoters70/4771271
ttttgct

SEQ ID NO: 87075 - DNA, 7 bp, Unknown
  misc_feature (1)..( 7): Result.001 file - promoters70/4771271
ttttgcc

SEQ ID NO: 87076 - DNA, 7 bp, Unknown
  misc_feature (1)..( 7): Result.001 file - promoters70/4771271
ttttgct

SEQ ID NO: 87077 - DNA, 9 bp, Unknown
  misc_feature (1)..( 9): Result.001 file - promoters70/4771271
aaattaaac

SEQ ID NO: 87078 - DNA, 9 bp, Unknown
  misc_feature (1)..( 9): Result.001 file - promoters70/4771271
aaaataaat

SEQ ID NO: 87079 - DNA, 9 bp, Unknown
  misc_feature (1)..( 9): Result.001 file - promoters70/4771271
attttaaac

SEQ ID NO: 87080 - DNA, 8 bp, Unknown
  misc_feature (1)..( 8): Result.001 file - promoters70/4771271
tattatta

SEQ ID NO: 87081 - DNA, 8 bp, Unknown
  misc_feature (1)..( 8): Result.001 file - promoters70/4771271
tatgattt

SEQ ID NO: 87082 - DNA, 8 bp, Unknown
  misc_feature (1)..( 8): Result.001 file - promoters70/4771271
ttggatta

SEQ ID NO: 87083 - DNA, 10 bp, Unknown
  misc_feature (1)..( 10): Result.001 file - promoters70/4771271
aaccaaattg

SEQ ID NO: 87084 - DNA, 10 bp, Unknown
  misc_feature (1)..( 10): Result.001 file - promoters70/4771271
ataaaaattg

SEQ ID NO: 87085 - DNA, 10 bp, Unknown
  misc_feature (1)..( 10): Result.001 file - promoters70/4771271
aacaaaattt

SEQ ID NO: 87086 - DNA, 13 bp, Unknown
  misc_feature (1)..( 13): Result.001 file - promoters70/4771271
gtttttcatggaa

SEQ ID NO: 87087 - DNA, 13 bp, Unknown
  misc_feature (1)..( 13): Result.001 file - promoters70/4771271
gtttttttaaagc

SEQ ID NO: 87088 - DNA, 13 bp, Unknown
  misc_feature (1)..( 13): Result.001 file - promoters70/4771271
attttgcatagaa

SEQ ID NO: 87089 - DNA, 8 bp, Unknown
  misc_feature (1)..( 8): Result.001 file - promoters70/4771271
gttatata

SEQ ID NO: 87090 - DNA, 8 bp, Unknown
  misc_feature (1)..( 8): Result.001 file - promoters70/4771271
gttaaata

SEQ ID NO: 87091 - DNA, 8 bp, Unknown
  misc_feature (1)..( 8): Result.001 file - promoters70/4771271
tttaaatt

SEQ ID NO: 87092 - DNA, 12 bp, Unknown
  misc_feature (1)..( 12): Result.001 file - promoters70/4771271
aattaaacaagt

SEQ ID NO: 87093 - DNA, 12 bp, Unknown
  misc_feature (1)..( 12): Result.001 file - promoters70/4771271
tgataaaaaagt

SEQ ID NO: 87094 - DNA, 12 bp, Unknown
  misc_feature (1)..( 12): Result.001 file - promoters70/4771271
tgataaaataaa

SEQ ID NO: 87095 - DNA, 9 bp, Unknown
  misc_feature (1)..( 9): Result.001 file - promoters70/4771271
ataaccaaa

SEQ ID NO: 87096 - DNA, 9 bp, Unknown
  misc_feature (1)..( 9): Result.001 file - promoters70/4771271
tgaacaaaa

SEQ ID NO: 87097 - DNA, 9 bp, Unknown
  misc_feature (1)..( 9): Result.001 file - promoters70/4771271
taaacaaga

SEQ ID NO: 87098 - DNA, 9 bp, Unknown
  misc_feature (1)..( 9): Result.001 file - promoters70/4771271
aatgtttta

SEQ ID NO: 87099 - DNA, 9 bp, Unknown
  misc_feature (1)..( 9): Result.001 file - promoters70/4771271
aatattttg

SEQ ID NO: 87100 - DNA, 9 bp, Unknown
  misc_feature (1)..( 9): Result.001 file - promoters70/4771271
aatatgttg

SEQ ID NO: 87101 - DNA, 10 bp, Unknown
  misc_feature (1)..( 10): Result.001 file - promoters70/4771271
gtagggtttt

SEQ ID NO: 87102 - DNA, 10 bp, Unknown
  misc_feature (1)..( 10): Result.001 file - promoters70/4771271
ttaggttttt

SEQ ID NO: 87103 - DNA, 10 bp, Unknown
  misc_feature (1)..( 10): Result.001 file - promoters70/4771271
ttaggtttgg

SEQ ID NO: 87104 - DNA, 8 bp, Unknown
  misc_feature (1)..( 8): Result.001 file - promoters70/4771271
tttatttt

SEQ ID NO: 87105 - DNA, 8 bp, Unknown
  misc_feature (1)..( 8): Result.001 file - promoters70/4771271
attatttt

SEQ ID NO: 87106 - DNA, 8 bp, Unknown
  misc_feature (1)..( 8): Result.001 file - promoters70/4771321
attctttt

SEQ ID NO: 87107 - DNA, 9 bp, Unknown
  misc_feature (1)..( 9): Result.001 file - promoters70/4771321
caaaaaaag

SEQ ID NO: 87108 - DNA, 9 bp, Unknown
  misc_feature (1)..( 9): Result.001 file - promoters70/4771321
gaaataaat

SEQ ID NO: 87109 - DNA, 9 bp, Unknown
  misc_feature (1)..( 9): Result.001 file - promoters70/4771321
gaaaacaga

SEQ ID NO: 87110 - DNA, 9 bp, Unknown
  misc_feature (1)..( 9): Result.001 file - promoters70/4771321
taaataagg

SEQ ID NO: 87111 - DNA, 9 bp, Unknown
  misc_feature (1)..( 9): Result.001 file - promoters70/4771321
ccaataaga

SEQ ID NO: 87112 - DNA, 9 bp, Unknown
  misc_feature (1)..( 9): Result.001 file - promoters70/4771334
gaaaccaga

SEQ ID NO: 87113 - DNA, 9 bp, Unknown
  misc_feature (1)..( 9): Result.001 file - promoters70/4771334
agttttgta

SEQ ID NO: 87114 - DNA, 9 bp, Unknown
  misc_feature (1)..( 9): Result.001 file - promoters70/4771334
tgttatgta

SEQ ID NO: 87115 - DNA, 9 bp, Unknown
  misc_feature (1)..( 9): Result.001 file - promoters70/4771334
agtgttgag

SEQ ID NO: 87116 - DNA, 9 bp, Unknown
  misc_feature (1)..( 9): Result.001 file - promoters70/4771334
agtttttgt

SEQ ID NO: 87117 - DNA, 9 bp, Unknown
  misc_feature (1)..( 9): Result.001 file - promoters70/4771334
ggttttttc

SEQ ID NO: 87118 - DNA, 9 bp, Unknown
  misc_feature (1)..( 9): Result.001 file - promoters70/4771348
gttgttgaa

SEQ ID NO: 87119 - DNA, 8 bp, Unknown
  misc_feature (1)..( 8): Result.001 file - promoters70/4771348
tgtcttta

SEQ ID NO: 87120 - DNA, 8 bp, Unknown
  misc_feature (1)..( 8): Result.001 file - promoters70/4771348
cgtcatta

SEQ ID NO: 87121 - DNA, 8 bp, Unknown
  misc_feature (1)..( 8): Result.001 file - promoters70/4771348
tgtctttc

SEQ ID NO: 87122 - DNA, 8 bp, Unknown
  misc_feature (1)..( 8): Result.001 file - promoters70/4771348
catttgta

SEQ ID NO: 87123 - DNA, 8 bp, Unknown
  misc_feature (1)..( 8): Result.001 file - promoters70/4771348
cattggta

SEQ ID NO: 87124 - DNA, 8 bp, Unknown
  misc_feature (1)..( 8): Result.001 file - promoters70/4771360
gattagta

SEQ ID NO: 87125 - DNA, 15 bp, Unknown
  misc_feature (1)..( 15): Result.001 file - promoters70/4771360
agaaaaatggatttc

SEQ ID NO: 87126 - DNA, 15 bp, Unknown
  misc_feature (1)..( 15): Result.001 file - promoters70/4771360
agagaaattgatttc

SEQ ID NO: 87127 - DNA, 15 bp, Unknown
  misc_feature (1)..( 15): Result.001 file - promoters70/4771360
ggaaaaaacatatat

SEQ ID NO: 87128 - DNA, 10 bp, Unknown
  misc_feature (1)..( 10): Result.001 file - promoters70/4771360
ttgtatttta

SEQ ID NO: 87129 - DNA, 10 bp, Unknown
  misc_feature (1)..( 10): Result.001 file - promoters70/4771360
cgccatttta

SEQ ID NO: 87130 - DNA, 10 bp, Unknown
  misc_feature (1)..( 10): Result.001 file - promoters70/4771360
ttggatttta

SEQ ID NO: 87131 - DNA, 8 bp, Unknown
  misc_feature (1)..( 8): Result.001 file - promoters70/4771360
aaatgtta

SEQ ID NO: 87132 - DNA, 8 bp, Unknown
  misc_feature (1)..( 8): Result.001 file - promoters70/4771360
gaatttta

SEQ ID NO: 87133 - DNA, 8 bp, Unknown
  misc_feature (1)..( 8): Result.001 file - promoters70/4771360
aaatgttc

SEQ ID NO: 87134 - DNA, 8 bp, Unknown
  misc_feature (1)..( 8): Result.001 file - promoters70/4771360
aaaaattc

SEQ ID NO: 87135 - DNA, 8 bp, Unknown
  misc_feature (1)..( 8): Result.001 file - promoters70/4771360
aaaagttc

SEQ ID NO: 87136 - DNA, 8 bp, Unknown
  misc_feature (1)..( 8): Result.001 file - promoters70/4771360
taaaattt

SEQ ID NO: 87137 - DNA, 9 bp, Unknown
  misc_feature (1)..( 9): Result.001 file - promoters70/4771360
taaaatgtt

SEQ ID NO: 87138 - DNA, 9 bp, Unknown
  misc_feature (1)..( 9): Result.001 file - promoters70/4771360
gaaaatgtt

SEQ ID NO: 87139 - DNA, 9 bp, Unknown
  misc_feature (1)..( 9): Result.001 file - promoters70/4771360
gaaaattct

SEQ ID NO: 87140 - DNA, 10 bp, Unknown
  misc_feature (1)..( 10): Result.001 file - promoters70/4771360
taaaaattaa

SEQ ID NO: 87141 - DNA, 10 bp, Unknown
  misc_feature (1)..( 10): Result.001 file - promoters70/4771360
aaaaaatgtt

SEQ ID NO: 87142 - DNA, 10 bp, Unknown
  misc_feature (1)..( 10): Result.001 file - promoters70/4771360
taaaaaccag

SEQ ID NO: 87143 - DNA, 10 bp, Unknown
  misc_feature (1)..( 10): Result.001 file - promoters70/4771360
caaacatgtt

SEQ ID NO: 87144 - DNA, 10 bp, Unknown
  misc_feature (1)..( 10): Result.001 file - promoters70/4771360
aaataagagt

SEQ ID NO: 87145 - DNA, 10 bp, Unknown
  misc_feature (1)..( 10): Result.001 file - promoters70/4771360
taattagagt

SEQ ID NO: 87146 - DNA, 10 bp, Unknown
  misc_feature (1)..( 10): Result.001 file - promoters70/4771360
taattaatta

SEQ ID NO: 87147 - DNA, 7 bp, Unknown
  misc_feature (1)..( 7): Result.001 file - promoters70/4771360
gaatatt

SEQ ID NO: 87148 - DNA, 7 bp, Unknown
  misc_feature (1)..( 7): Result.001 file - promoters70/4771360
gaaaatt

SEQ ID NO: 87149 - DNA, 7 bp, Unknown
  misc_feature (1)..( 7): Result.001 file - promoters70/4771407
gaaaatg

SEQ ID NO: 87150 - DNA, 8 bp, Unknown
  misc_feature (1)..( 8): Result.001 file - promoters70/4771407
tagaatat

SEQ ID NO: 87151 - DNA, 8 bp, Unknown
  misc_feature (1)..( 8): Result.001 file - promoters70/4771407
cagattat

SEQ ID NO: 87152 - DNA, 8 bp, Unknown
  misc_feature (1)..( 8): Result.001 file - promoters70/4771407
cagtttat

SEQ ID NO: 87153 - DNA, 12 bp, Unknown
  misc_feature (1)..( 12): Result.001 file - promoters70/4771407
atcagtcaattt

SEQ ID NO: 87154 - DNA, 12 bp, Unknown
  misc_feature (1)..( 12): Result.001 file - promoters70/4771407
aaatgtcatttt

SEQ ID NO: 87155 - DNA, 12 bp, Unknown
  misc_feature (1)..( 12): Result.001 file - promoters70/4771407
aaatgttatttg

SEQ ID NO: 87156 - DNA, 7 bp, Unknown
  misc_feature (1)..( 7): Result.001 file - promoters70/4771407
attgtgt

SEQ ID NO: 87157 - DNA, 7 bp, Unknown
  misc_feature (1)..( 7): Result.001 file - promoters70/4771407
attttgt

SEQ ID NO: 87158 - DNA, 7 bp, Unknown
  misc_feature (1)..( 7): Result.001 file - promoters70/4771407
attttga

SEQ ID NO: 87159 - DNA, 9 bp, Unknown
  misc_feature (1)..( 9): Result.001 file - promoters70/4771407
aaaggaaga

SEQ ID NO: 87160 - DNA, 9 bp, Unknown
  misc_feature (1)..( 9): Result.001 file - promoters70/4771407
aatggaaga

SEQ ID NO: 87161 - DNA, 9 bp, Unknown
  misc_feature (1)..( 9): Result.001 file - promoters70/4771407
aattgaaga

SEQ ID NO: 87162 - DNA, 11 bp, Unknown
  misc_feature (1)..( 11): Result.001 file - promoters70/4771407
gatttttgtta

SEQ ID NO: 87163 - DNA, 11 bp, Unknown
  misc_feature (1)..( 11): Result.001 file - promoters70/4771407
gatttttgtta

SEQ ID NO: 87164 - DNA, 11 bp, Unknown
  misc_feature (1)..( 11): Result.001 file - promoters70/4771414
gattttgaatt

SEQ ID NO: 87165 - DNA, 12 bp, Unknown
  misc_feature (1)..( 12): Result.001 file - promoters70/4771414
gaaagttttccc

SEQ ID NO: 87166 - DNA, 12 bp, Unknown
  misc_feature (1)..( 12): Result.001 file - promoters70/4771414
agattttttcca

SEQ ID NO: 87167 - DNA, 12 bp, Unknown
  misc_feature (1)..( 12): Result.001 file - promoters70/4771414
aaaatttttctg

SEQ ID NO: 87168 - DNA, 12 bp, Unknown
  misc_feature (1)..( 12): Result.001 file - promoters70/4771414
aaaaattgtaat

SEQ ID NO: 87169 - DNA, 12 bp, Unknown
  misc_feature (1)..( 12): Result.001 file - promoters70/4771414
acaaattgctca

SEQ ID NO: 87170 - DNA, 12 bp, Unknown
  misc_feature (1)..( 12): Result.001 file - promoters70/4771478
tgtgatttgcaa

SEQ ID NO: 87171 - DNA, 7 bp, Unknown
  misc_feature (1)..( 7): Result.001 file - promoters70/4771478
ttgcaaa

SEQ ID NO: 87172 - DNA, 7 bp, Unknown
  misc_feature (1)..( 7): Result.001 file - promoters70/4771478
atgcaaa

SEQ ID NO: 87173 - DNA, 7 bp, Unknown
  misc_feature (1)..( 7): Result.001 file - promoters70/4771478
ttgcaat

SEQ ID NO: 87174 - DNA, 9 bp, Unknown
  misc_feature (1)..( 9): Result.001 file - promoters70/4771478
taactaatt

SEQ ID NO: 87175 - DNA, 9 bp, Unknown
  misc_feature (1)..( 9): Result.001 file - promoters70/4771478
taattaaaa

SEQ ID NO: 87176 - DNA, 9 bp, Unknown
  misc_feature (1)..( 9): Result.001 file - promoters70/4771478
gaataaaaa

SEQ ID NO: 87177 - DNA, 9 bp, Unknown
  misc_feature (1)..( 9): Result.001 file - promoters70/4771478
ttaaaataa

SEQ ID NO: 87178 - DNA, 9 bp, Unknown
  misc_feature (1)..( 9): Result.001 file - promoters70/4771478
ttaaaagaa

SEQ ID NO: 87179 - DNA, 9 bp, Unknown
  misc_feature (1)..( 9): Result.001 file - promoters70/4771495
ctaacagaa

SEQ ID NO: 87180 - DNA, 16 bp, Unknown
  misc_feature (1)..( 16): Result.001 file - promoters70/4771495
aaactactaaaatcaa

SEQ ID NO: 87181 - DNA, 16 bp, Unknown
  misc_feature (1)..( 16): Result.001 file - promoters70/4771495
aaactattaaaatagt

SEQ ID NO: 87182 - DNA, 16 bp, Unknown
  misc_feature (1)..( 16): Result.001 file - promoters70/4771495
ttaaaaaaaaaatctc

SEQ ID NO: 87183 - DNA, 16 bp, Unknown
  misc_feature (1)..( 16): Result.001 file - promoters70/4771495
aaaaaacacaaattag

SEQ ID NO: 87184 - DNA, 16 bp, Unknown
  misc_feature (1)..( 16): Result.001 file - promoters70/4771495
aagttattaatgaatg

SEQ ID NO: 87185 - DNA, 16 bp, Unknown
  misc_feature (1)..( 16): Result.001 file - promoters70/4771523
atcttattaggtgaag

SEQ ID NO: 87186 - DNA, 9 bp, Unknown
  misc_feature (1)..( 9): Result.001 file - promoters70/4771523
attcatgaa

SEQ ID NO: 87187 - DNA, 9 bp, Unknown
  misc_feature (1)..( 9): Result.001 file - promoters70/4771523
gctcatgaa

SEQ ID NO: 87188 - DNA, 9 bp, Unknown
  misc_feature (1)..( 9): Result.001 file - promoters70/4771674
attaatggg

SEQ ID NO: 87189 - DNA, 10 bp, Unknown
  misc_feature (1)..( 10): Result.001 file - promoters70/4771674
ttctcgtttc

SEQ ID NO: 87190 - DNA, 10 bp, Unknown
  misc_feature (1)..( 10): Result.001 file - promoters70/4771674
ctctcttttg

SEQ ID NO: 87191 - DNA, 10 bp, Unknown
  misc_feature (1)..( 10): Result.001 file - promoters70/4771674
ctctcccttg

SEQ ID NO: 87192 - DNA, 10 bp, Unknown
  misc_feature (1)..( 10): Result.001 file - promoters70/4771674
ccttccattg

SEQ ID NO: 87193 - DNA, 16 bp, Unknown
  misc_feature (1)..( 16): Result.001 file - promoters70/4771674
ctcggttccaatcttg

SEQ ID NO: 87194 - DNA, 16 bp, Unknown
  misc_feature (1)..( 16): Result.001 file - promoters70/4771674
attcaatccaattttg

SEQ ID NO: 87195 - DNA, 16 bp, Unknown
  misc_feature (1)..( 16): Result.001 file - promoters70/4771674
attctatccaaattca

SEQ ID NO: 87196 - DNA, 16 bp, Unknown
  misc_feature (1)..( 16): Result.001 file - promoters70/4771677
cttctttcctcgctac

SEQ ID NO: 87197 - DNA, 8 bp, Unknown
  misc_feature (1)..( 8): Result.001 file - promoters70/4771677
aatgaaaa

SEQ ID NO: 87198 - DNA, 8 bp, Unknown
  misc_feature (1)..( 8): Result.001 file - promoters70/4771677
aatgaaat

SEQ ID NO: 87199 - DNA, 9 bp, Unknown
  misc_feature (1)..( 9): Result.001 file - promoters70/4771677
tatgagaaa

SEQ ID NO: 87200 - DNA, 9 bp, Unknown
  misc_feature (1)..( 9): Result.001 file - promoters70/4771677
aatcaaaaa

SEQ ID NO: 87201 - DNA, 9 bp, Unknown
  misc_feature (1)..( 9): Result.001 file - promoters70/4771677
tataagaaa

SEQ ID NO: 87202 - DNA, 10 bp, Unknown
  misc_feature (1)..( 10): Result.001 file - promoters70/4771677
gaaaaacaaa

SEQ ID NO: 87203 - DNA, 10 bp, Unknown
  misc_feature (1)..( 10): Result.001 file - promoters70/4771677
tttaaaaaaa

SEQ ID NO: 87204 - DNA, 10 bp, Unknown
  misc_feature (1)..( 10): Result.001 file - promoters70/4771677
tataagaaaa

SEQ ID NO: 87205 - DNA, 10 bp, Unknown
  misc_feature (1)..( 10): Result.001 file - promoters70/4771677
aataataaaa

SEQ ID NO: 87206 - DNA, 10 bp, Unknown
  misc_feature (1)..( 10): Result.001 file - promoters70/4771677
tatgagaaat

SEQ ID NO: 87207 - DNA, 12 bp, Unknown
  misc_feature (1)..( 12): Result.001 file - promoters70/4771677
aatgaaaaacaa

SEQ ID NO: 87208 - DNA, 12 bp, Unknown
  misc_feature (1)..( 12): Result.001 file - promoters70/4771677
gaagaaaaaata

SEQ ID NO: 87209 - DNA, 12 bp, Unknown
  misc_feature (1)..( 12): Result.001 file - promoters70/4771677
tatgagaaatca

SEQ ID NO: 87210 - DNA, 12 bp, Unknown
  misc_feature (1)..( 12): Result.001 file - promoters70/4771677
aatcaaaaataa

SEQ ID NO: 87211 - DNA, 12 bp, Unknown
  misc_feature (1)..( 12): Result.001 file - promoters70/4771677
taagaaaatata

SEQ ID NO: 87212 - DNA, 8 bp, Unknown
  misc_feature (1)..( 8): Result.001 file - promoters70/4771677
aaatgtca

SEQ ID NO: 87213 - DNA, 8 bp, Unknown
  misc_feature (1)..( 8): Result.001 file - promoters70/4771677
aaatgtta

SEQ ID NO: 87214 - DNA, 8 bp, Unknown
  misc_feature (1)..( 8): Result.001 file - promoters70/4771677
caatctca

SEQ ID NO: 87215 - DNA, 9 bp, Unknown
  misc_feature (1)..( 9): Result.001 file - promoters70/4771677
aaattgttt

SEQ ID NO: 87216 - DNA, 9 bp, Unknown
  misc_feature (1)..( 9): Result.001 file - promoters70/4771725
cccatctca

SEQ ID NO: 87217 - DNA, 11 bp, Unknown
  misc_feature (1)..( 11): Result.001 file - promoters70/4771725
ctgcagagtaa

SEQ ID NO: 87218 - DNA, 11 bp, Unknown
  misc_feature (1)..( 11): Result.001 file - promoters70/4771725
taacagaataa

SEQ ID NO: 87219 - DNA, 11 bp, Unknown
  misc_feature (1)..( 11): Result.001 file - promoters70/4771725
taaaagaaaat

SEQ ID NO: 87220 - DNA, 13 bp, Unknown
  misc_feature (1)..( 13): Result.001 file - promoters70/4771725
aaataataataat

SEQ ID NO: 87221 - DNA, 13 bp, Unknown
  misc_feature (1)..( 13): Result.001 file - promoters70/4771725
aaagaataaaaat

SEQ ID NO: 87222 - DNA, 13 bp, Unknown
  misc_feature (1)..( 13): Result.001 file - promoters70/4771725
cgttaatcaaata

SEQ ID NO: 87223 - DNA, 8 bp, Unknown
  misc_feature (1)..( 8): Result.001 file - promoters70/4771725
tttaaaat

SEQ ID NO: 87224 - DNA, 8 bp, Unknown
  misc_feature (1)..( 8): Result.001 file - promoters70/4771725
aataaaat

SEQ ID NO: 87225 - DNA, 8 bp, Unknown
  misc_feature (1)..( 8): Result.001 file - promoters70/4771853
aataaaaa

SEQ ID NO: 87226 - DNA, 9 bp, Unknown
  misc_feature (1)..( 9): Result.001 file - promoters70/4771853
gtttccttt

SEQ ID NO: 87227 - DNA, 9 bp, Unknown
  misc_feature (1)..( 9): Result.001 file - promoters70/4771853
gttaccttt

SEQ ID NO: 87228 - DNA, 9 bp, Unknown
  misc_feature (1)..( 9): Result.001 file - promoters70/4771928
gcttcgttt

SEQ ID NO: 87229 - DNA, 14 bp, Unknown
  misc_feature (1)..( 14): Result.001 file - promoters70/4771928
ggtcttacaatttt

SEQ ID NO: 87230 - DNA, 14 bp, Unknown
  misc_feature (1)..( 14): Result.001 file - promoters70/4771928
agaaatacaatttt

SEQ ID NO: 87231 - DNA, 14 bp, Unknown
  misc_feature (1)..( 14): Result.001 file - promoters70/4771928
agaactactattcg

SEQ ID NO: 87232 - DNA, 8 bp, Unknown
  misc_feature (1)..( 8): Result.001 file - promoters70/4771928
ctaaaata

SEQ ID NO: 87233 - DNA, 8 bp, Unknown
  misc_feature (1)..( 8): Result.001 file - promoters70/4771928
ctaaaaaa

SEQ ID NO: 87234 - DNA, 8 bp, Unknown
  misc_feature (1)..( 8): Result.001 file - promoters70/4771928
ttaaaaaa

SEQ ID NO: 87235 - DNA, 7 bp, Unknown
  misc_feature (1)..( 7): Result.001 file - promoters70/4771928
cttttgg

SEQ ID NO: 87236 - DNA, 7 bp, Unknown
  misc_feature (1)..( 7): Result.001 file - promoters70/4771928
tttttgg

SEQ ID NO: 87237 - DNA, 7 bp, Unknown
  misc_feature (1)..( 7): Result.001 file - promoters70/4771928
tttttgt

SEQ ID NO: 87238 - DNA, 10 bp, Unknown
  misc_feature (1)..( 10): Result.001 file - promoters70/4771928
ttttaaaaga

SEQ ID NO: 87239 - DNA, 10 bp, Unknown
  misc_feature (1)..( 10): Result.001 file - promoters70/4771928
tttcaaaaaa

SEQ ID NO: 87240 - DNA, 10 bp, Unknown
  misc_feature (1)..( 10): Result.001 file - promoters70/4772130
ttgcaaaaaa

SEQ ID NO: 87241 - DNA, 11 bp, Unknown
  misc_feature (1)..( 11): Result.001 file - promoters70/4772130
cgattgcacaa

SEQ ID NO: 87242 - DNA, 11 bp, Unknown
  misc_feature (1)..( 11): Result.001 file - promoters70/4772130
cgaatgcagcg

SEQ ID NO: 87243 - DNA, 11 bp, Unknown
  misc_feature (1)..( 11): Result.001 file - promoters70/4772130
aaatttcacaa

SEQ ID NO: 87244 - DNA, 7 bp, Unknown
  misc_feature (1)..( 7): Result.001 file - promoters70/4772130
tttcttc

SEQ ID NO: 87245 - DNA, 7 bp, Unknown
  misc_feature (1)..( 7): Result.001 file - promoters70/4772130
attcttc

SEQ ID NO: 87246 - DNA, 7 bp, Unknown
  misc_feature (1)..( 7): Result.001 file - promoters70/4772130
attctta

SEQ ID NO: 87247 - DNA, 12 bp, Unknown
  misc_feature (1)..( 12): Result.001 file - promoters70/4772130
gaccttgtgaaa

SEQ ID NO: 87248 - DNA, 12 bp, Unknown
  misc_feature (1)..( 12): Result.001 file - promoters70/4772130
gacattgttatt

SEQ ID NO: 87249 - DNA, 12 bp, Unknown
  misc_feature (1)..( 12): Result.001 file - promoters70/4772130
attcttttgaaa

SEQ ID NO: 87250 - DNA, 7 bp, Unknown
  misc_feature (1)..( 7): Result.001 file - promoters70/4772130
gatcatt

SEQ ID NO: 87251 - DNA, 7 bp, Unknown
  misc_feature (1)..( 7): Result.001 file - promoters70/4772130
tatcatt

SEQ ID NO: 87252 - DNA, 7 bp, Unknown
  misc_feature (1)..( 7): Result.001 file - promoters70/4772130
gatcata

SEQ ID NO: 87253 - DNA, 8 bp, Unknown
  misc_feature (1)..( 8): Result.001 file - promoters70/4772130
ataaataa

SEQ ID NO: 87254 - DNA, 8 bp, Unknown
  misc_feature (1)..( 8): Result.001 file - promoters70/4772130
ataaattc

SEQ ID NO: 87255 - DNA, 8 bp, Unknown
  misc_feature (1)..( 8): Result.001 file - promoters70/4772336
ttaacttc

SEQ ID NO: 87256 - DNA, 12 bp, Unknown
  misc_feature (1)..( 12): Result.001 file - promoters70/4772336
cattatatatag

SEQ ID NO: 87257 - DNA, 12 bp, Unknown
  misc_feature (1)..( 12): Result.001 file - promoters70/4772336
gcctatatataa

SEQ ID NO: 87258 - DNA, 12 bp, Unknown
  misc_feature (1)..( 12): Result.001 file - promoters70/4772336
tcctttatattc

SEQ ID NO: 87259 - DNA, 12 bp, Unknown
  misc_feature (1)..( 12): Result.001 file - promoters70/4772336
atctctatataa

SEQ ID NO: 87260 - DNA, 12 bp, Unknown
  misc_feature (1)..( 12): Result.001 file - promoters70/4772336
agtgagatataa

SEQ ID NO: 87261 - DNA, 16 bp, Unknown
  misc_feature (1)..( 16): Result.001 file - promoters70/4772336
tgtttgtttaacaaaa

SEQ ID NO: 87262 - DNA, 16 bp, Unknown
  misc_feature (1)..( 16): Result.001 file - promoters70/4772336
gattttcataacaaaa

SEQ ID NO: 87263 - DNA, 16 bp, Unknown
  misc_feature (1)..( 16): Result.001 file - promoters70/4772336
ccataaataaacaaag

SEQ ID NO: 87264 - DNA, 16 bp, Unknown
  misc_feature (1)..( 16): Result.001 file - promoters70/4772336
tgtttaataaacaaaa

SEQ ID NO: 87265 - DNA, 16 bp, Unknown
  misc_feature (1)..( 16): Result.001 file - promoters70/4772346
ctcctaattaacctta

SEQ ID NO: 87266 - DNA, 8 bp, Unknown
  misc_feature (1)..( 8): Result.001 file - promoters70/4772346
agatactt

SEQ ID NO: 87267 - DNA, 8 bp, Unknown
  misc_feature (1)..( 8): Result.001 file - promoters70/4772346
agatacag

SEQ ID NO: 87268 - DNA, 8 bp, Unknown
  misc_feature (1)..( 8): Result.001 file - promoters70/4772346
agagacat

SEQ ID NO: 87269 - DNA, 8 bp, Unknown
  misc_feature (1)..( 8): Result.001 file - promoters70/4772346
cgatccag

SEQ ID NO: 87270 - DNA, 7 bp, Unknown
  misc_feature (1)..( 7): Result.001 file - promoters70/4772346
tttcaat

SEQ ID NO: 87271 - DNA, 7 bp, Unknown
  misc_feature (1)..( 7): Result.001 file - promoters70/4772346
tttcaag

SEQ ID NO: 87272 - DNA, 7 bp, Unknown
  misc_feature (1)..( 7): Result.001 file - promoters70/4772346
tttaaag

SEQ ID NO: 87273 - DNA, 8 bp, Unknown
  misc_feature (1)..( 8): Result.001 file - promoters70/4772346
caaaccca

SEQ ID NO: 87274 - DNA, 8 bp, Unknown
  misc_feature (1)..( 8): Result.001 file - promoters70/4772346
caaacctg

SEQ ID NO: 87275 - DNA, 8 bp, Unknown
  misc_feature (1)..( 8): Result.001 file - promoters70/4772398
gaaagctg

SEQ ID NO: 87276 - DNA, 16 bp, Unknown
  misc_feature (1)..( 16): Result.001 file - promoters70/4772398
gacctaagtttaagtt

SEQ ID NO: 87277 - DNA, 16 bp, Unknown
  misc_feature (1)..( 16): Result.001 file - promoters70/4772398
ttctgaagtttctggt

SEQ ID NO: 87278 - DNA, 16 bp, Unknown
  misc_feature (1)..( 16): Result.001 file - promoters70/4772398
gacataaattttttat

SEQ ID NO: 87279 - DNA, 16 bp, Unknown
  misc_feature (1)..( 16): Result.001 file - promoters70/4772398
tgtataattttatata

SEQ ID NO: 87280 - DNA, 16 bp, Unknown
  misc_feature (1)..( 16): Result.001 file - promoters70/4772398
tcactctttttgatat

SEQ ID NO: 87281 - DNA, 16 bp, Unknown
  misc_feature (1)..( 16): Result.001 file - promoters70/4772398
taataaaatttcacaa

SEQ ID NO: 87282 - DNA, 16 bp, Unknown
  misc_feature (1)..( 16): Result.001 file - promoters70/4772398
ttcataaaatacaact

SEQ ID NO: 87283 - DNA, 13 bp, Unknown
  misc_feature (1)..( 13): Result.001 file - promoters70/4772398
taatcttttgggg

SEQ ID NO: 87284 - DNA, 13 bp, Unknown
  misc_feature (1)..( 13): Result.001 file - promoters70/4772398
taatttttttcta

SEQ ID NO: 87285 - DNA, 13 bp, Unknown
  misc_feature (1)..( 13): Result.001 file - promoters70/4772398
atttcttttcaca

SEQ ID NO: 87286 - DNA, 13 bp, Unknown
  misc_feature (1)..( 13): Result.001 file - promoters70/4772398
aactcttttgaag

SEQ ID NO: 87287 - DNA, 13 bp, Unknown
  misc_feature (1)..( 13): Result.001 file - promoters70/4772398
aactcttttgaga

SEQ ID NO: 87288 - DNA, 13 bp, Unknown
  misc_feature (1)..( 13): Result.001 file - promoters70/4772398
tttacttttaaca

SEQ ID NO: 87289 - DNA, 11 bp, Unknown
  misc_feature (1)..( 11): Result.001 file - promoters70/4772398
attgttacaaa

SEQ ID NO: 87290 - DNA, 11 bp, Unknown
  misc_feature (1)..( 11): Result.001 file - promoters70/4772398
atttttacttt

SEQ ID NO: 87291 - DNA, 11 bp, Unknown
  misc_feature (1)..( 11): Result.001 file - promoters70/4772398
tttgttagttc

SEQ ID NO: 87292 - DNA, 11 bp, Unknown
  misc_feature (1)..( 11): Result.001 file - promoters70/4772398
attgataggtg

SEQ ID NO: 87293 - DNA, 11 bp, Unknown
  misc_feature (1)..( 11): Result.001 file - promoters70/4772398
tttgttctata

SEQ ID NO: 87294 - DNA, 11 bp, Unknown
  misc_feature (1)..( 11): Result.001 file - promoters70/4772398
ttttttaattt

SEQ ID NO: 87295 - DNA, 9 bp, Unknown
  misc_feature (1)..( 9): Result.001 file - promoters70/4772398
tttcattaa

SEQ ID NO: 87296 - DNA, 9 bp, Unknown
  misc_feature (1)..( 9): Result.001 file - promoters70/4772398
ttttattat

SEQ ID NO: 87297 - DNA, 9 bp, Unknown
  misc_feature (1)..( 9): Result.001 file - promoters70/4772398
tttcactaa

SEQ ID NO: 87298 - DNA, 9 bp, Unknown
  misc_feature (1)..( 9): Result.001 file - promoters70/4772398
tttcactct

SEQ ID NO: 87299 - DNA, 9 bp, Unknown
  misc_feature (1)..( 9): Result.001 file - promoters70/4772398
agatattat

SEQ ID NO: 87300 - DNA, 9 bp, Unknown
  misc_feature (1)..( 9): Result.001 file - promoters70/4772398
ttgtattat

SEQ ID NO: 87301 - DNA, 11 bp, Unknown
  misc_feature (1)..( 11): Result.001 file - promoters70/4772398
gagtgacaaag

SEQ ID NO: 87302 - DNA, 11 bp, Unknown
  misc_feature (1)..( 11): Result.001 file - promoters70/4772398
ttatgaaaaaa

SEQ ID NO: 87303 - DNA, 11 bp, Unknown
  misc_feature (1)..( 11): Result.001 file - promoters70/4772398
ttaggaaagcc

SEQ ID NO: 87304 - DNA, 12 bp, Unknown
  misc_feature (1)..( 12): Result.001 file - promoters70/4772398
cgatgtaaaaat

SEQ ID NO: 87305 - DNA, 12 bp, Unknown
  misc_feature (1)..( 12): Result.001 file - promoters70/4772398
aacgttaataat

SEQ ID NO: 87306 - DNA, 12 bp, Unknown
  misc_feature (1)..( 12): Result.001 file - promoters70/4772402
tatttcaaaaat

SEQ ID NO: 87307 - DNA, 12 bp, Unknown
  misc_feature (1)..( 12): Result.001 file - promoters70/4772402
agagcataagac

SEQ ID NO: 87308 - DNA, 12 bp, Unknown
  misc_feature (1)..( 12): Result.001 file - promoters70/4772402
agaacattggat

SEQ ID NO: 87309 - DNA, 12 bp, Unknown
  misc_feature (1)..( 12): Result.001 file - promoters70/4772402
agagcatcgcca

SEQ ID NO: 87310 - DNA, 12 bp, Unknown
  misc_feature (1)..( 12): Result.001 file - promoters70/4772402
agaaaatttgat

SEQ ID NO: 87311 - DNA, 10 bp, Unknown
  misc_feature (1)..( 10): Result.001 file - promoters70/4772402
ctaataaaac

SEQ ID NO: 87312 - DNA, 10 bp, Unknown
  misc_feature (1)..( 10): Result.001 file - promoters70/4772402
ttaatcaaat

SEQ ID NO: 87313 - DNA, 10 bp, Unknown
  misc_feature (1)..( 10): Result.001 file - promoters70/4772402
ctaatgaaac

SEQ ID NO: 87314 - DNA, 8 bp, Unknown
  misc_feature (1)..( 8): Result.001 file - promoters70/4772402
caagttta

SEQ ID NO: 87315 - DNA, 8 bp, Unknown
  misc_feature (1)..( 8): Result.001 file - promoters70/4772402
taagtttg

SEQ ID NO: 87316 - DNA, 8 bp, Unknown
  misc_feature (1)..( 8): Result.001 file - promoters70/4772402
caaattta

SEQ ID NO: 87317 - DNA, 8 bp, Unknown
  misc_feature (1)..( 8): Result.001 file - promoters70/4772402
taaaatta

SEQ ID NO: 87318 - DNA, 8 bp, Unknown
  misc_feature (1)..( 8): Result.001 file - promoters70/4772402
gtaaatta

SEQ ID NO: 87319 - DNA, 8 bp, Unknown
  misc_feature (1)..( 8): Result.001 file - promoters70/4772402
taaaattg

SEQ ID NO: 87320 - DNA, 9 bp, Unknown
  misc_feature (1)..( 9): Result.001 file - promoters70/4772402
aaacccttt

SEQ ID NO: 87321 - DNA, 9 bp, Unknown
  misc_feature (1)..( 9): Result.001 file - promoters70/4772402
aaaccctaa

SEQ ID NO: 87322 - DNA, 9 bp, Unknown
  misc_feature (1)..( 9): Result.001 file - promoters70/4772402
aaaccttaa

SEQ ID NO: 87323 - DNA, 7 bp, Unknown
  misc_feature (1)..( 7): Result.001 file - promoters70/4772402
attttga

SEQ ID NO: 87324 - DNA, 7 bp, Unknown
  misc_feature (1)..( 7): Result.001 file - promoters70/4772402
tttttga

SEQ ID NO: 87325 - DNA, 7 bp, Unknown
  misc_feature (1)..( 7): Result.001 file - promoters70/4772724
tttttgt

SEQ ID NO: 87326 - DNA, 7 bp, Unknown
  misc_feature (1)..( 7): Result.001 file - promoters70/4772724
atgtggt

SEQ ID NO: 87327 - DNA, 7 bp, Unknown
  misc_feature (1)..( 7): Result.001 file - promoters70/4772724
atgtgga

SEQ ID NO: 87328 - DNA, 7 bp, Unknown
  misc_feature (1)..( 7): Result.001 file - promoters70/4772772
atgagga

SEQ ID NO: 87329 - DNA, 6 bp, Unknown
  misc_feature (1)..( 6): Result.001 file - promoters70/4772772
aaacaa

SEQ ID NO: 87330 - DNA, 6 bp, Unknown
  misc_feature (1)..( 6): Result.001 file - promoters70/4772772
aaacaa

SEQ ID NO: 87331 - DNA, 7 bp, Unknown
  misc_feature (1)..( 7): Result.001 file - promoters70/4772772
aaaccaa

SEQ ID NO: 87332 - DNA, 8 bp, Unknown
  misc_feature (1)..( 8): Result.001 file - promoters70/4772772
cctatata

SEQ ID NO: 87333 - DNA, 8 bp, Unknown
  misc_feature (1)..( 8): Result.001 file - promoters70/4772772
tatatata

SEQ ID NO: 87334 - DNA, 8 bp, Unknown
  misc_feature (1)..( 8): Result.001 file - promoters70/4772772
cctttata

SEQ ID NO: 87335 - DNA, 8 bp, Unknown
  misc_feature (1)..( 8): Result.001 file - promoters70/4772772
taatattt

SEQ ID NO: 87336 - DNA, 8 bp, Unknown
  misc_feature (1)..( 8): Result.001 file - promoters70/4772772
taaaattt

SEQ ID NO: 87337 - DNA, 8 bp, Unknown
  misc_feature (1)..( 8): Result.001 file - promoters70/4772772
gaaacttt

SEQ ID NO: 87338 - DNA, 8 bp, Unknown
  misc_feature (1)..( 8): Result.001 file - promoters70/4772772
aaaatctc

SEQ ID NO: 87339 - DNA, 8 bp, Unknown
  misc_feature (1)..( 8): Result.001 file - promoters70/4772772
aaaatctc

SEQ ID NO: 87340 - DNA, 8 bp, Unknown
  misc_feature (1)..( 8): Result.001 file - promoters70/4772776
aaaatcaa

SEQ ID NO: 87341 - DNA, 10 bp, Unknown
  misc_feature (1)..( 10): Result.001 file - promoters70/4772776
atttagaata

SEQ ID NO: 87342 - DNA, 10 bp, Unknown
  misc_feature (1)..( 10): Result.001 file - promoters70/4772776
gattaaaata

SEQ ID NO: 87343 - DNA, 10 bp, Unknown
  misc_feature (1)..( 10): Result.001 file - promoters70/4772776
atttaaacgg

SEQ ID NO: 87344 - DNA, 10 bp, Unknown
  misc_feature (1)..( 10): Result.001 file - promoters70/4772776
gcttacacgg

SEQ ID NO: 87345 - DNA, 10 bp, Unknown
  misc_feature (1)..( 10): Result.001 file - promoters70/4772776
aaatctcgtc

SEQ ID NO: 87346 - DNA, 10 bp, Unknown
  misc_feature (1)..( 10): Result.001 file - promoters70/4772776
acatctcgtt

SEQ ID NO: 87347 - DNA, 10 bp, Unknown
  misc_feature (1)..( 10): Result.001 file - promoters70/4772776
acctcttgtc

SEQ ID NO: 87348 - DNA, 10 bp, Unknown
  misc_feature (1)..( 10): Result.001 file - promoters70/4772776
aaaactctaa

SEQ ID NO: 87349 - DNA, 11 bp, Unknown
  misc_feature (1)..( 11): Result.001 file - promoters70/4772776
ttgttaatgat

SEQ ID NO: 87350 - DNA, 11 bp, Unknown
  misc_feature (1)..( 11): Result.001 file - promoters70/4772776
tttttagtgat

SEQ ID NO: 87351 - DNA, 11 bp, Unknown
  misc_feature (1)..( 11): Result.001 file - promoters70/4772776
ttgtaaattag

SEQ ID NO: 87352 - DNA, 9 bp, Unknown
  misc_feature (1)..( 9): Result.001 file - promoters70/4772776
tttatcata

SEQ ID NO: 87353 - DNA, 9 bp, Unknown
  misc_feature (1)..( 9): Result.001 file - promoters70/4772776
cgtatcata

SEQ ID NO: 87354 - DNA, 9 bp, Unknown
  misc_feature (1)..( 9): Result.001 file - promoters70/4772776
tttttcact

SEQ ID NO: 87355 - DNA, 13 bp, Unknown
  misc_feature (1)..( 13): Result.001 file - promoters70/4772776
tcagtgattaatt

SEQ ID NO: 87356 - DNA, 13 bp, Unknown
  misc_feature (1)..( 13): Result.001 file - promoters70/4772776
tcattgatctcaa

SEQ ID NO: 87357 - DNA, 13 bp, Unknown
  misc_feature (1)..( 13): Result.001 file - promoters70/4772776
tttttgatctcaa

SEQ ID NO: 87358 - DNA, 8 bp, Unknown
  misc_feature (1)..( 8): Result.001 file - promoters70/4772776
aattgaaa

SEQ ID NO: 87359 - DNA, 8 bp, Unknown
  misc_feature (1)..( 8): Result.001 file - promoters70/4772776
cattgaaa

SEQ ID NO: 87360 - DNA, 8 bp, Unknown
  misc_feature (1)..( 8): Result.001 file - promoters70/4772776
aatttaaa

SEQ ID NO: 87361 - DNA, 10 bp, Unknown
  misc_feature (1)..( 10): Result.001 file - promoters70/4772776
attgataaat

SEQ ID NO: 87362 - DNA, 10 bp, Unknown
  misc_feature (1)..( 10): Result.001 file - promoters70/4772776
attaatacaa

SEQ ID NO: 87363 - DNA, 10 bp, Unknown
  misc_feature (1)..( 10): Result.001 file - promoters70/4772776
tttggtaaat

SEQ ID NO: 87364 - DNA, 13 bp, Unknown
  misc_feature (1)..( 13): Result.001 file - promoters70/4772776
aacataaaagcat

SEQ ID NO: 87365 - DNA, 13 bp, Unknown
  misc_feature (1)..( 13): Result.001 file - promoters70/4772776
aacttaaaaacat

SEQ ID NO: 87366 - DNA, 13 bp, Unknown
  misc_feature (1)..( 13): Result.001 file - promoters70/4772776
catctaaaaataa

SEQ ID NO: 87367 - DNA, 9 bp, Unknown
  misc_feature (1)..( 9): Result.001 file - promoters70/4772776
taaaatgca

SEQ ID NO: 87368 - DNA, 9 bp, Unknown
  misc_feature (1)..( 9): Result.001 file - promoters70/4772776
taaaataat

SEQ ID NO: 87369 - DNA, 9 bp, Unknown
  misc_feature (1)..( 9): Result.001 file - promoters70/4772776
taaaaagca

SEQ ID NO: 87370 - DNA, 11 bp, Unknown
  misc_feature (1)..( 11): Result.001 file - promoters70/4772776
ttttatcgtaa

SEQ ID NO: 87371 - DNA, 11 bp, Unknown
  misc_feature (1)..( 11): Result.001 file - promoters70/4772776
tttgatctcaa

SEQ ID NO: 87372 - DNA, 11 bp, Unknown
  misc_feature (1)..( 11): Result.001 file - promoters70/4772776
attgatctcaa

SEQ ID NO: 87373 - DNA, 7 bp, Unknown
  misc_feature (1)..( 7): Result.001 file - promoters70/4772776
ctataaa

SEQ ID NO: 87374 - DNA, 7 bp, Unknown
  misc_feature (1)..( 7): Result.001 file - promoters70/4772776
atataaa

SEQ ID NO: 87375 - DNA, 7 bp, Unknown
  misc_feature (1)..( 7): Result.001 file - promoters70/4772776
atataac

SEQ ID NO: 87376 - DNA, 11 bp, Unknown
  misc_feature (1)..( 11): Result.001 file - promoters70/4772776
tgtctttttac

SEQ ID NO: 87377 - DNA, 11 bp, Unknown
  misc_feature (1)..( 11): Result.001 file - promoters70/4772776
cttcttgttac

SEQ ID NO: 87378 - DNA, 11 bp, Unknown
  misc_feature (1)..( 11): Result.001 file - promoters70/4772776
cttcatgtaca

SEQ ID NO: 87379 - DNA, 11 bp, Unknown
  misc_feature (1)..( 11): Result.001 file - promoters70/4772776
atttgtttttt

SEQ ID NO: 87380 - DNA, 11 bp, Unknown
  misc_feature (1)..( 11): Result.001 file - promoters70/4772776
aagtgtctttt

SEQ ID NO: 87381 - DNA, 11 bp, Unknown
  misc_feature (1)..( 11): Result.001 file - promoters70/4772776
aagtatcttac

SEQ ID NO: 87382 - DNA, 8 bp, Unknown
  misc_feature (1)..( 8): Result.001 file - promoters70/4772776
aatccaaa

SEQ ID NO: 87383 - DNA, 8 bp, Unknown
  misc_feature (1)..( 8): Result.001 file - promoters70/4772776
aatcaaaa

SEQ ID NO: 87384 - DNA, 8 bp, Unknown
  misc_feature (1)..( 8): Result.001 file - promoters70/4772879
tatcaaac

SEQ ID NO: 87385 - DNA, 10 bp, Unknown
  misc_feature (1)..( 10): Result.001 file - promoters70/4772879
taaaaatgaa

SEQ ID NO: 87386 - DNA, 10 bp, Unknown
  misc_feature (1)..( 10): Result.001 file - promoters70/4772879
taaaaagtct

SEQ ID NO: 87387 - DNA, 10 bp, Unknown
  misc_feature (1)..( 10): Result.001 file - promoters70/4772879
aaaaaaagaa

SEQ ID NO: 87388 - DNA, 10 bp, Unknown
  misc_feature (1)..( 10): Result.001 file - promoters70/4772879
gaaaaagggt

SEQ ID NO: 87389 - DNA, 12 bp, Unknown
  misc_feature (1)..( 12): Result.001 file - promoters70/4772879
atataataaata

SEQ ID NO: 87390 - DNA, 12 bp, Unknown
  misc_feature (1)..( 12): Result.001 file - promoters70/4772879
gcataaaaaata

SEQ ID NO: 87391 - DNA, 12 bp, Unknown
  misc_feature (1)..( 12): Result.001 file - promoters70/4772879
ttattatacttc

SEQ ID NO: 87392 - DNA, 12 bp, Unknown
  misc_feature (1)..( 12): Result.001 file - promoters70/4772879
atataattatct

SEQ ID NO: 87393 - DNA, 12 bp, Unknown
  misc_feature (1)..( 12): Result.001 file - promoters70/4772879
ctaaaatataat

SEQ ID NO: 87394 - DNA, 10 bp, Unknown
  misc_feature (1)..( 10): Result.001 file - promoters70/4772879
gtatatatat

SEQ ID NO: 87395 - DNA, 10 bp, Unknown
  misc_feature (1)..( 10): Result.001 file - promoters70/4772879
aaataaatag

SEQ ID NO: 87396 - DNA, 10 bp, Unknown
  misc_feature (1)..( 10): Result.001 file - promoters70/4772879
aaatatataa

SEQ ID NO: 87397 - DNA, 10 bp, Unknown
  misc_feature (1)..( 10): Result.001 file - promoters70/4772879
taaaatataa

SEQ ID NO: 87398 - DNA, 12 bp, Unknown
  misc_feature (1)..( 12): Result.001 file - promoters70/4772879
tagaaattaata

SEQ ID NO: 87399 - DNA, 12 bp, Unknown
  misc_feature (1)..( 12): Result.001 file - promoters70/4772879
agataattaagt

SEQ ID NO: 87400 - DNA, 11 bp, Unknown
  misc_feature (1)..( 11): Result.001 file - promoters70/4772879
taaaatcaata

SEQ ID NO: 87401 - DNA, 11 bp, Unknown
  misc_feature (1)..( 11): Result.001 file - promoters70/4772879
tttaattatta

SEQ ID NO: 87402 - DNA, 12 bp, Unknown
  misc_feature (1)..( 12): Result.001 file - promoters70/4772879
ataacatcactt

SEQ ID NO: 87403 - DNA, 12 bp, Unknown
  misc_feature (1)..( 12): Result.001 file - promoters70/4772879
ttttatcacaag

SEQ ID NO: 87404 - DNA, 12 bp, Unknown
  misc_feature (1)..( 12): Result.001 file - promoters70/4772879
ttttgtcaacga

SEQ ID NO: 87405 - DNA, 12 bp, Unknown
  misc_feature (1)..( 12): Result.001 file - promoters70/4772879
cggtgtaaacga

SEQ ID NO: 87406 - DNA, 12 bp, Unknown
  misc_feature (1)..( 12): Result.001 file - promoters70/4772879
ttttgtatctaa

SEQ ID NO: 87407 - DNA, 8 bp, Unknown
  misc_feature (1)..( 8): Result.001 file - promoters70/4772879
atatatat

SEQ ID NO: 87408 - DNA, 8 bp, Unknown
  misc_feature (1)..( 8): Result.001 file - promoters70/4772879
atatttat

SEQ ID NO: 87409 - DNA, 8 bp, Unknown
  misc_feature (1)..( 8): Result.001 file - promoters70/4772879
caatttat

SEQ ID NO: 87410 - DNA, 8 bp, Unknown
  misc_feature (1)..( 8): Result.001 file - promoters70/4772879
taatttat

SEQ ID NO: 87411 - DNA, 8 bp, Unknown
  misc_feature (1)..( 8): Result.001 file - promoters70/4772879
aatcaaaa

SEQ ID NO: 87412 - DNA, 8 bp, Unknown
  misc_feature (1)..( 8): Result.001 file - promoters70/4772879
aatcaaat

SEQ ID NO: 87413 - DNA, 9 bp, Unknown
  misc_feature (1)..( 9): Result.001 file - promoters70/4772879
gatccaaac

SEQ ID NO: 87414 - DNA, 9 bp, Unknown
  misc_feature (1)..( 9): Result.001 file - promoters70/4772879
tatcctaac

SEQ ID NO: 87415 - DNA, 11 bp, Unknown
  misc_feature (1)..( 11): Result.001 file - promoters70/4772879
ctagacacgta

SEQ ID NO: 87416 - DNA, 11 bp, Unknown
  misc_feature (1)..( 11): Result.001 file - promoters70/4772879
atcaacacgta

SEQ ID NO: 87417 - DNA, 11 bp, Unknown
  misc_feature (1)..( 11): Result.001 file - promoters70/4772879
aaagagacgaa

SEQ ID NO: 87418 - DNA, 11 bp, Unknown
  misc_feature (1)..( 11): Result.001 file - promoters70/4772879
aaaaagaatac

SEQ ID NO: 87419 - DNA, 8 bp, Unknown
  misc_feature (1)..( 8): Result.001 file - promoters70/4772879
ttataatg

SEQ ID NO: 87420 - DNA, 8 bp, Unknown
  misc_feature (1)..( 8): Result.001 file - promoters70/4772879
atataata

SEQ ID NO: 87421 - DNA, 8 bp, Unknown
  misc_feature (1)..( 8): Result.001 file - promoters70/4772879
ttattata

SEQ ID NO: 87422 - DNA, 8 bp, Unknown
  misc_feature (1)..( 8): Result.001 file - promoters70/4773035
ataaaatc

SEQ ID NO: 87423 - DNA, 13 bp, Unknown
  misc_feature (1)..( 13): Result.001 file - promoters70/4773035
aatatttttcata

SEQ ID NO: 87424 - DNA, 13 bp, Unknown
  misc_feature (1)..( 13): Result.001 file - promoters70/4773035
tatacttttaata

SEQ ID NO: 87425 - DNA, 13 bp, Unknown
  misc_feature (1)..( 13): Result.001 file - promoters70/4773035
aatgtttatgttg

SEQ ID NO: 87426 - DNA, 9 bp, Unknown
  misc_feature (1)..( 9): Result.001 file - promoters70/4773035
aaatttttt

SEQ ID NO: 87427 - DNA, 9 bp, Unknown
  misc_feature (1)..( 9): Result.001 file - promoters70/4773035
taatatttt

SEQ ID NO: 87428 - DNA, 9 bp, Unknown
  misc_feature (1)..( 9): Result.001 file - promoters70/4773035
aaatgttta

SEQ ID NO: 87429 - DNA, 7 bp, Unknown
  misc_feature (1)..( 7): Result.001 file - promoters70/4773035
tttctaa

SEQ ID NO: 87430 - DNA, 7 bp, Unknown
  misc_feature (1)..( 7): Result.001 file - promoters70/4773035
tttttaa

SEQ ID NO: 87431 - DNA, 7 bp, Unknown
  misc_feature (1)..( 7): Result.001 file - promoters70/4773035
tttttac

SEQ ID NO: 87432 - DNA, 9 bp, Unknown
  misc_feature (1)..( 9): Result.001 file - promoters70/4773035
ataagagtc

SEQ ID NO: 87433 - DNA, 9 bp, Unknown
  misc_feature (1)..( 9): Result.001 file - promoters70/4773035
atatgagtc

SEQ ID NO: 87434 - DNA, 9 bp, Unknown
  misc_feature (1)..( 9): Result.001 file - promoters70/4773035
atatgaata

SEQ ID NO: 87435 - DNA, 8 bp, Unknown
  misc_feature (1)..( 8): Result.001 file - promoters70/4773035
tattttca

SEQ ID NO: 87436 - DNA, 8 bp, Unknown
  misc_feature (1)..( 8): Result.001 file - promoters70/4773035
cgttttca

SEQ ID NO: 87437 - DNA, 8 bp, Unknown
  misc_feature (1)..( 8): Result.001 file - promoters70/4773035
tattgtca

SEQ ID NO: 87438 - DNA, 7 bp, Unknown
  misc_feature (1)..( 7): Result.001 file - promoters70/4773035
cggatag

SEQ ID NO: 87439 - DNA, 7 bp, Unknown
  misc_feature (1)..( 7): Result.001 file - promoters70/4773035
cggttag

SEQ ID NO: 87440 - DNA, 7 bp, Unknown
  misc_feature (1)..( 7): Result.001 file - promoters70/4773035
cggttaa

SEQ ID NO: 87441 - DNA, 12 bp, Unknown
  misc_feature (1)..( 12): Result.001 file - promoters70/4773035
gaaagaaataat

SEQ ID NO: 87442 - DNA, 12 bp, Unknown
  misc_feature (1)..( 12): Result.001 file - promoters70/4773035
aaccaaaacaat

SEQ ID NO: 87443 - DNA, 12 bp, Unknown
  misc_feature (1)..( 12): Result.001 file - promoters70/4773068
aaccagaacaga

SEQ ID NO: 87444 - DNA, 10 bp, Unknown
  misc_feature (1)..( 10): Result.001 file - promoters70/4773068
tacgtgtcaa

SEQ ID NO: 87445 - DNA, 10 bp, Unknown
  misc_feature (1)..( 10): Result.001 file - promoters70/4773068
cacgtgtcat

SEQ ID NO: 87446 - DNA, 10 bp, Unknown
  misc_feature (1)..( 10): Result.001 file - promoters70/4773068
tacgtgtcaa

SEQ ID NO: 87447 - DNA, 20 bp, Unknown
  misc_feature (1)..( 20): Result.001 file - promoters70/4773068
ttggttattgcttcaccgcc

SEQ ID NO: 87448 - DNA, 20 bp, Unknown
  misc_feature (1)..( 20): Result.001 file - promoters70/4773068
ttagctattgcttcaccgcc

SEQ ID NO: 87449 - DNA, 20 bp, Unknown
  misc_feature (1)..( 20): Result.001 file - promoters70/4773068
ttggctattgcttccacgcc

SEQ ID NO: 87450 - DNA, 22 bp, Unknown
  misc_feature (1)..( 22): Result.001 file - promoters70/4773068
tctcgtgaccgactcgtcctcg

SEQ ID NO: 87451 - DNA, 22 bp, Unknown
  misc_feature (1)..( 22): Result.001 file - promoters70/4773068
gacctagtcgtcctcgtctttt

SEQ ID NO: 87452 - DNA, 22 bp, Unknown
  misc_feature (1)..( 22): Result.001 file - promoters70/4773068
gaccgagtcgtcctcgtctttt

SEQ ID NO: 87453 - DNA, 19 bp, Unknown
  misc_feature (1)..( 19): Result.001 file - promoters70/4773068
ttcttcttctataaattaa

SEQ ID NO: 87454 - DNA, 19 bp, Unknown
  misc_feature (1)..( 19): Result.001 file - promoters70/4773068
ttcttcttctataaaacaa

SEQ ID NO: 87455 - DNA, 19 bp, Unknown
  misc_feature (1)..( 19): Result.001 file - promoters70/4773068
ttttgcttctataaatcaa

SEQ ID NO: 87456 - DNA, 15 bp, Unknown
  misc_feature (1)..( 15): Result.001 file - promoters70/4773068
cgccttagctttctc

SEQ ID NO: 87457 - DNA, 15 bp, Unknown
  misc_feature (1)..( 15): Result.001 file - promoters70/4773068
cgccttagctttctc

SEQ ID NO: 87458 - DNA, 15 bp, Unknown
  misc_feature (1)..( 15): Result.001 file - promoters70/4773074
cgccttagctttctc

SEQ ID NO: 87459 - DNA, 13 bp, Unknown
  misc_feature (1)..( 13): Result.001 file - promoters70/4773074
ttataaaacccta

SEQ ID NO: 87460 - DNA, 13 bp, Unknown
  misc_feature (1)..( 13): Result.001 file - promoters70/4773074
atataaatccctt

SEQ ID NO: 87461 - DNA, 13 bp, Unknown
  misc_feature (1)..( 13): Result.001 file - promoters70/4773074
ttataaataatct

SEQ ID NO: 87462 - DNA, 13 bp, Unknown
  misc_feature (1)..( 13): Result.001 file - promoters70/4773074
gtataaaaacact

SEQ ID NO: 87463 - DNA, 13 bp, Unknown
  misc_feature (1)..( 13): Result.001 file - promoters70/4773074
atataaatccttc

SEQ ID NO: 87464 - DNA, 13 bp, Unknown
  misc_feature (1)..( 13): Result.001 file - promoters70/4773182
ctcaaaagcccta

SEQ ID NO: 87465 - DNA, 10 bp, Unknown
  misc_feature (1)..( 10): Result.001 file - promoters70/4773182
ttgtaattta

SEQ ID NO: 87466 - DNA, 10 bp, Unknown
  misc_feature (1)..( 10): Result.001 file - promoters70/4773182
ttgtagtttt

SEQ ID NO: 87467 - DNA, 11 bp, Unknown
  misc_feature (1)..( 11): Result.001 file - promoters70/4773355
tctaagtcttg

SEQ ID NO: 87468 - DNA, 11 bp, Unknown
  misc_feature (1)..( 11): Result.001 file - promoters70/4773355
ttacttttatt

SEQ ID NO: 87469 - DNA, 11 bp, Unknown
  misc_feature (1)..( 11): Result.001 file - promoters70/4773355
ttacttttaac

SEQ ID NO: 87470 - DNA, 11 bp, Unknown
  misc_feature (1)..( 11): Result.001 file - promoters70/4773355
ctaatttgaac

SEQ ID NO: 87471 - DNA, 9 bp, Unknown
  misc_feature (1)..( 9): Result.001 file - promoters70/4773355
ttaacaaaa

SEQ ID NO: 87472 - DNA, 9 bp, Unknown
  misc_feature (1)..( 9): Result.001 file - promoters70/4773355
ttaagaaaa

SEQ ID NO: 87473 - DNA, 9 bp, Unknown
  misc_feature (1)..( 9): Result.001 file - promoters70/4773355
ttatcaaat

SEQ ID NO: 87474 - DNA, 8 bp, Unknown
  misc_feature (1)..( 8): Result.001 file - promoters70/4773355
aaacaatt

SEQ ID NO: 87475 - DNA, 8 bp, Unknown
  misc_feature (1)..( 8): Result.001 file - promoters70/4773355
aaataatc

SEQ ID NO: 87476 - DNA, 8 bp, Unknown
  misc_feature (1)..( 8): Result.001 file - promoters70/4773823
caactatt

SEQ ID NO: 87477 - DNA, 9 bp, Unknown
  misc_feature (1)..( 9): Result.001 file - promoters70/4773823
agataataa

SEQ ID NO: 87478 - DNA, 9 bp, Unknown
  misc_feature (1)..( 9): Result.001 file - promoters70/4773823
agaaaattc

SEQ ID NO: 87479 - DNA, 9 bp, Unknown
  misc_feature (1)..( 9): Result.001 file - promoters70/4803329
tcaaacttc

SEQ ID NO: 87480 - DNA, 9 bp, Unknown
  misc_feature (1)..( 9): Result.001 file - promoters70/4803329
aaaactgaa

SEQ ID NO: 87481 - DNA, 9 bp, Unknown
  misc_feature (1)..( 9): Result.001 file - promoters70/4803329
aaaattgaa

SEQ ID NO: 87482 - DNA, 9 bp, Unknown
  misc_feature (1)..( 9): Result.001 file - promoters70/4806023
tatattgaa

SEQ ID NO: 87483 - DNA, 7 bp, Unknown
  misc_feature (1)..( 7): Result.001 file - promoters70/4806023
aaccgtt

SEQ ID NO: 87484 - DNA, 7 bp, Unknown
  misc_feature (1)..( 7): Result.001 file - promoters70/4806023
gaccgtt

SEQ ID NO: 87485 - DNA, 7 bp, Unknown
  misc_feature (1)..( 7): Result.001 file - promoters70/4806023
gaccgtg

SEQ ID NO: 87486 - DNA, 10 bp, Unknown
  misc_feature (1)..( 10): Result.001 file - promoters70/4806023
ctctttattt

SEQ ID NO: 87487 - DNA, 10 bp, Unknown
  misc_feature (1)..( 10): Result.001 file - promoters70/4806023
atcttgattt

SEQ ID NO: 87488 - DNA, 10 bp, Unknown
  misc_feature (1)..( 10): Result.001 file - promoters70/4807026
atcttgaata

SEQ ID NO: 87489 - DNA, 14 bp, Unknown
  misc_feature (1)..( 14): Result.001 file - promoters70/4807026
tatattaactttga

SEQ ID NO: 87490 - DNA, 14 bp, Unknown
  misc_feature (1)..( 14): Result.001 file - promoters70/4807026
tatgttaattttag

SEQ ID NO: 87491 - DNA, 9 bp, Unknown
  misc_feature (1)..( 9): Result.001 file - promoters70/4807026
taactttat

SEQ ID NO: 87492 - DNA, 9 bp, Unknown
  misc_feature (1)..( 9): Result.001 file - promoters70/4807026
cttagaaac

SEQ ID NO: 87493 - DNA, 9 bp, Unknown
  misc_feature (1)..( 9): Result.001 file - promoters70/4807026
tttagaaag

SEQ ID NO: 87494 - DNA, 9 bp, Unknown
  misc_feature (1)..( 9): Result.001 file - promoters70/4807026
cttagaaga

SEQ ID NO: 87495 - DNA, 6 bp, Unknown
  misc_feature (1)..( 6): Result.001 file - promoters70/4807026
agaaac

SEQ ID NO: 87496 - DNA, 9 bp, Unknown
  misc_feature (1)..( 9): Result.001 file - promoters70/4807026
ttgagttgt

SEQ ID NO: 87497 - DNA, 9 bp, Unknown
  misc_feature (1)..( 9): Result.001 file - promoters70/4807026
ttgatttgg

SEQ ID NO: 87498 - DNA, 9 bp, Unknown
  misc_feature (1)..( 9): Result.001 file - promoters70/4807026
ggaatttgg

SEQ ID NO: 87499 - DNA, 9 bp, Unknown
  misc_feature (1)..( 9): Result.001 file - promoters70/4807026
ttgttttca

SEQ ID NO: 87500 - DNA, 10 bp, Unknown
  misc_feature (1)..( 10): Result.001 file - promoters70/4807026
aaaatcccta

SEQ ID NO: 87501 - DNA, 10 bp, Unknown
  misc_feature (1)..( 10): Result.001 file - promoters70/4807026
cagatcgcta

SEQ ID NO: 87502 - DNA, 10 bp, Unknown
  misc_feature (1)..( 10): Result.001 file - promoters70/4807026
aaaagcccat

SEQ ID NO: 87503 - DNA, 9 bp, Unknown
  misc_feature (1)..( 9): Result.001 file - promoters70/4807026
aaacattat

SEQ ID NO: 87504 - DNA, 9 bp, Unknown
  misc_feature (1)..( 9): Result.001 file - promoters70/4807026
aaacatata

SEQ ID NO: 87505 - DNA, 9 bp, Unknown
  misc_feature (1)..( 9): Result.001 file - promoters70/4807236
aaacttata

SEQ ID NO: 87506 - DNA, 12 bp, Unknown
  misc_feature (1)..( 12): Result.001 file - promoters70/4807236
tttaacaataag

SEQ ID NO: 87507 - DNA, 12 bp, Unknown
  misc_feature (1)..( 12): Result.001 file - promoters70/4807236
cttagcaataaa

SEQ ID NO: 87508 - DNA, 12 bp, Unknown
  misc_feature (1)..( 12): Result.001 file - promoters70/4808052
tttagcaaaaag

SEQ ID NO: 87509 - DNA, 7 bp, Unknown
  misc_feature (1)..( 7): Result.001 file - promoters70/4808052
gaaccat

SEQ ID NO: 87510 - DNA, 7 bp, Unknown
  misc_feature (1)..( 7): Result.001 file - promoters70/4808052
aaaccat

SEQ ID NO: 87511 - DNA, 7 bp, Unknown
  misc_feature (1)..( 7): Result.001 file - promoters70/4808052
aaaccaa

SEQ ID NO: 87512 - DNA, 10 bp, Unknown
  misc_feature (1)..( 10): Result.001 file - promoters70/4808052
ggtcaaaaac

SEQ ID NO: 87513 - DNA, 10 bp, Unknown
  misc_feature (1)..( 10): Result.001 file - promoters70/4808052
ggacaaaaac

SEQ ID NO: 87514 - DNA, 10 bp, Unknown
  misc_feature (1)..( 10): Result.001 file - promoters70/4808052
gaccaaaaga

SEQ ID NO: 87515 - DNA, 7 bp, Unknown
  misc_feature (1)..( 7): Result.001 file - promoters70/4808052
ttacaaa

SEQ ID NO: 87516 - DNA, 7 bp, Unknown
  misc_feature (1)..( 7): Result.001 file - promoters70/4808052
ttaaaaa

SEQ ID NO: 87517 - DNA, 7 bp, Unknown
  misc_feature (1)..( 7): Result.001 file - promoters70/4808052
ttaaaat

SEQ ID NO: 87518 - DNA, 7 bp, Unknown
  misc_feature (1)..( 7): Result.001 file - promoters70/4808052
caaatta

SEQ ID NO: 87519 - DNA, 7 bp, Unknown
  misc_feature (1)..( 7): Result.001 file - promoters70/4808052
aaaatta

SEQ ID NO: 87520 - DNA, 7 bp, Unknown
  misc_feature (1)..( 7): Result.001 file - promoters70/4808052
aaaattt

SEQ ID NO: 87521 - DNA, 7 bp, Unknown
  misc_feature (1)..( 7): Result.001 file - promoters70/4808052
agaccaa

SEQ ID NO: 87522 - DNA, 7 bp, Unknown
  misc_feature (1)..( 7): Result.001 file - promoters70/4808052
agatcaa

SEQ ID NO: 87523 - DNA, 7 bp, Unknown
  misc_feature (1)..( 7): Result.001 file - promoters70/4811047
ggatcaa

SEQ ID NO: 87524 - DNA, 9 bp, Unknown
  misc_feature (1)..( 9): Result.001 file - promoters70/4811047
aaaaataaa

SEQ ID NO: 87525 - DNA, 9 bp, Unknown
  misc_feature (1)..( 9): Result.001 file - promoters70/4811047
aaacatata

SEQ ID NO: 87526 - DNA, 9 bp, Unknown
  misc_feature (1)..( 9): Result.001 file - promoters70/4811047
taaaataca

SEQ ID NO: 87527 - DNA, 9 bp, Unknown
  misc_feature (1)..( 9): Result.001 file - promoters70/4811047
caaaataaa

SEQ ID NO: 87528 - DNA, 9 bp, Unknown
  misc_feature (1)..( 9): Result.001 file - promoters70/4811047
taaataaaa

SEQ ID NO: 87529 - DNA, 9 bp, Unknown
  misc_feature (1)..( 9): Result.001 file - promoters70/4811047
taattaaac

SEQ ID NO: 87530 - DNA, 9 bp, Unknown
  misc_feature (1)..( 9): Result.001 file - promoters70/4811047
attataaaa

SEQ ID NO: 87531 - DNA, 9 bp, Unknown
  misc_feature (1)..( 9): Result.001 file - promoters70/4811047
aaaataaag

SEQ ID NO: 87532 - DNA, 10 bp, Unknown
  misc_feature (1)..( 10): Result.001 file - promoters70/4811047
tcatattatt

SEQ ID NO: 87533 - DNA, 10 bp, Unknown
  misc_feature (1)..( 10): Result.001 file - promoters70/4811047
atatattaat

SEQ ID NO: 87534 - DNA, 11 bp, Unknown
  misc_feature (1)..( 11): Result.001 file - promoters70/4811047
atataattatt

SEQ ID NO: 87535 - DNA, 12 bp, Unknown
  misc_feature (1)..( 12): Result.001 file - promoters70/4811047
ttaatgattttg

SEQ ID NO: 87536 - DNA, 11 bp, Unknown
  misc_feature (1)..( 11): Result.001 file - promoters70/4811047
atattattagt

SEQ ID NO: 87537 - DNA, 11 bp, Unknown
  misc_feature (1)..( 11): Result.001 file - promoters70/4811047
taattattttg

SEQ ID NO: 87538 - DNA, 11 bp, Unknown
  misc_feature (1)..( 11): Result.001 file - promoters70/4811047
ccattgttaac

SEQ ID NO: 87539 - DNA, 11 bp, Unknown
  misc_feature (1)..( 11): Result.001 file - promoters70/4811047
taatgattttg

SEQ ID NO: 87540 - DNA, 8 bp, Unknown
  misc_feature (1)..( 8): Result.001 file - promoters70/4811047
ttcatatg

SEQ ID NO: 87541 - DNA, 8 bp, Unknown
  misc_feature (1)..( 8): Result.001 file - promoters70/4811047
gtcatata

SEQ ID NO: 87542 - DNA, 8 bp, Unknown
  misc_feature (1)..( 8): Result.001 file - promoters70/4811047
gtcataaa

SEQ ID NO: 87543 - DNA, 8 bp, Unknown
  misc_feature (1)..( 8): Result.001 file - promoters70/4899830
atcaaata

SEQ ID NO: 87544 - DNA, 9 bp, Unknown
  misc_feature (1)..( 9): Result.001 file - promoters70/4899830
tatatactt

SEQ ID NO: 87545 - DNA, 9 bp, Unknown
  misc_feature (1)..( 9): Result.001 file - promoters70/4899830
aatacacta

SEQ ID NO: 87546 - DNA, 9 bp, Unknown
  misc_feature (1)..( 9): Result.001 file - promoters70/4899830
tatatatat

SEQ ID NO: 87547 - DNA, 9 bp, Unknown
  misc_feature (1)..( 9): Result.001 file - promoters70/4899830
tatataaag

SEQ ID NO: 87548 - DNA, 9 bp, Unknown
  misc_feature (1)..( 9): Result.001 file - promoters70/4899830
tatttatga

SEQ ID NO: 87549 - DNA, 9 bp, Unknown
  misc_feature (1)..( 9): Result.001 file - promoters70/4899830
aatataaag

SEQ ID NO: 87550 - DNA, 13 bp, Unknown
  misc_feature (1)..( 13): Result.001 file - promoters70/4899830
gaatttttgcgag

SEQ ID NO: 87551 - DNA, 13 bp, Unknown
  misc_feature (1)..( 13): Result.001 file - promoters70/4899830
gaacttttaatcg

SEQ ID NO: 87552 - DNA, 13 bp, Unknown
  misc_feature (1)..( 13): Result.001 file - promoters70/4899830
aaattttttataa

SEQ ID NO: 87553 - DNA, 13 bp, Unknown
  misc_feature (1)..( 13): Result.001 file - promoters70/4899830
taacgtttggttt

SEQ ID NO: 87554 - DNA, 13 bp, Unknown
  misc_feature (1)..( 13): Result.001 file - promoters70/4899830
taaagttgattaa

SEQ ID NO: 87555 - DNA, 13 bp, Unknown
  misc_feature (1)..( 13): Result.001 file - promoters70/4899873
aaacgtttgcttt

SEQ ID NO: 87556 - DNA, 11 bp, Unknown
  misc_feature (1)..( 11): Result.001 file - promoters70/4899873
catatatactt

SEQ ID NO: 87557 - DNA, 11 bp, Unknown
  misc_feature (1)..( 11): Result.001 file - promoters70/4899873
aatatataaag

SEQ ID NO: 87558 - DNA, 11 bp, Unknown
  misc_feature (1)..( 11): Result.001 file - promoters70/4899873
catatatatgc

SEQ ID NO: 87559 - DNA, 11 bp, Unknown
  misc_feature (1)..( 11): Result.001 file - promoters70/4899873
catataaatta

SEQ ID NO: 87560 - DNA, 11 bp, Unknown
  misc_feature (1)..( 11): Result.001 file - promoters70/4899873
tatatatatta

SEQ ID NO: 87561 - DNA, 11 bp, Unknown
  misc_feature (1)..( 11): Result.001 file - promoters70/4899873
cgtatataaag

SEQ ID NO: 87562 - DNA, 10 bp, Unknown
  misc_feature (1)..( 10): Result.001 file - promoters70/4899873
taataataac

SEQ ID NO: 87563 - DNA, 10 bp, Unknown
  misc_feature (1)..( 10): Result.001 file - promoters70/4899873
tattaataaa

SEQ ID NO: 87564 - DNA, 10 bp, Unknown
  misc_feature (1)..( 10): Result.001 file - promoters70/4899873
aaatattaat

SEQ ID NO: 87565 - DNA, 10 bp, Unknown
  misc_feature (1)..( 10): Result.001 file - promoters70/4899873
aaaacatata

SEQ ID NO: 87566 - DNA, 10 bp, Unknown
  misc_feature (1)..( 10): Result.001 file - promoters70/4899873
gaaaaacaaa

SEQ ID NO: 87567 - DNA, 10 bp, Unknown
  misc_feature (1)..( 10): Result.001 file - promoters70/4900353
attaattaat

SEQ ID NO: 87568 - DNA, 11 bp, Unknown
  misc_feature (1)..( 11): Result.001 file - promoters70/4900353
taatatatatt

SEQ ID NO: 87569 - DNA, 11 bp, Unknown
  misc_feature (1)..( 11): Result.001 file - promoters70/4900353
taagataggaa

SEQ ID NO: 87570 - DNA, 11 bp, Unknown
  misc_feature (1)..( 11): Result.001 file - promoters70/4900353
tgatataaatt

SEQ ID NO: 87571 - DNA, 8 bp, Unknown
  misc_feature (1)..( 8): Result.001 file - promoters70/4900353
gggcctaa

SEQ ID NO: 87572 - DNA, 8 bp, Unknown
  misc_feature (1)..( 8): Result.001 file - promoters70/4900353
cggcgtaa

SEQ ID NO: 87573 - DNA, 8 bp, Unknown
  misc_feature (1)..( 8): Result.001 file - promoters70/4901133
gggcctat

SEQ ID NO: 87574 - DNA, 10 bp, Unknown
  misc_feature (1)..( 10): Result.001 file - promoters70/4901133
atgatactag

SEQ ID NO: 87575 - DNA, 10 bp, Unknown
  misc_feature (1)..( 10): Result.001 file - promoters70/4901133
atgatagtct

SEQ ID NO: 87576 - DNA, 10 bp, Unknown
  misc_feature (1)..( 10): Result.001 file - promoters70/4901133
ttgaaagttt

SEQ ID NO: 87577 - DNA, 10 bp, Unknown
  misc_feature (1)..( 10): Result.001 file - promoters70/4901133
agtaaaattt

SEQ ID NO: 87578 - DNA, 10 bp, Unknown
  misc_feature (1)..( 10): Result.001 file - promoters70/4901133
aaaaaaattg

SEQ ID NO: 87579 - DNA, 10 bp, Unknown
  misc_feature (1)..( 10): Result.001 file - promoters70/4901133
tttaaatttt

SEQ ID NO: 87580 - DNA, 10 bp, Unknown
  misc_feature (1)..( 10): Result.001 file - promoters70/4901133
gagaaattga

SEQ ID NO: 87581 - DNA, 10 bp, Unknown
  misc_feature (1)..( 10): Result.001 file - promoters70/4901133
acaaataaag

SEQ ID NO: 87582 - DNA, 10 bp, Unknown
  misc_feature (1)..( 10): Result.001 file - promoters70/4901133
ccaaatatca

SEQ ID NO: 87583 - DNA, 10 bp, Unknown
  misc_feature (1)..( 10): Result.001 file - promoters70/4901133
agaaaaaaaa

SEQ ID NO: 87584 - DNA, 10 bp, Unknown
  misc_feature (1)..( 10): Result.001 file - promoters70/4901133
tcaagtaaaa

SEQ ID NO: 87585 - DNA, 10 bp, Unknown
  misc_feature (1)..( 10): Result.001 file - promoters70/4901133
gtaaatgtat

SEQ ID NO: 87586 - DNA, 10 bp, Unknown
  misc_feature (1)..( 10): Result.001 file - promoters70/4901133
tgagaagaaa

SEQ ID NO: 87587 - DNA, 10 bp, Unknown
  misc_feature (1)..( 10): Result.001 file - promoters70/4901171
taaaatgtct

SEQ ID NO: 87588 - DNA, 10 bp, Unknown
  misc_feature (1)..( 10): Result.001 file - promoters70/4901171
gaacaaaaaa

SEQ ID NO: 87589 - DNA, 12 bp, Unknown
  misc_feature (1)..( 12): Result.001 file - promoters70/4901171
gcaaaccaaact

SEQ ID NO: 87590 - DNA, 12 bp, Unknown
  misc_feature (1)..( 12): Result.001 file - promoters70/4901171
agtaactaaaat

SEQ ID NO: 87591 - DNA, 12 bp, Unknown
  misc_feature (1)..( 12): Result.001 file - promoters70/4901171
aattacaaaata

SEQ ID NO: 87592 - DNA, 12 bp, Unknown
  misc_feature (1)..( 12): Result.001 file - promoters70/4901171
atgcacctaacc

SEQ ID NO: 87593 - DNA, 12 bp, Unknown
  misc_feature (1)..( 12): Result.001 file - promoters70/4901171
agtcactaaaaa

SEQ ID NO: 87594 - DNA, 12 bp, Unknown
  misc_feature (1)..( 12): Result.001 file - promoters70/4901171
ttttgctaaaaa

SEQ ID NO: 87595 - DNA, 12 bp, Unknown
  misc_feature (1)..( 12): Result.001 file - promoters70/4901171
agtaaaaaagta

SEQ ID NO: 87596 - DNA, 12 bp, Unknown
  misc_feature (1)..( 12): Result.001 file - promoters70/4901171
actaaaaaggtt

SEQ ID NO: 87597 - DNA, 12 bp, Unknown
  misc_feature (1)..( 12): Result.001 file - promoters70/4901171
agtcaaatatag

SEQ ID NO: 87598 - DNA, 12 bp, Unknown
  misc_feature (1)..( 12): Result.001 file - promoters70/4901171
gctaaaaatcct

SEQ ID NO: 87599 - DNA, 12 bp, Unknown
  misc_feature (1)..( 12): Result.001 file - promoters70/4901171
tacaaaataggt

SEQ ID NO: 87600 - DNA, 12 bp, Unknown
  misc_feature (1)..( 12): Result.001 file - promoters70/4901783
tttaggtgctta

SEQ ID NO: 87601 - DNA, 7 bp, Unknown
  misc_feature (1)..( 7): Result.001 file - promoters70/4901783
ccacaga

SEQ ID NO: 87602 - DNA, 7 bp, Unknown
  misc_feature (1)..( 7): Result.001 file - promoters70/4901783
ccacagc

SEQ ID NO: 87603 - DNA, 7 bp, Unknown
  misc_feature (1)..( 7): Result.001 file - promoters70/4901839
tcacaga

SEQ ID NO: 87604 - DNA, 10 bp, Unknown
  misc_feature (1)..( 10): Result.001 file - promoters70/4901839
ttaaacttgt

SEQ ID NO: 87605 - DNA, 10 bp, Unknown
  misc_feature (1)..( 10): Result.001 file - promoters70/4901839
ttaaacttgc

SEQ ID NO: 87606 - DNA, 10 bp, Unknown
  misc_feature (1)..( 10): Result.001 file - promoters70/4901839
acaaacatgt

SEQ ID NO: 87607 - DNA, 7 bp, Unknown
  misc_feature (1)..( 7): Result.001 file - promoters70/4901839
attctaa

SEQ ID NO: 87608 - DNA, 7 bp, Unknown
  misc_feature (1)..( 7): Result.001 file - promoters70/4901839
attttaa

SEQ ID NO: 87609 - DNA, 7 bp, Unknown
  misc_feature (1)..( 7): Result.001 file - promoters70/4902387
tttttaa

SEQ ID NO: 87610 - DNA, 10 bp, Unknown
  misc_feature (1)..( 10): Result.001 file - promoters70/4902387
tgatgttata

SEQ ID NO: 87611 - DNA, 10 bp, Unknown
  misc_feature (1)..( 10): Result.001 file - promoters70/4902387
tgatcttata

SEQ ID NO: 87612 - DNA, 10 bp, Unknown
  misc_feature (1)..( 10): Result.001 file - promoters70/4902387
atttctgata

SEQ ID NO: 87613 - DNA, 9 bp, Unknown
  misc_feature (1)..( 9): Result.001 file - promoters70/4902387
ccgattaat

SEQ ID NO: 87614 - DNA, 9 bp, Unknown
  misc_feature (1)..( 9): Result.001 file - promoters70/4902387
ccgaataaa

SEQ ID NO: 87615 - DNA, 9 bp, Unknown
  misc_feature (1)..( 9): Result.001 file - promoters70/4903614
gtaaataaa

SEQ ID NO: 87616 - DNA, 10 bp, Unknown
  misc_feature (1)..( 10): Result.001 file - promoters70/4903614
ttaatataaa

SEQ ID NO: 87617 - DNA, 10 bp, Unknown
  misc_feature (1)..( 10): Result.001 file - promoters70/4903614
acaatttaaa

SEQ ID NO: 87618 - DNA, 10 bp, Unknown
  misc_feature (1)..( 10): Result.001 file - promoters70/4909449
ttattataaa

SEQ ID NO: 87619 - DNA, 12 bp, Unknown
  misc_feature (1)..( 12): Result.001 file - promoters70/4909449
ttcaaaaaagag

SEQ ID NO: 87620 - DNA, 12 bp, Unknown
  misc_feature (1)..( 12): Result.001 file - promoters70/4909449
gttaaaaaagtg

SEQ ID NO: 87621 - DNA, 12 bp, Unknown
  misc_feature (1)..( 12): Result.001 file - promoters70/4909449
ttagtaaaagaa

SEQ ID NO: 87622 - DNA, 12 bp, Unknown
  misc_feature (1)..( 12): Result.001 file - promoters70/4909449
ttcaaaaaaaaa

SEQ ID NO: 87623 - DNA, 12 bp, Unknown
  misc_feature (1)..( 12): Result.001 file - promoters70/4909449
cagaaaatagtt

SEQ ID NO: 87624 - DNA, 12 bp, Unknown
  misc_feature (1)..( 12): Result.001 file - promoters70/4911380
tttcggatagtt

SEQ ID NO: 87625 - DNA, 15 bp, Unknown
  misc_feature (1)..( 15): Result.001 file - promoters70/4911380
cagttttgtattatc

SEQ ID NO: 87626 - DNA, 15 bp, Unknown
  misc_feature (1)..( 15): Result.001 file - promoters70/4911380
tagccttgtatttac

SEQ ID NO: 87627 - DNA, 15 bp, Unknown
  misc_feature (1)..( 15): Result.001 file - promoters70/4911380
gtttcttgtatcatt

SEQ ID NO: 87628 - DNA, 15 bp, Unknown
  misc_feature (1)..( 15): Result.001 file - promoters70/4911380
catttctgtgtttaa

SEQ ID NO: 87629 - DNA, 15 bp, Unknown
  misc_feature (1)..( 15): Result.001 file - promoters70/4911380
gttacttttattatt

SEQ ID NO: 87630 - DNA, 15 bp, Unknown
  misc_feature (1)..( 15): Result.001 file - promoters70/4911380
tttctctgggttgac

SEQ ID NO: 87631 - DNA, 17 bp, Unknown
  misc_feature (1)..( 17): Result.001 file - promoters70/4911380
aaaaaagtttttgtaat

SEQ ID NO: 87632 - DNA, 17 bp, Unknown
  misc_feature (1)..( 17): Result.001 file - promoters70/4911380
actagggttttttcttg

SEQ ID NO: 87633 - DNA, 17 bp, Unknown
  misc_feature (1)..( 17): Result.001 file - promoters70/4911380
ctcaaacttttattttt

SEQ ID NO: 87634 - DNA, 17 bp, Unknown
  misc_feature (1)..( 17): Result.001 file - promoters70/4911380
caagatatttttggtta

SEQ ID NO: 87635 - DNA, 17 bp, Unknown
  misc_feature (1)..( 17): Result.001 file - promoters70/4911380
cacaaatttttactttt

SEQ ID NO: 87636 - DNA, 17 bp, Unknown
  misc_feature (1)..( 17): Result.001 file - promoters70/4911485
cacaaataacggagttt

SEQ ID NO: 87637 - DNA, 8 bp, Unknown
  misc_feature (1)..( 8): Result.001 file - promoters70/4911485
tttgtttg

SEQ ID NO: 87638 - DNA, 8 bp, Unknown
  misc_feature (1)..( 8): Result.001 file - promoters70/4911485
aatgtttg

SEQ ID NO: 87639 - DNA, 8 bp, Unknown
  misc_feature (1)..( 8): Result.001 file - promoters70/4911485
tttatttt

SEQ ID NO: 87640 - DNA, 8 bp, Unknown
  misc_feature (1)..( 8): Result.001 file - promoters70/4911485
aatgtttg

SEQ ID NO: 87641 - DNA, 8 bp, Unknown
  misc_feature (1)..( 8): Result.001 file - promoters70/4911485
aatgttta

SEQ ID NO: 87642 - DNA, 8 bp, Unknown
  misc_feature (1)..( 8): Result.001 file - promoters70/4911485
catgtttt

SEQ ID NO: 87643 - DNA, 12 bp, Unknown
  misc_feature (1)..( 12): Result.001 file - promoters70/4911485
tgagtatatttt

SEQ ID NO: 87644 - DNA, 12 bp, Unknown
  misc_feature (1)..( 12): Result.001 file - promoters70/4911485
tgattatatgta

SEQ ID NO: 87645 - DNA, 12 bp, Unknown
  misc_feature (1)..( 12): Result.001 file - promoters70/4911485
tttgtaaatttt

SEQ ID NO: 87646 - DNA, 12 bp, Unknown
  misc_feature (1)..( 12): Result.001 file - promoters70/4911485
agattatcaata

SEQ ID NO: 87647 - DNA, 12 bp, Unknown
  misc_feature (1)..( 12): Result.001 file - promoters70/4911485
gatgtaaaaatt

SEQ ID NO: 87648 - DNA, 12 bp, Unknown
  misc_feature (1)..( 12): Result.001 file - promoters70/4911485
gacataaatttt

SEQ ID NO: 87649 - DNA, 9 bp, Unknown
  misc_feature (1)..( 9): Result.001 file - promoters70/4911485
acttgcata

SEQ ID NO: 87650 - DNA, 9 bp, Unknown
  misc_feature (1)..( 9): Result.001 file - promoters70/4911485
agttggata

SEQ ID NO: 87651 - DNA, 9 bp, Unknown
  misc_feature (1)..( 9): Result.001 file - promoters70/4911485
acttccatg

SEQ ID NO: 87652 - DNA, 9 bp, Unknown
  misc_feature (1)..( 9): Result.001 file - promoters70/4911485
gagtggata

SEQ ID NO: 87653 - DNA, 9 bp, Unknown
  misc_feature (1)..( 9): Result.001 file - promoters70/4911485
ctttggatt

SEQ ID NO: 87654 - DNA, 9 bp, Unknown
  misc_feature (1)..( 9): Result.001 file - promoters70/4911485
cgtttgatt

SEQ ID NO: 87655 - DNA, 10 bp, Unknown
  misc_feature (1)..( 10): Result.001 file - promoters70/4911485
caataattta

SEQ ID NO: 87656 - DNA, 10 bp, Unknown
  misc_feature (1)..( 10): Result.001 file - promoters70/4911485
gtataatttt

SEQ ID NO: 87657 - DNA, 10 bp, Unknown
  misc_feature (1)..( 10): Result.001 file - promoters70/4911485
tgaaaattta

SEQ ID NO: 87658 - DNA, 10 bp, Unknown
  misc_feature (1)..( 10): Result.001 file - promoters70/4911485
taaaaatttt

SEQ ID NO: 87659 - DNA, 10 bp, Unknown
  misc_feature (1)..( 10): Result.001 file - promoters70/4911485
gataaatttg

SEQ ID NO: 87660 - DNA, 11 bp, Unknown
  misc_feature (1)..( 11): Result.001 file - promoters70/4911485
acctaagttta

SEQ ID NO: 87661 - DNA, 11 bp, Unknown
  misc_feature (1)..( 11): Result.001 file - promoters70/4911485
agacaaataga

SEQ ID NO: 87662 - DNA, 10 bp, Unknown
  misc_feature (1)..( 10): Result.001 file - promoters70/4911485
tgtctgttag

SEQ ID NO: 87663 - DNA, 10 bp, Unknown
  misc_feature (1)..( 10): Result.001 file - promoters70/4911485
tctttgttag

SEQ ID NO: 87664 - DNA, 10 bp, Unknown
  misc_feature (1)..( 10): Result.001 file - promoters70/4911485
ttattgttac

SEQ ID NO: 87665 - DNA, 10 bp, Unknown
  misc_feature (1)..( 10): Result.001 file - promoters70/4911485
aaatttttac

SEQ ID NO: 87666 - DNA, 10 bp, Unknown
  misc_feature (1)..( 10): Result.001 file - promoters70/4911485
atattcttaa

SEQ ID NO: 87667 - DNA, 10 bp, Unknown
  misc_feature (1)..( 10): Result.001 file - promoters70/4911485
ttatggtttg

SEQ ID NO: 87668 - DNA, 11 bp, Unknown
  misc_feature (1)..( 11): Result.001 file - promoters70/4911485
attattattag

SEQ ID NO: 87669 - DNA, 11 bp, Unknown
  misc_feature (1)..( 11): Result.001 file - promoters70/4911485
acttttattat

SEQ ID NO: 87670 - DNA, 11 bp, Unknown
  misc_feature (1)..( 11): Result.001 file - promoters70/4911485
caaatttttac

SEQ ID NO: 87671 - DNA, 11 bp, Unknown
  misc_feature (1)..( 11): Result.001 file - promoters70/4911485
aaaatttaaat

SEQ ID NO: 87672 - DNA, 11 bp, Unknown
  misc_feature (1)..( 11): Result.001 file - promoters70/4911485
ttttgtattat

SEQ ID NO: 87673 - DNA, 11 bp, Unknown
  misc_feature (1)..( 11): Result.001 file - promoters70/4911485
taaattttagt

SEQ ID NO: 87674 - DNA, 17 bp, Unknown
  misc_feature (1)..( 17): Result.001 file - promoters70/4911485
atttacatttgtctgtt

SEQ ID NO: 87675 - DNA, 17 bp, Unknown
  misc_feature (1)..( 17): Result.001 file - promoters70/4911485
ataaaaatttttctgtt

SEQ ID NO: 87676 - DNA, 17 bp, Unknown
  misc_feature (1)..( 17): Result.001 file - promoters70/4911485
tgtataattttatatat

SEQ ID NO: 87677 - DNA, 17 bp, Unknown
  misc_feature (1)..( 17): Result.001 file - promoters70/4911485
agataaatttgtggatt

SEQ ID NO: 87678 - DNA, 17 bp, Unknown
  misc_feature (1)..( 17): Result.001 file - promoters70/4911485
acctaagtttaagttgt

SEQ ID NO: 87679 - DNA, 17 bp, Unknown
  misc_feature (1)..( 17): Result.001 file - promoters70/4911485
agacaaatagaagaaac

SEQ ID NO: 87680 - DNA, 11 bp, Unknown
  misc_feature (1)..( 11): Result.001 file - promoters70/4911485
agtataaatat

SEQ ID NO: 87681 - DNA, 11 bp, Unknown
  misc_feature (1)..( 11): Result.001 file - promoters70/4911485
attatcaatgg

SEQ ID NO: 87682 - DNA, 11 bp, Unknown
  misc_feature (1)..( 11): Result.001 file - promoters70/4911485
gacataaattt

SEQ ID NO: 87683 - DNA, 11 bp, Unknown
  misc_feature (1)..( 11): Result.001 file - promoters70/4911485
agtttaagttg

SEQ ID NO: 87684 - DNA, 11 bp, Unknown
  misc_feature (1)..( 11): Result.001 file - promoters70/4911485
cttttaacaaa

SEQ ID NO: 87685 - DNA, 11 bp, Unknown
  misc_feature (1)..( 11): Result.001 file - promoters70/4911485
tagataaattt

SEQ ID NO: 87686 - DNA, 10 bp, Unknown
  misc_feature (1)..( 10): Result.001 file - promoters70/4911485
attcataata

SEQ ID NO: 87687 - DNA, 10 bp, Unknown
  misc_feature (1)..( 10): Result.001 file - promoters70/4911485
tatcataaag

SEQ ID NO: 87688 - DNA, 10 bp, Unknown
  misc_feature (1)..( 10): Result.001 file - promoters70/4911485
cattatatat

SEQ ID NO: 87689 - DNA, 10 bp, Unknown
  misc_feature (1)..( 10): Result.001 file - promoters70/4911485
tttcaaaaat

SEQ ID NO: 87690 - DNA, 10 bp, Unknown
  misc_feature (1)..( 10): Result.001 file - promoters70/4911485
atgtaaaaat

SEQ ID NO: 87691 - DNA, 10 bp, Unknown
  misc_feature (1)..( 10): Result.001 file - promoters70/4911485
tatcaataat

SEQ ID NO: 87692 - DNA, 13 bp, Unknown
  misc_feature (1)..( 13): Result.001 file - promoters70/4911485
agaaaataaatag

SEQ ID NO: 87693 - DNA, 13 bp, Unknown
  misc_feature (1)..( 13): Result.001 file - promoters70/4911485
acattatatataa

SEQ ID NO: 87694 - DNA, 13 bp, Unknown
  misc_feature (1)..( 13): Result.001 file - promoters70/4911485
aagaaacaaagta

SEQ ID NO: 87695 - DNA, 13 bp, Unknown
  misc_feature (1)..( 13): Result.001 file - promoters70/4911485
attttatatatgt

SEQ ID NO: 87696 - DNA, 13 bp, Unknown
  misc_feature (1)..( 13): Result.001 file - promoters70/4911485
tttagataaattt

SEQ ID NO: 87697 - DNA, 13 bp, Unknown
  misc_feature (1)..( 13): Result.001 file - promoters70/4911485
tctcaagaagcaa

SEQ ID NO: 87698 - DNA, 13 bp, Unknown
  misc_feature (1)..( 13): Result.001 file - promoters70/4911492
gagacctaagttt

SEQ ID NO: 87699 - DNA, 10 bp, Unknown
  misc_feature (1)..( 10): Result.001 file - promoters70/4911492
aataaactta

SEQ ID NO: 87700 - DNA, 10 bp, Unknown
  misc_feature (1)..( 10): Result.001 file - promoters70/4911492
aataaaatta

SEQ ID NO: 87701 - DNA, 10 bp, Unknown
  misc_feature (1)..( 10): Result.001 file - promoters70/4911492
taaaaacttt

SEQ ID NO: 87702 - DNA, 8 bp, Unknown
  misc_feature (1)..( 8): Result.001 file - promoters70/4911492
aagaaata

SEQ ID NO: 87703 - DNA, 8 bp, Unknown
  misc_feature (1)..( 8): Result.001 file - promoters70/4911492
aagaaaag

SEQ ID NO: 87704 - DNA, 8 bp, Unknown
  misc_feature (1)..( 8): Result.001 file - promoters70/4911492
aagaaata

SEQ ID NO: 87705 - DNA, 9 bp, Unknown
  misc_feature (1)..( 9): Result.001 file - promoters70/4911492
tatatatat

SEQ ID NO: 87706 - DNA, 9 bp, Unknown
  misc_feature (1)..( 9): Result.001 file - promoters70/4911492
tataaatat

SEQ ID NO: 87707 - DNA, 9 bp, Unknown
  misc_feature (1)..( 9): Result.001 file - promoters70/4911492
tatatattc

SEQ ID NO: 87708 - DNA, 9 bp, Unknown
  misc_feature (1)..( 9): Result.001 file - promoters70/4911492
taaccaaaa

SEQ ID NO: 87709 - DNA, 9 bp, Unknown
  misc_feature (1)..( 9): Result.001 file - promoters70/4911492
taaccaaaa

SEQ ID NO: 87710 - DNA, 9 bp, Unknown
  misc_feature (1)..( 9): Result.001 file - promoters70/4911492
aaactaaac

SEQ ID NO: 87711 - DNA, 12 bp, Unknown
  misc_feature (1)..( 12): Result.001 file - promoters70/4911492
aaaataaaataa

SEQ ID NO: 87712 - DNA, 12 bp, Unknown
  misc_feature (1)..( 12): Result.001 file - promoters70/4911492
aaaataatagta

SEQ ID NO: 87713 - DNA, 12 bp, Unknown
  misc_feature (1)..( 12): Result.001 file - promoters70/4911492
aaaataaactaa

SEQ ID NO: 87714 - DNA, 8 bp, Unknown
  misc_feature (1)..( 8): Result.001 file - promoters70/4911492
aatagata

SEQ ID NO: 87715 - DNA, 8 bp, Unknown
  misc_feature (1)..( 8): Result.001 file - promoters70/4911492
aataaata

SEQ ID NO: 87716 - DNA, 8 bp, Unknown
  misc_feature (1)..( 8): Result.001 file - promoters70/4911492
aataaaat

SEQ ID NO: 87717 - DNA, 10 bp, Unknown
  misc_feature (1)..( 10): Result.001 file - promoters70/4911492
tggaaagttt

SEQ ID NO: 87718 - DNA, 10 bp, Unknown
  misc_feature (1)..( 10): Result.001 file - promoters70/4911492
taataagttt

SEQ ID NO: 87719 - DNA, 10 bp, Unknown
  misc_feature (1)..( 10): Result.001 file - promoters70/4914438
tggaaacttt

SEQ ID NO: 87720 - DNA, 8 bp, Unknown
  misc_feature (1)..( 8): Result.001 file - promoters70/4914438
tttaccag

SEQ ID NO: 87721 - DNA, 8 bp, Unknown
  misc_feature (1)..( 8): Result.001 file - promoters70/4914438
tttgccag

SEQ ID NO: 87722 - DNA, 8 bp, Unknown
  misc_feature (1)..( 8): Result.001 file - promoters70/4914438
tttgtacg

SEQ ID NO: 87723 - DNA, 10 bp, Unknown
  misc_feature (1)..( 10): Result.001 file - promoters70/4914438
ggaaaaaaat

SEQ ID NO: 87724 - DNA, 10 bp, Unknown
  misc_feature (1)..( 10): Result.001 file - promoters70/4914438
tataaaaaat

SEQ ID NO: 87725 - DNA, 10 bp, Unknown
  misc_feature (1)..( 10): Result.001 file - promoters70/4914438
tatacaaaag

SEQ ID NO: 87726 - DNA, 7 bp, Unknown
  misc_feature (1)..( 7): Result.001 file - promoters70/4914438
cataaaa

SEQ ID NO: 87727 - DNA, 7 bp, Unknown
  misc_feature (1)..( 7): Result.001 file - promoters70/4914438
tataaaa

SEQ ID NO: 87728 - DNA, 7 bp, Unknown
  misc_feature (1)..( 7): Result.001 file - promoters70/4915384
tatcaaa

SEQ ID NO: 87729 - DNA, 10 bp, Unknown
  misc_feature (1)..( 10): Result.001 file - promoters70/4915384
ggtttatttt

SEQ ID NO: 87730 - DNA, 10 bp, Unknown
  misc_feature (1)..( 10): Result.001 file - promoters70/4915384
ggtttattca

SEQ ID NO: 87731 - DNA, 10 bp, Unknown
  misc_feature (1)..( 10): Result.001 file - promoters70/4915420
attttatttt

SEQ ID NO: 87732 - DNA, 10 bp, Unknown
  misc_feature (1)..( 10): Result.001 file - promoters70/4915420
aagatttttt

SEQ ID NO: 87733 - DNA, 10 bp, Unknown
  misc_feature (1)..( 10): Result.001 file - promoters70/4915420
gagaattttt

SEQ ID NO: 87734 - DNA, 10 bp, Unknown
  misc_feature (1)..( 10): Result.001 file - promoters70/4915420
agtaatattt

SEQ ID NO: 87735 - DNA, 10 bp, Unknown
  misc_feature (1)..( 10): Result.001 file - promoters70/4915420
agtgatatga

SEQ ID NO: 87736 - DNA, 10 bp, Unknown
  misc_feature (1)..( 10): Result.001 file - promoters70/4915420
taatattagt

SEQ ID NO: 87737 - DNA, 10 bp, Unknown
  misc_feature (1)..( 10): Result.001 file - promoters70/4915420
taatattagt

SEQ ID NO: 87738 - DNA, 10 bp, Unknown
  misc_feature (1)..( 10): Result.001 file - promoters70/4915420
tcatatgagt

SEQ ID NO: 87739 - DNA, 10 bp, Unknown
  misc_feature (1)..( 10): Result.001 file - promoters70/4915420
taatatgatt

SEQ ID NO: 87740 - DNA, 9 bp, Unknown
  misc_feature (1)..( 9): Result.001 file - promoters70/4915420
tatatttga

SEQ ID NO: 87741 - DNA, 9 bp, Unknown
  misc_feature (1)..( 9): Result.001 file - promoters70/4915420
tatatatga

SEQ ID NO: 87742 - DNA, 9 bp, Unknown
  misc_feature (1)..( 9): Result.001 file - promoters70/4915420
ttcatatga

SEQ ID NO: 87743 - DNA, 9 bp, Unknown
  misc_feature (1)..( 9): Result.001 file - promoters70/4915420
ctaatatga

SEQ ID NO: 87744 - DNA, 13 bp, Unknown
  misc_feature (1)..( 13): Result.001 file - promoters70/4915420
attctaatttaaa

SEQ ID NO: 87745 - DNA, 13 bp, Unknown
  misc_feature (1)..( 13): Result.001 file - promoters70/4915420
aaaaaaatttaaa

SEQ ID NO: 87746 - DNA, 13 bp, Unknown
  misc_feature (1)..( 13): Result.001 file - promoters70/4915420
aaacaaatttttg

SEQ ID NO: 87747 - DNA, 13 bp, Unknown
  misc_feature (1)..( 13): Result.001 file - promoters70/4915420
gaggaaaacataa

SEQ ID NO: 87748 - DNA, 9 bp, Unknown
  misc_feature (1)..( 9): Result.001 file - promoters70/4915420
tattttaat

SEQ ID NO: 87749 - DNA, 9 bp, Unknown
  misc_feature (1)..( 9): Result.001 file - promoters70/4915420
ggttttaac

SEQ ID NO: 87750 - DNA, 9 bp, Unknown
  misc_feature (1)..( 9): Result.001 file - promoters70/4915420
ggttataaa

SEQ ID NO: 87751 - DNA, 9 bp, Unknown
  misc_feature (1)..( 9): Result.001 file - promoters70/4915420
ctttagaaa

SEQ ID NO: 87752 - DNA, 12 bp, Unknown
  misc_feature (1)..( 12): Result.001 file - promoters70/4915420
agaaatataaat

SEQ ID NO: 87753 - DNA, 12 bp, Unknown
  misc_feature (1)..( 12): Result.001 file - promoters70/4915420
ataaatatcttt

SEQ ID NO: 87754 - DNA, 12 bp, Unknown
  misc_feature (1)..( 12): Result.001 file - promoters70/4915420
agagatataaat

SEQ ID NO: 87755 - DNA, 12 bp, Unknown
  misc_feature (1)..( 12): Result.001 file - promoters70/4915606
gggtatataaat

SEQ ID NO: 87756 - DNA, 15 bp, Unknown
  misc_feature (1)..( 15): Result.001 file - promoters70/4915606
ggaaccgttaattcc

SEQ ID NO: 87757 - DNA, 15 bp, Unknown
  misc_feature (1)..( 15): Result.001 file - promoters70/4915606
aaaaaagtttattga

SEQ ID NO: 87758 - DNA, 13 bp, Unknown
  misc_feature (1)..( 13): Result.001 file - promoters70/4915606
atcagttaatctg

SEQ ID NO: 87759 - DNA, 15 bp, Unknown
  misc_feature (1)..( 15): Result.001 file - promoters70/4915606
atttatccttatttc

SEQ ID NO: 87760 - DNA, 15 bp, Unknown
  misc_feature (1)..( 15): Result.001 file - promoters70/4915606
gaaagagtttaggct

SEQ ID NO: 87761 - DNA, 15 bp, Unknown
  misc_feature (1)..( 15): Result.001 file - promoters70/4915606
gaaagacaaattgat

SEQ ID NO: 87762 - DNA, 17 bp, Unknown
  misc_feature (1)..( 17): Result.001 file - promoters70/4915606
gttaatttttgactttt

SEQ ID NO: 87763 - DNA, 17 bp, Unknown
  misc_feature (1)..( 17): Result.001 file - promoters70/4915606
ttgaatttttttttatt

SEQ ID NO: 87764 - DNA, 17 bp, Unknown
  misc_feature (1)..( 17): Result.001 file - promoters70/4915606
gttaactttgtacttac

SEQ ID NO: 87765 - DNA, 17 bp, Unknown
  misc_feature (1)..( 17): Result.001 file - promoters70/4915606
gtttctttttgtctttt

SEQ ID NO: 87766 - DNA, 17 bp, Unknown
  misc_feature (1)..( 17): Result.001 file - promoters70/4915606
attaattttctcattgc

SEQ ID NO: 87767 - DNA, 17 bp, Unknown
  misc_feature (1)..( 17): Result.001 file - promoters70/4915606
gttgactggttctaacg

SEQ ID NO: 87768 - DNA, 17 bp, Unknown
  misc_feature (1)..( 17): Result.001 file - promoters70/4915606
catgactgtgaaggcca

SEQ ID NO: 87769 - DNA, 10 bp, Unknown
  misc_feature (1)..( 10): Result.001 file - promoters70/4915606
aaaaagttta

SEQ ID NO: 87770 - DNA, 10 bp, Unknown
  misc_feature (1)..( 10): Result.001 file - promoters70/4915606
ataaattttg

SEQ ID NO: 87771 - DNA, 11 bp, Unknown
  misc_feature (1)..( 11): Result.001 file - promoters70/4915606
gaaagagttta

SEQ ID NO: 87772 - DNA, 11 bp, Unknown
  misc_feature (1)..( 11): Result.001 file - promoters70/4915606
tcaaaatttat

SEQ ID NO: 87773 - DNA, 11 bp, Unknown
  misc_feature (1)..( 11): Result.001 file - promoters70/4915606
gaaagacaaat

SEQ ID NO: 87774 - DNA, 11 bp, Unknown
  misc_feature (1)..( 11): Result.001 file - promoters70/4921433
ctaatatatat

SEQ ID NO: 87775 - DNA, 9 bp, Unknown
  misc_feature (1)..( 9): Result.001 file - promoters70/4921433
cgaatggag

SEQ ID NO: 87776 - DNA, 9 bp, Unknown
  misc_feature (1)..( 9): Result.001 file - promoters70/4921433
cgagtggct

SEQ ID NO: 87777 - DNA, 9 bp, Unknown
  misc_feature (1)..( 9): Result.001 file - promoters70/4921433
agaggggct

SEQ ID NO: 87778 - DNA, 12 bp, Unknown
  misc_feature (1)..( 12): Result.001 file - promoters70/4921433
atggagaggaag

SEQ ID NO: 87779 - DNA, 12 bp, Unknown
  misc_feature (1)..( 12): Result.001 file - promoters70/4921433
gcacagatgaat

SEQ ID NO: 87780 - DNA, 12 bp, Unknown
  misc_feature (1)..( 12): Result.001 file - promoters70/4921433
atgtagaggggc

SEQ ID NO: 87781 - DNA, 12 bp, Unknown
  misc_feature (1)..( 12): Result.001 file - promoters70/4934904
gaagtcatgaat

SEQ ID NO: 87782 - DNA, 13 bp, Unknown
  misc_feature (1)..( 13): Result.001 file - promoters70/4934904
tctggggaatcgg

SEQ ID NO: 87783 - DNA, 13 bp, Unknown
  misc_feature (1)..( 13): Result.001 file - promoters70/4934904
tctgggaaatcgg

SEQ ID NO: 87784 - DNA, 13 bp, Unknown
  misc_feature (1)..( 13): Result.001 file - promoters70/4934904
atgcggaaattaa

SEQ ID NO: 87785 - DNA, 6 bp, Unknown
  misc_feature (1)..( 6): Result.001 file - promoters70/4934904
tttcaa

SEQ ID NO: 87786 - DNA, 6 bp, Unknown
  misc_feature (1)..( 6): Result.001 file - promoters70/4934904
tttcaa

SEQ ID NO: 87787 - DNA, 6 bp, Unknown
  misc_feature (1)..( 6): Result.001 file - promoters70/4934904
tttcaa

SEQ ID NO: 87788 - DNA, 6 bp, Unknown
  misc_feature (1)..( 6): Result.001 file - promoters70/4934904
ggaaat

SEQ ID NO: 87789 - DNA, 6 bp, Unknown
  misc_feature (1)..( 6): Result.001 file - promoters70/4934904
ggaaat

SEQ ID NO: 87790 - DNA, 6 bp, Unknown
  misc_feature (1)..( 6): Result.001 file - promoters70/4949707
ggaaat

SEQ ID NO: 87791 - DNA, 10 bp, Unknown
  misc_feature (1)..( 10): Result.001 file - promoters70/4949707
aaataattga

SEQ ID NO: 87792 - DNA, 10 bp, Unknown
  misc_feature (1)..( 10): Result.001 file - promoters70/4949707
aaaaaatggt

SEQ ID NO: 87793 - DNA, 10 bp, Unknown
  misc_feature (1)..( 10): Result.001 file - promoters70/4949707
aaataaatga

SEQ ID NO: 87794 - DNA, 7 bp, Unknown
  misc_feature (1)..( 7): Result.001 file - promoters70/4949707
atatttt

SEQ ID NO: 87795 - DNA, 7 bp, Unknown
  misc_feature (1)..( 7): Result.001 file - promoters70/4949707
atattta

SEQ ID NO: 87796 - DNA, 7 bp, Unknown
  misc_feature (1)..( 7): Result.001 file - promoters70/4978201
ataatta

SEQ ID NO: 87797 - DNA, 11 bp, Unknown
  misc_feature (1)..( 11): Result.001 file - promoters70/4978201
catatatactt

SEQ ID NO: 87798 - DNA, 11 bp, Unknown
  misc_feature (1)..( 11): Result.001 file - promoters70/4978201
tttatatagat

SEQ ID NO: 87799 - DNA, 11 bp, Unknown
  misc_feature (1)..( 11): Result.001 file - promoters70/4978201
tatatattaaa

SEQ ID NO: 87800 - DNA, 11 bp, Unknown
  misc_feature (1)..( 11): Result.001 file - promoters70/4978201
cttatttatga

SEQ ID NO: 87801 - DNA, 11 bp, Unknown
  misc_feature (1)..( 11): Result.001 file - promoters70/4978201
actataaattc

SEQ ID NO: 87802 - DNA, 11 bp, Unknown
  misc_feature (1)..( 11): Result.001 file - promoters70/4992383
actataaattc

SEQ ID NO: 87803 - DNA, 10 bp, Unknown
  misc_feature (1)..( 10): Result.001 file - promoters70/4992383
tttcgatgta

SEQ ID NO: 87804 - DNA, 10 bp, Unknown
  misc_feature (1)..( 10): Result.001 file - promoters70/4992383
ttttgatttg

SEQ ID NO: 87805 - DNA, 10 bp, Unknown
  misc_feature (1)..( 10): Result.001 file - promoters70/4992383
ctttgctttg

SEQ ID NO: 87806 - DNA, 12 bp, Unknown
  misc_feature (1)..( 12): Result.001 file - promoters70/4992383
ttattttcagta

SEQ ID NO: 87807 - DNA, 12 bp, Unknown
  misc_feature (1)..( 12): Result.001 file - promoters70/4992383
aacttttaagta

SEQ ID NO: 87808 - DNA, 12 bp, Unknown
  misc_feature (1)..( 12): Result.001 file - promoters70/5662743
aacctttatgta

SEQ ID NO: 87809 - DNA, 7 bp, Unknown
  misc_feature (1)..( 7): Result.001 file - promoters70/5662743
attagat

SEQ ID NO: 87810 - DNA, 7 bp, Unknown
  misc_feature (1)..( 7): Result.001 file - promoters70/5662743
atttgat

SEQ ID NO: 87811 - DNA, 7 bp, Unknown
  misc_feature (1)..( 7): Result.001 file - promoters70/5662799
atttgag

SEQ ID NO: 87812 - DNA, 10 bp, Unknown
  misc_feature (1)..( 10): Result.001 file - promoters70/5662799
aggcccaatt

SEQ ID NO: 87813 - DNA, 10 bp, Unknown
  misc_feature (1)..( 10): Result.001 file - promoters70/5662799
aggcccatga

SEQ ID NO: 87814 - DNA, 10 bp, Unknown
  misc_feature (1)..( 10): Result.001 file - promoters70/5662799
aggcccaatt

SEQ ID NO: 87815 - DNA, 8 bp, Unknown
  misc_feature (1)..( 8): Result.001 file - promoters70/5662799
aattggat

SEQ ID NO: 87816 - DNA, 8 bp, Unknown
  misc_feature (1)..( 8): Result.001 file - promoters70/5662799
catttgat

SEQ ID NO: 87817 - DNA, 8 bp, Unknown
  misc_feature (1)..( 8): Result.001 file - promoters70/5662799
aatttgat

SEQ ID NO: 87818 - DNA, 8 bp, Unknown
  misc_feature (1)..( 8): Result.001 file - promoters70/5662799
gttgtcca

SEQ ID NO: 87819 - DNA, 8 bp, Unknown
  misc_feature (1)..( 8): Result.001 file - promoters70/5662799
tttgacca

SEQ ID NO: 87820 - DNA, 8 bp, Unknown
  misc_feature (1)..( 8): Result.001 file - promoters70/5662893
tttgacta

SEQ ID NO: 87821 - DNA, 13 bp, Unknown
  misc_feature (1)..( 13): Result.001 file - promoters70/5662893
accaagaccaatt

SEQ ID NO: 87822 - DNA, 13 bp, Unknown
  misc_feature (1)..( 13): Result.001 file - promoters70/5662893
tacaaaaccctaa

SEQ ID NO: 87823 - DNA, 13 bp, Unknown
  misc_feature (1)..( 13): Result.001 file - promoters70/5662893
accaagacgtaca

SEQ ID NO: 87824 - DNA, 13 bp, Unknown
  misc_feature (1)..( 13): Result.001 file - promoters70/5662893
gaagaaacaaagt

SEQ ID NO: 87825 - DNA, 13 bp, Unknown
  misc_feature (1)..( 13): Result.001 file - promoters70/5662893
tgacaaaccaatg

SEQ ID NO: 87826 - DNA, 13 bp, Unknown
  misc_feature (1)..( 13): Result.001 file - promoters70/5662893
tggcagaaaaaaa

SEQ ID NO: 87827 - DNA, 13 bp, Unknown
  misc_feature (1)..( 13): Result.001 file - promoters70/5662893
aaaaaaatcaaat

SEQ ID NO: 87828 - DNA, 11 bp, Unknown
  misc_feature (1)..( 11): Result.001 file - promoters70/5662893
cctaggctaga

SEQ ID NO: 87829 - DNA, 11 bp, Unknown
  misc_feature (1)..( 11): Result.001 file - promoters70/5662893
ccttggcaaac

SEQ ID NO: 87830 - DNA, 11 bp, Unknown
  misc_feature (1)..( 11): Result.001 file - promoters70/5662893
gtttgacaaac

SEQ ID NO: 87831 - DNA, 11 bp, Unknown
  misc_feature (1)..( 11): Result.001 file - promoters70/5662893
agttggcagaa

SEQ ID NO: 87832 - DNA, 11 bp, Unknown
  misc_feature (1)..( 11): Result.001 file - promoters70/5662893
aagagacaaat

SEQ ID NO: 87833 - DNA, 11 bp, Unknown
  misc_feature (1)..( 11): Result.001 file - promoters70/5662893
ttgtgacaaaa

SEQ ID NO: 87834 - DNA, 11 bp, Unknown
  misc_feature (1)..( 11): Result.001 file - promoters70/5662893
ctagatacaaa

SEQ ID NO: 87835 - DNA, 11 bp, Unknown
  misc_feature (1)..( 11): Result.001 file - promoters70/5662893
ctatataaaac

SEQ ID NO: 87836 - DNA, 11 bp, Unknown
  misc_feature (1)..( 11): Result.001 file - promoters70/5662893
caagagacaaa

SEQ ID NO: 87837 - DNA, 11 bp, Unknown
  misc_feature (1)..( 11): Result.001 file - promoters70/5662893
tgtttgacaaa

SEQ ID NO: 87838 - DNA, 11 bp, Unknown
  misc_feature (1)..( 11): Result.001 file - promoters70/5662893
tggcagaaaaa

SEQ ID NO: 87839 - DNA, 11 bp, Unknown
  misc_feature (1)..( 11): Result.001 file - promoters70/5662902
cttgtgacaaa

SEQ ID NO: 87840 - DNA, 11 bp, Unknown
  misc_feature (1)..( 11): Result.001 file - promoters70/5662902
taagaaaatgt

SEQ ID NO: 87841 - DNA, 11 bp, Unknown
  misc_feature (1)..( 11): Result.001 file - promoters70/5662902
gaagataataa

SEQ ID NO: 87842 - DNA, 11 bp, Unknown
  misc_feature (1)..( 11): Result.001 file - promoters70/5662902
gaagatggacg

SEQ ID NO: 87843 - DNA, 11 bp, Unknown
  misc_feature (1)..( 11): Result.001 file - promoters70/5662902
ttagatggatt

SEQ ID NO: 87844 - DNA, 11 bp, Unknown
  misc_feature (1)..( 11): Result.001 file - promoters70/5662914
tttgatactaa

SEQ ID NO: 87845 - DNA, 10 bp, Unknown
  misc_feature (1)..( 10): Result.001 file - promoters70/5662914
ggaaggagag

SEQ ID NO: 87846 - DNA, 10 bp, Unknown
  misc_feature (1)..( 10): Result.001 file - promoters70/5662914
ggaagtagag

SEQ ID NO: 87847 - DNA, 10 bp, Unknown
  misc_feature (1)..( 10): Result.001 file - promoters70/5662914
ggaagtagag

SEQ ID NO: 87848 - DNA, 9 bp, Unknown
  misc_feature (1)..( 9): Result.001 file - promoters70/5662914
gagatgaga

SEQ ID NO: 87849 - DNA, 9 bp, Unknown
  misc_feature (1)..( 9): Result.001 file - promoters70/5662914
aagatgatg

SEQ ID NO: 87850 - DNA, 9 bp, Unknown
  misc_feature (1)..( 9): Result.001 file - promoters70/5662921
aagttgatg

SEQ ID NO: 87851 - DNA, 9 bp, Unknown
  misc_feature (1)..( 9): Result.001 file - promoters70/5662921
taatttcaa

SEQ ID NO: 87852 - DNA, 9 bp, Unknown
  misc_feature (1)..( 9): Result.001 file - promoters70/5662921
aaatttcaa

SEQ ID NO: 87853 - DNA, 9 bp, Unknown
  misc_feature (1)..( 9): Result.001 file - promoters70/5662921
taatttcca

SEQ ID NO: 87854 - DNA, 8 bp, Unknown
  misc_feature (1)..( 8): Result.001 file - promoters70/5662921
caatctta

SEQ ID NO: 87855 - DNA, 8 bp, Unknown
  misc_feature (1)..( 8): Result.001 file - promoters70/5662921
aaatttta

SEQ ID NO: 87856 - DNA, 8 bp, Unknown
  misc_feature (1)..( 8): Result.001 file - promoters70/5662967
aaatttgt

SEQ ID NO: 87857 - DNA, 8 bp, Unknown
  misc_feature (1)..( 8): Result.001 file - promoters70/5662967
tatattat

SEQ ID NO: 87858 - DNA, 8 bp, Unknown
  misc_feature (1)..( 8): Result.001 file - promoters70/5662967
tataatat

SEQ ID NO: 87859 - DNA, 8 bp, Unknown
  misc_feature (1)..( 8): Result.001 file - promoters70/5662977
tatattga

SEQ ID NO: 87860 - DNA, 7 bp, Unknown
  misc_feature (1)..( 7): Result.001 file - promoters70/5662977
gttcctt

SEQ ID NO: 87861 - DNA, 7 bp, Unknown
  misc_feature (1)..( 7): Result.001 file - promoters70/5662977
gtttctt

SEQ ID NO: 87862 - DNA, 7 bp, Unknown
  misc_feature (1)..( 7): Result.001 file - promoters70/5662977
gttcctc

SEQ ID NO: 87863 - DNA, 8 bp, Unknown
  misc_feature (1)..( 8): Result.001 file - promoters70/5662977
aaatgtta

SEQ ID NO: 87864 - DNA, 8 bp, Unknown
  misc_feature (1)..( 8): Result.001 file - promoters70/5662977
aaaagttt

SEQ ID NO: 87865 - DNA, 8 bp, Unknown
  misc_feature (1)..( 8): Result.001 file - promoters70/5662977
caatttta

SEQ ID NO: 87866 - DNA, 7 bp, Unknown
  misc_feature (1)..( 7): Result.001 file - promoters70/5662977
gttgatt

SEQ ID NO: 87867 - DNA, 7 bp, Unknown
  misc_feature (1)..( 7): Result.001 file - promoters70/5662977
gttgatg

SEQ ID NO: 87868 - DNA, 7 bp, Unknown
  misc_feature (1)..( 7): Result.001 file - promoters70/5662977
gttaatt

SEQ ID NO: 87869 - DNA, 8 bp, Unknown
  misc_feature (1)..( 8): Result.001 file - promoters70/5662977
cgacatgt

SEQ ID NO: 87870 - DNA, 8 bp, Unknown
  misc_feature (1)..( 8): Result.001 file - promoters70/5662977
cgacatta

SEQ ID NO: 87871 - DNA, 8 bp, Unknown
  misc_feature (1)..( 8): Result.001 file - promoters70/5662977
cgacatgt

SEQ ID NO: 87872 - DNA, 8 bp, Unknown
  misc_feature (1)..( 8): Result.001 file - promoters70/5662977
acacatgt

SEQ ID NO: 87873 - DNA, 6 bp, Unknown
  misc_feature (1)..( 6): Result.001 file - promoters70/5662977
acatgt

SEQ ID NO: 87874 - DNA, 6 bp, Unknown
  misc_feature (1)..( 6): Result.001 file - promoters70/5662977
acatgt

SEQ ID NO: 87875 - DNA, 6 bp, Unknown
  misc_feature (1)..( 6): Result.001 file - promoters70/5663003
acatgt

SEQ ID NO: 87876 - DNA, 13 bp, Unknown
  misc_feature (1)..( 13): Result.001 file - promoters70/5663003
ctaaaatagtaaa

SEQ ID NO: 87877 - DNA, 13 bp, Unknown
  misc_feature (1)..( 13): Result.001 file - promoters70/5663003
aaataattgtata

SEQ ID NO: 87878 - DNA, 13 bp, Unknown
  misc_feature (1)..( 13): Result.001 file - promoters70/5663003
tcatatttgtata

SEQ ID NO: 87879 - DNA, 13 bp, Unknown
  misc_feature (1)..( 13): Result.001 file - promoters70/5663003
aaagaattgaaca

SEQ ID NO: 87880 - DNA, 10 bp, Unknown
  misc_feature (1)..( 10): Result.001 file - promoters70/5663003
gaaaaagata

SEQ ID NO: 87881 - DNA, 10 bp, Unknown
  misc_feature (1)..( 10): Result.001 file - promoters70/5663003
gaaatagatt

SEQ ID NO: 87882 - DNA, 10 bp, Unknown
  misc_feature (1)..( 10): Result.001 file - promoters70/5663003
ttagtagatt

SEQ ID NO: 87883 - DNA, 10 bp, Unknown
  misc_feature (1)..( 10): Result.001 file - promoters70/5663003
tatataaatt

SEQ ID NO: 87884 - DNA, 10 bp, Unknown
  misc_feature (1)..( 10): Result.001 file - promoters70/5663003
ttactaaaat

SEQ ID NO: 87885 - DNA, 10 bp, Unknown
  misc_feature (1)..( 10): Result.001 file - promoters70/5663003
ttattaattt

SEQ ID NO: 87886 - DNA, 11 bp, Unknown
  misc_feature (1)..( 11): Result.001 file - promoters70/5663003
gaactgaaaga

SEQ ID NO: 87887 - DNA, 11 bp, Unknown
  misc_feature (1)..( 11): Result.001 file - promoters70/5663116
ttgtataaatt

SEQ ID NO: 87888 - DNA, 16 bp, Unknown
  misc_feature (1)..( 16): Result.001 file - promoters70/5663116
cattagtttcctggaa

SEQ ID NO: 87889 - DNA, 16 bp, Unknown
  misc_feature (1)..( 16): Result.001 file - promoters70/5663116
cccaagtgtcctatgt

SEQ ID NO: 87890 - DNA, 16 bp, Unknown
  misc_feature (1)..( 16): Result.001 file - promoters70/5663116
cattcgtttagtcagg

SEQ ID NO: 87891 - DNA, 14 bp, Unknown
  misc_feature (1)..( 14): Result.001 file - promoters70/5663116
ttaatttcctgaac

SEQ ID NO: 87892 - DNA, 16 bp, Unknown
  misc_feature (1)..( 16): Result.001 file - promoters70/5663116
ttttcattttatcaag

SEQ ID NO: 87893 - DNA, 16 bp, Unknown
  misc_feature (1)..( 16): Result.001 file - promoters70/5663116
gatcgatttcaattta

SEQ ID NO: 87894 - DNA, 14 bp, Unknown
  misc_feature (1)..( 14): Result.001 file - promoters70/5663116
attaaatgaatagt

SEQ ID NO: 87895 - DNA, 14 bp, Unknown
  misc_feature (1)..( 14): Result.001 file - promoters70/5663116
aatacatgaattta

SEQ ID NO: 87896 - DNA, 14 bp, Unknown
  misc_feature (1)..( 14): Result.001 file - promoters70/5663116
ctttaattaattaa

SEQ ID NO: 87897 - DNA, 14 bp, Unknown
  misc_feature (1)..( 14): Result.001 file - promoters70/5663116
atttaatcaatcac

SEQ ID NO: 87898 - DNA, 14 bp, Unknown
  misc_feature (1)..( 14): Result.001 file - promoters70/5663116
aactaattatgtgg

SEQ ID NO: 87899 - DNA, 14 bp, Unknown
  misc_feature (1)..( 14): Result.001 file - promoters70/5663116
atgtaatttatttt

SEQ ID NO: 87900 - DNA, 14 bp, Unknown
  misc_feature (1)..( 14): Result.001 file - promoters70/5663116
aaatcatcaatgct

SEQ ID NO: 87901 - DNA, 14 bp, Unknown
  misc_feature (1)..( 14): Result.001 file - promoters70/5663116
cataattttattca

SEQ ID NO: 87902 - DNA, 13 bp, Unknown
  misc_feature (1)..( 13): Result.001 file - promoters70/5663116
acgaaatatcttt

SEQ ID NO: 87903 - DNA, 13 bp, Unknown
  misc_feature (1)..( 13): Result.001 file - promoters70/5663116
acgaaattgtgat

SEQ ID NO: 87904 - DNA, 13 bp, Unknown
  misc_feature (1)..( 13): Result.001 file - promoters70/5663116
acgaaacgattat

SEQ ID NO: 87905 - DNA, 13 bp, Unknown
  misc_feature (1)..( 13): Result.001 file - promoters70/5663116
ttgaagttggaag

SEQ ID NO: 87906 - DNA, 13 bp, Unknown
  misc_feature (1)..( 13): Result.001 file - promoters70/5663116
tcttaattaaagt

SEQ ID NO: 87907 - DNA, 13 bp, Unknown
  misc_feature (1)..( 13): Result.001 file - promoters70/5663116
aaaaagttgtcat

SEQ ID NO: 87908 - DNA, 11 bp, Unknown
  misc_feature (1)..( 11): Result.001 file - promoters70/5663116
attaaatgaat

SEQ ID NO: 87909 - DNA, 11 bp, Unknown
  misc_feature (1)..( 11): Result.001 file - promoters70/5663116
attaaaaatca

SEQ ID NO: 87910 - DNA, 11 bp, Unknown
  misc_feature (1)..( 11): Result.001 file - promoters70/5663116
atttaatcaat

SEQ ID NO: 87911 - DNA, 11 bp, Unknown
  misc_feature (1)..( 11): Result.001 file - promoters70/5663116
atcaatgctac

SEQ ID NO: 87912 - DNA, 11 bp, Unknown
  misc_feature (1)..( 11): Result.001 file - promoters70/5663116
attaaattttg

SEQ ID NO: 87913 - DNA, 11 bp, Unknown
  misc_feature (1)..( 11): Result.001 file - promoters70/5663138
ttttattcagg

SEQ ID NO: 87914 - DNA, 9 bp, Unknown
  misc_feature (1)..( 9): Result.001 file - promoters70/5663138
taataacaa

SEQ ID NO: 87915 - DNA, 9 bp, Unknown
  misc_feature (1)..( 9): Result.001 file - promoters70/5663138
aaatgacag

SEQ ID NO: 87916 - DNA, 9 bp, Unknown
  misc_feature (1)..( 9): Result.001 file - promoters70/5663138
taataatgt

SEQ ID NO: 87917 - DNA, 9 bp, Unknown
  misc_feature (1)..( 9): Result.001 file - promoters70/5663142
gaatcatgt

SEQ ID NO: 87918 - DNA, 13 bp, Unknown
  misc_feature (1)..( 13): Result.001 file - promoters70/5663142
aatgaatattaga

SEQ ID NO: 87919 - DNA, 13 bp, Unknown
  misc_feature (1)..( 13): Result.001 file - promoters70/5663142
aattaatgacgat

SEQ ID NO: 87920 - DNA, 13 bp, Unknown
  misc_feature (1)..( 13): Result.001 file - promoters70/5663142
tctgaatattaga

SEQ ID NO: 87921 - DNA, 8 bp, Unknown
  misc_feature (1)..( 8): Result.001 file - promoters70/5663142
gctaatga

SEQ ID NO: 87922 - DNA, 8 bp, Unknown
  misc_feature (1)..( 8): Result.001 file - promoters70/5663142
attaatga

SEQ ID NO: 87923 - DNA, 8 bp, Unknown
  misc_feature (1)..( 8): Result.001 file - promoters70/5663142
aataatga

SEQ ID NO: 87924 - DNA, 8 bp, Unknown
  misc_feature (1)..( 8): Result.001 file - promoters70/5663142
tattaatt

SEQ ID NO: 87925 - DNA, 8 bp, Unknown
  misc_feature (1)..( 8): Result.001 file - promoters70/5663142
tattaacc

SEQ ID NO: 87926 - DNA, 8 bp, Unknown
  misc_feature (1)..( 8): Result.001 file - promoters70/5663142
tataaatt

SEQ ID NO: 87927 - DNA, 6 bp, Unknown
  misc_feature (1)..( 6): Result.001 file - promoters70/5663142
ataata

SEQ ID NO: 87928 - DNA, 6 bp, Unknown
  misc_feature (1)..( 6): Result.001 file - promoters70/5663142
ataata

SEQ ID NO: 87929 - DNA, 6 bp, Unknown
  misc_feature (1)..( 6): Result.001 file - promoters70/5663142
ataata

SEQ ID NO: 87930 - DNA, 14 bp, Unknown
  misc_feature (1)..( 14): Result.001 file - promoters70/5663142
atatataataaata

SEQ ID NO: 87931 - DNA, 14 bp, Unknown
  misc_feature (1)..( 14): Result.001 file - promoters70/5663142
aagcataaaaaata

SEQ ID NO: 87932 - DNA, 14 bp, Unknown
  misc_feature (1)..( 14): Result.001 file - promoters70/5663142
tcatataattatct

SEQ ID NO: 87933 - DNA, 14 bp, Unknown
  misc_feature (1)..( 14): Result.001 file - promoters70/5663142
tcatataacaattt

SEQ ID NO: 87934 - DNA, 10 bp, Unknown
  misc_feature (1)..( 10): Result.001 file - promoters70/5663142
gtatatatat

SEQ ID NO: 87935 - DNA, 10 bp, Unknown
  misc_feature (1)..( 10): Result.001 file - promoters70/5663142
aaataaatag

SEQ ID NO: 87936 - DNA, 10 bp, Unknown
  misc_feature (1)..( 10): Result.001 file - promoters70/5663142
aaatatataa

SEQ ID NO: 87937 - DNA, 9 bp, Unknown
  misc_feature (1)..( 9): Result.001 file - promoters70/5663142
aaattaata

SEQ ID NO: 87938 - DNA, 9 bp, Unknown
  misc_feature (1)..( 9): Result.001 file - promoters70/5663142
taattaagt

SEQ ID NO: 87939 - DNA, 9 bp, Unknown
  misc_feature (1)..( 9): Result.001 file - promoters70/5663142
aaatcaata

SEQ ID NO: 87940 - DNA, 6 bp, Unknown
  misc_feature (1)..( 6): Result.001 file - promoters70/5663142
aaatat

SEQ ID NO: 87941 - DNA, 6 bp, Unknown
  misc_feature (1)..( 6): Result.001 file - promoters70/5663142
aaatat

SEQ ID NO: 87942 - DNA, 6 bp, Unknown
  misc_feature (1)..( 6): Result.001 file - promoters70/5663142
aaatat

SEQ ID NO: 87943 - DNA, 12 bp, Unknown
  misc_feature (1)..( 12): Result.001 file - promoters70/5663142
agacataataaa

SEQ ID NO: 87944 - DNA, 12 bp, Unknown
  misc_feature (1)..( 12): Result.001 file - promoters70/5663142
atttataataaa

SEQ ID NO: 87945 - DNA, 12 bp, Unknown
  misc_feature (1)..( 12): Result.001 file - promoters70/5663142
agacaaaataaa

SEQ ID NO: 87946 - DNA, 8 bp, Unknown
  misc_feature (1)..( 8): Result.001 file - promoters70/5663142
agtgaaac

SEQ ID NO: 87947 - DNA, 8 bp, Unknown
  misc_feature (1)..( 8): Result.001 file - promoters70/5663142
agtgaaaa

SEQ ID NO: 87948 - DNA, 8 bp, Unknown
  misc_feature (1)..( 8): Result.001 file - promoters70/5663142
tctgaaaa

SEQ ID NO: 87949 - DNA, 8 bp, Unknown
  misc_feature (1)..( 8): Result.001 file - promoters70/5663142
atatataa

SEQ ID NO: 87950 - DNA, 8 bp, Unknown
  misc_feature (1)..( 8): Result.001 file - promoters70/5663142
tcatataa

SEQ ID NO: 87951 - DNA, 8 bp, Unknown
  misc_feature (1)..( 8): Result.001 file - promoters70/5663142
tcatataa

SEQ ID NO: 87952 - DNA, 8 bp, Unknown
  misc_feature (1)..( 8): Result.001 file - promoters70/5663142
caatcttg

SEQ ID NO: 87953 - DNA, 8 bp, Unknown
  misc_feature (1)..( 8): Result.001 file - promoters70/5663142
aaatcttg

SEQ ID NO: 87954 - DNA, 8 bp, Unknown
  misc_feature (1)..( 8): Result.001 file - promoters70/5663151
aaagcttc

SEQ ID NO: 87955 - DNA, 10 bp, Unknown
  misc_feature (1)..( 10): Result.001 file - promoters70/5663151
aagaaatgat

SEQ ID NO: 87956 - DNA, 10 bp, Unknown
  misc_feature (1)..( 10): Result.001 file - promoters70/5663151
tagatatgat

SEQ ID NO: 87957 - DNA, 10 bp, Unknown
  misc_feature (1)..( 10): Result.001 file - promoters70/5663151
aagaaacgaa

SEQ ID NO: 87958 - DNA, 9 bp, Unknown
  misc_feature (1)..( 9): Result.001 file - promoters70/5663151
aaaacgcaa

SEQ ID NO: 87959 - DNA, 9 bp, Unknown
  misc_feature (1)..( 9): Result.001 file - promoters70/5663151
caaacccaa

SEQ ID NO: 87960 - DNA, 9 bp, Unknown
  misc_feature (1)..( 9): Result.001 file - promoters70/5663224
caaacctga

SEQ ID NO: 87961 - DNA, 10 bp, Unknown
  misc_feature (1)..( 10): Result.001 file - promoters70/5663224
cttttaaatt

SEQ ID NO: 87962 - DNA, 10 bp, Unknown
  misc_feature (1)..( 10): Result.001 file - promoters70/5663224
cttgtaatgt

SEQ ID NO: 87963 - DNA, 11 bp, Unknown
  misc_feature (1)..( 11): Result.001 file - promoters70/5663224
gttttgaatta

SEQ ID NO: 87964 - DNA, 7 bp, Unknown
  misc_feature (1)..( 7): Result.001 file - promoters70/5663224
gaattaa

SEQ ID NO: 87965 - DNA, 7 bp, Unknown
  misc_feature (1)..( 7): Result.001 file - promoters70/5663224
gaattat

SEQ ID NO: 87966 - DNA, 7 bp, Unknown
  misc_feature (1)..( 7): Result.001 file - promoters70/5663374
aaattat

SEQ ID NO: 87967 - DNA, 13 bp, Unknown
  misc_feature (1)..( 13): Result.001 file - promoters70/5663374
caataaattaaat

SEQ ID NO: 87968 - DNA, 13 bp, Unknown
  misc_feature (1)..( 13): Result.001 file - promoters70/5663374
aaataaaataaat

SEQ ID NO: 87969 - DNA, 13 bp, Unknown
  misc_feature (1)..( 13): Result.001 file - promoters70/5663374
aaatgaaatatct

SEQ ID NO: 87970 - DNA, 9 bp, Unknown
  misc_feature (1)..( 9): Result.001 file - promoters70/5663374
ttctcacat

SEQ ID NO: 87971 - DNA, 9 bp, Unknown
  misc_feature (1)..( 9): Result.001 file - promoters70/5663374
ttcccacta

SEQ ID NO: 87972 - DNA, 9 bp, Unknown
  misc_feature (1)..( 9): Result.001 file - promoters70/5663625
aacccacta

SEQ ID NO: 87973 - DNA, 9 bp, Unknown
  misc_feature (1)..( 9): Result.001 file - promoters70/5663625
aagtcacta

SEQ ID NO: 87974 - DNA, 9 bp, Unknown
  misc_feature (1)..( 9): Result.001 file - promoters70/5663625
aagtcagta

SEQ ID NO: 87975 - DNA, 9 bp, Unknown
  misc_feature (1)..( 9): Result.001 file - promoters70/5663625
tagttacta

SEQ ID NO: 87976 - DNA, 7 bp, Unknown
  misc_feature (1)..( 7): Result.001 file - promoters70/5663625
aagaaaa

SEQ ID NO: 87977 - DNA, 7 bp, Unknown
  misc_feature (1)..( 7): Result.001 file - promoters70/5663625
aagaaag

SEQ ID NO: 87978 - DNA, 8 bp, Unknown
  misc_feature (1)..( 8): Result.001 file - promoters70/5663625
gagataag

SEQ ID NO: 87979 - DNA, 12 bp, Unknown
  misc_feature (1)..( 12): Result.001 file - promoters70/5663625
ttgtaataatta

SEQ ID NO: 87980 - DNA, 12 bp, Unknown
  misc_feature (1)..( 12): Result.001 file - promoters70/5663625
ttaaaataattc

SEQ ID NO: 87981 - DNA, 12 bp, Unknown
  misc_feature (1)..( 12): Result.001 file - promoters70/5663625
ttgtcatagtta

SEQ ID NO: 87982 - DNA, 12 bp, Unknown
  misc_feature (1)..( 12): Result.001 file - promoters70/5663625
aacaaaaaatta

SEQ ID NO: 87983 - DNA, 9 bp, Unknown
  misc_feature (1)..( 9): Result.001 file - promoters70/5663625
tagtaatat

SEQ ID NO: 87984 - DNA, 9 bp, Unknown
  misc_feature (1)..( 9): Result.001 file - promoters70/5663625
tagtgatat

SEQ ID NO: 87985 - DNA, 9 bp, Unknown
  misc_feature (1)..( 9): Result.001 file - promoters70/5663625
aagtaatat

SEQ ID NO: 87986 - DNA, 9 bp, Unknown
  misc_feature (1)..( 9): Result.001 file - promoters70/5663625
ttgtaaatc

SEQ ID NO: 87987 - DNA, 9 bp, Unknown
  misc_feature (1)..( 9): Result.001 file - promoters70/5663625
ttgaaaatt

SEQ ID NO: 87988 - DNA, 9 bp, Unknown
  misc_feature (1)..( 9): Result.001 file - promoters70/5663625
atgaaaatt

SEQ ID NO: 87989 - DNA, 7 bp, Unknown
  misc_feature (1)..( 7): Result.001 file - promoters70/5663625
tcagtct

SEQ ID NO: 87990 - DNA, 7 bp, Unknown
  misc_feature (1)..( 7): Result.001 file - promoters70/5663625
tcagtct

SEQ ID NO: 87991 - DNA, 7 bp, Unknown
  misc_feature (1)..( 7): Result.001 file - promoters70/5663625
tcactct

SEQ ID NO: 87992 - DNA, 7 bp, Unknown
  misc_feature (1)..( 7): Result.001 file - promoters70/5663625
gtatgat

SEQ ID NO: 87993 - DNA, 7 bp, Unknown
  misc_feature (1)..( 7): Result.001 file - promoters70/5663625
atatgat

SEQ ID NO: 87994 - DNA, 7 bp, Unknown
  misc_feature (1)..( 7): Result.001 file - promoters70/5663625
atatgag

SEQ ID NO: 87995 - DNA, 8 bp, Unknown
  misc_feature (1)..( 8): Result.001 file - promoters70/5663625
atattagt

SEQ ID NO: 87996 - DNA, 8 bp, Unknown
  misc_feature (1)..( 8): Result.001 file - promoters70/5663625
atatgagt

SEQ ID NO: 87997 - DNA, 8 bp, Unknown
  misc_feature (1)..( 8): Result.001 file - promoters70/5663625
atatgatt

SEQ ID NO: 87998 - DNA, 7 bp, Unknown
  misc_feature (1)..( 7): Result.001 file - promoters70/5663625
taattta

SEQ ID NO: 87999 - DNA, 7 bp, Unknown
  misc_feature (1)..( 7): Result.001 file - promoters70/5663625
aaattta

SEQ ID NO: 88000 - DNA, 7 bp, Unknown
  misc_feature (1)..( 7): Result.001 file - promoters70/5663805
aaaatta

SEQ ID NO: 88001 - DNA, 9 bp, Unknown
  misc_feature (1)..( 9): Result.001 file - promoters70/5663805
aaactatac

SEQ ID NO: 88002 - DNA, 9 bp, Unknown
  misc_feature (1)..( 9): Result.001 file - promoters70/5663805
ttactttac

SEQ ID NO: 88003 - DNA, 9 bp, Unknown
  misc_feature (1)..( 9): Result.001 file - promoters70/5663805
ttaattttt

SEQ ID NO: 88004 - DNA, 9 bp, Unknown
  misc_feature (1)..( 9): Result.001 file - promoters70/5663805
atataataa

SEQ ID NO: 88005 - DNA, 9 bp, Unknown
  misc_feature (1)..( 9): Result.001 file - promoters70/5663805
ttattatac

SEQ ID NO: 88006 - DNA, 9 bp, Unknown
  misc_feature (1)..( 9): Result.001 file - promoters70/5663805
atataatta

SEQ ID NO: 88007 - DNA, 9 bp, Unknown
  misc_feature (1)..( 9): Result.001 file - promoters70/5663805
gtttaataa

SEQ ID NO: 88008 - DNA, 8 bp, Unknown
  misc_feature (1)..( 8): Result.001 file - promoters70/5663805
atcaaaag

SEQ ID NO: 88009 - DNA, 8 bp, Unknown
  misc_feature (1)..( 8): Result.001 file - promoters70/5663805
atccaaac

SEQ ID NO: 88010 - DNA, 8 bp, Unknown
  misc_feature (1)..( 8): Result.001 file - promoters70/5663805
atcctaac

SEQ ID NO: 88011 - DNA, 7 bp, Unknown
  misc_feature (1)..( 7): Result.001 file - promoters70/5663805
gtaagaa

SEQ ID NO: 88012 - DNA, 7 bp, Unknown
  misc_feature (1)..( 7): Result.001 file - promoters70/5663805
gtaagaa

SEQ ID NO: 88013 - DNA, 7 bp, Unknown
  misc_feature (1)..( 7): Result.001 file - promoters70/5663805
ataagaa

SEQ ID NO: 88014 - DNA, 10 bp, Unknown
  misc_feature (1)..( 10): Result.001 file - promoters70/5663805
ctttgttggt

SEQ ID NO: 88015 - DNA, 10 bp, Unknown
  misc_feature (1)..( 10): Result.001 file - promoters70/5663805
ttttattgat

SEQ ID NO: 88016 - DNA, 10 bp, Unknown
  misc_feature (1)..( 10): Result.001 file - promoters70/5663805
cgttactgat

SEQ ID NO: 88017 - DNA, 10 bp, Unknown
  misc_feature (1)..( 10): Result.001 file - promoters70/5663805
ttttatcgag

SEQ ID NO: 88018 - DNA, 8 bp, Unknown
  misc_feature (1)..( 8): Result.001 file - promoters70/5663805
ataataaa

SEQ ID NO: 88019 - DNA, 8 bp, Unknown
  misc_feature (1)..( 8): Result.001 file - promoters70/5663805
ataataaa

SEQ ID NO: 88020 - DNA, 8 bp, Unknown
  misc_feature (1)..( 8): Result.001 file - promoters70/5663805
acaataaa

SEQ ID NO: 88021 - DNA, 9 bp, Unknown
  misc_feature (1)..( 9): Result.001 file - promoters70/5663805
aatatatat

SEQ ID NO: 88022 - DNA, 9 bp, Unknown
  misc_feature (1)..( 9): Result.001 file - promoters70/5663805
aatttattt

SEQ ID NO: 88023 - DNA, 9 bp, Unknown
  misc_feature (1)..( 9): Result.001 file - promoters70/5663805
gctttgttt

SEQ ID NO: 88024 - DNA, 13 bp, Unknown
  misc_feature (1)..( 13): Result.001 file - promoters70/5663805
actcataataaat

SEQ ID NO: 88025 - DNA, 13 bp, Unknown
  misc_feature (1)..( 13): Result.001 file - promoters70/5663805
atttataatataa

SEQ ID NO: 88026 - DNA, 13 bp, Unknown
  misc_feature (1)..( 13): Result.001 file - promoters70/5663805
acttataatgaat

SEQ ID NO: 88027 - DNA, 11 bp, Unknown
  misc_feature (1)..( 11): Result.001 file - promoters70/5663805
aactagacacg

SEQ ID NO: 88028 - DNA, 11 bp, Unknown
  misc_feature (1)..( 11): Result.001 file - promoters70/5663805
aaaaagagacg

SEQ ID NO: 88029 - DNA, 11 bp, Unknown
  misc_feature (1)..( 11): Result.001 file - promoters70/5663805
aaaaagaatac

SEQ ID NO: 88030 - DNA, 7 bp, Unknown
  misc_feature (1)..( 7): Result.001 file - promoters70/5663805
taataaa

SEQ ID NO: 88031 - DNA, 7 bp, Unknown
  misc_feature (1)..( 7): Result.001 file - promoters70/5663805
gaataaa

SEQ ID NO: 88032 - DNA, 7 bp, Unknown
  misc_feature (1)..( 7): Result.001 file - promoters70/5663805
atataaa

SEQ ID NO: 88033 - DNA, 8 bp, Unknown
  misc_feature (1)..( 8): Result.001 file - promoters70/5663805
aatatgag

SEQ ID NO: 88034 - DNA, 8 bp, Unknown
  misc_feature (1)..( 8): Result.001 file - promoters70/5663805
aatttgaa

SEQ ID NO: 88035 - DNA, 8 bp, Unknown
  misc_feature (1)..( 8): Result.001 file - promoters70/5663805
aatatgaa

SEQ ID NO: 88036 - DNA, 8 bp, Unknown
  misc_feature (1)..( 8): Result.001 file - promoters70/5663805
tttaaaac

SEQ ID NO: 88037 - DNA, 8 bp, Unknown
  misc_feature (1)..( 8): Result.001 file - promoters70/5663805
tttcaaat

SEQ ID NO: 88038 - DNA, 8 bp, Unknown
  misc_feature (1)..( 8): Result.001 file - promoters70/5663805
tttgaaat

SEQ ID NO: 88039 - DNA, 8 bp, Unknown
  misc_feature (1)..( 8): Result.001 file - promoters70/5663805
tttatttc

SEQ ID NO: 88040 - DNA, 8 bp, Unknown
  misc_feature (1)..( 8): Result.001 file - promoters70/5663805
tttctttg

SEQ ID NO: 88041 - DNA, 8 bp, Unknown
  misc_feature (1)..( 8): Result.001 file - promoters70/5663862
tttagttc

SEQ ID NO: 88042 - DNA, 8 bp, Unknown
  misc_feature (1)..( 8): Result.001 file - promoters70/5663862
tgtgattt

SEQ ID NO: 88043 - DNA, 8 bp, Unknown
  misc_feature (1)..( 8): Result.001 file - promoters70/5663862
tgtcattt

SEQ ID NO: 88044 - DNA, 8 bp, Unknown
  misc_feature (1)..( 8): Result.001 file - promoters70/5663862
ggtgattg

SEQ ID NO: 88045 - DNA, 8 bp, Unknown
  misc_feature (1)..( 8): Result.001 file - promoters70/5663862
attgattt

SEQ ID NO: 88046 - DNA, 8 bp, Unknown
  misc_feature (1)..( 8): Result.001 file - promoters70/5663862
tttcattt

SEQ ID NO: 88047 - DNA, 8 bp, Unknown
  misc_feature (1)..( 8): Result.001 file - promoters70/5663907
tgtcatga

SEQ ID NO: 88048 - DNA, 8 bp, Unknown
  misc_feature (1)..( 8): Result.001 file - promoters70/5663907
taattaat

SEQ ID NO: 88049 - DNA, 8 bp, Unknown
  misc_feature (1)..( 8): Result.001 file - promoters70/5663907
taatcaat

SEQ ID NO: 88050 - DNA, 8 bp, Unknown
  misc_feature (1)..( 8): Result.001 file - promoters70/5663907
atatcaat

SEQ ID NO: 88051 - DNA, 9 bp, Unknown
  misc_feature (1)..( 9): Result.001 file - promoters70/5663907
ttatttgga

SEQ ID NO: 88052 - DNA, 9 bp, Unknown
  misc_feature (1)..( 9): Result.001 file - promoters70/5663907
atatttgtt

SEQ ID NO: 88053 - DNA, 9 bp, Unknown
  misc_feature (1)..( 9): Result.001 file - promoters70/5663907
ttatgtgga

SEQ ID NO: 88054 - DNA, 7 bp, Unknown
  misc_feature (1)..( 7): Result.001 file - promoters70/5663907
tataaat

SEQ ID NO: 88055 - DNA, 7 bp, Unknown
  misc_feature (1)..( 7): Result.001 file - promoters70/5663907
tataaat

SEQ ID NO: 88056 - DNA, 7 bp, Unknown
  misc_feature (1)..( 7): Result.001 file - promoters70/5663907
tataaaa

SEQ ID NO: 88057 - DNA, 8 bp, Unknown
  misc_feature (1)..( 8): Result.001 file - promoters70/5663907
attgatga

SEQ ID NO: 88058 - DNA, 8 bp, Unknown
  misc_feature (1)..( 8): Result.001 file - promoters70/5663907
tttgttga

SEQ ID NO: 88059 - DNA, 8 bp, Unknown
  misc_feature (1)..( 8): Result.001 file - promoters70/5663907
gtttatgt

SEQ ID NO: 88060 - DNA, 6 bp, Unknown
  misc_feature (1)..( 6): Result.001 file - promoters70/5663907
agcaat

SEQ ID NO: 88061 - DNA, 6 bp, Unknown
  misc_feature (1)..( 6): Result.001 file - promoters70/5663907
agcaat

SEQ ID NO: 88062 - DNA, 6 bp, Unknown
  misc_feature (1)..( 6): Result.001 file - promoters70/5663934
agcaat

SEQ ID NO: 88063 - DNA, 11 bp, Unknown
  misc_feature (1)..( 11): Result.001 file - promoters70/5663934
ctactacacat

SEQ ID NO: 88064 - DNA, 11 bp, Unknown
  misc_feature (1)..( 11): Result.001 file - promoters70/5663934
atactagacag

SEQ ID NO: 88065 - DNA, 11 bp, Unknown
  misc_feature (1)..( 11): Result.001 file - promoters70/5663934
aatctacgcat

SEQ ID NO: 88066 - DNA, 11 bp, Unknown
  misc_feature (1)..( 11): Result.001 file - promoters70/5663934
caactacaaat

SEQ ID NO: 88067 - DNA, 11 bp, Unknown
  misc_feature (1)..( 11): Result.001 file - promoters70/5663934
atactaaaaac

SEQ ID NO: 88068 - DNA, 11 bp, Unknown
  misc_feature (1)..( 11): Result.001 file - promoters70/5663934
ttactaaaagt

SEQ ID NO: 88069 - DNA, 13 bp, Unknown
  misc_feature (1)..( 13): Result.001 file - promoters70/5663934
aaaacgccttagt

SEQ ID NO: 88070 - DNA, 13 bp, Unknown
  misc_feature (1)..( 13): Result.001 file - promoters70/5663934
aaaacgaatggca

SEQ ID NO: 88071 - DNA, 13 bp, Unknown
  misc_feature (1)..( 13): Result.001 file - promoters70/5663934
aaaatgaattctt

SEQ ID NO: 88072 - DNA, 13 bp, Unknown
  misc_feature (1)..( 13): Result.001 file - promoters70/5663934
caaacaaatcaaa

SEQ ID NO: 88073 - DNA, 13 bp, Unknown
  misc_feature (1)..( 13): Result.001 file - promoters70/5663934
caaagaaaggtca

SEQ ID NO: 88074 - DNA, 13 bp, Unknown
  misc_feature (1)..( 13): Result.001 file - promoters70/5663934
aaaagaaaccaat

SEQ ID NO: 88075 - DNA, 13 bp, Unknown
  misc_feature (1)..( 13): Result.001 file - promoters70/5663934
caaggaaagactt

SEQ ID NO: 88076 - DNA, 12 bp, Unknown
  misc_feature (1)..( 12): Result.001 file - promoters70/5663934
gaccaaacacaa

SEQ ID NO: 88077 - DNA, 12 bp, Unknown
  misc_feature (1)..( 12): Result.001 file - promoters70/5663934
tatcaaacaaat

SEQ ID NO: 88078 - DNA, 12 bp, Unknown
  misc_feature (1)..( 12): Result.001 file - promoters70/5663934
aaagaaaccaat

SEQ ID NO: 88079 - DNA, 12 bp, Unknown
  misc_feature (1)..( 12): Result.001 file - promoters70/5663934
aacaaaaaaaaa

SEQ ID NO: 88080 - DNA, 12 bp, Unknown
  misc_feature (1)..( 12): Result.001 file - promoters70/5663934
aaccaaagaaag

SEQ ID NO: 88081 - DNA, 12 bp, Unknown
  misc_feature (1)..( 12): Result.001 file - promoters70/5663934
gtacaaggaaag

SEQ ID NO: 88082 - DNA, 12 bp, Unknown
  misc_feature (1)..( 12): Result.001 file - promoters70/5663934
gattaaaaaaag

SEQ ID NO: 88083 - DNA, 12 bp, Unknown
  misc_feature (1)..( 12): Result.001 file - promoters70/5663934
acttaaaatcta

SEQ ID NO: 88084 - DNA, 12 bp, Unknown
  misc_feature (1)..( 12): Result.001 file - promoters70/5663934
tactaaaaacag

SEQ ID NO: 88085 - DNA, 12 bp, Unknown
  misc_feature (1)..( 12): Result.001 file - promoters70/5663934
tactaaaagttt

SEQ ID NO: 88086 - DNA, 13 bp, Unknown
  misc_feature (1)..( 13): Result.001 file - promoters70/5663934
aactacaaatatc

SEQ ID NO: 88087 - DNA, 13 bp, Unknown
  misc_feature (1)..( 13): Result.001 file - promoters70/5663934
acgccaaaagaca

SEQ ID NO: 88088 - DNA, 13 bp, Unknown
  misc_feature (1)..( 13): Result.001 file - promoters70/5663934
ttgtggaaatgac

SEQ ID NO: 88089 - DNA, 12 bp, Unknown
  misc_feature (1)..( 12): Result.001 file - promoters70/5663934
aaaatgaattct

SEQ ID NO: 88090 - DNA, 12 bp, Unknown
  misc_feature (1)..( 12): Result.001 file - promoters70/5663934
taaaagaaacca

SEQ ID NO: 88091 - DNA, 12 bp, Unknown
  misc_feature (1)..( 12): Result.001 file - promoters70/5663934
aaaacgaatggc

SEQ ID NO: 88092 - DNA, 12 bp, Unknown
  misc_feature (1)..( 12): Result.001 file - promoters70/5663934
caaacaaatcaa

SEQ ID NO: 88093 - DNA, 12 bp, Unknown
  misc_feature (1)..( 12): Result.001 file - promoters70/5663934
ccaaagaaaggt

SEQ ID NO: 88094 - DNA, 12 bp, Unknown
  misc_feature (1)..( 12): Result.001 file - promoters70/5663934
acaaggaaagac

SEQ ID NO: 88095 - DNA, 10 bp, Unknown
  misc_feature (1)..( 10): Result.001 file - promoters70/5663934
caaatcaaat

SEQ ID NO: 88096 - DNA, 10 bp, Unknown
  misc_feature (1)..( 10): Result.001 file - promoters70/5663934
gcagtcaaat

SEQ ID NO: 88097 - DNA, 10 bp, Unknown
  misc_feature (1)..( 10): Result.001 file - promoters70/5663934
aaaaccaaag

SEQ ID NO: 88098 - DNA, 10 bp, Unknown
  misc_feature (1)..( 10): Result.001 file - promoters70/5663934
gaaaccaatt

SEQ ID NO: 88099 - DNA, 10 bp, Unknown
  misc_feature (1)..( 10): Result.001 file - promoters70/5663934
caagtaaaaa

SEQ ID NO: 88100 - DNA, 10 bp, Unknown
  misc_feature (1)..( 10): Result.001 file - promoters70/5663950
caaggaaaga

SEQ ID NO: 88101 - DNA, 7 bp, Unknown
  misc_feature (1)..( 7): Result.001 file - promoters70/5663950
agatttt

SEQ ID NO: 88102 - DNA, 7 bp, Unknown
  misc_feature (1)..( 7): Result.001 file - promoters70/5663950
ggatttt

SEQ ID NO: 88103 - DNA, 7 bp, Unknown
  misc_feature (1)..( 7): Result.001 file - promoters70/5663950
ggattta

SEQ ID NO: 88104 - DNA, 9 bp, Unknown
  misc_feature (1)..( 9): Result.001 file - promoters70/5663950
agatttatt

SEQ ID NO: 88105 - DNA, 9 bp, Unknown
  misc_feature (1)..( 9): Result.001 file - promoters70/5663950
ggatttatt

SEQ ID NO: 88106 - DNA, 9 bp, Unknown
  misc_feature (1)..( 9): Result.001 file - promoters70/5663950
ggattttca

SEQ ID NO: 88107 - DNA, 8 bp, Unknown
  misc_feature (1)..( 8): Result.001 file - promoters70/5663950
ttcaaata

SEQ ID NO: 88108 - DNA, 8 bp, Unknown
  misc_feature (1)..( 8): Result.001 file - promoters70/5663950
ctcatata

SEQ ID NO: 88109 - DNA, 8 bp, Unknown
  misc_feature (1)..( 8): Result.001 file - promoters70/5663950
ctcataca

SEQ ID NO: 88110 - DNA, 8 bp, Unknown
  misc_feature (1)..( 8): Result.001 file - promoters70/5663950
aaaaattt

SEQ ID NO: 88111 - DNA, 8 bp, Unknown
  misc_feature (1)..( 8): Result.001 file - promoters70/5663950
aaagattt

SEQ ID NO: 88112 - DNA, 8 bp, Unknown
  misc_feature (1)..( 8): Result.001 file - promoters70/5663970
taagattg

SEQ ID NO: 88113 - DNA, 9 bp, Unknown
  misc_feature (1)..( 9): Result.001 file - promoters70/5663970
gagtttctc

SEQ ID NO: 88114 - DNA, 9 bp, Unknown
  misc_feature (1)..( 9): Result.001 file - promoters70/5663970
tagtctctt

SEQ ID NO: 88115 - DNA, 9 bp, Unknown
  misc_feature (1)..( 9): Result.001 file - promoters70/5663970
gagattctg

SEQ ID NO: 88116 - DNA, 9 bp, Unknown
  misc_feature (1)..( 9): Result.001 file - promoters70/5663996
tagtttctt

SEQ ID NO: 88117 - DNA, 12 bp, Unknown
  misc_feature (1)..( 12): Result.001 file - promoters70/5663996
tatgaatcatgt

SEQ ID NO: 88118 - DNA, 12 bp, Unknown
  misc_feature (1)..( 12): Result.001 file - promoters70/5663996
ctggaatcaaca

SEQ ID NO: 88119 - DNA, 12 bp, Unknown
  misc_feature (1)..( 12): Result.001 file - promoters70/5663996
tggtaataatgt

SEQ ID NO: 88120 - DNA, 12 bp, Unknown
  misc_feature (1)..( 12): Result.001 file - promoters70/5663996
tatgaatctgct

SEQ ID NO: 88121 - DNA, 13 bp, Unknown
  misc_feature (1)..( 13): Result.001 file - promoters70/5663996
atcaaatagtccg

SEQ ID NO: 88122 - DNA, 13 bp, Unknown
  misc_feature (1)..( 13): Result.001 file - promoters70/5663996
atcaaatccacaa

SEQ ID NO: 88123 - DNA, 13 bp, Unknown
  misc_feature (1)..( 13): Result.001 file - promoters70/5663996
tccaaattcacaa

SEQ ID NO: 88124 - DNA, 9 bp, Unknown
  misc_feature (1)..( 9): Result.001 file - promoters70/5663996
gtcaaattt

SEQ ID NO: 88125 - DNA, 9 bp, Unknown
  misc_feature (1)..( 9): Result.001 file - promoters70/5663996
aacaatttt

SEQ ID NO: 88126 - DNA, 9 bp, Unknown
  misc_feature (1)..( 9): Result.001 file - promoters70/5663996
aacaattag

SEQ ID NO: 88127 - DNA, 9 bp, Unknown
  misc_feature (1)..( 9): Result.001 file - promoters70/5663996
ttggattta

SEQ ID NO: 88128 - DNA, 9 bp, Unknown
  misc_feature (1)..( 9): Result.001 file - promoters70/5663996
atggattta

SEQ ID NO: 88129 - DNA, 9 bp, Unknown
  misc_feature (1)..( 9): Result.001 file - promoters70/5663996
ttggatttt

SEQ ID NO: 88130 - DNA, 7 bp, Unknown
  misc_feature (1)..( 7): Result.001 file - promoters70/5663996
gagagta

SEQ ID NO: 88131 - DNA, 7 bp, Unknown
  misc_feature (1)..( 7): Result.001 file - promoters70/5663996
cagagta

SEQ ID NO: 88132 - DNA, 7 bp, Unknown
  misc_feature (1)..( 7): Result.001 file - promoters70/5663996
gagggta

SEQ ID NO: 88133 - DNA, 8 bp, Unknown
  misc_feature (1)..( 8): Result.001 file - promoters70/5663996
cttcgacg

SEQ ID NO: 88134 - DNA, 8 bp, Unknown
  misc_feature (1)..( 8): Result.001 file - promoters70/5663996
ctttgacc

SEQ ID NO: 88135 - DNA, 8 bp, Unknown
  misc_feature (1)..( 8): Result.001 file - promoters70/5663996
ttttaacc

SEQ ID NO: 88136 - DNA, 13 bp, Unknown
  misc_feature (1)..( 13): Result.001 file - promoters70/5663996
ctgaatcgagaat

SEQ ID NO: 88137 - DNA, 13 bp, Unknown
  misc_feature (1)..( 13): Result.001 file - promoters70/5663996
ttgaatcaatatt

SEQ ID NO: 88138 - DNA, 13 bp, Unknown
  misc_feature (1)..( 13): Result.001 file - promoters70/5663996
ttgattcaaaatt

SEQ ID NO: 88139 - DNA, 10 bp, Unknown
  misc_feature (1)..( 10): Result.001 file - promoters70/5663996
agctagctct

SEQ ID NO: 88140 - DNA, 10 bp, Unknown
  misc_feature (1)..( 10): Result.001 file - promoters70/5663996
agctcgctct

SEQ ID NO: 88141 - DNA, 10 bp, Unknown
  misc_feature (1)..( 10): Result.001 file - promoters70/5664060
tcctcactca

SEQ ID NO: 88142 - DNA, 9 bp, Unknown
  misc_feature (1)..( 9): Result.001 file - promoters70/5664060
tcaaataat

SEQ ID NO: 88143 - DNA, 9 bp, Unknown
  misc_feature (1)..( 9): Result.001 file - promoters70/5664060
gaaaacaat

SEQ ID NO: 88144 - DNA, 9 bp, Unknown
  misc_feature (1)..( 9): Result.001 file - promoters70/5664060
acaaattta

SEQ ID NO: 88145 - DNA, 9 bp, Unknown
  misc_feature (1)..( 9): Result.001 file - promoters70/5664060
attagatta

SEQ ID NO: 88146 - DNA, 9 bp, Unknown
  misc_feature (1)..( 9): Result.001 file - promoters70/5664060
attggatta

SEQ ID NO: 88147 - DNA, 9 bp, Unknown
  misc_feature (1)..( 9): Result.001 file - promoters70/5664060
catagttta

SEQ ID NO: 88148 - DNA, 9 bp, Unknown
  misc_feature (1)..( 9): Result.001 file - promoters70/5664060
atttgtctt

SEQ ID NO: 88149 - DNA, 9 bp, Unknown
  misc_feature (1)..( 9): Result.001 file - promoters70/5664060
atttatcta

SEQ ID NO: 88150 - DNA, 9 bp, Unknown
  misc_feature (1)..( 9): Result.001 file - promoters70/5664060
ttttgttta

SEQ ID NO: 88151 - DNA, 7 bp, Unknown
  misc_feature (1)..( 7): Result.001 file - promoters70/5664060
tgagaac

SEQ ID NO: 88152 - DNA, 7 bp, Unknown
  misc_feature (1)..( 7): Result.001 file - promoters70/5664060
tgaaaac

SEQ ID NO: 88153 - DNA, 7 bp, Unknown
  misc_feature (1)..( 7): Result.001 file - promoters70/5664141
agaaaac

SEQ ID NO: 88154 - DNA, 7 bp, Unknown
  misc_feature (1)..( 7): Result.001 file - promoters70/5664141
atttatg

SEQ ID NO: 88155 - DNA, 7 bp, Unknown
  misc_feature (1)..( 7): Result.001 file - promoters70/5664141
ctttatg

SEQ ID NO: 88156 - DNA, 7 bp, Unknown
  misc_feature (1)..( 7): Result.001 file - promoters70/5664141
atttatg

SEQ ID NO: 88157 - DNA, 9 bp, Unknown
  misc_feature (1)..( 9): Result.001 file - promoters70/5664141
atttgtttt

SEQ ID NO: 88158 - DNA, 9 bp, Unknown
  misc_feature (1)..( 9): Result.001 file - promoters70/5664141
atttttttt

SEQ ID NO: 88159 - DNA, 9 bp, Unknown
  misc_feature (1)..( 9): Result.001 file - promoters70/5664170
attatttac

SEQ ID NO: 88160 - DNA, 7 bp, Unknown
  misc_feature (1)..( 7): Result.001 file - promoters70/5664170
cataatt

SEQ ID NO: 88161 - DNA, 7 bp, Unknown
  misc_feature (1)..( 7): Result.001 file - promoters70/5664170
cataatc

SEQ ID NO: 88162 - DNA, 7 bp, Unknown
  misc_feature (1)..( 7): Result.001 file - promoters70/5664182
cataatt

SEQ ID NO: 88163 - DNA, 8 bp, Unknown
  misc_feature (1)..( 8): Result.001 file - promoters70/5664182
cacaaatt

SEQ ID NO: 88164 - DNA, 8 bp, Unknown
  misc_feature (1)..( 8): Result.001 file - promoters70/5664182
tacaaatt

SEQ ID NO: 88165 - DNA, 8 bp, Unknown
  misc_feature (1)..( 8): Result.001 file - promoters70/5664182
tacaaaag

SEQ ID NO: 88166 - DNA, 11 bp, Unknown
  misc_feature (1)..( 11): Result.001 file - promoters70/5664182
tcagaattttt

SEQ ID NO: 88167 - DNA, 11 bp, Unknown
  misc_feature (1)..( 11): Result.001 file - promoters70/5664182
gattaatttta

SEQ ID NO: 88168 - DNA, 11 bp, Unknown
  misc_feature (1)..( 11): Result.001 file - promoters70/5664182
acctaagttta

SEQ ID NO: 88169 - DNA, 11 bp, Unknown
  misc_feature (1)..( 11): Result.001 file - promoters70/5664182
gttaaagtcaa

SEQ ID NO: 88170 - DNA, 8 bp, Unknown
  misc_feature (1)..( 8): Result.001 file - promoters70/5664182
cgtaaagt

SEQ ID NO: 88171 - DNA, 8 bp, Unknown
  misc_feature (1)..( 8): Result.001 file - promoters70/5664182
gttaaagt

SEQ ID NO: 88172 - DNA, 8 bp, Unknown
  misc_feature (1)..( 8): Result.001 file - promoters70/5664294
gtttaagt

SEQ ID NO: 88173 - DNA, 8 bp, Unknown
  misc_feature (1)..( 8): Result.001 file - promoters70/5664294
caaaccga

SEQ ID NO: 88174 - DNA, 8 bp, Unknown
  misc_feature (1)..( 8): Result.001 file - promoters70/5664294
aaaatcga

SEQ ID NO: 88175 - DNA, 8 bp, Unknown
  misc_feature (1)..( 8): Result.001 file - promoters70/5664294
aaaatctg

SEQ ID NO: 88176 - DNA, 8 bp, Unknown
  misc_feature (1)..( 8): Result.001 file - promoters70/5664294
gataaaaa

SEQ ID NO: 88177 - DNA, 8 bp, Unknown
  misc_feature (1)..( 8): Result.001 file - promoters70/5664294
tatataaa

SEQ ID NO: 88178 - DNA, 8 bp, Unknown
  misc_feature (1)..( 8): Result.001 file - promoters70/5664294
gataaatg

SEQ ID NO: 88179 - DNA, 9 bp, Unknown
  misc_feature (1)..( 9): Result.001 file - promoters70/5664294
ctttataat

SEQ ID NO: 88180 - DNA, 9 bp, Unknown
  misc_feature (1)..( 9): Result.001 file - promoters70/5664294
cattaaaat

SEQ ID NO: 88181 - DNA, 10 bp, Unknown
  misc_feature (1)..( 10): Result.001 file - promoters70/5664298
acttcataga

SEQ ID NO: 88182 - DNA, 10 bp, Unknown
  misc_feature (1)..( 10): Result.001 file - promoters70/5664298
catgatttaa

SEQ ID NO: 88183 - DNA, 10 bp, Unknown
  misc_feature (1)..( 10): Result.001 file - promoters70/5664298
catgatctta

SEQ ID NO: 88184 - DNA, 10 bp, Unknown
  misc_feature (1)..( 10): Result.001 file - promoters70/5664298
gatgagctta

SEQ ID NO: 88185 - DNA, 10 bp, Unknown
  misc_feature (1)..( 10): Result.001 file - promoters70/5664311
gttgagctta

SEQ ID NO: 88186 - DNA, 11 bp, Unknown
  misc_feature (1)..( 11): Result.001 file - promoters70/5664311
catggtaacat

SEQ ID NO: 88187 - DNA, 11 bp, Unknown
  misc_feature (1)..( 11): Result.001 file - promoters70/5664311
tatgttaattt

SEQ ID NO: 88188 - DNA, 11 bp, Unknown
  misc_feature (1)..( 11): Result.001 file - promoters70/5664311
catagtagact

SEQ ID NO: 88189 - DNA, 11 bp, Unknown
  misc_feature (1)..( 11): Result.001 file - promoters70/5664311
catagtaacaa

SEQ ID NO: 88190 - DNA, 11 bp, Unknown
  misc_feature (1)..( 11): Result.001 file - promoters70/5664311
tttgtaaattt

SEQ ID NO: 88191 - DNA, 11 bp, Unknown
  misc_feature (1)..( 11): Result.001 file - promoters70/5664311
attgttaacga

SEQ ID NO: 88192 - DNA, 11 bp, Unknown
  misc_feature (1)..( 11): Result.001 file - promoters70/5664311
aatgttgtttc

SEQ ID NO: 88193 - DNA, 11 bp, Unknown
  misc_feature (1)..( 11): Result.001 file - promoters70/5664311
tattaaatata

SEQ ID NO: 88194 - DNA, 11 bp, Unknown
  misc_feature (1)..( 11): Result.001 file - promoters70/5664311
aaagaaatatt

SEQ ID NO: 88195 - DNA, 11 bp, Unknown
  misc_feature (1)..( 11): Result.001 file - promoters70/5664311
aaaaaaatatt

SEQ ID NO: 88196 - DNA, 11 bp, Unknown
  misc_feature (1)..( 11): Result.001 file - promoters70/5664311
aaaaaaaggaa

SEQ ID NO: 88197 - DNA, 11 bp, Unknown
  misc_feature (1)..( 11): Result.001 file - promoters70/5664311
cataaaataaa

SEQ ID NO: 88198 - DNA, 11 bp, Unknown
  misc_feature (1)..( 11): Result.001 file - promoters70/5664311
aacaaagtaaa

SEQ ID NO: 88199 - DNA, 9 bp, Unknown
  misc_feature (1)..( 9): Result.001 file - promoters70/5664311
aaacttttc

SEQ ID NO: 88200 - DNA, 9 bp, Unknown
  misc_feature (1)..( 9): Result.001 file - promoters70/5664311
aaagttttt

SEQ ID NO: 88201 - DNA, 9 bp, Unknown
  misc_feature (1)..( 9): Result.001 file - promoters70/5664311
aaattttta

SEQ ID NO: 88202 - DNA, 9 bp, Unknown
  misc_feature (1)..( 9): Result.001 file - promoters70/5664311
ttagttttg

SEQ ID NO: 88203 - DNA, 9 bp, Unknown
  misc_feature (1)..( 9): Result.001 file - promoters70/5664311
tttgttttt

SEQ ID NO: 88204 - DNA, 9 bp, Unknown
  misc_feature (1)..( 9): Result.001 file - promoters70/5664457
tctgttttc

SEQ ID NO: 88205 - DNA, 9 bp, Unknown
  misc_feature (1)..( 9): Result.001 file - promoters70/5664457
tctttctat

SEQ ID NO: 88206 - DNA, 9 bp, Unknown
  misc_feature (1)..( 9): Result.001 file - promoters70/5664457
tctctctga

SEQ ID NO: 88207 - DNA, 9 bp, Unknown
  misc_feature (1)..( 9): Result.001 file - promoters70/5664457
ccttactat

SEQ ID NO: 88208 - DNA, 7 bp, Unknown
  misc_feature (1)..( 7): Result.001 file - promoters70/5664457
tcaaact

SEQ ID NO: 88209 - DNA, 7 bp, Unknown
  misc_feature (1)..( 7): Result.001 file - promoters70/5664457
tcaaacc

SEQ ID NO: 88210 - DNA, 7 bp, Unknown
  misc_feature (1)..( 7): Result.001 file - promoters70/5664465
ccaaacc

SEQ ID NO: 88211 - DNA, 7 bp, Unknown
  misc_feature (1)..( 7): Result.001 file - promoters70/5664465
ttcacaa

SEQ ID NO: 88212 - DNA, 7 bp, Unknown
  misc_feature (1)..( 7): Result.001 file - promoters70/5664465
gtcacaa

SEQ ID NO: 88213 - DNA, 7 bp, Unknown
  misc_feature (1)..( 7): Result.001 file - promoters70/5664703
ttcacag

SEQ ID NO: 88214 - DNA, 12 bp, Unknown
  misc_feature (1)..( 12): Result.001 file - promoters70/5664703
ctttttgtttat

SEQ ID NO: 88215 - DNA, 12 bp, Unknown
  misc_feature (1)..( 12): Result.001 file - promoters70/5664703
tgatttgtatat

SEQ ID NO: 88216 - DNA, 12 bp, Unknown
  misc_feature (1)..( 12): Result.001 file - promoters70/5664703
cttattgtataa

SEQ ID NO: 88217 - DNA, 8 bp, Unknown
  misc_feature (1)..( 8): Result.001 file - promoters70/5664703
gctggatt

SEQ ID NO: 88218 - DNA, 8 bp, Unknown
  misc_feature (1)..( 8): Result.001 file - promoters70/5664703
tctgaatt

SEQ ID NO: 88219 - DNA, 8 bp, Unknown
  misc_feature (1)..( 8): Result.001 file - promoters70/5664873
tctgaaca

SEQ ID NO: 88220 - DNA, 7 bp, Unknown
  misc_feature (1)..( 7): Result.001 file - promoters70/5664873
aaataaa

SEQ ID NO: 88221 - DNA, 7 bp, Unknown
  misc_feature (1)..( 7): Result.001 file - promoters70/5664873
aaataaa

SEQ ID NO: 88222 - DNA, 7 bp, Unknown
  misc_feature (1)..( 7): Result.001 file - promoters70/5664873
aaataaa

SEQ ID NO: 88223 - DNA, 7 bp, Unknown
  misc_feature (1)..( 7): Result.001 file - promoters70/5664873
aaagaaa

SEQ ID NO: 88224 - DNA, 8 bp, Unknown
  misc_feature (1)..( 8): Result.001 file - promoters70/5664873
taaaattt

SEQ ID NO: 88225 - DNA, 8 bp, Unknown
  misc_feature (1)..( 8): Result.001 file - promoters70/5664873
taaaataa

SEQ ID NO: 88226 - DNA, 8 bp, Unknown
  misc_feature (1)..( 8): Result.001 file - promoters70/5664873
gaaacttt

SEQ ID NO: 88227 - DNA, 7 bp, Unknown
  misc_feature (1)..( 7): Result.001 file - promoters70/5664873
aaataaa

SEQ ID NO: 88228 - DNA, 7 bp, Unknown
  misc_feature (1)..( 7): Result.001 file - promoters70/5664873
aaataac

SEQ ID NO: 88229 - DNA, 7 bp, Unknown
  misc_feature (1)..( 7): Result.001 file - promoters70/5664873
aaagaaa

SEQ ID NO: 88230 - DNA, 7 bp, Unknown
  misc_feature (1)..( 7): Result.001 file - promoters70/5664873
aaattta

SEQ ID NO: 88231 - DNA, 7 bp, Unknown
  misc_feature (1)..( 7): Result.001 file - promoters70/5664873
caattta

SEQ ID NO: 88232 - DNA, 7 bp, Unknown
  misc_feature (1)..( 7): Result.001 file - promoters70/5664873
aaatttc

SEQ ID NO: 88233 - DNA, 9 bp, Unknown
  misc_feature (1)..( 9): Result.001 file - promoters70/5664873
aaaattaaa

SEQ ID NO: 88234 - DNA, 9 bp, Unknown
  misc_feature (1)..( 9): Result.001 file - promoters70/5664873
aaacttaat

SEQ ID NO: 88235 - DNA, 9 bp, Unknown
  misc_feature (1)..( 9): Result.001 file - promoters70/5664873
tgccttaat

SEQ ID NO: 88236 - DNA, 11 bp, Unknown
  misc_feature (1)..( 11): Result.001 file - promoters70/5664873
gtagtgacttt

SEQ ID NO: 88237 - DNA, 11 bp, Unknown
  misc_feature (1)..( 11): Result.001 file - promoters70/5664873
tttttgacttt

SEQ ID NO: 88238 - DNA, 11 bp, Unknown
  misc_feature (1)..( 11): Result.001 file - promoters70/5664873
ttttttacttg

SEQ ID NO: 88239 - DNA, 13 bp, Unknown
  misc_feature (1)..( 13): Result.001 file - promoters70/5664873
ttttactaaaaaa

SEQ ID NO: 88240 - DNA, 13 bp, Unknown
  misc_feature (1)..( 13): Result.001 file - promoters70/5664873
ctttaataagaaa

SEQ ID NO: 88241 - DNA, 13 bp, Unknown
  misc_feature (1)..( 13): Result.001 file - promoters70/5664873
ttttacttgatct

SEQ ID NO: 88242 - DNA, 10 bp, Unknown
  misc_feature (1)..( 10): Result.001 file - promoters70/5664873
taatgtctcg

SEQ ID NO: 88243 - DNA, 10 bp, Unknown
  misc_feature (1)..( 10): Result.001 file - promoters70/5664873
taatatctca

SEQ ID NO: 88244 - DNA, 10 bp, Unknown
  misc_feature (1)..( 10): Result.001 file - promoters70/5664873
tgatggctcg

SEQ ID NO: 88245 - DNA, 9 bp, Unknown
  misc_feature (1)..( 9): Result.001 file - promoters70/5664873
ctcttttat

SEQ ID NO: 88246 - DNA, 9 bp, Unknown
  misc_feature (1)..( 9): Result.001 file - promoters70/5664873
aaattttat

SEQ ID NO: 88247 - DNA, 9 bp, Unknown
  misc_feature (1)..( 9): Result.001 file - promoters70/5664885
aaaatttac

SEQ ID NO: 88248 - DNA, 12 bp, Unknown
  misc_feature (1)..( 12): Result.001 file - promoters70/5664885
aaagaaattata

SEQ ID NO: 88249 - DNA, 12 bp, Unknown
  misc_feature (1)..( 12): Result.001 file - promoters70/5664885
taaaaaataata

SEQ ID NO: 88250 - DNA, 12 bp, Unknown
  misc_feature (1)..( 12): Result.001 file - promoters70/5664885
atcaaaattaga

SEQ ID NO: 88251 - DNA, 12 bp, Unknown
  misc_feature (1)..( 12): Result.001 file - promoters70/5664885
ctagaaattcta

SEQ ID NO: 88252 - DNA, 12 bp, Unknown
  misc_feature (1)..( 12): Result.001 file - promoters70/5665140
ctacaaagacca

SEQ ID NO: 88253 - DNA, 7 bp, Unknown
  misc_feature (1)..( 7): Result.001 file - promoters70/5665140
aaaacaa

SEQ ID NO: 88254 - DNA, 7 bp, Unknown
  misc_feature (1)..( 7): Result.001 file - promoters70/5665140
aaaacat

SEQ ID NO: 88255 - DNA, 7 bp, Unknown
  misc_feature (1)..( 7): Result.001 file - promoters70/5665140
aaatcaa

SEQ ID NO: 88256 - DNA, 8 bp, Unknown
  misc_feature (1)..( 8): Result.001 file - promoters70/5665140
aatctttt

SEQ ID NO: 88257 - DNA, 8 bp, Unknown
  misc_feature (1)..( 8): Result.001 file - promoters70/5665140
catcgttt

SEQ ID NO: 88258 - DNA, 8 bp, Unknown
  misc_feature (1)..( 8): Result.001 file - promoters70/5665140
catcgtcg

SEQ ID NO: 88259 - DNA, 8 bp, Unknown
  misc_feature (1)..( 8): Result.001 file - promoters70/5665140
tattattt

SEQ ID NO: 88260 - DNA, 8 bp, Unknown
  misc_feature (1)..( 8): Result.001 file - promoters70/5665140
gattcttt

SEQ ID NO: 88261 - DNA, 8 bp, Unknown
  misc_feature (1)..( 8): Result.001 file - promoters70/5665347
gattctct

SEQ ID NO: 88262 - DNA, 11 bp, Unknown
  misc_feature (1)..( 11): Result.001 file - promoters70/5665347
agttataaatc

SEQ ID NO: 88263 - DNA, 11 bp, Unknown
  misc_feature (1)..( 11): Result.001 file - promoters70/5665347
agttatgaatc

SEQ ID NO: 88264 - DNA, 11 bp, Unknown
  misc_feature (1)..( 11): Result.001 file - promoters70/5665347
tgttatttatt

SEQ ID NO: 88265 - DNA, 11 bp, Unknown
  misc_feature (1)..( 11): Result.001 file - promoters70/5665347
gaaaatgaatt

SEQ ID NO: 88266 - DNA, 11 bp, Unknown
  misc_feature (1)..( 11): Result.001 file - promoters70/5665347
gattataaatc

SEQ ID NO: 88267 - DNA, 12 bp, Unknown
  misc_feature (1)..( 12): Result.001 file - promoters70/5665351
taaaatggtatt

SEQ ID NO: 88268 - DNA, 7 bp, Unknown
  misc_feature (1)..( 7): Result.001 file - promoters70/5665351
ccatttc

SEQ ID NO: 88269 - DNA, 7 bp, Unknown
  misc_feature (1)..( 7): Result.001 file - promoters70/5665351
gcatttc

SEQ ID NO: 88270 - DNA, 7 bp, Unknown
  misc_feature (1)..( 7): Result.001 file - promoters70/5665351
gcatttg

SEQ ID NO: 88271 - DNA, 8 bp, Unknown
  misc_feature (1)..( 8): Result.001 file - promoters70/5665351
caaatgaa

SEQ ID NO: 88272 - DNA, 8 bp, Unknown
  misc_feature (1)..( 8): Result.001 file - promoters70/5665351
caaatggt

SEQ ID NO: 88273 - DNA, 8 bp, Unknown
  misc_feature (1)..( 8): Result.001 file - promoters70/5665351
aaaaggaa

SEQ ID NO: 88274 - DNA, 9 bp, Unknown
  misc_feature (1)..( 9): Result.001 file - promoters70/5665351
cttcttctc

SEQ ID NO: 88275 - DNA, 9 bp, Unknown
  misc_feature (1)..( 9): Result.001 file - promoters70/5665351
tttcttctt

SEQ ID NO: 88276 - DNA, 9 bp, Unknown
  misc_feature (1)..( 9): Result.001 file - promoters70/5665359
cttattctc

SEQ ID NO: 88277 - DNA, 7 bp, Unknown
  misc_feature (1)..( 7): Result.001 file - promoters70/5665359
aaaaatt

SEQ ID NO: 88278 - DNA, 7 bp, Unknown
  misc_feature (1)..( 7): Result.001 file - promoters70/5665359
caaaatt

SEQ ID NO: 88279 - DNA, 7 bp, Unknown
  misc_feature (1)..( 7): Result.001 file - promoters70/5665359
aaaaata

SEQ ID NO: 88280 - DNA, 7 bp, Unknown
  misc_feature (1)..( 7): Result.001 file - promoters70/5665359
gttattt

SEQ ID NO: 88281 - DNA, 7 bp, Unknown
  misc_feature (1)..( 7): Result.001 file - promoters70/5665359
gttgttt

SEQ ID NO: 88282 - DNA, 8 bp, Unknown
  misc_feature (1)..( 8): Result.001 file - promoters70/5665359
tttaattt

SEQ ID NO: 88283 - DNA, 6 bp, Unknown
  misc_feature (1)..( 6): Result.001 file - promoters70/5665359
tattgt

SEQ ID NO: 88284 - DNA, 6 bp, Unknown
  misc_feature (1)..( 6): Result.001 file - promoters70/5665359
tattgt

SEQ ID NO: 88285 - DNA, 6 bp, Unknown
  misc_feature (1)..( 6): Result.001 file - promoters70/5665359
tattgt

SEQ ID NO: 88286 - DNA, 9 bp, Unknown
  misc_feature (1)..( 9): Result.001 file - promoters70/5665359
attgttttg

SEQ ID NO: 88287 - DNA, 9 bp, Unknown
  misc_feature (1)..( 9): Result.001 file - promoters70/5665359
aaagttttg

SEQ ID NO: 88288 - DNA, 9 bp, Unknown
  misc_feature (1)..( 9): Result.001 file - promoters70/5665404
ttggtttat

SEQ ID NO: 88289 - DNA, 9 bp, Unknown
  misc_feature (1)..( 9): Result.001 file - promoters70/5665404
ttcgtcctt

SEQ ID NO: 88290 - DNA, 9 bp, Unknown
  misc_feature (1)..( 9): Result.001 file - promoters70/5665404
aacgttctt

SEQ ID NO: 88291 - DNA, 9 bp, Unknown
  misc_feature (1)..( 9): Result.001 file - promoters70/5665404
ttcgtccaa

SEQ ID NO: 88292 - DNA, 7 bp, Unknown
  misc_feature (1)..( 7): Result.001 file - promoters70/5665404
ttgcttt

SEQ ID NO: 88293 - DNA, 7 bp, Unknown
  misc_feature (1)..( 7): Result.001 file - promoters70/5665404
atgcttt

SEQ ID NO: 88294 - DNA, 7 bp, Unknown
  misc_feature (1)..( 7): Result.001 file - promoters70/5665404
ttgtttt

SEQ ID NO: 88295 - DNA, 10 bp, Unknown
  misc_feature (1)..( 10): Result.001 file - promoters70/5665404
ttttaaaatt

SEQ ID NO: 88296 - DNA, 10 bp, Unknown
  misc_feature (1)..( 10): Result.001 file - promoters70/5665404
aaataaaata

SEQ ID NO: 88297 - DNA, 10 bp, Unknown
  misc_feature (1)..( 10): Result.001 file - promoters70/5665507
aaatgaaata

SEQ ID NO: 88298 - DNA, 10 bp, Unknown
  misc_feature (1)..( 10): Result.001 file - promoters70/5665507
atttttcttt

SEQ ID NO: 88299 - DNA, 10 bp, Unknown
  misc_feature (1)..( 10): Result.001 file - promoters70/5665507
attttttttt

SEQ ID NO: 88300 - DNA, 10 bp, Unknown
  misc_feature (1)..( 10): Result.001 file - promoters70/5665507
ctttctctga

SEQ ID NO: 88301 - DNA, 7 bp, Unknown
  misc_feature (1)..( 7): Result.001 file - promoters70/5665507
atgtttg

SEQ ID NO: 88302 - DNA, 7 bp, Unknown
  misc_feature (1)..( 7): Result.001 file - promoters70/5665507
atgtttc

SEQ ID NO: 88303 - DNA, 7 bp, Unknown
  misc_feature (1)..( 7): Result.001 file - promoters70/5665507
atggttg

SEQ ID NO: 88304 - DNA, 7 bp, Unknown
  misc_feature (1)..( 7): Result.001 file - promoters70/5665507
aaaaatt

SEQ ID NO: 88305 - DNA, 7 bp, Unknown
  misc_feature (1)..( 7): Result.001 file - promoters70/5665507
gaaaatt

SEQ ID NO: 88306 - DNA, 8 bp, Unknown
  misc_feature (1)..( 8): Result.001 file - promoters70/5665507
aaaacatt

SEQ ID NO: 88307 - DNA, 7 bp, Unknown
  misc_feature (1)..( 7): Result.001 file - promoters70/5665507
aattttc

SEQ ID NO: 88308 - DNA, 7 bp, Unknown
  misc_feature (1)..( 7): Result.001 file - promoters70/5665507
tattttc

SEQ ID NO: 88309 - DNA, 7 bp, Unknown
  misc_feature (1)..( 7): Result.001 file - promoters70/5665507
tatttta

SEQ ID NO: 88310 - DNA, 8 bp, Unknown
  misc_feature (1)..( 8): Result.001 file - promoters70/5665507
tttcgtac

SEQ ID NO: 88311 - DNA, 8 bp, Unknown
  misc_feature (1)..( 8): Result.001 file - promoters70/5665507
ttttgtac

SEQ ID NO: 88312 - DNA, 8 bp, Unknown
  misc_feature (1)..( 8): Result.001 file - promoters70/5665507
ttttgttg

SEQ ID NO: 88313 - DNA, 7 bp, Unknown
  misc_feature (1)..( 7): Result.001 file - promoters70/5665507
aaatatt

SEQ ID NO: 88314 - DNA, 7 bp, Unknown
  misc_feature (1)..( 7): Result.001 file - promoters70/5665507
aaatatc

SEQ ID NO: 88315 - DNA, 7 bp, Unknown
  misc_feature (1)..( 7): Result.001 file - promoters70/5665507
caatatc

SEQ ID NO: 88316 - DNA, 8 bp, Unknown
  misc_feature (1)..( 8): Result.001 file - promoters70/5665507
tatatctt

SEQ ID NO: 88317 - DNA, 8 bp, Unknown
  misc_feature (1)..( 8): Result.001 file - promoters70/5665507
aatatctt

SEQ ID NO: 88318 - DNA, 8 bp, Unknown
  misc_feature (1)..( 8): Result.001 file - promoters70/5665796
aatatccc

SEQ ID NO: 88319 - DNA, 10 bp, Unknown
  misc_feature (1)..( 10): Result.001 file - promoters70/5665796
agcatccaca

SEQ ID NO: 88320 - DNA, 10 bp, Unknown
  misc_feature (1)..( 10): Result.001 file - promoters70/5665796
tttatccacc

SEQ ID NO: 88321 - DNA, 10 bp, Unknown
  misc_feature (1)..( 10): Result.001 file - promoters70/5665796
agcaaccaca

SEQ ID NO: 88322 - DNA, 10 bp, Unknown
  misc_feature (1)..( 10): Result.001 file - promoters70/5665796
acaatgtgaa

SEQ ID NO: 88323 - DNA, 10 bp, Unknown
  misc_feature (1)..( 10): Result.001 file - promoters70/5665796
aaaatgtgaa

SEQ ID NO: 88324 - DNA, 10 bp, Unknown
  misc_feature (1)..( 10): Result.001 file - promoters70/5667720
aaaatgttat

SEQ ID NO: 88325 - DNA, 7 bp, Unknown
  misc_feature (1)..( 7): Result.001 file - promoters70/5667720
aatgata

SEQ ID NO: 88326 - DNA, 7 bp, Unknown
  misc_feature (1)..( 7): Result.001 file - promoters70/5667720
aatcata

SEQ ID NO: 88327 - DNA, 7 bp, Unknown
  misc_feature (1)..( 7): Result.001 file - promoters70/5667720
aatgatg

SEQ ID NO: 88328 - DNA, 7 bp, Unknown
  misc_feature (1)..( 7): Result.001 file - promoters70/5667720
aaaaatt

SEQ ID NO: 88329 - DNA, 7 bp, Unknown
  misc_feature (1)..( 7): Result.001 file - promoters70/5667720
aaacatt

SEQ ID NO: 88330 - DNA, 7 bp, Unknown
  misc_feature (1)..( 7): Result.001 file - promoters70/5667720
aaaaaag

SEQ ID NO: 88331 - DNA, 9 bp, Unknown
  misc_feature (1)..( 9): Result.001 file - promoters70/5667720
aaacaaaaa

SEQ ID NO: 88332 - DNA, 9 bp, Unknown
  misc_feature (1)..( 9): Result.001 file - promoters70/5667720
aaagaaata

SEQ ID NO: 88333 - DNA, 9 bp, Unknown
  misc_feature (1)..( 9): Result.001 file - promoters70/5667720
taagaaata

SEQ ID NO: 88334 - DNA, 9 bp, Unknown
  misc_feature (1)..( 9): Result.001 file - promoters70/5667720
ggaacaaat

SEQ ID NO: 88335 - DNA, 9 bp, Unknown
  misc_feature (1)..( 9): Result.001 file - promoters70/5667720
aaaacaaat

SEQ ID NO: 88336 - DNA, 9 bp, Unknown
  misc_feature (1)..( 9): Result.001 file - promoters70/5667720
aaaacaaga

SEQ ID NO: 88337 - DNA, 9 bp, Unknown
  misc_feature (1)..( 9): Result.001 file - promoters70/5667720
taaccaaaa

SEQ ID NO: 88338 - DNA, 9 bp, Unknown
  misc_feature (1)..( 9): Result.001 file - promoters70/5667720
taaccaaaa

SEQ ID NO: 88339 - DNA, 9 bp, Unknown
  misc_feature (1)..( 9): Result.001 file - promoters70/5667720
aaactaaac

SEQ ID NO: 88340 - DNA, 12 bp, Unknown
  misc_feature (1)..( 12): Result.001 file - promoters70/5667720
aaaataaaataa

SEQ ID NO: 88341 - DNA, 12 bp, Unknown
  misc_feature (1)..( 12): Result.001 file - promoters70/5667720
aaaataatagta

SEQ ID NO: 88342 - DNA, 12 bp, Unknown
  misc_feature (1)..( 12): Result.001 file - promoters70/5667737
aaaataaactaa

SEQ ID NO: 88343 - DNA, 8 bp, Unknown
  misc_feature (1)..( 8): Result.001 file - promoters70/5667737
ctacaaca

SEQ ID NO: 88344 - DNA, 8 bp, Unknown
  misc_feature (1)..( 8): Result.001 file - promoters70/5667737
ctacaaag

SEQ ID NO: 88345 - DNA, 8 bp, Unknown
  misc_feature (1)..( 8): Result.001 file - promoters70/5667737
ctagaaat

SEQ ID NO: 88346 - DNA, 8 bp, Unknown
  misc_feature (1)..( 8): Result.001 file - promoters70/5667737
ctaaaaag

SEQ ID NO: 88347 - DNA, 14 bp, Unknown
  misc_feature (1)..( 14): Result.001 file - promoters70/5667737
caacaaaaaccaaa

SEQ ID NO: 88348 - DNA, 14 bp, Unknown
  misc_feature (1)..( 14): Result.001 file - promoters70/5667737
ctacaaagaccaaa

SEQ ID NO: 88349 - DNA, 14 bp, Unknown
  misc_feature (1)..( 14): Result.001 file - promoters70/5667737
ctagaaattctatt

SEQ ID NO: 88350 - DNA, 14 bp, Unknown
  misc_feature (1)..( 14): Result.001 file - promoters70/5667812
ctaaaaagtatttt

SEQ ID NO: 88351 - DNA, 15 bp, Unknown
  misc_feature (1)..( 15): Result.001 file - promoters70/5667812
gattgttttttttcc

SEQ ID NO: 88352 - DNA, 15 bp, Unknown
  misc_feature (1)..( 15): Result.001 file - promoters70/5667812
aaaagtttttgtaat

SEQ ID NO: 88353 - DNA, 15 bp, Unknown
  misc_feature (1)..( 15): Result.001 file - promoters70/5667812
tagggttttttcttg

SEQ ID NO: 88354 - DNA, 15 bp, Unknown
  misc_feature (1)..( 15): Result.001 file - promoters70/5667812
ggatgtttttgttaa

SEQ ID NO: 88355 - DNA, 15 bp, Unknown
  misc_feature (1)..( 15): Result.001 file - promoters70/5667812
caaacttttattttt

SEQ ID NO: 88356 - DNA, 15 bp, Unknown
  misc_feature (1)..( 15): Result.001 file - promoters70/5667812
gaaaggtttcttctc

SEQ ID NO: 88357 - DNA, 15 bp, Unknown
  misc_feature (1)..( 15): Result.001 file - promoters70/5667812
caaatttttactttt

SEQ ID NO: 88358 - DNA, 10 bp, Unknown
  misc_feature (1)..( 10): Result.001 file - promoters70/5667812
aaaggaattc

SEQ ID NO: 88359 - DNA, 10 bp, Unknown
  misc_feature (1)..( 10): Result.001 file - promoters70/5667812
aaagaaattc

SEQ ID NO: 88360 - DNA, 10 bp, Unknown
  misc_feature (1)..( 10): Result.001 file - promoters70/5667812
aaagaaaatc

SEQ ID NO: 88361 - DNA, 10 bp, Unknown
  misc_feature (1)..( 10): Result.001 file - promoters70/5667812
taagaaaaaa

SEQ ID NO: 88362 - DNA, 10 bp, Unknown
  misc_feature (1)..( 10): Result.001 file - promoters70/5667812
gaagaaacaa

SEQ ID NO: 88363 - DNA, 10 bp, Unknown
  misc_feature (1)..( 10): Result.001 file - promoters70/5667812
gtttaaattc

SEQ ID NO: 88364 - DNA, 9 bp, Unknown
  misc_feature (1)..( 9): Result.001 file - promoters70/5667812
gaaagaaaa

SEQ ID NO: 88365 - DNA, 9 bp, Unknown
  misc_feature (1)..( 9): Result.001 file - promoters70/5667812
gtaagaaaa

SEQ ID NO: 88366 - DNA, 9 bp, Unknown
  misc_feature (1)..( 9): Result.001 file - promoters70/5667812
gaaacaaag

SEQ ID NO: 88367 - DNA, 9 bp, Unknown
  misc_feature (1)..( 9): Result.001 file - promoters70/5667812
caaagaaat

SEQ ID NO: 88368 - DNA, 9 bp, Unknown
  misc_feature (1)..( 9): Result.001 file - promoters70/5667812
aaaaccaag

SEQ ID NO: 88369 - DNA, 9 bp, Unknown
  misc_feature (1)..( 9): Result.001 file - promoters70/5667812
cgaaccaat

SEQ ID NO: 88370 - DNA, 14 bp, Unknown
  misc_feature (1)..( 14): Result.001 file - promoters70/5667812
acaagtagaagaaa

SEQ ID NO: 88371 - DNA, 14 bp, Unknown
  misc_feature (1)..( 14): Result.001 file - promoters70/5667812
ccaagaagaaaaaa

SEQ ID NO: 88372 - DNA, 14 bp, Unknown
  misc_feature (1)..( 14): Result.001 file - promoters70/5667812
acaagtcttcttct

SEQ ID NO: 88373 - DNA, 14 bp, Unknown
  misc_feature (1)..( 14): Result.001 file - promoters70/5667812
gtaaataattaatc

SEQ ID NO: 88374 - DNA, 14 bp, Unknown
  misc_feature (1)..( 14): Result.001 file - promoters70/5667812
cctgatacttaaca

SEQ ID NO: 88375 - DNA, 14 bp, Unknown
  misc_feature (1)..( 14): Result.001 file - promoters70/5667822
aaaaatacttacaa

SEQ ID NO: 88376 - DNA, 8 bp, Unknown
  misc_feature (1)..( 8): Result.001 file - promoters70/5667822
tttaccag

SEQ ID NO: 88377 - DNA, 8 bp, Unknown
  misc_feature (1)..( 8): Result.001 file - promoters70/5667822
tttgccag

SEQ ID NO: 88378 - DNA, 8 bp, Unknown
  misc_feature (1)..( 8): Result.001 file - promoters70/5667822
tttgtacg

SEQ ID NO: 88379 - DNA, 10 bp, Unknown
  misc_feature (1)..( 10): Result.001 file - promoters70/5667822
ggaaaaaaat

SEQ ID NO: 88380 - DNA, 10 bp, Unknown
  misc_feature (1)..( 10): Result.001 file - promoters70/5667822
tataaaaaat

SEQ ID NO: 88381 - DNA, 10 bp, Unknown
  misc_feature (1)..( 10): Result.001 file - promoters70/5667822
tatacaaaag

SEQ ID NO: 88382 - DNA, 7 bp, Unknown
  misc_feature (1)..( 7): Result.001 file - promoters70/5667822
cataaaa

SEQ ID NO: 88383 - DNA, 7 bp, Unknown
  misc_feature (1)..( 7): Result.001 file - promoters70/5667822
tataaaa

SEQ ID NO: 88384 - DNA, 7 bp, Unknown
  misc_feature (1)..( 7): Result.001 file - promoters70/5667849
tatcaaa

SEQ ID NO: 88385 - DNA, 9 bp, Unknown
  misc_feature (1)..( 9): Result.001 file - promoters70/5667849
gtgaaggat

SEQ ID NO: 88386 - DNA, 9 bp, Unknown
  misc_feature (1)..( 9): Result.001 file - promoters70/5667849
gtgaatgat

SEQ ID NO: 88387 - DNA, 9 bp, Unknown
  misc_feature (1)..( 9): Result.001 file - promoters70/5667849
gtgaatgat

SEQ ID NO: 88388 - DNA, 8 bp, Unknown
  misc_feature (1)..( 8): Result.001 file - promoters70/5667849
cattgtgt

SEQ ID NO: 88389 - DNA, 8 bp, Unknown
  misc_feature (1)..( 8): Result.001 file - promoters70/5667849
cattttgt

SEQ ID NO: 88390 - DNA, 8 bp, Unknown
  misc_feature (1)..( 8): Result.001 file - promoters70/5668294
cattttgt

SEQ ID NO: 88391 - DNA, 8 bp, Unknown
  misc_feature (1)..( 8): Result.001 file - promoters70/5668294
attctttt

SEQ ID NO: 88392 - DNA, 8 bp, Unknown
  misc_feature (1)..( 8): Result.001 file - promoters70/5668294
tttctttc

SEQ ID NO: 88393 - DNA, 8 bp, Unknown
  misc_feature (1)..( 8): Result.001 file - promoters70/5668294
attatttt

SEQ ID NO: 88394 - DNA, 9 bp, Unknown
  misc_feature (1)..( 9): Result.001 file - promoters70/5668294
attaatttt

SEQ ID NO: 88395 - DNA, 9 bp, Unknown
  misc_feature (1)..( 9): Result.001 file - promoters70/5668359
ttgaatttt

SEQ ID NO: 88396 - DNA, 8 bp, Unknown
  misc_feature (1)..( 8): Result.001 file - promoters70/5668359
atggatgt

SEQ ID NO: 88397 - DNA, 8 bp, Unknown
  misc_feature (1)..( 8): Result.001 file - promoters70/5668359
atggattt

SEQ ID NO: 88398 - DNA, 8 bp, Unknown
  misc_feature (1)..( 8): Result.001 file - promoters70/5668435
ttggattt

SEQ ID NO: 88399 - DNA, 12 bp, Unknown
  misc_feature (1)..( 12): Result.001 file - promoters70/5668435
ggtgataaatat

SEQ ID NO: 88400 - DNA, 12 bp, Unknown
  misc_feature (1)..( 12): Result.001 file - promoters70/5668435
tataaaaaatat

SEQ ID NO: 88401 - DNA, 13 bp, Unknown
  misc_feature (1)..( 13): Result.001 file - promoters70/5668435
aaacaaaacatat

SEQ ID NO: 88402 - DNA, 13 bp, Unknown
  misc_feature (1)..( 13): Result.001 file - promoters70/5668435
agatacaaaaccc

SEQ ID NO: 88403 - DNA, 13 bp, Unknown
  misc_feature (1)..( 13): Result.001 file - promoters70/5668435
ctatataaaacca

SEQ ID NO: 88404 - DNA, 13 bp, Unknown
  misc_feature (1)..( 13): Result.001 file - promoters70/5668435
agagacaaataga

SEQ ID NO: 88405 - DNA, 12 bp, Unknown
  misc_feature (1)..( 12): Result.001 file - promoters70/5668435
attgttacaaat

SEQ ID NO: 88406 - DNA, 12 bp, Unknown
  misc_feature (1)..( 12): Result.001 file - promoters70/5668435
tttgttagttca

SEQ ID NO: 88407 - DNA, 12 bp, Unknown
  misc_feature (1)..( 12): Result.001 file - promoters70/5668435
atttttactttt

SEQ ID NO: 88408 - DNA, 12 bp, Unknown
  misc_feature (1)..( 12): Result.001 file - promoters70/5668435
gactttagtttt

SEQ ID NO: 88409 - DNA, 12 bp, Unknown
  misc_feature (1)..( 12): Result.001 file - promoters70/5668435
tttgttctatat

SEQ ID NO: 88410 - DNA, 12 bp, Unknown
  misc_feature (1)..( 12): Result.001 file - promoters70/5668435
ctttttgtatca

SEQ ID NO: 88411 - DNA, 11 bp, Unknown
  misc_feature (1)..( 11): Result.001 file - promoters70/5668435
acatataaaat

SEQ ID NO: 88412 - DNA, 11 bp, Unknown
  misc_feature (1)..( 11): Result.001 file - promoters70/5668435
ctataaaaaat

SEQ ID NO: 88413 - DNA, 11 bp, Unknown
  misc_feature (1)..( 11): Result.001 file - promoters70/5668435
gaataaaaaca

SEQ ID NO: 88414 - DNA, 11 bp, Unknown
  misc_feature (1)..( 11): Result.001 file - promoters70/5668435
taagaaaaaaa

SEQ ID NO: 88415 - DNA, 11 bp, Unknown
  misc_feature (1)..( 11): Result.001 file - promoters70/5668435
ctatataaaac

SEQ ID NO: 88416 - DNA, 11 bp, Unknown
  misc_feature (1)..( 11): Result.001 file - promoters70/5668435
atagaagaaac

SEQ ID NO: 88417 - DNA, 12 bp, Unknown
  misc_feature (1)..( 12): Result.001 file - promoters70/5668435
cactatataaag

SEQ ID NO: 88418 - DNA, 12 bp, Unknown
  misc_feature (1)..( 12): Result.001 file - promoters70/5668435
tgtcttataaat

SEQ ID NO: 88419 - DNA, 12 bp, Unknown
  misc_feature (1)..( 12): Result.001 file - promoters70/5668435
cactatttaaag

SEQ ID NO: 88420 - DNA, 12 bp, Unknown
  misc_feature (1)..( 12): Result.001 file - promoters70/5668435
tactattaaagc

SEQ ID NO: 88421 - DNA, 12 bp, Unknown
  misc_feature (1)..( 12): Result.001 file - promoters70/5668435
tttaattaaaac

SEQ ID NO: 88422 - DNA, 12 bp, Unknown
  misc_feature (1)..( 12): Result.001 file - promoters70/5668454
gcttatttatga

SEQ ID NO: 88423 - DNA, 9 bp, Unknown
  misc_feature (1)..( 9): Result.001 file - promoters70/5668454
tcttaatta

SEQ ID NO: 88424 - DNA, 9 bp, Unknown
  misc_feature (1)..( 9): Result.001 file - promoters70/5668454
tcttaatct

SEQ ID NO: 88425 - DNA, 9 bp, Unknown
  misc_feature (1)..( 9): Result.001 file - promoters70/5668454
atttattta

SEQ ID NO: 88426 - DNA, 6 bp, Unknown
  misc_feature (1)..( 6): Result.001 file - promoters70/5668454
tctaaa

SEQ ID NO: 88427 - DNA, 6 bp, Unknown
  misc_feature (1)..( 6): Result.001 file - promoters70/5668454
tctaaa

SEQ ID NO: 88428 - DNA, 6 bp, Unknown
  misc_feature (1)..( 6): Result.001 file - promoters70/5668454
tctaaa

SEQ ID NO: 88429 - DNA, 8 bp, Unknown
  misc_feature (1)..( 8): Result.001 file - promoters70/5668454
aaaaataa

SEQ ID NO: 88430 - DNA, 8 bp, Unknown
  misc_feature (1)..( 8): Result.001 file - promoters70/5668454
aaaaattc

SEQ ID NO: 88431 - DNA, 8 bp, Unknown
  misc_feature (1)..( 8): Result.001 file - promoters70/5668469
taaaataa

SEQ ID NO: 88432 - DNA, 8 bp, Unknown
  misc_feature (1)..( 8): Result.001 file - promoters70/5668469
ataaaata

SEQ ID NO: 88433 - DNA, 8 bp, Unknown
  misc_feature (1)..( 8): Result.001 file - promoters70/5668469
atacaatt

SEQ ID NO: 88434 - DNA, 8 bp, Unknown
  misc_feature (1)..( 8): Result.001 file - promoters70/5668469
gtaaaata

SEQ ID NO: 88435 - DNA, 7 bp, Unknown
  misc_feature (1)..( 7): Result.001 file - promoters70/5668469
tttctta

SEQ ID NO: 88436 - DNA, 7 bp, Unknown
  misc_feature (1)..( 7): Result.001 file - promoters70/5668469
tttgtta

SEQ ID NO: 88437 - DNA, 7 bp, Unknown
  misc_feature (1)..( 7): Result.001 file - promoters70/5668493
tttatta

SEQ ID NO: 88438 - DNA, 9 bp, Unknown
  misc_feature (1)..( 9): Result.001 file - promoters70/5668493
aatcaatca

SEQ ID NO: 88439 - DNA, 9 bp, Unknown
  misc_feature (1)..( 9): Result.001 file - promoters70/5668493
aataaatgt

SEQ ID NO: 88440 - DNA, 9 bp, Unknown
  misc_feature (1)..( 9): Result.001 file - promoters70/5668493
catcaattt

SEQ ID NO: 88441 - DNA, 9 bp, Unknown
  misc_feature (1)..( 9): Result.001 file - promoters70/5668493
attaaatgt

SEQ ID NO: 88442 - DNA, 9 bp, Unknown
  misc_feature (1)..( 9): Result.001 file - promoters70/5668493
gtttgttta

SEQ ID NO: 88443 - DNA, 9 bp, Unknown
  misc_feature (1)..( 9): Result.001 file - promoters70/5668493
ttttatttg

SEQ ID NO: 88444 - DNA, 9 bp, Unknown
  misc_feature (1)..( 9): Result.001 file - promoters70/5668493
gtttgatta

SEQ ID NO: 88445 - DNA, 9 bp, Unknown
  misc_feature (1)..( 9): Result.001 file - promoters70/5668493
atttattta

SEQ ID NO: 88446 - DNA, 9 bp, Unknown
  misc_feature (1)..( 9): Result.001 file - promoters70/5668493
tacaataaa

SEQ ID NO: 88447 - DNA, 9 bp, Unknown
  misc_feature (1)..( 9): Result.001 file - promoters70/5668493
tacaatatt

SEQ ID NO: 88448 - DNA, 9 bp, Unknown
  misc_feature (1)..( 9): Result.001 file - promoters70/5668493
ttcaaaatt

SEQ ID NO: 88449 - DNA, 9 bp, Unknown
  misc_feature (1)..( 9): Result.001 file - promoters70/5668509
atcaatatg

SEQ ID NO: 88450 - DNA, 10 bp, Unknown
  misc_feature (1)..( 10): Result.001 file - promoters70/5668509
ttaaaaaaag

SEQ ID NO: 88451 - DNA, 10 bp, Unknown
  misc_feature (1)..( 10): Result.001 file - promoters70/5668509
ttaagaaaag

SEQ ID NO: 88452 - DNA, 10 bp, Unknown
  misc_feature (1)..( 10): Result.001 file - promoters70/5668509
agtagagaag

SEQ ID NO: 88453 - DNA, 8 bp, Unknown
  misc_feature (1)..( 8): Result.001 file - promoters70/5668509
ccacaaac

SEQ ID NO: 88454 - DNA, 8 bp, Unknown
  misc_feature (1)..( 8): Result.001 file - promoters70/5668509
ccaaaaaa

SEQ ID NO: 88455 - DNA, 9 bp, Unknown
  misc_feature (1)..( 9): Result.001 file - promoters70/5668509
gaaaataag

SEQ ID NO: 88456 - DNA, 7 bp, Unknown
  misc_feature (1)..( 7): Result.001 file - promoters70/5668509
agaagaa

SEQ ID NO: 88457 - DNA, 7 bp, Unknown
  misc_feature (1)..( 7): Result.001 file - promoters70/5668509
agaagat

SEQ ID NO: 88458 - DNA, 7 bp, Unknown
  misc_feature (1)..( 7): Result.001 file - promoters70/5668509
agaaaag

SEQ ID NO: 88459 - DNA, 7 bp, Unknown
  misc_feature (1)..( 7): Result.001 file - promoters70/5668509
agaggag

SEQ ID NO: 88460 - DNA, 7 bp, Unknown
  misc_feature (1)..( 7): Result.001 file - promoters70/5668509
tgaggag

SEQ ID NO: 88461 - DNA, 7 bp, Unknown
  misc_feature (1)..( 7): Result.001 file - promoters70/5668529
agaggat

SEQ ID NO: 88462 - DNA, 7 bp, Unknown
  misc_feature (1)..( 7): Result.001 file - promoters70/5668529
gttgact

SEQ ID NO: 88463 - DNA, 7 bp, Unknown
  misc_feature (1)..( 7): Result.001 file - promoters70/5668529
gttgact

SEQ ID NO: 88464 - DNA, 7 bp, Unknown
  misc_feature (1)..( 7): Result.001 file - promoters70/5668547
attgact

SEQ ID NO: 88465 - DNA, 7 bp, Unknown
  misc_feature (1)..( 7): Result.001 file - promoters70/5668547
gctaaaa

SEQ ID NO: 88466 - DNA, 7 bp, Unknown
  misc_feature (1)..( 7): Result.001 file - promoters70/5668547
gctgaaa

SEQ ID NO: 88467 - DNA, 7 bp, Unknown
  misc_feature (1)..( 7): Result.001 file - promoters70/5668720
tctgaaa

SEQ ID NO: 88468 - DNA, 11 bp, Unknown
  misc_feature (1)..( 11): Result.001 file - promoters70/5668720
acagacaccaa

SEQ ID NO: 88469 - DNA, 11 bp, Unknown
  misc_feature (1)..( 11): Result.001 file - promoters70/5668720
aaagaaacctg

SEQ ID NO: 88470 - DNA, 11 bp, Unknown
  misc_feature (1)..( 11): Result.001 file - promoters70/5668720
taagaaaaaaa

SEQ ID NO: 88471 - DNA, 11 bp, Unknown
  misc_feature (1)..( 11): Result.001 file - promoters70/5668720
gaagaaacaaa

SEQ ID NO: 88472 - DNA, 11 bp, Unknown
  misc_feature (1)..( 11): Result.001 file - promoters70/5668720
taagataaaat

SEQ ID NO: 88473 - DNA, 11 bp, Unknown
  misc_feature (1)..( 11): Result.001 file - promoters70/5668720
gatgaaatatt

SEQ ID NO: 88474 - DNA, 9 bp, Unknown
  misc_feature (1)..( 9): Result.001 file - promoters70/5668720
gcaaagttg

SEQ ID NO: 88475 - DNA, 9 bp, Unknown
  misc_feature (1)..( 9): Result.001 file - promoters70/5668720
aaaaagttt

SEQ ID NO: 88476 - DNA, 10 bp, Unknown
  misc_feature (1)..( 10): Result.001 file - promoters70/5668720
aaaatagttt

SEQ ID NO: 88477 - DNA, 10 bp, Unknown
  misc_feature (1)..( 10): Result.001 file - promoters70/5668720
aaaaaagtgt

SEQ ID NO: 88478 - DNA, 10 bp, Unknown
  misc_feature (1)..( 10): Result.001 file - promoters70/5668720
tgaaatgttt

SEQ ID NO: 88479 - DNA, 10 bp, Unknown
  misc_feature (1)..( 10): Result.001 file - promoters70/5668720
acaaattttt

SEQ ID NO: 88480 - DNA, 13 bp, Unknown
  misc_feature (1)..( 13): Result.001 file - promoters70/5668720
acttttgtttttg

SEQ ID NO: 88481 - DNA, 13 bp, Unknown
  misc_feature (1)..( 13): Result.001 file - promoters70/5668720
acttttttttttt

SEQ ID NO: 88482 - DNA, 13 bp, Unknown
  misc_feature (1)..( 13): Result.001 file - promoters70/5668720
gtttttgtctatc

SEQ ID NO: 88483 - DNA, 13 bp, Unknown
  misc_feature (1)..( 13): Result.001 file - promoters70/5668720
gaaattgtttcga

SEQ ID NO: 88484 - DNA, 13 bp, Unknown
  misc_feature (1)..( 13): Result.001 file - promoters70/5668720
ttccatgtttttg

SEQ ID NO: 88485 - DNA, 13 bp, Unknown
  misc_feature (1)..( 13): Result.001 file - promoters70/5668897
tgatttgtatttg

SEQ ID NO: 88486 - DNA, 9 bp, Unknown
  misc_feature (1)..( 9): Result.001 file - promoters70/5668897
ctgtgtttt

SEQ ID NO: 88487 - DNA, 9 bp, Unknown
  misc_feature (1)..( 9): Result.001 file - promoters70/5668897
atgtttttt

SEQ ID NO: 88488 - DNA, 9 bp, Unknown
  misc_feature (1)..( 9): Result.001 file - promoters70/5668903
atgttttag

SEQ ID NO: 88489 - DNA, 8 bp, Unknown
  misc_feature (1)..( 8): Result.001 file - promoters70/5668903
agacttta

SEQ ID NO: 88490 - DNA, 8 bp, Unknown
  misc_feature (1)..( 8): Result.001 file - promoters70/5668903
agaatttg

SEQ ID NO: 88491 - DNA, 8 bp, Unknown
  misc_feature (1)..( 8): Result.001 file - promoters70/5668903
cgaatttg

SEQ ID NO: 88492 - DNA, 9 bp, Unknown
  misc_feature (1)..( 9): Result.001 file - promoters70/5668903
tttaatttg

SEQ ID NO: 88493 - DNA, 9 bp, Unknown
  misc_feature (1)..( 9): Result.001 file - promoters70/5668903
tttgattgt

SEQ ID NO: 88494 - DNA, 9 bp, Unknown
  misc_feature (1)..( 9): Result.001 file - promoters70/5668926
tttcatttg

SEQ ID NO: 88495 - DNA, 8 bp, Unknown
  misc_feature (1)..( 8): Result.001 file - promoters70/5668926
catttaaa

SEQ ID NO: 88496 - DNA, 8 bp, Unknown
  misc_feature (1)..( 8): Result.001 file - promoters70/5668926
gatttaat

SEQ ID NO: 88497 - DNA, 8 bp, Unknown
  misc_feature (1)..( 8): Result.001 file - promoters70/5668926
cattaaaa

SEQ ID NO: 88498 - DNA, 12 bp, Unknown
  misc_feature (1)..( 12): Result.001 file - promoters70/5668926
caaactgtgaaa

SEQ ID NO: 88499 - DNA, 12 bp, Unknown
  misc_feature (1)..( 12): Result.001 file - promoters70/5668926
aaaaatgtgaaa

SEQ ID NO: 88500 - DNA, 12 bp, Unknown
  misc_feature (1)..( 12): Result.001 file - promoters70/5668926
aaaaataatttt

SEQ ID NO: 88501 - DNA, 11 bp, Unknown
  misc_feature (1)..( 11): Result.001 file - promoters70/5668926
ccaaatttggt

SEQ ID NO: 88502 - DNA, 11 bp, Unknown
  misc_feature (1)..( 11): Result.001 file - promoters70/5668926
ccaattttaag

SEQ ID NO: 88503 - DNA, 11 bp, Unknown
  misc_feature (1)..( 11): Result.001 file - promoters70/5668974
attattctaag

SEQ ID NO: 88504 - DNA, 8 bp, Unknown
  misc_feature (1)..( 8): Result.001 file - promoters70/5668974
aaaactaa

SEQ ID NO: 88505 - DNA, 8 bp, Unknown
  misc_feature (1)..( 8): Result.001 file - promoters70/5668974
aaaattaa

SEQ ID NO: 88506 - DNA, 9 bp, Unknown
  misc_feature (1)..( 9): Result.001 file - promoters70/5668974
aaaacctac

SEQ ID NO: 88507 - DNA, 10 bp, Unknown
  misc_feature (1)..( 10): Result.001 file - promoters70/5668974
caatattttg

SEQ ID NO: 88508 - DNA, 10 bp, Unknown
  misc_feature (1)..( 10): Result.001 file - promoters70/5668974
caattttttt

SEQ ID NO: 88509 - DNA, 10 bp, Unknown
  misc_feature (1)..( 10): Result.001 file - promoters70/5668974
tgtttttttt

SEQ ID NO: 88510 - DNA, 9 bp, Unknown
  misc_feature (1)..( 9): Result.001 file - promoters70/5668974
gatatatta

SEQ ID NO: 88511 - DNA, 9 bp, Unknown
  misc_feature (1)..( 9): Result.001 file - promoters70/5668974
aatatttta

SEQ ID NO: 88512 - DNA, 9 bp, Unknown
  misc_feature (1)..( 9): Result.001 file - promoters70/5668974
aatattttc

SEQ ID NO: 88513 - DNA, 11 bp, Unknown
  misc_feature (1)..( 11): Result.001 file - promoters70/5668974
aactaaaccag

SEQ ID NO: 88514 - DNA, 11 bp, Unknown
  misc_feature (1)..( 11): Result.001 file - promoters70/5668974
cactaaaacag

SEQ ID NO: 88515 - DNA, 11 bp, Unknown
  misc_feature (1)..( 11): Result.001 file - promoters70/5668990
cacaaaaaaga

SEQ ID NO: 88516 - DNA, 8 bp, Unknown
  misc_feature (1)..( 8): Result.001 file - promoters70/5668990
cgtagtat

SEQ ID NO: 88517 - DNA, 8 bp, Unknown
  misc_feature (1)..( 8): Result.001 file - promoters70/5668990
tgtagtat

SEQ ID NO: 88518 - DNA, 8 bp, Unknown
  misc_feature (1)..( 8): Result.001 file - promoters70/5669025
cgtggtag

SEQ ID NO: 88519 - DNA, 8 bp, Unknown
  misc_feature (1)..( 8): Result.001 file - promoters70/5669025
taagttta

SEQ ID NO: 88520 - DNA, 8 bp, Unknown
  misc_feature (1)..( 8): Result.001 file - promoters70/5669025
gaagtttc

SEQ ID NO: 88521 - DNA, 8 bp, Unknown
  misc_feature (1)..( 8): Result.001 file - promoters70/5669025
taatttta

SEQ ID NO: 88522 - DNA, 8 bp, Unknown
  misc_feature (1)..( 8): Result.001 file - promoters70/5669025
atagttta

SEQ ID NO: 88523 - DNA, 8 bp, Unknown
  misc_feature (1)..( 8): Result.001 file - promoters70/5669025
aaaggttc

SEQ ID NO: 88524 - DNA, 8 bp, Unknown
  misc_feature (1)..( 8): Result.001 file - promoters70/5669025
atattttt

SEQ ID NO: 88525 - DNA, 16 bp, Unknown
  misc_feature (1)..( 16): Result.001 file - promoters70/5669025
gtacataaaacaaaaa

SEQ ID NO: 88526 - DNA, 16 bp, Unknown
  misc_feature (1)..( 16): Result.001 file - promoters70/5669025
ttacaaaaaaaaaaaa

SEQ ID NO: 88527 - DNA, 16 bp, Unknown
  misc_feature (1)..( 16): Result.001 file - promoters70/5669025
atcacaagaactaaac

SEQ ID NO: 88528 - DNA, 16 bp, Unknown
  misc_feature (1)..( 16): Result.001 file - promoters70/5669025
aatggtaacacacaag

SEQ ID NO: 88529 - DNA, 16 bp, Unknown
  misc_feature (1)..( 16): Result.001 file - promoters70/5669025
tgacataaagatgaca

SEQ ID NO: 88530 - DNA, 16 bp, Unknown
  misc_feature (1)..( 16): Result.001 file - promoters70/5669025
ttactaaaagttttac

SEQ ID NO: 88531 - DNA, 16 bp, Unknown
  misc_feature (1)..( 16): Result.001 file - promoters70/5669250
ttactaaggtgtgttt

SEQ ID NO: 88532 - DNA, 12 bp, Unknown
  misc_feature (1)..( 12): Result.001 file - promoters70/5669250
aaataaatatct

SEQ ID NO: 88533 - DNA, 12 bp, Unknown
  misc_feature (1)..( 12): Result.001 file - promoters70/5669250
aaaaaaattcca

SEQ ID NO: 88534 - DNA, 12 bp, Unknown
  misc_feature (1)..( 12): Result.001 file - promoters70/5669250
aattaaattaat

SEQ ID NO: 88535 - DNA, 11 bp, Unknown
  misc_feature (1)..( 11): Result.001 file - promoters70/5669250
aaatatctata

SEQ ID NO: 88536 - DNA, 11 bp, Unknown
  misc_feature (1)..( 11): Result.001 file - promoters70/5669250
ccatagctaga

SEQ ID NO: 88537 - DNA, 11 bp, Unknown
  misc_feature (1)..( 11): Result.001 file - promoters70/5669250
aaatttctaga

SEQ ID NO: 88538 - DNA, 11 bp, Unknown
  misc_feature (1)..( 11): Result.001 file - promoters70/5669250
gattttataga

SEQ ID NO: 88539 - DNA, 9 bp, Unknown
  misc_feature (1)..( 9): Result.001 file - promoters70/5669250
aaggcccaa

SEQ ID NO: 88540 - DNA, 9 bp, Unknown
  misc_feature (1)..( 9): Result.001 file - promoters70/5669250
aaggcccaa

SEQ ID NO: 88541 - DNA, 9 bp, Unknown
  misc_feature (1)..( 9): Result.001 file - promoters70/5669250
tcggcccat

SEQ ID NO: 88542 - DNA, 8 bp, Unknown
  misc_feature (1)..( 8): Result.001 file - promoters70/5669250
agtataaa

SEQ ID NO: 88543 - DNA, 8 bp, Unknown
  misc_feature (1)..( 8): Result.001 file - promoters70/5669250
actataaa

SEQ ID NO: 88544 - DNA, 8 bp, Unknown
  misc_feature (1)..( 8): Result.001 file - promoters70/5669508
tatataaa

SEQ ID NO: 88545 - DNA, 8 bp, Unknown
  misc_feature (1)..( 8): Result.001 file - promoters70/5669508
gaaagaaa

SEQ ID NO: 88546 - DNA, 8 bp, Unknown
  misc_feature (1)..( 8): Result.001 file - promoters70/5669508
aaaacaaa

SEQ ID NO: 88547 - DNA, 8 bp, Unknown
  misc_feature (1)..( 8): Result.001 file - promoters70/5669508
gagagaga

SEQ ID NO: 88548 - DNA, 8 bp, Unknown
  misc_feature (1)..( 8): Result.001 file - promoters70/5669508
taaataaa

SEQ ID NO: 88549 - DNA, 8 bp, Unknown
  misc_feature (1)..( 8): Result.001 file - promoters70/5669508
ttaacaaa

SEQ ID NO: 88550 - DNA, 8 bp, Unknown
  misc_feature (1)..( 8): Result.001 file - promoters70/5669508
ctaacaac

SEQ ID NO: 88551 - DNA, 8 bp, Unknown
  misc_feature (1)..( 8): Result.001 file - promoters70/5669546
taaataat

SEQ ID NO: 88552 - DNA, 8 bp, Unknown
  misc_feature (1)..( 8): Result.001 file - promoters70/5669546
cgacatgt

SEQ ID NO: 88553 - DNA, 8 bp, Unknown
  misc_feature (1)..( 8): Result.001 file - promoters70/5669546
cgacatgt

SEQ ID NO: 88554 - DNA, 8 bp, Unknown
  misc_feature (1)..( 8): Result.001 file - promoters70/5670592
acacatgt

SEQ ID NO: 88555 - DNA, 11 bp, Unknown
  misc_feature (1)..( 11): Result.001 file - promoters70/5670592
tatacagactt

SEQ ID NO: 88556 - DNA, 11 bp, Unknown
  misc_feature (1)..( 11): Result.001 file - promoters70/5670592
aatacaaactt

SEQ ID NO: 88557 - DNA, 11 bp, Unknown
  misc_feature (1)..( 11): Result.001 file - promoters70/5670592
aatagagaact

SEQ ID NO: 88558 - DNA, 11 bp, Unknown
  misc_feature (1)..( 11): Result.001 file - promoters70/5670592
gttacaaatct

SEQ ID NO: 88559 - DNA, 11 bp, Unknown
  misc_feature (1)..( 11): Result.001 file - promoters70/5670592
tataaaaacac

SEQ ID NO: 88560 - DNA, 11 bp, Unknown
  misc_feature (1)..( 11): Result.001 file - promoters70/5670592
ctaccaaactg

SEQ ID NO: 88561 - DNA, 11 bp, Unknown
  misc_feature (1)..( 11): Result.001 file - promoters70/5670592
aatagtgaaat

SEQ ID NO: 88562 - DNA, 12 bp, Unknown
  misc_feature (1)..( 12): Result.001 file - promoters70/5670592
agaaatataaat

SEQ ID NO: 88563 - DNA, 12 bp, Unknown
  misc_feature (1)..( 12): Result.001 file - promoters70/5670592
ataaatatcttt

SEQ ID NO: 88564 - DNA, 12 bp, Unknown
  misc_feature (1)..( 12): Result.001 file - promoters70/5670592
agagatataaat

SEQ ID NO: 88565 - DNA, 12 bp, Unknown
  misc_feature (1)..( 12): Result.001 file - promoters70/5670592
tttgatatacag

SEQ ID NO: 88566 - DNA, 12 bp, Unknown
  misc_feature (1)..( 12): Result.001 file - promoters70/5670592
agacatatatac

SEQ ID NO: 88567 - DNA, 12 bp, Unknown
  misc_feature (1)..( 12): Result.001 file - promoters70/5670592
gctactataaat

SEQ ID NO: 88568 - DNA, 10 bp, Unknown
  misc_feature (1)..( 10): Result.001 file - promoters70/5670592
tgacaaaaac

SEQ ID NO: 88569 - DNA, 10 bp, Unknown
  misc_feature (1)..( 10): Result.001 file - promoters70/5670592
tgacataaag

SEQ ID NO: 88570 - DNA, 10 bp, Unknown
  misc_feature (1)..( 10): Result.001 file - promoters70/5670592
aaacataaca

SEQ ID NO: 88571 - DNA, 10 bp, Unknown
  misc_feature (1)..( 10): Result.001 file - promoters70/5670592
tcgaataaag

SEQ ID NO: 88572 - DNA, 10 bp, Unknown
  misc_feature (1)..( 10): Result.001 file - promoters70/5670592
atccatgaag

SEQ ID NO: 88573 - DNA, 10 bp, Unknown
  misc_feature (1)..( 10): Result.001 file - promoters70/5671204
atatatgaag

SEQ ID NO: 88574 - DNA, 11 bp, Unknown
  misc_feature (1)..( 11): Result.001 file - promoters70/5671204
gtatatatata

SEQ ID NO: 88575 - DNA, 11 bp, Unknown
  misc_feature (1)..( 11): Result.001 file - promoters70/5671204
atatttatata

SEQ ID NO: 88576 - DNA, 11 bp, Unknown
  misc_feature (1)..( 11): Result.001 file - promoters70/5671204
gaccctatata

SEQ ID NO: 88577 - DNA, 11 bp, Unknown
  misc_feature (1)..( 11): Result.001 file - promoters70/5671204
ctatttaaagc

SEQ ID NO: 88578 - DNA, 11 bp, Unknown
  misc_feature (1)..( 11): Result.001 file - promoters70/5671204
atatttgtatc

SEQ ID NO: 88579 - DNA, 11 bp, Unknown
  misc_feature (1)..( 11): Result.001 file - promoters70/5671204
taatataaagg

SEQ ID NO: 88580 - DNA, 11 bp, Unknown
  misc_feature (1)..( 11): Result.001 file - promoters70/5671204
ccatataaatt

SEQ ID NO: 88581 - DNA, 10 bp, Unknown
  misc_feature (1)..( 10): Result.001 file - promoters70/5671204
aaactaaaac

SEQ ID NO: 88582 - DNA, 10 bp, Unknown
  misc_feature (1)..( 10): Result.001 file - promoters70/5671204
gaacaaaaaa

SEQ ID NO: 88583 - DNA, 10 bp, Unknown
  misc_feature (1)..( 10): Result.001 file - promoters70/5671204
aaaccaaact

SEQ ID NO: 88584 - DNA, 10 bp, Unknown
  misc_feature (1)..( 10): Result.001 file - promoters70/5671204
tcactaaaaa

SEQ ID NO: 88585 - DNA, 10 bp, Unknown
  misc_feature (1)..( 10): Result.001 file - promoters70/5671204
tgaccaaaca

SEQ ID NO: 88586 - DNA, 10 bp, Unknown
  misc_feature (1)..( 10): Result.001 file - promoters70/5671204
acacacaaag

SEQ ID NO: 88587 - DNA, 9 bp, Unknown
  misc_feature (1)..( 9): Result.001 file - promoters70/5671318
tctcaaacc

SEQ ID NO: 88588 - DNA, 11 bp, Unknown
  misc_feature (1)..( 11): Result.001 file - promoters70/5671318
ttttaaattat

SEQ ID NO: 88589 - DNA, 11 bp, Unknown
  misc_feature (1)..( 11): Result.001 file - promoters70/5671318
ccttatatttc

SEQ ID NO: 88590 - DNA, 11 bp, Unknown
  misc_feature (1)..( 11): Result.001 file - promoters70/5671318
aattaaataaa

SEQ ID NO: 88591 - DNA, 11 bp, Unknown
  misc_feature (1)..( 11): Result.001 file - promoters70/5671318
ctttaaaatag

SEQ ID NO: 88592 - DNA, 11 bp, Unknown
  misc_feature (1)..( 11): Result.001 file - promoters70/5671318
ttataaaattg

SEQ ID NO: 88593 - DNA, 11 bp, Unknown
  misc_feature (1)..( 11): Result.001 file - promoters70/5671318
gactaaagaaa

SEQ ID NO: 88594 - DNA, 11 bp, Unknown
  misc_feature (1)..( 11): Result.001 file - promoters70/5671318
acggataattc

SEQ ID NO: 88595 - DNA, 11 bp, Unknown
  misc_feature (1)..( 11): Result.001 file - promoters70/5671318
acgtataattt

SEQ ID NO: 88596 - DNA, 11 bp, Unknown
  misc_feature (1)..( 11): Result.001 file - promoters70/5671318
ttggaaaattt

SEQ ID NO: 88597 - DNA, 11 bp, Unknown
  misc_feature (1)..( 11): Result.001 file - promoters70/5671318
ctgcatatttt

SEQ ID NO: 88598 - DNA, 11 bp, Unknown
  misc_feature (1)..( 11): Result.001 file - promoters70/5671318
caaaaaaattc

SEQ ID NO: 88599 - DNA, 11 bp, Unknown
  misc_feature (1)..( 11): Result.001 file - promoters70/5671318
aaacaaaaaat

SEQ ID NO: 88600 - DNA, 11 bp, Unknown
  misc_feature (1)..( 11): Result.001 file - promoters70/5671318
gaattaaaatc

SEQ ID NO: 88601 - DNA, 11 bp, Unknown
  misc_feature (1)..( 11): Result.001 file - promoters70/5671318
gagttataatg

SEQ ID NO: 88602 - DNA, 11 bp, Unknown
  misc_feature (1)..( 11): Result.001 file - promoters70/5671318
tgattaaattt

SEQ ID NO: 88603 - DNA, 11 bp, Unknown
  misc_feature (1)..( 11): Result.001 file - promoters70/5671318
ttgttacaatg

SEQ ID NO: 88604 - DNA, 11 bp, Unknown
  misc_feature (1)..( 11): Result.001 file - promoters70/5671318
tgattaatttc

SEQ ID NO: 88605 - DNA, 11 bp, Unknown
  misc_feature (1)..( 11): Result.001 file - promoters70/5671318
ttattaatacc

SEQ ID NO: 88606 - DNA, 11 bp, Unknown
  misc_feature (1)..( 11): Result.001 file - promoters70/5671318
aaaatttaaat

SEQ ID NO: 88607 - DNA, 11 bp, Unknown
  misc_feature (1)..( 11): Result.001 file - promoters70/5671318
ataatctaata

SEQ ID NO: 88608 - DNA, 11 bp, Unknown
  misc_feature (1)..( 11): Result.001 file - promoters70/5671318
ggaatttatgt

SEQ ID NO: 88609 - DNA, 11 bp, Unknown
  misc_feature (1)..( 11): Result.001 file - promoters70/5671318
cgaatttaata

SEQ ID NO: 88610 - DNA, 11 bp, Unknown
  misc_feature (1)..( 11): Result.001 file - promoters70/5671318
atagtcttaaa

SEQ ID NO: 88611 - DNA, 11 bp, Unknown
  misc_feature (1)..( 11): Result.001 file - promoters70/5671318
actatttgata

SEQ ID NO: 88612 - DNA, 11 bp, Unknown
  misc_feature (1)..( 11): Result.001 file - promoters70/5672093
ttcatttatcc

SEQ ID NO: 88613 - DNA, 10 bp, Unknown
  misc_feature (1)..( 10): Result.001 file - promoters70/5672093
ttttcttcac

SEQ ID NO: 88614 - DNA, 10 bp, Unknown
  misc_feature (1)..( 10): Result.001 file - promoters70/5672093
tttgcttctt

SEQ ID NO: 88615 - DNA, 10 bp, Unknown
  misc_feature (1)..( 10): Result.001 file - promoters70/5672093
tttgctgatg

SEQ ID NO: 88616 - DNA, 10 bp, Unknown
  misc_feature (1)..( 10): Result.001 file - promoters70/5672093
tttgatgatt

SEQ ID NO: 88617 - DNA, 10 bp, Unknown
  misc_feature (1)..( 10): Result.001 file - promoters70/5672842
atggattatt

SEQ ID NO: 88618 - DNA, 12 bp, Unknown
  misc_feature (1)..( 12): Result.001 file - promoters70/5672842
ctaaattacttt

SEQ ID NO: 88619 - DNA, 12 bp, Unknown
  misc_feature (1)..( 12): Result.001 file - promoters70/5672842
atcaaatacttt

SEQ ID NO: 88620 - DNA, 12 bp, Unknown
  misc_feature (1)..( 12): Result.001 file - promoters70/5672842
aaaaaaaacttt

SEQ ID NO: 88621 - DNA, 12 bp, Unknown
  misc_feature (1)..( 12): Result.001 file - promoters70/5672842
aaaagaaacgaa

SEQ ID NO: 88622 - DNA, 11 bp, Unknown
  misc_feature (1)..( 11): Result.001 file - promoters70/5672842
tttgccactct

SEQ ID NO: 88623 - DNA, 11 bp, Unknown
  misc_feature (1)..( 11): Result.001 file - promoters70/5672842
tttaccacacg

SEQ ID NO: 88624 - DNA, 11 bp, Unknown
  misc_feature (1)..( 11): Result.001 file - promoters70/5672842
attggcactct

SEQ ID NO: 88625 - DNA, 11 bp, Unknown
  misc_feature (1)..( 11): Result.001 file - promoters70/5672842
aactagtgacg

SEQ ID NO: 88626 - DNA, 11 bp, Unknown
  misc_feature (1)..( 11): Result.001 file - promoters70/5672842
gcctaatgaat

SEQ ID NO: 88627 - DNA, 11 bp, Unknown
  misc_feature (1)..( 11): Result.001 file - promoters70/5672842
gcccaataaat

SEQ ID NO: 88628 - DNA, 11 bp, Unknown
  misc_feature (1)..( 11): Result.001 file - promoters70/5673124
gcccaatttca

SEQ ID NO: 88629 - DNA, 10 bp, Unknown
  misc_feature (1)..( 10): Result.001 file - promoters70/5673124
ggtttatttt

SEQ ID NO: 88630 - DNA, 10 bp, Unknown
  misc_feature (1)..( 10): Result.001 file - promoters70/5673124
ggtttattca

SEQ ID NO: 88631 - DNA, 10 bp, Unknown
  misc_feature (1)..( 10): Result.001 file - promoters70/5674194
attttatttt

SEQ ID NO: 88632 - DNA, 12 bp, Unknown
  misc_feature (1)..( 12): Result.001 file - promoters70/5674194
taagtttaagtt

SEQ ID NO: 88633 - DNA, 12 bp, Unknown
  misc_feature (1)..( 12): Result.001 file - promoters70/5674194
gaagtttctggt

SEQ ID NO: 88634 - DNA, 12 bp, Unknown
  misc_feature (1)..( 12): Result.001 file - promoters70/5674194
aaagtttgatat

SEQ ID NO: 88635 - DNA, 12 bp, Unknown
  misc_feature (1)..( 12): Result.001 file - promoters70/5674194
taattttatata

SEQ ID NO: 88636 - DNA, 12 bp, Unknown
  misc_feature (1)..( 12): Result.001 file - promoters70/5674194
tctttttgatat

SEQ ID NO: 88637 - DNA, 12 bp, Unknown
  misc_feature (1)..( 12): Result.001 file - promoters70/5674194
aaagttgattaa

SEQ ID NO: 88638 - DNA, 12 bp, Unknown
  misc_feature (1)..( 12): Result.001 file - promoters70/5674194
cctttttgtatc

SEQ ID NO: 88639 - DNA, 12 bp, Unknown
  misc_feature (1)..( 12): Result.001 file - promoters70/5674194
catattgagagg

SEQ ID NO: 88640 - DNA, 12 bp, Unknown
  misc_feature (1)..( 12): Result.001 file - promoters70/5674194
ttgattgatagg

SEQ ID NO: 88641 - DNA, 12 bp, Unknown
  misc_feature (1)..( 12): Result.001 file - promoters70/5674194
gtctttgttagt

SEQ ID NO: 88642 - DNA, 12 bp, Unknown
  misc_feature (1)..( 12): Result.001 file - promoters70/5674194
ctttttgttcta

SEQ ID NO: 88643 - DNA, 12 bp, Unknown
  misc_feature (1)..( 12): Result.001 file - promoters70/5674194
ctttttgtatca

SEQ ID NO: 88644 - DNA, 12 bp, Unknown
  misc_feature (1)..( 12): Result.001 file - promoters70/5674194
acatttggtaca

SEQ ID NO: 88645 - DNA, 17 bp, Unknown
  misc_feature (1)..( 17): Result.001 file - promoters70/5674194
cagacatatatacttag

SEQ ID NO: 88646 - DNA, 17 bp, Unknown
  misc_feature (1)..( 17): Result.001 file - promoters70/5674194
tatatttatatagataa

SEQ ID NO: 88647 - DNA, 17 bp, Unknown
  misc_feature (1)..( 17): Result.001 file - promoters70/5674194
aaaaaaaatatttgtat

SEQ ID NO: 88648 - DNA, 17 bp, Unknown
  misc_feature (1)..( 17): Result.001 file - promoters70/5674194
accctatataaagataa

SEQ ID NO: 88649 - DNA, 17 bp, Unknown
  misc_feature (1)..( 17): Result.001 file - promoters70/5674194
gtataatataaaggtcc

SEQ ID NO: 88650 - DNA, 17 bp, Unknown
  misc_feature (1)..( 17): Result.001 file - promoters70/5674194
agagaataaaaggtctt

SEQ ID NO: 88651 - DNA, 10 bp, Unknown
  misc_feature (1)..( 10): Result.001 file - promoters70/5674194
taatcttttg

SEQ ID NO: 88652 - DNA, 10 bp, Unknown
  misc_feature (1)..( 10): Result.001 file - promoters70/5674194
taattttttt

SEQ ID NO: 88653 - DNA, 10 bp, Unknown
  misc_feature (1)..( 10): Result.001 file - promoters70/5674194
taatgttttt

SEQ ID NO: 88654 - DNA, 10 bp, Unknown
  misc_feature (1)..( 10): Result.001 file - promoters70/5674194
aactcttttg

SEQ ID NO: 88655 - DNA, 10 bp, Unknown
  misc_feature (1)..( 10): Result.001 file - promoters70/5674194
tcatttttct

SEQ ID NO: 88656 - DNA, 10 bp, Unknown
  misc_feature (1)..( 10): Result.001 file - promoters70/5674194
ggatgttttt

SEQ ID NO: 88657 - DNA, 8 bp, Unknown
  misc_feature (1)..( 8): Result.001 file - promoters70/5674194
aaatattc

SEQ ID NO: 88658 - DNA, 8 bp, Unknown
  misc_feature (1)..( 8): Result.001 file - promoters70/5674194
aaatatcg

SEQ ID NO: 88659 - DNA, 8 bp, Unknown
  misc_feature (1)..( 8): Result.001 file - promoters70/5674194
aaatattt

SEQ ID NO: 88660 - DNA, 8 bp, Unknown
  misc_feature (1)..( 8): Result.001 file - promoters70/5674194
aaaaatta

SEQ ID NO: 88661 - DNA, 8 bp, Unknown
  misc_feature (1)..( 8): Result.001 file - promoters70/5674194
aaaaaaaa

SEQ ID NO: 88662 - DNA, 8 bp, Unknown
  misc_feature (1)..( 8): Result.001 file - promoters70/5674194
aaagaaaa

SEQ ID NO: 88663 - DNA, 11 bp, Unknown
  misc_feature (1)..( 11): Result.001 file - promoters70/5674194
cgatttgttag

SEQ ID NO: 88664 - DNA, 11 bp, Unknown
  misc_feature (1)..( 11): Result.001 file - promoters70/5674194
agtttttttag

SEQ ID NO: 88665 - DNA, 11 bp, Unknown
  misc_feature (1)..( 11): Result.001 file - promoters70/5674194
ctttttgttgt

SEQ ID NO: 88666 - DNA, 11 bp, Unknown
  misc_feature (1)..( 11): Result.001 file - promoters70/5674194
gtttttgtcta

SEQ ID NO: 88667 - DNA, 11 bp, Unknown
  misc_feature (1)..( 11): Result.001 file - promoters70/5674194
ttttatgtttc

SEQ ID NO: 88668 - DNA, 12 bp, Unknown
  misc_feature (1)..( 12): Result.001 file - promoters70/5674194
ttttactttttt

SEQ ID NO: 88669 - DNA, 11 bp, Unknown
  misc_feature (1)..( 11): Result.001 file - promoters70/5674194
tttattgttac

SEQ ID NO: 88670 - DNA, 11 bp, Unknown
  misc_feature (1)..( 11): Result.001 file - promoters70/5674194
gtctttgttag

SEQ ID NO: 88671 - DNA, 11 bp, Unknown
  misc_feature (1)..( 11): Result.001 file - promoters70/5674194
ttgattgatag

SEQ ID NO: 88672 - DNA, 11 bp, Unknown
  misc_feature (1)..( 11): Result.001 file - promoters70/5674194
ctttttgttct

SEQ ID NO: 88673 - DNA, 11 bp, Unknown
  misc_feature (1)..( 11): Result.001 file - promoters70/5674194
ctttttgtatc

SEQ ID NO: 88674 - DNA, 11 bp, Unknown
  misc_feature (1)..( 11): Result.001 file - promoters70/5674634
acatttggtac

SEQ ID NO: 88675 - DNA, 12 bp, Unknown
  misc_feature (1)..( 12): Result.001 file - promoters70/5674634
gggaaaatgaat

SEQ ID NO: 88676 - DNA, 12 bp, Unknown
  misc_feature (1)..( 12): Result.001 file - promoters70/5674634
aaaaaaacgaat

SEQ ID NO: 88677 - DNA, 12 bp, Unknown
  misc_feature (1)..( 12): Result.001 file - promoters70/5674634
attaaaatggta

SEQ ID NO: 88678 - DNA, 12 bp, Unknown
  misc_feature (1)..( 12): Result.001 file - promoters70/5674634
tatcaaacaaat

SEQ ID NO: 88679 - DNA, 12 bp, Unknown
  misc_feature (1)..( 12): Result.001 file - promoters70/5674634
gagaaaaaaagt

SEQ ID NO: 88680 - DNA, 12 bp, Unknown
  misc_feature (1)..( 12): Result.001 file - promoters70/5674666
gagaaaaagagg

SEQ ID NO: 88681 - DNA, 9 bp, Unknown
  misc_feature (1)..( 9): Result.001 file - promoters70/5674666
aaaaattat

SEQ ID NO: 88682 - DNA, 9 bp, Unknown
  misc_feature (1)..( 9): Result.001 file - promoters70/5674666
aaagattgt

SEQ ID NO: 88683 - DNA, 9 bp, Unknown
  misc_feature (1)..( 9): Result.001 file - promoters70/5674666
gtaaattag

SEQ ID NO: 88684 - DNA, 9 bp, Unknown
  misc_feature (1)..( 9): Result.001 file - promoters70/5674666
ggagagtgt

SEQ ID NO: 88685 - DNA, 9 bp, Unknown
  misc_feature (1)..( 9): Result.001 file - promoters70/5674666
aaaaattca

SEQ ID NO: 88686 - DNA, 9 bp, Unknown
  misc_feature (1)..( 9): Result.001 file - promoters70/5674666
aaatatttt

SEQ ID NO: 88687 - DNA, 10 bp, Unknown
  misc_feature (1)..( 10): Result.001 file - promoters70/5674666
attctttcaa

SEQ ID NO: 88688 - DNA, 10 bp, Unknown
  misc_feature (1)..( 10): Result.001 file - promoters70/5674666
attcttacaa

SEQ ID NO: 88689 - DNA, 10 bp, Unknown
  misc_feature (1)..( 10): Result.001 file - promoters70/5674666
attgttttgg

SEQ ID NO: 88690 - DNA, 10 bp, Unknown
  misc_feature (1)..( 10): Result.001 file - promoters70/5674666
agttttacaa

SEQ ID NO: 88691 - DNA, 10 bp, Unknown
  misc_feature (1)..( 10): Result.001 file - promoters70/5674666
gattttacat

SEQ ID NO: 88692 - DNA, 10 bp, Unknown
  misc_feature (1)..( 10): Result.001 file - promoters70/5674666
aagcttacac

SEQ ID NO: 88693 - DNA, 10 bp, Unknown
  misc_feature (1)..( 10): Result.001 file - promoters70/5675661
attttaaata

SEQ ID NO: 88694 - DNA, 9 bp, Unknown
  misc_feature (1)..( 9): Result.001 file - promoters70/5675661
ggttaattc

SEQ ID NO: 88695 - DNA, 9 bp, Unknown
  misc_feature (1)..( 9): Result.001 file - promoters70/5675661
ggttgattt

SEQ ID NO: 88696 - DNA, 9 bp, Unknown
  misc_feature (1)..( 9): Result.001 file - promoters70/5675661
atttgattt

SEQ ID NO: 88697 - DNA, 9 bp, Unknown
  misc_feature (1)..( 9): Result.001 file - promoters70/5675661
ttttgatgg

SEQ ID NO: 88698 - DNA, 8 bp, Unknown
  misc_feature (1)..( 8): Result.001 file - promoters70/5675661
aaaagttt

SEQ ID NO: 88699 - DNA, 8 bp, Unknown
  misc_feature (1)..( 8): Result.001 file - promoters70/5675661
caaagttg

SEQ ID NO: 88700 - DNA, 8 bp, Unknown
  misc_feature (1)..( 8): Result.001 file - promoters70/5675661
caaatttg

SEQ ID NO: 88701 - DNA, 8 bp, Unknown
  misc_feature (1)..( 8): Result.001 file - promoters70/5675661
caattttt

SEQ ID NO: 88702 - DNA, 8 bp, Unknown
  misc_feature (1)..( 8): Result.001 file - promoters70/5675661
gaaagatt

SEQ ID NO: 88703 - DNA, 8 bp, Unknown
  misc_feature (1)..( 8): Result.001 file - promoters70/5675661
aaaagatt

SEQ ID NO: 88704 - DNA, 8 bp, Unknown
  misc_feature (1)..( 8): Result.001 file - promoters70/5675661
aaaagaga

SEQ ID NO: 88705 - DNA, 8 bp, Unknown
  misc_feature (1)..( 8): Result.001 file - promoters70/5675661
aaaagaaa

SEQ ID NO: 88706 - DNA, 8 bp, Unknown
  misc_feature (1)..( 8): Result.001 file - promoters70/5675661
tagaataa

SEQ ID NO: 88707 - DNA, 8 bp, Unknown
  misc_feature (1)..( 8): Result.001 file - promoters70/5675661
cagagtaa

SEQ ID NO: 88708 - DNA, 8 bp, Unknown
  misc_feature (1)..( 8): Result.001 file - promoters70/5675661
gagagtat

SEQ ID NO: 88709 - DNA, 8 bp, Unknown
  misc_feature (1)..( 8): Result.001 file - promoters70/5677230
gagggtac

SEQ ID NO: 88710 - DNA, 7 bp, Unknown
  misc_feature (1)..( 7): Result.001 file - promoters70/5677230
aaggaaa

SEQ ID NO: 88711 - DNA, 7 bp, Unknown
  misc_feature (1)..( 7): Result.001 file - promoters70/5677230
aagtaaa

SEQ ID NO: 88712 - DNA, 7 bp, Unknown
  misc_feature (1)..( 7): Result.001 file - promoters70/5677230
gagtaaa

SEQ ID NO: 88713 - DNA, 7 bp, Unknown
  misc_feature (1)..( 7): Result.001 file - promoters70/5677230
aaaatat

SEQ ID NO: 88714 - DNA, 7 bp, Unknown
  misc_feature (1)..( 7): Result.001 file - promoters70/5677230
aaaataa

SEQ ID NO: 88715 - DNA, 7 bp, Unknown
  misc_feature (1)..( 7): Result.001 file - promoters70/5677274
gaaatat

SEQ ID NO: 88716 - DNA, 8 bp, Unknown
  misc_feature (1)..( 8): Result.001 file - promoters70/5677274
tcatatag

SEQ ID NO: 88717 - DNA, 8 bp, Unknown
  misc_feature (1)..( 8): Result.001 file - promoters70/5677274
acatttag

SEQ ID NO: 88718 - DNA, 8 bp, Unknown
  misc_feature (1)..( 8): Result.001 file - promoters70/5677274
acagttac

SEQ ID NO: 88719 - DNA, 11 bp, Unknown
  misc_feature (1)..( 11): Result.001 file - promoters70/5677274
atggtaatctc

SEQ ID NO: 88720 - DNA, 11 bp, Unknown
  misc_feature (1)..( 11): Result.001 file - promoters70/5677274
atgataataat

SEQ ID NO: 88721 - DNA, 11 bp, Unknown
  misc_feature (1)..( 11): Result.001 file - promoters70/5677298
atgttaaaaat

SEQ ID NO: 88722 - DNA, 8 bp, Unknown
  misc_feature (1)..( 8): Result.001 file - promoters70/5677298
taagtaaa

SEQ ID NO: 88723 - DNA, 8 bp, Unknown
  misc_feature (1)..( 8): Result.001 file - promoters70/5677298
taagaaaa

SEQ ID NO: 88724 - DNA, 8 bp, Unknown
  misc_feature (1)..( 8): Result.001 file - promoters70/5677298
gtagaaaa

SEQ ID NO: 88725 - DNA, 8 bp, Unknown
  misc_feature (1)..( 8): Result.001 file - promoters70/5677298
cttcgatg

SEQ ID NO: 88726 - DNA, 8 bp, Unknown
  misc_feature (1)..( 8): Result.001 file - promoters70/5677298
cttcaatg

SEQ ID NO: 88727 - DNA, 8 bp, Unknown
  misc_feature (1)..( 8): Result.001 file - promoters70/5677298
cttcaatg

SEQ ID NO: 88728 - DNA, 8 bp, Unknown
  misc_feature (1)..( 8): Result.001 file - promoters70/5677298
agagaact

SEQ ID NO: 88729 - DNA, 8 bp, Unknown
  misc_feature (1)..( 8): Result.001 file - promoters70/5677298
agaaaacc

SEQ ID NO: 88730 - DNA, 8 bp, Unknown
  misc_feature (1)..( 8): Result.001 file - promoters70/5681068
ataaaaaa

SEQ ID NO: 88731 - DNA, 7 bp, Unknown
  misc_feature (1)..( 7): Result.001 file - promoters70/5681068
gctaaaa

SEQ ID NO: 88732 - DNA, 7 bp, Unknown
  misc_feature (1)..( 7): Result.001 file - promoters70/5681068
gctgaaa

SEQ ID NO: 88733 - DNA, 7 bp, Unknown
  misc_feature (1)..( 7): Result.001 file - promoters70/5681157
tctgaaa

SEQ ID NO: 88734 - DNA, 10 bp, Unknown
  misc_feature (1)..( 10): Result.001 file - promoters70/5681157
accttaaaaa

SEQ ID NO: 88735 - DNA, 10 bp, Unknown
  misc_feature (1)..( 10): Result.001 file - promoters70/5681157
catttaaaat

SEQ ID NO: 88736 - DNA, 10 bp, Unknown
  misc_feature (1)..( 10): Result.001 file - promoters70/5681157
accttaaaaa

SEQ ID NO: 88737 - DNA, 7 bp, Unknown
  misc_feature (1)..( 7): Result.001 file - promoters70/5681157
aaataaa

SEQ ID NO: 88738 - DNA, 7 bp, Unknown
  misc_feature (1)..( 7): Result.001 file - promoters70/5681157
aaataac

SEQ ID NO: 88739 - DNA, 8 bp, Unknown
  misc_feature (1)..( 8): Result.001 file - promoters70/5681157
aaattaaa

SEQ ID NO: 88740 - DNA, 6 bp, Unknown
  misc_feature (1)..( 6): Result.001 file - promoters70/5681157
ttaaaa

SEQ ID NO: 88741 - DNA, 6 bp, Unknown
  misc_feature (1)..( 6): Result.001 file - promoters70/5681157
ttaaaa

SEQ ID NO: 88742 - DNA, 6 bp, Unknown
  misc_feature (1)..( 6): Result.001 file - promoters70/5681157
ttaaaa

SEQ ID NO: 88743 - DNA, 8 bp, Unknown
  misc_feature (1)..( 8): Result.001 file - promoters70/5681157
aaaaccat

SEQ ID NO: 88744 - DNA, 8 bp, Unknown
  misc_feature (1)..( 8): Result.001 file - promoters70/5681157
taaaccat

SEQ ID NO: 88745 - DNA, 8 bp, Unknown
  misc_feature (1)..( 8): Result.001 file - promoters70/5681157
taaaccta

SEQ ID NO: 88746 - DNA, 12 bp, Unknown
  misc_feature (1)..( 12): Result.001 file - promoters70/5681157
ataaaccaaaaa

SEQ ID NO: 88747 - DNA, 12 bp, Unknown
  misc_feature (1)..( 12): Result.001 file - promoters70/5681157
accattcaaaaa

SEQ ID NO: 88748 - DNA, 12 bp, Unknown
  misc_feature (1)..( 12): Result.001 file - promoters70/5681157
ataaacctaaat

SEQ ID NO: 88749 - DNA, 6 bp, Unknown
  misc_feature (1)..( 6): Result.001 file - promoters70/5681157
ttaaaa

SEQ ID NO: 88750 - DNA, 6 bp, Unknown
  misc_feature (1)..( 6): Result.001 file - promoters70/5681157
ttaaaa

SEQ ID NO: 88751 - DNA, 6 bp, Unknown
  misc_feature (1)..( 6): Result.001 file - promoters70/5681157
ttaaaa

SEQ ID NO: 88752 - DNA, 9 bp, Unknown
  misc_feature (1)..( 9): Result.001 file - promoters70/5681157
aaaatatga

SEQ ID NO: 88753 - DNA, 9 bp, Unknown
  misc_feature (1)..( 9): Result.001 file - promoters70/5681157
aaaataaac

SEQ ID NO: 88754 - DNA, 9 bp, Unknown
  misc_feature (1)..( 9): Result.001 file - promoters70/5681157
aaattaaac

SEQ ID NO: 88755 - DNA, 10 bp, Unknown
  misc_feature (1)..( 10): Result.001 file - promoters70/5681157
aatgtattat

SEQ ID NO: 88756 - DNA, 10 bp, Unknown
  misc_feature (1)..( 10): Result.001 file - promoters70/5681157
tttgtaatat

SEQ ID NO: 88757 - DNA, 10 bp, Unknown
  misc_feature (1)..( 10): Result.001 file - promoters70/5753942
tttttaaaaa

SEQ ID NO: 88758 - DNA, 9 bp, Unknown
  misc_feature (1)..( 9): Result.001 file - promoters70/5753942
acaattgta

SEQ ID NO: 88759 - DNA, 9 bp, Unknown
  misc_feature (1)..( 9): Result.001 file - promoters70/5753942
tacattgta

SEQ ID NO: 88760 - DNA, 9 bp, Unknown
  misc_feature (1)..( 9): Result.001 file - promoters70/5753942
taccttgtt

SEQ ID NO: 88761 - DNA, 9 bp, Unknown
  misc_feature (1)..( 9): Result.001 file - promoters70/5753942
caaacaaaa

SEQ ID NO: 88762 - DNA, 9 bp, Unknown
  misc_feature (1)..( 9): Result.001 file - promoters70/5753942
gaaacaaag

SEQ ID NO: 88763 - DNA, 9 bp, Unknown
  misc_feature (1)..( 9): Result.001 file - promoters70/5753942
taaagaaaa

SEQ ID NO: 88764 - DNA, 9 bp, Unknown
  misc_feature (1)..( 9): Result.001 file - promoters70/5753942
caatcaaat

SEQ ID NO: 88765 - DNA, 8 bp, Unknown
  misc_feature (1)..( 8): Result.001 file - promoters70/5753942
tgttcaaa

SEQ ID NO: 88766 - DNA, 8 bp, Unknown
  misc_feature (1)..( 8): Result.001 file - promoters70/5753942
tgtccaat

SEQ ID NO: 88767 - DNA, 9 bp, Unknown
  misc_feature (1)..( 9): Result.001 file - promoters70/5753942
cgttcgaaa

SEQ ID NO: 88768 - DNA, 13 bp, Unknown
  misc_feature (1)..( 13): Result.001 file - promoters70/5753942
aaacaaattaggg

SEQ ID NO: 88769 - DNA, 13 bp, Unknown
  misc_feature (1)..( 13): Result.001 file - promoters70/5753942
gcccaaattaaaa

SEQ ID NO: 88770 - DNA, 13 bp, Unknown
  misc_feature (1)..( 13): Result.001 file - promoters70/5753942
gcccatattaaaa

SEQ ID NO: 88771 - DNA, 11 bp, Unknown
  misc_feature (1)..( 11): Result.001 file - promoters70/5753942
tttgtgttttt

SEQ ID NO: 88772 - DNA, 11 bp, Unknown
  misc_feature (1)..( 11): Result.001 file - promoters70/5753942
gatgtcttttt

SEQ ID NO: 88773 - DNA, 11 bp, Unknown
  misc_feature (1)..( 11): Result.001 file - promoters70/5753942
tttgggttcct

SEQ ID NO: 88774 - DNA, 7 bp, Unknown
  misc_feature (1)..( 7): Result.001 file - promoters70/5753942
aatattt

SEQ ID NO: 88775 - DNA, 7 bp, Unknown
  misc_feature (1)..( 7): Result.001 file - promoters70/5753942
catattt

SEQ ID NO: 88776 - DNA, 7 bp, Unknown
  misc_feature (1)..( 7): Result.001 file - promoters70/5753942
catatta

SEQ ID NO: 88777 - DNA, 10 bp, Unknown
  misc_feature (1)..( 10): Result.001 file - promoters70/5753942
attcgtagca

SEQ ID NO: 88778 - DNA, 10 bp, Unknown
  misc_feature (1)..( 10): Result.001 file - promoters70/5753942
tttcgtacat

SEQ ID NO: 88779 - DNA, 10 bp, Unknown
  misc_feature (1)..( 10): Result.001 file - promoters70/5753942
tttggtacat

SEQ ID NO: 88780 - DNA, 8 bp, Unknown
  misc_feature (1)..( 8): Result.001 file - promoters70/5753942
aggctata

SEQ ID NO: 88781 - DNA, 8 bp, Unknown
  misc_feature (1)..( 8): Result.001 file - promoters70/5753942
gggccata

SEQ ID NO: 88782 - DNA, 8 bp, Unknown
  misc_feature (1)..( 8): Result.001 file - promoters70/5754134
gggccaag

SEQ ID NO: 88783 - DNA, 12 bp, Unknown
  misc_feature (1)..( 12): Result.001 file - promoters70/5754134
gcaatctggatg

SEQ ID NO: 88784 - DNA, 12 bp, Unknown
  misc_feature (1)..( 12): Result.001 file - promoters70/5754134
tgggcctgcatg

SEQ ID NO: 88785 - DNA, 12 bp, Unknown
  misc_feature (1)..( 12): Result.001 file - promoters70/5754134
gaaatatggata

SEQ ID NO: 88786 - DNA, 12 bp, Unknown
  misc_feature (1)..( 12): Result.001 file - promoters70/5754134
gaggtcttgatt

SEQ ID NO: 88787 - DNA, 12 bp, Unknown
  misc_feature (1)..( 12): Result.001 file - promoters70/5756166
gaaatatgacac

SEQ ID NO: 88788 - DNA, 8 bp, Unknown
  misc_feature (1)..( 8): Result.001 file - promoters70/5756166
ttacaatg

SEQ ID NO: 88789 - DNA, 8 bp, Unknown
  misc_feature (1)..( 8): Result.001 file - promoters70/5756166
atacaatg

SEQ ID NO: 88790 - DNA, 8 bp, Unknown
  misc_feature (1)..( 8): Result.001 file - promoters70/5756166
ttaaaatt

SEQ ID NO: 88791 - DNA, 7 bp, Unknown
  misc_feature (1)..( 7): Result.001 file - promoters70/5756166
tctaaaa

SEQ ID NO: 88792 - DNA, 7 bp, Unknown
  misc_feature (1)..( 7): Result.001 file - promoters70/5756166
tcttaaa

SEQ ID NO: 88793 - DNA, 7 bp, Unknown
  misc_feature (1)..( 7): Result.001 file - promoters70/5759467
tcttaat

SEQ ID NO: 88794 - DNA, 8 bp, Unknown
  misc_feature (1)..( 8): Result.001 file - promoters70/5759467
gcaataag

SEQ ID NO: 88795 - DNA, 8 bp, Unknown
  misc_feature (1)..( 8): Result.001 file - promoters70/5759467
acaataag

SEQ ID NO: 88796 - DNA, 8 bp, Unknown
  misc_feature (1)..( 8): Result.001 file - promoters70/5759467
gcaataaa

SEQ ID NO: 88797 - DNA, 7 bp, Unknown
  misc_feature (1)..( 7): Result.001 file - promoters70/5759467
catttac

SEQ ID NO: 88798 - DNA, 7 bp, Unknown
  misc_feature (1)..( 7): Result.001 file - promoters70/5759467
gatttac

SEQ ID NO: 88799 - DNA, 7 bp, Unknown
  misc_feature (1)..( 7): Result.001 file - promoters70/5773091
gatttaa

SEQ ID NO: 88800 - DNA, 9 bp, Unknown
  misc_feature (1)..( 9): Result.001 file - promoters70/5773091
ccaaagtaa

SEQ ID NO: 88801 - DNA, 9 bp, Unknown
  misc_feature (1)..( 9): Result.001 file - promoters70/5773091
acaaaataa

SEQ ID NO: 88802 - DNA, 9 bp, Unknown
  misc_feature (1)..( 9): Result.001 file - promoters70/5776417
acaaaaata

SEQ ID NO: 88803 - DNA, 8 bp, Unknown
  misc_feature (1)..( 8): Result.001 file - promoters70/5776417
agttttgt

SEQ ID NO: 88804 - DNA, 8 bp, Unknown
  misc_feature (1)..( 8): Result.001 file - promoters70/5776417
agtttttg

SEQ ID NO: 88805 - DNA, 8 bp, Unknown
  misc_feature (1)..( 8): Result.001 file - promoters70/5776417
ggtttttt

SEQ ID NO: 88806 - DNA, 8 bp, Unknown
  misc_feature (1)..( 8): Result.001 file - promoters60/1006957
tgttgttg

SEQ ID NO: 88807 - DNA, 8 bp, Unknown
  misc_feature (1)..( 8): Result.001 file - promoters60/1006957
aaaaggaa

SEQ ID NO: 88808 - DNA, 8 bp, Unknown
  misc_feature (1)..( 8): Result.001 file - promoters60/1006957
gaaaggag

SEQ ID NO: 88809 - DNA, 8 bp, Unknown
  misc_feature (1)..( 8): Result.001 file - promoters60/1006957
gaaaagag

SEQ ID NO: 88810 - DNA, 7 bp, Unknown
  misc_feature (1)..( 7): Result.001 file - promoters60/1006957
gatcaat

SEQ ID NO: 88811 - DNA, 7 bp, Unknown
  misc_feature (1)..( 7): Result.001 file - promoters60/1006957
gataaat

SEQ ID NO: 88812 - DNA, 6 bp, Unknown
  misc_feature (1)..( 6): Result.001 file - promoters60/1006957
atcata

SEQ ID NO: 88813 - DNA, 6 bp, Unknown
  misc_feature (1)..( 6): Result.001 file - promoters60/1006957
atcata

SEQ ID NO: 88814 - DNA, 6 bp, Unknown
  misc_feature (1)..( 6): Result.001 file - promoters60/1006957
aaaaat

SEQ ID NO: 88815 - DNA, 6 bp, Unknown
  misc_feature (1)..( 6): Result.001 file - promoters60/1006957
aaaaat

SEQ ID NO: 88816 - DNA, 7 bp, Unknown
  misc_feature (1)..( 7): Result.001 file - promoters60/1006957
attcaaa

SEQ ID NO: 88817 - DNA, 7 bp, Unknown
  misc_feature (1)..( 7): Result.001 file - promoters60/1006957
attgaaa

SEQ ID NO: 88818 - DNA, 10 bp, Unknown
  misc_feature (1)..( 10): Result.001 file - promoters60/1006957
caaagtagag

SEQ ID NO: 88819 - DNA, 10 bp, Unknown
  misc_feature (1)..( 10): Result.001 file - promoters60/1006957
caaactaggc

SEQ ID NO: 88820 - DNA, 10 bp, Unknown
  misc_feature (1)..( 10): Result.001 file - promoters60/1006957
aaaacaaggc

SEQ ID NO: 88821 - DNA, 10 bp, Unknown
  misc_feature (1)..( 10): Result.001 file - promoters60/1006957
tgagtgtttt

SEQ ID NO: 88822 - DNA, 10 bp, Unknown
  misc_feature (1)..( 10): Result.001 file - promoters60/1006957
tgagggtttt

SEQ ID NO: 88823 - DNA, 7 bp, Unknown
  misc_feature (1)..( 7): Result.001 file - promoters60/1006957
tggcttc

SEQ ID NO: 88824 - DNA, 7 bp, Unknown
  misc_feature (1)..( 7): Result.001 file - promoters60/1006957
tgggttc

SEQ ID NO: 88825 - DNA, 6 bp, Unknown
  misc_feature (1)..( 6): Result.001 file - promoters60/1006957
gagtga

SEQ ID NO: 88826 - DNA, 6 bp, Unknown
  misc_feature (1)..( 6): Result.001 file - promoters60/1006957
gagtga

SEQ ID NO: 88827 - DNA, 9 bp, Unknown
  misc_feature (1)..( 9): Result.001 file - promoters60/1006957
ggagagaaa

SEQ ID NO: 88828 - DNA, 9 bp, Unknown
  misc_feature (1)..( 9): Result.001 file - promoters60/1006957
ggagtgaaa

SEQ ID NO: 88829 - DNA, 9 bp, Unknown
  misc_feature (1)..( 9): Result.001 file - promoters60/1006957
agaaaaagt

SEQ ID NO: 88830 - DNA, 9 bp, Unknown
  misc_feature (1)..( 9): Result.001 file - promoters60/1006957
agagaaagt

SEQ ID NO: 88831 - DNA, 8 bp, Unknown
  misc_feature (1)..( 8): Result.001 file - promoters60/1006957
tttcgctt

SEQ ID NO: 88832 - DNA, 8 bp, Unknown
  misc_feature (1)..( 8): Result.001 file - promoters60/1007030
tttagctt

SEQ ID NO: 88833 - DNA, 10 bp, Unknown
  misc_feature (1)..( 10): Result.001 file - promoters60/1007030
aaataataaa

SEQ ID NO: 88834 - DNA, 10 bp, Unknown
  misc_feature (1)..( 10): Result.001 file - promoters60/1007030
ttataatata

SEQ ID NO: 88835 - DNA, 10 bp, Unknown
  misc_feature (1)..( 10): Result.001 file - promoters60/1007030
aaatagtaaa

SEQ ID NO: 88836 - DNA, 10 bp, Unknown
  misc_feature (1)..( 10): Result.001 file - promoters60/1007030
ggataaaata

SEQ ID NO: 88837 - DNA, 10 bp, Unknown
  misc_feature (1)..( 10): Result.001 file - promoters60/1007030
agatagtact

SEQ ID NO: 88838 - DNA, 12 bp, Unknown
  misc_feature (1)..( 12): Result.001 file - promoters60/1007030
ataaatagcggg

SEQ ID NO: 88839 - DNA, 12 bp, Unknown
  misc_feature (1)..( 12): Result.001 file - promoters60/1007030
ataaataattat

SEQ ID NO: 88840 - DNA, 12 bp, Unknown
  misc_feature (1)..( 12): Result.001 file - promoters60/1007030
ataaatagtaaa

SEQ ID NO: 88841 - DNA, 12 bp, Unknown
  misc_feature (1)..( 12): Result.001 file - promoters60/1007030
tgagatagtact

SEQ ID NO: 88842 - DNA, 8 bp, Unknown
  misc_feature (1)..( 8): Result.001 file - promoters60/1007030
aaaacaat

SEQ ID NO: 88843 - DNA, 8 bp, Unknown
  misc_feature (1)..( 8): Result.001 file - promoters60/1007030
aaaacaat

SEQ ID NO: 88844 - DNA, 8 bp, Unknown
  misc_feature (1)..( 8): Result.001 file - promoters60/1007030
aaaagaat

SEQ ID NO: 88845 - DNA, 8 bp, Unknown
  misc_feature (1)..( 8): Result.001 file - promoters60/1007030
tgaagaat

SEQ ID NO: 88846 - DNA, 8 bp, Unknown
  misc_feature (1)..( 8): Result.001 file - promoters60/1007030
aaatgaaa

SEQ ID NO: 88847 - DNA, 8 bp, Unknown
  misc_feature (1)..( 8): Result.001 file - promoters60/1007030
aaacgaat

SEQ ID NO: 88848 - DNA, 8 bp, Unknown
  misc_feature (1)..( 8): Result.001 file - promoters60/1007030
gaaccaat

SEQ ID NO: 88849 - DNA, 8 bp, Unknown
  misc_feature (1)..( 8): Result.001 file - promoters60/1007030
aaacgatt

SEQ ID NO: 88850 - DNA, 13 bp, Unknown
  misc_feature (1)..( 13): Result.001 file - promoters60/1007030
gggaagataaaca

SEQ ID NO: 88851 - DNA, 13 bp, Unknown
  misc_feature (1)..( 13): Result.001 file - promoters60/1007030
tcgaaaatataca

SEQ ID NO: 88852 - DNA, 13 bp, Unknown
  misc_feature (1)..( 13): Result.001 file - promoters60/1007030
tataaagtattta

SEQ ID NO: 88853 - DNA, 13 bp, Unknown
  misc_feature (1)..( 13): Result.001 file - promoters60/1007030
tcgataatgaaga

SEQ ID NO: 88854 - DNA, 11 bp, Unknown
  misc_feature (1)..( 11): Result.001 file - promoters60/1007030
aattaacccaa

SEQ ID NO: 88855 - DNA, 11 bp, Unknown
  misc_feature (1)..( 11): Result.001 file - promoters60/1007030
tattaacctac

SEQ ID NO: 88856 - DNA, 11 bp, Unknown
  misc_feature (1)..( 11): Result.001 file - promoters60/1007030
aattaaaaaag

SEQ ID NO: 88857 - DNA, 11 bp, Unknown
  misc_feature (1)..( 11): Result.001 file - promoters60/1007030
cagtaatccaa

SEQ ID NO: 88858 - DNA, 10 bp, Unknown
  misc_feature (1)..( 10): Result.001 file - promoters60/1007030
aatctgcttc

SEQ ID NO: 88859 - DNA, 10 bp, Unknown
  misc_feature (1)..( 10): Result.001 file - promoters60/1007030
aatcttcttc

SEQ ID NO: 88860 - DNA, 10 bp, Unknown
  misc_feature (1)..( 10): Result.001 file - promoters60/1007030
aatctgatgt

SEQ ID NO: 88861 - DNA, 10 bp, Unknown
  misc_feature (1)..( 10): Result.001 file - promoters60/1007030
aatttgaaaa

SEQ ID NO: 88862 - DNA, 7 bp, Unknown
  misc_feature (1)..( 7): Result.001 file - promoters60/1007030
gaaataa

SEQ ID NO: 88863 - DNA, 7 bp, Unknown
  misc_feature (1)..( 7): Result.001 file - promoters60/1007030
aaaataa

SEQ ID NO: 88864 - DNA, 7 bp, Unknown
  misc_feature (1)..( 7): Result.001 file - promoters60/1007030
aaaatac

SEQ ID NO: 88865 - DNA, 7 bp, Unknown
  misc_feature (1)..( 7): Result.001 file - promoters60/1007030
aaagtaa

SEQ ID NO: 88866 - DNA, 13 bp, Unknown
  misc_feature (1)..( 13): Result.001 file - promoters60/1007030
cataaaaaaagat

SEQ ID NO: 88867 - DNA, 13 bp, Unknown
  misc_feature (1)..( 13): Result.001 file - promoters60/1007030
atatgaaaaggat

SEQ ID NO: 88868 - DNA, 13 bp, Unknown
  misc_feature (1)..( 13): Result.001 file - promoters60/1007030
tgaagaaaaagca

SEQ ID NO: 88869 - DNA, 13 bp, Unknown
  misc_feature (1)..( 13): Result.001 file - promoters60/1007030
tgatgaaaaatta

SEQ ID NO: 88870 - DNA, 7 bp, Unknown
  misc_feature (1)..( 7): Result.001 file - promoters60/1007030
taaaaat

SEQ ID NO: 88871 - DNA, 7 bp, Unknown
  misc_feature (1)..( 7): Result.001 file - promoters60/1007030
taaaaaa

SEQ ID NO: 88872 - DNA, 7 bp, Unknown
  misc_feature (1)..( 7): Result.001 file - promoters60/1007030
taaaaaa

SEQ ID NO: 88873 - DNA, 7 bp, Unknown
  misc_feature (1)..( 7): Result.001 file - promoters60/1007030
caaaaaa

SEQ ID NO: 88874 - DNA, 10 bp, Unknown
  misc_feature (1)..( 10): Result.001 file - promoters60/1007030
attgagatag

SEQ ID NO: 88875 - DNA, 10 bp, Unknown
  misc_feature (1)..( 10): Result.001 file - promoters60/1007030
actgaaatat

SEQ ID NO: 88876 - DNA, 10 bp, Unknown
  misc_feature (1)..( 10): Result.001 file - promoters60/1007030
attgacatat

SEQ ID NO: 88877 - DNA, 10 bp, Unknown
  misc_feature (1)..( 10): Result.001 file - promoters60/1007056
attaaaatat

SEQ ID NO: 88878 - DNA, 8 bp, Unknown
  misc_feature (1)..( 8): Result.001 file - promoters60/1007056
aaggctga

SEQ ID NO: 88879 - DNA, 8 bp, Unknown
  misc_feature (1)..( 8): Result.001 file - promoters60/1007056
aaggatga

SEQ ID NO: 88880 - DNA, 7 bp, Unknown
  misc_feature (1)..( 7): Result.001 file - promoters60/1007056
gttttgg

SEQ ID NO: 88881 - DNA, 7 bp, Unknown
  misc_feature (1)..( 7): Result.001 file - promoters60/1007056
gttctgg

SEQ ID NO: 88882 - DNA, 7 bp, Unknown
  misc_feature (1)..( 7): Result.001 file - promoters60/1007056
gttttgt

SEQ ID NO: 88883 - DNA, 6 bp, Unknown
  misc_feature (1)..( 6): Result.001 file - promoters60/1007056
ggtgat

SEQ ID NO: 88884 - DNA, 6 bp, Unknown
  misc_feature (1)..( 6): Result.001 file - promoters60/1007056
ggtgat

SEQ ID NO: 88885 - DNA, 11 bp, Unknown
  misc_feature (1)..( 11): Result.001 file - promoters60/1007056
accttctgtga

SEQ ID NO: 88886 - DNA, 11 bp, Unknown
  misc_feature (1)..( 11): Result.001 file - promoters60/1007056
accttctctga

SEQ ID NO: 88887 - DNA, 6 bp, Unknown
  misc_feature (1)..( 6): Result.001 file - promoters60/1007056
aaggct

SEQ ID NO: 88888 - DNA, 6 bp, Unknown
  misc_feature (1)..( 6): Result.001 file - promoters60/1007056
aaggct

SEQ ID NO: 88889 - DNA, 6 bp, Unknown
  misc_feature (1)..( 6): Result.001 file - promoters60/1007056
gatgca

SEQ ID NO: 88890 - DNA, 6 bp, Unknown
  misc_feature (1)..( 6): Result.001 file - promoters60/1007056
gatgca

SEQ ID NO: 88891 - DNA, 7 bp, Unknown
  misc_feature (1)..( 7): Result.001 file - promoters60/1007056
aacatct

SEQ ID NO: 88892 - DNA, 7 bp, Unknown
  misc_feature (1)..( 7): Result.001 file - promoters60/1007056
aacttct

SEQ ID NO: 88893 - DNA, 10 bp, Unknown
  misc_feature (1)..( 10): Result.001 file - promoters60/1007056
atcttttcta

SEQ ID NO: 88894 - DNA, 10 bp, Unknown
  misc_feature (1)..( 10): Result.001 file - promoters60/1007056
aagttttcta

SEQ ID NO: 88895 - DNA, 10 bp, Unknown
  misc_feature (1)..( 10): Result.001 file - promoters60/1007056
aagttctctg

SEQ ID NO: 88896 - DNA, 7 bp, Unknown
  misc_feature (1)..( 7): Result.001 file - promoters60/1007056
ctattca

SEQ ID NO: 88897 - DNA, 7 bp, Unknown
  misc_feature (1)..( 7): Result.001 file - promoters60/1007056
ctaatca

SEQ ID NO: 88898 - DNA, 6 bp, Unknown
  misc_feature (1)..( 6): Result.001 file - promoters60/1007056
ggtttt

SEQ ID NO: 88899 - DNA, 6 bp, Unknown
  misc_feature (1)..( 6): Result.001 file - promoters60/1007056
ggtttt

SEQ ID NO: 88900 - DNA, 6 bp, Unknown
  misc_feature (1)..( 6): Result.001 file - promoters60/1007056
ttttgt

SEQ ID NO: 88901 - DNA, 6 bp, Unknown
  misc_feature (1)..( 6): Result.001 file - promoters60/1007056
ttttgt

SEQ ID NO: 88902 - DNA, 6 bp, Unknown
  misc_feature (1)..( 6): Result.001 file - promoters60/1007056
ttgttt

SEQ ID NO: 88903 - DNA, 6 bp, Unknown
  misc_feature (1)..( 6): Result.001 file - promoters60/1007056
ttgttt

SEQ ID NO: 88904 - DNA, 6 bp, Unknown
  misc_feature (1)..( 6): Result.001 file - promoters60/1007056
atccaa

SEQ ID NO: 88905 - DNA, 6 bp, Unknown
  misc_feature (1)..( 6): Result.001 file - promoters60/1007056
atccaa

SEQ ID NO: 88906 - DNA, 7 bp, Unknown
  misc_feature (1)..( 7): Result.001 file - promoters60/1007056
tgccaag

SEQ ID NO: 88907 - DNA, 7 bp, Unknown
  misc_feature (1)..( 7): Result.001 file - promoters60/1007056
tgctaag

SEQ ID NO: 88908 - DNA, 7 bp, Unknown
  misc_feature (1)..( 7): Result.001 file - promoters60/1007056
tcatgaa

SEQ ID NO: 88909 - DNA, 7 bp, Unknown
  misc_feature (1)..( 7): Result.001 file - promoters60/1007056
tcaagaa

SEQ ID NO: 88910 - DNA, 6 bp, Unknown
  misc_feature (1)..( 6): Result.001 file - promoters60/1007056
agtcct

SEQ ID NO: 88911 - DNA, 6 bp, Unknown
  misc_feature (1)..( 6): Result.001 file - promoters60/1007056
agtcct

SEQ ID NO: 88912 - DNA, 6 bp, Unknown
  misc_feature (1)..( 6): Result.001 file - promoters60/1007056
gaggca

SEQ ID NO: 88913 - DNA, 6 bp, Unknown
  misc_feature (1)..( 6): Result.001 file - promoters60/1007056
gaggca

SEQ ID NO: 88914 - DNA, 7 bp, Unknown
  misc_feature (1)..( 7): Result.001 file - promoters60/1007056
tcaagaa

SEQ ID NO: 88915 - DNA, 7 bp, Unknown
  misc_feature (1)..( 7): Result.001 file - promoters60/1007139
tcatgaa

SEQ ID NO: 88916 - DNA, 11 bp, Unknown
  misc_feature (1)..( 11): Result.001 file - promoters60/1007139
cccccacaaaa

SEQ ID NO: 88917 - DNA, 11 bp, Unknown
  misc_feature (1)..( 11): Result.001 file - promoters60/1007139
ttttaacaaaa

SEQ ID NO: 88918 - DNA, 11 bp, Unknown
  misc_feature (1)..( 11): Result.001 file - promoters60/1007139
gtataataaag

SEQ ID NO: 88919 - DNA, 12 bp, Unknown
  misc_feature (1)..( 12): Result.001 file - promoters60/1007139
tttcaaccaaaa

SEQ ID NO: 88920 - DNA, 9 bp, Unknown
  misc_feature (1)..( 9): Result.001 file - promoters60/1007139
aaagttttg

SEQ ID NO: 88921 - DNA, 9 bp, Unknown
  misc_feature (1)..( 9): Result.001 file - promoters60/1007139
aaagttcaa

SEQ ID NO: 88922 - DNA, 9 bp, Unknown
  misc_feature (1)..( 9): Result.001 file - promoters60/1007139
caagttttg

SEQ ID NO: 88923 - DNA, 9 bp, Unknown
  misc_feature (1)..( 9): Result.001 file - promoters60/1007139
caagatcat

SEQ ID NO: 88924 - DNA, 10 bp, Unknown
  misc_feature (1)..( 10): Result.001 file - promoters60/1007139
aaatatatgt

SEQ ID NO: 88925 - DNA, 10 bp, Unknown
  misc_feature (1)..( 10): Result.001 file - promoters60/1007139
taatttatca

SEQ ID NO: 88926 - DNA, 11 bp, Unknown
  misc_feature (1)..( 11): Result.001 file - promoters60/1007139
ttgatatatac

SEQ ID NO: 88927 - DNA, 11 bp, Unknown
  misc_feature (1)..( 11): Result.001 file - promoters60/1007187
gaattatatgt

SEQ ID NO: 88928 - DNA, 9 bp, Unknown
  misc_feature (1)..( 9): Result.001 file - promoters60/1007187
aatttattt

SEQ ID NO: 88929 - DNA, 9 bp, Unknown
  misc_feature (1)..( 9): Result.001 file - promoters60/1007187
gatttatta

SEQ ID NO: 88930 - DNA, 9 bp, Unknown
  misc_feature (1)..( 9): Result.001 file - promoters60/1007187
aatttattt

SEQ ID NO: 88931 - DNA, 9 bp, Unknown
  misc_feature (1)..( 9): Result.001 file - promoters60/1007187
aaaatatta

SEQ ID NO: 88932 - DNA, 9 bp, Unknown
  misc_feature (1)..( 9): Result.001 file - promoters60/1007187
aaaagatta

SEQ ID NO: 88933 - DNA, 9 bp, Unknown
  misc_feature (1)..( 9): Result.001 file - promoters60/1007187
ttaatattt

SEQ ID NO: 88934 - DNA, 9 bp, Unknown
  misc_feature (1)..( 9): Result.001 file - promoters60/1007187
tgttaatct

SEQ ID NO: 88935 - DNA, 9 bp, Unknown
  misc_feature (1)..( 9): Result.001 file - promoters60/1007187
tgttaatag

SEQ ID NO: 88936 - DNA, 9 bp, Unknown
  misc_feature (1)..( 9): Result.001 file - promoters60/1007187
acttaatct

SEQ ID NO: 88937 - DNA, 7 bp, Unknown
  misc_feature (1)..( 7): Result.001 file - promoters60/1007187
aaatgat

SEQ ID NO: 88938 - DNA, 7 bp, Unknown
  misc_feature (1)..( 7): Result.001 file - promoters60/1007187
aaaagat

SEQ ID NO: 88939 - DNA, 9 bp, Unknown
  misc_feature (1)..( 9): Result.001 file - promoters60/1007187
ttttgtttt

SEQ ID NO: 88940 - DNA, 9 bp, Unknown
  misc_feature (1)..( 9): Result.001 file - promoters60/1007187
tttggtttt

SEQ ID NO: 88941 - DNA, 12 bp, Unknown
  misc_feature (1)..( 12): Result.001 file - promoters60/1007187
tttttaacaatt

SEQ ID NO: 88942 - DNA, 12 bp, Unknown
  misc_feature (1)..( 12): Result.001 file - promoters60/1007187
ttttctacaatt

SEQ ID NO: 88943 - DNA, 12 bp, Unknown
  misc_feature (1)..( 12): Result.001 file - promoters60/1007187
ttttctaaaata

SEQ ID NO: 88944 - DNA, 7 bp, Unknown
  misc_feature (1)..( 7): Result.001 file - promoters60/1007187
tttttct

SEQ ID NO: 88945 - DNA, 7 bp, Unknown
  misc_feature (1)..( 7): Result.001 file - promoters60/1007187
gttttct

SEQ ID NO: 88946 - DNA, 7 bp, Unknown
  misc_feature (1)..( 7): Result.001 file - promoters60/1007187
tttttct

SEQ ID NO: 88947 - DNA, 8 bp, Unknown
  misc_feature (1)..( 8): Result.001 file - promoters60/1007187
tgaggaat

SEQ ID NO: 88948 - DNA, 8 bp, Unknown
  misc_feature (1)..( 8): Result.001 file - promoters60/1007187
tgatgaat

SEQ ID NO: 88949 - DNA, 7 bp, Unknown
  misc_feature (1)..( 7): Result.001 file - promoters60/1007187
caaacgc

SEQ ID NO: 88950 - DNA, 7 bp, Unknown
  misc_feature (1)..( 7): Result.001 file - promoters60/1007187
caatcgc

SEQ ID NO: 88951 - DNA, 6 bp, Unknown
  misc_feature (1)..( 6): Result.001 file - promoters60/1007187
aatttt

SEQ ID NO: 88952 - DNA, 6 bp, Unknown
  misc_feature (1)..( 6): Result.001 file - promoters60/1007187
aatttt

SEQ ID NO: 88953 - DNA, 6 bp, Unknown
  misc_feature (1)..( 6): Result.001 file - promoters60/1007187
aatttt

SEQ ID NO: 88954 - DNA, 9 bp, Unknown
  misc_feature (1)..( 9): Result.001 file - promoters60/1007187
tattttgga

SEQ ID NO: 88955 - DNA, 9 bp, Unknown
  misc_feature (1)..( 9): Result.001 file - promoters60/1007187
tatttttac

SEQ ID NO: 88956 - DNA, 9 bp, Unknown
  misc_feature (1)..( 9): Result.001 file - promoters60/1007187
aattttttt

SEQ ID NO: 88957 - DNA, 9 bp, Unknown
  misc_feature (1)..( 9): Result.001 file - promoters60/1007187
aatattgca

SEQ ID NO: 88958 - DNA, 9 bp, Unknown
  misc_feature (1)..( 9): Result.001 file - promoters60/1007187
aatattttt

SEQ ID NO: 88959 - DNA, 9 bp, Unknown
  misc_feature (1)..( 9): Result.001 file - promoters60/1007187
aattttttt

SEQ ID NO: 88960 - DNA, 8 bp, Unknown
  misc_feature (1)..( 8): Result.001 file - promoters60/1007187
ttttaaat

SEQ ID NO: 88961 - DNA, 8 bp, Unknown
  misc_feature (1)..( 8): Result.001 file - promoters60/1007187
atttaaaa

SEQ ID NO: 88962 - DNA, 7 bp, Unknown
  misc_feature (1)..( 7): Result.001 file - promoters60/1007187
taaataa

SEQ ID NO: 88963 - DNA, 7 bp, Unknown
  misc_feature (1)..( 7): Result.001 file - promoters60/1007187
taattaa

SEQ ID NO: 88964 - DNA, 7 bp, Unknown
  misc_feature (1)..( 7): Result.001 file - promoters60/1007187
ttgtttt

SEQ ID NO: 88965 - DNA, 7 bp, Unknown
  misc_feature (1)..( 7): Result.001 file - promoters60/1007187
ttgtttt

SEQ ID NO: 88966 - DNA, 8 bp, Unknown
  misc_feature (1)..( 8): Result.001 file - promoters60/1007187
attggatg

SEQ ID NO: 88967 - DNA, 8 bp, Unknown
  misc_feature (1)..( 8): Result.001 file - promoters60/1007187
attgtatg

SEQ ID NO: 88968 - DNA, 6 bp, Unknown
  misc_feature (1)..( 6): Result.001 file - promoters60/1007187
tccaaa

SEQ ID NO: 88969 - DNA, 6 bp, Unknown
  misc_feature (1)..( 6): Result.001 file - promoters60/1007187
tccaaa

SEQ ID NO: 88970 - DNA, 6 bp, Unknown
  misc_feature (1)..( 6): Result.001 file - promoters60/1007187
tatttt

SEQ ID NO: 88971 - DNA, 6 bp, Unknown
  misc_feature (1)..( 6): Result.001 file - promoters60/1007187
tatttt

SEQ ID NO: 88972 - DNA, 6 bp, Unknown
  misc_feature (1)..( 6): Result.001 file - promoters60/1007187
ttaaaa

SEQ ID NO: 88973 - DNA, 6 bp, Unknown
  misc_feature (1)..( 6): Result.001 file - promoters60/1007187
ttaaaa

SEQ ID NO: 88974 - DNA, 9 bp, Unknown
  misc_feature (1)..( 9): Result.001 file - promoters60/1007187
ataagaaaa

SEQ ID NO: 88975 - DNA, 9 bp, Unknown
  misc_feature (1)..( 9): Result.001 file - promoters60/1007187
ataacaaaa

SEQ ID NO: 88976 - DNA, 7 bp, Unknown
  misc_feature (1)..( 7): Result.001 file - promoters60/1007187
taataat

SEQ ID NO: 88977 - DNA, 7 bp, Unknown
  misc_feature (1)..( 7): Result.001 file - promoters60/1007187
taataat

SEQ ID NO: 88978 - DNA, 6 bp, Unknown
  misc_feature (1)..( 6): Result.001 file - promoters60/1007187
atattt

SEQ ID NO: 88979 - DNA, 6 bp, Unknown
  misc_feature (1)..( 6): Result.001 file - promoters60/1007187
atattt

SEQ ID NO: 88980 - DNA, 7 bp, Unknown
  misc_feature (1)..( 7): Result.001 file - promoters60/1007187
tatccaa

SEQ ID NO: 88981 - DNA, 7 bp, Unknown
  misc_feature (1)..( 7): Result.001 file - promoters60/1007187
tatacaa

SEQ ID NO: 88982 - DNA, 7 bp, Unknown
  misc_feature (1)..( 7): Result.001 file - promoters60/1007187
tataatt

SEQ ID NO: 88983 - DNA, 7 bp, Unknown
  misc_feature (1)..( 7): Result.001 file - promoters60/1007187
tatgatt

SEQ ID NO: 88984 - DNA, 6 bp, Unknown
  misc_feature (1)..( 6): Result.001 file - promoters60/1007187
aaaaaa

SEQ ID NO: 88985 - DNA, 6 bp, Unknown
  misc_feature (1)..( 6): Result.001 file - promoters60/1007187
aaaaaa

SEQ ID NO: 88986 - DNA, 8 bp, Unknown
  misc_feature (1)..( 8): Result.001 file - promoters60/1007187
taaatttc

SEQ ID NO: 88987 - DNA, 8 bp, Unknown
  misc_feature (1)..( 8): Result.001 file - promoters60/1007187
taactttc

SEQ ID NO: 88988 - DNA, 7 bp, Unknown
  misc_feature (1)..( 7): Result.001 file - promoters60/1007187
aagagaa

SEQ ID NO: 88989 - DNA, 7 bp, Unknown
  misc_feature (1)..( 7): Result.001 file - promoters60/1007187
aagtgaa

SEQ ID NO: 88990 - DNA, 8 bp, Unknown
  misc_feature (1)..( 8): Result.001 file - promoters60/1007187
atggcttg

SEQ ID NO: 88991 - DNA, 8 bp, Unknown
  misc_feature (1)..( 8): Result.001 file - promoters60/1007269
atgggttg

SEQ ID NO: 88992 - DNA, 12 bp, Unknown
  misc_feature (1)..( 12): Result.001 file - promoters60/1007269
cccaaacaaatt

SEQ ID NO: 88993 - DNA, 12 bp, Unknown
  misc_feature (1)..( 12): Result.001 file - promoters60/1007269
tggaaacgaatt

SEQ ID NO: 88994 - DNA, 12 bp, Unknown
  misc_feature (1)..( 12): Result.001 file - promoters60/1007269
tggaaacggtga

SEQ ID NO: 88995 - DNA, 10 bp, Unknown
  misc_feature (1)..( 10): Result.001 file - promoters60/1007269
gaaacgtttt

SEQ ID NO: 88996 - DNA, 10 bp, Unknown
  misc_feature (1)..( 10): Result.001 file - promoters60/1007269
tattcgtttt

SEQ ID NO: 88997 - DNA, 10 bp, Unknown
  misc_feature (1)..( 10): Result.001 file - promoters60/1007269
tatttgtttt

SEQ ID NO: 88998 - DNA, 10 bp, Unknown
  misc_feature (1)..( 10): Result.001 file - promoters60/1007269
taaaaaagat

SEQ ID NO: 88999 - DNA, 10 bp, Unknown
  misc_feature (1)..( 10): Result.001 file - promoters60/1007269
taaaatagat

SEQ ID NO: 89000 - DNA, 10 bp, Unknown
  misc_feature (1)..( 10): Result.001 file - promoters60/1007269
gttaatagac

SEQ ID NO: 89001 - DNA, 9 bp, Unknown
  misc_feature (1)..( 9): Result.001 file - promoters60/1007269
ttaaaacaa

SEQ ID NO: 89002 - DNA, 9 bp, Unknown
  misc_feature (1)..( 9): Result.001 file - promoters60/1007269
ataaaacct

SEQ ID NO: 89003 - DNA, 9 bp, Unknown
  misc_feature (1)..( 9): Result.001 file - promoters60/1007289
ataaaccct

SEQ ID NO: 89004 - DNA, 8 bp, Unknown
  misc_feature (1)..( 8): Result.001 file - promoters60/1007289
ttttctta

SEQ ID NO: 89005 - DNA, 8 bp, Unknown
  misc_feature (1)..( 8): Result.001 file - promoters60/1007289
tttacttt

SEQ ID NO: 89006 - DNA, 8 bp, Unknown
  misc_feature (1)..( 8): Result.001 file - promoters60/1007289
atttgtta

SEQ ID NO: 89007 - DNA, 8 bp, Unknown
  misc_feature (1)..( 8): Result.001 file - promoters60/1007289
atttgtat

SEQ ID NO: 89008 - DNA, 11 bp, Unknown
  misc_feature (1)..( 11): Result.001 file - promoters60/1007289
ttcaatgataa

SEQ ID NO: 89009 - DNA, 11 bp, Unknown
  misc_feature (1)..( 11): Result.001 file - promoters60/1007289
aataattataa

SEQ ID NO: 89010 - DNA, 11 bp, Unknown
  misc_feature (1)..( 11): Result.001 file - promoters60/1007289
ttcaatgactc

SEQ ID NO: 89011 - DNA, 11 bp, Unknown
  misc_feature (1)..( 11): Result.001 file - promoters60/1007289
gtgaattattc

SEQ ID NO: 89012 - DNA, 12 bp, Unknown
  misc_feature (1)..( 12): Result.001 file - promoters60/1007289
taaacagaagat

SEQ ID NO: 89013 - DNA, 12 bp, Unknown
  misc_feature (1)..( 12): Result.001 file - promoters60/1007289
ggtttagaagaa

SEQ ID NO: 89014 - DNA, 12 bp, Unknown
  misc_feature (1)..( 12): Result.001 file - promoters60/1007289
gacgaagaagat

SEQ ID NO: 89015 - DNA, 12 bp, Unknown
  misc_feature (1)..( 12): Result.001 file - promoters60/1007289
ttataagaagaa

SEQ ID NO: 89016 - DNA, 7 bp, Unknown
  misc_feature (1)..( 7): Result.001 file - promoters60/1007289
ataaagc

SEQ ID NO: 89017 - DNA, 7 bp, Unknown
  misc_feature (1)..( 7): Result.001 file - promoters60/1007289
ataaagt

SEQ ID NO: 89018 - DNA, 7 bp, Unknown
  misc_feature (1)..( 7): Result.001 file - promoters60/1007289
aaaaaaa

SEQ ID NO: 89019 - DNA, 7 bp, Unknown
  misc_feature (1)..( 7): Result.001 file - promoters60/1007348
aaaaaaa

SEQ ID NO: 89020 - DNA, 7 bp, Unknown
  misc_feature (1)..( 7): Result.001 file - promoters60/1007348
tgtaatt

SEQ ID NO: 89021 - DNA, 7 bp, Unknown
  misc_feature (1)..( 7): Result.001 file - promoters60/1007348
tgttatt

SEQ ID NO: 89022 - DNA, 6 bp, Unknown
  misc_feature (1)..( 6): Result.001 file - promoters60/1007348
gatctt

SEQ ID NO: 89023 - DNA, 6 bp, Unknown
  misc_feature (1)..( 6): Result.001 file - promoters60/1007348
gatctt

SEQ ID NO: 89024 - DNA, 8 bp, Unknown
  misc_feature (1)..( 8): Result.001 file - promoters60/1007348
tatgtttt

SEQ ID NO: 89025 - DNA, 8 bp, Unknown
  misc_feature (1)..( 8): Result.001 file - promoters60/1007348
tatgtttt

SEQ ID NO: 89026 - DNA, 7 bp, Unknown
  misc_feature (1)..( 7): Result.001 file - promoters60/1007348
ttataac

SEQ ID NO: 89027 - DNA, 7 bp, Unknown
  misc_feature (1)..( 7): Result.001 file - promoters60/1007348
ttaaaac

SEQ ID NO: 89028 - DNA, 7 bp, Unknown
  misc_feature (1)..( 7): Result.001 file - promoters60/1007348
attgttt

SEQ ID NO: 89029 - DNA, 7 bp, Unknown
  misc_feature (1)..( 7): Result.001 file - promoters60/1007348
attgttt

SEQ ID NO: 89030 - DNA, 7 bp, Unknown
  misc_feature (1)..( 7): Result.001 file - promoters60/1007348
atccaca

SEQ ID NO: 89031 - DNA, 7 bp, Unknown
  misc_feature (1)..( 7): Result.001 file - promoters60/1007348
atccaca

SEQ ID NO: 89032 - DNA, 8 bp, Unknown
  misc_feature (1)..( 8): Result.001 file - promoters60/1007348
tatttttc

SEQ ID NO: 89033 - DNA, 8 bp, Unknown
  misc_feature (1)..( 8): Result.001 file - promoters60/1007348
tatttttc

SEQ ID NO: 89034 - DNA, 8 bp, Unknown
  misc_feature (1)..( 8): Result.001 file - promoters60/1007348
atatttaa

SEQ ID NO: 89035 - DNA, 8 bp, Unknown
  misc_feature (1)..( 8): Result.001 file - promoters60/1007348
atatgtaa

SEQ ID NO: 89036 - DNA, 6 bp, Unknown
  misc_feature (1)..( 6): Result.001 file - promoters60/1007348
gtttaa

SEQ ID NO: 89037 - DNA, 6 bp, Unknown
  misc_feature (1)..( 6): Result.001 file - promoters60/1007348
gtttaa

SEQ ID NO: 89038 - DNA, 7 bp, Unknown
  misc_feature (1)..( 7): Result.001 file - promoters60/1007348
ctctttt

SEQ ID NO: 89039 - DNA, 7 bp, Unknown
  misc_feature (1)..( 7): Result.001 file - promoters60/1007348
ctctttt

SEQ ID NO: 89040 - DNA, 8 bp, Unknown
  misc_feature (1)..( 8): Result.001 file - promoters60/1007348
ataacatc

SEQ ID NO: 89041 - DNA, 8 bp, Unknown
  misc_feature (1)..( 8): Result.001 file - promoters60/1007348
atatcatc

SEQ ID NO: 89042 - DNA, 8 bp, Unknown
  misc_feature (1)..( 8): Result.001 file - promoters60/1007348
cacataga

SEQ ID NO: 89043 - DNA, 8 bp, Unknown
  misc_feature (1)..( 8): Result.001 file - promoters60/1007348
cacaaaga

SEQ ID NO: 89044 - DNA, 11 bp, Unknown
  misc_feature (1)..( 11): Result.001 file - promoters60/1007348
accaataagaa

SEQ ID NO: 89045 - DNA, 11 bp, Unknown
  misc_feature (1)..( 11): Result.001 file - promoters60/1007348
accaatcagaa

SEQ ID NO: 89046 - DNA, 8 bp, Unknown
  misc_feature (1)..( 8): Result.001 file - promoters60/1007348
aaaataag

SEQ ID NO: 89047 - DNA, 8 bp, Unknown
  misc_feature (1)..( 8): Result.001 file - promoters60/1007348
aaactaag

SEQ ID NO: 89048 - DNA, 8 bp, Unknown
  misc_feature (1)..( 8): Result.001 file - promoters60/1007348
taagttgt

SEQ ID NO: 89049 - DNA, 8 bp, Unknown
  misc_feature (1)..( 8): Result.001 file - promoters60/1007348
taaattgt

SEQ ID NO: 89050 - DNA, 6 bp, Unknown
  misc_feature (1)..( 6): Result.001 file - promoters60/1007348
atagat

SEQ ID NO: 89051 - DNA, 6 bp, Unknown
  misc_feature (1)..( 6): Result.001 file - promoters60/1007348
atagat

SEQ ID NO: 89052 - DNA, 7 bp, Unknown
  misc_feature (1)..( 7): Result.001 file - promoters60/1007348
agatata

SEQ ID NO: 89053 - DNA, 7 bp, Unknown
  misc_feature (1)..( 7): Result.001 file - promoters60/1007348
agagata

SEQ ID NO: 89054 - DNA, 6 bp, Unknown
  misc_feature (1)..( 6): Result.001 file - promoters60/1007348
ttttgg

SEQ ID NO: 89055 - DNA, 6 bp, Unknown
  misc_feature (1)..( 6): Result.001 file - promoters60/1007348
ttttgg

SEQ ID NO: 89056 - DNA, 6 bp, Unknown
  misc_feature (1)..( 6): Result.001 file - promoters60/1007348
taagat

SEQ ID NO: 89057 - DNA, 6 bp, Unknown
  misc_feature (1)..( 6): Result.001 file - promoters60/1007348
taagat

SEQ ID NO: 89058 - DNA, 6 bp, Unknown
  misc_feature (1)..( 6): Result.001 file - promoters60/1007348
aaagaa

SEQ ID NO: 89059 - DNA, 6 bp, Unknown
  misc_feature (1)..( 6): Result.001 file - promoters60/1007348
aaagaa

SEQ ID NO: 89060 - DNA, 12 bp, Unknown
  misc_feature (1)..( 12): Result.001 file - promoters60/1007348
aaaaacaaaaca

SEQ ID NO: 89061 - DNA, 12 bp, Unknown
  misc_feature (1)..( 12): Result.001 file - promoters60/1007348
aaacacaataca

SEQ ID NO: 89062 - DNA, 6 bp, Unknown
  misc_feature (1)..( 6): Result.001 file - promoters60/1007348
aaaaat

SEQ ID NO: 89063 - DNA, 6 bp, Unknown
  misc_feature (1)..( 6): Result.001 file - promoters60/1007348
aaaaat

SEQ ID NO: 89064 - DNA, 6 bp, Unknown
  misc_feature (1)..( 6): Result.001 file - promoters60/1007348
taaccc

SEQ ID NO: 89065 - DNA, 6 bp, Unknown
  misc_feature (1)..( 6): Result.001 file - promoters60/1007370
taaccc

SEQ ID NO: 89066 - DNA, 13 bp, Unknown
  misc_feature (1)..( 13): Result.001 file - promoters60/1007370
caacaatgtacaa

SEQ ID NO: 89067 - DNA, 13 bp, Unknown
  misc_feature (1)..( 13): Result.001 file - promoters60/1007370
caataatttacat

SEQ ID NO: 89068 - DNA, 13 bp, Unknown
  misc_feature (1)..( 13): Result.001 file - promoters60/1007370
ttacaatttacaa

SEQ ID NO: 89069 - DNA, 13 bp, Unknown
  misc_feature (1)..( 13): Result.001 file - promoters60/1007370
gaataataaaatg

SEQ ID NO: 89070 - DNA, 13 bp, Unknown
  misc_feature (1)..( 13): Result.001 file - promoters60/1007370
attttattaaaat

SEQ ID NO: 89071 - DNA, 13 bp, Unknown
  misc_feature (1)..( 13): Result.001 file - promoters60/1007370
gtataatttaatg

SEQ ID NO: 89072 - DNA, 11 bp, Unknown
  misc_feature (1)..( 11): Result.001 file - promoters60/1007370
aatttatctca

SEQ ID NO: 89073 - DNA, 11 bp, Unknown
  misc_feature (1)..( 11): Result.001 file - promoters60/1007370
attttttcttt

SEQ ID NO: 89074 - DNA, 11 bp, Unknown
  misc_feature (1)..( 11): Result.001 file - promoters60/1007370
aatttctctac

SEQ ID NO: 89075 - DNA, 11 bp, Unknown
  misc_feature (1)..( 11): Result.001 file - promoters60/1007370
tatttatgaaa

SEQ ID NO: 89076 - DNA, 11 bp, Unknown
  misc_feature (1)..( 11): Result.001 file - promoters60/1007370
tcattttgttt

SEQ ID NO: 89077 - DNA, 11 bp, Unknown
  misc_feature (1)..( 11): Result.001 file - promoters60/1007370
gattttgatgg

SEQ ID NO: 89078 - DNA, 12 bp, Unknown
  misc_feature (1)..( 12): Result.001 file - promoters60/1007370
agaatttttgta

SEQ ID NO: 89079 - DNA, 12 bp, Unknown
  misc_feature (1)..( 12): Result.001 file - promoters60/1007370
tgcatttttatt

SEQ ID NO: 89080 - DNA, 12 bp, Unknown
  misc_feature (1)..( 12): Result.001 file - promoters60/1007370
agaattttctgg

SEQ ID NO: 89081 - DNA, 12 bp, Unknown
  misc_feature (1)..( 12): Result.001 file - promoters60/1007370
atattttatatt

SEQ ID NO: 89082 - DNA, 12 bp, Unknown
  misc_feature (1)..( 12): Result.001 file - promoters60/1007370
actatttgataa

SEQ ID NO: 89083 - DNA, 12 bp, Unknown
  misc_feature (1)..( 12): Result.001 file - promoters60/1007524
tctaattgaaga

SEQ ID NO: 89084 - DNA, 9 bp, Unknown
  misc_feature (1)..( 9): Result.001 file - promoters60/1007524
tcttgtaaa

SEQ ID NO: 89085 - DNA, 9 bp, Unknown
  misc_feature (1)..( 9): Result.001 file - promoters60/1007524
tcttttaac

SEQ ID NO: 89086 - DNA, 10 bp, Unknown
  misc_feature (1)..( 10): Result.001 file - promoters60/1007524
cgatgtgaaa

SEQ ID NO: 89087 - DNA, 10 bp, Unknown
  misc_feature (1)..( 10): Result.001 file - promoters60/1007554
ggggtttaac

SEQ ID NO: 89088 - DNA, 9 bp, Unknown
  misc_feature (1)..( 9): Result.001 file - promoters60/1007554
atttgttag

SEQ ID NO: 89089 - DNA, 9 bp, Unknown
  misc_feature (1)..( 9): Result.001 file - promoters60/1007554
atttgtgta

SEQ ID NO: 89090 - DNA, 9 bp, Unknown
  misc_feature (1)..( 9): Result.001 file - promoters60/1007554
atttatgta

SEQ ID NO: 89091 - DNA, 9 bp, Unknown
  misc_feature (1)..( 9): Result.001 file - promoters60/1007554
atttattta

SEQ ID NO: 89092 - DNA, 8 bp, Unknown
  misc_feature (1)..( 8): Result.001 file - promoters60/1007554
aaaaataa

SEQ ID NO: 89093 - DNA, 8 bp, Unknown
  misc_feature (1)..( 8): Result.001 file - promoters60/1007554
taaagtaa

SEQ ID NO: 89094 - DNA, 8 bp, Unknown
  misc_feature (1)..( 8): Result.001 file - promoters60/1007554
aaaaattg

SEQ ID NO: 89095 - DNA, 8 bp, Unknown
  misc_feature (1)..( 8): Result.001 file - promoters60/1007554
caaaatat

SEQ ID NO: 89096 - DNA, 11 bp, Unknown
  misc_feature (1)..( 11): Result.001 file - promoters60/1007554
tataattttaa

SEQ ID NO: 89097 - DNA, 11 bp, Unknown
  misc_feature (1)..( 11): Result.001 file - promoters60/1007554
tttaattttat

SEQ ID NO: 89098 - DNA, 11 bp, Unknown
  misc_feature (1)..( 11): Result.001 file - promoters60/1007554
tttgattgaat

SEQ ID NO: 89099 - DNA, 11 bp, Unknown
  misc_feature (1)..( 11): Result.001 file - promoters60/1007576
tggctttttat

SEQ ID NO: 89100 - DNA, 7 bp, Unknown
  misc_feature (1)..( 7): Result.001 file - promoters60/1007576
aaacaaa

SEQ ID NO: 89101 - DNA, 7 bp, Unknown
  misc_feature (1)..( 7): Result.001 file - promoters60/1007576
aaagaaa

SEQ ID NO: 89102 - DNA, 10 bp, Unknown
  misc_feature (1)..( 10): Result.001 file - promoters60/1007576
ctggaatatg

SEQ ID NO: 89103 - DNA, 10 bp, Unknown
  misc_feature (1)..( 10): Result.001 file - promoters60/1007576
ctggaaaatg

SEQ ID NO: 89104 - DNA, 10 bp, Unknown
  misc_feature (1)..( 10): Result.001 file - promoters60/1007576
agggaaaagg

SEQ ID NO: 89105 - DNA, 6 bp, Unknown
  misc_feature (1)..( 6): Result.001 file - promoters60/1007576
aatgat

SEQ ID NO: 89106 - DNA, 6 bp, Unknown
  misc_feature (1)..( 6): Result.001 file - promoters60/1007576
aatgat

SEQ ID NO: 89107 - DNA, 8 bp, Unknown
  misc_feature (1)..( 8): Result.001 file - promoters60/1007576
cttctata

SEQ ID NO: 89108 - DNA, 8 bp, Unknown
  misc_feature (1)..( 8): Result.001 file - promoters60/1007576
cttcgata

SEQ ID NO: 89109 - DNA, 7 bp, Unknown
  misc_feature (1)..( 7): Result.001 file - promoters60/1007576
tcaggaa

SEQ ID NO: 89110 - DNA, 7 bp, Unknown
  misc_feature (1)..( 7): Result.001 file - promoters60/1007576
tcaggaa

SEQ ID NO: 89111 - DNA, 6 bp, Unknown
  misc_feature (1)..( 6): Result.001 file - promoters60/1007576
ttttct

SEQ ID NO: 89112 - DNA, 6 bp, Unknown
  misc_feature (1)..( 6): Result.001 file - promoters60/1007576
ttttct

SEQ ID NO: 89113 - DNA, 6 bp, Unknown
  misc_feature (1)..( 6): Result.001 file - promoters60/1007576
tgaaat

SEQ ID NO: 89114 - DNA, 6 bp, Unknown
  misc_feature (1)..( 6): Result.001 file - promoters60/1007576
tgaaat

SEQ ID NO: 89115 - DNA, 8 bp, Unknown
  misc_feature (1)..( 8): Result.001 file - promoters60/1007576
gtttctca

SEQ ID NO: 89116 - DNA, 8 bp, Unknown
  misc_feature (1)..( 8): Result.001 file - promoters60/1007576
gtttctca

SEQ ID NO: 89117 - DNA, 6 bp, Unknown
  misc_feature (1)..( 6): Result.001 file - promoters60/1007576
tatatt

SEQ ID NO: 89118 - DNA, 6 bp, Unknown
  misc_feature (1)..( 6): Result.001 file - promoters60/1007576
tatatt

SEQ ID NO: 89119 - DNA, 6 bp, Unknown
  misc_feature (1)..( 6): Result.001 file - promoters60/1007576
gatggt

SEQ ID NO: 89120 - DNA, 6 bp, Unknown
  misc_feature (1)..( 6): Result.001 file - promoters60/1007576
gatggt

SEQ ID NO: 89121 - DNA, 7 bp, Unknown
  misc_feature (1)..( 7): Result.001 file - promoters60/1007576
tctgttg

SEQ ID NO: 89122 - DNA, 7 bp, Unknown
  misc_feature (1)..( 7): Result.001 file - promoters60/1007576
tctcttg

SEQ ID NO: 89123 - DNA, 7 bp, Unknown
  misc_feature (1)..( 7): Result.001 file - promoters60/1007576
tttactc

SEQ ID NO: 89124 - DNA, 7 bp, Unknown
  misc_feature (1)..( 7): Result.001 file - promoters60/1007576
tttgctc

SEQ ID NO: 89125 - DNA, 7 bp, Unknown
  misc_feature (1)..( 7): Result.001 file - promoters60/1007576
ctgaaac

SEQ ID NO: 89126 - DNA, 7 bp, Unknown
  misc_feature (1)..( 7): Result.001 file - promoters60/1007639
ctgcaac

SEQ ID NO: 89127 - DNA, 10 bp, Unknown
  misc_feature (1)..( 10): Result.001 file - promoters60/1007639
cacaaaacat

SEQ ID NO: 89128 - DNA, 10 bp, Unknown
  misc_feature (1)..( 10): Result.001 file - promoters60/1007639
cacaaagact

SEQ ID NO: 89129 - DNA, 10 bp, Unknown
  misc_feature (1)..( 10): Result.001 file - promoters60/1007639
tacaaaaact

SEQ ID NO: 89130 - DNA, 10 bp, Unknown
  misc_feature (1)..( 10): Result.001 file - promoters60/1007639
tacaaatttg

SEQ ID NO: 89131 - DNA, 10 bp, Unknown
  misc_feature (1)..( 10): Result.001 file - promoters60/1007639
ccgaaaacta

SEQ ID NO: 89132 - DNA, 10 bp, Unknown
  misc_feature (1)..( 10): Result.001 file - promoters60/1007639
actaaaaact

SEQ ID NO: 89133 - DNA, 12 bp, Unknown
  misc_feature (1)..( 12): Result.001 file - promoters60/1007639
tataatatttcc

SEQ ID NO: 89134 - DNA, 12 bp, Unknown
  misc_feature (1)..( 12): Result.001 file - promoters60/1007639
tataatctttta

SEQ ID NO: 89135 - DNA, 12 bp, Unknown
  misc_feature (1)..( 12): Result.001 file - promoters60/1007639
tcgaaattttaa

SEQ ID NO: 89136 - DNA, 12 bp, Unknown
  misc_feature (1)..( 12): Result.001 file - promoters60/1007639
atgggtcttttt

SEQ ID NO: 89137 - DNA, 11 bp, Unknown
  misc_feature (1)..( 11): Result.001 file - promoters60/1007639
ccgaagtttct

SEQ ID NO: 89138 - DNA, 9 bp, Unknown
  misc_feature (1)..( 9): Result.001 file - promoters60/1007639
taaatttct

SEQ ID NO: 89139 - DNA, 16 bp, Unknown
  misc_feature (1)..( 16): Result.001 file - promoters60/1007639
tagaagaaagaaacct

SEQ ID NO: 89140 - DNA, 16 bp, Unknown
  misc_feature (1)..( 16): Result.001 file - promoters60/1007639
tagaagaaaaaaattt

SEQ ID NO: 89141 - DNA, 16 bp, Unknown
  misc_feature (1)..( 16): Result.001 file - promoters60/1007639
aatacaaaacaaaata

SEQ ID NO: 89142 - DNA, 16 bp, Unknown
  misc_feature (1)..( 16): Result.001 file - promoters60/1007639
tgacaaaaacaaattt

SEQ ID NO: 89143 - DNA, 16 bp, Unknown
  misc_feature (1)..( 16): Result.001 file - promoters60/1007639
tgacaaaaacaaattt

SEQ ID NO: 89144 - DNA, 16 bp, Unknown
  misc_feature (1)..( 16): Result.001 file - promoters60/1007639
caaattaaacaagtaa

SEQ ID NO: 89145 - DNA, 17 bp, Unknown
  misc_feature (1)..( 17): Result.001 file - promoters60/1007639
ttgatcaaatcaaatct

SEQ ID NO: 89146 - DNA, 9 bp, Unknown
  misc_feature (1)..( 9): Result.001 file - promoters60/1007639
atacattca

SEQ ID NO: 89147 - DNA, 9 bp, Unknown
  misc_feature (1)..( 9): Result.001 file - promoters60/1007639
ataaattta

SEQ ID NO: 89148 - DNA, 9 bp, Unknown
  misc_feature (1)..( 9): Result.001 file - promoters60/1007639
gaaaattta

SEQ ID NO: 89149 - DNA, 9 bp, Unknown
  misc_feature (1)..( 9): Result.001 file - promoters60/1007639
acaaatttg

SEQ ID NO: 89150 - DNA, 9 bp, Unknown
  misc_feature (1)..( 9): Result.001 file - promoters60/1007639
aaaaacttg

SEQ ID NO: 89151 - DNA, 9 bp, Unknown
  misc_feature (1)..( 9): Result.001 file - promoters60/1007639
gaaaactac

SEQ ID NO: 89152 - DNA, 9 bp, Unknown
  misc_feature (1)..( 9): Result.001 file - promoters60/1007639
aaaaactct

SEQ ID NO: 89153 - DNA, 9 bp, Unknown
  misc_feature (1)..( 9): Result.001 file - promoters60/1007639
ataacttta

SEQ ID NO: 89154 - DNA, 10 bp, Unknown
  misc_feature (1)..( 10): Result.001 file - promoters60/1007639
gaaaatttat

SEQ ID NO: 89155 - DNA, 10 bp, Unknown
  misc_feature (1)..( 10): Result.001 file - promoters60/1007639
acaaatttgt

SEQ ID NO: 89156 - DNA, 10 bp, Unknown
  misc_feature (1)..( 10): Result.001 file - promoters60/1007639
ataaatttag

SEQ ID NO: 89157 - DNA, 10 bp, Unknown
  misc_feature (1)..( 10): Result.001 file - promoters60/1007639
aaaaacttgg

SEQ ID NO: 89158 - DNA, 10 bp, Unknown
  misc_feature (1)..( 10): Result.001 file - promoters60/1007639
gaaaactact

SEQ ID NO: 89159 - DNA, 10 bp, Unknown
  misc_feature (1)..( 10): Result.001 file - promoters60/1007639
aaaaactcta

SEQ ID NO: 89160 - DNA, 10 bp, Unknown
  misc_feature (1)..( 10): Result.001 file - promoters60/1007639
aataacttta

SEQ ID NO: 89161 - DNA, 12 bp, Unknown
  misc_feature (1)..( 12): Result.001 file - promoters60/1007639
gttttctgtttg

SEQ ID NO: 89162 - DNA, 12 bp, Unknown
  misc_feature (1)..( 12): Result.001 file - promoters60/1007639
aatttttgtaga

SEQ ID NO: 89163 - DNA, 12 bp, Unknown
  misc_feature (1)..( 12): Result.001 file - promoters60/1007639
tttttctatcca

SEQ ID NO: 89164 - DNA, 12 bp, Unknown
  misc_feature (1)..( 12): Result.001 file - promoters60/1007639
tctttttacatt

SEQ ID NO: 89165 - DNA, 12 bp, Unknown
  misc_feature (1)..( 12): Result.001 file - promoters60/1007639
tgtttatataaa

SEQ ID NO: 89166 - DNA, 12 bp, Unknown
  misc_feature (1)..( 12): Result.001 file - promoters60/1007639
tggttatatagt

SEQ ID NO: 89167 - DNA, 12 bp, Unknown
  misc_feature (1)..( 12): Result.001 file - promoters60/1007675
atattacatagt

SEQ ID NO: 89168 - DNA, 8 bp, Unknown
  misc_feature (1)..( 8): Result.001 file - promoters60/1007675
ctataaag

SEQ ID NO: 89169 - DNA, 8 bp, Unknown
  misc_feature (1)..( 8): Result.001 file - promoters60/1007675
ctagaaag

SEQ ID NO: 89170 - DNA, 6 bp, Unknown
  misc_feature (1)..( 6): Result.001 file - promoters60/1007675
gagata

SEQ ID NO: 89171 - DNA, 6 bp, Unknown
  misc_feature (1)..( 6): Result.001 file - promoters60/1007675
gagata

SEQ ID NO: 89172 - DNA, 6 bp, Unknown
  misc_feature (1)..( 6): Result.001 file - promoters60/1007675
caagac

SEQ ID NO: 89173 - DNA, 6 bp, Unknown
  misc_feature (1)..( 6): Result.001 file - promoters60/1007675
caagac

SEQ ID NO: 89174 - DNA, 7 bp, Unknown
  misc_feature (1)..( 7): Result.001 file - promoters60/1007675
taatatt

SEQ ID NO: 89175 - DNA, 7 bp, Unknown
  misc_feature (1)..( 7): Result.001 file - promoters60/1007675
taatatt

SEQ ID NO: 89176 - DNA, 7 bp, Unknown
  misc_feature (1)..( 7): Result.001 file - promoters60/1007675
aaaggga

SEQ ID NO: 89177 - DNA, 7 bp, Unknown
  misc_feature (1)..( 7): Result.001 file - promoters60/1007675
aaatgga

SEQ ID NO: 89178 - DNA, 6 bp, Unknown
  misc_feature (1)..( 6): Result.001 file - promoters60/1007675
tacaaa

SEQ ID NO: 89179 - DNA, 6 bp, Unknown
  misc_feature (1)..( 6): Result.001 file - promoters60/1007675
tacaaa

SEQ ID NO: 89180 - DNA, 7 bp, Unknown
  misc_feature (1)..( 7): Result.001 file - promoters60/1007675
aaagaaa

SEQ ID NO: 89181 - DNA, 7 bp, Unknown
  misc_feature (1)..( 7): Result.001 file - promoters60/1007675
aaaaaaa

SEQ ID NO: 89182 - DNA, 8 bp, Unknown
  misc_feature (1)..( 8): Result.001 file - promoters60/1007675
aaatcaac

SEQ ID NO: 89183 - DNA, 8 bp, Unknown
  misc_feature (1)..( 8): Result.001 file - promoters60/1007675
aaatcaac

SEQ ID NO: 89184 - DNA, 6 bp, Unknown
  misc_feature (1)..( 6): Result.001 file - promoters60/1007675
aagtcc

SEQ ID NO: 89185 - DNA, 6 bp, Unknown
  misc_feature (1)..( 6): Result.001 file - promoters60/1007675
aagtcc

SEQ ID NO: 89186 - DNA, 7 bp, Unknown
  misc_feature (1)..( 7): Result.001 file - promoters60/1007675
tcacttg

SEQ ID NO: 89187 - DNA, 7 bp, Unknown
  misc_feature (1)..( 7): Result.001 file - promoters60/1007675
tcaattg

SEQ ID NO: 89188 - DNA, 7 bp, Unknown
  misc_feature (1)..( 7): Result.001 file - promoters60/1007675
tatgatt

SEQ ID NO: 89189 - DNA, 7 bp, Unknown
  misc_feature (1)..( 7): Result.001 file - promoters60/1007675
tattatt

SEQ ID NO: 89190 - DNA, 6 bp, Unknown
  misc_feature (1)..( 6): Result.001 file - promoters60/1007675
atatat

SEQ ID NO: 89191 - DNA, 6 bp, Unknown
  misc_feature (1)..( 6): Result.001 file - promoters60/1007675
atatat

SEQ ID NO: 89192 - DNA, 6 bp, Unknown
  misc_feature (1)..( 6): Result.001 file - promoters60/1007675
gaagac

SEQ ID NO: 89193 - DNA, 6 bp, Unknown
  misc_feature (1)..( 6): Result.001 file - promoters60/1007675
gaagac

SEQ ID NO: 89194 - DNA, 10 bp, Unknown
  misc_feature (1)..( 10): Result.001 file - promoters60/1007675
tattattgaa

SEQ ID NO: 89195 - DNA, 10 bp, Unknown
  misc_feature (1)..( 10): Result.001 file - promoters60/1007675
tattaatgaa

SEQ ID NO: 89196 - DNA, 7 bp, Unknown
  misc_feature (1)..( 7): Result.001 file - promoters60/1007675
tttagaa

SEQ ID NO: 89197 - DNA, 7 bp, Unknown
  misc_feature (1)..( 7): Result.001 file - promoters60/1007675
tttggaa

SEQ ID NO: 89198 - DNA, 6 bp, Unknown
  misc_feature (1)..( 6): Result.001 file - promoters60/1007675
aaataa

SEQ ID NO: 89199 - DNA, 6 bp, Unknown
  misc_feature (1)..( 6): Result.001 file - promoters60/1007675
aaataa

SEQ ID NO: 89200 - DNA, 9 bp, Unknown
  misc_feature (1)..( 9): Result.001 file - promoters60/1007675
tcccaaagt

SEQ ID NO: 89201 - DNA, 9 bp, Unknown
  misc_feature (1)..( 9): Result.001 file - promoters60/1007675
tccaaaagt

SEQ ID NO: 89202 - DNA, 8 bp, Unknown
  misc_feature (1)..( 8): Result.001 file - promoters60/1007675
tccatatg

SEQ ID NO: 89203 - DNA, 8 bp, Unknown
  misc_feature (1)..( 8): Result.001 file - promoters60/1007675
tccaaatg

SEQ ID NO: 89204 - DNA, 7 bp, Unknown
  misc_feature (1)..( 7): Result.001 file - promoters60/1007675
aaagaaa

SEQ ID NO: 89205 - DNA, 7 bp, Unknown
  misc_feature (1)..( 7): Result.001 file - promoters60/1007675
aaataaa

SEQ ID NO: 89206 - DNA, 6 bp, Unknown
  misc_feature (1)..( 6): Result.001 file - promoters60/1007675
ggaaat

SEQ ID NO: 89207 - DNA, 6 bp, Unknown
  misc_feature (1)..( 6): Result.001 file - promoters60/1007675
ggaaat

SEQ ID NO: 89208 - DNA, 7 bp, Unknown
  misc_feature (1)..( 7): Result.001 file - promoters60/1007675
atataaa

SEQ ID NO: 89209 - DNA, 7 bp, Unknown
  misc_feature (1)..( 7): Result.001 file - promoters60/1007731
ataaaaa

SEQ ID NO: 89210 - DNA, 6 bp, Unknown
  misc_feature (1)..( 6): Result.001 file - promoters60/1007731
ttttta

SEQ ID NO: 89211 - DNA, 6 bp, Unknown
  misc_feature (1)..( 6): Result.001 file - promoters60/1007731
ttttta

SEQ ID NO: 89212 - DNA, 6 bp, Unknown
  misc_feature (1)..( 6): Result.001 file - promoters60/1007731
atttac

SEQ ID NO: 89213 - DNA, 6 bp, Unknown
  misc_feature (1)..( 6): Result.001 file - promoters60/1007731
atttac

SEQ ID NO: 89214 - DNA, 6 bp, Unknown
  misc_feature (1)..( 6): Result.001 file - promoters60/1007731
atttac

SEQ ID NO: 89215 - DNA, 6 bp, Unknown
  misc_feature (1)..( 6): Result.001 file - promoters60/1007731
ctgttg

SEQ ID NO: 89216 - DNA, 6 bp, Unknown
  misc_feature (1)..( 6): Result.001 file - promoters60/1007731
ctgttg

SEQ ID NO: 89217 - DNA, 6 bp, Unknown
  misc_feature (1)..( 6): Result.001 file - promoters60/1007731
aaacta

SEQ ID NO: 89218 - DNA, 6 bp, Unknown
  misc_feature (1)..( 6): Result.001 file - promoters60/1007731
aaacta

SEQ ID NO: 89219 - DNA, 7 bp, Unknown
  misc_feature (1)..( 7): Result.001 file - promoters60/1007731
atttgag

SEQ ID NO: 89220 - DNA, 7 bp, Unknown
  misc_feature (1)..( 7): Result.001 file - promoters60/1007731
attcgag

SEQ ID NO: 89221 - DNA, 7 bp, Unknown
  misc_feature (1)..( 7): Result.001 file - promoters60/1007731
tttcctt

SEQ ID NO: 89222 - DNA, 7 bp, Unknown
  misc_feature (1)..( 7): Result.001 file - promoters60/1007731
ttttctt

SEQ ID NO: 89223 - DNA, 6 bp, Unknown
  misc_feature (1)..( 6): Result.001 file - promoters60/1007731
tatttt

SEQ ID NO: 89224 - DNA, 6 bp, Unknown
  misc_feature (1)..( 6): Result.001 file - promoters60/1007731
tatttt

SEQ ID NO: 89225 - DNA, 6 bp, Unknown
  misc_feature (1)..( 6): Result.001 file - promoters60/1007731
ttgaat

SEQ ID NO: 89226 - DNA, 6 bp, Unknown
  misc_feature (1)..( 6): Result.001 file - promoters60/1007731
ttgaat

SEQ ID NO: 89227 - DNA, 6 bp, Unknown
  misc_feature (1)..( 6): Result.001 file - promoters60/1007731
attgaa

SEQ ID NO: 89228 - DNA, 6 bp, Unknown
  misc_feature (1)..( 6): Result.001 file - promoters60/1007731
attgaa

SEQ ID NO: 89229 - DNA, 7 bp, Unknown
  misc_feature (1)..( 7): Result.001 file - promoters60/1007731
tgagatt

SEQ ID NO: 89230 - DNA, 7 bp, Unknown
  misc_feature (1)..( 7): Result.001 file - promoters60/1007731
tgacatt

SEQ ID NO: 89231 - DNA, 10 bp, Unknown
  misc_feature (1)..( 10): Result.001 file - promoters60/1007731
aaattagttg

SEQ ID NO: 89232 - DNA, 10 bp, Unknown
  misc_feature (1)..( 10): Result.001 file - promoters60/1007731
aaattacttg

SEQ ID NO: 89233 - DNA, 7 bp, Unknown
  misc_feature (1)..( 7): Result.001 file - promoters60/1007731
atgtgac

SEQ ID NO: 89234 - DNA, 7 bp, Unknown
  misc_feature (1)..( 7): Result.001 file - promoters60/1007731
atgtgac

SEQ ID NO: 89235 - DNA, 9 bp, Unknown
  misc_feature (1)..( 9): Result.001 file - promoters60/1007731
tgactccat

SEQ ID NO: 89236 - DNA, 9 bp, Unknown
  misc_feature (1)..( 9): Result.001 file - promoters60/1007731
tgacttcat

SEQ ID NO: 89237 - DNA, 7 bp, Unknown
  misc_feature (1)..( 7): Result.001 file - promoters60/1007731
acgttta

SEQ ID NO: 89238 - DNA, 7 bp, Unknown
  misc_feature (1)..( 7): Result.001 file - promoters60/1007731
acgatta

SEQ ID NO: 89239 - DNA, 8 bp, Unknown
  misc_feature (1)..( 8): Result.001 file - promoters60/1007731
agaaaatt

SEQ ID NO: 89240 - DNA, 8 bp, Unknown
  misc_feature (1)..( 8): Result.001 file - promoters60/1007731
agaatatt

SEQ ID NO: 89241 - DNA, 6 bp, Unknown
  misc_feature (1)..( 6): Result.001 file - promoters60/1007731
aaaatt

SEQ ID NO: 89242 - DNA, 6 bp, Unknown
  misc_feature (1)..( 6): Result.001 file - promoters60/1007731
aaaatt

SEQ ID NO: 89243 - DNA, 7 bp, Unknown
  misc_feature (1)..( 7): Result.001 file - promoters60/1007731
caaaatg

SEQ ID NO: 89244 - DNA, 7 bp, Unknown
  misc_feature (1)..( 7): Result.001 file - promoters60/1007731
caacatg

SEQ ID NO: 89245 - DNA, 6 bp, Unknown
  misc_feature (1)..( 6): Result.001 file - promoters60/1007731
gtttac

SEQ ID NO: 89246 - DNA, 6 bp, Unknown
  misc_feature (1)..( 6): Result.001 file - promoters60/1007731
gtttac

SEQ ID NO: 89247 - DNA, 6 bp, Unknown
  misc_feature (1)..( 6): Result.001 file - promoters60/1007731
ccaaat

SEQ ID NO: 89248 - DNA, 6 bp, Unknown
  misc_feature (1)..( 6): Result.001 file - promoters60/1007756
ccaaat

SEQ ID NO: 89249 - DNA, 7 bp, Unknown
  misc_feature (1)..( 7): Result.001 file - promoters60/1007756
cttctag

SEQ ID NO: 89250 - DNA, 7 bp, Unknown
  misc_feature (1)..( 7): Result.001 file - promoters60/1007756
cttgtag

SEQ ID NO: 89251 - DNA, 6 bp, Unknown
  misc_feature (1)..( 6): Result.001 file - promoters60/1007756
attcac

SEQ ID NO: 89252 - DNA, 6 bp, Unknown
  misc_feature (1)..( 6): Result.001 file - promoters60/1007756
attcac

SEQ ID NO: 89253 - DNA, 8 bp, Unknown
  misc_feature (1)..( 8): Result.001 file - promoters60/1007756
tcacgtta

SEQ ID NO: 89254 - DNA, 8 bp, Unknown
  misc_feature (1)..( 8): Result.001 file - promoters60/1007756
tcacatta

SEQ ID NO: 89255 - DNA, 13 bp, Unknown
  misc_feature (1)..( 13): Result.001 file - promoters60/1007756
aaccggttaaatc

SEQ ID NO: 89256 - DNA, 13 bp, Unknown
  misc_feature (1)..( 13): Result.001 file - promoters60/1007756
aacctgtttgttg

SEQ ID NO: 89257 - DNA, 13 bp, Unknown
  misc_feature (1)..( 13): Result.001 file - promoters60/1007756
actctgtttcttg

SEQ ID NO: 89258 - DNA, 6 bp, Unknown
  misc_feature (1)..( 6): Result.001 file - promoters60/1007756
tattta

SEQ ID NO: 89259 - DNA, 6 bp, Unknown
  misc_feature (1)..( 6): Result.001 file - promoters60/1007756
tattta

SEQ ID NO: 89260 - DNA, 9 bp, Unknown
  misc_feature (1)..( 9): Result.001 file - promoters60/1007756
cggtttata

SEQ ID NO: 89261 - DNA, 9 bp, Unknown
  misc_feature (1)..( 9): Result.001 file - promoters60/1007756
cggtttata

SEQ ID NO: 89262 - DNA, 6 bp, Unknown
  misc_feature (1)..( 6): Result.001 file - promoters60/1007756
gatgat

SEQ ID NO: 89263 - DNA, 6 bp, Unknown
  misc_feature (1)..( 6): Result.001 file - promoters60/1007756
gatgat

SEQ ID NO: 89264 - DNA, 6 bp, Unknown
  misc_feature (1)..( 6): Result.001 file - promoters60/1007756
acccgg

SEQ ID NO: 89265 - DNA, 6 bp, Unknown
  misc_feature (1)..( 6): Result.001 file - promoters60/1007756
acccgg

SEQ ID NO: 89266 - DNA, 8 bp, Unknown
  misc_feature (1)..( 8): Result.001 file - promoters60/1007756
aatggtaa

SEQ ID NO: 89267 - DNA, 8 bp, Unknown
  misc_feature (1)..( 8): Result.001 file - promoters60/1007756
aatagtaa

SEQ ID NO: 89268 - DNA, 9 bp, Unknown
  misc_feature (1)..( 9): Result.001 file - promoters60/1007756
attctgaaa

SEQ ID NO: 89269 - DNA, 9 bp, Unknown
  misc_feature (1)..( 9): Result.001 file - promoters60/1007759
attttgaaa

SEQ ID NO: 89270 - DNA, 12 bp, Unknown
  misc_feature (1)..( 12): Result.001 file - promoters60/1007759
aaactacgtcaa

SEQ ID NO: 89271 - DNA, 12 bp, Unknown
  misc_feature (1)..( 12): Result.001 file - promoters60/1007759
aaactacacata

SEQ ID NO: 89272 - DNA, 12 bp, Unknown
  misc_feature (1)..( 12): Result.001 file - promoters60/1007759
aaattactctta

SEQ ID NO: 89273 - DNA, 12 bp, Unknown
  misc_feature (1)..( 12): Result.001 file - promoters60/1007759
aaacaacatata

SEQ ID NO: 89274 - DNA, 12 bp, Unknown
  misc_feature (1)..( 12): Result.001 file - promoters60/1007759
aaacaaatcaaa

SEQ ID NO: 89275 - DNA, 12 bp, Unknown
  misc_feature (1)..( 12): Result.001 file - promoters60/1007759
aaaaaaagttat

SEQ ID NO: 89276 - DNA, 12 bp, Unknown
  misc_feature (1)..( 12): Result.001 file - promoters60/1007795
agataaagaagt

SEQ ID NO: 89277 - DNA, 10 bp, Unknown
  misc_feature (1)..( 10): Result.001 file - promoters60/1007795
actatttaaa

SEQ ID NO: 89278 - DNA, 10 bp, Unknown
  misc_feature (1)..( 10): Result.001 file - promoters60/1007795
actttttttt

SEQ ID NO: 89279 - DNA, 10 bp, Unknown
  misc_feature (1)..( 10): Result.001 file - promoters60/1007795
catatataaa

SEQ ID NO: 89280 - DNA, 10 bp, Unknown
  misc_feature (1)..( 10): Result.001 file - promoters60/1007795
tctttttgtt

SEQ ID NO: 89281 - DNA, 10 bp, Unknown
  misc_feature (1)..( 10): Result.001 file - promoters60/1007795
catttttttc

SEQ ID NO: 89282 - DNA, 15 bp, Unknown
  misc_feature (1)..( 15): Result.001 file - promoters60/1007795
aatttatattgattt

SEQ ID NO: 89283 - DNA, 15 bp, Unknown
  misc_feature (1)..( 15): Result.001 file - promoters60/1007795
gttttgtattatcaa

SEQ ID NO: 89284 - DNA, 15 bp, Unknown
  misc_feature (1)..( 15): Result.001 file - promoters60/1007795
atactatatttattt

SEQ ID NO: 89285 - DNA, 16 bp, Unknown
  misc_feature (1)..( 16): Result.001 file - promoters60/1007795
agtttggtatttgatt

SEQ ID NO: 89286 - DNA, 9 bp, Unknown
  misc_feature (1)..( 9): Result.001 file - promoters60/1007795
ttagttttg

SEQ ID NO: 89287 - DNA, 9 bp, Unknown
  misc_feature (1)..( 9): Result.001 file - promoters60/1007795
aaagttttt

SEQ ID NO: 89288 - DNA, 10 bp, Unknown
  misc_feature (1)..( 10): Result.001 file - promoters60/1007795
aacgttgttg

SEQ ID NO: 89289 - DNA, 10 bp, Unknown
  misc_feature (1)..( 10): Result.001 file - promoters60/1007802
aaaatttcag

SEQ ID NO: 89290 - DNA, 9 bp, Unknown
  misc_feature (1)..( 9): Result.001 file - promoters60/1007802
agattttct

SEQ ID NO: 89291 - DNA, 9 bp, Unknown
  misc_feature (1)..( 9): Result.001 file - promoters60/1007802
tcattatct

SEQ ID NO: 89292 - DNA, 9 bp, Unknown
  misc_feature (1)..( 9): Result.001 file - promoters60/1007802
agattttaa

SEQ ID NO: 89293 - DNA, 6 bp, Unknown
  misc_feature (1)..( 6): Result.001 file - promoters60/1007802
aaaaac

SEQ ID NO: 89294 - DNA, 6 bp, Unknown
  misc_feature (1)..( 6): Result.001 file - promoters60/1007802
aaaaac

SEQ ID NO: 89295 - DNA, 6 bp, Unknown
  misc_feature (1)..( 6): Result.001 file - promoters60/1007802
aaaaac

SEQ ID NO: 89296 - DNA, 9 bp, Unknown
  misc_feature (1)..( 9): Result.001 file - promoters60/1007802
tgaaaaagt

SEQ ID NO: 89297 - DNA, 9 bp, Unknown
  misc_feature (1)..( 9): Result.001 file - promoters60/1007802
tgaaaaaaa

SEQ ID NO: 89298 - DNA, 9 bp, Unknown
  misc_feature (1)..( 9): Result.001 file - promoters60/1007802
ttaaaaaaa

SEQ ID NO: 89299 - DNA, 11 bp, Unknown
  misc_feature (1)..( 11): Result.001 file - promoters60/1007802
gtttacttgct

SEQ ID NO: 89300 - DNA, 11 bp, Unknown
  misc_feature (1)..( 11): Result.001 file - promoters60/1007802
atttatttgtg

SEQ ID NO: 89301 - DNA, 11 bp, Unknown
  misc_feature (1)..( 11): Result.001 file - promoters60/1007802
atttattagtg

SEQ ID NO: 89302 - DNA, 8 bp, Unknown
  misc_feature (1)..( 8): Result.001 file - promoters60/1007802
tagtacta

SEQ ID NO: 89303 - DNA, 8 bp, Unknown
  misc_feature (1)..( 8): Result.001 file - promoters60/1007802
atgtacta

SEQ ID NO: 89304 - DNA, 8 bp, Unknown
  misc_feature (1)..( 8): Result.001 file - promoters60/1007802
atgaactc

SEQ ID NO: 89305 - DNA, 9 bp, Unknown
  misc_feature (1)..( 9): Result.001 file - promoters60/1007802
aaaatttgt

SEQ ID NO: 89306 - DNA, 9 bp, Unknown
  misc_feature (1)..( 9): Result.001 file - promoters60/1007802
aaaatgtgt

SEQ ID NO: 89307 - DNA, 9 bp, Unknown
  misc_feature (1)..( 9): Result.001 file - promoters60/1007967
aaaatttga

SEQ ID NO: 89308 - DNA, 6 bp, Unknown
  misc_feature (1)..( 6): Result.001 file - promoters60/1007967
gtttta

SEQ ID NO: 89309 - DNA, 6 bp, Unknown
  misc_feature (1)..( 6): Result.001 file - promoters60/1007967
gtttta

SEQ ID NO: 89310 - DNA, 8 bp, Unknown
  misc_feature (1)..( 8): Result.001 file - promoters60/1007967
attcttaa

SEQ ID NO: 89311 - DNA, 8 bp, Unknown
  misc_feature (1)..( 8): Result.001 file - promoters60/1007967
attgttat

SEQ ID NO: 89312 - DNA, 8 bp, Unknown
  misc_feature (1)..( 8): Result.001 file - promoters60/1007967
gttcataa

SEQ ID NO: 89313 - DNA, 9 bp, Unknown
  misc_feature (1)..( 9): Result.001 file - promoters60/1007967
aatttcaac

SEQ ID NO: 89314 - DNA, 9 bp, Unknown
  misc_feature (1)..( 9): Result.001 file - promoters60/1007967
aatttgaac

SEQ ID NO: 89315 - DNA, 9 bp, Unknown
  misc_feature (1)..( 9): Result.001 file - promoters60/1007967
aatgtgaaa

SEQ ID NO: 89316 - DNA, 6 bp, Unknown
  misc_feature (1)..( 6): Result.001 file - promoters60/1007967
attcat

SEQ ID NO: 89317 - DNA, 6 bp, Unknown
  misc_feature (1)..( 6): Result.001 file - promoters60/1007967
attcat

SEQ ID NO: 89318 - DNA, 6 bp, Unknown
  misc_feature (1)..( 6): Result.001 file - promoters60/1007967
ttttaa

SEQ ID NO: 89319 - DNA, 6 bp, Unknown
  misc_feature (1)..( 6): Result.001 file - promoters60/1007967
ttttaa

SEQ ID NO: 89320 - DNA, 6 bp, Unknown
  misc_feature (1)..( 6): Result.001 file - promoters60/1007967
gtgtaa

SEQ ID NO: 89321 - DNA, 6 bp, Unknown
  misc_feature (1)..( 6): Result.001 file - promoters60/1007967
gtgtaa

SEQ ID NO: 89322 - DNA, 9 bp, Unknown
  misc_feature (1)..( 9): Result.001 file - promoters60/1007967
cataagtgt

SEQ ID NO: 89323 - DNA, 9 bp, Unknown
  misc_feature (1)..( 9): Result.001 file - promoters60/1007967
cataactgt

SEQ ID NO: 89324 - DNA, 7 bp, Unknown
  misc_feature (1)..( 7): Result.001 file - promoters60/1007967
ttattga

SEQ ID NO: 89325 - DNA, 7 bp, Unknown
  misc_feature (1)..( 7): Result.001 file - promoters60/1007967
ttactga

SEQ ID NO: 89326 - DNA, 6 bp, Unknown
  misc_feature (1)..( 6): Result.001 file - promoters60/1007967
aaccaa

SEQ ID NO: 89327 - DNA, 6 bp, Unknown
  misc_feature (1)..( 6): Result.001 file - promoters60/1007967
aaccaa

SEQ ID NO: 89328 - DNA, 6 bp, Unknown
  misc_feature (1)..( 6): Result.001 file - promoters60/1007967
tttcac

SEQ ID NO: 89329 - DNA, 6 bp, Unknown
  misc_feature (1)..( 6): Result.001 file - promoters60/1007967
tttcac

SEQ ID NO: 89330 - DNA, 6 bp, Unknown
  misc_feature (1)..( 6): Result.001 file - promoters60/1007967
aaactc

SEQ ID NO: 89331 - DNA, 6 bp, Unknown
  misc_feature (1)..( 6): Result.001 file - promoters60/1007967
aaactc

SEQ ID NO: 89332 - DNA, 8 bp, Unknown
  misc_feature (1)..( 8): Result.001 file - promoters60/1007967
tcatatgt

SEQ ID NO: 89333 - DNA, 8 bp, Unknown
  misc_feature (1)..( 8): Result.001 file - promoters60/1007967
tcatgtgt

SEQ ID NO: 89334 - DNA, 7 bp, Unknown
  misc_feature (1)..( 7): Result.001 file - promoters60/1007967
aaacaga

SEQ ID NO: 89335 - DNA, 7 bp, Unknown
  misc_feature (1)..( 7): Result.001 file - promoters60/1007967
aaacaga

SEQ ID NO: 89336 - DNA, 9 bp, Unknown
  misc_feature (1)..( 9): Result.001 file - promoters60/1007967
ataacataa

SEQ ID NO: 89337 - DNA, 9 bp, Unknown
  misc_feature (1)..( 9): Result.001 file - promoters60/1007967
ataaaataa

SEQ ID NO: 89338 - DNA, 9 bp, Unknown
  misc_feature (1)..( 9): Result.001 file - promoters60/1007967
ttatccaac

SEQ ID NO: 89339 - DNA, 9 bp, Unknown
  misc_feature (1)..( 9): Result.001 file - promoters60/1008070
ttatccaac

SEQ ID NO: 89340 - DNA, 9 bp, Unknown
  misc_feature (1)..( 9): Result.001 file - promoters60/1008070
caacaaagt

SEQ ID NO: 89341 - DNA, 9 bp, Unknown
  misc_feature (1)..( 9): Result.001 file - promoters60/1008070
aaacaaacg

SEQ ID NO: 89342 - DNA, 9 bp, Unknown
  misc_feature (1)..( 9): Result.001 file - promoters60/1008070
gaaaaaaaa

SEQ ID NO: 89343 - DNA, 9 bp, Unknown
  misc_feature (1)..( 9): Result.001 file - promoters60/1008070
taaaaaaag

SEQ ID NO: 89344 - DNA, 9 bp, Unknown
  misc_feature (1)..( 9): Result.001 file - promoters60/1008070
aaacaaatg

SEQ ID NO: 89345 - DNA, 9 bp, Unknown
  misc_feature (1)..( 9): Result.001 file - promoters60/1008070
taaaaaata

SEQ ID NO: 89346 - DNA, 11 bp, Unknown
  misc_feature (1)..( 11): Result.001 file - promoters60/1008070
ccactatataa

SEQ ID NO: 89347 - DNA, 11 bp, Unknown
  misc_feature (1)..( 11): Result.001 file - promoters60/1008070
ccattatatat

SEQ ID NO: 89348 - DNA, 11 bp, Unknown
  misc_feature (1)..( 11): Result.001 file - promoters60/1008070
cttttatatat

SEQ ID NO: 89349 - DNA, 11 bp, Unknown
  misc_feature (1)..( 11): Result.001 file - promoters60/1008070
cgcctatatat

SEQ ID NO: 89350 - DNA, 11 bp, Unknown
  misc_feature (1)..( 11): Result.001 file - promoters60/1008070
gtgagatataa

SEQ ID NO: 89351 - DNA, 11 bp, Unknown
  misc_feature (1)..( 11): Result.001 file - promoters60/1008070
tccctataaat

SEQ ID NO: 89352 - DNA, 9 bp, Unknown
  misc_feature (1)..( 9): Result.001 file - promoters60/1008070
ggaataaga

SEQ ID NO: 89353 - DNA, 9 bp, Unknown
  misc_feature (1)..( 9): Result.001 file - promoters60/1008070
gcaataaga

SEQ ID NO: 89354 - DNA, 9 bp, Unknown
  misc_feature (1)..( 9): Result.001 file - promoters60/1008070
gcaaaaagt

SEQ ID NO: 89355 - DNA, 9 bp, Unknown
  misc_feature (1)..( 9): Result.001 file - promoters60/1008070
ttaaaaaag

SEQ ID NO: 89356 - DNA, 9 bp, Unknown
  misc_feature (1)..( 9): Result.001 file - promoters60/1008070
ttaaaataa

SEQ ID NO: 89357 - DNA, 9 bp, Unknown
  misc_feature (1)..( 9): Result.001 file - promoters60/1008070
ttaaaataa

SEQ ID NO: 89358 - DNA, 10 bp, Unknown
  misc_feature (1)..( 10): Result.001 file - promoters60/1008070
tgtttgattg

SEQ ID NO: 89359 - DNA, 10 bp, Unknown
  misc_feature (1)..( 10): Result.001 file - promoters60/1008070
tatttcattt

SEQ ID NO: 89360 - DNA, 10 bp, Unknown
  misc_feature (1)..( 10): Result.001 file - promoters60/1008070
atttttattc

SEQ ID NO: 89361 - DNA, 10 bp, Unknown
  misc_feature (1)..( 10): Result.001 file - promoters60/1008070
agatttattt

SEQ ID NO: 89362 - DNA, 10 bp, Unknown
  misc_feature (1)..( 10): Result.001 file - promoters60/1008070
atttttacca

SEQ ID NO: 89363 - DNA, 10 bp, Unknown
  misc_feature (1)..( 10): Result.001 file - promoters60/1008148
tagtatatca

SEQ ID NO: 89364 - DNA, 19 bp, Unknown
  misc_feature (1)..( 19): Result.001 file - promoters60/1008148
tacatttatctctcaaaga

SEQ ID NO: 89365 - DNA, 19 bp, Unknown
  misc_feature (1)..( 19): Result.001 file - promoters60/1008148
aaatgaattctttcaaaat

SEQ ID NO: 89366 - DNA, 19 bp, Unknown
  misc_feature (1)..( 19): Result.001 file - promoters60/1008148
caaaccaaactctcattcc

SEQ ID NO: 89367 - DNA, 19 bp, Unknown
  misc_feature (1)..( 19): Result.001 file - promoters60/1008148
aaataaattattttctttt

SEQ ID NO: 89368 - DNA, 19 bp, Unknown
  misc_feature (1)..( 19): Result.001 file - promoters60/1008148
taaaattagcagtcaaata

SEQ ID NO: 89369 - DNA, 19 bp, Unknown
  misc_feature (1)..( 19): Result.001 file - promoters60/1008218
ggtgagaatcattaatcct

SEQ ID NO: 89370 - DNA, 13 bp, Unknown
  misc_feature (1)..( 13): Result.001 file - promoters60/1008218
tgattgaaataaa

SEQ ID NO: 89371 - DNA, 13 bp, Unknown
  misc_feature (1)..( 13): Result.001 file - promoters60/1008218
agattaaaaaaag

SEQ ID NO: 89372 - DNA, 13 bp, Unknown
  misc_feature (1)..( 13): Result.001 file - promoters60/1008218
tgaatgatgttcc

SEQ ID NO: 89373 - DNA, 13 bp, Unknown
  misc_feature (1)..( 13): Result.001 file - promoters60/1008218
gacttaaaatcta

SEQ ID NO: 89374 - DNA, 13 bp, Unknown
  misc_feature (1)..( 13): Result.001 file - promoters60/1008218
atcttaaatgctt

SEQ ID NO: 89375 - DNA, 13 bp, Unknown
  misc_feature (1)..( 13): Result.001 file - promoters60/1008218
gctctaaaatcta

SEQ ID NO: 89376 - DNA, 16 bp, Unknown
  misc_feature (1)..( 16): Result.001 file - promoters60/1008218
ttttggtgagaagatt

SEQ ID NO: 89377 - DNA, 16 bp, Unknown
  misc_feature (1)..( 16): Result.001 file - promoters60/1008218
gacacaagagaagaag

SEQ ID NO: 89378 - DNA, 16 bp, Unknown
  misc_feature (1)..( 16): Result.001 file - promoters60/1008218
tttgggtgagaatcat

SEQ ID NO: 89379 - DNA, 16 bp, Unknown
  misc_feature (1)..( 16): Result.001 file - promoters60/1008218
gaaaagaaagaagaac

SEQ ID NO: 89380 - DNA, 16 bp, Unknown
  misc_feature (1)..( 16): Result.001 file - promoters60/1008218
ccaaattctgaacatt

SEQ ID NO: 89381 - DNA, 16 bp, Unknown
  misc_feature (1)..( 16): Result.001 file - promoters60/1008218
ctcaaaagagaaaggt

SEQ ID NO: 89382 - DNA, 9 bp, Unknown
  misc_feature (1)..( 9): Result.001 file - promoters60/1008218
caaacacaa

SEQ ID NO: 89383 - DNA, 9 bp, Unknown
  misc_feature (1)..( 9): Result.001 file - promoters60/1008218
caaacaaat

SEQ ID NO: 89384 - DNA, 9 bp, Unknown
  misc_feature (1)..( 9): Result.001 file - promoters60/1008218
gaaacacaa

SEQ ID NO: 89385 - DNA, 9 bp, Unknown
  misc_feature (1)..( 9): Result.001 file - promoters60/1008218
caaagaaag

SEQ ID NO: 89386 - DNA, 9 bp, Unknown
  misc_feature (1)..( 9): Result.001 file - promoters60/1008218
aaaagaaag

SEQ ID NO: 89387 - DNA, 9 bp, Unknown
  misc_feature (1)..( 9): Result.001 file - promoters60/1008319
caaggaaag

SEQ ID NO: 89388 - DNA, 9 bp, Unknown
  misc_feature (1)..( 9): Result.001 file - promoters60/1008319
ggacaaggc

SEQ ID NO: 89389 - DNA, 9 bp, Unknown
  misc_feature (1)..( 9): Result.001 file - promoters60/1008319
ggacaacag

SEQ ID NO: 89390 - DNA, 9 bp, Unknown
  misc_feature (1)..( 9): Result.001 file - promoters60/1008319
agacaagta

SEQ ID NO: 89391 - DNA, 9 bp, Unknown
  misc_feature (1)..( 9): Result.001 file - promoters60/1008319
tgaaaacaa

SEQ ID NO: 89392 - DNA, 14 bp, Unknown
  misc_feature (1)..( 14): Result.001 file - promoters60/1008319
tttattttaacaga

SEQ ID NO: 89393 - DNA, 14 bp, Unknown
  misc_feature (1)..( 14): Result.001 file - promoters60/1008319
tttcttttccggtt

SEQ ID NO: 89394 - DNA, 14 bp, Unknown
  misc_feature (1)..( 14): Result.001 file - promoters60/1008319
tctattttaagcaa

SEQ ID NO: 89395 - DNA, 14 bp, Unknown
  misc_feature (1)..( 14): Result.001 file - promoters60/1008319
tttctttcttctcc

SEQ ID NO: 89396 - DNA, 15 bp, Unknown
  misc_feature (1)..( 15): Result.001 file - promoters60/1008319
gatcttctttctctc

SEQ ID NO: 89397 - DNA, 10 bp, Unknown
  misc_feature (1)..( 10): Result.001 file - promoters60/1008319
aaaaacatta

SEQ ID NO: 89398 - DNA, 10 bp, Unknown
  misc_feature (1)..( 10): Result.001 file - promoters60/1008319
aaagacaaag

SEQ ID NO: 89399 - DNA, 10 bp, Unknown
  misc_feature (1)..( 10): Result.001 file - promoters60/1008319
aaaaaccgtt

SEQ ID NO: 89400 - DNA, 10 bp, Unknown
  misc_feature (1)..( 10): Result.001 file - promoters60/1008319
aagaacaaat

SEQ ID NO: 89401 - DNA, 10 bp, Unknown
  misc_feature (1)..( 10): Result.001 file - promoters60/1008319
gaagacgaag

SEQ ID NO: 89402 - DNA, 8 bp, Unknown
  misc_feature (1)..( 8): Result.001 file - promoters60/1008319
tttttatt

SEQ ID NO: 89403 - DNA, 8 bp, Unknown
  misc_feature (1)..( 8): Result.001 file - promoters60/1008319
tttatatt

SEQ ID NO: 89404 - DNA, 8 bp, Unknown
  misc_feature (1)..( 8): Result.001 file - promoters60/1008319
attacttt

SEQ ID NO: 89405 - DNA, 8 bp, Unknown
  misc_feature (1)..( 8): Result.001 file - promoters60/1008324
cttaaatt

SEQ ID NO: 89406 - DNA, 11 bp, Unknown
  misc_feature (1)..( 11): Result.001 file - promoters60/1008324
gatatgttcgc

SEQ ID NO: 89407 - DNA, 11 bp, Unknown
  misc_feature (1)..( 11): Result.001 file - promoters60/1008324
gatatgttttg

SEQ ID NO: 89408 - DNA, 12 bp, Unknown
  misc_feature (1)..( 12): Result.001 file - promoters60/1008324
tctatgctttgg

SEQ ID NO: 89409 - DNA, 11 bp, Unknown
  misc_feature (1)..( 11): Result.001 file - promoters60/1008324
gagcattggtc

SEQ ID NO: 89410 - DNA, 11 bp, Unknown
  misc_feature (1)..( 11): Result.001 file - promoters60/1008324
gataatttgtc

SEQ ID NO: 89411 - DNA, 11 bp, Unknown
  misc_feature (1)..( 11): Result.001 file - promoters60/1008324
gatgatttgag

SEQ ID NO: 89412 - DNA, 9 bp, Unknown
  misc_feature (1)..( 9): Result.001 file - promoters60/1008324
tggctcaac

SEQ ID NO: 89413 - DNA, 9 bp, Unknown
  misc_feature (1)..( 9): Result.001 file - promoters60/1008324
aggcccaat

SEQ ID NO: 89414 - DNA, 9 bp, Unknown
  misc_feature (1)..( 9): Result.001 file - promoters60/1008324
aggcccaat

SEQ ID NO: 89415 - DNA, 10 bp, Unknown
  misc_feature (1)..( 10): Result.001 file - promoters60/1008324
acacgatatt

SEQ ID NO: 89416 - DNA, 10 bp, Unknown
  misc_feature (1)..( 10): Result.001 file - promoters60/1008324
acacggtatt

SEQ ID NO: 89417 - DNA, 10 bp, Unknown
  misc_feature (1)..( 10): Result.001 file - promoters60/1008400
agacggtagt

SEQ ID NO: 89418 - DNA, 8 bp, Unknown
  misc_feature (1)..( 8): Result.001 file - promoters60/1008400
gaaggtga

SEQ ID NO: 89419 - DNA, 8 bp, Unknown
  misc_feature (1)..( 8): Result.001 file - promoters60/1008400
gaacgtga

SEQ ID NO: 89420 - DNA, 7 bp, Unknown
  misc_feature (1)..( 7): Result.001 file - promoters60/1008400
gtaagaa

SEQ ID NO: 89421 - DNA, 7 bp, Unknown
  misc_feature (1)..( 7): Result.001 file - promoters60/1008400
gtacgaa

SEQ ID NO: 89422 - DNA, 8 bp, Unknown
  misc_feature (1)..( 8): Result.001 file - promoters60/1008400
aaaaaaat

SEQ ID NO: 89423 - DNA, 8 bp, Unknown
  misc_feature (1)..( 8): Result.001 file - promoters60/1008400
aaaaaaat

SEQ ID NO: 89424 - DNA, 6 bp, Unknown
  misc_feature (1)..( 6): Result.001 file - promoters60/1008400
ttgatt

SEQ ID NO: 89425 - DNA, 6 bp, Unknown
  misc_feature (1)..( 6): Result.001 file - promoters60/1008400
ttgatt

SEQ ID NO: 89426 - DNA, 6 bp, Unknown
  misc_feature (1)..( 6): Result.001 file - promoters60/1008400
aattgt

SEQ ID NO: 89427 - DNA, 6 bp, Unknown
  misc_feature (1)..( 6): Result.001 file - promoters60/1008400
aattgt

SEQ ID NO: 89428 - DNA, 7 bp, Unknown
  misc_feature (1)..( 7): Result.001 file - promoters60/1008400
ctttgag

SEQ ID NO: 89429 - DNA, 7 bp, Unknown
  misc_feature (1)..( 7): Result.001 file - promoters60/1008400
ctttgag

SEQ ID NO: 89430 - DNA, 7 bp, Unknown
  misc_feature (1)..( 7): Result.001 file - promoters60/1008400
tatcatt

SEQ ID NO: 89431 - DNA, 7 bp, Unknown
  misc_feature (1)..( 7): Result.001 file - promoters60/1008400
tatgatt

SEQ ID NO: 89432 - DNA, 7 bp, Unknown
  misc_feature (1)..( 7): Result.001 file - promoters60/1008400
gaatttg

SEQ ID NO: 89433 - DNA, 7 bp, Unknown
  misc_feature (1)..( 7): Result.001 file - promoters60/1008400
gaatttg

SEQ ID NO: 89434 - DNA, 7 bp, Unknown
  misc_feature (1)..( 7): Result.001 file - promoters60/1008400
tttgatt

SEQ ID NO: 89435 - DNA, 7 bp, Unknown
  misc_feature (1)..( 7): Result.001 file - promoters60/1008400
tttgatt

SEQ ID NO: 89436 - DNA, 7 bp, Unknown
  misc_feature (1)..( 7): Result.001 file - promoters60/1008400
ttagatc

SEQ ID NO: 89437 - DNA, 7 bp, Unknown
  misc_feature (1)..( 7): Result.001 file - promoters60/1008400
ttatatc

SEQ ID NO: 89438 - DNA, 6 bp, Unknown
  misc_feature (1)..( 6): Result.001 file - promoters60/1008400
catttg

SEQ ID NO: 89439 - DNA, 6 bp, Unknown
  misc_feature (1)..( 6): Result.001 file - promoters60/1008425
catttg

SEQ ID NO: 89440 - DNA, 7 bp, Unknown
  misc_feature (1)..( 7): Result.001 file - promoters60/1008425
tttggaa

SEQ ID NO: 89441 - DNA, 7 bp, Unknown
  misc_feature (1)..( 7): Result.001 file - promoters60/1008425
ttttgaa

SEQ ID NO: 89442 - DNA, 6 bp, Unknown
  misc_feature (1)..( 6): Result.001 file - promoters60/1008425
agaaaa

SEQ ID NO: 89443 - DNA, 6 bp, Unknown
  misc_feature (1)..( 6): Result.001 file - promoters60/1008425
agaaaa

SEQ ID NO: 89444 - DNA, 10 bp, Unknown
  misc_feature (1)..( 10): Result.001 file - promoters60/1008425
caaatacatt

SEQ ID NO: 89445 - DNA, 10 bp, Unknown
  misc_feature (1)..( 10): Result.001 file - promoters60/1008425
caaaaacaac

SEQ ID NO: 89446 - DNA, 10 bp, Unknown
  misc_feature (1)..( 10): Result.001 file - promoters60/1008425
taaatacatt

SEQ ID NO: 89447 - DNA, 8 bp, Unknown
  misc_feature (1)..( 8): Result.001 file - promoters60/1008425
tgtaaatt

SEQ ID NO: 89448 - DNA, 8 bp, Unknown
  misc_feature (1)..( 8): Result.001 file - promoters60/1008425
tgtatatt

SEQ ID NO: 89449 - DNA, 7 bp, Unknown
  misc_feature (1)..( 7): Result.001 file - promoters60/1008425
caaataa

SEQ ID NO: 89450 - DNA, 7 bp, Unknown
  misc_feature (1)..( 7): Result.001 file - promoters60/1008425
caaataa

SEQ ID NO: 89451 - DNA, 7 bp, Unknown
  misc_feature (1)..( 7): Result.001 file - promoters60/1008425
ttttttt

SEQ ID NO: 89452 - DNA, 7 bp, Unknown
  misc_feature (1)..( 7): Result.001 file - promoters60/1008425
ttttttt

SEQ ID NO: 89453 - DNA, 6 bp, Unknown
  misc_feature (1)..( 6): Result.001 file - promoters60/1008425
aatatt

SEQ ID NO: 89454 - DNA, 6 bp, Unknown
  misc_feature (1)..( 6): Result.001 file - promoters60/1008425
aatatt

SEQ ID NO: 89455 - DNA, 8 bp, Unknown
  misc_feature (1)..( 8): Result.001 file - promoters60/1008425
cttctgaa

SEQ ID NO: 89456 - DNA, 8 bp, Unknown
  misc_feature (1)..( 8): Result.001 file - promoters60/1008425
cttttgaa

SEQ ID NO: 89457 - DNA, 8 bp, Unknown
  misc_feature (1)..( 8): Result.001 file - promoters60/1008425
attttgag

SEQ ID NO: 89458 - DNA, 6 bp, Unknown
  misc_feature (1)..( 6): Result.001 file - promoters60/1008425
tttttt

SEQ ID NO: 89459 - DNA, 6 bp, Unknown
  misc_feature (1)..( 6): Result.001 file - promoters60/1008425
tttttt

SEQ ID NO: 89460 - DNA, 9 bp, Unknown
  misc_feature (1)..( 9): Result.001 file - promoters60/1008425
aatatatta

SEQ ID NO: 89461 - DNA, 9 bp, Unknown
  misc_feature (1)..( 9): Result.001 file - promoters60/1008425
aatttatta

SEQ ID NO: 89462 - DNA, 8 bp, Unknown
  misc_feature (1)..( 8): Result.001 file - promoters60/1008425
gaaaactt

SEQ ID NO: 89463 - DNA, 8 bp, Unknown
  misc_feature (1)..( 8): Result.001 file - promoters60/1008425
gaatactt

SEQ ID NO: 89464 - DNA, 8 bp, Unknown
  misc_feature (1)..( 8): Result.001 file - promoters60/1008425
acttttat

SEQ ID NO: 89465 - DNA, 8 bp, Unknown
  misc_feature (1)..( 8): Result.001 file - promoters60/1008425
acttttat

SEQ ID NO: 89466 - DNA, 7 bp, Unknown
  misc_feature (1)..( 7): Result.001 file - promoters60/1008425
tttatta

SEQ ID NO: 89467 - DNA, 7 bp, Unknown
  misc_feature (1)..( 7): Result.001 file - promoters60/1008425
tttgtta

SEQ ID NO: 89468 - DNA, 8 bp, Unknown
  misc_feature (1)..( 8): Result.001 file - promoters60/1008425
tttcaatt

SEQ ID NO: 89469 - DNA, 8 bp, Unknown
  misc_feature (1)..( 8): Result.001 file - promoters60/1008425
tttctatt

SEQ ID NO: 89470 - DNA, 7 bp, Unknown
  misc_feature (1)..( 7): Result.001 file - promoters60/1008425
cataaaa

SEQ ID NO: 89471 - DNA, 7 bp, Unknown
  misc_feature (1)..( 7): Result.001 file - promoters60/1008425
cataaaa

SEQ ID NO: 89472 - DNA, 7 bp, Unknown
  misc_feature (1)..( 7): Result.001 file - promoters60/1008425
aaattga

SEQ ID NO: 89473 - DNA, 7 bp, Unknown
  misc_feature (1)..( 7): Result.001 file - promoters60/1008425
aaaatga

SEQ ID NO: 89474 - DNA, 6 bp, Unknown
  misc_feature (1)..( 6): Result.001 file - promoters60/1008425
acttgt

SEQ ID NO: 89475 - DNA, 6 bp, Unknown
  misc_feature (1)..( 6): Result.001 file - promoters60/1008425
acttgt

SEQ ID NO: 89476 - DNA, 7 bp, Unknown
  misc_feature (1)..( 7): Result.001 file - promoters60/1008425
tcacgtt

SEQ ID NO: 89477 - DNA, 7 bp, Unknown
  misc_feature (1)..( 7): Result.001 file - promoters60/1008425
tcaagtt

SEQ ID NO: 89478 - DNA, 6 bp, Unknown
  misc_feature (1)..( 6): Result.001 file - promoters60/1008425
attaaa

SEQ ID NO: 89479 - DNA, 6 bp, Unknown
  misc_feature (1)..( 6): Result.001 file - promoters60/1008425
attaaa

SEQ ID NO: 89480 - DNA, 6 bp, Unknown
  misc_feature (1)..( 6): Result.001 file - promoters60/1008425
tcaaca

SEQ ID NO: 89481 - DNA, 6 bp, Unknown
  misc_feature (1)..( 6): Result.001 file - promoters60/1008425
tcaaca

SEQ ID NO: 89482 - DNA, 9 bp, Unknown
  misc_feature (1)..( 9): Result.001 file - promoters60/1008425
aactattta

SEQ ID NO: 89483 - DNA, 9 bp, Unknown
  misc_feature (1)..( 9): Result.001 file - promoters60/1008432
aaccattta

SEQ ID NO: 89484 - DNA, 6 bp, Unknown
  misc_feature (1)..( 6): Result.001 file - promoters60/1008432
tataat

SEQ ID NO: 89485 - DNA, 6 bp, Unknown
  misc_feature (1)..( 6): Result.001 file - promoters60/1008432
tataat

SEQ ID NO: 89486 - DNA, 6 bp, Unknown
  misc_feature (1)..( 6): Result.001 file - promoters60/1008432
ccacca

SEQ ID NO: 89487 - DNA, 6 bp, Unknown
  misc_feature (1)..( 6): Result.001 file - promoters60/1008432
ccacca

SEQ ID NO: 89488 - DNA, 9 bp, Unknown
  misc_feature (1)..( 9): Result.001 file - promoters60/1008432
gtatatatt

SEQ ID NO: 89489 - DNA, 9 bp, Unknown
  misc_feature (1)..( 9): Result.001 file - promoters60/1008432
gtagatatt

SEQ ID NO: 89490 - DNA, 6 bp, Unknown
  misc_feature (1)..( 6): Result.001 file - promoters60/1008432
aacatt

SEQ ID NO: 89491 - DNA, 6 bp, Unknown
  misc_feature (1)..( 6): Result.001 file - promoters60/1008432
aacatt

SEQ ID NO: 89492 - DNA, 7 bp, Unknown
  misc_feature (1)..( 7): Result.001 file - promoters60/1008432
ttgatga

SEQ ID NO: 89493 - DNA, 7 bp, Unknown
  misc_feature (1)..( 7): Result.001 file - promoters60/1008432
ttgatga

SEQ ID NO: 89494 - DNA, 8 bp, Unknown
  misc_feature (1)..( 8): Result.001 file - promoters60/1008432
ttagtcaa

SEQ ID NO: 89495 - DNA, 8 bp, Unknown
  misc_feature (1)..( 8): Result.001 file - promoters60/1008432
ttaatcaa

SEQ ID NO: 89496 - DNA, 8 bp, Unknown
  misc_feature (1)..( 8): Result.001 file - promoters60/1008432
aaaaggta

SEQ ID NO: 89497 - DNA, 8 bp, Unknown
  misc_feature (1)..( 8): Result.001 file - promoters60/1008432
aaatggtt

SEQ ID NO: 89498 - DNA, 8 bp, Unknown
  misc_feature (1)..( 8): Result.001 file - promoters60/1008432
taattgtt

SEQ ID NO: 89499 - DNA, 7 bp, Unknown
  misc_feature (1)..( 7): Result.001 file - promoters60/1008432
aatctct

SEQ ID NO: 89500 - DNA, 7 bp, Unknown
  misc_feature (1)..( 7): Result.001 file - promoters60/1008432
aatctct

SEQ ID NO: 89501 - DNA, 6 bp, Unknown
  misc_feature (1)..( 6): Result.001 file - promoters60/1008432
caaatt

SEQ ID NO: 89502 - DNA, 6 bp, Unknown
  misc_feature (1)..( 6): Result.001 file - promoters60/1008432
caaatt

SEQ ID NO: 89503 - DNA, 9 bp, Unknown
  misc_feature (1)..( 9): Result.001 file - promoters60/1008432
aatcataaa

SEQ ID NO: 89504 - DNA, 9 bp, Unknown
  misc_feature (1)..( 9): Result.001 file - promoters60/1008432
aatcaaaaa

SEQ ID NO: 89505 - DNA, 8 bp, Unknown
  misc_feature (1)..( 8): Result.001 file - promoters60/1008432
tatagtaa

SEQ ID NO: 89506 - DNA, 8 bp, Unknown
  misc_feature (1)..( 8): Result.001 file - promoters60/1008432
tattgtaa

SEQ ID NO: 89507 - DNA, 8 bp, Unknown
  misc_feature (1)..( 8): Result.001 file - promoters60/1008432
attgtttt

SEQ ID NO: 89508 - DNA, 8 bp, Unknown
  misc_feature (1)..( 8): Result.001 file - promoters60/1008432
attttttt

SEQ ID NO: 89509 - DNA, 8 bp, Unknown
  misc_feature (1)..( 8): Result.001 file - promoters60/1008432
atttttat

SEQ ID NO: 89510 - DNA, 6 bp, Unknown
  misc_feature (1)..( 6): Result.001 file - promoters60/1008432
tttgtt

SEQ ID NO: 89511 - DNA, 6 bp, Unknown
  misc_feature (1)..( 6): Result.001 file - promoters60/1008432
tttgtt

SEQ ID NO: 89512 - DNA, 6 bp, Unknown
  misc_feature (1)..( 6): Result.001 file - promoters60/1008432
tataac

SEQ ID NO: 89513 - DNA, 6 bp, Unknown
  misc_feature (1)..( 6): Result.001 file - promoters60/1008432
tataac

SEQ ID NO: 89514 - DNA, 8 bp, Unknown
  misc_feature (1)..( 8): Result.001 file - promoters60/1008432
gaagaaag

SEQ ID NO: 89515 - DNA, 8 bp, Unknown
  misc_feature (1)..( 8): Result.001 file - promoters60/1008432
gaacaaag

SEQ ID NO: 89516 - DNA, 8 bp, Unknown
  misc_feature (1)..( 8): Result.001 file - promoters60/1008432
tttaaatg

SEQ ID NO: 89517 - DNA, 8 bp, Unknown
  misc_feature (1)..( 8): Result.001 file - promoters60/1008432
tttatatg

SEQ ID NO: 89518 - DNA, 7 bp, Unknown
  misc_feature (1)..( 7): Result.001 file - promoters60/1008432
ccaaaca

SEQ ID NO: 89519 - DNA, 7 bp, Unknown
  misc_feature (1)..( 7): Result.001 file - promoters60/1008432
ccataca

SEQ ID NO: 89520 - DNA, 8 bp, Unknown
  misc_feature (1)..( 8): Result.001 file - promoters60/1008432
tacaaaaa

SEQ ID NO: 89521 - DNA, 8 bp, Unknown
  misc_feature (1)..( 8): Result.001 file - promoters60/1008432
tacaaaaa

SEQ ID NO: 89522 - DNA, 8 bp, Unknown
  misc_feature (1)..( 8): Result.001 file - promoters60/1008432
aaaaaaag

SEQ ID NO: 89523 - DNA, 8 bp, Unknown
  misc_feature (1)..( 8): Result.001 file - promoters60/1008432
aaacaaag

SEQ ID NO: 89524 - DNA, 8 bp, Unknown
  misc_feature (1)..( 8): Result.001 file - promoters60/1008432
aaccacct

SEQ ID NO: 89525 - DNA, 8 bp, Unknown
  misc_feature (1)..( 8): Result.001 file - promoters60/1008443
aacaacct

SEQ ID NO: 89526 - DNA, 17 bp, Unknown
  misc_feature (1)..( 17): Result.001 file - promoters60/1008443
acaatgggctgggccta

SEQ ID NO: 89527 - DNA, 17 bp, Unknown
  misc_feature (1)..( 17): Result.001 file - promoters60/1008443
gaaataggcccaacaaa

SEQ ID NO: 89528 - DNA, 17 bp, Unknown
  misc_feature (1)..( 17): Result.001 file - promoters60/1008443
ctgttgggcttttaatg

SEQ ID NO: 89529 - DNA, 17 bp, Unknown
  misc_feature (1)..( 17): Result.001 file - promoters60/1008443
taattgggctttttaag

SEQ ID NO: 89530 - DNA, 17 bp, Unknown
  misc_feature (1)..( 17): Result.001 file - promoters60/1008443
taaaaaggcccattata

SEQ ID NO: 89531 - DNA, 17 bp, Unknown
  misc_feature (1)..( 17): Result.001 file - promoters60/1008443
aaataaagcccattata

SEQ ID NO: 89532 - DNA, 17 bp, Unknown
  misc_feature (1)..( 17): Result.001 file - promoters60/1008534
taaaaaatatctgaaac

SEQ ID NO: 89533 - DNA, 12 bp, Unknown
  misc_feature (1)..( 12): Result.001 file - promoters60/1008534
attaacataaat

SEQ ID NO: 89534 - DNA, 12 bp, Unknown
  misc_feature (1)..( 12): Result.001 file - promoters60/1008534
tataatataaag

SEQ ID NO: 89535 - DNA, 12 bp, Unknown
  misc_feature (1)..( 12): Result.001 file - promoters60/1008534
cagtatataaat

SEQ ID NO: 89536 - DNA, 12 bp, Unknown
  misc_feature (1)..( 12): Result.001 file - promoters60/1008534
ccctttataaaa

SEQ ID NO: 89537 - DNA, 12 bp, Unknown
  misc_feature (1)..( 12): Result.001 file - promoters60/1008534
ccctatataaag

SEQ ID NO: 89538 - DNA, 12 bp, Unknown
  misc_feature (1)..( 12): Result.001 file - promoters60/1008534
ttatatattatt

SEQ ID NO: 89539 - DNA, 11 bp, Unknown
  misc_feature (1)..( 11): Result.001 file - promoters60/1008534
ctttctgtctc

SEQ ID NO: 89540 - DNA, 11 bp, Unknown
  misc_feature (1)..( 11): Result.001 file - promoters60/1008534
atttttgttaa

SEQ ID NO: 89541 - DNA, 11 bp, Unknown
  misc_feature (1)..( 11): Result.001 file - promoters60/1008534
cttcctgagaa

SEQ ID NO: 89542 - DNA, 11 bp, Unknown
  misc_feature (1)..( 11): Result.001 file - promoters60/1008534
aatccagagaa

SEQ ID NO: 89543 - DNA, 11 bp, Unknown
  misc_feature (1)..( 11): Result.001 file - promoters60/1008534
tttttttttac

SEQ ID NO: 89544 - DNA, 11 bp, Unknown
  misc_feature (1)..( 11): Result.001 file - promoters60/1008534
gtttttgtcta

SEQ ID NO: 89545 - DNA, 13 bp, Unknown
  misc_feature (1)..( 13): Result.001 file - promoters60/1008534
ccctttataaaac

SEQ ID NO: 89546 - DNA, 13 bp, Unknown
  misc_feature (1)..( 13): Result.001 file - promoters60/1008534
attactattaaag

SEQ ID NO: 89547 - DNA, 13 bp, Unknown
  misc_feature (1)..( 13): Result.001 file - promoters60/1008534
tataatataaagg

SEQ ID NO: 89548 - DNA, 13 bp, Unknown
  misc_feature (1)..( 13): Result.001 file - promoters60/1008534
ccctatataaaga

SEQ ID NO: 89549 - DNA, 13 bp, Unknown
  misc_feature (1)..( 13): Result.001 file - promoters60/1008534
tatattatttaag

SEQ ID NO: 89550 - DNA, 13 bp, Unknown
  misc_feature (1)..( 13): Result.001 file - promoters60/1008573
ctcagtatataaa

SEQ ID NO: 89551 - DNA, 15 bp, Unknown
  misc_feature (1)..( 15): Result.001 file - promoters60/1008573
ttagcatatcctttc

SEQ ID NO: 89552 - DNA, 15 bp, Unknown
  misc_feature (1)..( 15): Result.001 file - promoters60/1008573
agaatgtattcttca

SEQ ID NO: 89553 - DNA, 15 bp, Unknown
  misc_feature (1)..( 15): Result.001 file - promoters60/1008573
atgaaatatccggta

SEQ ID NO: 89554 - DNA, 15 bp, Unknown
  misc_feature (1)..( 15): Result.001 file - promoters60/1008573
aaaaattattctgat

SEQ ID NO: 89555 - DNA, 15 bp, Unknown
  misc_feature (1)..( 15): Result.001 file - promoters60/1008573
gtatatcattctttt

SEQ ID NO: 89556 - DNA, 15 bp, Unknown
  misc_feature (1)..( 15): Result.001 file - promoters60/1008573
aaggtttactctata

SEQ ID NO: 89557 - DNA, 15 bp, Unknown
  misc_feature (1)..( 15): Result.001 file - promoters60/1008573
gtatttcactctttt

SEQ ID NO: 89558 - DNA, 13 bp, Unknown
  misc_feature (1)..( 13): Result.001 file - promoters60/1008573
ttacaatttcact

SEQ ID NO: 89559 - DNA, 13 bp, Unknown
  misc_feature (1)..( 13): Result.001 file - promoters60/1008573
tttttttttcact

SEQ ID NO: 89560 - DNA, 13 bp, Unknown
  misc_feature (1)..( 13): Result.001 file - promoters60/1008573
ttttcttttcata

SEQ ID NO: 89561 - DNA, 13 bp, Unknown
  misc_feature (1)..( 13): Result.001 file - promoters60/1008573
ctgatttttaata

SEQ ID NO: 89562 - DNA, 13 bp, Unknown
  misc_feature (1)..( 13): Result.001 file - promoters60/1008573
ttcatgtttaatc

SEQ ID NO: 89563 - DNA, 13 bp, Unknown
  misc_feature (1)..( 13): Result.001 file - promoters60/1008573
taaaaagttaaat

SEQ ID NO: 89564 - DNA, 13 bp, Unknown
  misc_feature (1)..( 13): Result.001 file - promoters60/1008573
tatactttttagt

SEQ ID NO: 89565 - DNA, 14 bp, Unknown
  misc_feature (1)..( 14): Result.001 file - promoters60/1008573
gattaaaaatccaa

SEQ ID NO: 89566 - DNA, 14 bp, Unknown
  misc_feature (1)..( 14): Result.001 file - promoters60/1008573
gaataaatatcctc

SEQ ID NO: 89567 - DNA, 14 bp, Unknown
  misc_feature (1)..( 14): Result.001 file - promoters60/1008573
gaaacaaaatccaa

SEQ ID NO: 89568 - DNA, 14 bp, Unknown
  misc_feature (1)..( 14): Result.001 file - promoters60/1008573
atttaaagcccaat

SEQ ID NO: 89569 - DNA, 14 bp, Unknown
  misc_feature (1)..( 14): Result.001 file - promoters60/1008573
acttaaaaacattt

SEQ ID NO: 89570 - DNA, 14 bp, Unknown
  misc_feature (1)..( 14): Result.001 file - promoters60/1008573
tcatgaatatataa

SEQ ID NO: 89571 - DNA, 12 bp, Unknown
  misc_feature (1)..( 12): Result.001 file - promoters60/1008573
caacaatgtaca

SEQ ID NO: 89572 - DNA, 12 bp, Unknown
  misc_feature (1)..( 12): Result.001 file - promoters60/1008573
caataatttaca

SEQ ID NO: 89573 - DNA, 12 bp, Unknown
  misc_feature (1)..( 12): Result.001 file - promoters60/1008573
gaataataaaat

SEQ ID NO: 89574 - DNA, 12 bp, Unknown
  misc_feature (1)..( 12): Result.001 file - promoters60/1008573
atttaatttaat

SEQ ID NO: 89575 - DNA, 12 bp, Unknown
  misc_feature (1)..( 12): Result.001 file - promoters60/1008573
gattaaatataa

SEQ ID NO: 89576 - DNA, 12 bp, Unknown
  misc_feature (1)..( 12): Result.001 file - promoters60/1008573
tgaaaatttata

SEQ ID NO: 89577 - DNA, 10 bp, Unknown
  misc_feature (1)..( 10): Result.001 file - promoters60/1008573
agaatgtatt

SEQ ID NO: 89578 - DNA, 10 bp, Unknown
  misc_feature (1)..( 10): Result.001 file - promoters60/1008573
aaaatatatt

SEQ ID NO: 89579 - DNA, 10 bp, Unknown
  misc_feature (1)..( 10): Result.001 file - promoters60/1008573
agagtgtaca

SEQ ID NO: 89580 - DNA, 10 bp, Unknown
  misc_feature (1)..( 10): Result.001 file - promoters60/1008573
aaaatttata

SEQ ID NO: 89581 - DNA, 10 bp, Unknown
  misc_feature (1)..( 10): Result.001 file - promoters60/1008573
attatgtata

SEQ ID NO: 89582 - DNA, 10 bp, Unknown
  misc_feature (1)..( 10): Result.001 file - promoters60/1008573
aaaacataac

SEQ ID NO: 89583 - DNA, 10 bp, Unknown
  misc_feature (1)..( 10): Result.001 file - promoters60/1008573
caaatttttg

SEQ ID NO: 89584 - DNA, 7 bp, Unknown
  misc_feature (1)..( 7): Result.001 file - promoters60/1008573
gataaaa

SEQ ID NO: 89585 - DNA, 7 bp, Unknown
  misc_feature (1)..( 7): Result.001 file - promoters60/1008573
tataaaa

SEQ ID NO: 89586 - DNA, 7 bp, Unknown
  misc_feature (1)..( 7): Result.001 file - promoters60/1008573
gattaaa

SEQ ID NO: 89587 - DNA, 7 bp, Unknown
  misc_feature (1)..( 7): Result.001 file - promoters60/1008573
gatgaaa

SEQ ID NO: 89588 - DNA, 7 bp, Unknown
  misc_feature (1)..( 7): Result.001 file - promoters60/1008573
aataaaa

SEQ ID NO: 89589 - DNA, 7 bp, Unknown
  misc_feature (1)..( 7): Result.001 file - promoters60/1008573
gattaat

SEQ ID NO: 89590 - DNA, 12 bp, Unknown
  misc_feature (1)..( 12): Result.001 file - promoters60/1008573
agattttttatt

SEQ ID NO: 89591 - DNA, 12 bp, Unknown
  misc_feature (1)..( 12): Result.001 file - promoters60/1008573
agaatttttgta

SEQ ID NO: 89592 - DNA, 12 bp, Unknown
  misc_feature (1)..( 12): Result.001 file - promoters60/1008573
atattttatatt

SEQ ID NO: 89593 - DNA, 12 bp, Unknown
  misc_feature (1)..( 12): Result.001 file - promoters60/1008573
ctgtttcttagg

SEQ ID NO: 89594 - DNA, 12 bp, Unknown
  misc_feature (1)..( 12): Result.001 file - promoters60/1008573
ataattttaaac

SEQ ID NO: 89595 - DNA, 12 bp, Unknown
  misc_feature (1)..( 12): Result.001 file - promoters60/1008573
tcatatgagtga

SEQ ID NO: 89596 - DNA, 9 bp, Unknown
  misc_feature (1)..( 9): Result.001 file - promoters60/1008573
tatttataa

SEQ ID NO: 89597 - DNA, 9 bp, Unknown
  misc_feature (1)..( 9): Result.001 file - promoters60/1008573
tttttttaa

SEQ ID NO: 89598 - DNA, 9 bp, Unknown
  misc_feature (1)..( 9): Result.001 file - promoters60/1008573
gattaatac

SEQ ID NO: 89599 - DNA, 9 bp, Unknown
  misc_feature (1)..( 9): Result.001 file - promoters60/1008573
gattaaatt

SEQ ID NO: 89600 - DNA, 9 bp, Unknown
  misc_feature (1)..( 9): Result.001 file - promoters60/1008573
atttaataa

SEQ ID NO: 89601 - DNA, 9 bp, Unknown
  misc_feature (1)..( 9): Result.001 file - promoters60/1008673
catttttat

SEQ ID NO: 89602 - DNA, 6 bp, Unknown
  misc_feature (1)..( 6): Result.001 file - promoters60/1008673
atagat

SEQ ID NO: 89603 - DNA, 6 bp, Unknown
  misc_feature (1)..( 6): Result.001 file - promoters60/1008673
atagat

SEQ ID NO: 89604 - DNA, 9 bp, Unknown
  misc_feature (1)..( 9): Result.001 file - promoters60/1008673
tatgtaatt

SEQ ID NO: 89605 - DNA, 9 bp, Unknown
  misc_feature (1)..( 9): Result.001 file - promoters60/1008673
tatgtaatt

SEQ ID NO: 89606 - DNA, 7 bp, Unknown
  misc_feature (1)..( 7): Result.001 file - promoters60/1008673
attgaaa

SEQ ID NO: 89607 - DNA, 7 bp, Unknown
  misc_feature (1)..( 7): Result.001 file - promoters60/1008673
atttaaa

SEQ ID NO: 89608 - DNA, 12 bp, Unknown
  misc_feature (1)..( 12): Result.001 file - promoters60/1008673
aactcaattgtt

SEQ ID NO: 89609 - DNA, 12 bp, Unknown
  misc_feature (1)..( 12): Result.001 file - promoters60/1008673
aacttaatagtt

SEQ ID NO: 89610 - DNA, 6 bp, Unknown
  misc_feature (1)..( 6): Result.001 file - promoters60/1008673
gtttgt

SEQ ID NO: 89611 - DNA, 6 bp, Unknown
  misc_feature (1)..( 6): Result.001 file - promoters60/1008673
gtttgt

SEQ ID NO: 89612 - DNA, 7 bp, Unknown
  misc_feature (1)..( 7): Result.001 file - promoters60/1008673
attcatt

SEQ ID NO: 89613 - DNA, 7 bp, Unknown
  misc_feature (1)..( 7): Result.001 file - promoters60/1008673
attgatt

SEQ ID NO: 89614 - DNA, 6 bp, Unknown
  misc_feature (1)..( 6): Result.001 file - promoters60/1008673
tgtttg

SEQ ID NO: 89615 - DNA, 6 bp, Unknown
  misc_feature (1)..( 6): Result.001 file - promoters60/1008673
tgtttg

SEQ ID NO: 89616 - DNA, 8 bp, Unknown
  misc_feature (1)..( 8): Result.001 file - promoters60/1008673
cgttacca

SEQ ID NO: 89617 - DNA, 8 bp, Unknown
  misc_feature (1)..( 8): Result.001 file - promoters60/1008673
cgttacca

SEQ ID NO: 89618 - DNA, 7 bp, Unknown
  misc_feature (1)..( 7): Result.001 file - promoters60/1008673
aaacgaa

SEQ ID NO: 89619 - DNA, 7 bp, Unknown
  misc_feature (1)..( 7): Result.001 file - promoters60/1008673
aaaagaa

SEQ ID NO: 89620 - DNA, 6 bp, Unknown
  misc_feature (1)..( 6): Result.001 file - promoters60/1008673
actgaa

SEQ ID NO: 89621 - DNA, 6 bp, Unknown
  misc_feature (1)..( 6): Result.001 file - promoters60/1008673
actgaa

SEQ ID NO: 89622 - DNA, 6 bp, Unknown
  misc_feature (1)..( 6): Result.001 file - promoters60/1008673
tagata

SEQ ID NO: 89623 - DNA, 6 bp, Unknown
  misc_feature (1)..( 6): Result.001 file - promoters60/1008673
tagata

SEQ ID NO: 89624 - DNA, 8 bp, Unknown
  misc_feature (1)..( 8): Result.001 file - promoters60/1008673
atgaaatg

SEQ ID NO: 89625 - DNA, 8 bp, Unknown
  misc_feature (1)..( 8): Result.001 file - promoters60/1008673
atgaaatg

SEQ ID NO: 89626 - DNA, 8 bp, Unknown
  misc_feature (1)..( 8): Result.001 file - promoters60/1008673
tttttaat

SEQ ID NO: 89627 - DNA, 8 bp, Unknown
  misc_feature (1)..( 8): Result.001 file - promoters60/1008673
tttttaat

SEQ ID NO: 89628 - DNA, 7 bp, Unknown
  misc_feature (1)..( 7): Result.001 file - promoters60/1008673
aaatctt

SEQ ID NO: 89629 - DNA, 7 bp, Unknown
  misc_feature (1)..( 7): Result.001 file - promoters60/1008732
aaatctt

SEQ ID NO: 89630 - DNA, 10 bp, Unknown
  misc_feature (1)..( 10): Result.001 file - promoters60/1008732
taaattttaa

SEQ ID NO: 89631 - DNA, 10 bp, Unknown
  misc_feature (1)..( 10): Result.001 file - promoters60/1008732
caaatttgtt

SEQ ID NO: 89632 - DNA, 10 bp, Unknown
  misc_feature (1)..( 10): Result.001 file - promoters60/1008732
ataattttgt

SEQ ID NO: 89633 - DNA, 10 bp, Unknown
  misc_feature (1)..( 10): Result.001 file - promoters60/1008732
tgaattctaa

SEQ ID NO: 89634 - DNA, 10 bp, Unknown
  misc_feature (1)..( 10): Result.001 file - promoters60/1008732
taaatatgtt

SEQ ID NO: 89635 - DNA, 10 bp, Unknown
  misc_feature (1)..( 10): Result.001 file - promoters60/1008732
taaataacat

SEQ ID NO: 89636 - DNA, 14 bp, Unknown
  misc_feature (1)..( 14): Result.001 file - promoters60/1008732
tcaattgtacttat

SEQ ID NO: 89637 - DNA, 14 bp, Unknown
  misc_feature (1)..( 14): Result.001 file - promoters60/1008732
caacttgtacacgc

SEQ ID NO: 89638 - DNA, 14 bp, Unknown
  misc_feature (1)..( 14): Result.001 file - promoters60/1008732
ttaattgtataatt

SEQ ID NO: 89639 - DNA, 14 bp, Unknown
  misc_feature (1)..( 14): Result.001 file - promoters60/1008732
ttctttgaacttat

SEQ ID NO: 89640 - DNA, 14 bp, Unknown
  misc_feature (1)..( 14): Result.001 file - promoters60/1008732
ttatttgagttatg

SEQ ID NO: 89641 - DNA, 14 bp, Unknown
  misc_feature (1)..( 14): Result.001 file - promoters60/1008732
ttaattgtctccgg

SEQ ID NO: 89642 - DNA, 12 bp, Unknown
  misc_feature (1)..( 12): Result.001 file - promoters60/1008732
aattttaatctc

SEQ ID NO: 89643 - DNA, 12 bp, Unknown
  misc_feature (1)..( 12): Result.001 file - promoters60/1008732
atttttattcta

SEQ ID NO: 89644 - DNA, 12 bp, Unknown
  misc_feature (1)..( 12): Result.001 file - promoters60/1008732
aattctaaaatc

SEQ ID NO: 89645 - DNA, 12 bp, Unknown
  misc_feature (1)..( 12): Result.001 file - promoters60/1008732
tgttgtattcta

SEQ ID NO: 89646 - DNA, 12 bp, Unknown
  misc_feature (1)..( 12): Result.001 file - promoters60/1008732
ctttttacggcg

SEQ ID NO: 89647 - DNA, 12 bp, Unknown
  misc_feature (1)..( 12): Result.001 file - promoters60/1008732
ggttttatttat

SEQ ID NO: 89648 - DNA, 10 bp, Unknown
  misc_feature (1)..( 10): Result.001 file - promoters60/1008732
atatatctta

SEQ ID NO: 89649 - DNA, 10 bp, Unknown
  misc_feature (1)..( 10): Result.001 file - promoters60/1008732
ataaatcttt

SEQ ID NO: 89650 - DNA, 11 bp, Unknown
  misc_feature (1)..( 11): Result.001 file - promoters60/1008732
ttatcatatta

SEQ ID NO: 89651 - DNA, 11 bp, Unknown
  misc_feature (1)..( 11): Result.001 file - promoters60/1008732
ataaaacttga

SEQ ID NO: 89652 - DNA, 11 bp, Unknown
  misc_feature (1)..( 11): Result.001 file - promoters60/1008732
ttgaaatttga

SEQ ID NO: 89653 - DNA, 11 bp, Unknown
  misc_feature (1)..( 11): Result.001 file - promoters60/1008787
aacaaagttgt

SEQ ID NO: 89654 - DNA, 7 bp, Unknown
  misc_feature (1)..( 7): Result.001 file - promoters60/1008787
taacgtt

SEQ ID NO: 89655 - DNA, 7 bp, Unknown
  misc_feature (1)..( 7): Result.001 file - promoters60/1008787
taaggtt

SEQ ID NO: 89656 - DNA, 15 bp, Unknown
  misc_feature (1)..( 15): Result.001 file - promoters60/1008787
aaaagcatacaaata

SEQ ID NO: 89657 - DNA, 15 bp, Unknown
  misc_feature (1)..( 15): Result.001 file - promoters60/1008787
aaaagaatagcttct

SEQ ID NO: 89658 - DNA, 15 bp, Unknown
  misc_feature (1)..( 15): Result.001 file - promoters60/1008787
gaaggcatacagata

SEQ ID NO: 89659 - DNA, 6 bp, Unknown
  misc_feature (1)..( 6): Result.001 file - promoters60/1008787
tcaact

SEQ ID NO: 89660 - DNA, 6 bp, Unknown
  misc_feature (1)..( 6): Result.001 file - promoters60/1008787
tcaact

SEQ ID NO: 89661 - DNA, 7 bp, Unknown
  misc_feature (1)..( 7): Result.001 file - promoters60/1008787
aacttcg

SEQ ID NO: 89662 - DNA, 7 bp, Unknown
  misc_feature (1)..( 7): Result.001 file - promoters60/1008787
aacgtcg

SEQ ID NO: 89663 - DNA, 7 bp, Unknown
  misc_feature (1)..( 7): Result.001 file - promoters60/1008787
ctattat

SEQ ID NO: 89664 - DNA, 7 bp, Unknown
  misc_feature (1)..( 7): Result.001 file - promoters60/1008787
ctagtat

SEQ ID NO: 89665 - DNA, 7 bp, Unknown
  misc_feature (1)..( 7): Result.001 file - promoters60/1008787
ctattac

SEQ ID NO: 89666 - DNA, 8 bp, Unknown
  misc_feature (1)..( 8): Result.001 file - promoters60/1008787
attgtatt

SEQ ID NO: 89667 - DNA, 8 bp, Unknown
  misc_feature (1)..( 8): Result.001 file - promoters60/1008787
attatatt

SEQ ID NO: 89668 - DNA, 9 bp, Unknown
  misc_feature (1)..( 9): Result.001 file - promoters60/1008787
aaatatcaa

SEQ ID NO: 89669 - DNA, 9 bp, Unknown
  misc_feature (1)..( 9): Result.001 file - promoters60/1008787
aaataacaa

SEQ ID NO: 89670 - DNA, 7 bp, Unknown
  misc_feature (1)..( 7): Result.001 file - promoters60/1008787
ttaatca

SEQ ID NO: 89671 - DNA, 7 bp, Unknown
  misc_feature (1)..( 7): Result.001 file - promoters60/1008787
ttattca

SEQ ID NO: 89672 - DNA, 6 bp, Unknown
  misc_feature (1)..( 6): Result.001 file - promoters60/1008787
tttctt

SEQ ID NO: 89673 - DNA, 6 bp, Unknown
  misc_feature (1)..( 6): Result.001 file - promoters60/1008787
tttctt

SEQ ID NO: 89674 - DNA, 6 bp, Unknown
  misc_feature (1)..( 6): Result.001 file - promoters60/1008787
caagaa

SEQ ID NO: 89675 - DNA, 6 bp, Unknown
  misc_feature (1)..( 6): Result.001 file - promoters60/1008787
caagaa

SEQ ID NO: 89676 - DNA, 8 bp, Unknown
  misc_feature (1)..( 8): Result.001 file - promoters60/1008787
acgttatt

SEQ ID NO: 89677 - DNA, 8 bp, Unknown
  misc_feature (1)..( 8): Result.001 file - promoters60/1008787
tggttatt

SEQ ID NO: 89678 - DNA, 8 bp, Unknown
  misc_feature (1)..( 8): Result.001 file - promoters60/1008787
tgggtata

SEQ ID NO: 89679 - DNA, 6 bp, Unknown
  misc_feature (1)..( 6): Result.001 file - promoters60/1008787
ctttgt

SEQ ID NO: 89680 - DNA, 6 bp, Unknown
  misc_feature (1)..( 6): Result.001 file - promoters60/1008787
ctttgt

SEQ ID NO: 89681 - DNA, 7 bp, Unknown
  misc_feature (1)..( 7): Result.001 file - promoters60/1008787
tttcaac

SEQ ID NO: 89682 - DNA, 7 bp, Unknown
  misc_feature (1)..( 7): Result.001 file - promoters60/1008787
ttttaac

SEQ ID NO: 89683 - DNA, 6 bp, Unknown
  misc_feature (1)..( 6): Result.001 file - promoters60/1008787
attaaa

SEQ ID NO: 89684 - DNA, 6 bp, Unknown
  misc_feature (1)..( 6): Result.001 file - promoters60/1008787
attaaa

SEQ ID NO: 89685 - DNA, 7 bp, Unknown
  misc_feature (1)..( 7): Result.001 file - promoters60/1008787
tacgtaa

SEQ ID NO: 89686 - DNA, 7 bp, Unknown
  misc_feature (1)..( 7): Result.001 file - promoters60/1008787
tacataa

SEQ ID NO: 89687 - DNA, 6 bp, Unknown
  misc_feature (1)..( 6): Result.001 file - promoters60/1008787
gtaaaa

SEQ ID NO: 89688 - DNA, 6 bp, Unknown
  misc_feature (1)..( 6): Result.001 file - promoters60/1008787
gtaaaa

SEQ ID NO: 89689 - DNA, 9 bp, Unknown
  misc_feature (1)..( 9): Result.001 file - promoters60/1008787
aaatagtta

SEQ ID NO: 89690 - DNA, 9 bp, Unknown
  misc_feature (1)..( 9): Result.001 file - promoters60/1008787
aaatattta

SEQ ID NO: 89691 - DNA, 8 bp, Unknown
  misc_feature (1)..( 8): Result.001 file - promoters60/1008787
caatactt

SEQ ID NO: 89692 - DNA, 8 bp, Unknown
  misc_feature (1)..( 8): Result.001 file - promoters60/1008787
caaaactt

SEQ ID NO: 89693 - DNA, 6 bp, Unknown
  misc_feature (1)..( 6): Result.001 file - promoters60/1008787
gttcta

SEQ ID NO: 89694 - DNA, 6 bp, Unknown
  misc_feature (1)..( 6): Result.001 file - promoters60/1008787
gttcta

SEQ ID NO: 89695 - DNA, 7 bp, Unknown
  misc_feature (1)..( 7): Result.001 file - promoters60/1008787
atatttt

SEQ ID NO: 89696 - DNA, 7 bp, Unknown
  misc_feature (1)..( 7): Result.001 file - promoters60/1008808
atacttt

SEQ ID NO: 89697 - DNA, 9 bp, Unknown
  misc_feature (1)..( 9): Result.001 file - promoters60/1008808
tacttcctt

SEQ ID NO: 89698 - DNA, 9 bp, Unknown
  misc_feature (1)..( 9): Result.001 file - promoters60/1008808
agcttactt

SEQ ID NO: 89699 - DNA, 9 bp, Unknown
  misc_feature (1)..( 9): Result.001 file - promoters60/1008808
gacttccgc

SEQ ID NO: 89700 - DNA, 9 bp, Unknown
  misc_feature (1)..( 9): Result.001 file - promoters60/1008808
tctttactt

SEQ ID NO: 89701 - DNA, 9 bp, Unknown
  misc_feature (1)..( 9): Result.001 file - promoters60/1008808
tcttttctt

SEQ ID NO: 89702 - DNA, 11 bp, Unknown
  misc_feature (1)..( 11): Result.001 file - promoters60/1008808
gcctatggtta

SEQ ID NO: 89703 - DNA, 11 bp, Unknown
  misc_feature (1)..( 11): Result.001 file - promoters60/1008808
agaaatgatta

SEQ ID NO: 89704 - DNA, 11 bp, Unknown
  misc_feature (1)..( 11): Result.001 file - promoters60/1008808
ttaaaggatta

SEQ ID NO: 89705 - DNA, 11 bp, Unknown
  misc_feature (1)..( 11): Result.001 file - promoters60/1008808
gaaaaagatgg

SEQ ID NO: 89706 - DNA, 11 bp, Unknown
  misc_feature (1)..( 11): Result.001 file - promoters60/1008808
aaaaatgtgaa

SEQ ID NO: 89707 - DNA, 11 bp, Unknown
  misc_feature (1)..( 11): Result.001 file - promoters60/1008808
caaaatgttat

SEQ ID NO: 89708 - DNA, 9 bp, Unknown
  misc_feature (1)..( 9): Result.001 file - promoters60/1008808
ataagtttg

SEQ ID NO: 89709 - DNA, 9 bp, Unknown
  misc_feature (1)..( 9): Result.001 file - promoters60/1008808
ataagtctg

SEQ ID NO: 89710 - DNA, 9 bp, Unknown
  misc_feature (1)..( 9): Result.001 file - promoters60/1008808
ttaagttct

SEQ ID NO: 89711 - DNA, 9 bp, Unknown
  misc_feature (1)..( 9): Result.001 file - promoters60/1008808
ttatgtttc

SEQ ID NO: 89712 - DNA, 9 bp, Unknown
  misc_feature (1)..( 9): Result.001 file - promoters60/1008816
aaaagttct

SEQ ID NO: 89713 - DNA, 9 bp, Unknown
  misc_feature (1)..( 9): Result.001 file - promoters60/1008816
tcataacac

SEQ ID NO: 89714 - DNA, 9 bp, Unknown
  misc_feature (1)..( 9): Result.001 file - promoters60/1008816
tcatatcac

SEQ ID NO: 89715 - DNA, 7 bp, Unknown
  misc_feature (1)..( 7): Result.001 file - promoters60/1008816
gataaaa

SEQ ID NO: 89716 - DNA, 7 bp, Unknown
  misc_feature (1)..( 7): Result.001 file - promoters60/1008816
gattaaa

SEQ ID NO: 89717 - DNA, 6 bp, Unknown
  misc_feature (1)..( 6): Result.001 file - promoters60/1008816
ttcaac

SEQ ID NO: 89718 - DNA, 6 bp, Unknown
  misc_feature (1)..( 6): Result.001 file - promoters60/1008816
ttcaac

SEQ ID NO: 89719 - DNA, 6 bp, Unknown
  misc_feature (1)..( 6): Result.001 file - promoters60/1008816
taaaac

SEQ ID NO: 89720 - DNA, 6 bp, Unknown
  misc_feature (1)..( 6): Result.001 file - promoters60/1008816
taaaac

SEQ ID NO: 89721 - DNA, 6 bp, Unknown
  misc_feature (1)..( 6): Result.001 file - promoters60/1008816
aaagtt

SEQ ID NO: 89722 - DNA, 6 bp, Unknown
  misc_feature (1)..( 6): Result.001 file - promoters60/1008816
aaagtt

SEQ ID NO: 89723 - DNA, 6 bp, Unknown
  misc_feature (1)..( 6): Result.001 file - promoters60/1008816
atattt

SEQ ID NO: 89724 - DNA, 6 bp, Unknown
  misc_feature (1)..( 6): Result.001 file - promoters60/1008816
atattt

SEQ ID NO: 89725 - DNA, 6 bp, Unknown
  misc_feature (1)..( 6): Result.001 file - promoters60/1008816
gaaaaa

SEQ ID NO: 89726 - DNA, 6 bp, Unknown
  misc_feature (1)..( 6): Result.001 file - promoters60/1008816
gaaaaa

SEQ ID NO: 89727 - DNA, 8 bp, Unknown
  misc_feature (1)..( 8): Result.001 file - promoters60/1008816
aggataaa

SEQ ID NO: 89728 - DNA, 8 bp, Unknown
  misc_feature (1)..( 8): Result.001 file - promoters60/1008816
aggagaaa

SEQ ID NO: 89729 - DNA, 6 bp, Unknown
  misc_feature (1)..( 6): Result.001 file - promoters60/1008816
tctaaa

SEQ ID NO: 89730 - DNA, 6 bp, Unknown
  misc_feature (1)..( 6): Result.001 file - promoters60/1008816
tctaaa

SEQ ID NO: 89731 - DNA, 9 bp, Unknown
  misc_feature (1)..( 9): Result.001 file - promoters60/1008816
atcataact

SEQ ID NO: 89732 - DNA, 9 bp, Unknown
  misc_feature (1)..( 9): Result.001 file - promoters60/1008816
atcttaact

SEQ ID NO: 89733 - DNA, 6 bp, Unknown
  misc_feature (1)..( 6): Result.001 file - promoters60/1008816
ctctac

SEQ ID NO: 89734 - DNA, 6 bp, Unknown
  misc_feature (1)..( 6): Result.001 file - promoters60/1008816
ctctac

SEQ ID NO: 89735 - DNA, 8 bp, Unknown
  misc_feature (1)..( 8): Result.001 file - promoters60/1008816
taaagcaa

SEQ ID NO: 89736 - DNA, 8 bp, Unknown
  misc_feature (1)..( 8): Result.001 file - promoters60/1008816
taaaccaa

SEQ ID NO: 89737 - DNA, 13 bp, Unknown
  misc_feature (1)..( 13): Result.001 file - promoters60/1008816
cgaataaaaaaaa

SEQ ID NO: 89738 - DNA, 13 bp, Unknown
  misc_feature (1)..( 13): Result.001 file - promoters60/1008816
cgattaataaaaa

SEQ ID NO: 89739 - DNA, 6 bp, Unknown
  misc_feature (1)..( 6): Result.001 file - promoters60/1008816
agtaaa

SEQ ID NO: 89740 - DNA, 6 bp, Unknown
  misc_feature (1)..( 6): Result.001 file - promoters60/1008816
agtaaa

SEQ ID NO: 89741 - DNA, 7 bp, Unknown
  misc_feature (1)..( 7): Result.001 file - promoters60/1008816
aatcggg

SEQ ID NO: 89742 - DNA, 7 bp, Unknown
  misc_feature (1)..( 7): Result.001 file - promoters60/1008816
aattggg

SEQ ID NO: 89743 - DNA, 8 bp, Unknown
  misc_feature (1)..( 8): Result.001 file - promoters60/1008816
gaaagaaa

SEQ ID NO: 89744 - DNA, 8 bp, Unknown
  misc_feature (1)..( 8): Result.001 file - promoters60/1008816
gaaacaaa

SEQ ID NO: 89745 - DNA, 10 bp, Unknown
  misc_feature (1)..( 10): Result.001 file - promoters60/1008816
ggaaaagaaa

SEQ ID NO: 89746 - DNA, 10 bp, Unknown
  misc_feature (1)..( 10): Result.001 file - promoters60/1008816
ggaaatgaaa

SEQ ID NO: 89747 - DNA, 7 bp, Unknown
  misc_feature (1)..( 7): Result.001 file - promoters60/1008816
cccacta

SEQ ID NO: 89748 - DNA, 7 bp, Unknown
  misc_feature (1)..( 7): Result.001 file - promoters60/1008816
cccacta

SEQ ID NO: 89749 - DNA, 9 bp, Unknown
  misc_feature (1)..( 9): Result.001 file - promoters60/1008816
aaagaaaag

SEQ ID NO: 89750 - DNA, 9 bp, Unknown
  misc_feature (1)..( 9): Result.001 file - promoters60/1008816
aaagtaaag

SEQ ID NO: 89751 - DNA, 7 bp, Unknown
  misc_feature (1)..( 7): Result.001 file - promoters60/1008816
gtatata

SEQ ID NO: 89752 - DNA, 7 bp, Unknown
  misc_feature (1)..( 7): Result.001 file - promoters60/1008836
gtatata

SEQ ID NO: 89753 - DNA, 11 bp, Unknown
  misc_feature (1)..( 11): Result.001 file - promoters60/1008836
atatttttatg

SEQ ID NO: 89754 - DNA, 11 bp, Unknown
  misc_feature (1)..( 11): Result.001 file - promoters60/1008836
gaaattttatg

SEQ ID NO: 89755 - DNA, 11 bp, Unknown
  misc_feature (1)..( 11): Result.001 file - promoters60/1008836
ttttttttaac

SEQ ID NO: 89756 - DNA, 11 bp, Unknown
  misc_feature (1)..( 11): Result.001 file - promoters60/1008836
atatttttata

SEQ ID NO: 89757 - DNA, 11 bp, Unknown
  misc_feature (1)..( 11): Result.001 file - promoters60/1008836
caaattttatt

SEQ ID NO: 89758 - DNA, 11 bp, Unknown
  misc_feature (1)..( 11): Result.001 file - promoters60/1008836
acatttttttc

SEQ ID NO: 89759 - DNA, 10 bp, Unknown
  misc_feature (1)..( 10): Result.001 file - promoters60/1008836
atttatatga

SEQ ID NO: 89760 - DNA, 10 bp, Unknown
  misc_feature (1)..( 10): Result.001 file - promoters60/1008836
atttttattt

SEQ ID NO: 89761 - DNA, 10 bp, Unknown
  misc_feature (1)..( 10): Result.001 file - promoters60/1008836
cttttttttt

SEQ ID NO: 89762 - DNA, 10 bp, Unknown
  misc_feature (1)..( 10): Result.001 file - promoters60/1008836
atttttttca

SEQ ID NO: 89763 - DNA, 10 bp, Unknown
  misc_feature (1)..( 10): Result.001 file - promoters60/1008836
cgtttcattg

SEQ ID NO: 89764 - DNA, 12 bp, Unknown
  misc_feature (1)..( 12): Result.001 file - promoters60/1008836
tcaaaagattta

SEQ ID NO: 89765 - DNA, 12 bp, Unknown
  misc_feature (1)..( 12): Result.001 file - promoters60/1008836
acaaaagaaaaa

SEQ ID NO: 89766 - DNA, 12 bp, Unknown
  misc_feature (1)..( 12): Result.001 file - promoters60/1008836
tcaaaaaaagaa

SEQ ID NO: 89767 - DNA, 12 bp, Unknown
  misc_feature (1)..( 12): Result.001 file - promoters60/1008836
ggaaaaaaaaaa

SEQ ID NO: 89768 - DNA, 9 bp, Unknown
  misc_feature (1)..( 9): Result.001 file - promoters60/1008836
taaaatttg

SEQ ID NO: 89769 - DNA, 9 bp, Unknown
  misc_feature (1)..( 9): Result.001 file - promoters60/1008836
aaaacttta

SEQ ID NO: 89770 - DNA, 9 bp, Unknown
  misc_feature (1)..( 9): Result.001 file - promoters60/1008836
gttaatttg

SEQ ID NO: 89771 - DNA, 9 bp, Unknown
  misc_feature (1)..( 9): Result.001 file - promoters60/1008836
aaaacgtta

SEQ ID NO: 89772 - DNA, 13 bp, Unknown
  misc_feature (1)..( 13): Result.001 file - promoters60/1008836
gactaattaaatg

SEQ ID NO: 89773 - DNA, 13 bp, Unknown
  misc_feature (1)..( 13): Result.001 file - promoters60/1008836
taaaaattaataa

SEQ ID NO: 89774 - DNA, 13 bp, Unknown
  misc_feature (1)..( 13): Result.001 file - promoters60/1008836
ttgtaaataattg

SEQ ID NO: 89775 - DNA, 13 bp, Unknown
  misc_feature (1)..( 13): Result.001 file - promoters60/1008836
aaacgattaaatg

SEQ ID NO: 89776 - DNA, 13 bp, Unknown
  misc_feature (1)..( 13): Result.001 file - promoters60/1008836
cttaaatttagat

SEQ ID NO: 89777 - DNA, 13 bp, Unknown
  misc_feature (1)..( 13): Result.001 file - promoters60/1008836
tgtgaatctaaga

SEQ ID NO: 89778 - DNA, 12 bp, Unknown
  misc_feature (1)..( 12): Result.001 file - promoters60/1008836
aacattgtccat

SEQ ID NO: 89779 - DNA, 12 bp, Unknown
  misc_feature (1)..( 12): Result.001 file - promoters60/1008836
catattatccat

SEQ ID NO: 89780 - DNA, 12 bp, Unknown
  misc_feature (1)..( 12): Result.001 file - promoters60/1008836
ataattatccaa

SEQ ID NO: 89781 - DNA, 12 bp, Unknown
  misc_feature (1)..( 12): Result.001 file - promoters60/1008836
ttaaatattttt

SEQ ID NO: 89782 - DNA, 12 bp, Unknown
  misc_feature (1)..( 12): Result.001 file - promoters60/1008836
atcaatattctt

SEQ ID NO: 89783 - DNA, 6 bp, Unknown
  misc_feature (1)..( 6): Result.001 file - promoters60/1008836
tataaa

SEQ ID NO: 89784 - DNA, 6 bp, Unknown
  misc_feature (1)..( 6): Result.001 file - promoters60/1008836
tataaa

SEQ ID NO: 89785 - DNA, 6 bp, Unknown
  misc_feature (1)..( 6): Result.001 file - promoters60/1008836
tataaa

SEQ ID NO: 89786 - DNA, 6 bp, Unknown
  misc_feature (1)..( 6): Result.001 file - promoters60/1008836
tataaa

SEQ ID NO: 89787 - DNA, 13 bp, Unknown
  misc_feature (1)..( 13): Result.001 file - promoters60/1008836
atatttttatgtg

SEQ ID NO: 89788 - DNA, 13 bp, Unknown
  misc_feature (1)..( 13): Result.001 file - promoters60/1008836
acatttttttcac

SEQ ID NO: 89789 - DNA, 13 bp, Unknown
  misc_feature (1)..( 13): Result.001 file - promoters60/1008836
atatttttataaa

SEQ ID NO: 89790 - DNA, 13 bp, Unknown
  misc_feature (1)..( 13): Result.001 file - promoters60/1008836
atatttttatttt

SEQ ID NO: 89791 - DNA, 13 bp, Unknown
  misc_feature (1)..( 13): Result.001 file - promoters60/1008836
atgtatttagaaa

SEQ ID NO: 89792 - DNA, 11 bp, Unknown
  misc_feature (1)..( 11): Result.001 file - promoters60/1008836
gttttgaaatt

SEQ ID NO: 89793 - DNA, 11 bp, Unknown
  misc_feature (1)..( 11): Result.001 file - promoters60/1008836
attttgacatc

SEQ ID NO: 89794 - DNA, 11 bp, Unknown
  misc_feature (1)..( 11): Result.001 file - promoters60/1008836
tttttgatatt

SEQ ID NO: 89795 - DNA, 12 bp, Unknown
  misc_feature (1)..( 12): Result.001 file - promoters60/1008836
gttgttgcttct

SEQ ID NO: 89796 - DNA, 10 bp, Unknown
  misc_feature (1)..( 10): Result.001 file - promoters60/1008836
ttttaaagtt

SEQ ID NO: 89797 - DNA, 10 bp, Unknown
  misc_feature (1)..( 10): Result.001 file - promoters60/1008836
ttttaacatc

SEQ ID NO: 89798 - DNA, 10 bp, Unknown
  misc_feature (1)..( 10): Result.001 file - promoters60/1008836
ttttaacaaa

SEQ ID NO: 89799 - DNA, 10 bp, Unknown
  misc_feature (1)..( 10): Result.001 file - promoters60/1008836
tagtaaaaaa

SEQ ID NO: 89800 - DNA, 8 bp, Unknown
  misc_feature (1)..( 8): Result.001 file - promoters60/1008836
taaatatt

SEQ ID NO: 89801 - DNA, 8 bp, Unknown
  misc_feature (1)..( 8): Result.001 file - promoters60/1008836
tcaatatt

SEQ ID NO: 89802 - DNA, 9 bp, Unknown
  misc_feature (1)..( 9): Result.001 file - promoters60/1008836
ataattatc

SEQ ID NO: 89803 - DNA, 9 bp, Unknown
  misc_feature (1)..( 9): Result.001 file - promoters60/1008836
atccatata

SEQ ID NO: 89804 - DNA, 12 bp, Unknown
  misc_feature (1)..( 12): Result.001 file - promoters60/1008836
ttgattaaaaaa

SEQ ID NO: 89805 - DNA, 12 bp, Unknown
  misc_feature (1)..( 12): Result.001 file - promoters60/1008836
ttgaataaaaaa

SEQ ID NO: 89806 - DNA, 12 bp, Unknown
  misc_feature (1)..( 12): Result.001 file - promoters60/1008836
caaagtaaaaaa

SEQ ID NO: 89807 - DNA, 12 bp, Unknown
  misc_feature (1)..( 12): Result.001 file - promoters60/1008889
ctagataaaagt

SEQ ID NO: 89808 - DNA, 8 bp, Unknown
  misc_feature (1)..( 8): Result.001 file - promoters60/1008889
attcattg

SEQ ID NO: 89809 - DNA, 8 bp, Unknown
  misc_feature (1)..( 8): Result.001 file - promoters60/1008889
atttattg

SEQ ID NO: 89810 - DNA, 8 bp, Unknown
  misc_feature (1)..( 8): Result.001 file - promoters60/1008889
ctgatatt

SEQ ID NO: 89811 - DNA, 8 bp, Unknown
  misc_feature (1)..( 8): Result.001 file - promoters60/1008889
ctgatatt

SEQ ID NO: 89812 - DNA, 10 bp, Unknown
  misc_feature (1)..( 10): Result.001 file - promoters60/1008889
atttataaat

SEQ ID NO: 89813 - DNA, 10 bp, Unknown
  misc_feature (1)..( 10): Result.001 file - promoters60/1008889
atttataaat

SEQ ID NO: 89814 - DNA, 7 bp, Unknown
  misc_feature (1)..( 7): Result.001 file - promoters60/1008889
gttgttt

SEQ ID NO: 89815 - DNA, 7 bp, Unknown
  misc_feature (1)..( 7): Result.001 file - promoters60/1008889
gttattt

SEQ ID NO: 89816 - DNA, 8 bp, Unknown
  misc_feature (1)..( 8): Result.001 file - promoters60/1008889
aaaattaa

SEQ ID NO: 89817 - DNA, 8 bp, Unknown
  misc_feature (1)..( 8): Result.001 file - promoters60/1008889
taaattat

SEQ ID NO: 89818 - DNA, 8 bp, Unknown
  misc_feature (1)..( 8): Result.001 file - promoters60/1008889
taaaatat

SEQ ID NO: 89819 - DNA, 8 bp, Unknown
  misc_feature (1)..( 8): Result.001 file - promoters60/1008889
gtcaaaaa

SEQ ID NO: 89820 - DNA, 8 bp, Unknown
  misc_feature (1)..( 8): Result.001 file - promoters60/1008889
gtcaaaaa

SEQ ID NO: 89821 - DNA, 6 bp, Unknown
  misc_feature (1)..( 6): Result.001 file - promoters60/1008889
agtttg

SEQ ID NO: 89822 - DNA, 6 bp, Unknown
  misc_feature (1)..( 6): Result.001 file - promoters60/1008889
agtttg

SEQ ID NO: 89823 - DNA, 8 bp, Unknown
  misc_feature (1)..( 8): Result.001 file - promoters60/1008889
aaagacat

SEQ ID NO: 89824 - DNA, 8 bp, Unknown
  misc_feature (1)..( 8): Result.001 file - promoters60/1008889
aaagccat

SEQ ID NO: 89825 - DNA, 6 bp, Unknown
  misc_feature (1)..( 6): Result.001 file - promoters60/1008889
ctctcc

SEQ ID NO: 89826 - DNA, 6 bp, Unknown
  misc_feature (1)..( 6): Result.001 file - promoters60/1008889
ctctcc

SEQ ID NO: 89827 - DNA, 7 bp, Unknown
  misc_feature (1)..( 7): Result.001 file - promoters60/1008889
caatctt

SEQ ID NO: 89828 - DNA, 7 bp, Unknown
  misc_feature (1)..( 7): Result.001 file - promoters60/1008889
caacctt

SEQ ID NO: 89829 - DNA, 8 bp, Unknown
  misc_feature (1)..( 8): Result.001 file - promoters60/1008889
aagaagat

SEQ ID NO: 89830 - DNA, 8 bp, Unknown
  misc_feature (1)..( 8): Result.001 file - promoters60/1008889
aagaggat

SEQ ID NO: 89831 - DNA, 8 bp, Unknown
  misc_feature (1)..( 8): Result.001 file - promoters60/1008889
caataaga

SEQ ID NO: 89832 - DNA, 8 bp, Unknown
  misc_feature (1)..( 8): Result.001 file - promoters60/1008889
caatcaga

SEQ ID NO: 89833 - DNA, 6 bp, Unknown
  misc_feature (1)..( 6): Result.001 file - promoters60/1008889
aaaaaa

SEQ ID NO: 89834 - DNA, 6 bp, Unknown
  misc_feature (1)..( 6): Result.001 file - promoters60/1008889
aaaaaa

SEQ ID NO: 89835 - DNA, 13 bp, Unknown
  misc_feature (1)..( 13): Result.001 file - promoters60/1008889
aaataaaaaaatt

SEQ ID NO: 89836 - DNA, 13 bp, Unknown
  misc_feature (1)..( 13): Result.001 file - promoters60/1008889
aaagaaaataatt

SEQ ID NO: 89837 - DNA, 8 bp, Unknown
  misc_feature (1)..( 8): Result.001 file - promoters60/1008889
atttgttt

SEQ ID NO: 89838 - DNA, 8 bp, Unknown
  misc_feature (1)..( 8): Result.001 file - promoters60/1008889
attttttt

SEQ ID NO: 89839 - DNA, 8 bp, Unknown
  misc_feature (1)..( 8): Result.001 file - promoters60/1008889
atttttag

SEQ ID NO: 89840 - DNA, 6 bp, Unknown
  misc_feature (1)..( 6): Result.001 file - promoters60/1008889
caatat

SEQ ID NO: 89841 - DNA, 6 bp, Unknown
  misc_feature (1)..( 6): Result.001 file - promoters60/1008889
caatat

SEQ ID NO: 89842 - DNA, 6 bp, Unknown
  misc_feature (1)..( 6): Result.001 file - promoters60/1008889
aataaa

SEQ ID NO: 89843 - DNA, 6 bp, Unknown
  misc_feature (1)..( 6): Result.001 file - promoters60/1008983
aataaa

SEQ ID NO: 89844 - DNA, 7 bp, Unknown
  misc_feature (1)..( 7): Result.001 file - promoters60/1008983
ttaattg

SEQ ID NO: 89845 - DNA, 7 bp, Unknown
  misc_feature (1)..( 7): Result.001 file - promoters60/1008983
ttatttg

SEQ ID NO: 89846 - DNA, 7 bp, Unknown
  misc_feature (1)..( 7): Result.001 file - promoters60/1008983
gtccaga

SEQ ID NO: 89847 - DNA, 7 bp, Unknown
  misc_feature (1)..( 7): Result.001 file - promoters60/1008983
gtctaga

SEQ ID NO: 89848 - DNA, 6 bp, Unknown
  misc_feature (1)..( 6): Result.001 file - promoters60/1008983
tgaaaa

SEQ ID NO: 89849 - DNA, 6 bp, Unknown
  misc_feature (1)..( 6): Result.001 file - promoters60/1008983
tgaaaa

SEQ ID NO: 89850 - DNA, 6 bp, Unknown
  misc_feature (1)..( 6): Result.001 file - promoters60/1008983
atttgg

SEQ ID NO: 89851 - DNA, 6 bp, Unknown
  misc_feature (1)..( 6): Result.001 file - promoters60/1008983
atttgg

SEQ ID NO: 89852 - DNA, 9 bp, Unknown
  misc_feature (1)..( 9): Result.001 file - promoters60/1008983
ggttttggt

SEQ ID NO: 89853 - DNA, 9 bp, Unknown
  misc_feature (1)..( 9): Result.001 file - promoters60/1008983
ggtgttggt

SEQ ID NO: 89854 - DNA, 7 bp, Unknown
  misc_feature (1)..( 7): Result.001 file - promoters60/1008983
atttttg

SEQ ID NO: 89855 - DNA, 7 bp, Unknown
  misc_feature (1)..( 7): Result.001 file - promoters60/1008983
atttttg

SEQ ID NO: 89856 - DNA, 6 bp, Unknown
  misc_feature (1)..( 6): Result.001 file - promoters60/1008983
gctttt

SEQ ID NO: 89857 - DNA, 6 bp, Unknown
  misc_feature (1)..( 6): Result.001 file - promoters60/1008983
gctttt

SEQ ID NO: 89858 - DNA, 7 bp, Unknown
  misc_feature (1)..( 7): Result.001 file - promoters60/1008983
tcttgtg

SEQ ID NO: 89859 - DNA, 7 bp, Unknown
  misc_feature (1)..( 7): Result.001 file - promoters60/1008983
tctggtg

SEQ ID NO: 89860 - DNA, 6 bp, Unknown
  misc_feature (1)..( 6): Result.001 file - promoters60/1008983
tcttgt

SEQ ID NO: 89861 - DNA, 6 bp, Unknown
  misc_feature (1)..( 6): Result.001 file - promoters60/1008983
tcttgt

SEQ ID NO: 89862 - DNA, 6 bp, Unknown
  misc_feature (1)..( 6): Result.001 file - promoters60/1008983
tctatc

SEQ ID NO: 89863 - DNA, 6 bp, Unknown
  misc_feature (1)..( 6): Result.001 file - promoters60/1008983
tctatc

SEQ ID NO: 89864 - DNA, 7 bp, Unknown
  misc_feature (1)..( 7): Result.001 file - promoters60/1008983
aatatct

SEQ ID NO: 89865 - DNA, 7 bp, Unknown
  misc_feature (1)..( 7): Result.001 file - promoters60/1008983
aatatct

SEQ ID NO: 89866 - DNA, 7 bp, Unknown
  misc_feature (1)..( 7): Result.001 file - promoters60/1008983
ttagccc

SEQ ID NO: 89867 - DNA, 7 bp, Unknown
  misc_feature (1)..( 7): Result.001 file - promoters60/1008983
ttaaccc

SEQ ID NO: 89868 - DNA, 6 bp, Unknown
  misc_feature (1)..( 6): Result.001 file - promoters60/1008983
ttctta

SEQ ID NO: 89869 - DNA, 6 bp, Unknown
  misc_feature (1)..( 6): Result.001 file - promoters60/1008983
ttctta

SEQ ID NO: 89870 - DNA, 8 bp, Unknown
  misc_feature (1)..( 8): Result.001 file - promoters60/1008983
atgatttc

SEQ ID NO: 89871 - DNA, 8 bp, Unknown
  misc_feature (1)..( 8): Result.001 file - promoters60/1008983
atgttttc

SEQ ID NO: 89872 - DNA, 7 bp, Unknown
  misc_feature (1)..( 7): Result.001 file - promoters60/1008983
atttttc

SEQ ID NO: 89873 - DNA, 7 bp, Unknown
  misc_feature (1)..( 7): Result.001 file - promoters60/1008983
atttttc

SEQ ID NO: 89874 - DNA, 8 bp, Unknown
  misc_feature (1)..( 8): Result.001 file - promoters60/1008983
agaagagg

SEQ ID NO: 89875 - DNA, 8 bp, Unknown
  misc_feature (1)..( 8): Result.001 file - promoters60/1008983
agaacagg

SEQ ID NO: 89876 - DNA, 6 bp, Unknown
  misc_feature (1)..( 6): Result.001 file - promoters60/1008983
tgatcg

SEQ ID NO: 89877 - DNA, 6 bp, Unknown
  misc_feature (1)..( 6): Result.001 file - promoters60/1008983
tgatcg

SEQ ID NO: 89878 - DNA, 6 bp, Unknown
  misc_feature (1)..( 6): Result.001 file - promoters60/1008983
aatgcc

SEQ ID NO: 89879 - DNA, 6 bp, Unknown
  misc_feature (1)..( 6): Result.001 file - promoters60/1008983
aatgcc

SEQ ID NO: 89880 - DNA, 6 bp, Unknown
  misc_feature (1)..( 6): Result.001 file - promoters60/1008983
tgctga

SEQ ID NO: 89881 - DNA, 6 bp, Unknown
  misc_feature (1)..( 6): Result.001 file - promoters60/1008983
tgctga

SEQ ID NO: 89882 - DNA, 7 bp, Unknown
  misc_feature (1)..( 7): Result.001 file - promoters60/1008983
ccgtgtt

SEQ ID NO: 89883 - DNA, 7 bp, Unknown
  misc_feature (1)..( 7): Result.001 file - promoters60/1009030
ccgagtt

SEQ ID NO: 89884 - DNA, 11 bp, Unknown
  misc_feature (1)..( 11): Result.001 file - promoters60/1009030
ttaaagcaaaa

SEQ ID NO: 89885 - DNA, 11 bp, Unknown
  misc_feature (1)..( 11): Result.001 file - promoters60/1009030
atggagcaaat

SEQ ID NO: 89886 - DNA, 11 bp, Unknown
  misc_feature (1)..( 11): Result.001 file - promoters60/1009030
ataaaacaaaa

SEQ ID NO: 89887 - DNA, 11 bp, Unknown
  misc_feature (1)..( 11): Result.001 file - promoters60/1009030
ttgaaataaaa

SEQ ID NO: 89888 - DNA, 11 bp, Unknown
  misc_feature (1)..( 11): Result.001 file - promoters60/1009030
acaaaacatcc

SEQ ID NO: 89889 - DNA, 11 bp, Unknown
  misc_feature (1)..( 11): Result.001 file - promoters60/1009030
ataagacagta

SEQ ID NO: 89890 - DNA, 11 bp, Unknown
  misc_feature (1)..( 11): Result.001 file - promoters60/1009030
gcaatcatggt

SEQ ID NO: 89891 - DNA, 11 bp, Unknown
  misc_feature (1)..( 11): Result.001 file - promoters60/1009030
ataataatgtc

SEQ ID NO: 89892 - DNA, 11 bp, Unknown
  misc_feature (1)..( 11): Result.001 file - promoters60/1009030
gcagtcaaaag

SEQ ID NO: 89893 - DNA, 11 bp, Unknown
  misc_feature (1)..( 11): Result.001 file - promoters60/1009030
ataatcatagc

SEQ ID NO: 89894 - DNA, 11 bp, Unknown
  misc_feature (1)..( 11): Result.001 file - promoters60/1009030
ttaataaaaat

SEQ ID NO: 89895 - DNA, 11 bp, Unknown
  misc_feature (1)..( 11): Result.001 file - promoters60/1009030
atattaatcga

SEQ ID NO: 89896 - DNA, 11 bp, Unknown
  misc_feature (1)..( 11): Result.001 file - promoters60/1009030
gcaaaacacat

SEQ ID NO: 89897 - DNA, 11 bp, Unknown
  misc_feature (1)..( 11): Result.001 file - promoters60/1009030
acaaaacatcc

SEQ ID NO: 89898 - DNA, 11 bp, Unknown
  misc_feature (1)..( 11): Result.001 file - promoters60/1009030
ataaaacaaaa

SEQ ID NO: 89899 - DNA, 11 bp, Unknown
  misc_feature (1)..( 11): Result.001 file - promoters60/1009030
agcaaataaat

SEQ ID NO: 89900 - DNA, 11 bp, Unknown
  misc_feature (1)..( 11): Result.001 file - promoters60/1009030
ataaaattaat

SEQ ID NO: 89901 - DNA, 11 bp, Unknown
  misc_feature (1)..( 11): Result.001 file - promoters60/1009053
ataagacagta

SEQ ID NO: 89902 - DNA, 8 bp, Unknown
  misc_feature (1)..( 8): Result.001 file - promoters60/1009053
atattact

SEQ ID NO: 89903 - DNA, 8 bp, Unknown
  misc_feature (1)..( 8): Result.001 file - promoters60/1009053
atactact

SEQ ID NO: 89904 - DNA, 7 bp, Unknown
  misc_feature (1)..( 7): Result.001 file - promoters60/1009053
caaatac

SEQ ID NO: 89905 - DNA, 7 bp, Unknown
  misc_feature (1)..( 7): Result.001 file - promoters60/1009053
caattac

SEQ ID NO: 89906 - DNA, 11 bp, Unknown
  misc_feature (1)..( 11): Result.001 file - promoters60/1009053
tatattaaata

SEQ ID NO: 89907 - DNA, 11 bp, Unknown
  misc_feature (1)..( 11): Result.001 file - promoters60/1009053
tatattttttt

SEQ ID NO: 89908 - DNA, 11 bp, Unknown
  misc_feature (1)..( 11): Result.001 file - promoters60/1009053
gatattttttt

SEQ ID NO: 89909 - DNA, 6 bp, Unknown
  misc_feature (1)..( 6): Result.001 file - promoters60/1009053
tatatg

SEQ ID NO: 89910 - DNA, 6 bp, Unknown
  misc_feature (1)..( 6): Result.001 file - promoters60/1009053
tatatg

SEQ ID NO: 89911 - DNA, 6 bp, Unknown
  misc_feature (1)..( 6): Result.001 file - promoters60/1009053
ttcaaa

SEQ ID NO: 89912 - DNA, 6 bp, Unknown
  misc_feature (1)..( 6): Result.001 file - promoters60/1009053
ttcaaa

SEQ ID NO: 89913 - DNA, 9 bp, Unknown
  misc_feature (1)..( 9): Result.001 file - promoters60/1009053
atactctca

SEQ ID NO: 89914 - DNA, 9 bp, Unknown
  misc_feature (1)..( 9): Result.001 file - promoters60/1009053
atattctca

SEQ ID NO: 89915 - DNA, 6 bp, Unknown
  misc_feature (1)..( 6): Result.001 file - promoters60/1009053
tcaaac

SEQ ID NO: 89916 - DNA, 6 bp, Unknown
  misc_feature (1)..( 6): Result.001 file - promoters60/1009053
tcaaac

SEQ ID NO: 89917 - DNA, 6 bp, Unknown
  misc_feature (1)..( 6): Result.001 file - promoters60/1009053
ttttct

SEQ ID NO: 89918 - DNA, 6 bp, Unknown
  misc_feature (1)..( 6): Result.001 file - promoters60/1009053
ttttct

SEQ ID NO: 89919 - DNA, 7 bp, Unknown
  misc_feature (1)..( 7): Result.001 file - promoters60/1009053
gaattca

SEQ ID NO: 89920 - DNA, 7 bp, Unknown
  misc_feature (1)..( 7): Result.001 file - promoters60/1009053
gaaatca

SEQ ID NO: 89921 - DNA, 6 bp, Unknown
  misc_feature (1)..( 6): Result.001 file - promoters60/1009053
atcttg

SEQ ID NO: 89922 - DNA, 6 bp, Unknown
  misc_feature (1)..( 6): Result.001 file - promoters60/1009053
atcttg

SEQ ID NO: 89923 - DNA, 6 bp, Unknown
  misc_feature (1)..( 6): Result.001 file - promoters60/1009053
acacaa

SEQ ID NO: 89924 - DNA, 6 bp, Unknown
  misc_feature (1)..( 6): Result.001 file - promoters60/1009053
acacaa

SEQ ID NO: 89925 - DNA, 12 bp, Unknown
  misc_feature (1)..( 12): Result.001 file - promoters60/1009053
atgttttcaata

SEQ ID NO: 89926 - DNA, 12 bp, Unknown
  misc_feature (1)..( 12): Result.001 file - promoters60/1009053
atttttttaata

SEQ ID NO: 89927 - DNA, 12 bp, Unknown
  misc_feature (1)..( 12): Result.001 file - promoters60/1009053
atattttttttt

SEQ ID NO: 89928 - DNA, 7 bp, Unknown
  misc_feature (1)..( 7): Result.001 file - promoters60/1009053
actattc

SEQ ID NO: 89929 - DNA, 7 bp, Unknown
  misc_feature (1)..( 7): Result.001 file - promoters60/1009053
actcttc

SEQ ID NO: 89930 - DNA, 11 bp, Unknown
  misc_feature (1)..( 11): Result.001 file - promoters60/1009053
accggttatta

SEQ ID NO: 89931 - DNA, 11 bp, Unknown
  misc_feature (1)..( 11): Result.001 file - promoters60/1009053
accggatatta

SEQ ID NO: 89932 - DNA, 6 bp, Unknown
  misc_feature (1)..( 6): Result.001 file - promoters60/1009053
tactgt

SEQ ID NO: 89933 - DNA, 6 bp, Unknown
  misc_feature (1)..( 6): Result.001 file - promoters60/1009053
tactgt

SEQ ID NO: 89934 - DNA, 9 bp, Unknown
  misc_feature (1)..( 9): Result.001 file - promoters60/1009053
tcaaaattt

SEQ ID NO: 89935 - DNA, 9 bp, Unknown
  misc_feature (1)..( 9): Result.001 file - promoters60/1009053
tcagaattt

SEQ ID NO: 89936 - DNA, 6 bp, Unknown
  misc_feature (1)..( 6): Result.001 file - promoters60/1009053
ttgaaa

SEQ ID NO: 89937 - DNA, 6 bp, Unknown
  misc_feature (1)..( 6): Result.001 file - promoters60/1009053
ttgaaa

SEQ ID NO: 89938 - DNA, 7 bp, Unknown
  misc_feature (1)..( 7): Result.001 file - promoters60/1009053
cttctcc

SEQ ID NO: 89939 - DNA, 7 bp, Unknown
  misc_feature (1)..( 7): Result.001 file - promoters60/1009053
cttgtcc

SEQ ID NO: 89940 - DNA, 7 bp, Unknown
  misc_feature (1)..( 7): Result.001 file - promoters60/1009053
ttcatgt

SEQ ID NO: 89941 - DNA, 7 bp, Unknown
  misc_feature (1)..( 7): Result.001 file - promoters60/1009053
ttcatgt

SEQ ID NO: 89942 - DNA, 7 bp, Unknown
  misc_feature (1)..( 7): Result.001 file - promoters60/1009053
aagcttt

SEQ ID NO: 89943 - DNA, 7 bp, Unknown
  misc_feature (1)..( 7): Result.001 file - promoters60/1009053
aagattt

SEQ ID NO: 89944 - DNA, 7 bp, Unknown
  misc_feature (1)..( 7): Result.001 file - promoters60/1009053
tacctca

SEQ ID NO: 89945 - DNA, 7 bp, Unknown
  misc_feature (1)..( 7): Result.001 file - promoters60/1009053
tacctca

SEQ ID NO: 89946 - DNA, 7 bp, Unknown
  misc_feature (1)..( 7): Result.001 file - promoters60/1009053
ttttata

SEQ ID NO: 89947 - DNA, 7 bp, Unknown
  misc_feature (1)..( 7): Result.001 file - promoters60/1009053
tttgata

SEQ ID NO: 89948 - DNA, 9 bp, Unknown
  misc_feature (1)..( 9): Result.001 file - promoters60/1009053
catccttat

SEQ ID NO: 89949 - DNA, 9 bp, Unknown
  misc_feature (1)..( 9): Result.001 file - promoters60/1009086
catcattat

SEQ ID NO: 89950 - DNA, 8 bp, Unknown
  misc_feature (1)..( 8): Result.001 file - promoters60/1009086
ataaataa

SEQ ID NO: 89951 - DNA, 8 bp, Unknown
  misc_feature (1)..( 8): Result.001 file - promoters60/1009086
atatataa

SEQ ID NO: 89952 - DNA, 6 bp, Unknown
  misc_feature (1)..( 6): Result.001 file - promoters60/1009086
aattat

SEQ ID NO: 89953 - DNA, 6 bp, Unknown
  misc_feature (1)..( 6): Result.001 file - promoters60/1009086
aattat

SEQ ID NO: 89954 - DNA, 6 bp, Unknown
  misc_feature (1)..( 6): Result.001 file - promoters60/1009086
tttgtt

SEQ ID NO: 89955 - DNA, 6 bp, Unknown
  misc_feature (1)..( 6): Result.001 file - promoters60/1009086
tttgtt

SEQ ID NO: 89956 - DNA, 6 bp, Unknown
  misc_feature (1)..( 6): Result.001 file - promoters60/1009086
aaattg

SEQ ID NO: 89957 - DNA, 6 bp, Unknown
  misc_feature (1)..( 6): Result.001 file - promoters60/1009086
aaattg

SEQ ID NO: 89958 - DNA, 7 bp, Unknown
  misc_feature (1)..( 7): Result.001 file - promoters60/1009086
aaaaatt

SEQ ID NO: 89959 - DNA, 7 bp, Unknown
  misc_feature (1)..( 7): Result.001 file - promoters60/1009086
aaaaatt

SEQ ID NO: 89960 - DNA, 6 bp, Unknown
  misc_feature (1)..( 6): Result.001 file - promoters60/1009086
tttgat

SEQ ID NO: 89961 - DNA, 6 bp, Unknown
  misc_feature (1)..( 6): Result.001 file - promoters60/1009086
tttgat

SEQ ID NO: 89962 - DNA, 6 bp, Unknown
  misc_feature (1)..( 6): Result.001 file - promoters60/1009086
tcaaat

SEQ ID NO: 89963 - DNA, 6 bp, Unknown
  misc_feature (1)..( 6): Result.001 file - promoters60/1009086
tcaaat

SEQ ID NO: 89964 - DNA, 9 bp, Unknown
  misc_feature (1)..( 9): Result.001 file - promoters60/1009086
taaatatga

SEQ ID NO: 89965 - DNA, 9 bp, Unknown
  misc_feature (1)..( 9): Result.001 file - promoters60/1009086
caaagatga

SEQ ID NO: 89966 - DNA, 9 bp, Unknown
  misc_feature (1)..( 9): Result.001 file - promoters60/1009086
taaataagt

SEQ ID NO: 89967 - DNA, 7 bp, Unknown
  misc_feature (1)..( 7): Result.001 file - promoters60/1009086
aatactt

SEQ ID NO: 89968 - DNA, 7 bp, Unknown
  misc_feature (1)..( 7): Result.001 file - promoters60/1009086
aatactt

SEQ ID NO: 89969 - DNA, 7 bp, Unknown
  misc_feature (1)..( 7): Result.001 file - promoters60/1009086
aaactct

SEQ ID NO: 89970 - DNA, 7 bp, Unknown
  misc_feature (1)..( 7): Result.001 file - promoters60/1009086
aaagtct

SEQ ID NO: 89971 - DNA, 6 bp, Unknown
  misc_feature (1)..( 6): Result.001 file - promoters60/1009086
gttttt

SEQ ID NO: 89972 - DNA, 6 bp, Unknown
  misc_feature (1)..( 6): Result.001 file - promoters60/1009086
gttttt

SEQ ID NO: 89973 - DNA, 8 bp, Unknown
  misc_feature (1)..( 8): Result.001 file - promoters60/1009086
gaaacaga

SEQ ID NO: 89974 - DNA, 8 bp, Unknown
  misc_feature (1)..( 8): Result.001 file - promoters60/1009086
gaaacaga

SEQ ID NO: 89975 - DNA, 7 bp, Unknown
  misc_feature (1)..( 7): Result.001 file - promoters60/1009086
aaagctt

SEQ ID NO: 89976 - DNA, 7 bp, Unknown
  misc_feature (1)..( 7): Result.001 file - promoters60/1009086
aaagctt

SEQ ID NO: 89977 - DNA, 8 bp, Unknown
  misc_feature (1)..( 8): Result.001 file - promoters60/1009086
aatttgat

SEQ ID NO: 89978 - DNA, 8 bp, Unknown
  misc_feature (1)..( 8): Result.001 file - promoters60/1009086
aatatgat

SEQ ID NO: 89979 - DNA, 7 bp, Unknown
  misc_feature (1)..( 7): Result.001 file - promoters60/1009086
ctcaaca

SEQ ID NO: 89980 - DNA, 7 bp, Unknown
  misc_feature (1)..( 7): Result.001 file - promoters60/1009086
ctccaca

SEQ ID NO: 89981 - DNA, 8 bp, Unknown
  misc_feature (1)..( 8): Result.001 file - promoters60/1009086
ataaaaca

SEQ ID NO: 89982 - DNA, 8 bp, Unknown
  misc_feature (1)..( 8): Result.001 file - promoters60/1009086
ataagaca

SEQ ID NO: 89983 - DNA, 8 bp, Unknown
  misc_feature (1)..( 8): Result.001 file - promoters60/1009086
tatatttt

SEQ ID NO: 89984 - DNA, 8 bp, Unknown
  misc_feature (1)..( 8): Result.001 file - promoters60/1009086
tatttttt

SEQ ID NO: 89985 - DNA, 6 bp, Unknown
  misc_feature (1)..( 6): Result.001 file - promoters60/1009086
tatttc

SEQ ID NO: 89986 - DNA, 6 bp, Unknown
  misc_feature (1)..( 6): Result.001 file - promoters60/1009086
tatttc

SEQ ID NO: 89987 - DNA, 8 bp, Unknown
  misc_feature (1)..( 8): Result.001 file - promoters60/1009086
atcatgaa

SEQ ID NO: 89988 - DNA, 8 bp, Unknown
  misc_feature (1)..( 8): Result.001 file - promoters60/1009086
atcaggaa

SEQ ID NO: 89989 - DNA, 8 bp, Unknown
  misc_feature (1)..( 8): Result.001 file - promoters60/1009086
tttaaaag

SEQ ID NO: 89990 - DNA, 8 bp, Unknown
  misc_feature (1)..( 8): Result.001 file - promoters60/1009086
tttaaaag

SEQ ID NO: 89991 - DNA, 6 bp, Unknown
  misc_feature (1)..( 6): Result.001 file - promoters60/1009086
aggttt

SEQ ID NO: 89992 - DNA, 6 bp, Unknown
  misc_feature (1)..( 6): Result.001 file - promoters60/1009136
aggttt

SEQ ID NO: 89993 - DNA, 8 bp, Unknown
  misc_feature (1)..( 8): Result.001 file - promoters60/1009136
caaaccaa

SEQ ID NO: 89994 - DNA, 8 bp, Unknown
  misc_feature (1)..( 8): Result.001 file - promoters60/1009136
caaaacaa

SEQ ID NO: 89995 - DNA, 8 bp, Unknown
  misc_feature (1)..( 8): Result.001 file - promoters60/1009136
aaaaacaa

SEQ ID NO: 89996 - DNA, 8 bp, Unknown
  misc_feature (1)..( 8): Result.001 file - promoters60/1009136
taaaccaa

SEQ ID NO: 89997 - DNA, 8 bp, Unknown
  misc_feature (1)..( 8): Result.001 file - promoters60/1009136
tttcaatt

SEQ ID NO: 89998 - DNA, 8 bp, Unknown
  misc_feature (1)..( 8): Result.001 file - promoters60/1009136
attcaatg

SEQ ID NO: 89999 - DNA, 8 bp, Unknown
  misc_feature (1)..( 8): Result.001 file - promoters60/1009136
ttttaatt

SEQ ID NO: 90000 - DNA, 8 bp, Unknown
  misc_feature (1)..( 8): Result.001 file - promoters60/1009136
attcaact

SEQ ID NO: 90001 - DNA, 11 bp, Unknown
  misc_feature (1)..( 11): Result.001 file - promoters60/1009136
taggaaataaa

SEQ ID NO: 90002 - DNA, 11 bp, Unknown
  misc_feature (1)..( 11): Result.001 file - promoters60/1009136
actaaaataac

SEQ ID NO: 90003 - DNA, 11 bp, Unknown
  misc_feature (1)..( 11): Result.001 file - promoters60/1009136
acagaaataaa

SEQ ID NO: 90004 - DNA, 11 bp, Unknown
  misc_feature (1)..( 11): Result.001 file - promoters60/1009146
acacaaatatg

SEQ ID NO: 90005 - DNA, 8 bp, Unknown
  misc_feature (1)..( 8): Result.001 file - promoters60/1009146
caaatttt

SEQ ID NO: 90006 - DNA, 8 bp, Unknown
  misc_feature (1)..( 8): Result.001 file - promoters60/1009146
caattttt

SEQ ID NO: 90007 - DNA, 7 bp, Unknown
  misc_feature (1)..( 7): Result.001 file - promoters60/1009146
agacaag

SEQ ID NO: 90008 - DNA, 7 bp, Unknown
  misc_feature (1)..( 7): Result.001 file - promoters60/1009146
agagaag

SEQ ID NO: 90009 - DNA, 8 bp, Unknown
  misc_feature (1)..( 8): Result.001 file - promoters60/1009146
aaagcgac

SEQ ID NO: 90010 - DNA, 8 bp, Unknown
  misc_feature (1)..( 8): Result.001 file - promoters60/1009146
aaagtgac

SEQ ID NO: 90011 - DNA, 8 bp, Unknown
  misc_feature (1)..( 8): Result.001 file - promoters60/1009146
aggggaat

SEQ ID NO: 90012 - DNA, 8 bp, Unknown
  misc_feature (1)..( 8): Result.001 file - promoters60/1009146
aggtgaat

SEQ ID NO: 90013 - DNA, 7 bp, Unknown
  misc_feature (1)..( 7): Result.001 file - promoters60/1009146
gtttttg

SEQ ID NO: 90014 - DNA, 7 bp, Unknown
  misc_feature (1)..( 7): Result.001 file - promoters60/1009146
gttcttg

SEQ ID NO: 90015 - DNA, 13 bp, Unknown
  misc_feature (1)..( 13): Result.001 file - promoters60/1009146
ttgaatcaatatt

SEQ ID NO: 90016 - DNA, 13 bp, Unknown
  misc_feature (1)..( 13): Result.001 file - promoters60/1009146
ttgattcaaaatt

SEQ ID NO: 90017 - DNA, 7 bp, Unknown
  misc_feature (1)..( 7): Result.001 file - promoters60/1009146
tggattt

SEQ ID NO: 90018 - DNA, 7 bp, Unknown
  misc_feature (1)..( 7): Result.001 file - promoters60/1009146
tggattt

SEQ ID NO: 90019 - DNA, 6 bp, Unknown
  misc_feature (1)..( 6): Result.001 file - promoters60/1009146
aagatt

SEQ ID NO: 90020 - DNA, 6 bp, Unknown
  misc_feature (1)..( 6): Result.001 file - promoters60/1009146
aagatt

SEQ ID NO: 90021 - DNA, 6 bp, Unknown
  misc_feature (1)..( 6): Result.001 file - promoters60/1009146
ttggtt

SEQ ID NO: 90022 - DNA, 6 bp, Unknown
  misc_feature (1)..( 6): Result.001 file - promoters60/1009146
ttggtt

SEQ ID NO: 90023 - DNA, 6 bp, Unknown
  misc_feature (1)..( 6): Result.001 file - promoters60/1009146
ttaacc

SEQ ID NO: 90024 - DNA, 6 bp, Unknown
  misc_feature (1)..( 6): Result.001 file - promoters60/1009146
ttaacc

SEQ ID NO: 90025 - DNA, 7 bp, Unknown
  misc_feature (1)..( 7): Result.001 file - promoters60/1009146
ctcactc

SEQ ID NO: 90026 - DNA, 7 bp, Unknown
  misc_feature (1)..( 7): Result.001 file - promoters60/1009146
ctcgctc

SEQ ID NO: 90027 - DNA, 6 bp, Unknown
  misc_feature (1)..( 6): Result.001 file - promoters60/1009146
atttct

SEQ ID NO: 90028 - DNA, 6 bp, Unknown
  misc_feature (1)..( 6): Result.001 file - promoters60/1009211
atttct

SEQ ID NO: 90029 - DNA, 15 bp, Unknown
  misc_feature (1)..( 15): Result.001 file - promoters60/1009211
acaatgggctgggcc

SEQ ID NO: 90030 - DNA, 15 bp, Unknown
  misc_feature (1)..( 15): Result.001 file - promoters60/1009211
attttgggcttctta

SEQ ID NO: 90031 - DNA, 15 bp, Unknown
  misc_feature (1)..( 15): Result.001 file - promoters60/1009211
taattgggcttttta

SEQ ID NO: 90032 - DNA, 15 bp, Unknown
  misc_feature (1)..( 15): Result.001 file - promoters60/1009211
tgattggggttacaa

SEQ ID NO: 90033 - DNA, 15 bp, Unknown
  misc_feature (1)..( 15): Result.001 file - promoters60/1009211
caattgggattattt

SEQ ID NO: 90034 - DNA, 16 bp, Unknown
  misc_feature (1)..( 16): Result.001 file - promoters60/1009234
tgattgtggtaaaaag

SEQ ID NO: 90035 - DNA, 12 bp, Unknown
  misc_feature (1)..( 12): Result.001 file - promoters60/1009234
ttaaatgaagat

SEQ ID NO: 90036 - DNA, 12 bp, Unknown
  misc_feature (1)..( 12): Result.001 file - promoters60/1009234
aataatgatgat

SEQ ID NO: 90037 - DNA, 12 bp, Unknown
  misc_feature (1)..( 12): Result.001 file - promoters60/1009234
gacaatgaattg

SEQ ID NO: 90038 - DNA, 12 bp, Unknown
  misc_feature (1)..( 12): Result.001 file - promoters60/1009234
ttacatgaacag

SEQ ID NO: 90039 - DNA, 7 bp, Unknown
  misc_feature (1)..( 7): Result.001 file - promoters60/1009234
caagtat

SEQ ID NO: 90040 - DNA, 7 bp, Unknown
  misc_feature (1)..( 7): Result.001 file - promoters60/1009234
caaatat

SEQ ID NO: 90041 - DNA, 7 bp, Unknown
  misc_feature (1)..( 7): Result.001 file - promoters60/1009234
caaatag

SEQ ID NO: 90042 - DNA, 7 bp, Unknown
  misc_feature (1)..( 7): Result.001 file - promoters60/1009354
caattag

SEQ ID NO: 90043 - DNA, 9 bp, Unknown
  misc_feature (1)..( 9): Result.001 file - promoters60/1009354
attgaaata

SEQ ID NO: 90044 - DNA, 9 bp, Unknown
  misc_feature (1)..( 9): Result.001 file - promoters60/1009354
atttaaata

SEQ ID NO: 90045 - DNA, 6 bp, Unknown
  misc_feature (1)..( 6): Result.001 file - promoters60/1009354
ttattt

SEQ ID NO: 90046 - DNA, 6 bp, Unknown
  misc_feature (1)..( 6): Result.001 file - promoters60/1009354
ttattt

SEQ ID NO: 90047 - DNA, 6 bp, Unknown
  misc_feature (1)..( 6): Result.001 file - promoters60/1009354
ataatt

SEQ ID NO: 90048 - DNA, 6 bp, Unknown
  misc_feature (1)..( 6): Result.001 file - promoters60/1009354
ataatt

SEQ ID NO: 90049 - DNA, 8 bp, Unknown
  misc_feature (1)..( 8): Result.001 file - promoters60/1009354
taagaact

SEQ ID NO: 90050 - DNA, 8 bp, Unknown
  misc_feature (1)..( 8): Result.001 file - promoters60/1009354
taagaaat

SEQ ID NO: 90051 - DNA, 8 bp, Unknown
  misc_feature (1)..( 8): Result.001 file - promoters60/1009354
gaagaact

SEQ ID NO: 90052 - DNA, 7 bp, Unknown
  misc_feature (1)..( 7): Result.001 file - promoters60/1009354
accgtct

SEQ ID NO: 90053 - DNA, 7 bp, Unknown
  misc_feature (1)..( 7): Result.001 file - promoters60/1009354
accctct

SEQ ID NO: 90054 - DNA, 6 bp, Unknown
  misc_feature (1)..( 6): Result.001 file - promoters60/1009354
ttaaat

SEQ ID NO: 90055 - DNA, 6 bp, Unknown
  misc_feature (1)..( 6): Result.001 file - promoters60/1009354
ttaaat

SEQ ID NO: 90056 - DNA, 6 bp, Unknown
  misc_feature (1)..( 6): Result.001 file - promoters60/1009354
ttttgt

SEQ ID NO: 90057 - DNA, 6 bp, Unknown
  misc_feature (1)..( 6): Result.001 file - promoters60/1009354
ttttgt

SEQ ID NO: 90058 - DNA, 6 bp, Unknown
  misc_feature (1)..( 6): Result.001 file - promoters60/1009354
agtaat

SEQ ID NO: 90059 - DNA, 6 bp, Unknown
  misc_feature (1)..( 6): Result.001 file - promoters60/1009354
agtaat

SEQ ID NO: 90060 - DNA, 6 bp, Unknown
  misc_feature (1)..( 6): Result.001 file - promoters60/1009354
atagag

SEQ ID NO: 90061 - DNA, 6 bp, Unknown
  misc_feature (1)..( 6): Result.001 file - promoters60/1009354
atagag

SEQ ID NO: 90062 - DNA, 7 bp, Unknown
  misc_feature (1)..( 7): Result.001 file - promoters60/1009354
atgtggc

SEQ ID NO: 90063 - DNA, 7 bp, Unknown
  misc_feature (1)..( 7): Result.001 file - promoters60/1009354
atgtggc

SEQ ID NO: 90064 - DNA, 7 bp, Unknown
  misc_feature (1)..( 7): Result.001 file - promoters60/1009354
gatactt

SEQ ID NO: 90065 - DNA, 7 bp, Unknown
  misc_feature (1)..( 7): Result.001 file - promoters60/1009354
gattctt

SEQ ID NO: 90066 - DNA, 7 bp, Unknown
  misc_feature (1)..( 7): Result.001 file - promoters60/1009354
gattcta

SEQ ID NO: 90067 - DNA, 9 bp, Unknown
  misc_feature (1)..( 9): Result.001 file - promoters60/1009354
aatgaagat

SEQ ID NO: 90068 - DNA, 9 bp, Unknown
  misc_feature (1)..( 9): Result.001 file - promoters60/1009354
aatgatgat

SEQ ID NO: 90069 - DNA, 7 bp, Unknown
  misc_feature (1)..( 7): Result.001 file - promoters60/1009354
acacgtc

SEQ ID NO: 90070 - DNA, 7 bp, Unknown
  misc_feature (1)..( 7): Result.001 file - promoters60/1009354
acatgtc

SEQ ID NO: 90071 - DNA, 8 bp, Unknown
  misc_feature (1)..( 8): Result.001 file - promoters60/1009354
gtgatcca

SEQ ID NO: 90072 - DNA, 8 bp, Unknown
  misc_feature (1)..( 8): Result.001 file - promoters60/1009354
gtggtcca

SEQ ID NO: 90073 - DNA, 6 bp, Unknown
  misc_feature (1)..( 6): Result.001 file - promoters60/1009354
aaactt

SEQ ID NO: 90074 - DNA, 6 bp, Unknown
  misc_feature (1)..( 6): Result.001 file - promoters60/1009354
aaactt

SEQ ID NO: 90075 - DNA, 7 bp, Unknown
  misc_feature (1)..( 7): Result.001 file - promoters60/1009354
ttctaaa

SEQ ID NO: 90076 - DNA, 7 bp, Unknown
  misc_feature (1)..( 7): Result.001 file - promoters60/1009354
ttcaaaa

SEQ ID NO: 90077 - DNA, 6 bp, Unknown
  misc_feature (1)..( 6): Result.001 file - promoters60/1009354
taagaa

SEQ ID NO: 90078 - DNA, 6 bp, Unknown
  misc_feature (1)..( 6): Result.001 file - promoters60/1009354
taagaa

SEQ ID NO: 90079 - DNA, 8 bp, Unknown
  misc_feature (1)..( 8): Result.001 file - promoters60/1009354
gaaaatct

SEQ ID NO: 90080 - DNA, 8 bp, Unknown
  misc_feature (1)..( 8): Result.001 file - promoters60/1009354
gaagatct

SEQ ID NO: 90081 - DNA, 6 bp, Unknown
  misc_feature (1)..( 6): Result.001 file - promoters60/1009354
ttgtca

SEQ ID NO: 90082 - DNA, 6 bp, Unknown
  misc_feature (1)..( 6): Result.001 file - promoters60/1009354
ttgtca

SEQ ID NO: 90083 - DNA, 8 bp, Unknown
  misc_feature (1)..( 8): Result.001 file - promoters60/1009354
cataagta

SEQ ID NO: 90084 - DNA, 8 bp, Unknown
  misc_feature (1)..( 8): Result.001 file - promoters60/1009354
cattagta

SEQ ID NO: 90085 - DNA, 8 bp, Unknown
  misc_feature (1)..( 8): Result.001 file - promoters60/1009354
ggtgtata

SEQ ID NO: 90086 - DNA, 8 bp, Unknown
  misc_feature (1)..( 8): Result.001 file - promoters60/1009354
ggtggata

SEQ ID NO: 90087 - DNA, 7 bp, Unknown
  misc_feature (1)..( 7): Result.001 file - promoters60/1009354
cacacgt

SEQ ID NO: 90088 - DNA, 7 bp, Unknown
  misc_feature (1)..( 7): Result.001 file - promoters60/1009354
cacacgt

SEQ ID NO: 90089 - DNA, 13 bp, Unknown
  misc_feature (1)..( 13): Result.001 file - promoters60/1009354
taaccaaagattc

SEQ ID NO: 90090 - DNA, 13 bp, Unknown
  misc_feature (1)..( 13): Result.001 file - promoters60/1009430
taatcaaaaattc

SEQ ID NO: 90091 - DNA, 10 bp, Unknown
  misc_feature (1)..( 10): Result.001 file - promoters60/1009430
attttatata

SEQ ID NO: 90092 - DNA, 10 bp, Unknown
  misc_feature (1)..( 10): Result.001 file - promoters60/1009430
ctcttaaata

SEQ ID NO: 90093 - DNA, 10 bp, Unknown
  misc_feature (1)..( 10): Result.001 file - promoters60/1009430
ctctgaaaca

SEQ ID NO: 90094 - DNA, 10 bp, Unknown
  misc_feature (1)..( 10): Result.001 file - promoters60/1009430
agacaatttt

SEQ ID NO: 90095 - DNA, 10 bp, Unknown
  misc_feature (1)..( 10): Result.001 file - promoters60/1009430
agaaaatttc

SEQ ID NO: 90096 - DNA, 10 bp, Unknown
  misc_feature (1)..( 10): Result.001 file - promoters60/1009430
aaaaaaattc

SEQ ID NO: 90097 - DNA, 10 bp, Unknown
  misc_feature (1)..( 10): Result.001 file - promoters60/1009430
ttcaaagttc

SEQ ID NO: 90098 - DNA, 8 bp, Unknown
  misc_feature (1)..( 8): Result.001 file - promoters60/1009430
cttcttct

SEQ ID NO: 90099 - DNA, 8 bp, Unknown
  misc_feature (1)..( 8): Result.001 file - promoters60/1009430
cttcctct

SEQ ID NO: 90100 - DNA, 8 bp, Unknown
  misc_feature (1)..( 8): Result.001 file - promoters60/1009616
attcatct

SEQ ID NO: 90101 - DNA, 10 bp, Unknown
  misc_feature (1)..( 10): Result.001 file - promoters60/1009616
ttaaacaaaa

SEQ ID NO: 90102 - DNA, 10 bp, Unknown
  misc_feature (1)..( 10): Result.001 file - promoters60/1009616
ctaaacaaaa

SEQ ID NO: 90103 - DNA, 10 bp, Unknown
  misc_feature (1)..( 10): Result.001 file - promoters60/1009616
gtaaccaaat

SEQ ID NO: 90104 - DNA, 10 bp, Unknown
  misc_feature (1)..( 10): Result.001 file - promoters60/1009616
tcaaacacta

SEQ ID NO: 90105 - DNA, 10 bp, Unknown
  misc_feature (1)..( 10): Result.001 file - promoters60/1009616
ctagacagag

SEQ ID NO: 90106 - DNA, 9 bp, Unknown
  misc_feature (1)..( 9): Result.001 file - promoters60/1009616
gaaaacaat

SEQ ID NO: 90107 - DNA, 9 bp, Unknown
  misc_feature (1)..( 9): Result.001 file - promoters60/1009616
gaatacaat

SEQ ID NO: 90108 - DNA, 9 bp, Unknown
  misc_feature (1)..( 9): Result.001 file - promoters60/1009616
taatacaaa

SEQ ID NO: 90109 - DNA, 9 bp, Unknown
  misc_feature (1)..( 9): Result.001 file - promoters60/1009616
taacacaga

SEQ ID NO: 90110 - DNA, 14 bp, Unknown
  misc_feature (1)..( 14): Result.001 file - promoters60/1009616
aaagtataaacaca

SEQ ID NO: 90111 - DNA, 14 bp, Unknown
  misc_feature (1)..( 14): Result.001 file - promoters60/1009616
tatatattaacaca

SEQ ID NO: 90112 - DNA, 14 bp, Unknown
  misc_feature (1)..( 14): Result.001 file - promoters60/1009616
aaagtctaatacaa

SEQ ID NO: 90113 - DNA, 14 bp, Unknown
  misc_feature (1)..( 14): Result.001 file - promoters60/1009616
accaaatatacaaa

SEQ ID NO: 90114 - DNA, 14 bp, Unknown
  misc_feature (1)..( 14): Result.001 file - promoters60/1009616
aaaatctacgcata

SEQ ID NO: 90115 - DNA, 13 bp, Unknown
  misc_feature (1)..( 13): Result.001 file - promoters60/1009616
attattatgcatg

SEQ ID NO: 90116 - DNA, 13 bp, Unknown
  misc_feature (1)..( 13): Result.001 file - promoters60/1009616
tttataatgcaaa

SEQ ID NO: 90117 - DNA, 13 bp, Unknown
  misc_feature (1)..( 13): Result.001 file - promoters60/1009616
attactatttcaa

SEQ ID NO: 90118 - DNA, 13 bp, Unknown
  misc_feature (1)..( 13): Result.001 file - promoters60/1009616
atagaaatgaaaa

SEQ ID NO: 90119 - DNA, 20 bp, Unknown
  misc_feature (1)..( 20): Result.001 file - promoters60/1009616
acactaaaatagtttttttt

SEQ ID NO: 90120 - DNA, 20 bp, Unknown
  misc_feature (1)..( 20): Result.001 file - promoters60/1009616
acacttaaaaagtctttttt

SEQ ID NO: 90121 - DNA, 20 bp, Unknown
  misc_feature (1)..( 20): Result.001 file - promoters60/1009616
tgagatcaaaagtgaaaaca

SEQ ID NO: 90122 - DNA, 20 bp, Unknown
  misc_feature (1)..( 20): Result.001 file - promoters60/1009686
aaaattaaaaagaatacaaa

SEQ ID NO: 90123 - DNA, 7 bp, Unknown
  misc_feature (1)..( 7): Result.001 file - promoters60/1009686
tatgttt

SEQ ID NO: 90124 - DNA, 7 bp, Unknown
  misc_feature (1)..( 7): Result.001 file - promoters60/1009686
tattttt

SEQ ID NO: 90125 - DNA, 7 bp, Unknown
  misc_feature (1)..( 7): Result.001 file - promoters60/1009686
aaagttg

SEQ ID NO: 90126 - DNA, 7 bp, Unknown
  misc_feature (1)..( 7): Result.001 file - promoters60/1009686
aaatttg

SEQ ID NO: 90127 - DNA, 7 bp, Unknown
  misc_feature (1)..( 7): Result.001 file - promoters60/1009686
ttacata

SEQ ID NO: 90128 - DNA, 7 bp, Unknown
  misc_feature (1)..( 7): Result.001 file - promoters60/1009686
ttatata

SEQ ID NO: 90129 - DNA, 7 bp, Unknown
  misc_feature (1)..( 7): Result.001 file - promoters60/1009686
tagttaa

SEQ ID NO: 90130 - DNA, 7 bp, Unknown
  misc_feature (1)..( 7): Result.001 file - promoters60/1009686
tagttaa

SEQ ID NO: 90131 - DNA, 6 bp, Unknown
  misc_feature (1)..( 6): Result.001 file - promoters60/1009686
tgaaaa

SEQ ID NO: 90132 - DNA, 6 bp, Unknown
  misc_feature (1)..( 6): Result.001 file - promoters60/1009686
tgaaaa

SEQ ID NO: 90133 - DNA, 6 bp, Unknown
  misc_feature (1)..( 6): Result.001 file - promoters60/1009686
taaagt

SEQ ID NO: 90134 - DNA, 6 bp, Unknown
  misc_feature (1)..( 6): Result.001 file - promoters60/1009686
taaagt

SEQ ID NO: 90135 - DNA, 6 bp, Unknown
  misc_feature (1)..( 6): Result.001 file - promoters60/1009686
taattt

SEQ ID NO: 90136 - DNA, 6 bp, Unknown
  misc_feature (1)..( 6): Result.001 file - promoters60/1009686
taattt

SEQ ID NO: 90137 - DNA, 7 bp, Unknown
  misc_feature (1)..( 7): Result.001 file - promoters60/1009686
ttatgaa

SEQ ID NO: 90138 - DNA, 7 bp, Unknown
  misc_feature (1)..( 7): Result.001 file - promoters60/1009686
ttacgaa

SEQ ID NO: 90139 - DNA, 8 bp, Unknown
  misc_feature (1)..( 8): Result.001 file - promoters60/1009686
attcagtt

SEQ ID NO: 90140 - DNA, 8 bp, Unknown
  misc_feature (1)..( 8): Result.001 file - promoters60/1009686
attaagtc

SEQ ID NO: 90141 - DNA, 8 bp, Unknown
  misc_feature (1)..( 8): Result.001 file - promoters60/1009686
gttaagtc

SEQ ID NO: 90142 - DNA, 9 bp, Unknown
  misc_feature (1)..( 9): Result.001 file - promoters60/1009686
aattaaaaa

SEQ ID NO: 90143 - DNA, 9 bp, Unknown
  misc_feature (1)..( 9): Result.001 file - promoters60/1009686
aatcaaaaa

SEQ ID NO: 90144 - DNA, 9 bp, Unknown
  misc_feature (1)..( 9): Result.001 file - promoters60/1009686
aaacaatta

SEQ ID NO: 90145 - DNA, 9 bp, Unknown
  misc_feature (1)..( 9): Result.001 file - promoters60/1009686
aaataatta

SEQ ID NO: 90146 - DNA, 7 bp, Unknown
  misc_feature (1)..( 7): Result.001 file - promoters60/1009686
agtagtt

SEQ ID NO: 90147 - DNA, 7 bp, Unknown
  misc_feature (1)..( 7): Result.001 file - promoters60/1009686
agtggtt

SEQ ID NO: 90148 - DNA, 7 bp, Unknown
  misc_feature (1)..( 7): Result.001 file - promoters60/1009686
ctttctt

SEQ ID NO: 90149 - DNA, 7 bp, Unknown
  misc_feature (1)..( 7): Result.001 file - promoters60/1009686
cttcctt

SEQ ID NO: 90150 - DNA, 6 bp, Unknown
  misc_feature (1)..( 6): Result.001 file - promoters60/1009686
tttaca

SEQ ID NO: 90151 - DNA, 6 bp, Unknown
  misc_feature (1)..( 6): Result.001 file - promoters60/1009686
tttaca

SEQ ID NO: 90152 - DNA, 7 bp, Unknown
  misc_feature (1)..( 7): Result.001 file - promoters60/1009686
aataagg

SEQ ID NO: 90153 - DNA, 7 bp, Unknown
  misc_feature (1)..( 7): Result.001 file - promoters60/1009686
aattagg

SEQ ID NO: 90154 - DNA, 11 bp, Unknown
  misc_feature (1)..( 11): Result.001 file - promoters60/1009686
acagagaaata

SEQ ID NO: 90155 - DNA, 11 bp, Unknown
  misc_feature (1)..( 11): Result.001 file - promoters60/1009686
acaaagagata

SEQ ID NO: 90156 - DNA, 6 bp, Unknown
  misc_feature (1)..( 6): Result.001 file - promoters60/1009686
tcaaaa

SEQ ID NO: 90157 - DNA, 6 bp, Unknown
  misc_feature (1)..( 6): Result.001 file - promoters60/1009686
tcaaaa

SEQ ID NO: 90158 - DNA, 8 bp, Unknown
  misc_feature (1)..( 8): Result.001 file - promoters60/1009686
aagaggaa

SEQ ID NO: 90159 - DNA, 8 bp, Unknown
  misc_feature (1)..( 8): Result.001 file - promoters60/1009686
aagaagaa

SEQ ID NO: 90160 - DNA, 8 bp, Unknown
  misc_feature (1)..( 8): Result.001 file - promoters60/1009686
aagaggag

SEQ ID NO: 90161 - DNA, 8 bp, Unknown
  misc_feature (1)..( 8): Result.001 file - promoters60/1009752
aagcggag

SEQ ID NO: 90162 - DNA, 8 bp, Unknown
  misc_feature (1)..( 8): Result.001 file - promoters60/1009752
atttgaat

SEQ ID NO: 90163 - DNA, 8 bp, Unknown
  misc_feature (1)..( 8): Result.001 file - promoters60/1009752
atttcaat

SEQ ID NO: 90164 - DNA, 8 bp, Unknown
  misc_feature (1)..( 8): Result.001 file - promoters60/1009752
ttatttta

SEQ ID NO: 90165 - DNA, 8 bp, Unknown
  misc_feature (1)..( 8): Result.001 file - promoters60/1009752
atatttta

SEQ ID NO: 90166 - DNA, 8 bp, Unknown
  misc_feature (1)..( 8): Result.001 file - promoters60/1009752
ttaattta

SEQ ID NO: 90167 - DNA, 7 bp, Unknown
  misc_feature (1)..( 7): Result.001 file - promoters60/1009752
aaaaaat

SEQ ID NO: 90168 - DNA, 7 bp, Unknown
  misc_feature (1)..( 7): Result.001 file - promoters60/1009752
aaagaat

SEQ ID NO: 90169 - DNA, 6 bp, Unknown
  misc_feature (1)..( 6): Result.001 file - promoters60/1009752
aattag

SEQ ID NO: 90170 - DNA, 6 bp, Unknown
  misc_feature (1)..( 6): Result.001 file - promoters60/1009752
aattag

SEQ ID NO: 90171 - DNA, 8 bp, Unknown
  misc_feature (1)..( 8): Result.001 file - promoters60/1009752
aggatgtt

SEQ ID NO: 90172 - DNA, 8 bp, Unknown
  misc_feature (1)..( 8): Result.001 file - promoters60/1009752
aggttgtt

SEQ ID NO: 90173 - DNA, 6 bp, Unknown
  misc_feature (1)..( 6): Result.001 file - promoters60/1009752
taaacg

SEQ ID NO: 90174 - DNA, 6 bp, Unknown
  misc_feature (1)..( 6): Result.001 file - promoters60/1009752
taaacg

SEQ ID NO: 90175 - DNA, 6 bp, Unknown
  misc_feature (1)..( 6): Result.001 file - promoters60/1009752
ttaatt

SEQ ID NO: 90176 - DNA, 6 bp, Unknown
  misc_feature (1)..( 6): Result.001 file - promoters60/1009752
ttaatt

SEQ ID NO: 90177 - DNA, 7 bp, Unknown
  misc_feature (1)..( 7): Result.001 file - promoters60/1009752
taaaaat

SEQ ID NO: 90178 - DNA, 7 bp, Unknown
  misc_feature (1)..( 7): Result.001 file - promoters60/1009752
taacaat

SEQ ID NO: 90179 - DNA, 7 bp, Unknown
  misc_feature (1)..( 7): Result.001 file - promoters60/1009752
taacaac

SEQ ID NO: 90180 - DNA, 6 bp, Unknown
  misc_feature (1)..( 6): Result.001 file - promoters60/1009752
aaataa

SEQ ID NO: 90181 - DNA, 6 bp, Unknown
  misc_feature (1)..( 6): Result.001 file - promoters60/1009752
aaataa

SEQ ID NO: 90182 - DNA, 7 bp, Unknown
  misc_feature (1)..( 7): Result.001 file - promoters60/1009752
tttccct

SEQ ID NO: 90183 - DNA, 7 bp, Unknown
  misc_feature (1)..( 7): Result.001 file - promoters60/1009752
ttttcct

SEQ ID NO: 90184 - DNA, 6 bp, Unknown
  misc_feature (1)..( 6): Result.001 file - promoters60/1009752
tatttt

SEQ ID NO: 90185 - DNA, 6 bp, Unknown
  misc_feature (1)..( 6): Result.001 file - promoters60/1009752
tatttt

SEQ ID NO: 90186 - DNA, 6 bp, Unknown
  misc_feature (1)..( 6): Result.001 file - promoters60/1009752
atttaa

SEQ ID NO: 90187 - DNA, 6 bp, Unknown
  misc_feature (1)..( 6): Result.001 file - promoters60/1009752
atttaa

SEQ ID NO: 90188 - DNA, 6 bp, Unknown
  misc_feature (1)..( 6): Result.001 file - promoters60/1009752
taatta

SEQ ID NO: 90189 - DNA, 6 bp, Unknown
  misc_feature (1)..( 6): Result.001 file - promoters60/1009752
taatta

SEQ ID NO: 90190 - DNA, 7 bp, Unknown
  misc_feature (1)..( 7): Result.001 file - promoters60/1009752
gatgata

SEQ ID NO: 90191 - DNA, 7 bp, Unknown
  misc_feature (1)..( 7): Result.001 file - promoters60/1009752
gataata

SEQ ID NO: 90192 - DNA, 7 bp, Unknown
  misc_feature (1)..( 7): Result.001 file - promoters60/1009752
ttaaaaa

SEQ ID NO: 90193 - DNA, 7 bp, Unknown
  misc_feature (1)..( 7): Result.001 file - promoters60/1009752
ttacaaa

SEQ ID NO: 90194 - DNA, 6 bp, Unknown
  misc_feature (1)..( 6): Result.001 file - promoters60/1009752
aataaa

SEQ ID NO: 90195 - DNA, 6 bp, Unknown
  misc_feature (1)..( 6): Result.001 file - promoters60/1009752
aataaa

SEQ ID NO: 90196 - DNA, 7 bp, Unknown
  misc_feature (1)..( 7): Result.001 file - promoters60/1009752
tcctata

SEQ ID NO: 90197 - DNA, 7 bp, Unknown
  misc_feature (1)..( 7): Result.001 file - promoters60/1009834
tcctata

SEQ ID NO: 90198 - DNA, 9 bp, Unknown
  misc_feature (1)..( 9): Result.001 file - promoters60/1009834
aaggaaaga

SEQ ID NO: 90199 - DNA, 9 bp, Unknown
  misc_feature (1)..( 9): Result.001 file - promoters60/1009834
aagaaaaga

SEQ ID NO: 90200 - DNA, 7 bp, Unknown
  misc_feature (1)..( 7): Result.001 file - promoters60/1009834
ttttttc

SEQ ID NO: 90201 - DNA, 7 bp, Unknown
  misc_feature (1)..( 7): Result.001 file - promoters60/1009834
tttattc

SEQ ID NO: 90202 - DNA, 11 bp, Unknown
  misc_feature (1)..( 11): Result.001 file - promoters60/1009834
atattttggag

SEQ ID NO: 90203 - DNA, 11 bp, Unknown
  misc_feature (1)..( 11): Result.001 file - promoters60/1009834
atatttttgag

SEQ ID NO: 90204 - DNA, 7 bp, Unknown
  misc_feature (1)..( 7): Result.001 file - promoters60/1009834
ttcatta

SEQ ID NO: 90205 - DNA, 7 bp, Unknown
  misc_feature (1)..( 7): Result.001 file - promoters60/1009834
ttcttta

SEQ ID NO: 90206 - DNA, 7 bp, Unknown
  misc_feature (1)..( 7): Result.001 file - promoters60/1009834
aaacatt

SEQ ID NO: 90207 - DNA, 7 bp, Unknown
  misc_feature (1)..( 7): Result.001 file - promoters60/1009834
aaaaatt
